United States Patent Application Publication US 2017/0114356 A1 - sequence listing, part 105

SEQ ID NO: 201126 - DNA, 5096 bp, Zea Mays
cccgctcactccgagtctcactctcactccgtcctccctcttccttacagaaacacaactcatgcagctcgtacggcaccaccaccaccaccaccaactgccgcactgacacatgcatgcgcagaaagcagctagctagcggccggtggccttgagagccgctcgctagcttttaaaattagccaccaattcaatctctagctagcttgggggagctccgttcctagctacacgtacgggcggcgcggcaaccaccagccgtgtagccgacctagtacgttggagcgaagcatatatcggcggccgcatcacatggagagcgcgatggagaaggtgtgggagtcggggcggcggatgagccggagcatcgggcggggcatgggcatggaggcgtggggcgtcgacgacgccttcgtgccgcagcacggctcccggtcccggggcggcggcggcggcggcggcgacgacgacgaggaggcgctgcgctgggcggccatcgagcgcctgcccacctacagccgcgtgcgcaccgccatcctgtccaccgagaacgccgccgtggttgacgacgacgacgacaagacgcggcggccgccgccgccgcagcagcagcacttcaaggaggtggacgtgaggaagctcggcgtcggcgagcgccaggagttcatcgagcgcgtcttccgcgtcgccgaggaggacaaccagcggttcctccagaagctccgcaaccgcatcgacagggtgggcatcgagctgccgacggtggaggtgcggttcgagcggctgacggtggaggccaggtgccacgtgggcagccgcgcgctgccgacgctgctgaacacggcgcgcaacgtcgcggaggcggcgctgggcctgtgcggcgtgcggctggggggccggcaggccaggctgaccatcctcagggacgtgtccggcgccgtccgcccgtccaggatgacgctgctgcttggcccgccgtcgtccgggaagaccacgctgctgctggccctcgcgggcaagctggacccggcgctggtcgtcgccggcggcggcgaggtctcctacaacgggttccgcctcggcgagttcgtgccgcagaagacggcggcgtacatcagccagacggacgtgcacgtcggcgagatgacggtcaaggagacgctcgacttctccgcccggtgccagggcgtcggcaccaaatacgatcttatgacggagctggccaggagggagaagggggccggcatccggccggagcctgaagtcgacctcttcatgaaggcgacttcaatggaaggagtggagaacagcctccagacggattacactctcaggatactggggctggacatctgcgccgacaccatcgtcggcgaccagatgcagcgggggatctctggcggccagaagaagcgcgtcaccacaggggagatgatcgttggcccgaccaaggtgctgttcatggacgagatatcaactgggctggacagctccacgacgttccagatcgtcaaatgtctccagcagattgtgcacctgggcgaggccaccatcctcatgtccctcctccagccagcccccgagaccttcgacctgttcgatgacatcatcctgctgtcggaaggccagatcgtttaccagggacctcgtgaatacgtcctcgagttcttcgactcctgcgggttctgctgccccgagcgcaagggcactgcggacttccttcaggaggtaacatcaaggaaggaccaggagcagtactgggcggacaagcagatgccttacagatacgtttcggtgccagaatttgcgcagcggtttaaacggttccatgtcgggctccagcttgagaaccacctctcgctgccgtttgacaagagcaggtgccatcaggctgccctcgtattctcgaagcactcggtgtcgacaaccgaactcctcaaggcatcctttgacaaggagtggctcctcatcaagcgcaattcatttgtgtacatcttcaagaccatacaggttgccggttttctacaagcaccgggacctgctcttctatcctgcttgggtcttcacagtaccgaacgtcattctcagaatcccattctccattattgaatctatagtatgggttcttgtgacatattacaccatagggtttgctccagatgctgacaggtttttcaagcacttgctgctcgtgttcttgatccagcaaatggcaggtgggcttttcagagcaacagctggactttgcaggtccatgatcattgctcaaactggtggagcactatttcttcttatcttctttgttcttggaggctttgtcctgcctaaagttttcattcctaactggtggatctggggctactggatctcacccttgatgtatggatacaatgctctagctgttaatgaattctatgcccctcggtggatgaataagtttgtcctggaccaaaatggtgttcccaaaagactggggatagctatgcttgaaggtgccaacatctttgttgacaaaaactggtactggattggagcagcagggctcttgggtttcaccatcttcttcaatgtccttttcacactgtcgcttatgtacctgaaccctctcggcaagccacaagctgttatatcagaagaaactgcaaaggaagcggaaggcaacgggcattcaaaaggggcaataagaaatggaagcacaaaaccaaaggacggtagtcataacagtttggttatttcagaggaaatgaaggagatgaggttgagtgcacgtttgagcaactgttcatcaaatggggtttcacgactcatgtccattggcagcaatgaagctgctccaacaagaggaatggttcttccattcaaccctcttgctatgtcttttgataatgtgaactactatgttgacatgcctgcggaaatgaaacatcaaggagtgcaggatgacagactccaattgttgcgtgaggttacaggatcattcaggcctggagtgctgacagcacttatgggtgtcagtggagctggaaagactactcttatggatgttttggctggaagaaagactggggggtatattgaaggagacatcagaattgcaggctatcccaagaaccaagcaacattcgcaaggatttctggatactgcgagcaaaatgatatacattctcctcaggtcacagtaagggagtctttgatatactctgcctttttgcgccttcctggaaaaattggagatcaagaaataactgatgacataaagatgcaatttgtggatgaagttatggaactagtggagctcgacaatctgagggatgccttagttgggctaccaggaatcacagggctttcgacagagcaaagaaaaaggttgacaatagccgtggagctcgttgccaatccatcaatcatatttatggatgaaccaacatcagggcttgatgcaagagctgcagcaattgtcatgagaactgtgcggaacacagttgacactggacggacagttgtttgcacaatccatcagccaagcatcgacatctttgaatcttttgatgagttgctattgttgaaaagaggaggccaggtgatctactctgggaaattgggtcgcaactcccagaaaatggtggagtattttgaggcaattcctggagtgcctaaaataaaagataagtacaatcctgcaacgtggatgctcgaggtcagttcagttgcaactgaagtgcgactaaagatggattttgctaagtactatgaaacatcagatctgtataagcaaaacaaggtactggtgaaccagctgagtcaaccagagccaggaacatcagatctttatttccctacagagtactcgcaatccacaataggacagttcaaagcctgtctctggaagcaatggctgacttattggcgcagcccggattacaaccttgttagatattccttcactctgttagttgccttgcttctcggctccattttctggaggataggcaccaacatggaagatgcaaccactctcggtatggttattggagcaatgtacactgctgttatgtttatcggcatcaacaattgttcaactgtgcagccagttgtttcaattgaaagaacggtcttctacagagagagggctgctgggatgtactctgctatgccatatgccattgctcaggttgttatagagataccatatgtatttgtgcaaacaacgtactacaccctcattgtatacgccatgatgagcttccaatggacagctgtcaagttcttctggttcttcttcatttcctacttctccttcctctacttcacctactatggcatgatggctgtctcaatctccccaaaccatgaggttgcatccatcttcgcagcagctttcttttctctcttcaatctcttctcaggcttcttcattccgagaccgagaattcctggatggtggatctggtactactggatttgcccactggcatggacagtgtatgggctcatcgtgacacaatacggagacctggaagacctcatctcagtccctggagaaagtgagcagacgataagctactatgtaacacatcattttggataccacagggattttctgccggtcattgcgccggttctggtactctttgcagtattcttcgcgttcttgtacgcagtctgcatcaagaaactgaacttccagcaacgataagaacaagatatggcagcaaaagctcttgagagtttttttggaacattgccgtgtatatagggtattttgcacatcgcgttctcctttcattttttgagtccctttaatacattgtcgtgtatatagggtattctgcacatcgccaaatgtggtgaggtcttatacagatttctagccatttattgcaagagcaaaactatgatatttttccggatacacagaagagctacatattattatattaagaagagaggtctaacgtagacctgccacaagatataatcctctattggataagaggatataacactatcttcatctcctttacctatataaataggtctccttgtatcatgtaccacataatatctctttttcgtatctatgatcctaacatcct

SEQ ID NO: 201127 - DNA, 4252 bp, Zea Mays
ccccacctttgcgcacgcccacgacgtgttcgtcgagatgccaagccgaaggcgttggtctgtgtggtgtgcagatactggggctggacatctgcgccgacaccatcgtcggcgaccagatgcagcgggggatctctggcggccagaagaagcgcgtcaccacagctaacgacacagtcgagtgtcacatcctgcggttcgatcgtgcagcaaaaaaaaaaaaaagggcaccgtgcttttgtgctgtgcctctgaggtccacacacacaagggacaccgtgcctttgattgggacgcagcagttggtagcgtaccatctcgtggttcagggattccagggggagatgatcgttggcccgaccaaggtgctgttcatggacgagatatcaactgggctggacagctccacgacgttccagatcgtcaaatgtctccagcagattgtgcacctgggcgaggccaccatcctcatgtccctcctccagccagcccccgagaccttcgacctgttcgatgacatcatcctgctgtcggaaggccagatcgtttaccagggacctcgtgaatacgtcctcgagttcttcgactcctgcgggttctgctgccccgagcgcaagggcactgcggacttccttcaggaggtaacatcaaggaaggaccaggagcagtactgggcggacaagcagatgccttacagatacgtttcggtgccagaatttgcgcagcggtttaaacggttccatgtcgggctccagcttgagaaccacctctcgctgccgtttgacaagagcaggtgccatcaggctgccctcgtattctcgaagcactcggtgtcgacaaccgaactcctcaaggcatcctttgacaaggagtggctcctcatcaagcgcaattcatttgtgtacatcttcaagaccatacaggtaaaacacattgtttttgggagtctctcccatgaaactttccaagactcccagtgctaattgactgaccttattgttgtctgtcctgtgaactctgaagcttatcattgtagccctcatcgcgtcaacggtgtttctgagaactcacatgcatacgacgaatctagatgatggctttgtttacattggagcactgctctttactctgattgtgaatatgttcaatggttttgctgagctttccttgaccataacaaggttgccggttttctacaagcaccgggacctgctcttctatcctgcttgggtcttcacagtaccgaacgtcattctcagaatcccattctccattattgaatctatagtatgggttcttgtgacatattacaccatagggtttgctccagatgctgacaggtttttcaagcacttgctgctcgtgttcttgatccagcaaatggcaggtgggcttttcagagcaacagctggactttgcaggtccatgatcattgctcaaactggtggagcactatttcttcttatcttctttgttcttggaggctttgtcctgcctaaagttttcattcctaactggtggatctggggctactggatctcacccttgatgtatggatacaatgctctagctgttaatgaattctatgcccctcggtggatgaataagtttgtcctggaccaaaatggtgttcccaaaagactggggatagctatgcttgaaggtgccaacatctttgttgacaaaaactggtactggattggagcagcagggctcttgggtttcaccatcttcttcaatgtccttttcacactgtcgcttatgtacctgaaccctctcggcaagccacaagctgttatatcagaagaaactgcaaaggaagcggaaggcaacgggcattcaaaaggggcaataagaaatggaagcacaaaaccaaaggacggtagtcataacaaggaaatgaaggagatgaggttgagtgcacgtttgagcaactgttcatcaaatggggtttcacgactcatgtccattggcagcaatgaagctgctccaacaagaggaatggttcttccattcaaccctcttgctatgtcttttgataatgtgaactactatgttgacatgcctgcggaaatgaaacatcaaggagtgcaggatgacagactccaattgttgcgtgaggttacaggatcattcaggcctggagtgctgacagcacttatgggtgtcagtggagctggaaagactactcttatggatgttttggctggaagaaagactggggggtatattgaaggagacatcagaattgcaggctatcccaagaaccaagcaacattcgcaaggatttctggatactgcgagcaaaatgatatacattctcctcaggtcacagtaagggagtctttgatatactctgcctttttgcgccttcctggaaaaattggagatcaagaaataactgatgacataaagatgcaatttgtggatgaagttatggaactagtggagctcgacaatctgagggatgccttagttgggctaccaggaatcacagggctttcgacagagcaaagaaaaaggttgacaatagccgtggagctcgttgccaatccatcaatcatatttatggatgaaccaacatcagggcttgatgcaagagctgcagcaattgtcatgagaactgtgcggaacacagttgacactggacggacagttgtttgcacaatccatcagccaagcatcgacatctttgaatcttttgatgagttgctattgttgaaaagaggaggccaggtgatctactctgggaaattgggtcgcaactcccagaaaatggtggagtattttgaggcaattcctggagtgcctaaaataaaagataagtacaatcctgcaacgtggatgctcgaggtcagttcagttgcaactgaagtgcgactaaagatggattttgctaagtactatgaaacatcagatctgtataagcaaaacaaggtactggtgaaccagctgagtcaaccagagccaggaacatcagatctttatttccctacagagtactcgcaatccacaataggacagttcaaagcctgtctctggaagcaatggctgacttattggcgcagcccggattacaaccttgttagatattccttcactctgttagttgccttgcttctcggctccattttctggaggataggcaccaacatggaagatgcaaccactctcggtatggttattggagcaatgtacactgctgttatgtttatcggcatcaacaattgttcaactgtgcagccagttgtttcaattgaaagaacggtcttctacagagagagggctgctgggatgtactctgctatgccatatgccattgctcaggttgttatagagataccatatgtatttgtgcaaacaacgtactacaccctcattgtatacgccatgatgagcttccaatggacagctgtcaagttcttctggttcttcttcatttcctacttctccttcctctacttcacctactatggcatgatggctgtctcaatctccccaaaccatgaggttgcatccatcttcgcagcagctttcttttctctcttcaatctcttctcaggcttcttcattccgagaccgagaattcctggatggtggatctggtactactggatttgcccactggcatggacagtgtatgggctcatcgtgacacaatacggagacctggaagacctcatctcagtccctggagaaagtgagcagacgataagctactatgtaacacatcattttggataccacagggattttctgccggtcattgcgccggttctggtactctttgcagtattcttcgcgttcttgtacgcagtctgcatcaagaaactgaacttccagcaacgataagaacaagatatggcagcaaaagctcttgagagtttttttggaacattgccgtgtatatagggtattttgcacatcgcgttctcctttcattttttgagtccctttaatacattgtcgtgtatatagggtattctgcacatcgccaaatgtggtgaggtcttatacagatttctagccatttattgcaagagcaaaactatgatatttttccggatacacagaagagctacatattattatattaagaagagaggtctaacgtagacctgccacaagatataatcctctattggataagaggatataacactatcttcatctcctttacctatataaataggtctccttgtatcatgtaccacataatatctctttttcgtatctatgatcctaacatcct

SEQ ID NO: 201128 - DNA, 4030 bp, Zea Mays
agtcgctctctcctgatgttaacggagagagtagtttgacgatactggggctggacatctgcgccgacaccatcgtcggcgaccagatgcagcgggggatctctggcggccagaagaagcgcgtcaccacaggggagatgatcgttggcccgaccaaggtgctgttcatggacgagatatcaactgggctggacagctccacgacgttccagatcgtcaaatgtctccagcagattgtgcacctgggcgaggccaccatcctcatgtccctcctccagccagcccccgagaccttcgacctgttcgatgacatcatcctgctgtcggaaggccagatcgtttaccagggacctcgtgaatacgtcctcgagttcttcgactcctgcgggttctgctgccccgagcgcaagggcactgcggacttccttcaggaggtaacatcaaggaaggaccaggagcagtactgggcggacaagcagatgccttacagatacgtttcggtgccagaatttgcgcagcggtttaaacggttccatgtcgggctccagcttgagaaccacctctcgctgccgtttgacaagagcaggtgccatcaggctgccctcgtattctcgaagcactcggtgtcgacaaccgaactcctcaaggcatcctttgacaaggagtggctcctcatcaagcgcaattcatttgtgtacatcttcaagaccatacagcttatcattgtagccctcatcgcgtcaacggtgtttctgagaactcacatgcatacgacgaatctagatgatggctttgtttacattggagcactgctctttactctgattgtgaatatgttcaatggttttgctgagctttccttgaccataacaaggttgccggttttctacaagcaccgggacctgctcttctatcctgcttgggtcttcacagtaccgaacgtcattctcagaatcccattctccattattgaatctatagtatgggttcttgtgacatattacaccatagggtttgctccagatgctgacaggtttttcaagcacttgctgctcgtgttcttgatccagcaaatggcaggtgggcttttcagagcaacagctggactttgcaggtccatgatcattgctcaaactggtggagcactatttcttcttatcttctttgttcttggaggctttgtcctgcctaaagttttcattcctaactggtggatctggggctactggatctcacccttgatgtatggatacaatgctctagctgttaatgaattctatgcccctcggtggatgaataagtttgtcctggaccaaaatggtgttcccaaaagactggggatagctatgcttgaaggtgccaacatctttgttgacaaaaactggtactggattggagcagcagggctcttgggtttcaccatcttcttcaatgtccttttcacactgtcgcttatgtacctgaaccctctcggcaagccacaagctgttatatcagaagaaactgcaaaggaagcggaaggcaacgggcattcaaaaggggcaataagaaatggaagcacaaaaccaaaggacggtagtcataacagtaagcaactctgacagaagtcataactcataagcaaatctgaaaaacaagtgacatcttctaatctgaggtttggttatttcagaggaaatgaaggagatgaggttgagtgcacgtttgagcaactgttcatcaaatggggtttcacgactcatgtccattggcagcaatgaagctgctccaacaagaggaatggttcttccattcaaccctcttgctatgtcttttgataatgtgaactactatgttgacatgcctgcggaaatgaaacatcaaggagtgcaggatgacagactccaattgttgcgtgaggttacaggatcattcaggcctggagtgctgacagcacttatgggtgtcagtggagctggaaagactactcttatggatgttttggctggaagaaagactggggggtatattgaaggagacatcagaattgcaggctatcccaagaaccaagcaacattcgcaaggatttctggatactgcgagcaaaatgatatacattctcctcaggtcacagtaagggagtctttgatatactctgcctttttgcgccttcctggaaaaattggagatcaagaaataactgatgacataaagatgcaatttgtggatgaagttatggaactagtggagctcgacaatctgagggatgccttagttgggctaccaggaatcacagggctttcgacagagcaaagaaaaaggttgacaatagccgtggagctcgttgccaatccatcaatcatatttatggatgaaccaacatcagggcttgatgcaagagctgcagcaattgtcatgagaactgtgcggaacacagttgacactggacggacagttgtttgcacaatccatcagccaagcatcgacatctttgaatcttttgatgagttgctattgttgaaaagaggaggccaggtgatctactctgggaaattgggtcgcaactcccagaaaatggtggagtattttgaggcaattcctggagtgcctaaaataaaagataagtacaatcctgcaacgtggatgctcgaggtcagttcagttgcaactgaagtgcgactaaagatggattttgctaagtactatgaaacatcagatctgtataagcaaaacaaggtactggtgaaccagctgagtcaaccagagccaggaacatcagatctttatttccctacagagtactcgcaatccacaataggacagttcaaagcctgtctctggaagcaatggctgacttattggcgcagcccggattacaaccttgttagatattccttcactctgttagttgccttgcttctcggctccattttctggaggataggcaccaacatggaagatgcaaccactctcggtatggttattggagcaatgtacactgctgttatgtttatcggcatcaacaattgttcaactgtgcagccagttgtttcaattgaaagaacggtcttctacagagagagggctgctgggatgtactctgctatgccatatgccattgctcaggttgttatagagataccatatgtatttgtgcaaacaacgtactacaccctcattgtatacgccatgatgagcttccaatggacagctgtcaagttcttctggttcttcttcatttcctacttctccttcctctacttcacctactatggcatgatggctgtctcaatctccccaaaccatgaggttgcatccatcttcgcagcagctttcttttctctcttcaatctcttctcaggcttcttcattccgagaccgagaattcctggatggtggatctggtactactggatttgcccactggcatggacagtgtatgggctcatcgtgacacaatacggagacctggaagacctcatctcagtccctggagaaagtgagcagacgataagctactatgtaacacatcattttggataccacagggattttctgccggtcattgcgccggttctggtactctttgcagtattcttcgcgttcttgtacgcagtctgcatcaagaaactgaacttccagcaacgataagaacaagatatggcagcaaaagctcttgagagtttttttggaacattgccgtgtatatagggtattttgcacatcgcgttctcctttcattttttgagtccctttaatacattgtcgtgtatatagggtattctgcacatcgccaaatgtggtgaggtcttatacagatttctagccatttattgcaagagcaaaactatgatatttttccggatacacagaagagctacatattattatattaagaagagaggtctaacgtagacctgccacaagatataatcctctattggataagaggatataacactatcttcatctcctttacctatataaataggtctccttgtatcatgtaccacataatatctctttttcgtatctatgatcctaacatcct

SEQ ID NO: 201129 - DNA, 3954 bp, Zea Mays
ctatcctgtagaaaccaccgtattgtaggttaaatgagtgaatcttgattgatagttccaaattgattaatagtgcaggggacaaaatgtaactcttgcactagctgtatggaactcgggttacataaaatgctaacgatggggagatgatcgttggcccgaccaaggtgctgttcatggacgagatatcaactgggctggacagctccacgacgttccagatcgtcaaatgtctccagcagattgtgcacctgggcgaggccaccatcctcatgtccctcctccagccagcccccgagaccttcgacctgttcgatgacatcatcctgctgtcggaaggccagatcgtttaccagggacctcgtgaatacgtcctcgagttcttcgactcctgcgggttctgctgccccgagcgcaagggcactgcggacttccttcaggaggtaacatcaaggaaggaccaggagcagtactgggcggacaagcagatgccttacagatacgtttcggtgccagaatttgcgcagcggtttaaacggttccatgtcgggctccagcttgagaaccacctctcgctgccgtttgacaagagcaggtgccatcaggctgccctcgtattctcgaagcactcggtgtcgacaaccgaactcctcaaggcatcctttgacaaggagtggctcctcatcaagcgcaattcatttgtgtacatcttcaagaccatacagcttatcattgtagccctcatcgcgtcaacggtgtttctgagaactcacatgcatacgacgaatctagatgatggctttgtttacattggagcactgctctttactctgattgtgaatatgttcaatggttttgctgagctttccttgaccataacaaggttgccggttttctacaagcaccgggacctgctcttctatcctgcttgggtcttcacagtaccgaacgtcattctcagaatcccattctccattattgaatctatagtatgggttcttgtgacatattacaccatagggtttgctccagatgctgacaggtttttcaagcacttgctgctcgtgttcttgatccagcaaatggcaggtgggcttttcagagcaacagctggactttgcaggtccatgatcattgctcaaactggtggagcactatttcttcttatcttctttgttcttggaggctttgtcctgcctaaagttttcattcctaactggtggatctggggctactggatctcacccttgatgtatggatacaatgctctagctgttaatgaattctatgcccctcggtggatgaataagtttgtcctggaccaaaatggtgttcccaaaagactggggatagctatgcttgaaggtgccaacatctttgttgacaaaaactggtactggattggagcagcagggctcttgggtttcaccatcttcttcaatgtccttttcacactgtcgcttatgtacctgaaccctctcggcaagccacaagctgttatatcagaagaaactgcaaaggaagcggaaggcaacgggcattcaaaaggggcaataagaaatggaagcacaaaaccaaaggacggtagtcataacaaggaaatgaaggagatgaggttgagtgcacgtttgagcaactgttcatcaaatggggtttcacgactcatgtccattggcagcaatgaagctgctccaacaagaggaatggttcttccattcaaccctcttgctatgtcttttgataatgtgaactactatgttgacatgcctgcggaaatgaaacatcaaggagtgcaggatgacagactccaattgttgcgtgaggttacaggatcattcaggcctggagtgctgacagcacttatgggtgtcagtggagctggaaagactactcttatggatgttttggctggaagaaagactggggggtatattgaaggagacatcagaattgcaggctatcccaagaaccaagcaacattcgcaaggatttctggatactgcgagcaaaatgatatacattctcctcaggtcacagtaagggagtctttgatatactctgcctttttgcgccttcctggaaaaattggagatcaagaaataactgatgacataaagatgcaatttgtggatgaagttatggaactagtggagctcgacaatctgagggatgccttagttgggctaccaggaatcacagggctttcgacagagcaaagaaaaaggttgacaatagccgtggagctcgttgccaatccatcaatcatatttatggatgaaccaacatcagggcttgatgcaagagctgcagcaattgtcatgagaactgtgcggaacacagttgacactggacggacagttgtttgcacaatccatcagccaagcatcgacatctttgaatcttttgatgagttgctattgttgaaaagaggaggccaggtgatctactctgggaaattgggtcgcaactcccagaaaatggtggagtattttgaggcaattcctggagtgcctaaaataaaagataagtacaatcctgcaacgtggatgctcgaggtcagttcagttgcaactgaagtgcgactaaagatggattttgctaagtactatgaaacatcagatctgtataagcaaaacaaggtactggtgaaccagctgagtcaaccagagccaggaacatcagatctttatttccctacagagtactcgcaatccacaataggacagttcaaagcctgtctctggaagcaatggctgacttattggcgcagcccggattacaaccttgttagatattccttcactctgttagttgccttgcttctcggctccattttctggaggataggcaccaacatggaagatgcaaccactctcggtatggttattggagcaatgtacactgctgttatgtttatcggcatcaacaattgttcaactgtgcagccagttgtttcaattgaaagaacggtcttctacagagagagggctgctgggatgtactctgctatgccatatgccattgctcaggttgttatagagataccatatgtatttgtgcaaacaacgtactacaccctcattgtatacgccatgatgagcttccaatggacagctgtcaagttcttctggttcttcttcatttcctacttctccttcctctacttcacctactatggcatgatggctgtctcaatctccccaaaccatgaggttgcatccatcttcgcagcagctttcttttctctcttcaatctcttctcaggcttcttcattccgagaccgagaattcctggatggtggatctggtactactggatttgcccactggcatggacagtgtatgggctcatcgtgacacaatacggagacctggaagacctcatctcagtccctggagaaagtgagcagacgataagctactatgtaacacatcattttggataccacagggattttctgccggtcattgcgccggttctggtactctttgcagtattcttcgcgttcttgtacgcagtctgcatcaagaaactgaacttccagcaacgataagaacaagatatggcagcaaaagctcttgagagtttttttggaacattgccgtgtatatagggtattttgcacatcgcgttctcctttcattttttgagtccctttaatacattgtcgtgtatatagggtattctgcacatcgccaaatgtggtgaggtcttatacagatttctagccatttattgcaagagcaaaactatgatatttttccggatacacagaagagctacatattattatattaagaagagaggtctaacgtagacctgccacaagatataatcctctattggataagaggatataacactatcttcatctcctttacctatataaataggtctccttgtatcatgtaccacataatatctctttttcgtatctatgatcctaacatcct

SEQ ID NO: 201130 - DNA, 1853 bp, Zea Mays
ccaccaacccgggctcctccattgaaccgccgtctcctccattcctggcttcccctccattgaaccgccaccagtctcttccattgaaccgcggtcgtaagacgcctcacccaacaccgcgcccaccaccccaaacgacgcctacattcctgacttcccctcctacgcgcagacgccgtcccaccgccgggatgccgccggcgatcccaagcctggtccacccgtcccgtgtgcggattctccacccgggcggaagccatattcacgggccggtggtgtactggatgctgcgggaccaacgtctcgcggacaactgggccctcctccacgcggccgaactcgccgctgcgtccacccccgcggcgccgctcgccatcgctttcacgctattcccacggcctttcctcctaggcgcgcacctccgccagctaggtttcctcctccgcgggctccgccgccttgccgccgatgcgcacgcccgcggcctcccgttctttctactcgagggcggacctgcggagctgccgtcgttggtgcggcggctcggggcttcggcgctcgtcgccgacttctctccgctgcggccggtgcgggaggcattggatgctgtcgtccaggagcttctgcgtgacgccgccaacatggccgtgcaccaggtggacgcacacaatgtagtgcctgtctggacggcgtcagggaagctcgagtactcggccaaaacctttagaagtaaggtgaacaaggtgataaacgagtatctggtggagtaccctgaggttccgcagtgggcgccttggtgcatggagcagccgaagagtgttgactgggatgcactgatcaatagcatcttcagtgaggctgagaatgtgccggagattaactggtgcgagcctggggagtcctcagcgatggaggtccttcttgggagtaaggatgggttcttgacgaagaggattaagaactatgacactggccggaatgatcctacaaagccacatgcattgtcgtgcctttcaccgtacttacattttgggcacatttctgcacaaaggtgtgctcttgaagcaaaaaaacgccgtcatcttagtccaaagtcagtggacacgttcttggaggagctgataataaggagggaactagctgacaatttctgctattaccagcctcaatatgattcactggctggtgcatgggagtgggctagaaagacgttaacggatcacactggtgataaaagagagcatatctatacgagggagcagctcgaaaatgccaaaacatctgatccactttggaatgcatctcaattggagatggtgcaccatgggaaaatgcatggatttatgcgaatgtattgggccaaaaagattctagaatggaccagtcaacctgaagaagcactttccatagcaatatatttgaacgacaagtatcatatcgatggcagggatcccaatggctatgttggttgcatgtggtctatttgtggcctccatgaccagggttggaaggaacgtccggtatttggaaagatacgttatatgaattatgctggttgcaagagaaaatttgacgttgatgcttatatttcgtacgttaaaagattggttcctagggccaagaagaggaaaactgaggaaggtgaatccacggtcaaagaatccaatgtctgagttggctcagcagttcaacattgtctaaaacattgtttcaggatgaatatcttttctcatgacaaagacatacacgatgtgaagatgtagcctgaaggtgataagaatggacgctgaagctatggccgaagagctttggtttaatatggtgacgaagaccaagtacgatgctgaccaaaa

SEQ ID NO: 201131 - DNA, 752 bp, Zea Mays
gaagggaatggaagacaagaccatgatccattttcaccaacgggatatcaagcacgggggtccaggacgacatacaggccaccgctgctaccagtctaatactataaatccaattgcatgatttggggtaatatttttaagaagcacagtgttcgggataatccagttcaaaaaaactcatctgattctgcttccatttttttgctatgtttcgatggaggcagaagtaaagacgatagtacccgatgacgtcctgggcaaggccgaggcaaggaatactactaagtgatactggacttccttggtggtctgcgttcatccatccaatatggaggctccaacacatctcttcattatctgtatctggatttatctgtgtaatagcattatggtgctcctaacttccaagcttcattaaacaaggaaactgaaagtgtcagaactgcaattcatatagactagatttttatgatacattgtaactaatgcattggtaagcattactttgaatgtgtgggtttttccaggggttgagtggtatgttgtggtcagatttggcaacaatgtatctgccatcatgtgctatatcgataaattatgatacaatgtggtcagattctaggtttagttactgtttttgcgcaacctgtgtgccatctgtttaccgacaactggacaaataggacatattgcaatcggataaataacttggcactcttagtcaaaattttgattttccaatatttagaatc

SEQ ID NO: 201132 - DNA, 977 bp, Zea Mays
ccgcgtgctcgcaggccacacggaggtcagattatgacaggcagccttgacaagaagctaaagctttgggattcaaaaacaagaaatgtaagcccgagcggcaccataaccttaaattcagatgtggcctcaatttctatatgcggcatttacatattagctgcagttgagagaaatgtttatctttatgacatgaggaatctaacaagaccagttgatgaaaaagactgtcctctggattatcaaattcgatgccttcatacttctctagagtggaatgcttatgttgctggctctgtggatggagttgttgcattgaagtatcttgatcgtggaacagatagagatttgggatatgcatttcgttgtcatccaaattccagaaacggaaaatggaatctggtccctgtaaattgcatctcagttcatccctgcaacagaactttcgttacgggagatgataaaggatgcactattgtttgggatgctcaattgaaaaagaagctgattgagcttccaatgtatttgggcagtgtggcgtcagtggcatacaaccataatggccaacttctggcggttgcctcaaactattttttagaagtggataaagaggagcaacaccaccaggtattcattgaaactgtggagaacttcaaaggcaagtcccgtgtgggatagagccttctaacaaaacatgttctgttcatctgttgtattgtattttgtctaccatacatgttaaaggtcaccaagatgtgacagcatgttgtattatgttgtatgactaagcattttttttaggaaacgacataatatggctaagcaatacttgtatatattggttacatctagtctgagacagctgtggtgtgttgtaactcttttgagcttttgcaaccagtattgctgttctggacttctggtaaccgcagctatccctgctgtgttaatgaactgttatttgctttcaataaaac

SEQ ID NO: 201133 - DNA, 1587 bp, Zea Mays
tcaagcccattttctcggcctgcctcgcgcaactcgtcccagcacaccgctgtggcgctgtcgtcctcgctcacctcgtccgtcctcgtgagctccgcctgccctccatctggacagctccagcctccagccatctccccccacctgtacacagttacaaagcttggcacttcgcagttcgcactcgcatgctcttcgcccctcgcgcttaccgctgccgcgcctcccgacttgccgcctccgcctagctccgggctctccaatggcctccatgctcgccatcctcaggccctccgcgccggccccgctcgcggggcgccgggccagggctgccgcgccggcgaccgcgagggtggcgctatcttccagatctaggtattcgtcggtcagggtgtcgctcggctccgaggttgcagtgggcgccgacgcgctcttcgccgactataagcccaccaccgctttcctcttccccggccagggtgcccaaaccgttggaatgggggcagaagctcagagtgttccagcagctaccaaattgttcaaccaggcaaatgaaatccttggatatgacttgctggatctttgcaccaatggaccaaaagaaaagcttgactcaacaatgatcagtcagccggctatatatgtcaccagccttgcagcagtagaggtactacgtgcacgcgatggaggccaagatgtgattaactctgtagatgttacatgtggtctcagtttgggagagtataccgctcttgcatttgccggtgcttttagctttgaggatggactgaagcttgtcaagctaagaggagaagctatgcagatgctgccaatagtgcgatggttagtgtgattggtctggattcagaaaaggtgcaagaactatgtgatgctgctaatgacgaagtagatgaaaacgatagagttcaaatagcaaactttctgtgccctgggaattatgcagtttctggtggtgtaaaaggtattgaagtagtcgaagccaaagcaaagtccttcaaggccagaatgacggttcgcctagctgttgctggcgctttccatactagcttcatgcaaccagctgtttcaagattggaatctgcgttggctgccactgagattagaacacctagaattccggtcatctccaatgttgatgcgcagccccactcagatcctaacaccatcaagcagattttagctcagcaggtaacctctccggtgcaatgggaaaccactgttaagaatcttatgggcaaggggcttgagataagttatgaactcggacctggaaaggttatagcaggtattctcaagaggatcaacaaaggcactagcattgagaacatcggggcttaaacgtctgggatctgaagaactcttgatggaaccaagttacacagcagaggattgaaacatgccattattgtggaacgatgtttccactcagagttaccgttttttttaccttagtggttgaattttgatcttgatgtaaaattgacatgaaacacatggttaatgattttatgaacagtgtagttttcacagtttgaataagggtgtgtctggtttctaaggactaat

SEQ ID NO: 201134 - DNA, 2661 bp, Zea Mays
ctggttgttatgttactatgctcaatcttcatggttttatcttccagtaggatacaatgggcgagcatcatctatagttgtgtctggaaccaatgtcattaggcccaggggacaaggacatccaacaggaaactccgctccttattttggtccctcgcagaagcttgattttgagcttgagatggctgccattgttggtccagggaatgaattaggcaaacctattgatattaatgacgccgaagaacatatttttggcctaactttgatgaatgattggagtgccagagatatccaggcttgggagactatacctcttggacctttccttgggaaaagcttcagtaccacggtatcaccatggattgttaccctagatgctttgaagcctttcatgtgtgatgctcctaagcaggcctggattaagccgaaagatcaaaatgacgcatcaattgtcacaaaaactaatttcaagcatctgtattggacgctgacacagcagctagcacaccacaccatcaacggatgcaacatgaggccgggggatatatttgcgactggcacactgagtggacctgaaccggactccctcgggtgtctgctggagctgacatggaacgggcagaaggagataccggtggggaatttgacccgcaagttcctagaagatggagatgaagtcatcttgacaggatgttgcaagggtgaaggctacaacattggttttggaacctgcaccgggaaggttctgccggcacttccctgagccaacacgtcttggcatcagttctccggagtctcaacgatctcagctatcagagagttgtctcaacggtctcaactatcaaagagttcatgccgctatctagcaaggctgctatgtaactgaacaatatgaatatgggttgttttcctgggctgttgaagatgaggagactgatgctctgttgtgcaataaaaccgcttcaccattttatacgatgtctccctctatttaagagttgggttgtgttcttaaacttgtacattgcaatgtcctctgtggcatgaaatttagatcatgtatatattttgaatggaattatagatccacactagtagaatgaataagaaagttcgcagattgccagaggcctaaaaaaagactggcgagagtgagaaagagagaggtgacgaagagtgagtgatggatgcaagtaggttcagacgcaggcgagctccttcgccatgccaatggacttgccgatggcgttcttgcagacggacatggtcttgttgtcggacctgttgtacttgatgtcgacgttgatgagctgcacgccctggcagggcaggttgttggcgcagttgagcgtgatggcctccggcgtgttggaggtgccgtggatgttcttgaagacgacgtcgttgacggccaccttggaggcgccggacttgacgcagatgttgttggggcagtacttctggtctatgatgatggggtaggagacgttgtccatggtgacgtcctggtacaggaacttggtggccttgagcgacgacttggagtcctcgtacgacttgatgcgcaggccgttggtggtgccggcgagcgtgcaccccgtcaccttcacgtcctccacgtccttctcgtccttgtaccgccccaggctgccgacgctgatgccgtggcccgggccgcacttgacgcccttcacgcggatggtcttgctcccggggccgatggagacgcagtcgtcgccgacggcgatggtggtgccgctgatggtcacgttgctcgagtcgccgatgtggatgccgtccgtgttggggctgttgccgggggccttgatcgtcaccttgtcgatcaccacgttcttgctcccgaagatgttcatgtggaagaacttgctgttcagcagcgtgatgccgcggatctgggcgttcgtcacgaagtccagcaccaggctctgcacgcgttcgccgttgcgatttacatcacatcaccttccgaagcaggggacagacagagaaagaagaagcacgtacgttggggaggattttgcagttgtaggaacgctggcactcgttcttgttccacaccagggctccctgcccgtcgatggtgccgtggccgttgatggacaggttgtcgacgttctggatctcgatccagttcctcttgtacgcgttgaggtcgccggtgccgagcaggttgccgtcgaggcggatgatgatggaggacttgcaggggcccaccaggtccagcgcgcccgtcaggtagttgcccttggggatgacgatcttctgctgccccgtcgcctcgcacgcgtgcttccacgccttgagcaccatcggggtgctgtccgacttgccgtcgcccttggcgcccagctgcgcgatgtccagcgagccagcgggcaccgacggcgcgcctcccacagccttcgccttcgcctccgcctccgccgccaccgcgcgcgcggcaggcgacaccgcggcgaacaccagcagagcggccacggctgccttcatcgccgcactgctgatgaacgccatcgatatgtctcgtgctgtagggtgcgtgccgcgccggagccgtggcgcgctcgggcacatatatatgcggcgacggcgagggggtggcgtgctatgtttgggatggccatggcgcgccgggcg

SEQ ID NO: 201135 - DNA, 1663 bp, Zea Mays
tgtccgctgcgtctccaaaacagagaagccaacaccaacgccaccccttctgtcttcttccataatggcaattatctcgccgtgcgaacccctgcacccgaaccctcacttaaaaactagtccccttgcgaaaaaattggtccgtccctgcctcagtctgcactctacgatggcggcgcctccggccacggctcccgcgaccgcccgatgtctgtccgtcgccaagtcgtgctgggctgccgagcggagctccagctcgtttgtcctctcggctcctgcgactggcctccggcaaagtgggagccgcgtcctcagcatccgtgccaaggttgccactggcctgcagagggcctgcattgcggatgatggagcggaaaggccgtggaagctcagtgatgctcgtcttgtcctggaagatggatcagtgtggacggccaagtcttttggtgcttcaggaacacaagttggtgaagttgttttcaacacatcactgacaggctatcaggagattttgaccgatccaagttatgctggtcagtttgtcctaatgaccaatcctcatattgggaacactggcgttaatcctgatgatgaagaatcaaaccaatgttttcttggtggcttaatcataagaaatctaagcatatgtacttccaactggcgatgcaaagaaacacttgagaagtatctgattaagaggaacatcatgggaatatatgatgtggatacacgtgctataacacgaagattaagagaagatggtagtcttattggtgtcttgagtactgatcagtctctgacagacaatgagttgttagaaatggcccaaaagtggaaaattgttggagttgatttgattagtggtgtcacatgtgatgctccatatgaatggtcggacaagactgattcagaatgggagtttaagagggatccgtcaagtgaaacttttcatgtggttgcctacgactttggtatcaagcataatattttgagacgattgacatcatatggatgcaaaataacagttgttccagcaaattggcctgcttcagaggctcttggtgggaagacatttaaaatgaaatttggacatcatggcgggaatcaccctgtctgtgatctccgtagtggacgtgtagacataagtgcacagaaccataactacgcagttgacccagaatcactcccagaaggagcaaaagtaactcacgtcaatctcaacgataatagttgcgctggcctccagtactccaagatgaagcttatgtctctccagtaccatcccgagtcttcccctggtccgcatgactccgacacagccttcggcgagtttatagagctcatgaagagcaacagattgtaagaaaggggatcaggggagtacttgaaaaggtcaataattgtattggtgctccctcgcaccaacctcaaaagaatttgttgtatctgtagtgtttttcttttggttttgggacgttcatgtgcttgaatttttgggtccagaggacatagcataagatgctctgcgcattgtaccatgaaatggcctggttggatttcgtgaagataacatgtcatcaaactgtacggtacggtacactcactcggacagcgcctcgcgaatttcttaacggcagattggcggtgtgacgaagagaaaagg

SEQ ID NO: 201136 - DNA, 2116 bp, Zea Mays
gcgccattgccaagtcgaggcacgcggccagtggtgccctcgtcatcgtcaatgagcaccgacgccgcgcccctcctccactccacctgcacagcgccgctcgcccccacaccccaacccaaccatccgctccttgtcgccttccgacgctgagtttgctggtgtcgatttgcgccgtcggatgctcgatctggcagccgcctgtgccgacctactcgtcgaatccgttatctaacgtaatggatgggcaaggcacaaagcacaggattttgatggtgtctgactttttctttccaaactttggtggggtggaaagccatatctactacctgtcacaatgtctacttaagcttggccataaggttgttgtcatgacacatgcatatggaaacagatctggagtacgatatgtcacaaatggtttaaaggtctattatgtaccatggaggccattcctgatgcagaatacacttcctacactattcttgacgtttccaattgtaaggacaattattattcgagagaagatttctgtcgtgcatggacatcaagctttttcaacactgtgtcatgaagcattaatgcatgctaggacaatggggcaatatgtgtctcacatacaagcaaagagaacactgtcttgaggtctgggatatctccagagaaggttttcatggttcctaatgcagttgacactgcaatgtttactccctctcccaagcgcttaaactgtgatgaaatagttattgttgtggtcagtagattagtataccgaaaaggcgccgaccttcttgttgaagtcattccagaagtgtgtcggctatttccaaaggttcgctttattgttggtggtgatggtccaaaacgtgtgcgccttgaagaaatgagggagaagttctcccttcaggatagagttgagatgttaggagctgtacctcatgctcaggtgcgatcggttctgatatctggacatatatttttgaacagaggcattttgcatagccattctagaagcagctagctgtggactgttgacagtgagcactagagtcggtggtgtccctgaggttcttccagatgacatgatagtacttgcagaaccagctcctggagatatggtaagagctgtcaagaaagccatcgacatgctacctggaatagacccccagattatgcatcttcggatgaaagaactttatagttgggacgatgttgccaaaagaactgagattgtttatgatcgtgcaatggaatctccaacaacaaatttactagatcgccttcctcggtatcttacttgtggatcttgggctggaaaactgttttgcctagttatgatcatcaattacctactatggcgccttttagaatttctacagcctgctgtaggtattgaagaagtcccagatatagggccactacatgctcatttaggttcaaggaatgatgaggctcaagagaagtgaaacttaaatctttgacagttttgaaatggttggggacttgaggtggcagtcatggtatcttctgcttgtcagcattcgttctgatccacatgcagtatatgcctttatgatatggcccccgcacagcattttctcttgaagcttcccgtctccgtagtcgcagctgaaagagagtggaacgccttgatttgtaggatttcttgtcatgctggttaaagctatggtccgagtctctgtcattgccagcttcttttttttttcttcctctgcgtaatgcgtagtgagtggatggcctgcgttttaggcacgtcatcaaaccaattatctgctggaacgttggtactctcttgccaccatattgcaactagaagtcttgattggcatgttgccacacaaattcctactatgtttgatgtcttgtatcatgtcggagcaccaattcctgctgtgtttgtgatgtaataatgccaattccaaccagcgacgtgagaccaatctgcatggatccagtcgataatactttttgaatataaaataagtgcaatctcttttcggcactgtttggaattcaagactggccattcgctttgtaaggtacgaggtattgcaggcactattcaattctcatcatatgaaatattttgtggatt

SEQ ID NO: 201137 - DNA, 2027 bp, Zea Mays
gcgccattgccaagtcgaggcacgcggccagtggtgccctcgtcatcgtcaatgagcaccgacgccgcgcccctcctccactccacctgcacagcgccgctcgcccccacaccccaacccaaccatccgctccttgtcgccttccgacgctgagtttgctggtgtcgatttgcgccgtcggatgctcgatctggcagccgcctgtgccgacctactcgtcgaatccgttatctaacgtaatggatgggcaaggcacaaagcacaggattttgatggtgtctgactttttctttccaaactttggtggggtggaaagccatatctactacctgtcacaatgtctacttaagcttggccataaggttgttgtcatgacacatgcatatggaaacagatctggagtacgatatgtcacaaatggtttaaaggtctattatgtaccatggaggccattcctgatgcagaatacacttcctacactattcttgacgtttccaattatattgatcaggcaatatgtgtctcacatacaagcaaagagaacactgtcttgaggtctgggatatctccagagaaggttttcatggttcctaatgcagttgacactgcaatgtttactccctctcccaagcgcttaaactgtgatgaaatagttattgttgtggtcagtagattagtataccgaaaaggcgccgaccttcttgttgaagtcattccagaagtgtgtcggctatttccaaaggttcgctttattgttggtggtgatggtccaaaacgtgtgcgccttgaagaaatgagggagaagttctcccttcaggatagagttgagatgttaggagctgtacctcatgctcaggtgcgatcggttctgatatctggacatatatttttgaacagttcactcacagaggcattttgcatagccattctagaagcagctagctgtggactgttgacagtgagcactagagtcggtggtgtccctgagatgacatgatagtacttgcagaaccagctcctggagatatggtaagagctgtcaagaaagccatcgacatgctacctggaatagacccccagattatgcatcttcggatgaaagaactttatagttgggacgatgttgccaaaagaactgagattgtttatgatcgtgcaatggaatctccaacaacaaatttactagatcgccttcctcggtatcttacttgtggatcttgggctggaaaactgttttgcctagttatgatcatcaattacctactatggcgccttttagaatttctacagcctgctgtaggtattgaagaagtcccagatatagggccactacatgctcatttaggttcaaggaatgatgaggctcaagagaagtgaaacttaaatctttgacagttttgaaatggttggggacttgaggtggcagtcatggtatcttctgcttgtcagcattcgttctgatccacatgcagtatatgcctttatgatatggcccccgcacagcattttctcttgaagcttcccgtctccgtagtcgcagctgaaagagagtggaacgccttgatttgtaggatttcttgtcatgctggttaaagctatggtccgagtctctgtcattgccagcttcttttttttttcttcctctgcgtaatgcgtagtgagtggatggcctgcgttttaggcacgtcatcaaaccaattatctgctggaacgttggtactctcttgccaccatattgcaactagaagtcttgattggcatgttgccacacaaattcctactatgtttgatgtcttgtatcatgtcggagcaccaattcctgctgtgtttgtgatgtaataatgccaattccaaccagcgacgtgagaccaatctgcatggatccagtcgataatactttttgaatataaaataagtgcaatctcttttcggcactgtttggaattcaagactggccattcgctttgtaaggtacgaggtattgcaggcactattcaattctcatcatatgaaatattttgtggatt

SEQ ID NO: 201138 - DNA, 1915 bp, Zea Mays
gcgccattgccaagtcgaggcacgcggccagtggtgccctcgtcatcgtcaatgagcaccgacgccgcgcccctcctccactccacctgcacagcgccgctcgcccccacaccccaacccaaccatccgctccttgtcgccttccgacgctgagtttgctggtgtcgatttgcgccgtcggatgctcgatctggcagccgcctgtgccgacctactcgtcgaatccggttgttgtcatgacacatgcatatggaaacagatctggagtacgatatgtcacaaatggtttaaaggtctattatgtaccatggaggccattcctgatgcagaatacacttcctacactattcttgacgtttccaatttttactcttgcagatattgatcaggcaatatgtgtctcacatacaagcaaagagaacactgtcttgaggtctgggatatctccagagaaggttttcatggttcctaatgcagttgacactgcaatgtttactccctctcccaagcgcttaaactgtgatgaaatagttattgttgtggtcagtagattagtataccgaaaaggcgccgaccttcttgttgaagtcattccagaagtgtgtcggctatttccaaaggttcgctttattgttggtggtgatggtccaaaacgtgtgcgccttgaagaaatgagggagaagttctcccttcaggatagagttgagatgttaggagctgtacctcatgctcaggtgcgatcggttctgatatctggacatatatttttgaacagttcactcacagaggcattttgcatagccattctagaagcagctagctgtggactgttgacagtgagcactagagtcggtggtgtccctgaggttcttccagatgacatgatagtacttgcagaaccagctcctggagatatggtaagagctgtcaagaaagccatcgacatgctacctggaatagacccccagattatgcatcttcggatgaaagaactttatagttgggacgatgttgccaaaagaactgagattgtttatgatcgtgcaatggaatctccaacaacaaatttactagatcgccttcctcggtatcttacttgtggatcttgggctggaaaactgttttgcctagttatgatcatcaattacctactatggcgccttttagaatttctacagcctgctgtaggtattgaagaagtcccagatatagggccactacatgctcatttaggttcaaggaatgatgaggctcaagagaagtgaaacttaaatctttgacagttttgaaatggttggggacttgaggtggcagtcatggtatcttctgcttgtcagcattcgttctgatccacatgcagtatatgcctttatgatatggcccccgcacagcattttctcttgaagcttcccgtctccgtagtcgcagctgaaagagagtggaacgccttgatttgtaggatttcttgtcatgctggttaaagctatggtccgagtctctgtcattgccagcttcttttttttttcttcctctgcgtaatgcgtagtgagtggatggcctgcgttttaggcacgtcatcaaaccaattatctgctggaacgttggtactctcttgccaccatattgcaactagaagtcttgattggcatgttgccacacaaattcctactatgtttgatgtcttgtatcatgtcggagcaccaattcctgctgtgtttgtgatgtaataatgccaattccaaccagcgacgtgagaccaatctgcatggatccagtcgataatactttttgaatataaaataagtgcaatctcttttcggcactgtttggaattcaagactggccattcgctttgtaaggtacgaggtattgcaggcactattcaattctcatcatatgaaatattttgtggatt

SEQ ID NO: 201139 - DNA, 2039 bp, Zea Mays
gcgccattgccaagtcgaggcacgcggccagtggtgccctcgtcatcgtcaatgagcaccgacgccgcgcccctcctccactccacctgcacagcgccgctcgcccccacaccccaacccaaccatccgctccttgtcgccttccgacgctgagtttgctggtgtcgatttgcgccgtcggatgctcgatctggcagccgcctgtgccgacctactcgtcgaatccgttatctaacgtaatggatgggcaaggcacaaagcacaggattttgatggtgtctgactttttctttccaaactttggtggggtggaaagccatatctactacctgtcacaatgtctacttaagcttggccataaggttgttgtcatgacacatgcatatggaaacagatctggagtacgatatgtcacaaatggtttaaaggtctattatgtaccatggaggccattcctgatgcagaatacacttcctacactattcttgacgtttccaatttttactcttgcagatattgatcaggcaatatgtgtctcacatacaagcaaagagaacactgtcttgaggtctgggatatctccagagaaggttttcatggttcctaatgcagttgacactgcaatgtttactccctctcccaagcgcttaaactgtgatgaaatagttattgttgtggtcagtagattagtataccgaaaaggcgccgaccttcttgttgaagtcattccagaagtgtgtcggctatttccaaaggttcgctttattgttggtggtgatggtccaaaacgtgtgcgccttgaagaaatgagggagaagttctcccttcaggatagagttgagatgttaggagctgtacctcatgctcaggtgcgatcggttctgatatctggacatatatttttgaacagaggcattttgcatagccattctagaagcagctagctgtggactgttgacagtgagcactagagtcggtggtgtccctgaggttcttccagatgacatgatagtacttgcagaaccagctcctggagatatggtaagagctgtcaagaaagccatcgacatgctacctggaatagacccccagattatgcatcttcggatgaaagaactttatagttgggacgatgttgccaaaagaactgagattgtttatgatcgtgcaatggaatctccaacaacaaatttactagatcgccttcctcggtatcttacttgtggatcttgggctggaaaactgttttgcctagttatgatcatcaattacctactatggcgccttttagaatttctacagcctgctgtaggtattgaagaagtcccagatatagggccactacatgctcatttaggttcaaggaatgatgaggctcaagagaagtgaaacttaaatctttgacagttttgaaatggttggggacttgaggtggcagtcatggtatcttctgcttgtcagcattcgttctgatccacatgcagtatatgcctttatgatatggcccccgcacagcattttctcttgaagcttcccgtctccgtagtcgcagctgaaagagagtggaacgccttgatttgtaggatttcttgtcatgctggttaaagctatggtccgagtctctgtcattgccagcttcttttttttttcttcctctgcgtaatgcgtagtgagtggatggcctgcgttttaggcacgtcatcaaaccaattatctgctggaacgttggtactctcttgccaccatattgcaactagaagtcttgattggcatgttgccacacaaattcctactatgtttgatgtcttgtatcatgtcggagcaccaattcctgctgtgtttgtgatgtaataatgccaattccaaccagcgacgtgagaccaatctgcatggatccagtcgataatactttttgaatataaaataagtgcaatctcttttcggcactgtttggaattcaagactggccattcgctttgtaaggtacgaggtattgcaggcactattcaattctcatcatatgaaatattttgtggatt

SEQ ID NO: 201140 - DNA, 1219 bp, Zea Mays
gtcaggattcagggaggcgatatgagttccgagagcgactccttggcctcacggcggtccaagaaacccaagtattccaagtttacccagcaggagcttccagcatgcaagccaatgttaactcctggaatcgtcatcggtgctttctcgctcatcggtgtcttcttcgtcccgatcggcctcgcttcgctatccgcgtctcataacatcgttgaggtgatagatcgatatgacgccgagtgtgtgtccgccaacgacaaggtcggcttcatccaggacaccaagaccgacaaggcgtgcacaagaaagatcaccgtgccaaagccgatgaaagggccgatacacatatactaccagctcgagaatttctatcagaaccatcgacggtacgtgaagagccgtaacgacatgcagctgcggaacaagggcgacgcgagcacgatcgccaactgcgagcccgaggccaccagcgaggacggcggcaagcccatcgtgccctgcggcctcatcgcctggagcctgttcaacgacacctactccttctcgctcaacagcaaggccgtccaggtgaacaagaagaacatcgcctgggacagcgacaagatcaagaagttcggcagcgatgtctaccccagcaacttccagaaaggggggctcatcggtggtgctaaactggacgagaaaataccactgagtgagcaggaggacctgatcgtgtggatgcggaccgccgcgctcccgacgttcaggaagctgtacggcaggatcgaggcggacgccatggcgagcgacgagatcacggtggtgatccagaacaactacaacacgtacagcttcgggggcaccaaggcgctggtgctgtccaccacgtcgtggatcggcggcaggaacaacttcatcggcgtcgcctacgtcgccatcggcggcgtctgcctcttcctcgccctggccttcgtcatcctctacgtcatcaagccaagggcgcttggagacccatcgtacttgtcatggaacagagagaacccagaccatcccaactgagggaaggctagctgctagacctgctctcggtctcgtacagtgtgtgcagagtgaagaagactatttgctgtgttcattgttgatttgttttgtccataagttaaacggaattaatctgatgcgtggaatcaagcaaaatgttgtgttctgtcagatcttttgccgcgttggcacttac

SEQ ID NO: 201141 - DNA, 849 bp, Zea Mays
  misc_feature (1)..(1): n is a, c, g, or t
nttgtgcgattttagacgaatggctgtcgacggagaacaatggagtggacgaactgattagacgccatcttggagggggattgacgcttcaaggtccccaagatcgcagtcgtaagctgatgggtagtcctttgctagacgatgataataggcccgctaattcagcagagacggacatttttattcatgctgtggaacgtgtcttgcctaatttgccaaaaagttgcatagacaaaatcaagagactaatgggctgagctagcaagtacgtgatagcgacctgcaatggcacctatggacccggtatgacatgtataatgactgagcaggctagagcctgaacatagtcaatgatatgctcatgaggtgaaaccaatcgcttatgcaagggtcgatggctgtttgaaattgctagaacacaaactgaagaccgatttcgagttatatagtggacctgaaaatgttcctgaacttttaaaggatgtgcaggaagtgttgttctttcagatttatttttgttttttagtctcaatgtctagcgtcatagttgtaaagcacatgaactgcgaaattctgcagataatggctgcattttttataaatgtgatttttaggtaccagcagcctagcaacggtcttgtttattgcagtggccaaccagtcaattggtacttaaaaagacatgtttgtttaaatgaatgattcaagtgcatggtttgttaatatttgattgaaacacacataaagggtacattaagactctttactggagctctttttttttgaaaacgcaggagaactgcgcctcaatatattaagaagaagaaataagtccaggtcaaagagacc

SEQ ID NO: 201142 - DNA, 813 bp, Zea Mays
  misc_feature (1)..(1): n is a, c, g, or t
nttgtgcgattttagacgaatggctgtcgacggagaacaatggagtggacgaactgattagacgccatcttggagggggattgacgcttcaaggtccccaagacgatgataataggcccgctaattcagcagagacggacatttttattcatgctgtggaacgtgtcttgcctaatttgccaaaaagttgcatagacaaaatcaagagactaatgggctgagctagcaagtacgtgatagcgacctgcaatggcacctatggacccggtatgacatgtataatgactgagcaggctagagcctgaacatagtcaatgatatgctcatgaggtgaaaccaatcgcttatgcaagggtcgatggctgtttgaaattgctagaacacaaactgaagaccgatttcgagttatatagtggacctgaaaatgttcctgaacttttaaaggatgtgcaggaagtgttgttctttcagatttatttttgttttttagtctcaatgtctagcgtcatagttgtaaagcacatgaactgcgaaattctgcagataatggctgcattttttataaatgtgatttttaggtaccagcagcctagcaacggtcttgtttattgcagtggccaaccagtcaattggtacttaaaaagacatgtttgtttaaatgaatgattcaagtgcatggtttgttaatatttgattgaaacacacataaagggtacattaagactctttactggagctctttttttttgaaaacgcaggagaactgcgcctcaatatattaagaagaagaaataagtccaggtcaaagagacc

SEQ ID NO: 201143 - DNA, 422 bp, Zea Mays
ttgtgcgattttagacgaatggctgtcgacggagaacaatggagtggacgaactgattagacgccatcttggagggggattgacgcttcaaggtccccaagatcgcagtcgtaagctgatgggtagtcctttgctagacgatgataataggcccgctaattcagcagagacggacatttttattcatgctgtggaacgtgtcttgcctaatttgccaaaaagttgcatagacaaaatcaagagactaatgggctgagctagcaagtacgtgatagcgacctgcaatggcacctatggacccgaagggaacaaccttcagcctgttcttgtagcttcaagcaaggagctaaaaacaccaccaagatgaaaaaaagaacatccaattatggaggggctccattccgtatctcccataagttgct

SEQ ID NO: 201144 - DNA, 3047 bp, Zea Mays
ttgtgcgattttagacgaatggctgtcgacggagaacaatggagtggacgaactgattagacgccatcttggagggggattgacgcttcaaggtccccaagatcgcagtcgtaagctgatgggtagtcctttgctagacgatgataataggcccgctaattcagcagagacggacatttttattcatgctgtggaacgtgtcttgcctaatttgccaaaaagttgcatagacaaaatcaagagactaatgggctgagctagcaagtacgtgatagcgacctgcaatggcacctatggacccggtaattttttggttttgtttcgccaggaatcgataccagacctgtgtattctgtgattaggcaccatctcatgtagtactaagcgcttcagtttatggcaagcttttctgcattccgaatgctaccgggtatgtagttgtaactaggacataaggcgccctatcgggtgccgagacaatgcagagttgattgcatagttcatgattgtcatttataatcctaagaatcagttgaaagtatcaatacgaatgctgcatctgaaatgtcagtgcaccttcaatctgaaaatctaggcgggtatttagagaactcagtagcaaagttctgagttgtctgccacttgacctccgcgtatgtggagaccatgtaccaataggaatactgaaaagctgtttgtgcagaagggaacaaccttcagcctgttcttgtagcttcaagcaaggagctaaaaacaccaccaagatgaaaaaaagaacatccaattatggaggggctccattccgtatctcccataagttgctggataaccgagtttctttgtgttttcttgatattatttttctaaatattttttctagaagggaatctacaatgaccaccagtccctcatgctttctgctggatatgcaaacaacccccaaatgagatatggagcatattgtcctgtttcgactattggatatggccaacaatactttcctgtgcactttcccttctcaagtccttactatcaaccaccagcttcttctagcatgggatattcaaactctgtgactggaatgtcccaaggagtcgctatgttgcagcaagagtatttccttccttgtggtcttctatattcacccacaccagggtatcatcaaccatttagggcttgtttgggagcaaggataccagagaggattgaaggggttacaatctcttttctattcaaaactaaatagcaaggggattgtagcccctccaatcctctctggtattcttgctcccaaacaagtctttagttcatttgacagaggtaacatgtctcctcttatataaaacaatatcatacatttcaaaatcccctgaagggttgcaagattaagcaaatatgtggagaattacatgtactaatggccttctctgcattgcagcaccatcaaacccaccataaaatctttgcttctttccaagcagaaatgggatgcatttcaatctcttcattgccaataacttgaatatttctctgcaacagcacagcaaatgataattcaaaagaacataaaaatgctttcacagagaaacaaagtaatttattccacccacctttcttaacattaatacaaaatctaatgcacactgatattttggctgtgcttgtattctttgcacactgactctgattatttcgtcattaatacaaaatctaatgcacactgatattttggttgtgcttgtattctttgcacactgattcttataatcaatgtgcaaagaatacaaacatagaccacaaagtctcataatatatttatttaatgttataattttttgtaattatttttataatttttattaaatttaagatattttgttttaaaattttaaaataacttatactttaggagggtataggacagagatgatgcaagaatgctagaaattttcctataaacggatcggagcctttgatggttcgtgcccaagcccaactattatatataactaataatgtgcccctgcgtcgctacagaatcaatatggtattgatataataagatatattgagatgcagaagcactaattattttgaaattagcggaacatagattaatcaagacagaaaatattaagaaatatcaataccctaaggcgcttcttaacttggggcaacagtggaccttcgaagttgctgtcaatgtacttgatcaaatccaagctctctcctttgacctggttgtgctctagagaaggcacctgctgggaaacaaaacaaaggttaatcatacatgaaaggagaatataaaacacatgtttcaatatccatcctgaagtggatgcgtacaaggaccatggcaaaatatacacaggagcatgccaaattgacaataagtataaattgaagctagaaacatcaatcagcacagcagcaccctggaaacttaactaaccccccactatatggatgttgatgcatgttgctgcaatcttgtgcaggtatgacatgtataatgactgagcaggctagagcctgaacatagtcaatgatatgctcatgaggtgaaaccaatcgcttatgcaagggtcgatggctgtttgaaattgctagaacacaaactgaagaccgatttcgagttatatagtggacctgaaaatgttcctgaacttttaaaggatgtgcaggaagtgttgttctttcagatttatttttgttttttagtctcaatgtctagcgtcatagttgtaaagcacatgaactgcgaaattctgcagataatggctgcattttttataaatgtgatttttaggtaccagcagcctagcaacggtcttgtttattgcagtggccaaccagtcaattggtacttaaaaagacatgtttgtttaaatgaatgattcaagtgcatggtttgttaatatttgattgaaacacacataaagggtacattaagactctttactggagctctttttttttgaaaacgcaggagaactgcgcctcaatatattaagaagaagaaataagtccaggtcaaagagacc

SEQ ID NO: 201145 - DNA, 1572 bp, Zea Mays
ctccatccctcccatcctagacctgctcccccgccgccatgacgatcttgcgtcggccgtcgcacacccgccgaccctaccatcgcagaccccctccccattgtcagatcgatccttcatcgccccccgatgacaacggcttctcggatgctagggcacctgccacccacccatctccctcccatcccagatccctcgcgccatggccaacgcctccccccagtggcttacgctagcgcacctgcccacctccctccctctcccccgcccagccatggccatcgcctttgactctccgacctcctcccccgctgaaattcctgctctgaaatacgctcgcttctgctgcctagatctggtacccctgttgtcaccacgtttttgccaccaccgtcaccagctcagagctttccctccattgcttcctcctcgtcgtggtctcctctgtgtcactccgctcgagctcgccatcctcttgccagcgcgactccgtggagcgtgcgagacagtgccggtggccgcggagacccgccacggggacatggaggggtaggtgttgccacagttcgtagatttcaacgcctggtacacacacgcgatctccactaccgagctcgtggactacaggtttgtgcgggggatcatggtcatcctcatccaccctacagatacaccatgtgggaggccatccaaactccaaaactaaatcaacaagttggagatcctccttcctgcagcgcagaagcacagctggttctttcaggcgcagcaaactctgttcagataaaaatttgtgttaactgatgctcaaattactgaagaatggaatagaggagctgcaccaagttcacgcttcatattcgcagagaagaatgcaaactatgttctgcttacctgaacaataagtgtcttgagaagcttcttgtaagtgaggtgatctctacttatgcgcagtagctctttgcttgctgacttcaacatatctgttaccaaatcatcctgagcttgaaggactttaattctagaagcattgagctgcattgagtaatcactgcataagaccacacacagtaatatcagtgaattgatattttttacacaaaagaaaaatagtatggtcaccggcatatgctaaagtggggaaatatccataatggcccgtagacaatagtagctatgaagtgtgacataggtaaaacagaaacaagtcacaagaatgggaataagaaattgagttagaactgctatttacattttcttcttgatgccaataacttgctagctggattccaccgtggtcaagccttgtgatgaaatcagatgatgatgacgcaattggcttctgtgacctacaattatgggcatgctgatgctacctagaacctcactacactggatgacaggtacgttcattgatcacgtaatgtggaggacaacaactggaataatctcaagatgggactgatgaatgaacccaaagctaaatgatctgatcgtgctggaatgggaggtgctcgccaagcgagtatcatctaacaacactgacttagtgtttatcccaggcaagccccg

SEQ ID NO: 201146 - DNA, 2167 bp, Zea Mays
gttgttctgctcggactcggaatacaggcttcgacagtcgtcacagtccctcgcgtagacgcgcacccacctccatccctcccatcctagacctgctcccccgccgccatgacgatcttgcgtcggccgtcgcacacccgccgaccctaccatcgcagaccccctccccattgtcagatcgatccttcatcgccccccgatgacaacggcttctcggatgctagggcacctgccacccacccatctccctcccatcccagatccctcgcgccatggccaacgcctccccccagtggcttacgctagcgcacctgcccacctccctccctctcccccgcccagccatggccatcgcctttgactctccgacctcctcccccgctgaaattcctgctctgaaatacgctcgcttctgctgcctagatctggtacccctgttgtcaccacgtttttgccaccaccgtcaccagctcagagctttccctccattgcttcctcctcgtcgtggtctcctctgtgtcactccgctcgagctcgccatcctcttgccagcgcgactccgtggagcgtgcgagacagtgccggtggccgcggagacccgccacggggacatggaggggtaggtgttgccacagttcgtagatttcaacgcctggtacacacacgcgatctccactaccgagctcgtggactacaggtttgtgcgggggatcatggtcatcctcatccaccctacagatacaccatgtgggaggccatccaagttagtgcccattcgctcctcttcccccatgcccatgttgtgcatcatcctgcattgaacgttgctggtgtaaagatgaagagagtgattacaagtgtttctgcctgcatagttgtagattttgaagcatcgtgatgttccatttgtgcatagaatggtcccgaaatggtgtttaggtaataggcacgaatagcgtgtttttgttgttctggttccttgctttatttgcatactcattccttgcagactccaaaactaaatcaacaagttggagatcctccttcctgcagcgcagaagcacagctggttctttcaggcgcagcaaactctgttcagataaaaatttgtgttaactgatgctcaaattactgaagaatggaatagaggagctgcaccaagttcacgcttcatattcgcagagaagaatgcaaactatgttctgcttacctgaacaataagtgtcttgagaagcttcttgtaagtgaggtgatctctacttatgcgcagtagctctttgcttgctgacttcaacatatctgttaccaaatcatcctgagcttgaaggactttaattctagaagcattgagctgcattgagtaatcactgcataagaccacacacagtaatatcagtgaattgatattttttacacaaaagaaaaatagtatggtcaccggcatatgctaaagtggggaaatatccataatggcccgtagacaatagtagctatgaagtgtgacataggtaaaacagaaacaagtcacaagaatgggaataagaaattgagttagaactgctatttacattttcttcttgatgccaataacttgctagctggattccaccgtggtcaagccttgtgatgaaatcagatgatgatgacgcaattggcttctgtgacctacaattatgggcatgctgatgctacctagaacctcactacactggatgacagggcgctactttttctagtgtagcatacaagctccaatcggttggctttggtgacaatggagggaggagggaagggtagtggagtttggtatatagatccacccagatggagtggagtacagtacaatgatagacagtgaagagacgagaagattcaattttatttgagttgagcctcaaagttatctacaacagtccactctacagtactatagtgggcaacaaatgtatggacatatgcacgctttgttagtcaaaaggtttagaaatttaggtgtgggagaaagaaaaaaaataaccttgtgaactgcgaagttttttttctcttaaatctcatgataacatttagccatatacagtgactgagaggtgagagcacgctacctgcttggttcctggaacctccttgacgtggagcgaatgcaacaggttcctcaggatgcgggcgc

SEQ ID NO: 201147 - DNA, 886 bp, Zea Mays
cggcaacacgcgccgcggcggttccaggcctgcctgccctctcgcggtttccctcgcgctctccgtcttttgtgaaagccacggccttccggagaggcggagagtcccaaccctcctaccgccgcgtgctctccggattgttgtgcttgcggagtcggtcgcggcctcggcacgacggcgccgggcctccgatcccacaccccgccgagcagtggcggaacccacatgggtatgccgtatatggccacggggataccggaaataccctgcacggccatccgatcgagccaacgcttggagacgccgtctccgaatgaagtaggggagagcggggtgccggggggtcagtttgttgccggtcatcctcctcgtcgtccaacccaggtgagttccgcatttcacatcatcccatgctcgccttttaattttatatgggaacactaggtcatcgcatcgttcacgttcactctctgagactccgagacgcggttgctatggcctatttgttgattattacgggaatatggctgatgaggaatgcagtttaaaaactggagcaccaccgcgtggttgcttttgcaggatagtgtgccaatcagacgaagagtttgagacgagacaaattttcaaagcaggacacctctactaattagttgcagaatcaagtgtgtctgttgcacatggctttgacaaagcattgcatttctagtttgctgttacatacctagaccctagtgaatagagaagtcactccggtgctgctttaggaataatgctaatttattcagtcttgatatcttctgtaaaattcacagtaaattcataaacgaaagggaattttatttgtgagtaaagccgtaatagtatttgcatcaggagttcacaa

SEQ ID NO: 201148 - DNA, 1178 bp, Zea Mays
tgcccccggcctccctctcactgcgcgttcgcattcgccaattccgccgcctcctcctcctcctcccctgtgtccgagatctcgcatccgctccatctatggaaggccaccacacgccgtgcccagccatcctcggattccgccaccccatcctcggattccaagcgtcgtccaccccacgtgcccctgcccgacgaccccgttcctcgcggcgcttggcttcagcgccgcgaccgccgcgccatccccacccagcacccatccgcaaacccactcccatgactgcccccgcctgaagaccccgttccccgcgacttcggtgccgcgaccatcgcgccatccccacccatccgcaaccccgctcccccgccgcgccatccccacccattcacaaccccatcccctgccgcccctcacgtgatcacccattcgcgacctgccccctcccctcccccgatgggacagggagcagcaaggtcaccaccggagacgacctcgatgggtggcggcgccgaggacggaggtggtgtcacagtctatgggaggaaggagatcatgatgggggagcagtgccagtcgatggacttctctggggtcatctactacgacgctgaaggccaccacgtcgcacaaccgccgccgcggcgctagcctgatgcccgcctccgtgacctcgccgccaatgcccacaccgcgctcgtcttcagtgggctggacagtgataccccgcgacggtggtgtagtgggagtgggacggcgaggaggttaagggcggcgacggcgaggtgcagagctcctacgggctccgccatcaacactatggatacactccaagaggccccttcagctccattggaggctacagctgccctctacactatacagtttacagtatatttcttcttctcggaggaggatgaacagatttccagcaccctgttttcaacaccgaggaggatgaacattctacgaaatcaaaaggaccccttaagttctacaactcggagatccacacgacatcattctgtttgtcctcttttgcaaagagggtaattgagtcaaaggcagtgtaccgaggcacctcccattggaatggcgagtgctgatctgaatgggagatatttctattactgagattcagactccaatacaatatagcttctgctcaacgccaagta

SEQ ID NO: 201149 - DNA, 538 bp, Zea Mays
gtccctcagaaaaccaagtcgctgaaacagtagcagtgtattttgaaataatgtacggagagatcacagcctggagtggcatgcccaccgtgaaggttgctgtcaccgtcgatgcccctgccgtggtagagctgatgatgcagaggttgatgactgatgactagcagcaataccagttaattggcagcgccaccattaagacaatttccagttcttaagggagaaacaaatgttggaacatggaagtgcatttgttgttcaccagaaatttggtcgtcttgtcatcaaaacaccagaattgcattattgcacgctagatactcatttctttggttgttatgtgcgtgcttggtgtttatgtacagttttatgtgcttgataatgggcacatgaccagttcgacaatgtcatacagttatactatactagtacattgcttatgcttgtgagagaacagaattaagttaaatgaagagccacctgatgccagaaattggtccgccagttgttgcacgatgttattatatggccggaaaat

SEQ ID NO: 201150 - DNA, 760 bp, Zea Mays
ctttctgctcaagatgtatgctgcatcaagatgctgacagggagaagcttgaacagtgtgatagcaaatatgcccgctacttatgcaagataatgggcatttattttgattaccacaaggatgcctacttcattaaaggagtgtatcttcatgatccaacaacggttattgctgctgtgaatccatcgctgctgacttacacagaaggtgttgtgagggtacagacggttggaatcacaaagggccttactgtttttgataacaccaagaaaaggtacggagagatcacagcctggagtggcatgcccaccgtgaaggttgctgtcaccgtcgatgcccctgccgtggtagagctgatgatgcagaggttgatgactgatgactagcagcaataccagttaattggcagcgccaccattaagacaatttccagttcttaagggagaaacaaatgttggaacatggaagtgcatttgttgttcaccagaaatttggtcgtcttgtcatcaaaacaccagaattgcattattgcacgctagatactcatttctttggttgttatgtgcgtgcttggtgtttatgtacagttttatgtgcttgataatgggcacatgaccagttcgacaatgtcatacagttatactatactagtacattgcttatgcttgtgagagaacagaattaagttaaatgaagagccacctgatgccagaaattggtccgccagttgttgcacgatgttattatatggccggaaaat

SEQ ID NO: 201151 - DNA, 1516 bp, Zea Mays
cggcagccaaatccgctttatcaggtcgagaattgtttctcatccaccgatccacgcgtgctgccgagccggggtctgctcagcctgctgtagcatttgtcgggttggattgggttgttccgcttgggtagcctggtgggatcgaaatctgtgtgggatccatggcggcggtcgaggggacgacgaagaagaaggtaatcatcgacaccgaccccggaattgacgacgcgatggccatcttcgtggcactgcggtcgccggagctggaggtgctgggcctcaccactaccttcggcaacgtccacaccgccctcgccacgcgcaatgcgctccacctgttggaggctgttggaaggactgacatccccgtcgcagagggatcccatgtaacaatcaagaaagccaccaagctgaggatcgcaagctttgtccacggttctgacggcctgggaaaccaggatttccctccaccggctaccaagcctatagatcagtcggctgctgccttcctagttgagcaagcaaatctgtaccctggacaagttaccattgtcgccctcggtccactaaccaaccttgctctggcagtggagcttgacccttcgttcccgaagaagatagggcagattattattcttggaggtgcatattcagttaatggaaatgtgaaccctgcagccgaggcaaatatctttggggatcctgatgcggcagatattgtgttcacctgcggtgctgatattttggccgtgggactaaatgtaacccaccaagtagttctaaccgatgctgacagggagaagcttgaacagtgtgatagcaaatatgcccgctacttatgcaagataatgggcatttattttgattaccacaaggatgcctacttcattaaaggagtgtatcttcatgatccaacaacggttattgctgctgtgaatccatcgctgctgacttacacagaaggtgttgtgagggtacagacggttggaatcacaaagggccttactgtttttgataacaccaagaaaaggtacggagagatcacagcctggagtggcatgcccaccgtgaaggttgctgtcaccgtcgatgcccctgccgtggtagagctgatgatgcagaggttgatgactgatgactagcagcaataccagttaattggcagcgccaccattaagacaatttccagttcttaagggagaaacaaatgttggaacatggaagtgcatttgttgttcaccagaaatttggtcgtcttgtcatcaaaacaccagaattgcattattgcacgctagatactcatttctttggttgttatgtgcgtgcttggtgtttatgtacagttttatgtgcttgataatgggcacatgaccagttcgacaatgtcatacagttatactatactagtacattgcttatgcttgtgagagaacagaattaagttaaatgaagagccacctgatgccagaaattggtccgccagttgttgcacgatgttattatatggccggaaaat

SEQ ID NO: 201152 - DNA, 1799 bp, Zea Mays
ctccctcctcttgtctattcttcttctccagtgcaaaccggcgcttctcgcgccgtccttccccttctccttgcgcaggttcaggcctgaccgcctgagaaactggaaggtggcggcgacctcgggggttgatcggcgacttgggtcggattagtttccggaagagcactggaggagaaggcctgtttggaggcgcggaagccgtacacgatcacgaagcagcgggagaagtggacggaggacgagcaccggcggttcctggaggccctacagatgcacggtcgcgcctggcgccacatacaagagcacatcggcaccaagactgccgtgcaaatccggagccacgcgcagaagttcttcaccaaggtggtccgagagtcatcgtcaggaagtaacgcctccgcgggcgcggcgccggcaatccaggtcccgccgccgcgccccaagaggaagccggcgcacccttacccgcgcaaggtggacggcgcggccaagaagcccgcgccggagctcaagctgatggagaagctgcccccgcgtgaccgggatgaagggtcgccgacatcggtgcttgcctcggcgcgcacggcgtcgcgagcggaggtgttattaggcagcgcgttcgcgaacagctcgagcgccagcaggtcgcggggcctgtcagcttccggttcggatgagcgtggtgacggtggcggctcgctggtctcgtcggtggccggggagcacggctgcgcatcgccaagaacgagagcgccatataccaaggtgctcgttgaagcaaacgaagtgtcggatctaggaccggaagctccagtcttgaagctgttcggaaagaaagttgtggtgaaagacctgaaaacggactattcacctgcggctgcgagcgttgccaaggcaagcagagaccggaatcctatcggtgccgcaggagcgagctcatggagtccgtggccgggcagcgtgcaggtgcagcagctcatgtacttcgttccccagcacgacggcctcgcggcgcagcccgtcgcgccgtggttcggctacagcgggagcgtgccgtgcgcggtgttctacccgcaggcggtggcttcagctcaggagcaccagcaagcttcagagcctctggatcacaaacgcgcgcagacggaaaggtccctgacaggttcgaacatggcctccagcgccgcgtcggcggcgcagaactcggacaccgcgcagtcccaccacggtcccggacaagaaaacaccggcgacggctgcgcggcgcttcgggctgccatcccgcggctggccaagtgcgcgagttcggcttcctgcagcgggagagggttcgtgccgtacaagcggtgcgcggccgagagcgaggcgccgcgcccggtggcgcccggagaggaggatgacggcgagctgacgaggctgtgcttgtgacaactgacaagagctgaaacctcggtgtaaagaactcacgacgcactttttggatgttgggctgctgctgacatgcatggctgcctgcacatgctctgcagaagcagctagcctgggaacaggttttccaggagagacggatgagcaactctggttcttacccctcggtatatacgcgtatatataggcaaaatctgtactcatattccgcttttgtttcaccacttgtgtaattttttccccaacatgagatagagagggttgtgtgtgtgtcaatagtctgagcacatgtaaattttaggcttgtaccatctggacgaaatgtaatagggagcaggcggaatgagccactttgcactttggtgttcttc

SEQ ID NO: 201153 - DNA, 1538 bp, Zea Mays
cttgctcccagccaaatcattcacgtatccatcttcaagccagccgtctccttatccctacgacgccgctcacctgtgctcatcttccagccgccctctccgcccagcagcagagcacaccatcctctccactcggatccccaagccctcgcctccagctttgccacgacatccgtcccctgctcggacctccacccggccgcgtcctcgccggtggccagcgccgctgcatcgccattcctagcgtcggccttggcaccgcttccccgagcgccccagtcgagctcgcccatcctctgctctagccctttctccacgccgtagctgatctcgcccctctcctcagccatggacacgacgacctgcagcccttcttggtggccaagcccatcttcctgctcgcgccccctctttttccacctctgcgcgtatcagctcgtccaacccccatggtgtttcctccctctcggctcccttgctccctccccatggcgttccccctagatgctcgtgatctgttccccacggtgcaggcaaatgttctttccctccctgcagcagcaccttggtggttgtcgagcagcacgtcgcgcttgcgcagcctcggtcacgacgttgttcaccccgctaaccattggtgtcatacctcacgtgtcatgtgttcgccgaaatgcctaaacatgtagtctgtcgtcgttgtatccacagtcaattttagtcatggtacgctaatgatcgagatgcgaaggccagggtctaggttgaccccaagtggtgcaaaggatggcctacttcgagaggcgatgtcagcggaccaatctagaagattgatgatctctacataaaaacatgattacattgattcaactctgatctggttgtggaaactgagatcattgtaactcaaatgagagcttggcacttagcatatagatgccactagaaccaatctggaaatactgtgagatatagagtgataaaaggcattaatgtaagtactacataaatgtactacttgtattttttaataatcaatgcttcaaaagtctatatagatgctgactggtgtcagggttttcccattatttgaattgtgtatgcaactattgtggtatatcaatgaccttccgagaagatacaatggcgttcttagtagtaacgctgcttgatttctatagttggagtcatcacacagctaacatttgcactttaactgtttggtgaaatgcttgggagaaagaggccagcaagaatggagtcatggaacatcggcaggaggagtgcagcagcggcaaccgatgtatcccttgaacaatctggttttgacaagatgcaaatcaatctagtgtacattgtattccacacttgcaaagattgtttggctaattacaagattatttcagtgttttggtttggattaagagtacacttatgtatgaaatattgattggtactcatttatattatttttattatatcattattaaatatatatgtctgtgtatttctctttcaaattattataatgtggaatctca

SEQ ID NO: 201154 - DNA, 1442 bp, Zea Mays
cttgctcccagccaaatcattcacgtatccatcttcaagccagccgtctccttatccctacgacgccgctcacctgtgctcatcttccagccgccctctccgcccagcagcagagcacaccatcctctccactcggatccccaagccctcgcctccagctttgccacgacatccgtcccctgctcggacctccacccggccgcgtcctcgccggtggccagcgccgctgcatcgccattcctagcgtcggccttggcaccgcttccccgagcgccccagtcgagctcgcccatcctctgctctagccctttctccacgccgtagctgatctcgcccctctcctcagccatggacacgacgacctgcagcccttcttggtggccaagcccatcttcctgctcgcgccccctctttttccacctctgcgcgtatcagctcgtccaacccccatggtgtttcctccctctcggctcccttgctccctccccatggcgttccccctagatgctcgtgatctgttccccacggtgcaggcaaatgttctttccctccctgcagcagcaccttggtggttgtcgagcagcacgtcgcgcttgcgcagcctcggtcacgacgttgttcaccccgctaaccattggtgtcatacctcacgtgtcatgtgttcgccgaaatgcctaaacatgtagtctgtcgtcgttgtatccacagtcaattttagtcatggtacgctaatgatcgagatgcgaaggccagggtctaggttgaccccaagtggtgcaaaggatggcctacttcgagaggcgatgtcagcggaccaatctagaagattgatgatctctacataaaaacatgattacattgattcaactctgatctggttgtggaaactgagatcattgtaactcaaatgagagcttggcacttagcatatagatgccactagaaccaatctggaaatactgtgagatatagagtgataaaaggcattaattgaattgtgtatgcaactattgtggtatatcaatgaccttccgagaagatacaatggcgttcttagtagtaacgctgcttgatttctatagttggagtcatcacacagctaacatttgcactttaactgtttggtgaaatgcttgggagaaagaggccagcaagaatggagtcatggaacatcggcaggaggagtgcagcagcggcaaccgatgtatcccttgaacaatctggttttgacaagatgcaaatcaatctagtgtacattgtattccacacttgcaaagattgtttggctaattacaagattatttcagtgttttggtttggattaagagtacacttatgtatgaaatattgattggtactcatttatattatttttattatatcattattaaatatatatgtctgtgtatttctctttcaaattattataatgtggaatctca

SEQ ID NO: 201155 - DNA, 1603 bp, Zea Mays
agccaaatcattcacgtatccatcttcaagccagccgtctccttatccctacgacgccgctcacctgtgctcatcttccagccgccctctccgcccagcagcagagcacaccatcctctccactcggatccccaagccctcgcctccagctttgccacgacatccgtcccctgctcggacctccacccggccgcgtcctcgccggtggccagcgccgctgcatcgccattcctagcgtcggccttggcaccgcttccccgagcgccccagtcgagctcgcccatcctctgctctagccctttctccacgccgtagctgatctcgcccctctcctcagccatggacacgacgacctgcagcccttcttggtggccaagcccatcttcctgctcgcgccccctctttttccacctctgcgcgtatcagctcgtccaacccccatggtgtttcctccctctcggctcccttgctccctccccatggcgttccccctagatgctcgtgatctgttccccacggtgcaggcaaatgttctttccctccctgcagcagcaccttggtggttgtcgagcagcacgtcgcgcttgcgcagcctcggtcacgacgttgttcaccccgctaaccattggtgtcatacctcacgtgtcatgtgttcgccgaaatgcctaaacatgtagtctgtcgtcgttgtatccacagtcaattttagtcatggtacgctaatgatcgagatgcgaaggccagggtctaggttgaccccaagtggtgcaaaggatggcctacttcgagaggcgatgtcagcggaccaatctagaagattgatgatctctacataaaaacatgattacattgattcaactctgatctggtgtttggcatttgtttttcctctacattagtttctcattattatatttgtatagatttgtattcttgagactaacctaatcaacattctttacataataatattataaggaggattaatttcatatacaatactatatataatgagatgaatcatttggccttacgatatgtgtaagaaataatgctttgataattggcagcctatcaagagtttcattagtgtagaacaattgttttgttgttaacatagtgtataacatttgatgtcgtaatttgttttggaagaaaatttaatctcaacatagaattttttactgacaggtttatggtcttttaatatctacaggttgtggaaactgagatcattgtaactcaaatgagagcttggcacttagcatatagatgccactagaaccaatctggaaatactgtgagaggccagcaagaatggagtcatggaacatcggcaggaggagtgcagcagcggcaaccgatgtatcccttgaacaatctggttttgacaagatgcaaatcaatctagtgtacattgtattccacacttgcaaagattgtttggctaattacaagattatttcagtgttttggtttggattaagagtacacttatgtatgaaatattgattggtactcatttatattatttttattatatcattattaaatatatatgtctgtgtatttctctttcaaattattataatgtggaatctca

SEQ ID NO: 201156 - DNA, 1255 bp, Zea Mays
agccaaatcattcacgtatccatcttcaagccagccgtctccttatccctacgacgccgctcacctgtgctcatcttccagccgccctctccgcccagcagcagagcacaccatcctctccactcggatccccaagccctcgcctccagctttgccacgacatccgtcccctgctcggacctccacccggccgcgtcctcgccggtggccagcgccgctgcatcgccattcctagcgtcggccttggcaccgcttccccgagcgccccagtcgagctcgcccatcctctgctctagccctttctccacgccgtagctgatctcgcccctctcctcagccatggacacgacgacctgcagcccttcttggtggccaagcccatcttcctgctcgcgccccctctttttccacctctgcgcgtatcagctcgtccaacccccatggtgtttcctccctctcggctcccttgctccctccccatggcgttccccctagatgctcgtgatctgttccccacggtgcaggcaaatgttctttccctccctgcagcagcaccttggtggttgtcgagcagcacgtcgcgcttgcgcagcctcggtcacgacgttgttcaccccgctaaccattggtgtcatacctcacgtgtcatgtgttcgccgaaatgcctaaacatgtagtctgtcgtcgttgtatccacagtcaattttagtcatggtacgctaatgatcgagatgcgaaggccagggtctaggttgaccccaagtggtgcaaaggatggcctacttcgagaggcgatgtcagcggaccaatctagaagattgatgatctctacataaaaacatgattacattgattcaactctgatctggttgtggaaactgagatcattgtaactcaaatgagagcttggcacttagcatatagatgccactagaaccaatctggaaatactgtgagaggccagcaagaatggagtcatggaacatcggcaggaggagtgcagcagcggcaaccgatgtatcccttgaacaatctggttttgacaagatgcaaatcaatctagtgtacattgtattccacacttgcaaagattgtttggctaattacaagattatttcagtgttttggtttggattaagagtacacttatgtatgaaatattgattggtactcatttatattatttttattatatcattattaaatatatatgtctgtgtatttctctttcaaattattataatgtggaatctca

SEQ ID NO: 201157 - DNA, 1507 bp, Zea Mays
agccaaatcattcacgtatccatcttcaagccagccgtctccttatccctacgacgccgctcacctgtgctcatcttccagccgccctctccgcccagcagcagagcacaccatcctctccactcggatccccaagccctcgcctccagctttgccacgacatccgtcccctgctcggacctccacccggccgcgtcctcgccggtggccagcgccgctgcatcgccattcctagcgtcggccttggcaccgcttccccgagcgccccagtcgagctcgcccatcctctgctctagccctttctccacgccgtagctgatctcgcccctctcctcagccatggacacgacgacctgcagcccttcttggtggccaagcccatcttcctgctcgcgccccctctttttccacctctgcgcgtatcagctcgtccaacccccatggtgtttcctccctctcggctcccttgctccctccccatggcgttccccctagatgctcgtgatctgttccccacggtgcaggcaaatgttctttccctccctgcagcagcaccttggtggttgtcgagcagcacgtcgcgcttgcgcagcctcggtcacgacgttgttcaccccggtacgctaatgatcgagatgcgaaggccagggtctaggttgaccccaagtggtgcaaaggatggcctacttcgagaggcgatgtcagcggaccaatctagaagattgatgatctctacataaaaacatgattacattgattcaactctgatctggtgtttggcatttgtttttcctctacattagtttctcattattatatttgtatagatttgtattcttgagactaacctaatcaacattctttacataataatattataaggaggattaatttcatatacaatactatatataatgagatgaatcatttggccttacgatatgtgtaagaaataatgctttgataattggcagcctatcaagagtttcattagtgtagaacaattgttttgttgttaacatagtgtataacatttgatgtcgtaatttgttttggaagaaaatttaatctcaacatagaattttttactgacaggtttatggtcttttaatatctacaggttgtggaaactgagatcattgtaactcaaatgagagcttggcacttagcatatagatgccactagaaccaatctggaaatactgtgagaggccagcaagaatggagtcatggaacatcggcaggaggagtgcagcagcggcaaccgatgtatcccttgaacaatctggttttgacaagatgcaaatcaatctagtgtacattgtattccacacttgcaaagattgtttggctaattacaagattatttcagtgttttggtttggattaagagtacacttatgtatgaaatattgattggtactcatttatattatttttattatatcattattaaatatatatgtctgtgtatttctctttcaaattattataatgtggaatctca

SEQ ID NO: 201158 - DNA, 1490 bp, Zea Mays
agccaaatcattcacgtatccatcttcaagccagccgtctccttatccctacgacgccgctcacctgtgctcatcttccagccgccctctccgcccagcagcagagcacaccatcctctccactcggatccccaagccctcgcctccagctttgccacgacatccgtcccctgctcggacctccacccggccgcgtcctcgccggtggccagcgccgctgcatcgccattcctagcgtcggccttggcaccgcttccccgagcgccccagtcgagctcgcccatcctctgctctagccctttctccacgccgtagctgatctcgcccctctcctcagccatggacacgacgacctgcagcccttcttggtggccaagcccatcttcctgctcgcgccccctctttttccacctctgcgcgtatcagctcgtccaacccccatggtgtttcctccctctcggctcccttgctccctccccatggcgttccccctagatgctcgtgatctgttccccacggtgcaggcaaatgttctttccctccctgcagcagcaccttggtggttgtcgagcagcacgtcgcgcttgcgcagcctcggtcacgacgttgttcaccccggttgtggaaactgagatcattgtaactcaaatgagagcttggcacttagcatatagatgccactagaaccaatctggaaatactgtgaggtaattttatatcttgttctgtaagttggagaattaatagctagcatatgcttccttaatgatgttttctttttccatgcatcttcatattaccaaaccctcttcttgccggaaaaacagatatagagtgataaaaggcattaatgtaagtactacataaatgtactacttgtattttttaataatcaatgcttcaaaagtctatatagatgctgactggtgtcagggttttcccattattgtaagtttgttacaagcaagtgctttccctcacacaacttcaccttttctttacatgtttattacttttgtttgctggttttgacttacagtgaattgtgtatgcaactattgtggtatatcaatgaccttccgagaagatacaatggcgttcttagtagtaacgctgcttgatttctatagttggagtcatcacacagctaacatttgcactttaactgtttggtgaaatgcttgggagaaagaggccagcaagaatggagtcatggaacatcggcaggaggagtgcagcagcggcaaccgatgtatcccttgaacaatctggttttgacaagatgcaaatcaatctagtgtacattgtattccacacttgcaaagattgtttggctaattacaagattatttcagtgttttggtttggattaagagtacacttatgtatgaaatattgattggtactcatttatattatttttattatatcattattaaatatatatgtctgtgtatttctctttcaaattattataatgtggaatctca

SEQ ID NO: 201159 - DNA, 423 bp, Zea Mays
gagagcgcccgcatcctgaggaacctgttgcattcgctccacgtcaaggaggttccaggaaccaagcaggtagcgtgctctcacctctcagtcactgtatatggctaaatgttatcatgagatttaagagaaaaaaaacttcgcagttcacaagtgattactcaatgcagctcaatgcttctagaattaaagtccttcaagctcaggatgatttggtaacagatatgttgaagtcagcaagcaaagagctactgcgcataagtagagatcacctcacttacaagaagcttctcaagacacttattgttcagagtttgctgcgcctgaaagaaccagctgtgcttctgcgctgcaggaaggaggatctccaacttgttgatttagttttggagtctgcaaggaatgagtatgcaaataaagcaa

SEQ ID NO: 201160 - DNA, 734 bp, Zea Mays
gtttatgatgattctgatcatggttttgttcaatggtaccctggaacgggtgagttctacaagttctttgaggagagcatttataagggcttgttcagtttcatcagaatccatatccatatggattggaggggattgagtgagttttaatccatagcaagtcaaaattcttcataattttttccaatcccttccaatccatgagatataggaataaccgaacaaaaatgtgccggatgtggaactcccttatacaaatcatcgacaaagttcaactcaggtgtggctggccagcattctatgagggacttcctggggccataaaggcagacgccagacgaccctgatgggagccggacagagatcacatgtactgcccgtggaggacacttggggctcatattcaaaggggaggggtttaaaacgcctgccaacgagcgacactgtgttaatagcatttcgctcaagtttattccgtcccccaaggaagcctgactgcagatgagctctaatctggaactcaacaacagaataaatttggacttttgtttgttgcttccatgtgagagttatgagatgggatttgtcattcctctgaccattttgaatatgctgtaacaaattttcaatcgcaagtgctggtctttgttgataaaattattgtaccgcagtcttagaagaataggccatgtatctgctcatacaacaaatcaaataccatcataaagtcatcg

SEQ ID NO: 201161 - DNA, 2784 bp, Zea Mays
actcgccctactccccggtggggtacgtggactacctgcgccttcgccggcgcaccgccgcccgcgtgcgccgcgctcgcgctgtggctcgtggtgctcttctacctcctgggcgacacctaaaggatcacacaattgattcggcgatttgcactccacctgatgttgctttgctcgcaacttttgcttgccacgacggaggctagatccagctcctaggtgtccgtcgtccttccatctcccaccctccctcgttggagcacgagcaccaaaggtgcccagatcttcgtcggccctgcccctgcttccttcaactccaccaccaggtaatgccctggacttaattgaatgggctctcttctcaccaggatcggtgtcctgccatggctccacgccatgattgttgatcccgtgctgtaggtcatcagaaggggagcagaacccaagcaactagccttctctgctgcccttggtatcacgattgggatctttccgaaatattaggagcacctaaaggatcaactacgataaatgttttcagtgagtgtaccaaggccgaatcgtttcttccatttggttctggaagtcgagcatgtgttgggcagaagtttgttgttcttgcaatatcgatgttgattgccagtctgctccgcagctatgaggtatagcctcatccaagtttgtctaaagaaatggacacaacagttacagcagccaccttcatctcccaaaccctaagatcatcctcaccaaaagaaggatctgaagggagagtttggcaaacaaaaatctggcacgtttgctttcactgtattgtttttcactggtgttacatcagtatatgatctttagtttcctaccgtcgtttggaccatgctgaagtttggaaaggcgaccttggtgatgcagaagtgtcttttttcctctggatttttgacagaccctgtgtgcttcactggatctaagtttttgtcaggtttttggagcacccgcagggctgttagatcacaggagacgtatgttgatgtgtataaacagactcattttttcagttggggttttctcctctctgtggagaatgtaatgcccaacgcatgatgtttgtcgtgttgagatgttttttgatagttttttgcgtatgttgttgatattgattttattggatgtgaattcattcatcctttcatagtatatttgaattcatgatagtatctacatatgtacactgcttaaagatactatctacgtatctatatctattacaattttgtataaatactttttgatagtttttaatttgtatgacaaagcagagacacatacactgcttaaagatatgcgtctgagaacatcattgcatcatgccactgggcatacaagggtgttgaggaagactcaaccctagaaggtactactaatactagcaattacttttttaattaatgcctacattcctgttatgtagtatgcacatcggatttgtattgttgtcgtactattgatgcatgattttaacttgagggggcaagaatatgctaattaatttgtgtttatgttcttggtgcagatccctatttcttatatatcttatctctactattccattcacctctctctcctctcccacatttaaacgataaaaaatctaaaattatgcaaaaataaagattaataatttatgaaatatctagtcatggattttatactttgctctgtggcattaatcccttgtctggcattatctggtacttaaatacttaaagtatatatttttattccaaatgctacatacatatgtttttcagtcaacacaactccatctcgttttgtatttttcttagtgttcaatactatttggattctattaagtcagaaatagcaaagataacatagaaaggtggacttccaaatgcagaagcagttggaaaaattgtacatcttatgcaacttgatcaaactgttatattttagatcttttgtttagcattttttaatccacatgtatttctctatcatataaaactctatattgactctttaaaataatttatgtgaatttgataatgtctgtcacacggattctgtataccatagtgaattgatggttgagagactatgcatgaggcatgcaaattaacaagactcatacaagcagcgtcgaacagtgtgctgatgatgatcagagacacaagggcagcacatgatcaggtcttaacatgtttggcttccgaacaggcttttctccagatccccaagaaagaagaagaatatccggtcacatatgtgttgatgctcatccccaacatacataaattatcaatggtaccagcgagaggaaatcatatggctgcaccaagccaccaaaaaatcagttaccgtagtgaagaactttcattcatccaggcagtaaatgtatattagattggcagctgttattctgtaacatattatcacgttttttttcttttccctaagattgcagtagtaactatagtccgtgaaatcaaatctgagtttagagaatattttttctaaacttctgttctctatcatgtgtaaggataacttccttatgatatctcatatatcttttcaaatggttagccagctatttcaagtattaaatgatccagaagttgagaaaacacggttctattgatttcctagagacataaaaacagtacctaaatgcataatgatccccatgcttacctagtaccaaccaaataccagcaccattgtatacagataagaataaaagaagagagacaactttaatgcttg

SEQ ID NO: 201162 - DNA, 1925 bp, Zea Mays
cacaattgttagttttgcactccacctgaagtctaaagtgatgtgttgtgtacagtctaaagtccattttgtgtaggattcggcgatttgcactccacctgatgttgctttgctcgcaacttttgcttgccacgacggaggctagatccagctcctaggtgtccgtcgtccttccatctcccaccctccctcgttggagcacgagcaccaaaggtgcccagatcttcgtcggccctgcccctgcttccttcaactccaccaccaggggagcagaacccaagcaactagccttctctgctgcccttggtatcacgattgggatctttccgaaatattaggagcacctaaaggatcaactacgataaatgttttcagtgagtgtaccaaggccgaatcgtttcttccatttggttctggaagtcgagcatgtgttgggcagaagtttgttgttcttgcaatatcgatgttgattgccagtctgctccgcagctatgaggtatagcctcatccaagtttgtctaaagaaatggacacaacagttacagcagccaccttcatctcccaaaccctaagatcatcctcaccaaaagaaggatctgaagggagagtttggcaaacaaaaatctgagacacatacactgcttaaagatatgcgtctgagaacatcattgcatcatgccactgggcatacaagggtgttgaggaagactcaaccctagaaggtactactaatactagcaattacttttttaattaatgcctacattcctgttatgtagtatgcacatcggatttgtattgttgtcgtactattgatgcatgattttaacttgagggggcaagaatatgctaattaatttgtgtttatgttcttggtgcagatccctatttcttatatatcttatctctactattccattcacctctctctcctctcccacatttaaacgataaaaaatctaaaattatgcaaaaataaagattaataatttatgaaatatctagtcatggattttatactttgctctgtggcattaatcccttgtctggcattatctggtacttaaatacttaaagtatatatttttattccaaatgctacatacatatgtttttcagtcaacacaactccatctcgttttgtatttttcttagtgttcaatactatttggattctattaagtcagaaatagcaaagataacatagaaaggtggacttccaaatgcagaagcagttggaaaaattgtacatcttatgcaacttgatcaaactgttatattttagatcttttgtttagcattttttaatccacatgtatttctctatcatataaaactctatattgactctttaaaataatttatgtgaatttgataatgtctgtcacacggattctgtataccatagtgaattgatggttgagagactatgcatgaggcatgcaaattaacaagactcatacaagcagcgtcgaacagtgtgctgatgatgatcagagacacaagggcagcacatgatcaggtcttaacatgtttggcttccgaacaggcttttctccagatccccaagaaagaagaagaatatccggtcacatatgtgttgatgctcatccccaacatacataaattatcaatggtattatatatttccgttgcgacgcacggacacacacctagtaattatatatgtctgctcaactcctttaaacaactaacataaaacatcttcaatacgaaagttctaaattgtttcccacgcacgcaaggcgcgcgcactttactagttaatgaccatctctacctgtccaagacgaaaatttctgccattagtcgtagagacaatttcgaccgtggctgcatgattgttgacggcttctaaccgtagtgactgcaccatcaatcgtcatatgtgagtaaaatcgggg

SEQ ID NO: 201163 - DNA, 1510 bp, Zea Mays
actcgccctactccccggtggggtacgtggactacctgcgccttcgccggcgcaccgccgcccgcgtgcgccgcgctcgcgctgtggctcgtggtgctcttctacctcctgggcgacacctaaaggatcacacaattgattcggcgatttgcactccacctgatgttgctttgctcgcaacttttgcttgccacgacggaggctagatccagctcctaggtgtccgtcgtccttccatctcccaccctccctcgttggagcacgagcaccaaaggtccctataccccgtaccgcccttacctctgctctccttttcttctcttctcctgttcacccctcatgccataactgggcgtccgtcgctcccgccctatgccaggtgcccagatcttcgtcggccctgcccctgcttccttcaactccaccaccaggtaatgccctggacttaattgaatgggctctcttctcaccaggatcggtgtcctgccatggctccacgccatgattgttgatcccgtgctgtaggtcatcagaaggggagcagaacccaagcaactagccttctctgctgcccttggtatcacgattgggatctttccgaaatattaggagcacctaaaggatcaactacgataaatgttttcagtgagtgtaccaaggccgaatcgtttcttccatttggttctggaagtcgagcatgtgttgggcagaagtttgttgttcttgcaatatcgatgttgattgccagtctgctccgcagctatgaggtatagcctcatccaagtttgtctaaagaaatggacacaacagttacagcagccaccttcatctcccaaaccctaagatcatcctcaccaaaagaaggatctgaagggagagtttggcaaacaaaaatctgagacacatacactgcttaaagatatgcgtctgagaacatcattgcatcatgccactgggcatacaagggtgttgaggaagactcaaccctagaagtgaattgatggttgagagactatgcatgaggcatgcaaattaacaagactcatacaagcagcgtcgaacagtgtgctgatgatgatcagagacacaagggcagcacatgatcaggtcttaacatgtttggcttccgaacaggcttttctccagatccccaagaaagaagaagaatatccggtcacatatgtgttgatgctcatccccaacatacataaattatcaatggtattatatatttccgttgcgacgcacggacacacacctagtaattatatatgtctgctcaactcctttaaacaactaacataaaacatcttcaatacgaaagttctaaattgtttcccacgcacgcaaggcgcgcgcactttactagttaatgaccatctctacctgtccaagacgaaaatttctgccattagtcgtagagacaatttcgaccgtggctgcatgattgttgacggcttctaaccgtagtgactgcaccatcaatcgtcatatgtgagtaaaatcgggg

SEQ ID NO: 201164 - DNA, 2813 bp, Zea Mays
actcgccctactccccggtggggtacgtggactacctgcgccttcgccggcgcaccgccgcccgcgtgcgccgcgctcgcgctgtggctcgtggtgctcttctacctcctgggcgacacctaaaggatcacacaattgattcggcgatttgcactccacctgatgttgctttgctcgcaacttttgcttgccacgacggaggctagatccagctcctaggtgtccgtcgtccttccatctcccaccctccctcgttggagcacgagcaccaaaggtgcccagatcttcgtcggccctgcccctgcttccttcaactccaccaccaggtaatgccctggacttaattgaatgggctctcttctcaccaggatcggtgtcctgccatggctccacgccatgattgttgatcccgtgctgtaggtcatcagaaggggagcagaacccaagcaactagccttctctgctgcccttggtatcacgattgggatctttccgaaatattaggagcacctaaaggatcaactacgataaatgttttcagtgagtgtaccaaggccgaatcgtttcttccatttggttctggaagtcgagcatgtgttgggcagaagtttgttgttcttgcaatatcgatgttgattgccagtctgctccgcagctatgaggttagatgcactggtagcttctcgttgtgacacccacacctcttaatttgttctacacattgcccttctacagattgacacacacctcatcatgagtgagtgtgccaaggccggatcatttcttctatagattgcccttttcagtatgatctgtgttttaactttttaaacttctgatgttatttggaactcgatctctcaggtatagcctcatccaagtttgtctaaagaaatggacacaacagttacagcagccaccttcatctcccaaaccctaagatcatcctcaccaaaagaaggatctgaagggagagtttggcaaacaaaaatctggcacgtttgctttcactgtattgtttttcactggtgttacatcagtatatgatctttagtttcctaccgtcgtttggaccatgctgaagtttggaaaggcgaccttggtgatgcagaagtgtcttttttcctctggatttttgacagaccctgtgtgcttcactggatctaagtttttgtcaggtttttggagcacccgcagggctgttagatcacaggagacgtatgttgatgtgtataaacagactcattttttcagttggggttttctcctctctgtggagaatgtaatgcccaacgcatgatgtttgtcgtgttgagatgttttttgatagttttttgcgtatgttgttgatattgattttattggatgtgaattcattcatcctttcatagtatatttgaattcatgatagtatctacatatgtacactgcttaaagatactatctacgtatctatatctattacaattttgtataaatactttttgatagtttttaatttgtatgacaaagcagagacacatacactgcttaaagatatgcgtctgagaacatcattgcatcatgccactgggcatacaagggtgttgaggaagactcaaccctagaaggtactactaatactagcaattacttttttaattaatgcctacattcctgttatgtagtatgcacatcggatttgtattgttgtcgtactattgatgcatgattttaacttgagggggcaagaatatgctaattaatttgtgtttatgttcttggtgcagatccctatttcttatatatcttatctctactattccattcacctctctctcctctcccacatttaaacgataaaaaatctaaaattatgcaaaaataaagattaataatttatgaaatatctagtcatggattttatactttgctctgtggcattaatcccttgtctggcattatctggtacttaaatacttaaagtatatatttttattccaaatgctacatacatatgtttttcagtcaacacaactccatctcgttttgtatttttcttagtgttcaatactatttggattctattaagtcagaaatagcaaagataacatagaaaggtggacttccaaatgcagaagcagttggaaaaattgtacatcttatgcaacttgatcaaactgttatattttagatcttttgtttagcattttttaatccacatgtatttctctatcatataaaactctatattgactctttaaaataatttatgtgaatttgataatgtctgtcacacggattctgtataccatagtgaattgatggttgagagactatgcatgaggcatgcaaattaacaagactcatacaagcagcgtcgaacagtgtgctgatgatgatcagagacacaagggcagcacatgatcaggtcttaacatgtttggcttccgaacaggcttttctccagatccccaagaaagaagaagaatatccggtcacatatgtgttgatgctcatccccaacatacataaattatcaatggtattatatatttccgttgcgacgcacggacacacacctagtaattatatatgtctgctcaactcctttaaacaactaacataaaacatcttcaatacgaaagttctaaattgtttcccacgcacgcaaggcgcgcgcactttactagttaatgaccatctctacctgtccaagacgaaaatttctgccattagtcgtagagacaatttcgaccgtggctgcatgattgttgacggcttctaaccgtagtgactgcaccatcaatcgtcatatgtgagtaaaatcgggg

SEQ ID NO: 201165 - DNA, 3530 bp, Zea Mays
cgctagggcgaggcgacctcgccgtctccaccccgccaccgcctgcttcacgccgcgctccctgctccgcgtcgcctttattatagtctgatgccactacgcccgccaaggcacctgccaatccctcctctttcaactcaaaatccccacaccccgggcaggcgccccgccgcgggaacagggagactactacagcaggcggggtccgggggccgagagcttctcgccgcggccgcagtcgtccgggaccgaggtggggcgccctcctgcgccggctcgtgtgcttccgccgcctcgtccacaggcttctggttcaattgaatgatcacaggcatggagcggaatggcgagagccacctcaaggacccgcttctgccgacgacatctggcgcctctcctgctggggcgtctccaaggaaggagaggaagacgaggaaggtcctgttcagtgtccggggcatctcctgcgcttcttgtgccgtgtcgattgagaccgttgtggccggcttgaacggggtggagagcatccaggtctcctcacttcagggccaggccgtggttcagtacaggccagaggaaactgatgcaagaaccataaaagaagctattgaggacctcaactttgaggttgatgaacttcaagaacaagaaattgctgtgtgcagactacgcataaaaggaatggcttgtacaagctgttctgaatctgttgaacgggcgcttcaaatggtacctggagttaagaaagctgcagtgggtcttgctctagaggaagccaaggtccattacgatccaaatgtcactagtcgtgatcgcataattgaagctgttgaagatgctggatttggtgccgatctcattagttctggggatgatgtgaacaaagtgcatctaaagcttgagggtgtgaattctccagaagacaccatactcatccagtctgtactggaagctgtggaaggggtgaacaatgttgaatgggacacagttgagcagacaatagaagttgcatatgatcctgatttcactggtccaagattacttattcagtgcattcaggacactgcacagccccctaaatgctttaatgttaccttgcactcaccaccaaagcaaagagaagcagagcgcaatcatgaaattaggaattacaggaaccaatttctttggagctgcctgttttcggttcctgtattcctgttctccatggttcttcctatgctttctccttttggggattggttggagtacagaatctgcaacaacatgacaataggcatgctactacggtggttgctgtgttccccagttcagtttattgttggttggagattttatgttggagcctatcatgcactcaaacgaggatactcaaacatggatgtgctggttgctttgggaacaaatgctgcttacttctattctgtgtatattgttctgaaagcacttacatcagactcatttgaaggccaggacttctttgaaactagcgctatgttgatatcttttatattgctgggaaaatatctcgagatagtggcaaagggaaagacatcagatgcgttgtcgaaattgacagagcttgcaccagaaacagcgtgccttcttactttggacaaggacggaaatgccatttcagaaacagagatcagcactcaattacttcagagaaatgatgtcatcaagattgtgcctggcaccaaagttcctgttgacggcgttgtcataaaaggtcaaagccatgtcaatgaaagtatgataactggggaagcaaggcctattgcaaagaaaccaggcgacagggttattgggggtactgtaaatgataacggttgcataattgttaaggcgactcatgttgggtcagaaacagctttgtcgcaaatagtccagttggttgaagctgctcaacttgcaagagctccagtgcagaagttagcagacaagatttcacgtttttttgttccaactgtggtggtggctgcatttcttacatggcttggctggttcatacctgggcaacttcacctctacccccagcaatggatcccaaaggccatggatagttttgagcttgctttgcagtttggaatttctgtcctagttgtcgcatgcccatgtgctttgggacttgctacaccaactgctgttatggttgcaactggtaaaggtgcttctcaaggtgttctcattaagggtggaaatgcacttgagaaagctcataagattaaggctatcatatttgataaaactggaacgctgacagttggtaaaccttctgtcgttcaaacaaaggtcttctcaaagataccacttctagaactctgtgatctggctgctggtgctgaggcaaacagcgagcatcctctatcaaaagctatcgttgagcacacaaagaagctcaaggaacaatatggatctcacagtgatcacatgatggaatctagggactttgaggtgcatccaggagcaggtgtcagtgcccatatcgaaggcaggctggttttggttggaaacaaaaggctgatgcaggaatttgaagttccgttgagtcctgaggtggaggcgtacatgtccgaaacagaagagcttgctaggacctgcgtacttgttgctatcgataagatcatctgtggggccctcgctgtttcggatcctctgaagcctaaggcaggccaagtcatttcttaccttaagtcaatgggcatctccagtatcatggtgaccggtgataattgggctaccgcaaaatcaattgcaaaggaagttgggatcagccaggtgtttgccgagatcgacccagtgggaaaagctgaaaagatcaaagacttgcagatgcaagggttgacggtggcaatggttggcgatggggtaaacgactccccagcattggcggcggcagacgtgggcatggcgatcggtgctggcacagacgtggccatcgaggctgctgacatcgttctaatgaagagcaaccttgaggacgtcatcaccgccattgatctctcgcgcaagaccctctccaggatccggctgaactacgtgtgggccctgggctacaacgtcctgggcatgccgatcgccgccggcgtcctgttccctttcacgggcatccggctgcccccttggctcgccggggcatgcatggctgcctcgtcggtgagcgtcgtctgctcctccctgctcctccagctctacaagaaaccgctgcacgttgaagacgcgcccaggcccagggaggactcagatttggtgtgactgcgagtgaggactgatccctcgatctcgatgtgtactaacgagagcttgctggcgtcactgatgcttaacgagccaacacctgatcgatccgtgtacagcaagcaacacgttttggaacagttcgccaattgattgtgcaataattcaagacaaggtttataactttatatgatactagtacaatgacagcacataatcatagattttttttcggaaattacaagaaaacatttgctcttttgccataacatacaatcgagatagaaatg

SEQ ID NO: 201166 - DNA, 1121 bp, Zea Mays
aggaagcccacttgcagtgcgggcgcggatgtgcatttcccttttcaacccacttgcagtgtcgactgggctaccgcggtattaccgccgccgccgccgccgccctacgccggttaccgaggtcttcgtcagccccttcgccggcggcgagcaccctttaggcaggtaggagcggctccgatgcggaccgcctaagatgagcccattacgttctcgcgtcggcttacactggctcccacgccgtgggtggatgtttcgccaggccaagacgagcatccatgcttgtcgcgactggtgctgatgcctggttgcaggcctttggcggaccgacgttgcttcctcgggtcaaggttttggcctctcacgaagaggatgccaggaaagagaatgacatggtggaggagattctaatccccaagcaaacaattggtggcaattggtttgttccgtttcgtgctccatgagacatgcagctcaccttcgtcgtcgctccctccgtcaaagctttgctccactacctatggcaaagagttggataaagtgactggtcaaaagagatggaagggttctcaaattagcgctgctacctcaggtatggcagaattatcaaaacaggcacttggctctacggaggattgtctgctcgagtctctgatgggttgcttggcatctccctcttctcttggagctggcgggagggggccccacatacagggaacttgagctacctgcctgttgattgatatcttacttccacagaaagtttgagaaagagaggaagtcgatttgcgttttgcatggaatcattctttaccgggggaaccatttcacatttggtatgtgcctgtttggtggaatgcgttagcatgtatctaaacttgtgcgatgggatttaaacctatcaataagctactttatccattgtacctagaagtatctttgtaccttacatctaaaagtttagcatcttagattcaaatgcatcactaaacttaggccctgtttgatttagtttttttctgaggaacttttctgagaatttgggtaggaagaatctgagtatcgtgtaaattacatgtagaggaagataaaagaatccatagggtttagtacgtagaaaa

SEQ ID NO: 201167 - DNA, 1320 bp, Zea Mays
aggaagcccacttgcagtgcgggcgcggatgtgcatttcccttttcaacccacttgcagtgtcgactgggctaccgcggtattaccgccgccgccgccgccgccctacgccggttaccgaggtcttcgtcagccccttcgccggcggcgagcaccctttaggccaagacgagcatccatgcttgtcgcgactggtgctgatgcctggttgcaggcctttggcggaccgacgttgcttcctcgggtcaaggttttggcctctcacgaagaggatgccaggaaagagaatgacatggtggaggagattctaatccccaaggtaagacgtttgacatggtggaggagattctaatccccaaggcaagacgttcgccgggttttgcaggtgctcgtcggtcggagttaatttattttcgtgtatacacccgacgttggttaatttaatatccagtctacgcaagttggcaggaggacatgagaaaaatgtgctagaaattgtgttccgtggatttcagtgtgctgattctatttagtttttgccaatggatttcataccccatgtcctaattgtgtgccacttcttttgcttatggaatttccacggccaaattgcttctagcaaacaattggtggcaattggtttgttccgtttcgtgctccatgagacatgcagctcaccttcgtcgtcgctccctccgtcaaagctttgctccactacctatggcaaagagttggataaagtgactggtcaaaagagatggaagggttctcaaattagcgctgctacctcaggtatggcagaattatcaaaacaggcacttggctctacggaggattgtctgctcgagtctctgatgggttgcttggcatctccctcttctcttggagctggcgggagggggccccacatacagggaacttgagctacctgcctgttgattgatatcttacttccacagaaagtttgagaaagagaggaagtcgatttgcgttttgcatggaatcattctttaccgggggaaccatttcacatttggtatgtgcctgtttggtggaatgcgttagcatgtatctaaacttgtgcgatgggatttaaacctatcaataagctactttatccattgtacctagaagtatctttgtaccttacatctaaaagtttagcatcttagattcaaatgcatcactaaacttaggccctgtttgatttagtttttttctgaggaacttttctgagaatttgggtaggaagaatctgagtatcgtgtaaattacatgtagaggaagataaaagaatccatagggtttagtacgtagaaaa

SEQ ID NO: 201168 - DNA, 1312 bp, Zea Mays
aggaagcccacttgcagtgcgggcgcggatgtgcatttcccttttcaacccacttgcagtgtcgactgggctaccgcggtattaccgccgccgccgccgccgccctacgccggttaccgaggtcttcgtcagccccttcgccggcggcgagcaccctttaggttggtgatagaggcaggtaggagcggctccgatgcggaccgcctaagatgagcccattacgttctcgcgtcggcttacactggctcccacgccgtgggtggatgtttcgccaggccaagacgagcatccatgcttgtcgcgactggtgctgatgcctggttgcaggcctttggcggaccgacgttgcttcctcgggtcaaggttttggcctctcacgaagaggatgccaggaaagagaatgacatggtggaggagattctaatccccaaggtaagacgtttgacatggtggaggagattctaatccccaaggcaagacgttcgccgggttttgcagcaaacaattggtggcaattggtttgttccgtttcgtgctccatgagacatgcagctcaccttcgtcgtcgctccctccgtcaaagctttgctccactacctatggcaaagagttggataaagtgactggtcaaaagagacgtggtgttattaactatgacacaagtttgtgcttggtctacccatatatttcaactctgaagtgtctacttattcatctaaacaaggcgtcacatatttacagcccacagatggaagggttctcaaattagcgctgctacctcaggtatggcagaattatcaaaacaggcacttggctctacggaggattgtctgctcgagtctctgatgggttgcttggcatctccctcttctcttggagctggcgggagggggccccacatacagggaacttgagctacctgcctgttgattgatatcttacttccacagaaagtttgagaaagagaggaagtcgatttgcgttttgcatggaatcattctttaccgggggaaccatttcacatttggtatgtgcctgtttggtggaatgcgttagcatgtatctaaacttgtgcgatgggatttaaacctatcaataagctactttatccattgtacctagaagtatctttgtaccttacatctaaaagtttagcatcttagattcaaatgcatcactaaacttaggccctgtttgatttagtttttttctgaggaacttttctgagaatttgggtaggaagaatctgagtatcgtgtaaattacatgtagaggaagataaaagaatccatagggtttagtacgtagaaaa

SEQ ID NO: 201169 - DNA, 1338 bp, Zea Mays
aggaagcccacttgcagtgcgggcgcggatgtgcatttcccttttcaacccacttgcagtgtcgactgggctaccgcggtattaccgccgccgccgccgccgccctacgccggttaccgaggtcttcgtcagccccttcgccggcggcgagcaccctttaggttggtgatagaggcaggtaggagcggctccgatgcggaccgcctaagatgagcccattacgttctcgcgtcggcttacactggctcccacgccgtgggtggatgtttcgccaggccaagacgagcatccatgcttgtcgcgactggtgctgatgcctggttgcaggcctttggcggaccgacgttgcttcctcgggtcaaggttttggcctctcacgaagaggatgccaggaaagagaatgacatggtggaggagattctaatccccaaggtaagacgtttgacatggtggaggagattctaatccccaaggcaagacgttcgccgggttttgcaggtgctcgtcggtcggagttaatttattttcgtgtatacacccgacgttggttaatttaatatccagtctacgcaagttggcaggaggacatgagaaaaatgtgctagaaattgtgttccgtggatttcagtgtgctgattctatttagtttttgccaatggatttcataccccatgtcctaattgtgtgccacttcttttgcttatggaatttccacggccaaattgcttctagcaaacaattggtggcaattggtttgttccgtttcgtgctccatgagacatgcagctcaccttcgtcgtcgctccctccgtcaaagctttgctccactacctatggcaaagagttggataaagtgactggtcaaaagagatggaagggttctcaaattagcgctgctacctcagctggcgggagggggccccacatacagggaacttgagctacctgcctgttgattgatatcttacttccacagaaagtttgagaaagagaggaagtcgatttgcgttttgcatggaatcattctttaccgggggaaccatttcacatttggtatgtgcctgtttggtggaatgcgttagcatgtatctaaacttgtgcgatgggatttaaacctatcaataagctactttatccattgtacctagaagtatctttgtaccttacatctaaaagtttagcatcttagattcaaatgcatcactaaacttaggccctgtttgatttagtttttttctgaggaacttttctgagaatttgggtaggaagaatctgagtatcgtgtaaattacatgtagaggaagataaaagaatccatagggtttagtacgtagaaaa

SEQ ID NO: 201170 - DNA, 1243 bp, Zea Mays
cgagagaaatgtgcttgcagttttttaccgtgctcccttcttccattccatgcttcctttttcttgcatgaatggtacccgactcggatggctcaatgagttgaaataatatgacgttgtagtatactggatataggttatagagtgattatgggtcagccatgaatttttagaccaacaatttgcatttaagctgattatttggtgcataaagatatgtttataggataagtcagaaggaacaatttttggaatgctatatttacacaggttggtgatagaggcaggtaggagcggctccgatgcggaccgcctaagatgagcccattacgttctcgcgtcggcttacactggctcccacgccgtgggtggatgtttcgccaggccaagacgagcatccatgcttgtcgcgactggtgctgatgcctggttgcaggcctttggcggaccgacgttgcttcctcgggtcaaggttttggcctctcacgaagaggatgccaggaaagagaatgacatggtggaggagattctaatccccaagcaaacaattggtggcaattggtttgttccgtttcgtgctccatgagacatgcagctcaccttcgtcgtcgctccctccgtcaaagctttgctccactacctatggcaaagagttggataaagtgactggtcaaaagagatggaagggttctcaaattagcgctgctacctcaggtatggcagaattatcaaaacaggcacttggctctacggaggattgtctgctcgagtctctgatgggttgcttggcatctccctcttctcttggagctggcgggagggggccccacatacagggaacttgagctacctgcctgttgattgatatcttacttccacagaaagtttgagaaagagaggaagtcgatttgcgttttgcatggaatcattctttaccgggggaaccatttcacatttggtatgtgcctgtttggtggaatgcgttagcatgtatctaaacttgtgcgatgggatttaaacctatcaataagctactttatccattgtacctagaagtatctttgtaccttacatctaaaagtttagcatcttagattcaaatgcatcactaaacttaggccctgtttgatttagtttttttctgaggaacttttctgagaatttgggtaggaagaatctgagtatcgtgtaaattacatgtagaggaagataaaagaatccatagggtttagtacgtagaaaa

SEQ ID NO: 201171 - DNA, 638 bp, Zea Mays
aaagaacttagaagtcaacagatgttggtggtttgaggggtacaagaaatacaccattggaagagatagtagcggcattcttacacacactggctcatcatgtgaaaaatagaacaatagggggtttcttcttaaggagtggtgagatagtgagcagaaacttcaatgcatgccgcctagcagtattgaagcttcaccaattgctccttaagaaaccagaacctatacctgagggctgcacagactttggatggaagcacttcaagagttgcttgggtgcattggatggcacacatgtaaaggtgactatcccaactaagctgaaggggagatataggtcaagaaaaggagaaattgtgacaaatgtgttgggtgtttgtgcacctgacatgcagtttatatatgtcttacctggttgggagggttctgcacatgacgggcgtgtgctttgagatgccatcttgaggccggatggattacgtgtccctcaaggttgctattatcttgttgatgctggttacacaaatgcaaatggtttcttagcaccatatcgaggacagaggtatcatctaggaggtttcactactcaaaacccaccacatagtgctgaggagtacttcaacttgtgccatgctaga

SEQ ID NO: 201172 - DNA, 1696 bp, Zea Mays
tccaaattttctgaggtggagcagtccccgcttggcggcttgtctagagaactcacccgccgccacgcgcgaacgcaaccagcgacgcctcgcggccgcggacagcgcggagccagacgcctcgcattcgctgagaagccgaagcccgtagagcacaggagttgtggacttctagagcacggcgggtctggtatgagaggcttccgctttgcgttggtccgtgcggcgcggtcgcggtcgcgggcggagcaccagaccgtgcagcgccgccggccgtccgatgtggcccaacgtttttcccacaccgcgccggcgccggcgaggccatctttcggcatcgcgttcgacatcgatggggtcatcctgcgcggccgaagtccgatcgggggcgcgccgcgggccatccgacgcctatattccgaagaaggtaccctgaagatcccgtttctgtttttaacgaatggaggaggtgttccagagcacagaagggcccttgagctaagccaacttttaggagtcaatatttctccaacacaggttgtgcatggacattctccttacagagagctggtgaagcgttttgaagatgaccttattgttgctgttggaaaaggagagcctgcagtagtgatgtccgcgtacggatttagaaaagttctgtccatagatgaatatgcatcatattataaagatattgacccccttgctcctttcaagacttggaaagttgggcaaacagacagtcacatgtctgcaaaagtgcacccatcatatgatgtttattcagagcgagttaaaggagtatttgttgtcagcgatcctgtcgattggggaagagatctacagctgatgatcttgaataccaggcagcatttccttctgagcggcttgggatgggcgccttcaggatagctttggaaagcatcttcaatgaaataaatgatcatccactgaagtatacatcttatgggaaacctaatccatttgtgttcaagaatgcagcaaacatacttgaaaaacttgttatgagtatgtatcctaattcacagacaccaatggaaggaaaagattatcagttttcaactatttacatggttggagataatcctaaagtggatatcaatggagctatgaaggctggccacccatggtcatctgttcttacaaggacgggtgtttttaggggaaaggataacgacccacagtttcctgcagatgtggttgttgatactgttgaagatgccatcaactatattctggagaaggaacgtatacagtgatgataccatgtatgctcccttgatcattatcatttgacatgcttgacaagacaagatgtagccctttttttttggtctagtaaatttataatccttggctggaactggaggtcgactcttagaactccacctcgtgaacagtgcagtctacagtataaaataatgtttttgttaaactataggtagactgttgcaaacagctttattcgttctgccaacaaatacacgttagagtcagcaagacatattttattgcattttttgggtcctgaagagggtatttattactatgtgtacaaaggctaaggcaggctccacgcagtggaaccaaaactgaaatgagcgtcgcttgtaatagatgttcttgtttccatgtagaatatttgcttctcgggctgctctttacttgttcgaag

SEQ ID NO: 201173 - DNA, 1785 bp, Zea Mays
tccaaattttctgaggtggagcagtccccgcttggcggcttgtctagagaactcacccgccgccacgcgcgaacgcaaccagcgacgcctcgcggccgcggacagcgcggagccagacgcctcgcattcgctgagaagccgaagcccgtagagcacaggagttgtggacttctagagcacggcgggtctggtatgagaggcttccgctttgcgttggtccgtgcggcgcggtcgcggtcgcgggcggagcaccagaccgtgcagcgccgccggccgtccgatgtggcccaacgtttttcccacaccgcgccggcgccggcgaggccatctttcggcatcgcgttcgacatcgatggggtcatcctgcgcggccgaagtccgatcgggggcgcgccgcgggccatccgacgcctatattccgaagaaggtaccctgaagatcccgtttctgtttttaacgaatggaggaggtgttccagagcacagaagggcccttgagctaagccaacttttaggagtcaatatttctccaacacaggttgtgcatggacattctccttacagagagctggtgaagcggtgtgcctttcaattttgaagatgaccttattgttgctgttggaaaaggagagcctgcagtagtgatgtccgcgtacggatttagaaaagttctgtccatagatgaatatgcatcatattataaagatattgacccccttgctcctttcaagacttggaaagttgggcaaacagacagtcacatgtctgcaaaagtgcacccatcatatgatgtttattcagagcgagttaaaggagtatttgttgtcagcgatcctgtcgattggggaagagatctacaggtactctgtgacatcttgtctactcatggacttcctgggactgaaaaaggtgatcaacctcctttgtattttgcagctgatgatcttgaataccaggcagcatttccttctgagcggcttgggatgggcgccttcaggatagctttggaaagcatcttcaatgaaataaatgatcatccactgaagtatacatcttatgggaaacctaatccatttgtgttcaagaatgcagcaaacatacttgaaaaacttgttatgagtatgtatcctaattcacagacaccaatggaaggaaaagattatcagttttcaactatttacatggttggagataatcctaaagtggatatcaatggagctatgaaggctggccacccatggtcatctgttcttacaaggacgggtgtttttaggggaaaggataacgacccacagtttcctgcagatgtggttgttgatactgttgaagatgccatcaactatattctggagaaggaacgtatacagtgatgataccatgtatgctcccttgatcattatcatttgacatgcttgacaagacaagatgtagccctttttttttggtctagtaaatttataatccttggctggaactggaggtcgactcttagaactccacctcgtgaacagtgcagtctacagtataaaataatgtttttgttaaactataggtagactgttgcaaacagctttattcgttctgccaacaaatacacgttagagtcagcaagacatattttattgcattttttgggtcctgaagagggtatttattactatgtgtacaaaggctaaggcaggctccacgcagtggaaccaaaactgaaatgagcgtcgcttgtaatagatgttcttgtttccatgtagaatatttgcttctcgggctgctctttacttgttcgaag

SEQ ID NO: 201174 - DNA, 1834 bp, Zea Mays
tccaaattttctgaggtggagcagtccccgcttggcggcttgtctagagaactcacccgccgccacgcgcgaacgcaaccagcgacgcctcgcggccgcggacagcgcggagccagacgcctcgcattcgctgagaagccgaagcccgtagagcacaggagttgtggacttctagagcacggcgggtctggtatgagaggcttccgctttgcgttggtccgtgcggcgcggtcgcggtcgcgggcggagcaccagaccgtgcagcgccgccggccgtccgatgtggcccaacgtttttcccacaccgcgccggcgccggcgaggccatctttcggcatcgcgttcgacatcgatggggtcatcctgcgcggccgaagtccgatcgggggcgcgccgcgggccatccgacgcctatattccgaagaaggtaccctgaagatcccgtttctgtttttaacgaatggaggaggtgttccagagcacagaagggcccttgagctaagccaacttttaggagtcaatatttctccaacacaggttgtgcatggacattctccttacagagagctggtgaagcgttttgaagatgaccttattgttgctgttggaaaaggagagcctgcagtagtgatgtccgcgtacggatttagaaaagttctgtccatagatgaatatgcatcatattataaagatattgacccccttgctcctttcaagacttggaaagttgggcaaacagacagtcacatgtctgcaaaagtgcacccatcatatgatgtttattcagagcgagttaaaggagtatttgttgtcagcgatcctgtcgattggggaagagatctacaggtactctgtgacatcttgtctactcatggacttcctgggactgaaaaaggtgatcaacctcctttgtattttgcagctgatgatcttgaataccaggttcagtaatactaagataaccattgcactggaagaaacttagttttgagatcctatggcaggcagcatttccttctgagcggcttgggatgggcgccttcaggatagctttggaaagcatcttcaatgaaataaatgatcatccactgaagtatacatcttatgggaaacctaatccatttgtgttcaagaatgcagcaaacatacttgaaaaacttgttatgagtatgtatcctaattcacagacaccaatggaaggaaaagattatcagttttcaactatttacatggttggagataatcctaaagtggatatcaatggagctatgaaggctggccacccatggtcatctgttcttacaaggacgggtgtttttaggggaaaggataacgacccacagtttcctgcagatgtggttgttgatactgttgaagatgccatcaactatattctggagaaggaacgtatacagtgatgataccatgtatgctcccttgatcattatcatttgacatgcttgacaagacaagatgtagccctttttttttggtctagtaaatttataatccttggctggaactggaggtcgactcttagaactccacctcgtgaacagtgcagtctacagtataaaataatgtttttgttaaactataggtagactgttgcaaacagctttattcgttctgccaacaaatacacgttagagtcagcaagacatattttattgcattttttgggtcctgaagagggtatttattactatgtgtacaaaggctaaggcaggctccacgcagtggaaccaaaactgaaatgagcgtcgcttgtaatagatgttcttgtttccatgtagaatatttgcttctcgggctgctctttacttgttcgaag

SEQ ID NO: 201175 - DNA, 1736 bp, Zea Mays
tccaaattttctgaggtggagcagtccccgcttggcggcttgtctagagaactcacccgccgccacgcgcgaacgcaaccagcgacgcctcgcggccgcggacagcgcggagccagacgcctcgcattcgctgagaagccgaagcccgtagagcacaggagttgtggacttctagagcacggcgggtctggtatgagaggcttccgctttgcgttggtccgtgcggcgcggtcgcggtcgcgggcggagcaccagaccgtgcagcgccgccggccgtccgatgtggcccaacgtttttcccacaccgcgccggcgccggcgaggccatctttcggcatcgcgttcgacatcgatggggtcatcctgcgcggccgaagtccgatcgggggcgcgccgcgggccatccgacgcctatattccgaagaaggaggaggtgttccagagcacagaagggcccttgagctaagccaacttttaggagtcaatatttctccaacacaggttgtgcatggacattctccttacagagagctggtgaagcgttttgaagatgaccttattgttgctgttggaaaaggagagcctgcagtagtgatgtccgcgtacggatttagaaaagttctgtccatagatgaatatgcatcatattataaagatattgacccccttgctcctttcaagacttggaaagttgggcaaacagacagtcacatgtctgcaaaagtgcacccatcatatgatgtttattcagagcgagttaaaggagtatttgttgtcagcgatcctgtcgattggggaagagatctacaggtactctgtgacatcttgtctactcatggacttcctgggactgaaaaaggtgatcaacctcctttgtattttgcagctgatgatcttgaataccaggcagcatttccttctgagcggcttgggatgggcgccttcaggatagctttggaaagcatcttcaatgaaataaatgatcatccactgaagtatacatcttatgggaaacctaatccatttgtgttcaagaatgcagcaaacatacttgaaaaacttgttatgagtatgtatcctaattcacagacaccaatggaaggaaaagattatcagttttcaactatttacatggttggagataatcctaaagtggatatcaatggagctatgaaggctggccacccatggtcatctgttcttacaaggacgggtgtttttaggggaaaggataacgacccacagtttcctgcagatgtggttgttgatactgttgaagatgccatcaactatattctggagaaggaacgtatacagtgatgataccatgtatgctcccttgatcattatcatttgacatgcttgacaagacaagatgtagccctttttttttggtctagtaaatttataatccttggctggaactggaggtcgactcttagaactccacctcgtgaacagtgcagtctacagtataaaataatgtttttgttaaactataggtagactgttgcaaacagctttattcgttctgccaacaaatacacgttagagtcagcaagacatattttattgcattttttgggtcctgaagagggtatttattactatgtgtacaaaggctaaggcaggctccacgcagtggaaccaaaactgaaatgagcgtcgcttgtaatagatgttcttgtttccatgtagaatatttgcttctcgggctgctctttacttgttcgaag

SEQ ID NO: 201176 - DNA, 1709 bp, Zea Mays
tccaaattttctgaggtggagcagtccccgcttggcggcttgtctagagaactcacccgccgccacgcgcgaacgcaaccagcgacgcctcgcggccgcggacagcgcggagccagacgcctcgcattcgctgagaagccgaagcccgtagagcacaggagttgtggacttctagagcacggcgggtctggtatgagaggcttccgctttgcgttggtccgtgcggcgcggtcgcggtcgcgggcggagcaccagaccgtgcagcgccgccggccgtccgatgtggcccaacgtttttcccacaccgcgccggcgccggcgaggccatctttcggcatcgcgttcgacatcgatggggtcatcctgcgcggccgaagtccgatcgggggcgcgccgcgggccatccgacgcctatattccgaagaaggtaccctgaagatcccgtttctgtttttaacgaatggaggaggtgttccagagcacagaagggcccttgagctaagccaacttttaggagtcaatatttctccaacacaggttgtgcatggacattctccttacagagagctggtgaagcggtgtgcctttcaattttgaagatgaccttattgttgctgttggaaaaggagagcctgcagtagtgatgtccgcgtacggatttagaaaagttctgtccatagatgaatatgcatcatattataaagatattgacccccttgctcctttcaagacttggaaagttgggcaaacagacagtcacatgtctgcaaaagtgcacccatcatatgatgtttattcagagcgagttaaaggagtatttgttgtcagcgatcctgtcgattggggaagagatctacagctgatgatcttgaataccaggcagcatttccttctgagcggcttgggatgggcgccttcaggatagctttggaaagcatcttcaatgaaataaatgatcatccactgaagtatacatcttatgggaaacctaatccatttgtgttcaagaatgcagcaaacatacttgaaaaacttgttatgagtatgtatcctaattcacagacaccaatggaaggaaaagattatcagttttcaactatttacatggttggagataatcctaaagtggatatcaatggagctatgaaggctggccacccatggtcatctgttcttacaaggacgggtgtttttaggggaaaggataacgacccacagtttcctgcagatgtggttgttgatactgttgaagatgccatcaactatattctggagaaggaacgtatacagtgatgataccatgtatgctcccttgatcattatcatttgacatgcttgacaagacaagatgtagccctttttttttggtctagtaaatttataatccttggctggaactggaggtcgactcttagaactccacctcgtgaacagtgcagtctacagtataaaataatgtttttgttaaactataggtagactgttgcaaacagctttattcgttctgccaacaaatacacgttagagtcagcaagacatattttattgcattttttgggtcctgaagagggtatttattactatgtgtacaaaggctaaggcaggctccacgcagtggaaccaaaactgaaatgagcgtcgcttgtaatagatgttcttgtttccatgtagaatatttgcttctcgggctgctctttacttgttcgaag

SEQ ID NO: 201177 - DNA, 1753 bp, Zea Mays
tccaaattttctgaggtggagcagtccccgcttggcggcttgtctagagaactcacccgccgccacgcgcgaacgcaaccagcgacgcctcgcggccgcggacagcgcggagccagacgcctcgcattcgctgagaagccgaagcccgtagagcacaggagttgtggacttctagagcacggcgggtctggtatgagaggcttccgctttgcgttggtccgtgcggcgcggtcgcggtcgcgggcggagcaccagaccgtgcagcgccgccggccgtccgatgtggcccaacgtttttcccacaccgcgccggcgccggcgaggccatctttcggcatcgcgttcgacatcgatggggtcatcctgcgcggccgaagtccgatcgggggcgcgccgcgggccatccgacgcctatattccgaagaaggtaccctgaagatcccgtttctgtttttaacgaatggaggaggtgttccagagcacagaagggcccttgagctaagccaacttttaggagtcaatatttctccaacacaggttgtgcatggacattctccttacagagagctggtgaagcgttttgaagatgaccttattgttgctgttggaaaaggagagcctgcagtagtgatgtccgcgtacggatttagaaaagttctgtccatagatgaatatgcatcatattataaagatattgacccccttgctcctttcaagacttggaaagttgggcaaacagacagtcacatgtctgcaaaagtgcacccatcatatgatgtttattcagagcgagttaaaggagtatttgttgtcagcgatcctgtcgattggggaagagatctacaggtactctgtgacatcttgtctactcatggacttcctgggactgaaaaaggtgatcaacctcctttgtattttgcagctgatgatcttgaataccaggtatgatgatatgttaagaatggtgctatattgtgaacaccctacaggccaaattttctcttatttccatccaggttcagtaatactaagataaccattgcactggaagaaacttagttttgagatcctatggcaggcagcatttccttctgagcggcttgggatgggcgccttcaggatagctttggaaagcatcttcaatgaaataaatgatcatccactgaagtatacatcttatgggaaacctaatccatttgtgttcaagaatgcagcaaacatacttgaaaaacttgttatgagtatgtatcctaattcacagacaccaatggaaggaaaagattatcagttttcaactatttacatggttggagataatcctaaagtggatatcaatggagctatgaaggctggccacccatggtcatctgttcttacaaggacgggtgtttttaggggaaaggataacgacccacagtttcctgcagatgtggttgttgatactgttgaagatgccatcaactatattctggagaaggaacgtatacagtgatgataccattgaatatgctggagtgtcatgagatataaattggcactgtcatttcagaaactctgacagtaaaaggggaagtccacttatgcactgacagaactcaagcattcaaataagttgtaacaatcgaagcagagttagaaattcttctggatagctagagagactcgcttattcaatgtgcacaatatcttgattgtatgaacattcacttgctctggaatcacatccacgtaaccatctgtttggtgtgtgcta

SEQ ID NO: 201178 - DNA, 1856 bp, Zea Mays
tgtaggagtagatttgacattacactttagttgctgagaacaaacattgctctctacatcttttgtgctctgtccctcagaagacagtttgtttgtatatcttccttggatgaaaatggcaaacaagacagctgcaactaagaaggctgcaattcgggcttcaaaacttttcatattgggtgtgattttgcaagggggatacattcatggacgacacaaattaacttatggtgttgatttggatcatattcgatggctaggtgtgttgcagaggatagctattggatactttgtagcagcaatgtcagagatttggcttgtcaacaataatttggtggattcacctgtaccatttgtgaagaaatacttcatagagtggttcatggccatagctattacagtactttatgttgccttggtatttggcctttatgttgcaaactgggaatttgaaattcaaactagcaattcaaccctttctatcccaagcaattcaattgaaacaaagatgatccaatgtggagtcagaggtagtcttggaccaccttgcaatgcagttggcttggtagatcgagttttgcttggtgaaaatcacctatataagaacccagtctacaaaaggacaaaggaatgcagtattaattctcctgattatggaccacttcctccgaatgcaccagattggtgtctggctccatttgatcctgagggtttattaagtacgctgatggctgtggttacttgttttgttggtttgttctttggacatgttttaattcattgcaagaatcattcacagcgaatgctaatatggctgctagcttctgtggtgctgacaatctctgcgtatttagtgctattattaggcatgccttttagcaagcctttgtatacagtgaactacatgctactcactggaggagtatctgggttcttgttgctgctgttgtactacatagttgatgttattcatattaagaagcccttcgtactattccaatggatgggcatgaacgcacttatagtctatgttctcgctgcttgtgagctattccccacccttattcaagggttttattggcggtcacctgagaacaacctggtggatgttactgaatccctgctccaggccatcttccagtcgaaacgatggggcaccttggtgttcgtcctcctagagatagtcttttggtgcttggccgccggcttcctgcacatgaaaggcgtttacttgaaactgtagaaccaaatcgtggacagttctctgatggaacggaattgacgtcctgcaaacattggtggaaggcccggtatccctgttttttctgtaaatgcaacgcgattctggaaccatgggtgtagcggttgattacaggacgttgtggtcccaaggtcctccaactcatccgcctccatgcacaccaggaaaacatcttgctgaaagtcacaagcgtttcaccacgtgaagacccagtctgatggtctttcagttgtttggtaaaactgtttctgttttcctgcagaaatcatttctagtttctagtgattttggaaaccaggatgtttctgtttatcacttgtaatcttgggtaaatctcaaaaacgtagtgtattttgctaatgattccacgatgaagtgagtgagtggacatgtacacagtagacagtatgaaagtatgtatgaaccgtcgatcaccgtataatccatctactccaactcattgcagtgaaatgctgtgttgtacctccaagttctggcctctcaggcatgtacatatcaatggaaaatgctgtaccgtttaatttcatggcatgagtatggccattgaattgaaatgccagaactcttaacaaca

SEQ ID NO: 201179 - DNA, 2489 bp, Zea Mays
atcacaatgccacgccggatgccaagtctctcaaatctggaatcctttcacgccgccactctcccctttttccttctctcttcgtcgttgtggctcctgccttcctgcctcggcgcatcgactcgcggagagggacagcacagcgcctcctccccatcctttctccattcccagatcgaaggtccatacctgaaattcgagagatgtaggaagtttagaacacgagtcagaaaaaaccatccttttgcatctgattgagcactgtctttgtgcaagagaacaatttagttgtacatacaaacaaaaagaagtgggagtatttttcagagtttattagaagagactgtttcgaggacccaggtcagagaaaggcgagaagctttagcagcggcaatggtctggtcaatggacccgcaggtgaccgtccacggcgactgggtgtcagccgtggtgccgctgatgaagctgctgtgcctggcggtgatcggcctgctcctcgccaacccgcgggtccaggtcgtgcccagggccaccttcaagctcctgagcaagctcgtcttcgcgctcttcctcccctgcctcatcttcgtccacctcggcaagtcggtcaccatagacaacgtcctgcactggtggttcatccccgtcaacgtgctcatcagcactgccatcgggtgcgcccttgggtacatcgtggccctgatctgccgcccgccgccgcacctgttccggtttacggtgatcatgaccgggttcggtaacacggggaacctcccgatcgcgatcatcgggtcagtctgccacaccaacgaccaccccttcggccctgggtgcgacaccatgggcatcgcctatgtctcgttcgcgcagtgggttgcggtcattcttgtgtacactctggtctaccacatgatggagccaccgatgcagttctacgagatcgtcggggaagggaatgagatacagcaggaacccgagctggtcagcaactacagtaggtccctgcttcatgaggcggagtggccagggatggtcgacaaggaaactgagcattcgaagacaccgttcatcgcgagagttttcatgagcatttcaggttcctcacagaacacgttccctgacatcgatttcaccgaagaaggaacttctgcagctggaccaagcagtcctaagtcgctccgatgtctggcagagccaagagtggtcaggaggattagggttgtcgccgagaagactccgatccagcacgtccttcagcccccgacgatcgcctctttgcttgccattaccatcggcatggttcctgtcctgaaagattttgttttcggggctgatgcgccgctctcgttcttcaccgacagtttggagatcctagccgctgctgtggttccgtcggtgatgttgattctcggaggcatgctcgcggaaggcccaaaagacaacgccttgggcatgaggactatcatcggtatcattgtggccaggctcttggttctcccatgcattggcatcggtgttgtgaccctggcagacaggttgcatctgctcgtggaggaaaaccatatgtaccgctttgtgctctccctgcagtactccaccccgagtgctatcctgcttggagcgatcgccagtctcagaggctatggcgtcaaggaagcatccgcccttctgttctggcagcatatttgtgcggtgttctctctttcactctacctggttgtatacttcaagttgttttctttcatatgaagacaatggccatccatccatccatccatccagttctggcatatatacgtagctatcaagtaggatgctagaagaatgggttttcggcatcggctcctatcagtcagaagtgtttataattcggtagttatttaagtttcagttgtgtgtgttgtttgtgaacaggagatacagacagttattgtctgttcatttcggtcgatatattgatgtgtattttcatgatgctattgttgtatgcaaatcattacctggataaaattagtagaccaggatagactgatagtagtgaataacatggttgcctgatggtcaatatatgaagatgatcagtgttcagtcttctcgtggaagacccaaatcaggcgaccttgctacatgacatcaaggatgtgattcatttgtgtcaattgactttcagcattcctcctagactgtgcattcagatggattacccctttgccccgaaggagcaaataaccatttgctttggcatgggaaattctctctgtatgttcttttgattgaaggtttgggctgaggctatctttaaggctgtctcgtcgtcagagtgaagtttgaaataaaagatgagataaaagatagtatgagtaaactgctagagatagcctaacaatttatatggatcttcatgtgctgctaacatatgattttcaaaggttgttatggaacaatgttcttcctttttcgttttgtgaatgcacacatcgaacattgac

SEQ ID NO: 201180 - DNA, 4224 bp, Zea Mays
ctgaagactccaaaaaaacgcgattttctcctccactgcccctccttttctctttccaatcgttttgcaatcactacgagcgtaatgaatagaagttgatagggagatagcatccgcaatctaggtttggggcaatcgctctggccagactggatcggagtgcaagtcgtagagggaggcacttggggctcgtggggcaagatgagcaccgttgacaagatgctgatcaaggggattcggagcttcgatccggacaataagaacgtcatcaccttcttcaagccgctcaccctcatcgttggccccaacggtgctggcaagaccacgatcatcgagtgcctgaagctttcttgcaccggcgagctgccccccaactcccgctctggccacaccttcgtccacgaccccaaggtagctggcgagacggaaacaaaaggacaaattaagttgcggtttaagactgcagcaggaaaggatgtggtgtgcatccggtccttccagcttacccaaaaggcatcaaagatggagtttaaggcaattgaaagcgtcctccagactataaatccacacacaggggagaaagtctgcctcagctacagatgtgctgacatggatagagagattcctgccttaatgggtgtttcgaaggccgtactggagaatgttatatttgttcaccaagatgaatccaattggccattgcaggacccgtcaacacttaagaagaagttcgatgacatcttctctgccacacgctatacgaaagctcttgaagtcataaagaaacttcacaaggatcaaatgcaagagatcaagacttttaggttaaagctggagaaccttcagactgtaaaagaccaagcacataagctgcgtgaaaatattgctcaagatcaagaaaagtcagatgcctcaaaatctcagatggagcaactgaaggaaaagatctgtggtaccgagagagaaatcctgcaaatggaaacaagtttggatgaactgagaagacttcagggacaaattgacatcaaggcaacagagagaagtacattacttacgcagcagcatgaaaagcttgctgcactttctgaggaaaatgaagataccgatgaggaactaatggaatggcaaacaaaatttgaagaaaggattgcgttactagaaacaaaaatcagtaaacttgtaagagatatggatgatgaagcatcttatagctccgttctgtccaaacaaaattctgaattaacacatgaaattggaaagctccaggcagaagctgatgctcacctgactatgaagcatgaacgagactcagacataaaaaatatatgcactaaacataatcttgggccggttcctgaacatccctttacgaatgatgttgctatgaaccttacaaacaggattaaagcgagactatcaagtcttgagaatgatttgctggataagaagaaatccaatgaagatcagttagatgttttgtggaaacactatcttaaaataaatgctcgctactccgaagttgatggtcagatacaatctaagattgaatccatgtcaggcattttaagacggagaaaagataaagagaaagaacgcgatgctgcagaagtggagctttcaaaatttaatctatcccgtatcgatgagagggagagacatatgcaaattgaagtcgagaggaagacacttgcgcttggagaaagagactatgattcaattataagtcagaaacgaacagaagtatatagtttggaacagaaaataaaagtgcttctgcgggagaaagatataataaatagaaatgctgatgaaagagtaaaactgggtttgaagaaggatgcattggaaagcagcaaggacaagctcaatgagatagttaatgagcataaggataaaatcaaaaaggtacttagggggaggaatccttttgagaaggatatgaagaaggagatcaatcaagccttttggcctgtggacaaggaatacaatgagttaagatcaaaatcccaggaagcagagcaagagcttaaatttactcacagcaaagtaactgatgctagagaacaattgacaaaacttcgaagagatatggatgcaaaaagaagattcctggactcgaaacttcaatctattttacagatatctgctaatgttgacatgtttcccaaagttctacaagacgccatgaacaaaagagatgaacagaaaagattagagaatttcgcaaatggaatgcgggaaatgcttgcaccttttgaacatttggctcggaagaatcatgtatgcccatgctgtgaacgtgctttcacacctgatgaggaggatgagttcgtgaagaaacaaaggatgcaaaactcaagtactgcagagagatctaaagctctggcaatggaatcatcaaatgctgaagctctttttcagcaattggataaacttcggactatctatgatgcttatgtgaagctggtagaagaaaccatacctctagcagagaaaaacttgaatcaacatttggcggatgaaagtcagaaggcgcaggcatttgatgatcttttgggtgttcttgcccatgttcaaatggacagggatgcagtggaagccttattacaacccactgatactattgacaggcatgtacatgaaattcaacagctagtcaaagaagtagaagatcttgaatatgcacttgattctagtggccgaggtgtcaagtctttggaggaaattcaactggagctgaactttctgcagagaacaagggacacattgattgtcgaagtggatgatcttagagatcaacatagaatgctaaatgaagatatgtcaagtgctcaggtgagatggcacaatgctcgggaagagaaagtgaaagcttctagcatattggaaagattccaaaaatctgaagaggaattggtgcttctagctgaggaaaaagaacaactgattgtagaaaagaagcttttagaagagtctcttgatccattgtccaaagagaaagagagcttgttgcaagagtataatgctttgaagcaaaagctggatgaagagtatcatcagcttgcagaaagaaaaagggagttccagcaagaacttgatgctcttggaagacttagtatgaagataaaagggtacttggattccaagaaaaacgaaaagcttaaggaattgcagggaaggcatgttctttgccattctcagttacagagttgcatggcaaaacagcaaagaatatcagctgagttaaacaagagcaaagaactactgcagggccagggccagttgaaaagaaacattgatgacaatctcaagtacaggaaaacaaaggctgatgtggaacaacttactcgtgatatagaatcacttgaagaaaggctgctttcaataggtagcttgtctgctatagaagctgatctgaaacgccattctcaagaaaaagagaggcttaattcagaatttaacaggtggcaaggaacactttctgtttatcaaagtaatatttcaaagcacaaacaagagcttaaactgtcacagtacaaggatatcgagaagcgatatactaatcaatttctccagcttaagacaactgaaatggcaaacaaggacttggacagatattatactgctttagacaaggctcttatgcggttccacagcatgaagatggaggagataaataaaataatcaaggaactgtggcaacagacatacagaggccaggatattgattacataagcataaattctgattctgagggtgctggcactcgatcatacagctaccgcgttgttatgcaaactggtgatgctgagctggaaatgcgagggcgctgcagtgctggtcagaaggttcttgcttctcttataatcagactagcacttgcggaaactttctgcctgaactgcggtatattggctttggatgagccaactacgaatctagatgggccaaatgcagagagtcttgctgctgcgctgttgagaataatggaagccaggaaagggcaggagaacttccagttgattgtaatcactcatgatgagagatttgcccatcttatcggtcaaaggcagcttgctgagaagtactatcgagtctccaaggatgagaagtacctacgagtacgatggaacacaacggcatgtttctgcgtcgttggagccgttggattcgcttcaacatttgtaaggttgtctcttaacgtatgatgcttgtgcaatgac

SEQ ID NO: 201181 - DNA, 4036 bp, Zea Mays
ttcagaaattgagaactgtggttaatgtagctggcgagacggaaacaaaaggacaaattaagttgcggtttaagactgcagcaggaaaggatgtggtgtgcatccggtccttccagcttacccaaaaggcatcaaagatggagtttaaggcaattgaaagcgtcctccagactataaatccacacacaggggagaaagtctgcctcagctacagatgtgctgacatggatagagagattcctgccttaatgggtgtttcgaaggccgtactggagaatgttatatttgttcaccaagatgaatccaattggccattgcaggacccgtcaacacttaagaagaagttcgatgacatcttctctgccacacgctatacgaaagctcttgaagtcataaagaaacttcacaaggatcaaatgcaagagatcaagacttttaggttaaagctggagaaccttcagactgtaaaagaccaagcacataagctgcgtgaaaatattgctcaagatcaagaaaagtcagatgcctcaaaatctcagatggagcaactgaaggaaaagatctgtggtaccgagagagaaatcctgcaaatggaaacaagtttggatgaactgagaagacttcagggacaaattgacatcaaggcaacagagagaagtacattacttacgcagcagcatgaaaagcttgctgcactttctgaggaaaatgaagataccgatgaggaactaatggaatggcaaacaaaatttgaagaaaggattgcgttactagaaacaaaaatcagtaaacttgtaagagatatggatgatgaagcatcttatagctccgttctgtccaaacaaaattctgaattaacacatgaaattggaaagctccaggcagaagctgatgctcacctgactatgaagcatgaacgagactcagacataaaaaatatatgcactaaacataatcttgggccggttcctgaacatccctttacgaatgatgttgctatgaaccttacaaacaggattaaagcgagactatcaagtcttgagaatgatttgctggataagaagaaatccaatgaagatcagttagatgttttgtggaaacactatcttaaaataaatgctcgctactccgaagttgatggtcagatacaatctaagattgaatccatgtcaggcattttaagacggagaaaagataaagagaaagaacgcgatgctgcagaagtggagctttcaaaatttaatctatcccgtatcgatgagagggagagacatatgcaaattgaagtcgagaggaagacacttgcgcttggagaaagagactatgattcaattataagtcagaaacgaacagaagtatatagtttggaacagaaaataaaagtgcttctgcgggagaaagatataataaatagaaatgctgatgaaagagtaaaactgggtttgaagaaggatgcattggaaagcagcaaggacaagctcaatgagatagttaatgagcataaggataaaatcaaaaaggtacttagggggaggaatccttttgagaaggatatgaagaaggagatcaatcaagccttttggcctgtggacaaggaatacaatgagttaagatcaaaatcccaggaagcagagcaagagcttaaatttactcacagcaaagtaactgatgctagagaacaattgacaaaacttcgaagagatatggatgcaaaaagaagattcctggactcgaaacttcaatctattttacagatatctgctaatgttgacatgtttcccaaagttctacaagacgccatgaacaaaagagatgaacagaaaagattagagaatttcgcaaatggaatgcgggaaatgcttgcaccttttgaacatttggctcggaagaatcatgtatgcccatgctgtgaacgtgctttcacacctgatgaggaggatgagttcgtgaagaaacaaaggatgcaaaactcaagtactgcagagagatctaaagctctggcaatggaatcatcaaatgctgaagctctttttcagcaattggataaacttcggactatctatgatgcttatgtgaagctggtagaagaaaccatacctctagcagagaaaaacttgaatcaacatttggcggatgaaagtcagaaggcgcaggcatttgatgatcttttgggtgttcttgcccatgttcaaatggacagggatgcagtggaagccttattacaacccactgatactattgacaggcatgtacatgaaattcaacagctagtcaaagaagtagaagatcttgaatatgcacttgattctagtggccgaggtgtcaagtctttggaggaaattcaactggagctgaactttctgcagagaacaagggacacattgattgtcgaagtggatgatcttagagatcaacatagaatgctaaatgaagatatgtcaagtgctcaggtgagatggcacaatgctcgggaagagaaagtgaaagcttctagcatattggaaagattccaaaaatctgaagaggaattggtgcttctagctgaggaaaaagaacaactgattgtagaaaagaagcttttagaagagtctcttgatccattgtccaaagagaaagagagcttgttgcaagagtataatgctttgaagcaaaagctggatgaagagtatcatcagcttgcagaaagaaaaagggagttccagcaagaacttgatgctcttggaagacttagtatgaagataaaagggtacttggattccaagaaaaacgaaaagcttaaggaattgcagggaaggcatgttctttgccattctcagttacagagttgcatggcaaaacagcaaagaatatcagctgagttaaacaagagcaaagaactactgcagggccagggccagttgaaaagaaacattgatgacaatctcaagtacaggaaaacaaaggctgatgtggaacaacttactcgtgatatagaatcacttgaagaaaggctgctttcaataggtagcttgtctgctatagaagctgatctgaaacgccattctcaagaaaaagagaggcttaattcagaatttaacaggtggcaaggaacactttctgtttatcaaagtaatatttcaaagcacaaacaagagcttaaactgtcacagtacaaggatatcgagaagcgatatactaatcaatttctccagcttaagacaactgaaatggcaaacaaggacttggacagatattatactgctttagacaaggctcttatgcggttccacagcatgaagatggaggagataaataaaataatcaaggaactgtggcaacagacatacagaggccaggatattgattacataagcataaattctgattctgagggtgctggcactcgatcatacagctaccgcgttgttatgcaaactggtgatgctgagctggaaatgcgagggcgctgcagtgctggtcagaaggttcttgcttctcttataatcagactagcacttgcggaaactttctgcctgaactgcggtatattggctttggatgagccaactacgaatctagatgggccaaatgcagagagtcttgctgctgcgctgttgagaataatggaagccaggaaagggcaggagaacttccagttgattgtaatcactcatgatgagagatttgcccatcttatcggtcaaaggcagcttgctgagaagtactatcgagtctccaaggatgagaaccagcacagcataattgaatcccaagagatatttgactaagggtgttctaggaggctgtagcacgcactcgtttgctagtcgaatccagttaatttatgccaagtactggtgccagagcaatgttaacaagctttaggaggctctgttacgccgttacgtcagttgcgtgaaacctatccttcgttgttgtatacttatttaatctggccagaggatggaatgtgtgcactgggtgatggatgtttcacgacatcaatgaatgtttcacaatctagcatccgttttttttgcttcacatgatgtcatac

SEQ ID NO: 201182 - DNA, 4282 bp, Zea Mays
aaaaacgcgattttctcctccactgcccctccttttctctttccaatcgttttgcaatcactacgagcgtaatgaatagaagttgatagggagatagcatccgcaatctaggtttggggcaatcgctctggccagactggatcggagtgcaagtcgtagagggaggcacttggggctcgtggggcaagatgagcaccgttgacaagatgctgatcaaggggattcggagcttcgatccggacaataagaacgtcatcaccttcttcaagccgctcaccctcatcgttggccccaacggtgctggcaagaccacgatcatcgagtgcctgaagctttcttgcaccggcgagctgccccccaactcccgctctggccacaccttcgtccacgaccccaaggtagctggcgagacggaaacaaaaggacaaattaagttgcggtttaagactgcagcaggaaaggatgtggtgtgcatccggtccttccagcttacccaaaaggcatcaaagatggagtttaaggcaattgaaagcgtcctccagactataaatccacacacaggggaggacccgtcaacacttaagaagaagttcgatgacatcttctctgccacacgctatacgaaagctcttgaagtcataaagaaacttcacaaggatcaaatgcaagagatcaagacttttaggttaaagctggagaaccttcagactgtaaaagaccaagcacataagctgcgtgaaaatattgctcaagatcaagaaaagtcagatgcctcaaaatctcagatggagcaactgaaggaaaagatctgtggtaccgagagagaaatcctgcaaatggaaacaagtttggatgaactgagaagacttcagggacaaattgacatcaaggcaacagagagaagtacattacttacgcagcagcatgaaaagcttgctgcactttctgaggaaaatgaagataccgatgaggaactaatggaatggcaaacaaaatttgaagaaaggattgcgttactagaaacaaaaatcagtaaacttgtaagagatatggatgatgaagcatcttatagctccgttctgtccaaacaaaattctgaattaacacatgaaattggaaagctccaggcagaagctgatgctcacctgactatgaagcatgaacgagactcagacataaaaaatatatgcactaaacataatcttgggccggttcctgaacatccctttacgaatgatgttgctatgaaccttacaaacaggattaaagcgagactatcaagtcttgagaatgatttgctggataagaagaaatccaatgaagatcagttagatgttttgtggaaacactatcttaaaataaatgctcgctactccgaagttgatggtcagatacaatctaagattgaatccatgtcaggcattttaagacggagaaaagataaagagaaagaacgcgatgctgcagaagtggagctttcaaaatttaatctatcccgtatcgatgagagggagagacatatgcaaattgaagtcgagaggaagacacttgcgcttggagaaagagactatgattcaattataagtcagaaacgaacagaagtatatagtttggaacagaaaataaaagtgcttctgcgggagaaagatataataaatagaaatgctgatgaaagagtaaaactgggtttgaagaaggatgcattggaaagcagcaaggacaagctcaatgagatagttaatgagcataaggataaaatcaaaaaggtacttagggggaggaatccttttgagaaggatatgaagaaggagatcaatcaagccttttggcctgtggacaaggaatacaatgagttaagatcaaaatcccaggaagcagagcaagagcttaaatttactcacagcaaagtaactgatgctagagaacaattgacaaaacttcgaagagatatggatgcaaaaagaagattcctggactcgaaacttcaatctattttacagatatctgctaatgttgacatgtttcccaaagttctacaagacgccatgaacaaaagagatgaacagaaaagattagagaatttcgcaaatggaatgcgggaaatgcttgcaccttttgaacatttggctcggaagaatcatgtatgcccatgctgtgaacgtgctttcacacctgatgaggaggatgagttcgtgaagaaacaaaggatgcaaaactcaagtactgcagagagatctaaagctctggcaatggaatcatcaaatgctgaagctctttttcagcaattggataaacttcggactatctatgatgcttatgtgaagctggtagaagaaaccatacctctagcagagaaaaacttgaatcaacatttggcggatgaaagtcagaaggcgcaggcatttgatgatcttttgggtgttcttgcccatgttcaaatggacagggatgcagtggaagccttattacaacccactgatactattgacaggcatgtacatgaaattcaacagctagtcaaagaagtagaagatcttgaatatgcacttgattctagtggccgaggtgtcaagtctttggaggaaattcaactggagctgaactttctgcagagaacaagggacacattgattgtcgaagtggatgatcttagagatcaacatagaatgctaaatgaagatatgtcaagtgctcaggtgagatggcacaatgctcgggaagagaaagtgaaagcttctagcatattggaaagattccaaaaatctgaagaggaattggtgcttctagctgaggaaaaagaacaactgattgtagaaaagaagcttttagaagagtctcttgatccattgtccaaagagaaagagagcttgttgcaagagtataatgctttgaagcaaaagctggatgaagagtatcatcagcttgcagaaagaaaaagggagttccagcaagaacttgatgctcttggaagacttagtatgaagataaaagggtacttggattccaagaaaaacgaaaagcttaaggaattgcagggaaggcatgttctttgccattctcagttacagagttgcatggcaaaacagcaaagaatatcagctgagttaaacaagagcaaagaactactgcagggccagggccagttgaaaagaaacattgatgacaatctcaagtacaggaaaacaaaggctgatgtggaacaacttactcgtgatatagaatcacttgaagaaaggctgctttcaataggtagcttgtctgctatagaagctgatctgaaacgccattctcaagaaaaagagaggcttaattcagaatttaacaggtggcaaggaacactttctgtttatcaaagtaatatttcaaagcacaaacaagagcttaaactgtcacagtacaaggatatcgagaagcgatatactaatcaatttctccagcttaagacaactgaaatggcaaacaaggacttggacagatattatactgctttagacaaggctcttatgcggttccacagcatgaagatggaggagataaataaaataatcaaggaactgtggcaacagacatacagaggccaggatattgattacataagcataaattctgattctgagggtgctggcactcgatcatacagctaccgcgttgttatgcaaactggtgatgctgagctggaaatgcgagggcgctgcagtgctggtcagaaggttcttgcttctcttataatcagactagcacttgcggaaactttctgcctgaactgcggtatattggctttggatgagccaactacgaatctagatgggccaaatgcagagagtcttgctgctgcgctgttgagaataatggaagccaggaaagggcaggagaacttccagttgattgtaatcactcatgatgagagatttgcccatcttatcggtcaaaggcagcttgctgagaagtactatcgagtctccaaggatgagaaccagcacagcataattgaatcccaagagatatttgactaagggtgttctaggaggctgtagcacgcactcgtttgctagtcgaatccagttaatttatgccaagtactggtgccagagcaatgttaacaagctttaggaggctctgttacgccgttacgtcagttgcgtgaaacctatccttcgttgttgtatacttatttaatctggccagaggatggaatgtgtgcactgggtgatggatgtttcacgacatcaatgaatgtttcacaatctagcatccgttttttttgcttcacatgatgtcatac

SEQ ID NO: 201183 - DNA, 4318 bp, Zea Mays
agactccaaaaaaacgcgattttctcctccactgcccctccttttctctttccaatcgttttgcaatcactacgagcgtaatgaatagaagttgatagggagatagcatccgcaatctaggtttggggcaatcgctctggccagactggatcggagtgcaagtcgtagagggaggcacttggggctcgtggggcaagatgagcaccgttgacaagatgctgatcaaggggattcggagcttcgatccggacaataagaacgtcatcaccttcttcaagccgctcaccctcatcgttggccccaacggtgctggcaagaccacgatcatcgagtgcctgaagctttcttgcaccggcgagctgccccccaactcccgctctggccacaccttcgtccacgaccccaaggtagctggcgagacggaaacaaaaggacaaattaagttgcggtttaagactgcagcaggaaaggatgtggtgtgcatccggtccttccagcttacccaaaaggcatcaaagatggagtttaaggcaattgaaagcgtcctccagactataaatccacacacaggggagaaagtctgcctcagctacagatgtgctgacatggatagagagattcctgccttaatgggtgtttcgaaggccgtactggagaatgttatatttgttcaccaagatgaatccaattggccattgcaggacccgtcaacacttaagaagaagttcgatgacatcttctctgccacacgctatacgaaagctcttgaagtcataaagaaacttcacaaggatcaaatgcaagagatcaagacttttaggttaaagctggagaaccttcagactgtaaaagaccaagcacataagctgcgtgaaaatattgctcaagatcaagaaaagtcagatgcctcaaaatctcagatggagcaactgaaggaaaagatctgtggtaccgagagagaaatcctgcaaatggaaacaagtttggatgaactgagaagacttcagggacaaattgacatcaaggcaacagagagaagtacattacttacgcagcagcatgaaaagcttgctgcactttctgaggaaaatgaagataccgatgaggaactaatggaatggcaaacaaaatttgaagaaaggattgcgttactagaaacaaaaatcagtaaacttgctcacctgactatgaagcatgaacgagactcagacataaaaaatatatgcactaaacataatcttgggccggttcctgaacatccctttacgaatgatgttgctatgaaccttacaaacaggattaaagcgagactatcaagtcttgagaatgatttgctggataagaagaaatccaatgaagatcagttagatgttttgtggaaacactatcttaaaataaatgctcgctactccgaagttgatggtcagatacaatctaagattgaatccatgtcaggcattttaagacggagaaaagataaagagaaagaacgcgatgctgcagaagtggagctttcaaaatttaatctatcccgtatcgatgagagggagagacatatgcaaattgaagtcgagaggaagacacttgcgcttggagaaagagactatgattcaattataagtcagaaacgaacagaagtatatagtttggaacagaaaataaaagtgcttctgcgggagaaagatataataaatagaaatgctgatgaaagagtaaaactgggtttgaagaaggatgcattggaaagcagcaaggacaagctcaatgagatagttaatgagcataaggataaaatcaaaaaggtacttagggggaggaatccttttgagaaggatatgaagaaggagatcaatcaagccttttggcctgtggacaaggaatacaatgagttaagatcaaaatcccaggaagcagagcaagagcttaaatttactcacagcaaagtaactgatgctagagaacaattgacaaaacttcgaagagatatggatgcaaaaagaagattcctggactcgaaacttcaatctattttacagatatctgctaatgttgacatgtttcccaaagttctacaagacgccatgaacaaaagagatgaacagaaaagattagagaatttcgcaaatggaatgcgggaaatgcttgcaccttttgaacatttggctcggaagaatcatgtatgcccatgctgtgaacgtgctttcacacctgatgaggaggatgagttcgtgaagaaacaaaggatgcaaaactcaagtactgcagagagatctaaagctctggcaatggaatcatcaaatgctgaagctctttttcagcaattggataaacttcggactatctatgatgcttatgtgaagctggtagaagaaaccatacctctagcagagaaaaacttgaatcaacatttggcggatgaaagtcagaaggcgcaggcatttgatgatcttttgggtgttcttgcccatgttcaaatggacagggatgcagtggaagccttattacaacccactgatactattgacaggcatgtacatgaaattcaacagctagtcaaagaagtagaagatcttgaatatgcacttgattctagtggccgaggtgtcaagtctttggaggaaattcaactggagctgaactttctgcagagaacaagggacacattgattgtcgaagtggatgatcttagagatcaacatagaatgctaaatgaagatatgtcaagtgctcaggtgagatggcacaatgctcgggaagagaaagtgaaagcttctagcatattggaaagattccaaaaatctgaagaggaattggtgcttctagctgaggaaaaagaacaactgattgtagaaaagaagcttttagaagagtctcttgatccattgtccaaagagaaagagagcttgttgcaagagtataatgctttgaagcaaaagctggatgaagagtatcatcagcttgcagaaagaaaaagggagttccagcaagaacttgatgctcttggaagacttagtatgaagataaaagggtacttggattccaagaaaaacgaaaagcttaaggaattgcagggaaggcatgttctttgccattctcagttacagagttgcatggcaaaacagcaaagaatatcagctgagttaaacaagagcaaagaactactgcagggccagggccagttgaaaagaaacattgatgacaatctcaagtacaggaaaacaaaggctgatgtggaacaacttactcgtgatatagaatcacttgaagaaaggctgctttcaataggtagcttgtctgctatagaagctgatctgaaacgccattctcaagaaaaagagaggcttaattcagaatttaacaggtggcaaggaacactttctgtttatcaaagtaatatttcaaagcacaaacaagagcttaaactgtcacagtacaaggatatcgagaagcgatatactaatcaatttctccagcttaagacaactgaaatggcaaacaaggacttggacagatattatactgctttagacaaggctcttatgcggttccacagcatgaagatggaggagataaataaaataatcaaggaactgtggcaacagacatacagaggccaggatattgattacataagcataaattctgattctgagggtgctggcactcgatcatacagctaccgcgttgttatgcaaactggtgatgctgagctggaaatgcgagggcgctgcagtgctggtcagaaggttcttgcttctcttataatcagactagcacttgcggaaactttctgcctgaactgcggtatattggctttggatgagccaactacgaatctagatgggccaaatgcagagagtcttgctgctgcgctgttgagaataatggaagccaggaaagggcaggagaacttccagttgattgtaatcactcatgatgagagatttgcccatcttatcggtcaaaggcagcttgctgagaagtactatcgagtctccaaggatgagaaccagcacagcataattgaatcccaagagatatttgactaagggtgttctaggaggctgtagcacgcactcgtttgctagtcgaatccagttaatttatgccaagtactggtgccagagcaatgttaacaagctttaggaggctctgttacgccgttacgtcagttgcgtgaaacctatccttcgttgttgtatacttatttaatctggccagaggatggaatgtgtgcactgggtgatggatgtttcacgacatcaatgaatgtttcacaatctagcatccgttttttttgcttcacatgatgtcatac

SEQ ID NO: 201184 - DNA, 4459 bp, Zea Mays
aagaaccctaaccggtacaaaaccctaaaaaccctaacgccgctgaagactccaaaaaaacgcgattttctcctccactgcccctccttttctctttccaatcgttttgcaatcactacgagcgtaatgaatagaagttgatagggagatagcatccgcaatctaggtttggggcaatcgctctggccagactggatcggagtgcaagtcgtagagggaggcacttggggctcgtggggcaagatgagcaccgttgacaagatgctgatcaaggggattcggagcttcgatccggacaataagaacgtcatcaccttcttcaagccgctcaccctcatcgttggccccaacggtgctggcaagaccacgatcatcgagtgcctgaagctttcttgcaccggcgagctgccccccaactcccgctctggccacaccttcgtccacgaccccaagctggcgagacggaaacaaaaggacaaattaagttgcggtttaagactgcagcaggaaaggatgtggtgtgcatccggtccttccagcttacccaaaaggcatcaaagatggagtttaaggcaattgaaagcgtcctccagactataaatccacacacaggggagaaagtctgcctcagctacagatgtgctgacatggatagagagattcctgccttaatgggtgtttcgaaggccgtactggagaatgttatatttgttcaccaagatgaatccaattggccattgcaggacccgtcaacacttaagaagaagttcgatgacatcttctctgccacacgctatacgaaagctcttgaagtcataaagaaacttcacaaggatcaaatgcaagagatcaagacttttaggttaaagctggagaaccttcagactgtaaaagaccaagcacataagctgcgtgaaaatattgctcaagatcaagaaaagtcagatgcctcaaaatctcagatggagcaactgaaggaaaagatctgtggtaccgagagagaaatcctgcaaatggaaacaagtttggatgaactgagaagacttcagggacaaattgacatcaaggcaacagagagaagtacattacttacgcagcagcatgaaaagcttgctgcactttctgaggaaaatgaagataccgatgaggaactaatggaatggcaaacaaaatttgaagaaaggattgcgttactagaaacaaaaatcagtaaacttgtaagagatatggatgatgaagcatcttatagctccgttctgtccaaacaaaattctgaattaacacatgaaattggaaagctccaggcagaagctgatgctcacctgactatgaagcatgaacgagactcagacataaaaaatatatgcactaaacataatcttgggccggttcctgaacatccctttacgaatgatgttgctatgaaccttacaaacaggattaaagcgagactatcaagtcttgagaatgatttgctggataagaagaaatccaatgaagatcagttagatgttttgtggaaacactatcttaaaataaatgctcgctactccgaagttgatggtcagatacaatctaagattgaatccatgtcaggcattttaagacggagaaaagataaagagaaagaacgcgatgctgcagaagtggagctttcaaaatttaatctatcccgtatcgatgagagggagagacatatgcaaattgaagtcgagaggaagacacttgcgcttggagaaagagactatgattcaattataagtcagaaacgaacagaagtatatagtttggaacagaaaataaaagtgcttctgcgggagaaagatataataaatagaaatgctgatgaaagagtaaaactgggtttgaagaaggatgcattggaaagcagcaaggacaagctcaatgagatagttaatgagcataaggataaaatcaaaaaggtacttagggggaggaatccttttgagaaggatatgaagaaggagatcaatcaagccttttggcctgtggacaaggaatacaatgagttaagatcaaaatcccaggaagcagagcaagagcttaaatttactcacagcaaagtaactgatgctagagaacaattgacaaaacttcgaagagatatggatgcaaaaagaagattcctggactcgaaacttcaatctattttacagatatctgctaatgttgacatgtttcccaaagttctacaagacgccatgaacaaaagagatgaacagaaaagattagagaatttcgcaaatggaatgcgggaaatgcttgcaccttttgaacatttggctcggaagaatcatgtatgcccatgctgtgaacgtgctttcacacctgatgaggaggatgagttcgtgaagaaacaaaggatgcaaaactcaagtactgcagagagatctaaagctctggcaatggaatcatcaaatgctgaagctctttttcagcaattggataaacttcggactatctatgatgcttatgtgaagctggtagaagaaaccatacctctagcagagaaaaacttgaatcaacatttggcggatgaaagtcagaaggcgcaggcatttgatgatcttttgggtgttcttgcccatgttcaaatggacagggatgcagtggaagccttattacaacccactgatactattgacaggcatgtacatgaaattcaacagctagtcaaagaagtagaagatcttgaatatgcacttgattctagtggccgaggtgtcaagtctttggaggaaattcaactggagctgaactttctgcagagaacaagggacacattgattgtcgaagtggatgatcttagagatcaacatagaatgctaaatgaagatatgtcaagtgctcaggtgagatggcacaatgctcgggaagagaaagtgaaagcttctagcatattggaaagattccaaaaatctgaagaggaattggtgcttctagctgaggaaaaagaacaactgattgtagaaaagaagcttttagaagagtctcttgatccattgtccaaagagaaagagagcttgttgcaagagtataatgctttgaagcaaaagctggatgaagagtatcatcagcttgcagaaagaaaaagggagttccagcaagaacttgatgctcttggaagacttagtatgaagataaaagggtacttggattccaagaaaaacgaaaagcttaaggaattgcagggaaggcatgttctttgccattctcagttacagagttgcatggcaaaacagcaaagaatatcagctgagttaaacaagagcaaagaactactgcagggccagggccagttgaaaagaaacattgatgacaatctcaagtacaggaaaacaaaggctgatgtggaacaacttactcgtgatatagaatcacttgaagaaaggctgctttcaataggtagcttgtctgctatagaagctgatctgaaacgccattctcaagaaaaagagaggcttaattcagaatttaacaggtggcaaggaacactttctgtttatcaaagtaatatttcaaagcacaaacaagagcttaaactgtcacagtacaaggatatcgagaagcgatatactaatcaatttctccagcttaagacaactgaaatggcaaacaaggacttggacagatattatactgctttagacaaggctcttatgcggttccacagcatgaagatggaggagataaataaaataatcaaggaactgtggcaacagacatacagaggccaggatattgattacataagcataaattctgattctgagggtgctggcactcgatcatacagctaccgcgttgttatgcaaactggtgatgctgagctggaaatgcgagggcgctgcagtgctggtcagaaggttcttgcttctcttataatcagactagcacttgcggaaactttctgcctgaactgcggtatattggctttggatgagccaactacgaatctagatgggccaaatgcagagagtcttgctgctgcgctgttgagaataatggaagccaggaaagggcaggagaacttccagttgattgtaatcactcatgatgagagatttgcccatcttatcggtcaaaggcagcttgctgagaagtactatcgagtctccaaggatgagaaccagcacagcataattgaatcccaagagatatttgactaagggtgttctaggaggctgtagcacgcactcgtttgctagtcgaatccagttaatttatgccaagtactggtgccagagcaatgttaacaagctttaggaggctctgttacgccgttacgtcagttgcgtgaaacctatccttcgttgttgtatacttatttaatctggccagaggatggaatgtgtgcactgggtgatggatgtttcacgacatcaatgaatgtttcacaatctagcatccgttttttttgcttcacatgatgtcatac

SEQ ID NO: 201185 - DNA, 4476 bp, Zea Mays
aaaaccctaagaaccctaaccggtacaaaaccctaaaaaccctaacgccgctgaagactccaaaaaaacgcgattttctcctccactgcccctccttttctctttccaatcgttttgcaatcactacgagcgtaatgaatagaagttgatagggagatagcatccgcaatctaggtttggggcaatcgctctggccagactggatcggagtgcaagtcgtagagggaggcacttggggctcgtggggcaagatgagcaccgttgacaagatgctgatcaaggggattcggagcttcgatccggacaataagaacgtcatcaccttcttcaagccgctcaccctcatcgttggccccaacggtgctggcaagaccacgatcatcgagtgcctgaagctttcttgcaccggcgagctgccccccaactcccgctctggccacaccttcgtccacgaccccaaggtagctggcgagacggaaacaaaaggacaaattaagttgcggtttaagactgcagcaggaaaggatgtggtgtgcatccggtccttccagcttacccaaaaggcatcaaagatggagtttaaggcaattgaaagcgtcctccagactataaatccacacacaggggagaaagtctgcctcagctacagatgtgctgacatggatagagagattcctgccttaatgggtgtttcgaaggccgtactggagaatgttatatttgttcaccaagatgaatccaattggccattgcaggacccgtcaacacttaagaagaagttcgatgacatcttctctgccacacgctatacgaaagctcttgaagtcataaagaaacttcacaaggatcaaatgcaagagatcaagacttttaggttaaagctggagaaccttcagactgtaaaagaccaagcacataagctgcgtgaaaatattgctcaagatcaagaaaagtcagatgcctcaaaatctcagatggagcaactgaaggaaaagatctgtggtaccgagagagaaatcctgcaaatggaaacaagtttggatgaactgagaagacttcagggacaaattgacatcaaggcaacagagagaagtacattacttacgcagcagcatgaaaagcttgctgcactttctgaggaaaatgaagataccgatgaggaactaatggaatggcaaacaaaatttgaagaaaggattgcgttactagaaacaaaaatcagtaaacttgtaagagatatggatgatgaagcatcttatagctccgttctgtccaaacaaaattctgaattaacacatgaaattggaaagctccaggcagaagctgatgctcacctgactatgaagcatgaacgagactcagacataaaaaatatatgcactaaacataatcttgggccggttcctgaacatccctttacgaatgatgttgctatgaaccttacaaacaggattaaagcgagactatcaagtcttgagaatgatttgctggataagaagaaatccaatgaagatcagttagatgttttgtggaaacactatcttaaaataaatgctcgctactccgaagttgatggtcagatacaatctaagattgaatccatgtcaggcattttaagacggagaaaagataaagagaaagaacgcgatgctgcagaagtggagctttcaaaatttaatctatcccgtatcgatgagagggagagacatatgcaaattgaagtcgagaggaagacacttgcgcttggagaaagagactatgattcaattataagtcagaaacgaacagaagtatatagtttggaacagaaaataaaagtgcttctgcgggagaaagatataataaatagaaatgctgatgaaagagtaaaactgggtttgaagaaggatgcattggaaagcagcaaggacaagctcaatgagatagttaatgagcataaggataaaatcaaaaaggtacttagggggaggaatccttttgagaaggatatgaagaaggagatcaatcaagccttttggcctgtggacaaggaatacaatgagttaagatcaaaatcccaggaagcagagcaagagcttaaatttactcacagcaaagtaactgatgctagagaacaattgacaaaacttcgaagagatatggatgcaaaaagaagattcctggactcgaaacttcaatctattttacagatatctgctaatgttgacatgtttcccaaagttctacaagacgccatgaacaaaagagatgaacagaaaagattagagaatttcgcaaatggaatgcgggaaatgcttgcaccttttgaacatttggctcggaagaatcatgtatgcccatgctgtgaacgtgctttcacacctgatgaggaggatgagttcgtgaagaaacaaaggatgcaaaactcaagtactgcagagagatctaaagctctggcaatggaatcatcaaatgctgaagctctttttcagcaattggataaacttcggactatctatgatgcttatgtgaagctggtagaagaaaccatacctctagcagagaaaaacttgaatcaacatttggcggatgaaagtcagaaggcgcaggcatttgatgatcttttgggtgttcttgcccatgttcaaatggacagggatgcagtggaagccttattacaacccactgatactattgacaggcatgtacatgaaattcaacagctagtcaaagaagtagaagatcttgaatatgcacttgattctagtggccgaggtgtcaagtctttggaggaaattcaactggagctgaactttctgcagagaacaagggacacattgattgtcgaagtggatgatcttagagatcaacatagaatgctaaatgaagatatgtcaagtgctcaggtgagatggcacaatgctcgggaagagaaagtgaaagcttctagcatattggaaagattccaaaaatctgaagaggaattggtgcttctagctgaggaaaaagaacaactgattgtagaaaagaagcttttagaagagtctcttgatccattgtccaaagagaaagagagcttgttgcaagagtataatgctttgaagcaaaagctggatgaagagtatcatcagcttgcagaaagaaaaagggagttccagcaagaacttgatgctcttggaagacttagtatgaagataaaagggttaggtacttggattccaagaaaaacgaaaagcttaaggaattgcagggaaggcatgttctttgccattctcagttacagagttgcatggcaaaacagcaaagaatatcagctgagttaaacaagagcaaagaactactgcagggccagggccagttgaaaagaaacattgatgacaatctcaagtacaggaaaacaaaggctgatgtggaacaacttactcgtgatatagaatcacttgaagaaaggctgctttcaataggtagcttgtctgctatagaagctgatctgaaacgccattctcaagaaaaagagaggcttaattcagaatttaacaggtggcaaggaacactttctgtttatcaaagtaatatttcaaagcacaaacaagagcttaaactgtcacagtacaaggatatcgagaagcgatatactaatcaatttctccagcttaagacaactgaaatggcaaacaaggacttggacagatattatactgctttagacaaggctcttatgcggttccacagcatgaagatggaggagataaataaaataatcaaggaactgtggcaacagacatacagaggccaggatattgattacataagcataaattctgattctgagggtgctggcactcgatcatacagctaccgcgttgttatgcaaactggtgatgctgagctggaaatgcgagggcgctgcagtgctggtcagaaggttcttgcttctcttataatcagactagcacttgcggaaactttctgcctgaactgcggtatattggctttggatgagccaactacgaatctagatgggccaaatgcagagagtcttgctgctgcgctgttgagaataatggaagccaggaaagggcaggagaacttccagttgattgtaatcactcatgatgagagatttgcccatcttatcggtcaaaggcagcttgctgagaagtactatcgagtctccaaggatgagaaccagcacagcataattgaatcccaagagatatttgactaagggtgttctaggaggctgtagcacgcactcgtttgctagtcgaatccagttaatttatgccaagtactggtgccagagcaatgttaacaagctttaggaggctctgttacgccgttacgtcagttgcgtgaaacctatccttcgttgttgtatacttatttaatctggccagaggatggaatgtgtgcactgggtgatggatgtttcacgacatcaatgaatgtttcacaatctagcatccgttttttttgcttcacatgatgtcatac

SEQ ID NO: 201186 - DNA, 3080 bp, Zea Mays
ttcgaactttatcagtccattgtcccaatggcttattgctttacatgaatacggggttattggcccctatcggtcgggcaaatcttttcttctcaaccaacttctctccctatcatgtgacaatggttttggagttggacacatgcgggatacaaaaacaaaaggtatatgggtatggggttcccccgttgaggtggatatcggtggctccaaggtgtctgttctatacctggacaccgaaggatttgagagtgttggaaaatcaaatgtatatgatgataggatatttgctctggcaactgttttaagttctgttctgatctacaatcttcctgaaacaattcgtgaagccgatatatcgagactttcatttgccgtcgaaattgctgaagaattctatggaagagtcaaggggcaagatgttgcttttgagccagccaaacttctgtggttgatccagagggattttctccaaggaaaatcggttcagcagatggttgatgaagctctccaacgggtacctaacaacaatggagacacaaatattgacgagctcaaccaaatcagagactctttggcggttatgggagataacagtacagcttttagcttaccacagcctcatctgcaaaggacaaagttatgtgatatggaggaccaggaacttgatccgttgtatgtaaagaagagggatcagttgaaagaagtcgttgcatccatgataaaaccaaaaattgtgcagggtagaactctgaatggaacagagtttgtatccttcctagggcagatagttgatgctttgaataaaggtgaaattccatcagccgggtcgctggttgaaattttcaataaggccattcttgaacgttgcttgaaggtgtacagtgaaataatgggcagagcaggtctaccagtgtcagtggatgaacttcgggagttccacgacctggcaaaagatgaagctagaaggcttttcaacaagcagcatttcggtaaacatcatgctgctcggtccatcctcaagcttgatgaagagattaaaaaggtgtacagaaacttgggccaagctaacgagtatcagtcatcaaagctgtgcgaagcacggttctcagagtgcgaagataaaatggaacgactccaagtcttgaagcttccgtccatggcgaaatttgatgccggattccttctctgcaatcgaagttttgaaacggactgtgtggggccagccaaggaaagctatcgacaccggatgtcaaagatgctggcaaggtcccgtgctcttttcatcaaggagtacaacaacaagctcttcaactggctcgccatattctccctggccatggttgtcgttgggcgcttcttggtcaagttcttcctgctcgaagttgctgcgtgggtgatgtttgccttcctagagacatacacgaggctgttctggtcgtcggagtccctgtactacaaccccgcctggcacgcgatcgtctcttcttgggaaaccgtcgtctacagccccgttcttgatcttgacagatgggcgttcccgatctgcgctgtcctgttgtttttggcgttttattggcgttgcctcggtggaaggaggggaattgcccggtcactgctacctctgtacaacggggcttattacagaagctccagtcgcacaagaacagactgatccctcgaaccatgcgcacaatcacaccattagcgtgcacatatagttgtatcatgcttattccaacactgcattcttcgattatgagtcaaaactcgggtgttgctgtaaatatgaaacccagaaggtttgtcaattgtataaatatatggctgcttgctaaacttcttggatttatttgtttgtttatttattaagctctgatcctctggggtttgtctccgtagtgtcaagcccattgaatggcgtagctgctgtagttggtctgcttgtcggcgtagcggtcccagatcatgatcccggcgtagctgggcgccttctgcaccaccgggaggacgccgtagtacaggttcttggggtgcacgtacccgaccgtccgctccgacgccggcaggccgacgtagagcccggagcccgggtacgccgcggcccacttgtcccactcctgctgccagtacgcggcgcagcgcgcgtcgccgtagagcctgacgttgacgcgggtaacgagccccgtggcgagcagccgcagcgccggcccgtccggcgggaacgcgcaccgcggcgtcgccgacagctgcacgggcgtgcgggcgcggaactgccggttgtagctccacaggcgcgcggccagcgcgtcgaggtggtccggcggcgggcggccgccgcggtcgaggaagaagtcgaggccgtcgacgtacgcgtcgccgaacgggcggcgcacgccggcgcgcggcgccggcgccgggaagtaggcgtaccagaggtagtcggcgaggtccgcggcggcctcggcgctcggcagggagtgctgccggccgccgagggagaggaacaccatgatgctcttcgactggcagtgcttgatgtcggcgccgatgccggcgacggggtggcccgagaggtccaggctcggcgggctgttgccggggccggccgagacgttgaggaaggagatgacgacgatggtgtacgtgcccgtgtcgcaggcctctcggagcgtgccctcggccttgttccggccccagaagacagtcacctgcccggtcttccccgcggccgcggccgggccggcgaggaagagggagccagcgacggccacaagggccgccaggggcagtagagtggttgctggtctattacttgcgaccgccattggtgtctcgttggttaattgctgctaccactactcgtcactactcttgcgtgtgcgtgtagcagcagtcacccatcacccattatatgcctttcatttggtgttcgtcttagacttgtcttgttttggatcgaatcgggaaagaggaggacagctcaccgagctagaaggacgtggacgtggtacatagcatggcggcgaatcgactatgcatgctgttgtgtttgaccgacgcacgacgcagtgtctcgt

SEQ ID NO: 201187 - DNA, 1637 bp, Zea Mays
ccaccgcgctcgccctcttcgtcgttgccgtccgtctccacagtccccacccatattccattttggttatcctcttgcgtcacacctcctccctcctggcctcctcctgcggcccacttatatataccaccacgtcgatgcgctgctccgccggcatctccatcgccgtcgcgccgccgtagatggcctgacatttttcacttcatttgtcatcccaattccacaaacctcgcgcgcggcggcggagggaaacaaaaaaaaaaaggaaggatggcgttggagccggtggcgcgggcggtggcggaggaggtggcgcgctggggcgcgatgcgccagaccggggtcagcttgcgctacatgatggagttcggggtgcgccccacggagcggaccctcctgctcgccgcacagttcctgcacaaggagctccccatccgcatcgcgcgacgggcgctcgacctcgactcgctccccttcggcctctccaccaagcccgccatcctcaaggtgagagattggtatgtggagtcattccgtgacatccggtccttcccagaggtgaagaaccaggaagatgaactcgccttcacccagatgatcaaaatgatcaaggtgcggcacaccaatgtggtgcctgcggttgcattgggtgtgcagcagctgaagaaggacttgggtggtccaaaggcgttcccacctggaatccatgagatccatcagttccttgatcgcttctacatgtcaaggattgggatccggatgctgatagggcagcacgtcgctttgcatgaccctgatccagagcctggtgtgatagggcttataaacacaaaaatgtcacccatgacagtagctcgaattgctagtgaagatgcacgtgctatttgcatgcgggagtatggatcatctcctaatgtcgacatatatggtgatccggggtttacattcccatatgttacaccacatctacatctcatgatttttgagctggtgaagaactcccttcgcgcagtacaggaacggtatatggattctgataagcttgcacctccggttcgaatcatagttgctgatggagcagaggacgtgactattaagattactgatgaaggtggtggaataccaaggagtggtctctcaagaatttttacgtatctctatagtacagcagaaaaccctcctgatcttgatgtacataatgaaggagtaactatggctggatatggttatgggattcctattagtcgtctttatgctcgatatttcggcggggacttgcagatcatctctatggaaggatatggaactgatgcatacctccacttatcacggctgggagattcggaggaacccttgacttaatcgattcataagaagccattcctcattcctgtagttaggactctattgctttctcaattaccgtgctggtatgcaaatattgttctgaaggccagtcacctattagttcagctgtccatgccctatttgttatctttgttgttcattcatcatctcgatggaatgtgatcataattcagaatagttttgcttctggtttgtactgtcattataattgttcaacctccaataatggtatctgtcgagcacccgaggcattgaatttgaaaaaagaa

SEQ ID NO: 201188 - DNA, 1985 bp, Zea Mays
ccaccgcgctcgccctcttcgtcgttgccgtccgtctccacagtccccacccatattccattttggttatcctcttgcgtcacacctcctccctcctggcctcctcctgcggcccacttatatataccaccacgtcgatgcgctgctccgccggcatctccatcgccgtcgcgccgccgtagatggcctgacatttttcacttcatttgtcatcccaattccacaaacctcgcgcgcggcggcggagggaaacaaaaaaaaaaaggaaggatggcgttggagccggtggcgcgggcggtggcggaggaggtggcgcgctggggcgcgatgcgccagaccggggtcagcttgcgctacatgatggagttcggggtgcgccccacggagcggaccctcctgctcgccgcacagttcctgcacaaggagctccccatccgcatcgcgcgacgggcgctcgacctcgactcgctccccttcggcctctccaccaagcccgccatcctcaaggtgagagattggtatgtggagtcattccgtgacatccggtccttcccagaggtgaagaaccaggaagatgaactcgccttcacccagatgatcaaaatgatcaaggtgcggcacaccaatgtggtgcctgcggttgcattgggtgtgcagcagctgaagaaggacttgggtggtccaaaggcgttcccacctggaatccatgagatccatcagttccttgatcgcttctacatgtcaaggattgggatccggatgctgatagggcagcacgtcgctttgcatgaccctgatccagagcctggtgtgatagggcttataaacacaaaaatgtcacccatgacagtagctcgaattgctagtgaagatgcacgtgctatttgcatgcgggagtatggatcatctcctaatgtcgacatatatggtgatccggggtttacattcccatatgttacaccacatctacatctcatgatttttgagctggtgaagaactcccttcgcgcagtacaggaacggtatatggattctgataagcttgcacctccggttcgaatcatagttgctgatggagcagaggacgtgactattaagccaaaggagtaaaagagatttaagggaagttcactctatttatttcttgctggcctgaggagacaagacccgtattaatagtcatccagcaatgtcagctgactttttttttcttctggttacagccaaatgcaactagcagaaatgtaaataaacgccctttatgatgctaacagatagccaatccaactaactggctaacgccttttgttagaattttctcattaattgtgatattcaaccgacaaacttgtatcttctgcacctatgttagcaaaaatcaatagcttcgattattcatgatctggtatgaagtatgaactgtttgactaaaccatacttttgcagattactgatgaaggtggtggaataccaaggagtggtctctcaagaatttttacgtatctctatagtacagcagaaaaccctcctgatcttgatgtacataatgaaggagtaactatggctggatatggttatgggattcctattagtcgtctttatgctcgatatttcggcggggacttgcagatcatctctatggaaggatatggaactgatgcatacctccacttatcacggctgggagattcggaggaacccttgacttaatcgattcataagaagccattcctcattcctgtagttaggactctattgctttctcaattaccgtgctggtatgcaaatattgttctgaaggccagtcacctattagttcagctgtccatgccctatttgttatctttgttgttcattcatcatctcgatggaatgtgatcataattcagaatagttttgcttctggtttgtactgtcattataattgttcaacctccaataatggtatctgtcgagcacccgaggcattgaatttgaaaaaagaa

SEQ ID NO: 201189 - DNA, 3146 bp, Zea Mays
gcttggactctcagactaaacaaatccgaagcacaaagcaggggcctcttcgcaaatcccaccaccaccatcaccgcctcccagatccgcctggccgtcctcctcgtccgccactgcggcggtgatccctcgccgccccgcccttgataccgtcgagaggatcgtcgaggacttcgccatggacctcgccatcaatcccttctcctccggtacccgcctccgtgcgtttattcttcacagggacatgatacgtgcgatacgcgcgtgcaagacggcagcagaggagcgcgccgtggtgcggcgggagtgcgcggcgatacgggccgctatcagcgagggcgaccaggactaccggcatcggaacatggccaagctcatgttcatccacatgctcggctaccccacacacttcggccagatggagtgcctcaaacttattgctgccgcaggcttccccgagaagcgcatcggctatctaggactcatgctgctgctcgacgagcggcaggaggtcctcatgctcgtcaccaactctctcaagcaagatcttaaccactcaaaccagttcattgttggtcttgcactctgtgcccttggcaatatatgttctgctgaaatggcgcgtgatcttgctcctgaagtggagcggctgttacaaaatagggaccctaatacaaagaagaaggccgctttatgctctgtgaggattgtacgaaaagttccagacttggcagaaattttcatgagtgccgccacatcattactgaaggaaaaacatcacggtgttctgatatctgctgttcagctttgcatggagctatgtaatgccagcaatgaagcattggagtacttgaggaagaattgccttgaaggactggtccgaatactgagagatgtatccaacagttcatatgctcctgaatacgacattggtggcatcacagatccattcttacatatccgagtgcttaaactcatgcggatactgggccaaggagatgcagattgcagcgagtatatcaatgacattcttgctcaggtttcaacgaaaaccgagtcaaataagaatgctggaaatgctattttatatgaatgtgtggagacaataatgagcattgaagctacaagtggtttacgtgtgttggcaattaatattttgggtcggtttttgtccaaccgcgataacaacataagatatgttgccctaaacatgcttatgaaggccattgctgtagacacacaagcggtgcagaggcacagggcaacaatattagagtgtgtcaaggatgcagatgtttctattcgtaaaagggccctggaacttgtttacctacttgtcaacgatacaaatgtaaagccattgactaaggaacttgttgattaccttgaagtgagtgatcaagatttcaaggaagacctcactgctaagatatgctcaatagttgaaaagttttccctggacaggctatggtacttagaccagatgttcagagttttatctctggctggtaatcatgtgaaggatgatgtatggcatgctcttatagttctagtgagtaatgcatctgaacttcaaggatattcagtcaggtcattatataaagcattgcaagcatctagtgaacaggaaagtttagttagggtggctgtttggtgcatcggtgaatatggagaaatgctggtcaacaatcttagtatgttggacatggaggaaccaattacggtaacagaatatgatgctgtggatgccgtagaggctgctcttcagcgctactctgcagatgttactactagggctatgtgtcttgtctctcttttgaagctttcctcccggtttccaccaacatcagagaggataaaagaaatagttgcgcaaaataaagggaatactgtgcttgaattgcagcaaagatctattgaattcagttccattatacaaagacatcaatcgatgaaatcatctttgcttgaacggatgcctgtattggatgaagctaattatttggtgaagagagctgcttctatacaggctgcagttccatctgtaaattctgctccagcagtcacttctggaggcccatttaagcttcctaatggtgttggaaagcctgcagctcctttagctgatttgcttgatttgagttctgatgatgctccagtgactacctcggcccctacaacagcacctaatgattttctacaggatctgttgggcattggcttgactgattcgtctcctataggcggagctccgtctacaagcactgacattctgatggatcttctatctattggttcatcttctgtacaaaatggaccaccaacggcaaactttagccttcctggcatagagactaaatctgtcgctgttacacctcaagttgtggatcttcttgatggtttgtcctcaggcacatctcttcctgatgagaacgcaacctaccccacaatcacagcattccagagtgcaactttgaggatcacattcagtttcaaaaaacaacctggaaaacctcaggagactacaattagtgcttctttcacaaatttagcaaccactacattcacagatttcgtcttccaggcagctgtgccaaagttcatccagttgcgtttggacccagcgagcagcagcactcttcctgccagtggaaatgggtcagttacacaaagcctcagtgtcaccaacaaccagcatggccagaaaccacttgcaatgcgtatccggatgtcttacaaagtgaatggtgaggacaggctggaacaagggcaaatcagcaactttcctgctgggttgtagggccacctgtgtctatagggtttgggttgctctttcagacttatgcttgcctgctagtgagttgtgtacactggtagttggtttttggccgtccattatctctttatatatatagtgtacagtagatgacagcgattaatgatatatcctcagttttgccgaaatgtatttttatcttggtgcatatcggacttcagggtaaccaaaattttcacccttttccccgcgtaccaagcaccaaaggaatgtgttgtaccatgatattccccaatgtaattatttatttttctaatcattgtacaagcttattgtgcagacaaattatttgtttttcatgtgcgtttct

SEQ ID NO: 201190 - DNA, 908 bp, Zea Mays
gacgtgacagctgaactgaaggggagatacaacccaagaatggacccagttatcccagtggagaattggagaaaaggctcacagtgggctgtgctaattaaaaagcatgctgaggttgtggttgatgatgaagtggtgttaccagaattccagaagcattgcaggaggagacccttgccagagttctggcgggattgggatcgtcctattcctgcggaggcatggaaagcccataactgcataccagatgagcactatgttcagacgttgcttgcacaaagtggtctagaagaagaacttacgcggcgatcagtaacacatagtgcatgggatctttcagcttctaaagatcgtgaaagacgcgggtggcatcctgtaacatataaagtctctgatgctactacaagacttataaaatctataaaggatattgataatatatattacgagaccgaaaatagaagggagtggtgtacaagtaatggaaagccagccccctgcttcctttttgccaggaagtttacacgtggagctggtctgaagcttcttgattcatcactgatagcttcaaagtgatgaatattagtgacagatgcaagtgccttttgattgtttcacctttcgagaatatttcagttcacacaaatgtaaaggtacgggaccacggaaaagacacaaaataacaggactttctttttattcagtgtgtgattatcatatattattttgttgcttcatagaaaggcacgatacatgttgtaaagaattatcttcgttccttttatttcctaggatagcacgtccattaacacatgactcagcattataacatcagtcgaccagttggtcgtggagtcctgagaaaacttgtcggcaaaattatgaagaaatgttctctcatactgccc

SEQ ID NO: 201191 - DNA, 2456 bp, Zea Mays
ggagaaaggagacgacgacgagtcgacgacccgctcgctttgctcaggcattctcttcgcctcccccgtctttaagctccctccctttatctatcccttccttcgcctatcttcgtctctctccgactctccctcgcccgcgcacctttccgcgccgcctccttcctttcctcgcgtgctctggcgcgcgcaaggatcaaaaggcgccggccactagaggcgagtgagtcgcatgtaaacgaccaccagctgctgtgatctcaaaagggagcgagagacaaaggagaggcgagcaggtcgtggcggcagcaatcgttgcgaatccgcgcgggattctgtcctctgcaccactgcttcccgctttcctgcccggcggaagtggtataattctccaacgcggttgactgtattgcctctcgctctcggtgggtgggggcatggacgaggcagaggagatgcaggtggagaggctgcacgaggaggccgatgcggggggagccgacacggacaagctcagctacgagatattctccatcctcgagagcaagttcctgttcggctataccgacccgcaccagctctggctgcccaagccggcggcggaactgccggcgcaggcgtccgcggcggcgccgggtaaggcggcgcagcgcgggaaggtctgcgtgctctgcgtggacggcggcgggggcggcctgcgggcgctgctgccaggccgcgcgctggcgcacctggaggccgcgctgcgccgcgcgtcgggggaccccgacgcccgcgtcgccgactacttcgacctcgcggcgggcaccggcgccggcggcgtgttcgccgcgatgctcttctccacgcactcgcgcggcgcgccgctgttccacgccgacgacacgtggcggctcgtcgcggaccacgcgccgcgcatgttccgcaggcccgcggcctcctcgtccacgtccctcttctgccgcggcaagaagcggcccctggccgcgccaacggcggcgctggaggcggcaatgaaggcggcgttcggccaggagctcaccctgcgggacaccatcaagcccgtgctcatctcttgctacgacctcaagacgtccgcgccgctggtgttctcgcgcgccgacgcactggagaacgggagctacgacttccgcctctgcgaggtcgggcgcgccgcgtggtccgaggccggacgcttcgagcccgccgaggtggcgtcggtggacggcgccacgtcctgcgccgctgtagacggcggccccaccatgggcagcccggcggccgccgccatcacgcacgtgctccacaacaagcacgagttcccgttcgtgcgcggggtcgaggacctcctcgtgctctccatcggcggctgctctggcggaggctctggcgccgctggcgaggcggaactccggcgcatgcgtcggtggggtcccaaggagtgggcacgccccatcgcccgtattgcggccgacggcgccgccgaccttgtcgaccacgccgtggcgcgcgccttcggccaatgccgcgcatccaactacctgcgcatccagcgggagagcatgccgccgtgcggtccggacggggagtacgacccgaccccaggcaacgtgcgcgcgctgctcgcggcggcggacgagatgctcaagcagcggaacgtggagtcggtgctgttcgaggggaggcgagtcggggagcagacgaacgcggagaagctggactggttcgcggcagagctcgtcgccgagcaccgcagcagagcctcccggatcgcacccaccgttgcgttcaagcaggcgccgcagaagccgtaggcgctggactgagctggtggccgtaagaccgtggcgttaagggcatgtaggcctctctttcttcttgcttgggctggcggctggaattcctgctgcatatttttgacgcggcagcatggcatatcaatatggcattgctcccgggaagcatttgccgctgtgaaatcgtttcaagggaggatggaatatgaaaggaacgaacgttgccgatataaaaattctaatcttcagttcagcttaggagatatattagttttttcttgatgcagtttttttttgctgtcctttatgcaatctagtttcgttattaggtgtttggacttcagtgtcggtagagcttttgcttaaagatgtcggagatacaatggaaacgcctgaaaacttctgccatgcaattacgtacgcagatacaactccaatcagtctgcattgtttactgaagttttaaactgtagatgaacagtgtgtgcgaatgataccttatcccccttgtcagaatacccccatccttgattcttgatgttgggatatgttttgtacttgtaggcttatttggaccattaactggaatttcttactgcctcagccgcaaagataatgtaaatattaggtttggacaaagtcacatattcttaactttac

SEQ ID NO: 201192 - DNA, 3545 bp, Zea Mays
acacgacatccaaatcgaagaacacgtcgctgacacaccacctctccctcgccgcattctccactctctggtcttcgccgtggtcggtgccttccaaatccaaaaaaccccaagccctagctgtagccgtcccccaaggtcgccgagatgtcttcgtggctgcgcagcgcggtgagccgggcagtggaggccggcggccgcagcggcgtcgcccgcgcggtcaaggggtacgccgataccgtcgcgcaccacgccggtcaggccgtcgcggacatcctccacgaccgcatgaactataaaagtttcaagaagacagtagcacgattggaagaggctgctgtatcatgccgtgggggtgaaagagttgaattgttgaaacgttggttaggagcattgcaagatgttgatgctgaaaatggaagttcagatttaaaggtgtctgaagctaatgacccttctggtgaaatggacactttgaaagcacaaactgttttgttctatgatgctgatattgatggtgcacctatgaatttttgtgatgtattcttgtacagccaagcacttgaaggtattacattgtccatgattctcgaacctccttctgaggaggaagtttcactgcttttggaaatattcagcatatgccttactggagggaaagaagtgaacaaagaaatcatgagtaatgtacaagacttggccaaggcattttcagaatacaaagatgaagtcctggtgaaacgtgaagagctgcttgagtatgcccaaagtatcatttcaggactgaagagaaatgctgacattgtgaggatagatgctgaaaccctagaattgcagagaaaactagacgagaagcagaaatcacgaggtcaatcacctgaatatcaagataaaacgtcagataagattgctgctgcaaatcttgaggtcttcaaagaagcacttggtgaactccgcttatgctctagagttgaagaacttctgctgaagaagaaatcaatcactcttggtgactccctggagattcattctcagaaggtagataaactaaaggttttagcagattccctggcatgttcatcctccaaagcagaacagcgtattttggagcacaggcgccagaaagaagatgctctcaactttcgtgtgaaaaaagagaatgaagtcagtgtttctgaaaaggaattgcttgatgagattactgaattggaaaagcaaagagatgagcttgaggcacagctgaagaaggttaatatatcactaaatgctgctgctggacggctcaaacaaactagggaagagagggaccaatttgacgaagcaaacaatcaaatcatatttagcttgaaaaaaaaggaggatgacctctcaaaatccattgccttatgtaatgtggaatccaatgttgtcaagatctggatcggtttccttgaggactcgtggaagctgcagtcctcatacaatgaacagaaggataataaaacgtgtgatgagctggagaaatgtgtgagtgattttctaaagttgacaaaacatcatctttcagcattcaaggaagtcctaagccaattgattgagaatatcgaaacatatgtcggtaacttggctgtcttaacctcaaggtattttagttcttttcctaaagtcatgtactttgttgtccaatttgtttggtaggtttttacttgccttgtagggaagaggaaaaagaacatggggatgatgaggcatctgagaggacagatccacgtaaatcccttgaagaggaatatctagaaacagaaaagaaggttatactcagtcaccttactttaacttggtctcatacatggttcttaaagcggtaaggcgaggtaaggcattgaaccaccgctggacgcctaggcgccgccaaaggcgagcaaggcgacaccttatcaacatgagaaccagcaaaacagcagcatggaggaggaacaaaaagaaaaaaaaagaaaaaaaggaaatggaaaaaggagaaggggtaggagccccggccaaccggcaagcccatatgctcactctgtttccctctctctcccccgattgagctgctgctttccttctcccccttttcagccacggcttccttctctcccccagattcagccgctgccactcatgatttcgccgccgccacccccgatttggttgccgctggccccgattcggccaccgctgcccctgatctcgccgccgctgccccctgaatcctcgatttgccgcctccagccccgattcggccgccgctggcccgattcggcgccgccccttttcatcccctctgttctcttgctgatttagttaggcgacggggatgcctaggagagttggggggcgcctagacgcctaggcgacacctttaaaacagaggtctcatagttctagttcattcataacatgatttgatatgcctgaagaacccaaagttgaattgacatctatcagtcgccatatgtattacttatagcaactcgcccaactcttcagttttgtaacttctaaaccttagagaaactagaccaaactgtcttatgtattgacaatattttcagattataattgcgttcagcatagttgatcacataaagaaattgttttattctggggaaggggctgattcaaggagagatgacccagaggtcaagagcttaattgaggagattgagaaaatgagggaatcgttcgagtctatagaaaggccaacactaagcatagaatctgagaaagcaaaaccactacctgttgagggatcgaaactgagtccttcacctcttcaggctcctgctaccccaaaagctgcacacgttgactcaccaaaatctcccatgaaacctgagcagcatttcgattcagatgcggagcttgcaaccctgggatcagagatcgggaaagaagacaaagagtactcagttgaggagataagcgggtgggagtttgacgagctcgaagaggaccttaagagctgacacaaagaatcgacaaacagaacacaattcgatttggttatcttcactgacatgtattatttgtctgggccttgcgtgggcaagaaatacacactggttgatatgtacatagtgctgtttgattgtgtattgtcgcgcactcgcgctgtcaatttgtcactgtcttaagatatacggactgagctggtgtaacttgggcgaggcatttgctatttgtttgctcttgccgcgaatatttttatcttacatgtataccgaaccctgttgtaacagttgtaaacgcggaaaacaaaattcgaacatttgacagaatttgctccgtagaacattggattgttgggtttgagttttacattgcattcctaatggatgaatctatcaggattcaggcttccccaacaactataatatctcatttcatatttcaaactttgctctacaaacactggatttaggcttctactgtaactattttatctcatttcatatttcaaactttacaaacattgttatttttttttgacgaaggggcagagcccctatttcattaggaaatag

SEQ ID NO: 201193 - DNA, 2550 bp, Zea Mays
acacgacatccaaatcgaagaacacgtcgctgacacaccacctctccctcgccgcattctccactctctggtcttcgccgtggtcggtgccttccaaatccaaaaaaccccaagccctagctgtagccgtcccccaaggtcgccgagatgtcttcgtggctgcgcagcgcggtgagccgggcagtggaggccggcggccgcagcggcgtcgcccgcgcggtcaaggggtacgccgataccgtcgcgcaccacgccggtcaggccgtcgcggacatcctccacgaccgcatgggcgttcagaactataaaagtttcaagaagacagtagcacgattggaagaggctgctgtatcatgccgtgggggtgaaagagttgaattgttgaaacgttggttaggagcattgcaagatgttgatgctgaaaatggaagttcagatttaaaggtgtctgaagctaatgacccttctggtgaaatggacactttgaaagcacaaactgttttgttctatgatgctgatattgatggtgcacctatgaatttttgtgatgtattcttgtacagccaagcacttgaaggtattacattgtccatgcatatgccttactggagggaaagaagtgaacaaagaaatcatgagtaatgtacaagacttggccaaggcattttcagaatacaaagatgaagtcctggtgaaacgtgaagagctgcttgagtatgcccaaagtatcatttcaggactgaagagaaatgctgacattgtgaggatagatgctgaaaccctagaattgcagagaaaactagacgagaagcagaaatcacgaggtcaatcacctgaatatcaagataaaacgtcagataagattgctgctgcaaatcttgaggtcttcaaagaagcacttggtgaactccgcttatgctctagagttgaagaacttctgctgaagaagaaatcaatcactcttggtgactccctggagattcattctcagaaggtagataaactaaaggttttagcagattccctggcatgttcatcctccaaagcagaacagcgtattttggagcacaggcgccagaaagaagatgctctcaactttcgtgtgaaaaaagagaatgaagtcagtgtttctgaaaaggaattgcttgatgagattactgaattggaaaagcaaagagatgagcttgaggcacagctgaagaaggttaatatatcactaaatgctgctgctggacggctcaaacaaactagggaagagagggaccaatttgacgaagcaaacaatcaaatcatatttagcttgaaaaaaaaggaggatgacctctcaaaatccattgccttatgtaatgtggaatccaatgttgtcaagatctggatcggtttccttgaggactcgtggaagctgcagtcctcatacaatgaacagaaggataataaaacgtgtgatgagctggagaaatgtgtgagtgattttctaaagttgacaaaacatcatctttcagcattcaaggaagtcctaagccaattgattgagaatatcgaaacatatgtcggtaacttggctgtcttaacctcaagattataattgcgttcagcatagttgatcacataaagaaattgttttattctggggaaggggctgattcaaggagagatgacccagaggtcaagagcttaattgaggagattgagaaaatgagggaatcgttcgagtctatagaaaggccaacactaagcatagaatctgagaaagcaaaaccactacctgttgagggatcgaaactgagtccttcacctcttcaggctcctgctaccccaaaagctgcacacgttgactcaccaaaatctcccatgaaacctgagcagcatttcgattcagatgcggagcttgcaaccctgggatcagagatcgggaaagaagacaaagagtactcagttgaggagataagcgggtgggagtttgacgagctcgaagaggaccttaagagctgacacaaagaatcgacaaacagaacacaattcgatttggttatcttcactgacatgtattatttgtctgggccttgcgtgggcaagaaatacacactggttgatatgtacatagtgctgtttgattgtgtattgtcgcgcactcgcgctgtcaatttgtcactgtcttaagatatacggactgagctggtgtaacttgggcgaggcatttgctatttgtttgctcttgccgcgaatatttttatcttacatgtataccgaaccctgttgtaacagttgtaaacgcggaaaacaaaattcgaacatttgacagaatttgctccgtagaacattggattgttgggtttgagttttacattgcattcctaatggatgaatctatcaggattcaggcttccccaacaactataatatctcatttcatatttcaaactttgctctacaaacactggatttaggcttctactgtaactattttatctcatttcatatttcaaactttacaaacattgttatttttttttgacgaaggggcagagcccctatttcattaggaaatag

SEQ ID NO: 201194 - DNA, 631 bp, Zea Mays
aagtttttttttagaagttactgttacgagtcagcgcgggttgcgagttgcagaccgcaggagctcgcgctctgcaaaccttcatggcctccgaggcggtcgtcgttcacaccggcggttgccactgccggcgcttgcggtggcaggtcgaggcccccgcgagcgtagtggcgtggatctgcaactgctccgactgttccatgcgcgcgaacacccacttcatcgtccccgccgccaagttcaagctgcaggccggcgctgacgagttcatcaccacctacaccttcggcacgcacacggccaagcacaccttttgcaagacctgcggcatcacctccttctacaccccgaggtccaacccggacggcgtggccatcaccgtggcctgcgtcgaccccggtaccctgaagcacgtcgagtaccggaagttcgatgggaggaactgggaggattttttcaggaccagcgacatcgctggattctccaaggacgatgcagaggcggcggagtagcgggcagatgttctctgttgatctggtgttgtttcgtcatcagtacatcatctcagttctgaagagtttccaagtttgtgtggcatgatgatccaaacgcagtacaggcgccatagtaa

SEQ ID NO: 201195 - DNA, 3071 bp, Zea Mays
ctatgcatccactcgcctgaactgaacgtggtccctctcctctgtcctccgcgatggtggtccccagctcggcaaatgttgtccccggggcggcagcgccggcggcctgaagcgcgacgactaggacggcagcggcaatctttagcgctgtcggcggcgggatactcgctgcgcgccacgcgctgacatggacgagcccccgtgcccgcccccgcggcccgcgctcaactccgccgccgcgacgtcatggccggagctgctcgcgccgttcgacctctcccgcctccgcgccacgctgtcctcgcacccgctcaccccgcgccgcctggcccgcctcctcgcgctcccgctcgcgccggccacctccctgctcctcctcgactggtacgcgtcgtcccacccggcgctctcgctctcgtccctcccgctccgccccatcctcgcggcagccgaccccgaccgcgcgctcgcgctcctcgactccctgccggcctcccgcctgcccccgctccgcgagtccctcctgctcccgctgctccgctccctgccacccggccgcgcgctccacctgctcgaccagatgccccgccgcttcgccgtctccccctccttccgctcctacaacgtcgtcctctccacgctcgccagggccgactgccacgccgacgccctgctcctgtaccgccggatgctcagggaccgcgtgccgcccaccaccttcaccttcggtgtcgccgcgcgcgcgctctgccgcctcggccgcgccggcgacgcgctcgcgctgctccgcgggatggcgcgccacggatgcgtgcctgatgcggttctctaccagactgtcatccacgccctggtcgcgcagggcggggtcgccgaggccgcgatgctcctcgacgagatgttactcatggggtgtgcggcggacgtgaacaccttcaacgacctggtgctcgggctgtgcgggctcgggcgcgtgcgagaggcagccaggctggtggacaggatgatgacgcagggatgcatgccaagtgtggtgacatatgggttcctcctgcaagggctgtgccgaacaaggcaggcggacgaggcgtgcgccatgctcgggaggttgccggaggtgaacgtggtgatgcttaacacggtgatccgtggatgtctgacggaggggaagctggccagggcaacagagttgtatgagatgatgggttcaaaaggatgcccgcctgatgtgcacacatacagtattttgatgcatggcctttgcaagcttgggagatttggttcagcagtgcggatgcttgatgagatggaggagaagggttgtgcaccaaatatcgtgacctactctaccttgctgcattcattttgcaggaatggcatgtgggatgacgcaagagcaatgctggatcagatgttagccaagggctttagtatgaactcccaaggatacaatggtatcatatatgccttatgcaaggatggcaagcttgatcaagcgacaaggcttgtccaagagatgaagagtcaggggtgcaagcctgatatttgcacgtacaatacaatgatttatcatctgtgcaacaatgacctgatggaggaggcagaacatattttcagaaacttaattgaagagggtgttgttgccaatggaataacttataatactctcattcatgcacttctgcgcaacggaaggtggcaggagggcctaaggcttgcaagtgaaatgctacttcatggttgccagctagatgttattagctacaatggcctgattaaagccctctgcaaagaggggaatgttgatcggagtatggcgttgcttgaggaaatggtgacaaagggaattaagccaaataatttctcgtataacatgctgatcaatgaactctgcaaggcgggaaaggtacgtgatgcactggagctctcaaaggagatgctgaatcaaggactgacacctgacattgtgacttacaatacactcataaatgggttatgcaaagtgggatggacacatgctgctttaaatcttttagagaagctacccaacgaaaatgtgcatcctgacattgtgacatacaacattctcattagttggcactgcaaagtcagattgcttgatgatgccgctatgcttctagacaaagcaataagtggaggaatagttcctaatgagcgaacgtggggaatgatggtgcaaaattttgtcagacagacagtcaatctcgagggttactaaaaggatttattgtatatgttgtatgtcatatcagttttgggactccgcagctcgatatgcttttagatcaatatgggcacatcttaacttccagcatactgcctgccgtgcatgtcgtcatgtcgatctggactgttggagccctttttctcttaggttactgattaaccaccaaagcaaatagccattgacagaattcaaccagagtcttggctgaaaattcttgaatgggaatggaagatctctggtagcacagtggtcatgttgtgagtgatatataatggacctttctactgttccagctgcacatcctacctgcagtagtgaaccaccctaagtggcagtgaactatcaagtaagtagttgaatatacctatgaagcatggaccagagtctccctggggtggttggcactagtcgtgaacttgcgatgctgctgtctgtggtcagcgtttccacggcacttaagggtcaacatttaaggaacactccgtcgtgctgaacccaagcactttgattgatggaatgctgaaaaaaaaagcatgcgtgtggcccatgaaagcatggcaaggcctcccagcacaatatattgggtgtagccgtgtaggggtgctcttaatctagataaaccttatagtgtcaactacatgattggaggatgggtggccaactaagataaaaaaatataaagtcgttggctcttctagagcaacaacattgtgttggagcatctggcttaagggaaatgatattgtgtttgaaaaccaaactctgttttttttggtatgtgcatgttatattcactatcattcattgatgctatagaagcaag

SEQ ID NO: 201196 - DNA, 1290 bp, Zea Mays
  misc_feature (1289)..(1290): n is a, c, g, or t
tagcattctcctgattgccacggtaaaagttattcaggattctagacctatacatgacaaacttgttgattctttcttgaacaaaatttttccatcaggttatccatacagtgtgaatgaaggttacttaacttataccaaattccgtgtgctacagcatttctcgagtgctatgctacatgtgctatcaacacagtccttgctgtttgctgcaggtttgcgacctaccccggcgcaagcaactgctgtaagttgggtaagcatatgatgtcagagatgctaaagtccaagcagcacgcaggaaagctcatttgtagcagcatgggtgcaagaatggattctgaaccaaagagttggaggatacttgctgatgttctctacgatcttggtactgcattggaagttgtttcgccgctgtgtccacaacttttccttgaagtagcaggcttgggaaattttgcgaagggaatggccgttgttgcagcaagagcaacgaggcttccaatttactcttctttcgccaaagaaggcaatcttagtgatttatttgctaaaggggaagccatatcaacacttttcaatgtcatgggaattggagctggaattggattggcatctactgtttgttcaacaactcaaggcaagttaattgcaggcccgttactttccgcagtgcatatatatggggtcatccaagagatgagagcaactcctgtaaacacactcaacccacaaagaacagcaatgatcgtggctgattttatcaagagtggaaaggtttctagccccgccgagctaaggtacaaggaagacctcctgtttcccaaccgagttatagaagaagccggcagtgtgaaaatcggtcagccacttcgcaaagtgttcagtccccggcttgttgagcagctgagggcgactttcccaggcgagaaatttctgctcagccagaaaagcaacaggacgtacatggttctggagcgaagcgcgagcggagaggacgcgctgagggggtggctggtcgccgcgttcgcttcggagatggagaggtcaggcgccggctcacgcgatgacgcggttctgagcgaggcctacgagaagatggagcgggtcttccccaccttcgtgtcagaagttaggagtagggggtggtacaccgatcagtttttggacgggaactgtagtcgagtctcgtttgccaagtttcggtagtcgcagagactgtatatggtctatgttttttggaggggagatgcggaaccatgaactcatgcatgcagggcagtgtagtnn

SEQ ID NO: 201197 - DNA, 1030 bp, Zea Mays
  misc_feature (1029)..(1030): n is a, c, g, or t
gcatatgatgacagagatgctaaagtccaagcagcacgcaggaaagctcatttgtagcagcatgggtgcaagaatggattctgaaccaaagagttggaggatacttgctgatgttctctacgatcttggtactgcattggaagttgtttcgccgctgtgtccacaacttttccttgaagtagcaggcttgggaaattttgcgaagggaatggccgttgttgcagcaagagcaacgaggcttccaatttactcttctttcgccaaagaaggcaatcttagtgatttatttgctaaaggggaagccatatcaacacttttcaatgtcatgggaattggagctggaattggattggcatctactgtttgttcaacaactcaaggcaagttaattgcaggcccgttactttccgcagtgcatatatatggggtcatccaagagatgagagcaactcctgtaaacacactcaacccacaaagaacagcaatgatcgtggctgattttatcaagagtggaaaggtttctagccccgccgagctaaggtacaaggaagacctcctgtttcccaaccgagttatagaagaagccggcagtgtgaaaatcggtcagccacttcgcaaagtgttcagtccccggcttgttgagcagctgagggcgactttcccaggcgagaaatttctgctcagccagaaaagcaacaggacgtacatggttctggagcgaagcgcgagcggagaggacgcgctgagggggtggctggtcgccgcgttcgcttcggagatggagaggtcaggcgccggctcacgcgatgacgcggttctgagcgaggcctacgagaagatggagcgggtcttccccaccttcgtgtcagaagttaggagtagggggtggtacaccgatcagtttttggacgggaactgtagtcgagtctcgtttgccaagtttcggtagtcgcagagactgtatatggtctatgttttttggaggggagatgcggaaccatgaactcatgcatgcagggcagtgtagtnn

SEQ ID NO: 201198 - DNA, 1325 bp, Zea Mays
atcggcatctcggcaagacgacaacacatgccacagccacacgcgacacacctgtctcggctgtggcgagcgcgatggccgcaaacgtggcgctggtgctgctatcctcctgctcgccctccacttccgccgccgccgcctcgctcctccctcgccgccgcttcctgccctcccgccgaagaagagcaagctcccgagccaccaccatcatgtcggcgttgggcgatgacccgatcagggaatggattcttacagaagggaaggccacgcagataaaagggatcaggtccattggtggtggctgcattaactccgctcagcgctatgataccgacgcgggccccttctttgtgaagaccaacagccgcattggtccagaaatgtttgaaggggaggctcttggtttgaaggcaatgtatgacacaaagtcgatccgtgttccgttgccatacaagtataggttggttctttacctacaggtggttcttttatcatcatggagtttattgaatttggtcgttcaaggggagaccagatttgggaaggaagcttgctgaaatgcataaggctgctaaatctgataaaggatatggtttcccggttgacaatactattggaagcactccacaaattaacacttggactgatgactggattgagttttactccaagcatagattgggttaccagttggagttggcatcgagacgatatggagattcggccatactcgaaaaaggtcagcggttgatcaagaatatccgcccactttttgatggagcggttattgagccatgcttgcttcatggtgatctgtggagcggaaacataagctctgatagcaatggggatcctgtaatattggatcctgcttgctactatggacacaacgaggcagagtttgggatgtcctggtgtgctggatttggtggggacttctacaacgcctattttcaggtgatgccgaaacagccagggtttgagaagaggagggacctctatctcctctaccactacctgaatcactacaatctctttggctctggctaccgttcatcagctatgtccataatcgaagactacctatatgtgctggcgatttagtctcttctgtctattcccacatggccacatggaaacgaaaaagatcttcatttgtgtaaataaatatctcactgcccatccatttggacacggttcggtggctcaaagaagaataatgtaatagtatagtggactctgattgaatttggcccgtcctactaaactaacaccaggaggcgcccgggggggctatattgttaacaacgttagtgaaaagccca

SEQ ID NO: 201199 - DNA, 788 bp, Zea Mays
aaaagacataaacaccataaaaaagagctcatttaccatccgcaggagctcccttccagacgcttccgctcttctctctctgcttccggcagaaatcaaggcagtattaggatggtgacccggcgcctcttcgcgcgactctaccggcattgcgccggcgcagcggctgcgtcatcagccgcggggcggcaccggggggccctggcagcggcggccgtggagcagttcgccggttcctccctgcctgtcggggttccaaatattttgaatcatcatttcagatactcaaccagcatttttcaaaagattggtttctcgtctgtttcaccacaacaaagtgatgatgaggttaatgagctgaaagaccacgaaagggccttagatggatcaagtgaagattgtccatctggaagtattgaaggccttgatctgtcgagagatgatttggtgaagctagttcgtgagaaggatgaattgttgaagtccaaagatggtgaaatcaaagatatgaaggataaggttttgcgcagctatgcagaaatggaaaatatcattgctcggacaaaacgtgaatctgagaactccaaaaaatatgcagtacagaacttctctaagagcctgctagatgttgctgacaatttggctagggcatcatctgttgtcaaggaaagcttctcgaaaattgatacctcaaaagattctgctggagctgtcccactactgaaaaccctgctggagggtgtggacatgactgagaagcaacttgcagaggttccctccaatctaaa

SEQ ID NO: 201200 - DNA, 771 bp, Zea Mays
acatttcttttatcccaaagttgggaacgtgtcgtgggtatggtctccagtgcttgtcatcatctcattgtcaactgaagcctgttttatgaatcttcgaagattggtgttcagaaaaagacaaaaaaatgcaaattgcacatgaatcgagcggggaaatgtcgtttggatggggacgtcagccagctttcttgggaacatttagcaagaggcttaacaggtgtttcaatgatgctacaaatggggttccaggtgatggttggtctctaatgagcaatgatggtgctgaggatgttcctattgttgtcgactctttctccaaacaaacttattggtgctcatgtcaactcctcccagatgttttttgactgttgaaggtggtctcctgcgtgttaaggtataaattggatgaacttgcggaactgatccaagctgagcggacagagatcccggccgccactgatgatgcctgagttgaagaagagcagagggattcgtcgtcctggaattggaacagaaccgctctgtgctctgtcagtgtcatgaattaattaagagctccgcgtctgaaaattattgcagtatatatatcctgggctgggacgcatgcataccaagcgcgccggcctgttgtagcagcttcgctttatactgtgcgtagaagttgatctgtgtaggaatataaaataatccagtggccaccaggcggacaggaacagcttgttgctccataacaccatgattattagctaccttgctttcaagcgtttc

SEQ ID NO: 201201 - DNA, 789 bp, Zea Mays
aaggatgtcaaagaaacatttcttttatcccaaagttgggaacgtgtcgtgggtatggtctccagaagtgcttgtcatcatctcattgtcaactgaagcctgttttatgaatcttcgaagattggtgttcagaaaaagacaaaaaaatgcaaattgcacatgaatcgagcggggaaatgtcgtttggatggggacgtcagccagctttcttgggaacatttagcaagaggcttaacaggtgtttcaatgatgctacaaatggggttccaggtgatggttggtctctaatgagcaatgatggtgctgaggatgttcctattgttgtcgactctttctccaaacaaacttattggtgctcatgtcaactcctcccagatgttttttgactgttgaaggtggtctcctgcgtgttaaggtataaattggatgaacttgcggaactgatccaagctgagcggacagagatcccggccgccactgatgatgcctgagttgaagaagagcagagggattcgtcgtcctggaattggaacagaaccgctctgtgctctgtcagtgtcatgaattaattaagagctccgcgtctgaaaattattgcagtatatatatcctgggctgggacgcatgcataccaagcgcgccggcctgttgtagcagcttcgctttatactgtgcgtagaagttgatctgtgtaggaatataaaataatccagtggccaccaggcggacaggaacagcttgttgctccataacaccatgattattagctaccttgctttcaagcgtttc

SEQ ID NO: 201202 - DNA, 1162 bp, Zea Mays
ttctgctgctcttcttttcatctcatctctggcctccattggggacaaggagtggtacttctacgtgccgagagaccgcaagtaccgcaacggcgaccgccccaaccgggtgacgccgtcgggctactggaaggccacgggggccgaccggacggtgtacgtcgaggtcaagcggccgatcgggctcaagaagacgctggtattctacgtggggaaggcgcccaagggacttaggagcagctggatcatgaacgagtatcgccttccttccggcgaggctgaccgctaccaaaaggaaatttctctttgcaaagtgtacaaacgaccagggatcgaggacaactttcacctcagcaccaccacggcaagatcatctggctcaaaggcagcagcaaacatggacaagaagcaccaccggacgtcggcgtcgccccgcctggcgccgatgttcgacggtggccactcatcagctcacatgaacaagccatacggtggagcaaacaccgccatagccataacatcatcagctgcagctcgagcagtaacaatggtgcctcagacgtcaatgttcctatcaacaccctcacttagctccaccacgtcgacggaggaggacggtacatcactctacctcatgaagggtgctaataactcaccgatgttgcattcttccacacatgccctgcttaatgcaaactcggctacaatggcaacaattccaatagatgagctgagtagggcaatcggatcatatagtagccaaggaaaccctaaccatcccttgccatcacaaggtccattgcttccttttcctagtatggaaaagatttgggattggaatccactcctagaatctcccaaggtttgcacaagcttcaagtgacttccaagtgactcgaagcatatatatgcatgcatgcttgcacgtattatatatatgaatacaggtgtgtgtatatgtgcaggcgccacaaaattattatttgggctagaatatggttaagatgtaatggaatatatagggtgagttagttctagtcctatgcaatgcatgctccgctatattaatcagttcaccatctccacacatcaatagttggtgtaacgatatgttaatttctattatttgataatgcagaccttgtagttgaactcgattaaa

SEQ ID NO: 201203 - DNA, 807 bp, Zea Mays
ccagaagctgagagattgagggcggagcgtgattttcgcggtgattttcctgctcccatatcgttggcggccggttgatagcgagttgtgctggagggggaggtgcctgtgacaggatctgtggttgctgtccgtgggcaacaagctgtgtcgaaggaggtcgaactcccaacgcgatgtgtggtggcggggatagttcaatgacgttttcagttccaacctgtagcgatggtgctccagctcgtgttgacacggtcgatctgagagctgcctacagagagaaggtgctaattgaagcagagaaacagtttcaggacgatttcaattttttgaaggaaaaggtattagttgattttggccaattagtggatgtccaacgtattgacagtatttgccaagttatgtgcgacaagttcaagggttgttgttcggtttgcaagacaatgtgtattgaagctatagtcgattctgtgaaaattatggttgaagcaatgtctatcaagcatcaggagattttgaattccatgaaccctctagtgaaaactatggctgttaagcagatgagaaatacacccatactgatatcaatgtacaaccagctattgttaagtcggatgagaaagtcgttgttgcagactttgttgagtcatctgatgggaaaaggtcttggtgtgggtactagcaatcctctggtaacagtgcccatacatctgaacacatcaacacaccagtcgtttataggtcggatgcaaatactgcaacttctgtgaagcccccagcggtctcatgttgctggggcagttcctc

SEQ ID NO: 201204 - DNA, 2334 bp, Zea Mays
aaaaaagaatataaataaaaaataatatcatacatatacatttaaatagcctccaccactcccttctcgcgacctcagaatctcacggcatcacgcgaagcaaggagaaagaaaatggcgcagctggtggagacgtacgcgtgctcgccggcgacggaacgcggccgtggaatcctcctggccggggaccccaagacggacacgatcgcctactgcaccggccgcagcgtcatcattcgccgcctcgatgcgcccctcgacacttgggtctaccccgaccacgcctaccccaccaccgtcgcccgcttctcccccaacggcgagtgggtcgcctccgccgacgcctccggctgcgtccgcgtctggggccgctacggcgaccgcgcgctcaaggccgagtttcgccccctctcgggacgcgtcgacgacctccgctggtccccggacggcttacgcatcgttgtctccggggacggcaagggcaagtccttcgtccgcgcattcgtatgggactctggcagcacagttggtgagtttgatgggcactcaaagagggttctgagctgtgacttcaagccaacacgtccatttcgcattgtgacatgcggtgaagattttctggctaacttttatgaaggaccgccattcaaattcaagcattccataagggatcactcgaattttgttaactgtatccggtatgctcctgatggtagtaagtttatcactgtgagttctgataagaagggtttgatatatgatggtaaaactggagaaaaaataggagagctttccactgaaggcggtcacacagggagcatatatgctgttagctggaatcctgacagtaaacaggttctaacagtttctgctgataaatctgcgaaagtatgggatatctttgaagatgcaagtgggaaattgaatcgaactttggtttgccctggtataggaggtgtggatgatatgcttgttggttgtctctggcagaatgatcatctcgtgacagtctctcttggtgggacatttaatgtgttctctgcaagcaacccagaccaagaaccagttacatttgcaggacatttgaagactgttagttctttggtcttctttcctcaaagtagcccaagaactatactatctactagctatgatggtgtcatcatgaggtggatattgggtgttgggtttggtgggagactgatgcgcaaaaacaacactcaaataaaatgctttgctgcagtagaagaagagcttgttacctcaggttatgataataagatcttcaggattcctcttaatggaaaccagtgtggagatgctgagtcagttgatgtaggtggtcagccaaatgctttgaaccttgcacttcaaaaacctgaatttgcactggtcactactgattctgggattgtattgctgcacaactcaaaagtcatttctacaaccaaagttaactataccatcacttcatcttcggtgtctcctgatgggacagaagctgttgtgggtgctcaagatgggaaactgagaatctattccatcagtggtgatacacttacagaagaagctctgcttgagaagcaccggggtgctatcacttccatacattattcaccagatgtttctatgtttgcttctgctgatgccaacagggaagctgttgtgtgggatcgggccagtagagagatcaaactgaagaacatgttgtaccacacagctaggataaactccctggcttggtcaccggacagtcgattggttgccactggctcactggacacctgtgcaattgtctacgagatagacaagccagtagccagtcgcgtcactatcaagggagctcatctgggtggagttcatggtttaaccttcctggagaatgatactctggtgactgccggcgaggatgcttgcattcgtgtttggaaggtggtggagtaataggttactcattattctggtgtgcattgagaatgtctttgctattcattggaataaacttctttctttttctgtgcttgttggtacggttgttgttacctgacaggtcatagcatcgttgttgccttctcagcgatttgtgctctaaatttcctttacaattcttttttgagttgtattatttttgcctttttccccgaaagaaagactcctttgtaagtgtatctccgcatctgattttgtcaggaactgtgagaatatagggatactactgttgcttttctcccctatgtcttgaaatagtcgggtaccatagatcgagagaggctgaaggatagagcaaggctgcaaggggcctaggttggaggtacaccgattttagatactgtt

SEQ ID NO: 201205 - DNA, 2855 bp, Zea Mays
gtgaatcttccggtgaacatgctgcctgtgacttatccacagagccataattaccaacaagatgatttccacaaagctgttgcacggaccttgagccaaggatcagcacctatgagcatggatttccatccacttcaacaaactcttcttcttgttggtaccaatgttggcgacattggattgtgggatgttggtaccaaagagagactcgttgtaagaaacttcaaagtctgggaccttggtaaatgtacaatgaccctacaggcagcactggttaaggacccagctgtgtcagttaatcgcataatatggagtcctgatggaaccttgtttggtgttgcttattcaaggcatattgtacagatttattcctataacggtggcgatgatattagacaacacttggagattgatgcacatgttggtggtgtaaatgacatagcatttgctcatccaaataagcagctatgtataattacatgtggagatgataagacaattaaggtatgggaggccactagtggagctaagcaatttacctttgaaggacatgaagctcctgtttattctgtgtgtccacattacaaggaaaatattcagttcatcttctcaactgctttagatgggaagatcaaggcatggctatatgataatttgggatctagagttgactatgatgcaccaggtcattggtgcactacaatggcatatagtgcagatggttcaaggttattttcatgtgggactagcaaggatggtgaatcacatctagtagaatggaatgaaagtgaaggagcagtgaagagaacatatcagggattccgtaagcgatctatgggtgttgtgcaattcgataccacccggaacaggtttttggccgcgggggacgaattcatgattaagatatgggacatggacagcacgggtcttctgactaccattgatgctgatggtggcttaactgcaagtccacggatacgcttcaacaaggagggaactctattggctgtctccactgctgacaatggtatcaagatcttagcaaatgctgatggacttcggttgctgcgcacactggaaaatcgttcttttgatgcttctcgtaatgcatctgaggctgtaacaaagcctctaataaatcccttgactgctgcggcaaatgcagctgcagcaagcagttcaggagctggtgctccgtcagctataactgcaatgaatggtgatagcagaagtttggttgatgtaaaacctagaatagctgatgagtcacttgacaagtcaaaggtatggaagcttatggagataactgagtcaagtcagtgcagatcaatcaaactggcggataacatgagaacaagcaagatttcgagattgatttacacaaactctggtcttgctatcttggctttaacttcaagcgctgttcatctactctggaaatggccacgcagtgatcggaattctggaaaggcaaccgcaagtgtatctcccactctatggcaaccaccaagtggcatcttgatgactaatgacacgactgacaataatcctgaagaagctgttcactgctttgctttgtcgaagaatgattcatatgtcatgtctgcttctggaggaaaaatctctctgttcaacatgatgactttcaagacaatgacaacgtttatgcctgcaccgccggcagcaacttttcttgcatttcatccccaagataacaacataattgcaattggaatggatgactcaaccatccaaatctataatgtccgaattgatgaggtcaaaagcaagctcagaggtcactctaagagaatcacaggtcttgccttttcaaatgtgctaaatgttttagtctcgtcaggagctgatgcccagttatgtgtttggaacacggatggatgggagaagcaaaagaacagatttttgcagataccatcaggtcgccaatccaatatcttggacactcgtgttcagttccaccaagatcaaatgcactttcttgttgtgcatgaaacccagattgccatctatgaaactacaaaactagaaccagtgaagcagtggcctgttcgagagaattcacctccaatcacacatgccacattctcgtgtgatagtcaactgatctatgcaagctttatggatgccactgttggcatatttaatgggtcgagtttgagacttcaatgtcggattcttccagcttcgtatcttcctccaaatatcagtccgagcgttcatcctgttgtggttgcggcacacccttcggaagcaagccagtttgctctagggctgactgatggtggtgtttttgtgttggaacctttggaatcggagagaaaatggggaaatcctccaccagtagagaatgggtctgctagcaacttgtccacaccgcctcctaatggagcttcaagttctgaccaaccagaaagatgattaagaagttggaactggtagatttttcgtggcacgagtctaaccaagaagggcttcaaagggtggtgcgactaaccttggcagataggttccaagggagccggacaatgcgctcaataaaaataagttcaacagaagtttgtccgttgcttgtataaatatttgtattgactatcgagtgaggagtcctagtatttcatttttgctttgtttgcggtgctgtgaaaaggatcagtagataagctgtagtacaacaactatcagactggctgtacttacctatatttatgactattagttaatgtatgttgtttcatttgcctttttggctccgttcagccgtttttgctatcataaagtgctgtttctgaactcgcattagcattgtgcgcctcttttgatgaacgaggctcaac

SEQ ID NO: 201206 - DNA, 3258 bp, Zea Mays
gtttgcttagaatatttgtgcagcaactctcttaaactggcagcaccagctttgcaagaaccctagacctaatcctgacatcaagaccctttttgttgatcattcatgtggacaaccgaatggtgcacgtgctccatcaccagcaaacagtccgttacttggatctatgcccaaacctggaggtttccctccattgggtgctcatggaccttttcaacctgcaccaacacctgtcccacctctggctgggtggatgtcaaaccctccagcaataacacatcctgctgtgtctggtggtgccattggatttggcactccaacaaatcctgccgttttgttgaagcatcctagaacacccacaactggtaatcctggtatggattatccatcaggagattctgaccacatttccaagagaactagaccggttggcatgtctgaggagagccataattaccaacaagatgatttccacaaagctgttgcacggaccttgagccaaggatcagcacctatgagcatggatttccatccacttcaacaaactcttcttcttgttggtaccaatgttggcgacattggattgtgggatgttggtaccaaagagagactcgttgtaagaaacttcaaagtctgggaccttggtaaatgtacaatgaccctacaggcagcactggttaaggacccagctgtgtcagttaatcgcataatatggagtcctgatggaaccttgtttggtgttgcttattcaaggcatattgtacagatttattcctataacggtggcgatgatattagacaacacttggagattgatgcacatgttggtggtgtaaatgacatagcatttgctcatccaaataagcagctatgtataattacatgtggagatgataagacaattaaggtatgggaggccactagtggagctaagcaatttacctttgaaggacatgaagctcctgtttattctgtgtgtccacattacaaggaaaatattcagttcatcttctcaactgctttagatgggaagatcaaggcatggctatatgataatttgggatctagagttgactatgatgcaccaggtcattggtgcactacaatggcatatagtgcagatggttcaaggttattttcatgtgggactagcaaggatggtgaatcacatctagtagaatggaatgaaagtgaaggagcagtgaagagaacatatcagggattccgtaagcgatctatgggtgttgtgcaattcgataccacccggaacaggtttttggccgcgggggacgaattcatgattaagatatgggacatggacagcacgggtcttctgactaccattgatgctgatggtggcttaactgcaagtccacggatacgcttcaacaaggagggaactctattggctgtctccactgctgacaatggtatcaagatcttagcaaatgctgatggacttcggttgctgcgcacactggaaaatcgttcttttgatgcttctcgtaatgcatctgaggctgtaacaaagcctctaataaatcccttgactgctgcggcaaatgcagctgcagcaagcagttcaggagctggtgctccgtcagctataactgcaatgaatggtgatagcagaagtttggttgatgtaaaacctagaatagctgatgagtcacttgacaagtcaaaggtatggaagcttatggagataactgagtcaagtcagtgcagatcaatcaaactggcggataacatgagaacaagcaagatttcgagattgatttacacaaactctggtcttgctatcttggctttaacttcaagcgctgttcatctactctggaaatggccacgcagtgatcggaattctggaaaggcaaccgcaagtgtatctcccactctatggcaaccaccaagtggcatcttgatgactaatgacacgactgacaataatcctgaagaagctgttcactgctttgctttgtcgaagaatgattcatatgtcatgtctgcttctggaggaaaaatctctctgttcaacatgatgactttcaagacaatgacaacgtttatgcctgcaccgccggcagcaacttttcttgcatttcatccccaagataacaacataattgcaattggaatggatgactcaaccatccaaatctataatgtccgaattgatgaggtcaaaagcaagctcagaggtcactctaagagaatcacaggtcttgccttttcaaatgtgctaaatgttttagtctcgtcaggagctgatgcccagttatgtgtttggaacacggatggatgggagaagcaaaagaacagatttttgcagataccatcaggtcgccaatccaatatcttggacactcgtgttcagttccaccaagatcaaatgcactttcttgttgtgcatgaaacccagattgccatctatgaaactacaaaactagaaccagtgaagcagtggcctgttcgagagaattcacctccaatcacacatgccacattctcgtgtgatagtcaactgatctatgcaagctttatggatgccactgttggcatatttaatgggtcgagtttgagacttcaatgtcggattcttccagcttcgtatcttcctccaaatatcagtccgagcgttcatcctgttgtggttgcggcacacccttcggaagcaagccagtttgctctagggctgactgatggtggtgtttttgtgttggaacctttggaatcggagagaaaatggggaaatcctccaccagtagagaatgggtctgctagcaacttgtccacaccgcctcctaatggagcttcaagttctgaccaaccagaaagatgattaagaagttggaactggtagatttttcgtggcacgagtctaaccaagaagggcttcaaagggtggtgcgactaaccttggcagataggttccaagggagccggacaatgcgctcaataaaaataagttcaacagaagtttgtccgttgcttgtataaatatttgtattgactatcgagtgaggagtcctagtatttcatttttgctttgtttgcggtgctgtgaaaaggatcagtagataagctgtagtacaacaactatcagactggctgtacttacctatatttatgactattagttaatgtatgttgtttcatttgcctttttggctccgttcagccgtttttgctatcataaagtgctgtttctgaactcgcattagcattgtgcgcctcttttgatgaacgaggctcaac

SEQ ID NO: 201207 - DNA, 4223 bp, Zea Mays
gtttatactccccaacctggttcgatagtgatttcatcttcctctaccaggcggctccgtggtccgtgctgatcaactgcatcaaggatcgtcgccggcggcgcgctggcagcagttcgcacggcgagatcggattgatcgagatcttctaggcctggacctgcgctagacctcgaagcctcgatcgcaccgcatcttctctctctgctgctggtccgctccgtcgccgccgaccccgccgccagcttccccttccacctaaaaggacgacctctggccgcccttgtcccgccccgacgcctcggtttccactgcataggcgtggtgcggcgatccgtccgggcctagggttgcgagagacactatagggtacgaccctaggagcatccgcctccacgtgggtgaggcggaagagggaggatgacatcgctcagccgtgagctggtcttcctcatcctgcagttcctcgatgaggaaaaattcaaagagacagtccacaagctcgagcaggagtccggattctatttcaacataaagtactttgaggacgaagtcctcaatgggaattgggatgaggtggagcgctaccttggtggattcaccaaggttgacgataaccgctactccatgaagatattctttgagatccggaagcagaagtatctggaggctcttgataagcatgatcggtcaaaggctgttgaaatcttggtcaaggaccttaaggtctttgcatccttcaatgaggagttgttcaaggagatcacacagcttctaaccttggagaattttagggaaaatgagcagctctcgaagtatggtgatacaaaatctgcaagacaaataatgcttgctgagctgaagaagctgattgaagctaatcccttgttccgtgacaaactacaatttcccagcctgaagacttctaggttgcggacacttattaaccagagcttaaactggcagcaccagctttgcaagaaccctagacctaatcctgacatcaagaccctttttgttgatcattcatgtggacaaccgaatggtgcacgtgctccatcaccagcaaacagtccgttacttggatctatgcccaaacctggaggtttccctccattgggtgctcatggaccttttcaacctgcaccaacacctgtcccacctctggctgggtggatgtcaaaccctccagcaataacacatcctgctgtgtctggtggtgccattggatttggcactccaacaaatcctgccgttttgttgaagcatcctagaacacccacaactggtaatcctggtatggattatccatcaggagattctgaccacatttccaagagaactagaccggttggcatgtctgaggagatgaatcttccggtgaacatgctgcctgtgacttatccacagagccataattaccaacaagatgatttccacaaagctgttgcacggaccttgagccaaggatcagcacctatgagcatggatttccatccacttcaacaaactcttcttcttgttggtaccaatgttggcgacattggattgtgggatgttggtaccaaagagagactcgttgtaagaaacttcaaagtctgggaccttggtaaatgtacaatgaccctacaggcagcactggttaaggacccagctgtgtcagttaatcgcataatatggagtcctgatggaaccttgtttggtgttgcttattcaaggcatattgtacagatttattcctataacggtggcgatgatattagacaacacttggagattgatgcacatgttggtggtgtaaatgacatagcatttgctcatccaaataagcagctatgtataattacatgtggagatgataagacaattaaggtatgggaggccactagtggagctaagcaatttacctttgaaggacatgaagctcctgtttattctgtgtgtccacattacaaggaaaatattcagttcatcttctcaactgctttagatgggaagatcaaggcatggctatatgataatttgggatctagagttgactatgatgcaccaggtcattggtgcactacaatggcatatagtgcagatggttcaaggttattttcatgtgggactagcaaggatggtgaatcacatctagtagaatggaatgaaagtgaaggagcagtgaagagaacatatcagggattccgtaagcgatctatgggtgttgtgcaattcgataccacccggaacaggtttttggccgcgggggacgaattcatgattaagatatgggacatggacagcacgggtcttctgactaccattgatgctgatggtggcttaactgcaagtccacggatacgcttcaacaaggagggaactctattggctgtctccactgctgacaatggtatcaagatcttagcaaatgctgatggacttcggttgctgcgcacactggaaaatcgttcttttgatgcttctcgtaatgcatctgaggctgtaacaaagcctctaataaatcccttgactgctgcggcaaatgcagctgcagcaagcagttcaggagctggtgctccgtcagctataactgcaatgaatggtgatagcagaagtttggttgatgtaaaacctagaatagctgatgagtcacttgacaagtcaaaggtatggaagcttatggagataactgagtcaagtcagtgcagatcaatcaaactggcggataacatgagaacaagcaagatttcgagattgatttacacaaactctggtcttgctatcttggctttaacttcaagcgctgttcatctactctggaaatggccacgcagtgatcggaattctggaaaggcaaccgcaagtgtatctcccactctatggcaaccaccaagtggcatcttgatgactaatgacacgactgacaataatcctgaagaagctgttcactgctttgctttgtcgaagaatgattcatatgtcatgtctgcttctggaggaaaaatctctctgttcaacatgatgactttcaagacaatgacaacgtttatgcctgcaccgccggcagcaacttttcttgcatttcatccccaagataacaacataattgcaattggaatggatgactcaaccatccaaatctataatgtccgaattgatgaggtcaaaagcaagctcagaggtcactctaagagaatcacaggtcttgccttttcaaatgtgctaaatgttttagtctcgtcaggagctgatgcccagttatgtgtttggaacacggatggatgggagaagcaaaagaacagatttttgcagataccatcaggtcgccaatccaatatcttggacactcgtgttcagttccaccaagatcaaatgcactttcttgttgtgcatgaaacccagattgccatctatgaaactacaaaactagaaccagtgaagcagtggcctgttcgagagaattcacctccaatcacacatgccacattctcgtgtgatagtcaactgatctatgcaagctttatggatgccactgttggcatatttaatgggtcgagtttgagacttcaatgtcggattcttccagcttcgtatcttcctccaaatatcagtccgagcgttcatcctgttgtggttgcggcacacccttcggaagcaagccagtttgctctagggctgactgatggtggtgtttttgtgttggaacctttggaatcggagagaaaatggggaaatcctccaccagtagagaatgggtctgctagcaacttgtccacaccgcctcctaatggagcttcaagttctgaccaaccagaaagatgattaagaagttggaactggtagatttttcgtggcacgagtctaaccaagaagggcttcaaagggtggtgcgactaaccttggcagataggttccaagggagccggacaatgcgctcaataaaaataagttcaacagaagtttgtccgttgcttgtataaatatttgtattgactatcgagtgaggagtcctagtatttcatttttgctttgtttgcggtgctgtgaaaaggatcagtagataagctgtagtacaacaactatcagactggctgtacttacctatatttatgactattagttaatgtatgttgtttcatttgcctttttggctccgttcagccgtttttgctatcataaagtgctgtttctgaactcgcattagcattgtgcgcctcttttgatgaacgaggctcaac

SEQ ID NO: 201208 - DNA, 1015 bp, Zea Mays
atggagtacatgtacatatataggcatggaaaatctaagattgcccgtgagttgcgcttgagggatattggtggcattatcattgtggattttatcgatatgtcagatgattcaaacaaaaaactagtatatgaagaaatgaagaaagcagtagaaaaggatcgatcaacagttggtgtttcagaactatcaaagctaggtttgatggaaataactagaaaaagggtccgaccaagcgttactttcatgatcagtgagccatgtacatgctgccatggtactggtcgtgtggaagctcttgacacatcgttttcaaagatcgaacgtgaaatatgtcgacgtcttgctgcctctcgacgaaaatcagaccctgagaaaccaaaatcatggccaaggtttctgcttagagtggatcatgagatgtgcacgtatttgacgtccggaaagaagacaaaactaggactcctgagtagctcccttaaagtgtggattttgttgaagattgccagaggtttctcccgtggcgcttttgaactgctaccgtactcggagaaggaaaactactctatggagaaagaaacatcagagttgccccaaaaagagtccaggcccaagctatctgtctttcctatcaagaagtggatgagccgggccaagcgtgctaagtgattctcttttattagcatggggccttcctttgtattcacaacttagaatgagtaaagattcaggaagaggatcattcttttcgttcatgaaatctcagcgtcggatatctagagatctctcgaccagcttttgtttacatttttttaggaattcagacaattccatgtttagtttaatccagaaaattttcagcaaaaatgtgacgatatatataactgtgcaaatctagtacccttaatagtagtagatctcttaaatggttcttagtgttaccataagatacataatatatttatcatgagaagactacgattactcttttaagttactacattgttatgctcct

SEQ ID NO: 201209 - DNA, 1237 bp, Zea Mays
gcaacgagagggatgatcaagaccccgccttgggtaccactaaacaatgggggttctctggtcatagaacagactgaagctctggtatcagttgatgtgaatggtggtcacagtatgtttggtcagggaacttcacaggagaaggctattttagaagttaatcttgaagctgcaaagcaaattgcccgtgagttgcgcttgagggatattggtggcattatcattgtggattttatcgatatgtcagatgatttgtcactgatgccacattttcttccagcaaacaaaaaactagtatatgaagaaatgaagaaagcagtagaaaaggatcgatcaacagttggtgtttcagaactatcaaagctaggtttgatggaaataactagaaaaaggctaggacacggacatgtgtatcgcaacatcctctgtggtggctttggcgaccaggtccgaccaagcgttactttcatgatcagtgagccatgtacatgctgccatggtactggtcgtgtggaagctcttgacacatcgttttcaaagatcgaacgtgaaatatgtcgacgtcttgctgcctctcgacgaaaatcagaccctgagaaaccaaaatcatggccaaggtttctgcttagagtggatcatgagatgtgcacgtatttgacgtccggaaagaagacaaaactaggactcctgagtagctcccttaaagtgtggattttgttgaagattgccagaggtttctcccgtggcgcttttgaactgctaccgtactcggagaaggaaaactactctatggagaaagaaacatcagagttgccccaaaaagagtccaggcccaagctatctgtctttcctatcaagaagtggatgagccgggccaagcgtgctaagtgattctcttttattagcatggggccttcctttgtattcacaacttagaatgagtaaagattcaggaagaggatcattcttttcgttcatgaaatctcagcgtcggatatctagagatctctcgaccagcttttgtttacatttttttaggaattcagacaattccatgtttagtttaatccagaaaattttcagcaaaaatgtgacgatatatataactgtgcaaatctagtacccttaatagtagtagatctcttaaatggttcttagtgttaccataagatacataatatatttatcatgagaagactacgattactcttttaagttactacattgttatgctcct

SEQ ID NO: 201210 - DNA, 1313 bp, Zea Mays
ctgatactggaggatctcaggggaatttggttacgactatggaggcccaattgctcatgtcgcttcgtcgccttgcagcctctacacctacaggagctgctagttctgtgactcagtcctctgcatctaaaggttttgatgttggttctctatcgtccactaagggaccaccttccatttccatttcagggtaccactaaacaatgggggttctctggtcatagaacagactgaagctctggtatcagttgatgtgaatggtggtcacagtatgtttggtcagggaacttcacaggagaaggctattttagaagttaatcttgaagctgcaaagcaaattgcccgtgagttgcgcttgagggatattggtggcattatcattgtggattttatcgatatgtcagatgattcaaacaaaaaactagtatatgaagaaatgaagaaagcagtagaaaaggatcgatcaacagttggtgtttcagaactatcaaagctaggtttgatggaaataactagaaaaagggtccgaccaagcgttactttcatgatcagtgagccatgtacatgctgccatggtactggtcgtgtggaagctcttgacacatcgttttcaaagatcgaacgtgaaatatgtcgacgtcttgctgcctctcgacgaaaatcagaccctgagaaaccaaaatcatggccaaggtttctgcttagagtggatcatgagatgtgcacgtatttgacgtccggaaagaagacaaaactaggactcctgagtagctcccttaaagtgtggattttgttgaagattgccagaggtttctcccgtggcgcttttgaactgctaccgtactcggagaaggaaaactactctatggagaaagaaacatcagagttgccccaaaaagagtccaggcccaagctatctgtctttcctatcaagaagtggatgagccgggccaagcgtgctaagtgattctcttttattagcatggggccttcctttgtattcacaacttagaatgagtaaagattcaggaagaggatcattcttttcgttcatgaaatctcagcgtcggatatctagagatctctcgaccagcttttgtttacatttttttaggaattcagacaattccatgtttagtttaatccagaaaattttcagcaaaaatgtgacgatatatataactgtgcaaatctagtacccttaatagtagtagatctcttaaatggttcttagtgttaccataagatacataatatatttatcatgagaagactacgattactcttttaagttactacattgttatgctcct

SEQ ID NO: 201211 - DNA, 1938 bp, Zea Mays
ctgctgttcccgtcgaccggattcggttcggaccgcagctccccacagcccacactcgtccgtccgcccgtcgaatggcggctcccaaaccctaagccacagatcccttcccctgcctcagcttcgaacgccctcgcctcgccgccggtctttgtgtactgccgctgtgtccgtcggcgcggatcaagggtccgctccgctgcaccccgcggggagaaaggggcgggcctcggcgtcctccgctcgtcgcccgagtgtctgagtactatcaggtgcaagtccagccgaactgattgcatgacatatgaaatagcgagcgtcgaatgaccttctctatggatatggatttgaacgcatcaccggtgcctgacgatgatgagcagcagccttacaatgaaccagtggaggctgagtatgctcaggaggaacatgttgaatctgctgtcgcaacattgcgccgggaacgtgaagaaagacgcaagagactaaagagagagcagcaggatgatgggtcaaggctacattcccagcagattagggttgattatgctcctcaacccaaaaggcatagtcgcatcaaagaggcacctcagggctggttggactgtcctgcatttggggagccaatagataaaatcataccatctaaagttcctctcgatgaaacattcaatgagtcagtgcctcctgggaagcgatactcctcaaagcaactagttaacaaacaaagaaaagctggtcgtgaaataggtctggtgattgatttgacaaataccaccaggtattattcaccagctgaatggacgaagcaaggtactaagtatgcgaagattgcatgcaaggggagagatgcggtacctgacaatgaatctgttaataagtttgtctatgaggcaatgatattccttgatcgacaaaaacattcaaagaatcctaaatatattctggttcactgtacccatggtcataatcgtaccggtttcatgattattcattaccttatgcgcacacacgtatcttgtgttgctgaggcgataaatatgtttgctcaaaggcggccacctggcatatacaagagggactatattgaagcactatattcattttaccatgaggtccctgagaatatgatgatagcatgccctccaacaccagaatggaagagaccagatgatctcgatttaaatggcgaagctaagcaggatgatgacgacgacaatggtgatccagaaccaccgcgtaatgaatcagaggataaaatcatcaccaacgacgatgtgttaggggacgaagtgccatatgaccagcaagaagctttgcgtgtgctatgttataagttgcttgaaatgccccttataaggggacattcacaatttcctggatcacatccagtttctcttaacagtgaaaatctgcaactacttagacagcgatactactatgctacatggaaagctgacggaacacgatatatgatgcttataatgagagatggttgtttcttgattgatcgaaatttttgctttagaagggttcagatgcgctttccccataagagccttgaaggtctgcatgatatgaccttgattgatggagagatgattatagacacggtaccagattcaggcttgaagagaaggtacttggcatatgatcttatggcacttggtgcagtgtccaaaactaagttgccgttttctgaaaggtggaaaatgctggaagatgaaataatacgaccacgttattatgagaaaaataaatttgagagtggttctaagagcaatccgttgtacaaatatgacatggaattattttcggttagaagaaaagatttttggctgctctcaacagtaaaaaaggttcttaaggtgttcattccatccctttgccatgatgctgatggccttatatttcaggcttgctatcggaaaaagcgaa

SEQ ID NO: 201212 - DNA, 3172 bp, Zea Mays
ctgctgttcccgtcgaccggattcggttcggaccgcagctccccacagcccacactcgtccgtccgcccgtcgaatggcggctcccaaaccctaagccacagatcccttcccctgcctcagcttcgaacgccctcgcctcgccgccggtctttgtgtactgccgctgtgtccgtcggcgcggatcaagggtccgctccgctgcaccccgcggggagaaaggggcgggcctcggcgtcctccgctcgtcgcccgagtgtctgagtactatcaggtgcaagtccagccgaactgattgcatgacatatgaaatagcgagcgtcgaatgaccttctctatggatatggatttgaacgcatcaccggtgcctgacgatgatgagcagcagccttacaatgaaccagtggaggctgagtatgctcaggaggaacatgttgaatctgctgtcgcaacattgcgccgggaacgtgaagaaagacgcaagagactaaagagagagcagcaggatgatgggtcaaggctacattcccagcagattagggttgattatgctcctcaacccaaaaggcatagtcgcatcaaagaggcacctcagggctggttggactgtcctgcatttggggagccaatagataaaatcataccatctaaagttcctctcgatgaaacattcaatgagtcagtgcctcctgggaagcgatactcctcaaagcaactagttaacaaacaaagaaaagctggtcgtgaaataggtctggtgattgatttgacaaataccaccaggtattattcaccagctgaatggacgaagcaaggtactaagtatgcgaagattgcatgcaaggggagagatgcggtacctgacaatgaatctgttaataagtttgtctatgaggcaatgatattccttgatcgacaaaaacattcaaagaatcctaaatatattctggttcactgtacccatggtcataatcgtaccggtttcatgattattcattaccttatgcgcacacacgtatcttgtgttgctgaggcgataaatatgtttgctcaaaggcggccacctggcatatacaagagggactatattgaagcactatattcattttaccatgaggtccctgagaatatgatgatagcatgccctccaacaccagaatggaagagaccagatgatctcgatttaaatggcgaagctaagcaggatgatgacgacgacaatggtgatccagaaccaccgcgtaatgaatcagaggataaaatcatcaccaacgacgatgtgttaggggacgaagtgccatatgaccagcaagaagctttgcgtgtgctatgttataagttgcttgaaatgccccttataaggggacattcacaatttcctggatcacatccagtttctcttaacagtgaaaatctgcaactacttagacagcgatactactatgctacatggaaagctgacggaacacgatatatgatgcttataatgagagatggttgtttcttgattgatcgaaatttttgctttagaagggttcagatgcgctttccccataagagccttgaaggtctgcatgatatgaccttgattgatggagagatgattatagacacggtaccagattcaggcttgaagagaaggtacttggcatatgatcttatggcacttggtgcagtgtccaaaactaagttgccgttttctgaaaggtggaaaatgctggaagatgaaataatacgaccacgttattatgagaaaaataaatttgagagtggttctaagagcaatccgttgtacaaatatgacatggaattattttcggtatcagattctaggattcctcctgaactataatgttcaattcatgtcctgcaaagttaattttctctttttcgtttattatatgactttaccaggttagaagaaaagatttttggctgctctcaacagtaaaaaaggttcttaaggtgttcattccatccctttgccatgatgctgatggccttatatttcagggctgggacgatccatatgtaactcgtactcatgaaggtctcctgaagtggaaataccctgagatgaattctgtggactttctgttcgagcttacgaatgataatcgtcaactggttttcctttatgagagaggaaaaaagaaactcatggatggtgcccggatagcatttactggtaacatgcatttcaatttccatgatgagttgatgaccgttaattgtgtagtcagcttctttgtctctagagtgctgatataatattctttaacacattttaaaaatattttggggtattatattttaatgacatgtgtttctattttcctgccctactattgtatttgttttatatttactgctgtttaaacttatacagacgatgtagatccatcctctatcgccgggaggattgttgaatgctcctggaataaggaagaacagtgttggtcctgtatgcgtattagatctgataaatctactccaaacgacatcaacacataccggaaggtgatgaggagtatcacagataacattaccgaggaaaagcttctcgaagagattgatgagataagtcttctcccgatgtatgctgataggatgcagcaggctcatacaaagatggcacaacaacagcggcggagattgccaccacagtgctagccagtgctggggcgctctcctaccgccctagccagctgctggcttccgtagctgtgtaattagtagaggtttcagtagccccatatgatgatggctggctgggtctggcctgccaactaattctttgcacctcatttgtgtcttctccctgccctcccacccacctgtataggcgtcgccgcagagtagtttccctgtaaattgtgtactctatgttctcccatattctcccctatggttttatttttcatgggtgtagaatagcgtttaacaagagggtggtgttctaggtacattagtgtacgcgttactatctctcggtgttgcggttgccttgtgctagaataaatatggttaccatctgttgctgatgggtcatgtggttcccccggcggatatcatgtggttgcgtggtatgggttattttcgtcttctgttttgttcgcacctgatccgatccgatcttttgttcaatgaagaagaaaaaaattattggtaaaa

SEQ ID NO: 201213 - DNA, 2670 bp, Zea Mays
ctgctgttcccgtcgaccggattcggttcggaccgcagctccccacagcccacactcgtccgtccgcccgtcgaatggcggctcccaaaccctaagccacagatcccttcccctgcctcagcttcgaacgccctcgcctcgccgccggtctttgtgtactgccgctgtgtccgtcggcgcggatcaagggtccgctccgctgcaccccgcggggagaaaggggcgggcctcggcgtcctccgctcgtcgcccgaggaacgtgaagaaagacgcaagagactaaagagagagcagcaggatgatgggtcaaggctacattcccagcagattagggttgattatgctcctcaacccaaaaggcatagtcgcatcaaagaggcacctcagggctggttggactgtcctgcatttggggagccaatagataaaatcataccatctaaagttcctctcgatgaaacattcaatgagtcagtgcctcctgggaagcgatactcctcaaagcaactagttaacaaacaaagaaaagctggtcgtgaaataggtctggtgattgatttgacaaataccaccaggtattattcaccagctgaatggacgaagcaaggtactaagtatgcgaagattgcatgcaaggggagagatgcggtacctgacaatgaatctgttaataagtttgtctatgaggcaatgatattccttgatcgacaaaaacattcaaagaatcctaaatatattctggttcactgtacccatggtcataatcgtaccggtttcatgattattcattaccttatgcgcacacacgtatcttgtgttgctgaggcgataaatatgtttgctcaaaggcggccacctggcatatacaagagggactatattgaagcactatattcattttaccatgaggtccctgagaatatgatgatagcatgccctccaacaccagaatggaagagaccagatgatctcgatttaaatggcgaagctaagcaggatgatgacgacgacaatggtgatccagaaccaccgcgtaatgaatcagaggataaaatcatcaccaacgacgatgtgttaggggacgaagtgccatatgaccagcaagaagctttgcgtgtgctatgttataagttgcttgaaatgccccttataaggggacattcacaatttcctggatcacatccagtttctcttaacagtgaaaatctgcaactacttagacagcgatactactatgctacatggaaagctgacggaacacgatatatgatgcttataatgagagatggttgtttcttgattgatcgaaatttttgctttagaagggttcagatgcgctttccccataagagccttgaaggtctgcatgatatgaccttgattgatggagagatgattatagacacggtaccagattcaggcttgaagagaaggtacttggcatatgatcttatggcacttggtgcagtgtccaaaactaagttgccgttttctgaaaggtggaaaatgctggaagatgaaataatacgaccacgttattatgagaaaaataaatttgagagtggttctaagagcaatccgttgtacaaatatgacatggaattattttcggttagaagaaaagatttttggctgctctcaacagtaaaaaaggttcttaaggtgttcattccatccctttgccatgatgctgatggccttatatttcagggctgggacgatccatatgtaactcgtactcatgaaggtctcctgaagtggaaataccctgagatgaattctgtggactttctgttcgagcttacgaatgataatcgtcaactggttttcctttatgagagaggaaaaaagaaactcatggatggtgcccggatagcatttactgacgatgtagatccatcctctatcgccgggaggattgttgaatgctcctggaataaggaagaacagtgttggtcctgtatgcgtattagatctgataaatctactccaaacgacatcaacacataccggaaggtgatgaggagtatcacagataacattaccgaggaaaagcttctcgaagagattgatgagataagtcttctcccgatgtatgctgataggatgcagcaggctcatacaaagatggcacaacaacagcggcggagattgccaccacagtgctagccagtgctggggcgctctcctaccgccctagccagctgctggcttccgtagctgtgtaattagtagaggtttcagtagccccatatgatgatggctggctgggtctggcctgccaactaattctttgcacctcatttgtgtcttctccctgccctcccacccacctgtataggcgtcgccgcagagtagtttccctgtaaattgtgtactctatgttctcccatattctcccctatggttttatttttcatgggtgtagaatagcgtttaacaagagggtggtgttctaggtacattagtgtacgcgttactatctctcggtgttgcggttgccttgtgctagaataaatatggttaccatctgttgctgatgggtcatgtggttcccccggcggatatcatgtggttgcgtggtatgggttattttcgtcttctgttttgttcgcacctgatccgatccgatcttttgttcaatgaagaagaaaaaaattattggtaaaa

SEQ ID NO: 201214 - DNA, 2777 bp, Zea Mays
ctgctgttcccgtcgaccggattcggttcggaccgcagctccccacagcccacactcgtccgtccgcccgtcgaatggcggctcccaaaccctaagccacagatcccttcccctgcctcagcttcgaacgccctcgcctcgccgccggtctttgtgtactgccgctgtgtccgtcggcgcggatcaagggtccgctccgctgcaccccgcggggagaaaggggcgggcctcggcgtcctccgctcgtcgcccgagtgtctgagtactatcaggtgcaagtccagccgaactgattgcatgacatatgaaatagcgagcgtcgaatgaccttctctatggatatggatttgaacgcatcaccggtgcctgacgatgatgagcagcagccttacaatgaaccagtggaggctgagtatgctcaggaggaacatgttgaatctgctgtcgcaacattgcgccgggaacgtgaagaaagacgcaagagactaaagagagagcagcaggatgatgggtcaaggctacattcccagcagattagggttgattatgctcctcaacccaaaaggcatagtcgcatcaaagaggcacctcagggctggttggactgtcctgcatttggggagccaatagataaaatcataccatctaaagttcctctcgatgaaacattcaatgagtcagtgcctcctgggaagcgatactcctcaaagcaactagttaacaaacaaagaaaagctggtcgtgaaataggtctggtgattgatttgacaaataccaccaggtattattcaccagctgaatggacgaagcaaggtactaagtatgcgaagattgcatgcaaggggagagatgcggtacctgacaatgaatctgttaataagtttgtctatgaggcaatgatattccttgatcgacaaaaacattcaaagaatcctaaatatattctggttcactgtacccatggtcataatcgtaccggtttcatgattattcattaccttatgcgcacacacgtatcttgtgttgctgaggcgataaatatgtttgctcaaaggcggccacctggcatatacaagagggactatattgaagcactatattcattttaccatgaggtccctgagaatatgatgatagcatgccctccaacaccagaatggaagagaccagatgatctcgatttaaatggcgaagctaagcaggatgatgacgacgacaatggtgatccagaaccaccgcgtaatgaatcagaggataaaatcatcaccaacgacgatgtgttaggggacgaagtgccatatgaccagcaagaagctttgcgtgtgctatgttataagttgcttgaaatgccccttataaggggacattcacaatttcctggatcacatccagtttctcttaacagtgaaaatctgcaactacttagacagcgatactactatgctacatggaaagctgacggaacacgatatatgatgcttataatgagagatggttgtttcttgattgatcgaaatttttgctttagaagggttcagatgcgctttccccataagagccttgaaggtctgcatgatatgaccttgattgatggagagatgattatagacacggtaccagattcaggcttgaagagaaggtacttggcatatgatcttatggcacttggtgcagtgtccaaaactaagttgccgttttctgaaaggtggaaaatgctggaagatgaaataatacgaccacgttattatgagaaaaataaatttgagagtggttctaagagcaatccgttgtacaaatatgacatggaattattttcgggctgggacgatccatatgtaactcgtactcatgaaggtctcctgaagtggaaataccctgagatgaattctgtggactttctgttcgagcttacgaatgataatcgtcaactggttttcctttatgagagaggaaaaaagaaactcatggatggtgcccggatagcatttactgacgatgtagatccatcctctatcgccgggaggattgttgaatgctcctggaataaggaagaacagtgttggtcctgtatgcgtattagatctgataaatctactccaaacgacatcaacacataccggaaggtgatgaggagtatcacagataacattaccgaggaaaagcttctcgaagagattgatgagataagtcttctcccgatgtatgctgataggatgcagcaggctcatacaaagatggcacaacaacagcggcggagattgccaccacagtgctagccagtgctggggcgctctcctaccgccctagccagctgctggcttccgtagctgtgtaattagtagaggtttcagtagccccatatgatgatggctggctgggtctggcctgccaactaattctttgcacctcatttgtgtcttctccctgccctcccacccacctgtataggcgtcgccgcagagtagtttccctgtaaattgtgtactctatgttctcccatattctcccctatggttttatttttcatgggtgtagaatagcgtttaacaagagggtggtgttctaggtacattagtgtacgcgttactatctctcggtgttgcggttgccttgtgctagaataaatatggttaccatctgttgctgatgggtcatgtggttcccccggcggatatcatgtggttgcgtggtatgggttattttcgtcttctgttttgttcgcacctgatccgatccgatcttttgttcaatgaagaagaaaaaaattattggtaaaa

SEQ ID NO: 201215 - DNA, 2827 bp, Zea Mays
ctgctgttcccgtcgaccggattcggttcggaccgcagctccccacagcccacactcgtccgtccgcccgtcgaatggcggctcccaaaccctaagccacagatcccttcccctgcctcagcttcgaacgccctcgcctcgccgccggtctttgtgtactgccgctgtgtccgtcggcgcggatcaagggtccgctccgctgcaccccgcggggagaaaggggcgggcctcggcgtcctccgctcgtcgcccgagtgtctgagtactatcaggtgcaagtccagccgaactgattgcatgacatatgaaatagcgagcgtcgaatgaccttctctatggatatggatttgaacgcatcaccggtgcctgacgatgatgagcagcagccttacaatgaaccagtggaggctgagtatgctcaggaggaacatgttgaatctgctgtcgcaacattgcgccgggaacgtgaagaaagacgcaagagactaaagagagagcagcaggatgatgggtcaaggctacattcccagcagattagggttgattatgctcctcaacccaaaaggcatagtcgcatcaaagaggcacctcagggctggttggactgtcctgcatttggggagccaatagataaaatcataccatctaaagttcctctcgatgaaacattcaatgagtcagtgcctcctgggaagcgatactcctcaaagcaactagttaacaaacaaagaaaagctggtcgtgaaataggtctggtgattgatttgacaaataccaccaggtattattcaccagctgaatggacgaagcaaggtactaagtatgcgaagattgcatgcaaggggagagatgcggtacctgacaatgaatctgttaataagtttgtctatgaggcaatgatattccttgatcgacaaaaacattcaaagaatcctaaatatattctggttcactgtacccatggtcataatcgtaccggtttcatgattattcattaccttatgcgcacacacgtatcttgtgttgctgaggcgataaatatgtttgctcaaaggcggccacctggcatatacaagagggactatattgaagcactatattcattttaccatgaggtccctgagaatatgatgatagcatgccctccaacaccagaatggaagagaccagatgatctcgatttaaatggcgaagctaagcaggatgatgacgacgacaatggtgatccagaaccaccgcgtaatgaatcagaggataaaatcatcaccaacgacgatgtgttaggggacgaagtgccatatgaccagcaagaagctttgcgtgtgctatgttataagttgcttgaaatgccccttataaggggacattcacaatttcctggatcacatccagtttctcttaacagtgaaaatctgcaactacttagacagcgatactactatgctacatggaaagctgacggaacacgatatatgatgcttataatgagagatggttgtttcttgattgatcgaaatttttgctttagaagggttcagatgcgctttccccataagagccttgaaggtctgcatgatatgaccttgattgatggagagatgattatagacacggtaccagattcaggcttgaagagaagttgccgttttctgaaaggtggaaaatgctggaagatgaaataatacgaccacgttattatgagaaaaataaatttgagagtggttctaagagcaatccgttgtacaaatatgacatggaattattttcggttagaagaaaagatttttggctgctctcaacagtaaaaaaggttcttaaggtgttcattccatccctttgccatgatgctgatggccttatatttcagggctgggacgatccatatgtaactcgtactcatgaaggtctcctgaagtggaaataccctgagatgaattctgtggactttctgttcgagcttacgaatgataatcgtcaactggttttcctttatgagagaggaaaaaagaaactcatggatggtgcccggatagcatttactgacgatgtagatccatcctctatcgccgggaggattgttgaatgctcctggaataaggaagaacagtgttggtcctgtatgcgtattagatctgataaatctactccaaacgacatcaacacataccggaaggtgatgaggagtatcacagataacattaccgaggaaaagcttctcgaagagattgatgagataagtcttctcccgatgtatgctgataggatgcagcaggctcatacaaagatggcacaacaacagcggcggagattgccaccacagtgctagccagtgctggggcgctctcctaccgccctagccagctgctggcttccgtagctgtgtaattagtagaggtttcagtagccccatatgatgatggctggctgggtctggcctgccaactaattctttgcacctcatttgtgtcttctccctgccctcccacccacctgtataggcgtcgccgcagagtagtttccctgtaaattgtgtactctatgttctcccatattctcccctatggttttatttttcatgggtgtagaatagcgtttaacaagagggtggtgttctaggtacattagtgtacgcgttactatctctcggtgttgcggttgccttgtgctagaataaatatggttaccatctgttgctgatgggtcatgtggttcccccggcggatatcatgtggttgcgtggtatgggttattttcgtcttctgttttgttcgcacctgatccgatccgatcttttgttcaatgaagaagaaaaaaattattggtaaaa

SEQ ID NO: 201216 - DNA, 2903 bp, Zea Mays
cgtcgaccggattcggttcggaccgcagctccccacagcccacactcgtccgtccgcccgtcgaatggcggctcccaaaccctaagccacagatcccttcccctgcctcagcttcgaacgccctcgcctcgccgccggtctttgtgtactgccgctgtgtccgtcggcgcggatcaagggtccgctccgctgcaccccgcggggagaaaggggcgggcctcggcgtcctccgctcgtcgcccgagcgagcgtcgaatgaccttctctatggatatggatttgaacgcatcaccggtgcctgacgatgatgagcagcagccttacaatgaaccagtggaggctgagtatgctcaggaggaacatgttgaatctgctgtcgcaacattgcgccgggaacgtgaagaaagacgcaagagactaaagagagagcagcaggatgatgggtcaaggctacattcccagcagattagggttgattatgctcctcaacccaaaaggcatagtcgcatcaaagaggcacctcagggctggttggactgtcctgcatttggggagccaatagataaaatcataccatctaaagttcctctcgatgaaacattcaatgagtcagtgcctcctgggaagcgatactcctcaaagcaactagttaacaaacaaagaaaagctggtcgtgaaataggtctggtgattgatttgacaaataccaccaggtattattcaccagctgaatggacgaagcaaggtactaagtatgcgaagattgcatgcaaggggagagatgcggtacctgacaatgaatctgttaataagtttgtctatgaggcaatgatattccttgatcgacaaaaacattcaaagaatcctaaatatattctggttcactgtacccatggtcataatcgtaccggtttcatgattattcattaccttatgcgcacacacgtatcttgtgttgctgaggcgataaatatgtttgctcaaaggcggccacctggcatatacaagagggactatattgaagcactatattcattttaccatgaggtccctgagaatatgatgatagcatgccctccaacaccagaatggaagagaccagatgatctcgatttaaatggcgaagctaagcaggatgatgacgacgacaatggtgatccagaaccaccgcgtaatgaatcagaggataaaatcatcaccaacgacgatgtgttaggggacgaagtgccatatgaccagcaagaagctttgcgtgtgctatgttataagttgcttgaaatgccccttataaggggacattcacaatttcctggatcacatccagtttctcttaacagtgaaaatctgcaactacttagacagcgatactactatgctacatggaaagctgacggaacacgatatatgatgcttataatgagagatggttgtttcttgattgatcgaaatttttgctttagaagggttcagatgcgctttccccataagagccttgaaggtctgcatgatatgaccttgattgatggagagatgattatagacacggtaccagattcaggcttgaagagaaggtacttggcatatgatcttatggcacttggtgcagtgtccaaaactaagttgccgttttctgaaaggtggaaaatgctggaagatgaaataatacgaccacgttattatgagaaaaataaatttgagagtggttctaagagcaatccgttgtacaaatatgacatggaattattttcggtatcagattctaggattcctcctgaactataatgttcaattcatgtcctgcaaagttaattttctctttttcgtttattatatgactttaccaggttagaagaaaagatttttggctgctctcaacagtaaaaaaggttcttaaggtgttcattccatccctttgccatgatgctgatggccttatatttcagggctgggacgatccatatgtaactcgtactcatgaaggtctcctgaagtggaaataccctgagatgaattctgtggactttctgttcgagcttacgaatgataatcgtcaactggttttcctttatgagagaggaaaaaagaaactcatggatggtgcccggatagcatttactgacgatgtagatccatcctctatcgccgggaggattgttgaatgctcctggaataaggaagaacagtgttggtcctgtatgcgtattagatctgataaatctactccaaacgacatcaacacataccggaaggtgatgaggagtatcacagataacattaccgaggaaaagcttctcgaagagattgatgagataagtcttctcccgatgtatgctgataggatgcagcaggctcatacaaagatggcacaacaacagcggcggagattgccaccacagtgctagccagtgctggggcgctctcctaccgccctagccagctgctggcttccgtagctgtgtaattagtagaggtttcagtagccccatatgatgatggctggctgggtctggcctgccaactaattctttgcacctcatttgtgtcttctccctgccctcccacccacctgtataggcgtcgccgcagagtagtttccctgtaaattgtgtactctatgttctcccatattctcccctatggttttatttttcatgggtgtagaatagcgtttaacaagagggtggtgttctaggtacattagtgtacgcgttactatctctcggtgttgcggttgccttgtgctagaataaatatggttaccatctgttgctgatgggtcatgtggttcccccggcggatatcatgtggttgcgtggtatgggttattttcgtcttctgttttgttcgcacctgatccgatccgatcttttgttcaatgaagaagaaaaaaattattggtaaaa

SEQ ID NO: 201217 - DNA, 2015 bp, Zea Mays
ctattgtttatggtattgtcatcactcatcaggcaatgatattccttgatcgacaaaaacattcaaagaatcctaaatatattctggttcactgtacccatggtcataatcgtaccggtttcatgattattcattaccttatgcgcacacacgtatcttgtgttgctgaggcgataaatatgtttgctcaaaggcggccacctggcatatacaagagggactatattgaagcactatattcattttaccatgaggtccctgagaatatgatgatagcatgccctccaacaccagaatggaagagaccagatgatctcgatttaaatggcgaagctaagcaggatgatgacgacgacaatggtgatccagaaccaccgcgtaatgaatcagaggataaaatcatcaccaacgacgatgtgttaggggacgaagtgccatatgaccagcaagaagctttgcgtgtgctatgttataagttgcttgaaatgccccttataaggggacattcacaatttcctggatcacatccagtttctcttaacagtgaaaatctgcaactacttagacagcgatactactatgctacatggaaagctgacggaacacgatatatgatgcttataatgagagatggttgtttcttgattgatcgaaatttttgctttagaagggttcagatgcgctttccccataagagccttgaaggtctgcatgatatgaccttgattgatggagagatgattatagacacggtaccagattcaggcttgaagagaaggtacttggcatatgatcttatggcacttggtgcagtgtccaaaactaagttgccgttttctgaaaggtggaaaatgctggaagatgaaataatacgaccacgttattatgagaaaaataaatttgagagtggttctaagagcaatccgttgtacaaatatgacatggaattattttcggttagaagaaaagatttttggctgctctcaacagtaaaaaaggttcttaaggtgttcattccatccctttgccatgatgctgatggccttatatttcagggctgggacgatccatatgtaactcgtactcatgaaggtctcctgaagtggaaataccctgagatgaattctgtggactttctgttcgagcttacgaatgataatcgtcaactggttttcctttatgagagaggaaaaaagaaactcatggatggtgcccggatagcatttactgacgatgtagatccatcctctatcgccgggaggattgttgaatgctcctggaataaggaagaacagtgttggtcctgtatgcgtattagatctgataaatctactccaaacgacatcaacacataccggaaggtgatgaggagtatcacagataacattaccgaggaaaagcttctcgaagagattgatgagataagtcttctcccgatgtatgctgataggatgcagcaggctcatacaaagatggcacaacaacagcggcggagattgccaccacagtgctagccagtgctggggcgctctcctaccgccctagccagctgctggcttccgtagctgtgtaattagtagaggtttcagtagccccatatgatgatggctggctgggtctggcctgccaactaattctttgcacctcatttgtgtcttctccctgccctcccacccacctgtataggcgtcgccgcagagtagtttccctgtaaattgtgtactctatgttctcccatattctcccctatggttttatttttcatgggtgtagaatagcgtttaacaagagggtggtgttctaggtacattagtgtacgcgttactatctctcggtgttgcggttgccttgtgctagaataaatatggttaccatctgttgctgatgggtcatgtggttcccccggcggatatcatgtggttgcgtggtatgggttattttcgtcttctgttttgttcgcacctgatccgatccgatcttttgttcaatgaagaagaaaaaaattattggtaaaa

SEQ ID NO: 201218 - DNA, 1046 bp, Zea Mays
  misc_feature (1046)..(1046): n is a, c, g, or t
cgtaaaccaacgccagattctggtcgccacgcttggcagttggcaagcagcgagtggggggagacagccaactctctatcctcttcccccctcgtccatccccatcccaccgccttgctctcccctctccacttccagctgtccatggctgcagcagcgtgctcctctgcctcgccgctcctcctcccctcagggccgagacatgcgtcggcctccagggcgtggtttctcggcggcaggagcagggcgctgagatcagaggcgccgtgctgctgcaaggccgccgccgcccgtggaagcgctccgcaatgcgggacggtcggtggtggcagcagcagcacccggagggggctgctaggcgtggccctgggagcctctgccttggggctggccgcgtttgacgccgtcgccgccgggttgccgccggaggagaagcccaagctctgcgacgccgcctgcgaaggcgagctcgaaaatgtgcctatggtaactacagaatccggactgcagtacaaggatatcaaagtgggcgaagggcctagcccacccgttggtttccaggttgcagcaaattatgttgctatggtgccaactgggcagatattcgacaggtgggattcggatagctgatgcctgacgtccagctagagatctgggattttatctctacttcgtttgcaaaacacaactcaactaattattgtcttcacaatcagcttgcagacttagaatctgttcctgtagaattttgttgtttattaggccttgggggatggaagccattctagttcttactgttcttcgctgctctgtgatgcagttcgctggagaaaggtcagccctacatattccgtgttggatcagggcaggtgatcaaggggcttgatgagggaattttgtcgatgaaggttggaggactacgtcggctgtacatacctgggccattagcgttcccctaagggtctttactttctgctcctgggaaggccaagagtacccccaaccagccctgtcgttgtcgacgtcaatttactgtacataccagn

SEQ ID NO: 201219 - DNA, 3441 bp, Zea Mays
ctcgtatattaaccccgcctctgcctctcttcccctctttccccccgtctccgcctccctcccaccgccccacggccccaccagattcctccgcaccgccatggacgacctcgagcaggcaatactgctggcctccgactctcccgccgccgccgcggcgtccccgtccgtccgcgcggaggctctcgccttctgcgcccgcgcccgcgacgagtcgccgccgtcgtcgctcctccgcctgtgcctctccggcatcgcctcctccccgcacgcgcaggtccacttctggtgcctccagtccctccacgacttgctcctccgccgccgcctcgtgctccccgacgacctcgcgctgctccgatcctctctcctatcgctggcggtttcctctcacgccgcgtcgccgcctttcctccgcaacaagctcgcgcagcttgtcgcgctcctcgtccgcctcgactacccccatgtctacccttcctacttcctggacctcctcccgcccgcgccgccgcagcccggccccacggacatgttcgcgcgggttctaatctccctcgacgacgacctgctctcccaggagtacccccgcagttctgaagaggccgccgacgctatgcgggtgaaggattccatgcgcgtgcagtgcgtgtcccagatcgccagccactggcacaccgccgccgtgaccctccgtacagccgaccctgcggttgcggcagtggccccttggtgacaacatatgcagccgaggctctggaatgtcatcgcaggcttggccctactgatgctgatggagctgcagcgttggagatgctggaagaggtgctaccagctgtatttgcagctgcagagagcggtaacgatgaagatgtggattctggttccgtgcttgagttcttatctggctatgtgagcataatgaaggcaccgtctgagaagcagttggcgcacttgggacggatcttggatctggtgcgggtgcagatgtcatttgatccagtatatagggggcaccttgacgtgcttgacaagatagggaaggaggaggaggacctcatggcggagcaacgaaaagatttgattgtattgttccggagcatttgtcgtgtcgcaccagctgccgctcagctgttcataagagggctgattatgacagctctctcgtctgcagaagctagtgtggaggatgttgaggttgctcttaccctgttcttccggcttggagaagctgtgggtgaagaggagattcggagtggggcagggctcctaggagagcttgtgcccatgctcctttcagcgaggttcttgtgtcacacacatcgcttagttgcattggtgtatctggagacagttacccgctacatgaagtttgtacaggagcatgtgcagtatgtaccacacctgcttggtgtgttcttggataaccgtggaatacaccatcagaatgcccacgtgagccgtcgtgcaggatacttattcatgagggcagtcaagtcattgaaggcaaatctagtgccttacctggataccatattgcagagtctgcaagatgtactaagtcaattcacttctatggattgggcaaacaaagatactaagttccccagctccgaggatggcagccaaatttttgaggctgttggattattgattggcattgaagaggtatcaccagagaagcaggctcaatgcttgactgctcttctaaatcctctctgtcaccagattgagtcacttgttatggatgccaaagcacgagggcttgaggaatcattaccaagagctattagtcttcaacaaatcattgttgcattgaatatggtcagcaagggctttaatgagcgccttgtgatggtaaataggccagctattggggtcatgttcaagaaaacccttgatgtagttttgcaagtccttgtttcatttcctagtgtaagacctctgcgatctaaggtgatatcgtttctgcatcgtatgatcgagatattaggtatctcagtgcttccatgtattccaatcgcactgagacaattgcttcttgataacgaggctaaggatatggtggaatttctcgtattggtaaatcaaataatctgcaaatttaaatcgtcagctagcgccatattggaggaagtcttccctactattgcaagtcatttgtctgtgatattatcacaagatgcattttcagctggtcttgcaagcaatactgaggaaatgcgagaactacaagagttgcagaggacattatacatattcttgcatgccatggcaacacatgatctttctacagttctccttacttctagctctaggcagtatctggagaccataatgcaattgcttttatttacctcatgcaaacataaggatatactgctacgcaaggtcaggatttttgtttaacttgattttttatcttcttttcaatccatctgcattatcgaactcgataataagttacctgtggatgccatttacgtggttcttcattgtttcttaggcatgtgttcagattttcgtgaatcttgtaaaagactggtgctctaactctgaagataaggttcctggcttccgagtatttatgattgagaagtttgctactaattgctgtttatacagtgtacttgataaatcatttgatttacgcgatgcaaactcgcttgtcctttttggtgaaattgtgctggcccagaagattatgtatgaaagatttggggaggaattcattatgaactttgtagctaaaggtcttcctgaagttcactgcccaccggacctagctgaacagtactaccagaagttaaagggaaatgatatcaaggcattcaggtcattttatcaatcacttgttgagaagataagaccacaaggaaatgggagtcttgttttcagatagcatcattctttgattttcaatatgtcttccaccaaaagactcctcaactgtgttattcaattataggctagttgtgccatcaatgtacatagagctataatttctgagattggaagacgtattactgcggcattatctttaccaagtttggcaaccatggtggcgtccttattcattatattctatctgagatgcaggggaattcatcccacaatagtttctactttctactaagaaggaaatacatggttctactttctcatcttggcctttctccccaaatcggactgttctgctgtctgggcctgaaattttgcatggtatttcctgtgaactagttgtgtataggggcaaaaagagtgtcgtgtaggctgtgttttttcctgatgaaaaatgtcgcaccgcctgttgtgttatgagtcgggttgtaccaaattttgcgaaacggcagcggttttttgcaccccccctgttgccatctggggtgatgtacatatttttttttggcattccccattttatttcataaattcttttat

SEQ ID NO: 201220 - DNA, 1094 bp, Zea Mays
ctcgaagcccacttctggttccggtggacccgcgtacatcgctaaggaacgcagcagctcccccgacaaccaccagataaagctgcaagctgcttatcttctcccgtcccataggttgctaggctcggccgtgtagagcagcaagagcacgccgcgccaagcaacaaagagggaccccgcatccatggaggtggtgggcggcgtgtcgctgaggccgtcgccagcgccggcgcgtatccggactaccctgccacccgtcgacgtaggcggacgcttccttctccgccgggtcgcggggcgccagccggcgaggcgcgcgctggtcgtggaggcccggggcggcaggggctggtcggagcggcagatgcagcagcagcgccgcgcgccgctgctgccgaaaatcgaggacgacggcaacccgcgattcgtcatcttcatccgcaccgccaatgtctacttctggtacccgctcaacatcatcacgggcggtacgacggcgaagatcatgctcgccgccaaggacaacttcctcggcaagtacatctacaaggacacgctcgccaggaacctcgccgccgtcatttacaaagacgaggacgtgatcatagacacagcgaaagagcagtaccgtgtgctcaagaccgaaaatcagtttcggtatggctacaaagttgtggagaaagggaacataaggtctgctctgacgacaagcaatgtgatcgaacttccaaagaaggacgagctcaaaaccgtggttgacaaggtgaaggacttctttggcgacgtgactgccggcgccaaagaatcctttgcgcagataacagggtctgctgtcagcaaggaggaagaggaagcagagagcaaagagaagttccgctccaagagacgaaagaagcagcggaagtcgaaggagggcctcaagacggagaaatgattcagtcagtcacacaagtaaagcaccggctgtagtttcgctatcgatgtccgagaactgttctgtaatttctccagcttccttttttttgtttgttttgtaaaaagacgtcgtgtaacttcattgcgactaacgtgtgctatgccttctcaaaaaagaa

SEQ ID NO: 201221 - DNA, 722 bp, Zea Mays
gttgatgtccattcagtaacctttggttttgtttgctctttgatgtcatccgaagatcaaagatcctaagaaacagtttctggtttttggagctagcagagccagaagttaaatcacgtcttgatacgtacaagcaaaattctgaagctattcttcctacatactctgatttgcttaataagattgatggaaactgcccagccgaagttgtttttcaggcgatagatttcctgttacagaagatctgtgagaacacttcagcgagcaagttgaccaaaacaaatggaaaacgaccagattctgcggatacaggttcaaaaaatgagtggcgtggaattccaacgaggttgaataacattccacattctagggaaattagggaatacttctacaacgacgtgttaaaagctacaaaacttgctattgaagataaaaagactcggttgcagatagatatcaatattcctgaacttaaccctgaaatggatgtttaccgcataggaaccctcatggaacttgtaagagaactttctctatcctttgcagatgatgggaaacgtgtcaaggtctgtgttcaaggctccatggggcaaggtgcatttgctggcatcccacttcaactggcaggaaccagaaaaattttggaattcatggactggggtgactatggggcgaagggcaccttcattaatattggagcagtaggtgtgtatgtgttgccc

SEQ ID NO: 201222 - DNA, 1086 bp, Zea Mays
cgtaactacgtttcaggtctgggactaaggtgccaggccgcggaggaggcaccaccgccggcgcggggtaagacttcgctcaaggtgatgatttcgggagctcccgcctcgggaaaaggaacgcaatgccgcatgatcgtcgagaagaaattggcaagaaagcaaaagaatacatggacaatggaaagcttgtgccggaccaagttgtgacagatatggtggtatcacgactgtcacaaccggatatacaagaaagagggtggcttcttgatggttacccaaggagcttcagtcaagcacaacaccttgaaaatttgaaaataagaccgaatatattcattgtgctagaaatgtgttggaagacggctggatcctgtgactggcaagatttaccatttaaaaaactaccccccggagaatgaggagatttctgcccgacttattacacgttctgatgacacatttgagaaggttaaatcacgtcttgatacgtacaagcaaaattctgaagctattcttcctacatactctgatttgcttaataagattgatggaaactgcccagccgaagttgtttttcaggcgatagatttcctgttacagaagatctgtgagaacacttcagcgagcaagttgaccaaaacaaatggaaaacgaccagattctgcggatacaggttcaaaaaatgagtggcgtggaattccaacgaggttgaataacattccacattctagggaaattagggaatacttctacaacgacgtgttaaaagctacaaaacttgctattgaagataaaaagactcggttgcagatagatatcaatattcctgaacttaaccctgaaatggatgtttaccgcataggaaccctcatggaacttgtaagagaactttctctatcctttgcagatgatgggaaacgtgtcaaggtctgtgttcaaggctccatggggcaaggtgcatttgctggcatcccacttcaactggcaggaaccagaaaaattttggaattcatggactggggtgactatggggcgaagggcaccttcattaatattggagcagtaggtgtgtatgtgttgccc

SEQ ID NO: 201223 - DNA, 1420 bp, Zea Mays
ccgtccacacaacgcacgcgaggtccatcgctcctcctctccgtcaccgagaaaatgtcggtctcctccccggccatggcctcgccccctctcgccgcgcccggcactcaccgcggcccctgcttctcgaccctctgccgcttaccgtcgccttcctgctacccgcctctttcggcttcctcctcaccggctatctccaccgtctccgcattcgctgtcctcaaacacaagcccagaggtctgggactaaggtgccaggccgcggaggaggcaccaccgccggcgcggggtaagacttcgctcaaggtgatgatttcgggagctcccgcctcgggaaaaggaacgcaatgccgcatgatcgtcgagaagtatggtttagttcacatatcaactggtgatcttctgcgagctgaagtatcttctggcacagaaattggcaagaaagcaaaagaatacatggacaatggaaagcttgtgccggaccaagttgtgacagatatggtggtatcacgactgtcacaaccggatatacaagaaagagggtggcttcttgatggttacccaaggagcttcagtcaagcacaacaccttgaaaatttgaaaataagaccgaatatattcattgtgctagaagttcctgatgatgttctaatcgacagatgtgttggaagacggctggatcctgtgactggcaagatttaccatttaaaaaactaccccccggagaatgaggagatttctgcccgacttattacacgttctgatgacacatttgagaaggttaaatcacgtcttgatacgtacaagcaaaattctgaagctattcttcctacatactctgatttgcttaataagcaagaatatagattgatggaaactgcccagccgaagttgtttttcaggcgatagatttcctgttacagaagatctgtgagaacacttcagcgagcaagttgaccaaaacaaatggaaaacgaccagattctgcggatacaggttcaaaaaatgagtggcgtggaattccaacgaggttgaataacattccacattctagggaaattagggaatacttctacaacgacgtgttaaaagctacaaaacttgctattgaagataaaaagactcggttgcagatagatatcaatattcctgaacttaaccctgaaatggatgtttaccgcataggaaccctcatggaacttgtaagagaactttctctatcctttgcagatgatgggaaacgtgtcaagccacttgataccaggtctgtgttcaaggctccatggggcaaggtgcatttgctggcatcccacttcaactggcaggaaccagaaaaattttggaattcatggactggggtgactatggggcgaagggcaccttcattaatattggagcagtaggtgtgtatgtgttgccc

SEQ ID NO: 201224 - DNA, 1359 bp, Zea Mays
ccgtccacacaacgcacgcgaggtccatcgctcctcctctccgtcaccgagaaaatgtcggtctcctccccggccatggcctcgccccctctcgccgcgcccggcactcaccgcggcccctgcttctcgaccctctgccgcttaccgtcgccttcctgctacccgcctctttcggcttcctcctcaccggctatctccaccgtctccgcattcgctgtcctcaaacacaagcccagaggtctgggactaaggtgccaggccgcggaggaggcaccaccgccggcgcggggtaagacttcgctcaaggtgatgatttcgggagctcccgcctcgggaaaaggaacgcaatgccgcatgatcgtcgagaagttcacatatcaactggtgatcttctgcgagctgaagtatcttctggcacagaaattggcaagaaagcaaaagaatacatggacaatggaaagcttgtgccggaccaagttgtgacagatatggtggtatcacgactgtcacaaccggatatacaagaaagagggtggcttcttgatggttacccaaggagcttcagtcaagcacaacaccttgaaaatttgaaaataagaccgaatatattcattgtgctagaaatgtgttggaagacggctggatcctgtgactggcaagatttaccatttaaaaaactaccccccggagaatgaggagatttctgcccgacttattacacgttctgatgacacatttgagaaggttaaatcacgtcttgatacgtacaagcaaaattctgaagctattcttcctacatactctgatttgcttaataagattgatggaaactgcccagccgaagttgtttttcaggcgatagatttcctgttacagaagatctgtgagaacacttcagcgagcaagttgaccaaaacaaatggaaaacgaccagattctgcggatacaggttcaaaaaatgagtggcgtggaattccaacgaggttgaataacattccacattctagggaaattagggaatacttctacaacgacgtgttaaaagctacaaaacttgctattgaagataaaaagactcggttgcagatagatatcaatattcctgaacttaaccctgaaatggatgtttaccgcataggaaccctcatggaacttgtaagagaactttctctatcctttgcagatgatgggaaacgtgtcaaggtctgtgttcaaggctccatggggcaaggtgcatttgctggcatcccacttcaactggcaggaaccagaaaaattttggaattcatggactggggtgactatggggcgaagggcaccttcattaatattggagcagtaggtgtgtatgtgttgccc

SEQ ID NO: 201225 - DNA, 1341 bp, Zea Mays
gtgttttccgtccacacaacgcacgcgaggtccatcgctcctcctctccgtcaccgagaaaatgtcggtctcctccccggccatggcctcgccccctctcgccgcgcccggcactcaccgcggcccctgcttctcgaccctctgccgcttaccgtcgccttcctgctacccgcctctttcggcttcctcctcaccggctatctccaccgtctccgcattcgctgtcctcaaacacaagcccagaggtctgggactaaggtgccaggccgcggaggaggcaccaccgccggcgcggggtaagacttcgctcaaggtgatgatttcgggagctcccgcctcgggaaaaggaacgcaatgccgcatgatcgtcgagaagaaattggcaagaaagcaaaagaatacatggacaatggaaagcttgtgccggaccaagttgtgacagatatggtggtatcacgactgtcacaaccggatatacaagaaagagggtggcttcttgatggttacccaaggagcttcagtcaagcacaacaccttgaaaatttgaaaataagaccgaatatattcattgtgctagaagttcctgatgatgttctaatcgacagatgtgttggaagacggctggatcctgtgactggcaagatttaccatttaaaaaactaccccccggagaatgaggagatttctgcccgacttattacacgttctgatgacacatttgagaaggttaaatcacgtcttgatacgtacaagcaaaattctgaagctattcttcctacatactctgatttgcttaataagattgatggaaactgcccagccgaagttgtttttcaggcgatagatttcctgttacagaagatctgtgagaacacttcagcgagcaagttgaccaaaacaaatggaaaacgaccagattctgcggatacaggttcaaaaaatgagtggcgtggaattccaacgaggttgaataacattccacattctagggaaattagggaatacttctacaacgacgtgttaaaagctacaaaacttgctattgaagataaaaagactcggttgcagatagatatcaatattcctgaacttaaccctgaaatggatgtttaccgcataggaaccctcatggaacttgtaagagaactttctctatcctttgcagatgatgggaaacgtgtcaaggtctgtgttcaaggctccatggggcaaggtgcatttgctggcatcccacttcaactggcaggaaccagaaaaattttggaattcatggactggggtgactatggggcgaagggcaccttcattaatattggagcagtaggtgtgtatgtgttgccc

SEQ ID NO: 201226 - DNA, 1427 bp, Zea Mays
cacacacgtgacgggacgccgatcttcaaatcctcccgtgtggccgtgtgtgtgttttccgtccacacaacgcacgcgaggtccatcgctcctcctctccgtcaccgagaaaatgtcggtctcctccccggccatggcctcgccccctctcgccgcgcccggcactcaccgcggcccctgcttctcgaccctctgccgcttaccgtcgccttcctgctacccgcctctttcggcttcctcctcaccggctatctccaccgtctccgcattcgctgtcctcaaacacaagcccagaggtctgggactaaggtgccaggccgcggaggaggcaccaccgccggcgcggggtaagacttcgctcaaggtgatgatttcgggagctcccgcctcgggaaaaggaacgcaatgccgcatgatcgtcgagaagtatggtttagttcacatatcaactggtgatcttctgcgagctgaagtatcttctggcacagaaattggcaagaaagcaaaagaatacatggacaatggaaagcttgtgccggaccaagttgtgacagatatggtggtatcacgactgtcacaaccggatatacaagaaagagggtggcttcttgatggttacccaaggagcttcagtcaagcacaacaccttgaaaatttgaaaataagaccgaatatattcattgtgctagaaatgtgttggaagacggctggatcctgtgactggcaagatttaccatttaaaaaactaccccccggagaatgaggagatttctgcccgacttattacacgttctgatgacacatttgagaaggttaaatcacgtcttgatacgtacaagcaaaattctgaagctattcttcctacatactctgatttgcttaataagattgatggaaactgcccagccgaagttgtttttcaggcgatagatttcctgttacagaagatctgtgagaacacttcagcgagcaagttgaccaaaacaaatggaaaacgaccagattctgcggatacaggttcaaaaaatgagtggcgtggaattccaacgaggttgaataacattccacattctagggaaattagggaatacttctacaacgacgtgttaaaagctacaaaacttgctattgaagataaaaagactcggttgcagatagatatcaatattcctgaacttaaccctgaaatggatgtttaccgcataggaaccctcatggaacttgtaagagaactttctctatcctttgcagatgatgggaaacgtgtcaaggtctgtgttcaaggctccatggggcaaggtgcatttgctggcatcccacttcaactggcaggaaccagaaaaattttggaattcatggactggggtgactatggggcgaagggcaccttcattaatattggagcagtaggtgtgtatgtgttgccc

SEQ ID NO: 201227 - DNA, 1288 bp, Zea Mays
aaactggatcgctgccgttggcgccgccaccgccgatgtagggtggagcactcagcgtgccgtcgtcgcatgcggcctcgaacatttacgtctggccgtgccggtgctgggaaggaaggggatcgaggggcagcagaccgcagagagacgacagccaccgaggcaattccaactttttaagcttgccccctttgatccaaccaagaagaagaagaagaagaaggttgtcatccaagagccttctgatgaagtggacaagcttgcagagaagacagaatcgctagcagttgcagaacctgctgaacttaacttcactggaatgaagaagaaaaagaagaagcaggtggatcttgattcatctattgatgaccttggagatggggaggacactcaaggtgatcaagttgtagaggaacaaggggacggtattgtgcttggaggtggccctacatatccttgggaaggaactgaccgggattataaatacgaggagctgttggacagagtgttcaacattcttcgtgagaacaacccagatcttgctggtgataggcggagaaccgttatgaggccacctcaagttcttagggagggaacaaagaagacagtttttgttaattttatggatttgtgtaaaacgatgcataggcaacctgagcatgtaatgatgtttttacttgccgaaatgggaacaagtgggtcacttgatgggcagcaaaggttggtgatcaagggaagatttgctcctaaaaactttgaagcaatcctgaggagatacatcaatgagtatgtcatctgcaatggatgcaagagccctgatactattttgtccaaagaaaatcgtctgttcttccttcgctgcgaacagtgtggatcttcacggtccgttgcaccaatcaaagctggattcgttgcgcaagttggtcggcggaaggcctaagcgcaaaccaaattggtcctttgcgctgcctgctctgttttggtcgtgtatttcttgttttttttcgtgtcatgttaatgcagctgaggttcggtttatgattgtcctatctttgtgtggctgaaatttgaggccataccaattcgacaatattacattattttgccggatggacattctgccgtgcaatgttgagagcaagatgtgtcaacagttacattttgtcttgcattcaaaagatccatcgaatgatggcgcagtcctgtggcggctggcgagtgtcactcatgcatcctgcctgataagcgactccctgcgatcgtaacacctggctattgtcaaacaaag

SEQ ID NO: 201228 - DNA, 1392 bp, Zea Mays
aaactggatcgctgccgttggcgccgccaccgccgatgtagggtggagcactcagcgtgccgtcgtcgcatgcggcctcgaacatttacgtctggccgtgccggtgctgggaaggaaggggatcgaggggcagcagaccgcagagagacgacagccaccgaggcaattccaactttttaagagatcggagcgctcggttcggataggggcgactaggaggtgaaggcgggcgcgtcagccatggcggacgaggagcacccggagaggagggaggaggcctccgagcttgccccctttgatccaaccaagaagaagaagaagaagaaggttgtcatccaagagccttctgatgaagtggacaagcttgcagagaagacagaatcgctagcagttgcagaacctgctgaacttaacttcactggaatgaagaagaaaaagaagaagcaggtggatcttgattcatctattgatgaccttggagatggggaggacactcaaggtgatcaagttgtagaggaacaaggggacggtattgtgcttggaggtggccctacatatccttgggaaggaactgaccgggattataaatacgaggagctgttggacagagtgttcaacattcttcgtgagaacaacccagatcttgctggtgataggcggagaaccgttatgaggccacctcaagttcttagggagggaacaaagaagacagtttttgttaattttatggatttgtgtaaaacgatgcataggcaacctgagcatgtaatgatgtttttacttgccgaaatgggaacaagtgggtcacttgatgggcagcaaaggttggtgatcaagggaagatttgctcctaaaaactttgaagcaatcctgaggagatacatcaatgagtatgtcatctgcaatggatgcaagagccctgatactattttgtccaaagaaaatcgtctgttcttccttcgctgcgaacagtgtggatcttcacggtccgttgcaccaatcaaagctggattcgttgcgcaagttggtcggcggaaggcctaagcgcaaaccaaattggtcctttgcgctgcctgctctgttttggtcgtgtatttcttgttttttttcgtgtcatgttaatgcagctgaggttcggtttatgattgtcctatctttgtgtggctgaaatttgaggccataccaattcgacaatattacattattttgccggatggacattctgccgtgcaatgttgagagcaagatgtgtcaacagttacattttgtcttgcattcaaaagatccatcgaatgatggcgcagtcctgtggcggctggcgagtgtcactcatgcatcctgcctgataagcgactccctgcgatcgtaacacctggctattgtcaaacaaag

SEQ ID NO: 201229 - DNA, 1503 bp, Zea Mays
aaacaaactggatcgctgccgttggcgccgccaccgccgatgtagggtggagcactcagcgtgccgtcgtcgcatgcggcctcgaacatttacgtctggccgtgccggtgctgggaaggaaggggatcgaggggcagcagaccgcagagagacgacagccaccgaggttgacactgagaggaggaaaagataagaggaaaggatctccaccgagaaaaccctaattcgaacaaccgcgccgccgtcaccgactcaccgtcgtctctcgctcactcgctcgcgctctccatccagatcggagcgctcggttcggataggggcgactaggaggtgaaggcgggcgcgtcagccatggcggacgaggagcacccggagaggagggaggaggcctccgagcttgccccctttgatccaaccaagaagaagaagaagaagaaggttgtcatccaagagccttctgatgaagtggacaagcttgcagagaagacagaatcgctagcagttgcagaacctgctgaacttaacttcactggaatgaagaagaaaaagaagaagcaggtggatcttgattcatctattgatgaccttggagatggggaggacactcaaggtgatcaagttgtagaggaacaaggggacggtattgtgcttggaggtggccctacatatccttgggaaggaactgaccgggattataaatacgaggagctgttggacagagtgttcaacattcttcgtgagaacaacccagatcttgctggtgataggcggagaaccgttatgaggccacctcaagttcttagggagggaacaaagaagacagtttttgttaattttatggatttgtgtaaaacgatgcataggcaacctgagcatgtaatgatgtttttacttgccgaaatgggaacaagtgggtcacttgatgggcagcaaaggttggtgatcaagggaagatttgctcctaaaaactttgaagcaatcctgaggagatacatcaatgagtatgtcatctgcaatggatgcaagagccctgatactattttgtccaaagaaaatcgtctgttcttccttcgctgcgaacagtgtggatcttcacggtccgttgcaccaatcaaagctggattcgttgcgcaagttggtcggcggaaggcctaagcgcaaaccaaattggtcctttgcgctgcctgctctgttttggtcgtgtatttcttgttttttttcgtgtcatgttaatgcagctgaggttcggtttatgattgtcctatctttgtgtggctgaaatttgaggccataccaattcgacaatattacattattttgccggatggacattctgccgtgcaatgttgagagcaagatgtgtcaacagttacattttgtcttgcattcaaaagatccatcgaatgatggcgcagtcctgtggcggctggcgagtgtcactcatgcatcctgcctgataagcgactccctgcgatcgtaacacctggctattgtcaaacaaag

SEQ ID NO: 201230 - DNA, 4378 bp, Zea Mays
gtgaaaatagaattccaaactagcaaaagagtaataaagcagcacccaagaccttcacgaaacccactccgagctttcacgatacaatcacgcaatatttgtcgctgagaaattctcaactctggaagaaaaaaaatcgcagcacggaaaaagagagtccccctccccaccaccacatcccggtctagggtttgcgccatcccgaaccatccgctcgccgccggccgctgctgccgccatgggctccggtgacgacgagcgctccacctccaagcaccatcaccgcgataaggacaaggaccgtgaccgctcctcgtctcgccaccatcgcgacaaggaccgggaccgcgagcgctcctcgcggcaccaccgcgacgatggcgaccgggaccgggaccgccatcaccgggacaaggaccgggatcgagaggagcggaaggagagggagcgggaggagcgtaaagcacgggagcgggaggagcggaaggcacgggagcgggaggagcgggaggagcgggacagggagaaggagaaggagaaagagaaggagcgggcgcggcggcgcgaggagagggaccgcgaggagcgggagagttccaggcggcgcggggatgcggatggagaggaggacgacgaccgggaccgcaagcggcgccgccggtcctcgcaccaccaccaccgggacccagagccggagccggagcctgcatcccgggaagaggaggaggtggacgccgaggaggctgagcgccggcgccagcggaagaaggaggaggacatggaggccgagcagcagcgcctcgacgacgagatggagcgccggcgccggcgcgtcaaggagtggcaggagaagcgccgcgagcagcagcagcaggacggcagtgttgccagtggcgcttctgctgctgtggcggccgaggctgatggcgccaaagcggggaagaagtggaccttggatggcgaggagtctgacgaggaagaggacaaggaggacggcaagaaggctgaggggaatggtggtgctggtgacatggacgtgggtttgcccagtggaaatggtgatgccaacggtggtgctgagatggaggaggacgaaattgatccgctcgatgccttcatgaattccatggtgctgccagaggttgccaagctggagagtgctgcagtagcaatggatacagcccctgctgcaggtgcagatggcaagaatggtaagagctcaaaggatgtcattagtaatggggataagaaagggtcaaggaaagctacggggagaattatgcaaggggatgattcagactcggactacgatgatgctgatgatgatggggctggagaggatgatgaggatgatgaggaattcataaagcgtgtcaagaagacgaaggctgagaagttggcgatcgttgaccattcgaagattgactaccaaccgttccggaagaatttctatattgaggtgaaggacatcaccaagatgacatccgaggaagtggtagactaccggaagcacttggagctcaaggtgcatgggaaagatgtgcccaagccaataaagacatgggtgcagagtgggctgacaagcaaactccttgataccatcaagaagcttggttttgagaaaccgatgcctatacagacacaggctttgccgatcataatgagtggtcgtgattgtataggcatcgcaaaaactggatctggcaagactctagcatttgtcctcccaatgctgaggcatgttaaagatcagccccctgttgtccctggagatggccctattgggcttattatggctcctactagagagcttgtggtccagatacattcagacatcaagaagttctctaaggtgcttggcatcaactgtgttgcaatctatggtggttcgggagttgcacagcagatcagcgaattgaagaggggtgccgaaattgttgtttgtacaccgggaaggatgatcgatatcctttgcactagcagtggaaaaataactaaccttcgcagagtgactttcttggtgatggatgaagctgatagaatgtttgacatgggttttgagcctcagattactcgtatagttcagaatacccggccagatcggcagacagtacttttctctgccacatttccacggcaggtggagatactggcacgcaaggtgcttaccaagcctgttgaaattcaggtgggtgggaggagtgtcgtgaacaaagatatcacacaactggttgaggtccgaccagacaccgagaggttcttcaggctattagagttgcttggtgaatggtatgttaaggggaaaatccttgtttttgttcactcacaagataagtgtgattctctactcaaagacttgttccagcatgggtatccatgtctgtcccttcatggtggcaaagatcagactgaccgcgaatcaactattgctgatttcaagagcaacgtgtgcagcttgctgattgctactagtgttgctgctagaggattagatgttaaagaacttgaactggttgtcaattatgatgtccctaaccattatgaggactatgttcatcgtgttggtagaacaggtcgtgctggtagaaagggctttgccgttacttttatttctgatgaggatgagcgctatgcaacagaccttgttaaggctctggagctctctgagcaggctgttccacaggacctaaaagccctggctgatagatttatggctaaggtgaaacagggaactgagcaggcccatggcacaggctatggtggtagtggttttaagtttaacgaggaagaggatgaagcacggaagaccgcgaagaaggctcaggcaagggaatatggatatgaggaggacaagtcagattcagattctgatgatgaagggggagtgcgtaaggcaggaggtgatctggcagcacaagctattgccaatgctcatgcagctgctgctttggttgcaaacaaggctgctaataatgcaaatcagcaaataccaggatctgcaacagcccccttgattcctttactcacagcatcaaaccaacaaaatgatgaggccactgctcgggcacttcaggctgcaatgaacttgcaacaaaatctggcaaggatacaggcccatgcagttccagaacactatgaggctgaacttgagattaatgatttcccacagaatgcccgttggagaatcactcacaaagagacactggcccctattcaggactggactggtgctgctatcactacgaggggaacatatattcctcaaggaaaaattgttggtgcaaatgagcgcaagctttacctgtttatcgagggcccgacagagtcttctgtgaagaaggcgaaagcagaattaaaacgtgtccttgaggattgtgcaaaccaggctctaaatcttcctggatctgctcaaactggaaaatattctgttatttgagttgcagagtagataacaaagtggccgagtatttttttaggagcttataatggtttgcacacttcaaagccgctgatggattgctacttctgatgctcttgctgtctccagccttttattttgtctgatactcttttataagaagacttagaacacaggcggtgaccgagtgctgtaatgcaaaggaaggcggccagttttctggtgtacgtattgatttgcctattcggaagctgagaagctatagctttctctgttgatgcactattgttactgttgcaagcggagggcatcttataggggtgttgcttaggaaaaatagatgaaactggtaagatttggctcgatttgctgagacttgagaaaatgtgaatgatcatggagcaattttacctttctatcggtctatcttaggttatctccaataatttactcattctctaaattgcctaatgtgcttgcgctcttaatggtgtatgaaatgctatatatgcctggggccctaatattatctatgaacagtgtttgccctaatgtttcgtcgcttcgtctcatcttccctgaaaagtgtgcctgttatactacccatacttcttttggcgcagataaaaataacagatgaaatcggtaaagattcttttttcttgaacccgaggaagtatggatgatgctgcgtgcatgaacaagattgtgaaattgcatgcctgaattctggcgagtgatgattcatctatgtttccggtcatcctgataagcttgcgcagtatcgtctccgcggttatggtgtccagatttttgagttcaattcatggtgtcaacaaatagcacggcagtttacattggaataaatttcttgagtcaaatcagaaagctgcgcaaaaaacgagaggatatacttcacgcacaactcaaatcatttgtaaatgagttgcactagaaaat

SEQ ID NO: 201231 - DNA, 4559 bp, Zea Mays
caagaccttcacgaaacccactccgagctttcacgatacaatcacgcaatatttgtcgctgagaaattctcaactctggaagaaaaaaaatcgcagcacggaaaaagagagtccccctccccaccaccacatcccggtctagggtttgcgccatcccgaaccatccgctcgccgccggccgctgctgccgccatgggctccggtgacgacgagcgctccacctccaagcaccatcaccgcgataaggacaaggaccgtgaccgctcctcgtctcgccaccatcgcgacaaggaccgggaccgcgagcgctcctcgcggcaccaccgcgacgatggcgaccgggaccgggaccgccatcaccgggacaaggaccgggatcgagaggagcggaaggagagggagcgggaggagcgtaaagcacgggagcgggaggagcggaaggcacgggagcgggaggagcgggaggagcgggacagggagaaggagaaggagaaagagaaggagcgggcgcggcggcgcgaggagagggaccgcgaggagcgggagagttccaggcggcgcggggatgcggatggagaggaggacgacgaccgggaccgcaagcggcgccgccggtcctcgcaccaccaccaccgggacccagagccggagccggagcctgcatcccgggaagaggaggaggtggacgccgaggaggctgagcgccggcgccagcggaagaaggaggaggacatggaggccgagcagcagcgcctcgacgacgagatggagcgccggcgccggcgcgtcaaggagtggcaggagaagcgccgcgagcagcagcagcaggacggcagtgttgccagtggcgcttctgctgctgtggcggccgaggctgatggcgccaaagcggggaagaagtggaccttggatggcgaggagtctgacgaggaagaggacaaggaggacggcaagaaggctgaggggaatggtggtgctggtgacatggacgtgggtttgcccagtggaaatggtgatgccaacggtggtgctgagatggaggaggacgaaattgatccgctcgatgccttcatgaattccatggtgctgccagaggttgccaagctggagagtgctgcagtagcaatggatacagcccctgctgcaggtgcagatggcaagaatggtaagagctcaaaggatgtcattagtaatggggataagaaagggtcaaggaaagctacggggagaattatgcaaggggatgattcagactcggactacgatgatgctgatgatgatggggctggagaggatgatgaggatgatgaggaattcataaagcgtgtcaagaagacgaaggctgagaagttggcgatcgttgaccattcgaagattgactaccaaccgttccggaagaatttctatattgaggtgaaggacatcaccaagatgacatccgaggaagtggtagactaccggaagcacttggagctcaaggtgcatgggaaagatgtgcccaagccaataaagacatgggtgcagagtgggctgacaagcaaactccttgataccatcaagaagcttggttttgagaaaccgatgcctatacagacacaggctttgccgatcataatgagtggtcgtgattgtataggcatcgcaaaaactggatctggcaagactctagcatttgtcctcccaatgctgaggcatgttaaagatcagccccctgttgtccctggagatggccctattgggcttattatggctcctactagagagcttgtggtccagatacattcagacatcaagaagttctctaaggtgcttggcatcaactgtgttgcaatctatggtggttcgggagttgcacagcagatcagcgaattgaagaggggtgccgaaattgttgtttgtacaccgggaaggatgatcgatatcctttgcactagcagtggaaaaataactaaccttcgcagagtgactttcttggtgatggatgaagctgatagaatgtttgacatgggttttgagcctcagattactcgtatagttcagaatacccggccagatcggcagacagtacttttctctgccacatttccacggcaggtggagatactggcacgcaaggtgcttaccaagcctgttgaaattcaggtgggtgggaggagtgtcgtgaacaaagatatcacacaactggttgaggtccgaccagacaccgagaggttcttcaggctattagagttgcttggtgaatggtatgttaaggggaaaatccttgtttttgttcactcacaagataagtgtgattctctactcaaagacttgttccagcatgggtatccatgtctgtcccttcatggtggcaaagatcagactgaccgcgaatcaactattgctgatttcaagagcaacgtgtgcagcttgctgattgctactagtgttgctgctagaggattagatgttaaagaacttgaactggttgtcaattatgatgtccctaaccattatgaggactatgttcatcgtgttggtagaacaggtcgtgctggtagaaagggctttgccgttacttttatttctgatgaggatgagcgctatgcaacagaccttgttaaggctctggagctctctgagcaggctgttccacaggacctaaaagccctggctgatagatttatggctaaggtgaaacagggaactgagcaggcccatggcacaggctatggtggtagtggttttaagtttaacgaggaagaggatgaagcacggaagaccgcgaagaaggctcaggcaagggaatatggatatgaggaggacaagtcagattcagattctgatgatgaagggggagtgcgtaaggcaggaggtgatctggcagcacaagctattgccaatgctcatgcagctgctgctttggttgcaaacaaggctgctaataatgcaaatcagcaaataccaggatctgcaacagcccccttgattcctttactcacagcatcaaaccaacaaaatgatgaggccactgctcgggcacttcaggctgcaatgaacttgcaacaaaatctggcaaggatacaggcccatgcagttccagaacactatgaggctgaacttgagattaatgatttcccacagaatgcccgttggagaatcactcacaaagagacactggcccctattcaggactggactggtgctgctatcactacgaggggaacatatattcctcaaggaaaaattgttggtgcaaatgagcgcaagctttacctgtttatcgagggcccgacagagtcttctgtgaagaaggcgaaagcagaattaaaacgtgtccttgaggattgtgcaaaccaggctctaaatcttcctggatctgctcaaactggaaaatattctgttatttgagttgcagagtagataacaaagtggccgagtatttttttaggagcttataatggtttgcacacttcaaagccgctgatggattgctacttctgatgctcttgctgtctccagccttttattttgtctgatactcttttataaggcaactatggttacttaatgtgacatgattattatgaaattgtcggggtattttggcaatttctactgatgagttttcattgcctttggacagaagacttagaacacaggcggtgaccgagtgctgtaatgcaaaggaaggcggccagttttctggtgcggttttgaaagtgctggtgtacgtattgatttgcctattcggaagctgagaagctatagctttctctgttgatgcactattgttactgttgcaagcggagggcatcttataggtatgtctataagctgcagctggccttggtggttgctgagatggccaaacatcttgctcatatgtttccattgctgtaactttctttcctcttcgatcttatctttgtgaaaaggggtgttgcttaggaaaaatagatgaaactggtaagatttggctcgatttgctgagacttgagaaaatgtgaatgatcatggagcaattttacctttctatcggtctatcttaggttatctccaataatttactcattctctaaattgcctaatgtgcttgcgctcttaatggtgtatgaaatgctatatatgcctggggccctaatattatctatgaacagtgtttgccctaatgtttcgtcgcttcgtctcatcttccctgaaaagtgtgcctgttatactacccatacttcttttggcgcagataaaaataacagatgaaatcggtaaagattcttttttcttgaacccgaggaagtatggatgatgctgcgtgcatgaacaagattgtgaaattgcatgcctgaattctggcgagtgatgattcatctatgtttccggtcatcctgataagcttgcgcagtatcgtctccgcggttatggtgtccagatttttgagttcaattcatggtgtcaacaaatagcacggcagtttacattggaataaatttcttgagtcaaatcagaaagctgcgcaaaaaacgagaggatatacttcacgcacaactcaaatcatttgtaaatgagttgcactagaaaat

SEQ ID NO: 201232 - DNA, 1003 bp, Zea Mays
ttctttatcacggaactgatctagttattgctgatcacttgtcagctgaagaggttgaggacataaaggatatgttcaaggtgatggatactgataatgatggcatagtttcttatgaagagttaaagagtgggattgcaaaatttggttctcatcttgcagaatcagaagtgcaaatgcttattgaagctgtggatacaaatggtagaggagcactagattatggtgaatttttggccgtctcacttcatttacaaaggatggcaaacgatgagcaccttcggcgggccttcctatttttcgacaaggatggcaatggtttcattgagcctgaggagcttcaggaagccctgatggaggacgggggagctgataccatggacgtggtcaatgacatattgcaagaagttgacacagataaggatggtaaaattagctacgaagaatttgtagcgatgatgaagactggaacagattggaggaaggcgtcgcggcattattcaagagggcgcttcaatagccttagcataaagcttataaaagatgggtctgtaaaactgggtagcgagtgaggttgtagcttgctgccgatgctcttctccacgcattgtagtctgcctctcgggcccgctaagcagaaacccccttccgtttgctaatgattattttgtctgggatttaggtagttggagcctccctgattggtttactcgtgtaattagtagcccttttcagtatcgctgaggagcatctgctgtaggatgcacgcctgcctccgtctgtctgctcatctcctccggtgtacccgtcgctcaaatggaagtgttgtaaaatgttttggtgttgacctcaaatgcaatttgctggtttcgtgtactgacacccaagattcatttgcgcctataaggctaactgtgaaaatttacgtcatttgatgaggaaatgatgaagcgctagctgatttgtcttgtattctgtttatgcggtgtaaagctagtttgag

SEQ ID NO: 201233 - DNA, 1422 bp, Zea Mays
ctggacatgacagcacttatcagcccaaggtgaaaagttttcggaaattgtgggaagtccatactacatggctcctgaagtcttgaagaggaactatggacctgaaatagacatatggagcgctggtgttatcttgtatattttgttatgtggtgttcctccgttttgggctgagactgaacaaggagttgcacaagctattcttcggggaaatatagattttaagcgagaaccctggcccaatgtttctgacaatgctaaagatcttgttcggcagatgcttcaacctgatccaaaactcaggctaacagcaaagcaagttcttgagcatccctggcttcaaaatgctaagaaagctccaaatgttcctcttggagacattgtaaagtcaaggctgaaacagttttcaaggatgaacagattcaaaagaaaagctctaagggttattgctgatcacttgtcagctgaagaggttgaggacataaaggatatgttcaaggtgatggatactgataatgatggcatagtttcttatgaagagttaaagagtgggattgcaaaatttggttctcatcttgcagaatcagaagtgcaaatgcttattgaagctgtggatacaaatggtagaggagcactagattatggtgaatttttggccgtctcacttcatttacaaaggatggcaaacgatgagcaccttcggcgggccttcctatttttcgacaaggatggcaatggtttcattgagcctgaggagcttcaggaagccctgatggaggacgggggagctgataccatggacgtggtcaatgacatattgcaagaagttgacacagataaggatggtaaaattagctacgaagaatttgtagcgatgatgaagactggaacagattggaggaaggcgtcgcggcattattcaagagggcgcttcaatagccttagcataaagcttataaaagatgggtctgtaaaactgggtagcgagtgaggttgtagcttgctgccgatgctcttctccacgcattgtagtctgcctctcgggcccgctaagcagaaacccccttccgtttgctaatgattattttgtctgggatttaggtagttggagcctccctgattggtttactcgtgtaattagtagcccttttcagtatcgctgaggagcatctgctgtaggatgcacgcctgcctccgtctgtctgctcatctcctccggtgtacccgtcgctcaaatggaagtgttgtaaaatgttttggtgttgacctcaaatgcaatttgctggtttcgtgtactgacacccaagattcatttgcgcctataaggctaactgtgaaaatttacgtcatttgatgaggaaatgatgaagcgctagctgatttgtcttgtattctgtttatgcggtgtaaagctagtttgag

SEQ ID NO: 201234 - DNA, 1906 bp, Zea Mays
cccccctcgcctcgtccttaccgttataccccgagtccccgacacaggtctcgctcgctggtcgcctccctcgtccctcgcatcttctccctctttctctctccagcccagtagcctgtagccccccccccctcctctctctctctcttcctcccccactcgcacagtgcccaatgccgcacaaaccctagtgcccccactcccaatctcgcgcggcggccatgggaaactgctgccgctcgccggccgccgcggcgcgggaagacgtcaagtcgtcgcacttcccggcctccgccggcgggaagaagaagccccaccagcaggcgcggaacggcggccccggctccggggagaagaagcgtctgtcggtgctcggggaggaggggtgcgacgtgggcgccggcgggatcgaggagaagtacgcgctggaccgggagctggggcgcggcgagttcggggagaactcgccgctcaaggccatcgactttggtctctccatcttcttcaagcccggtgaaaagttttcggaaattgtgggaagtccatactacatggctcctgaagtcttgaagaggaactatggacctgaaatagacatatggagcgctggtgttatcttgtatattttgttatgtggtgttcctccgttttgggctgagactgaacaaggagttgcacaagctattcttcggggaaatatagattttaagcgagaaccctggcccaatgtttctgacaatgctaaagatcttgttcggcagatgcttcaacctgatccaaaactcaggctaacagcaaagcaagttcttgagcatccctggcttcaaaatgctaagaaagctccaaatgttcctcttggagacattgtaaagtcaaggctgaaacagttttcaaggatgaacagattcaaaagaaaagctctaagggttattgctgatcacttgtcagctgaagaggttgaggacataaaggatatgttcaaggtgatggatactgataatgatggcatagtttcttatgaagagttaaagagtgggattgcaaaatttggttctcatcttgcagaatcagaagtgcaaatgcttattgaagctgtggatacaaatggtagaggagcactagattatggtgaatttttggccgtctcacttcatttacaaaggatggcaaacgatgagcaccttcggcgggccttcctatttttcgacaaggatggcaatggtttcattgagcctgaggagcttcaggaagccctgatggaggacgggggagctgataccatggacgtggtcaatgacatattgcaagaagttgacacagataaggatggtaaaattagctacgaagaatttgtagcgatgatgaagactggaacagattggaggaaggcgtcgcggcattattcaagagggcgcttcaatagccttagcataaagcttataaaagatgggtctgtaaaactgggtagcgagtgaggttgtagcttgctgccgatgctcttctccacgcattgtagtctgcctctcgggcccgctaagcagaaacccccttccgtttgctaatgattattttgtctgggatttaggtagttggagcctccctgattggtttactcgtgtaattagtagcccttttcagtatcgctgaggagcatctgctgtaggatgcacgcctgcctccgtctgtctgctcatctcctccggtgtacccgtcgctcaaatggaagtgttgtaaaatgttttggtgttgacctcaaatgcaatttgctggtttcgtgtactgacacccaagattcatttgcgcctataaggctaactgtgaaaatttacgtcatttgatgaggaaatgatgaagcgctagctgatttgtcttgtattctgtttatgcggtgtaaagctagtttgag

SEQ ID NO: 201235 - DNA, 3112 bp, Zea Mays
cctcacgcaccctgcgtcttttccggctgccgctgctggctggctggctctggctcacagctacaggctacagtgaccgccacgcaacccacactgtctctgtcctcgtctccctctcccctcctagctctagctggataggtgggctctggggaggaggaggagggtagctaggtagtagctgcctataggcctcggcccccattcatggccattaccacgatgtgtcaccccaccacaccgccctctccgatgctgcctccctcatgataaccctctccctggtggttgttctttgccttgttgccgtgcagcctccacccccaccctcctcattaatcacttgctagctccctgcctccctcccggctcccgctcccccttctcgtgcttcgcgcccccgcagcagccatggcggggatcgacctcaacgacaccgtggaggaggacgaggaggaggcggagcccggcaacgcctgctcccagcagagccggaccagctccgcggccacgttcccgccgccgccgccgaaccagccgaggccgagcgccgcggtgtgcctcgagctgtggcacgcctgcgccggccccgtcgcgccgctgccgaggaaagggagcgtcgtggtgtacctcccgcagggacacatcgagcacctcggcgacgccgcggccgccggcggaggcgcgccgccgcccgtcgccctgccgccccacgtcttctgccgcgtcgtcgacgtcactctccatgcggacgcgtccacggacgaggtgtacgcccagctcgccctcgtcgccgagaacgaggatgtcgcgaggcggctgcgcggacggtcggaggacggcagcgccgaggacggcgacgaaggggaaaccgtgaagcagcggttctcgcggatgccgcacatgttctgcaagacgctcacggcctccgacaccagcacgcacggcggcttctccgtgccacgccgcgccgccgaggactgcttcccgcctctggactacagccagcagcgaccgtcgcaggagcttgtggccaaggatttgcacggaaccgagtggaggttccgccacatttatcgagggcagccccgcagacaccttttaaccactggatggagtgcctttgtcaacaagaagaagcttgtctcaggggacgccgtactatttttgaggggtgataatggggagctaagacttggagtgcgccgtgcagctcagcttaaaaatggatctgcttttccagctctttataaccagtgcttaaatcttggttcactacctaatgttgcacatgctgtggccaccaaaagtgtgttccacatctactacaaccccagattaagccaatctgaattcattataccattttcgaagtttatcaagagcttcagtcaaccattttctgctggttcgaggttcaaagtgaaatatgagagtgatgatgcttctgaaagaagatgcacagggatcatagcaggaattggtgatgctgaccccatgtggcgtggttcgaaatggaaatgtttgatggttcgatgggatgacgatgtagattttcgtcaaccaaacaggatttctccttgggagattgagctgactagttcagtttcaggatctcacatgtctgcaccaaatgcaaagagactgaaaccatgtcttccccatgttaatccagactacctagttccaaatggaagcggtcgtcctgattttgcggaatctgcccaattccacaaggtcttgcaaggtcaagaattactgggttatagaactcatgacaatgctgctgttgcaacttctcagccatgcgaagcaacgaacatgcagtacattgatgaacgaagttgctccaacgatgcgagtaacattatcccgggggttccaagaattggtgtcagaacaccactcggaagccctaggttttcctaccgttgctcaggctttggggagtctccaagattccaaaaggtcttgcaaggtcaagaagtatttcatccctacagaggaactctggtcgatgcaagcttgagtaatagtggcttccatcagcaagatggttctcatgtgcctactcaggccagcaagtggcacgcacagctacatggatgtgcttttcgtggccaacaagcaccagctgttccatctcaatcctcatccccaccatctgtcctgatgtttcaacgaggtgatccaaagatgtccccatttgaatttgggcatttccacgtgaataagaaagaggatagacgcgcaatgtttgtccatgctggaggcatcggaggaactgagcaaacgacgatgctccaggctcatcatgtttctggaggaacgggaaacagagatgtgaccgttgagaaatctcatcccgctgttgccgctgcttcagacaacagggaagttagcaaaaacagttgcaaaatatttggcatatctttgaccgagaaggttccagcaatgaaagaaaagggctgtggtgacatcaacaccaactatccatcccccttcctgtctttgaagcaacaagtgccgaaatcgctgggcaacagctgtgccaccggtgattgacgtttcaacagtggatatgatgatctgatgtattggaaaactgtcctggaggctgtgttgcgtagtgtggacagtgtcggtttgatggttcggtatcgtgaagacgggatttgattgaggatctggccagatttgtatcctagttgtagctgttagagcactttgtatgacaaccgtgagtgctccgtgttatcagcactagttgctgctcacaacttgcctctatgttcataatctgtatgccatgtcagacccatttatagagggtttgtttgcttggcatagttctagacttaaagcattattatgagaacaaatttgctctgcaccgtatctttcttactttcaagttggcaacggattaacggtggaggagatgatctgagaggttagttgtgcgacgtattaatggtgttacatatattatgcttaggagcattctgccagctcatttatcatatacatgtcagcacttgatttgttaagtgtagttagtagccttgcactttggattggagctatcctcttagggtgtgtttggttggag

SEQ ID NO: 201236 - DNA, 3065 bp, Zea Mays
ccgctgctggctggctggctctggctcacagctacaggctacagtgaccgccacgcaacccacactgtctctgtcctcgtctccctctcccctcctagctctagctggataggtgggctctggggaggaggaggagggtagctaggtagtagctgcctataggcctcggcccccattcatggccattaccacgatgtgtcaccccaccacaccgccctctccgatgctgcctccctcatgataaccctctccctggtggttgttctttgccttgttgccgtgcagcctccacccccaccctcctcattaatcacttgctagctccctgcctccctcccggctcccgctcccccttctcgtgcttcgcgcccccgcagcagccatggcggggatcgacctcaacgacaccgtggaggaggacgaggaggaggcggagcccggcaacgcctgctcccagcagagccggaccagctccgcggccacgttcccgccgccgccgccgaaccagccgaggccgagcgccgcggtgtgcctcgagctgtggcacgcctgcgccggccccgtcgcgccgctgccgaggaaagggagcgtcgtggtgtacctcccgcagggacacatcgagcacctcggcgacgccgcggccgccggcggaggcgcgccgccgcccgtcgccctgccgccccacgtcttctgccgcgtcgtcgacgtcactctccatgcggacgcgtccacggacgaggtgtacgcccagctcgccctcgtcgccgagaacgaggatgtcgcgaggcggctgcgcggacggtcggaggacggcagcgccgaggacggcgacgaaggggaaaccgtgaagcagcggttctcgcggatgccgcacatgttctgcaagacgctcacggcctccgacaccagcacgcacggcggcttctccgtgccacgccgcgccgccgaggactgcttcccgcctctggactacagccagcagcgaccgtcgcaggagcttgtggccaaggatttgcacggaaccgagtggaggttccgccacatttatcgagggcagccccgcagacaccttttaaccactggatggagtgcctttgtcaacaagaagaagcttgtctcaggggacgccgtactatttttgaggggtgataatggggagctaagacttggagtgcgccgtgcagctcagcttaaaaatggatctgcttttccagctctttataaccagtgcttaaatcttggttcactacctaatgttgcacatgctgtggccaccaaaagtgtgttccacatctactacaaccccagattaagccaatctgaattcattataccattttcgaagtttatcaagagcttcagtcaaccattttctgctggttcgaggttcaaagtgaaatatgagagtgatgatgcttctgaaagaagatgcacagggatcatagcaggaattggtgatgctgaccccatgtggcgtggttcgaaatggaaatgtttgatggttcgatgggatgacgatgtagattttcgtcaaccaaacaggatttctccttgggagattgagctgactagttcagtttcaggatctcacatgtctgcaccaaatgcaaagagactgaaaccatgtcttccccatgttaatccagactacctagttccaagtcttgcaaggtcaagaattactgggttatagaactcatgacaatgctgctgttgcaacttctcagccatgcgaagcaacgaacatgcagtacattgatgaacgaagttgctccaacgatgcgagtaacattatcccgggggttccaagaattggtgtcagaacaccactcggaagccctaggttttcctaccgttgctcaggctttggggagtctccaagattccaaaaggtcttgcaaggtcaagaagtatttcatccctacagaggaactctggtcgatgcaagcttgagtaatagtggcttccatcagcaagatggttctcatgtgcctactcaggccagcaagtggcacgcacagctacatggatgtgcttttcgtggccaacaagcaccagctgttccatctcaatcctcatccccaccatctgtcctgatgtttcaacgaggtgatccaaagatgtccccatttgaatttgggcatttccacgtgaataagaaagaggatagacgcgcaatgtttgtccatgctggaggcatcggaggaactgagcaaacgacgatgctccaggctcatcatgtttctggaggaacgggaaacagagatgtgaccgttgagaaatctcatcccgctgttgccgctgcttcagacaacagggaagttagcaaaaacagttgcaaaatatttggcatatctttgaccgagaaggttccagcaatgaaagaaaagggctgtggtgacatcaacaccaactatccatcccccttcctgtctttgaagcaacaagtgccgaaatcgctgggcaacagctgtgccaccgttcatgagcagaggcctgttgttgctagggtgattgacgtttcaacagtggatatgatgatctgatgtattggaaaactgtcctggaggctgtgttgcgtagtgtggacagtgtcggtttgatggttcggtatcgtgaagacgggatttgattgaggatctggccagatttgtatcctagttgtagctgttagagcactttgtatgacaaccgtgagtgctccgtgttatcagcactagttgctgctcacaacttgcctctatgttcataatctgtatgccatgtcagacccatttatagagggtttgtttgcttggcatagttctagacttaaagcattattatgagaacaaatttgctctgcaccgtatctttcttactttcaagttggcaacggattaacggtggaggagatgatctgagaggttagttgtgcgacgtattaatggtgttacatatattatgcttaggagcattctgccagctcatttatcatatacatgtcagcacttgatttgttaagtgtagttagtagccttgcactttggattggagctatcctcttagggtgtgtttggttggag

SEQ ID NO: 201237 - DNA, 3011 bp, Zea Mays
agctctagctggataggtgggctctggggaggaggaggagggtagctaggtagtagctgcctataggcctcggcccccattcatggccattaccacgatgtgtcaccccaccacaccgccctctccgatgctgcctccctcatgataaccctctccctggtggttgttctttgccttgttgccgtgcagcctccacccccaccctcctcattaatcacttgctagctccctgcctccctcccggctcccgctcccccttctcgtgcttcgcgcccccgcagcagccatggcggggatcgacctcaacgacaccgtggaggaggacgaggaggaggcggagcccggcaacgcctgctcccagcagagccggaccagctccgcggccacgttcccgccgccgccgccgaaccagccgaggccgagcgccgcggtgtgcctcgagctgtggcacgcctgcgccggccccgtcgcgccgctgccgaggaaagggagcgtcgtggtgtacctcccgcagggacacatcgagcacctcggcgacgccgcggccgccggcggaggcgcgccgccgcccgtcgccctgccgccccacgtcttctgccgcgtcgtcgacgtcactctccatgcggacgcgtccacggacgaggtgtacgcccagctcgccctcgtcgccgagaacgaggatgtcgcgaggcggctgcgcggacggtcggaggacggcagcgccgaggacggcgacgaaggggaaaccgtgaagcagcggttctcgcggatgccgcacatgttctgcaagacgctcacggcctccgacaccagcacgcacggcggcttctccgtgccacgccgcgccgccgaggactgcttcccgcctctggactacagccagcagcgaccgtcgcaggagcttgtggccaaggatttgcacggaaccgagtggaggttccgccacatttatcgagccccgcagacaccttttaaccactggatggagtgcctttgtcaacaagaagaagcttgtctcaggggacgccgtactatttttgaggggtgataatggggagctaagacttggagtgcgccgtgcagctcagcttaaaaatggatctgcttttccagctctttataaccagtgcttaaatcttggttcactacctaatgttgcacatgctgtggccaccaaaagtgtgttccacatctactacaaccccagattaagccaatctgaattcattataccattttcgaagtttatcaagagcttcagtcaaccattttctgctggttcgaggttcaaagtgaaatatgagagtgatgatgcttctgaaagaagatgcacagggatcatagcaggaattggtgatgctgaccccatgtggcgtggttcgaaatggaaatgtttgatggttcgatgggatgacgatgtagattttcgtcaaccaaacaggatttctccttgggagattgagctgactagttcagtttcaggatctcacatgtctgcaccaaatgcaaagagactgaaaccatgtcttccccatgttaatccagactacctagttccaaatggaagcggtcgtcctgattttgcggaatctgcccaattccacaaggtcttgcaaggtcaagaattactgggttatagaactcatgacaatgctgctgttgcaacttctcagccatgcgaagcaacgaacatgcagtacattgatgaacgaagttgctccaacgatgcgagtaacattatcccgggggttccaagaattggtgtcagaacaccactcggaagccctaggttttcctaccgttgctcaggctttggggagtctccaagattccaaaaggtcttgcaaggtcaagaagtatttcatccctacagaggaactctggtcgatgcaagcttgagtaatagtggcttccatcagcaagatggttctcatgtgcctactcaggccagcaagtggcacgcacagctacatggatgtgcttttcgtggccaacaagcaccagctgttccatctcaatcctcatccccaccatctgtcctgatgtttcaacgaggtgatccaaagatgtccccatttgaatttgggcatttccacgtgaataagaaagaggatagacgcgcaatgtttgtccatgctggaggcatcggaggaactgagcaaacgacgatgctccaggctcatcatgtttctggaggaacgggaaacagagatgtgaccgttgagaaatctcatcccgctgttgccgctgcttcagacaacagggaagttagcaaaaacagttgcaaaatatttggcatatctttgaccgagaaggttccagcaatgaaagaaaagggctgtggtgacatcaacaccaactatccatcccccttcctgtctttgaagcaacaagtgccgaaatcgctgggcaacagctgtgccaccgttcatgagcagaggcctgttgttgctagggtgattgacgtttcaacagtggatatgatgatctgatgtattggaaaactgtcctggaggctgtgttgcgtagtgtggacagtgtcggtttgatggttcggtatcgtgaagacgggatttgattgaggatctggccagatttgtatcctagttgtagctgttagagcactttgtatgacaaccgtgagtgctccgtgttatcagcactagttgctgctcacaacttgcctctatgttcataatctgtatgccatgtcagacccatttatagagggtttgtttgcttggcatagttctagacttaaagcattattatgagaacaaatttgctctgcaccgtatctttcttactttcaagttggcaacggattaacggtggaggagatgatctgagaggttagttgtgcgacgtattaatggtgttacatatattatgcttaggagcattctgccagctcatttatcatatacatgtcagcacttgatttgttaagtgtagttagtagccttgcactttggattggagctatcctcttagggtgtgtttggttggag

SEQ ID NO: 201238 - DNA, 1672 bp, Zea Mays
gtttcttattgccctgcccctgagtgcacattgtaggggtacataataccctcttgacttagttcgatgggatgacgatgtagattttcgtcaaccaaacaggatttctccttgggagattgagctgactagttcagtttcaggatctcacatgtctgcaccaaatgcaaagagactgaaaccatgtcttccccatgttaatccagactacctagttccaaatggaagcggtcgtcctgattttgcggaatctgcccaattccacaaggtcttgcaaggtcaagaattactgggttatagaactcatgacaatgctgctgttgcaacttctcagccatgcgaagcaacgaacatgcagtacattgatgaacgaagttgctccaacgatgcgagtaacattatcccgggggttccaagaattggtgtcagaacaccactcggaagccctaggttttcctaccgttgctcaggctttggggagtctccaagattccaaaaggtcttgcaaggtcaagaagtatttcatccctacagaggaactctggtcgatgcaagcttgagtaatagtggcttccatcagcaagatggttctcatgtgcctactcaggccagcaagtggcacgcacagctacatggatgtgcttttcgtggccaacaagcaccagctgttccatctcaatcctcatccccaccatctgtcctgatgtttcaacgaggtgatccaaagatgtccccatttgaatttgggcatttccacgtgaataagaaagaggatagacgcgcaatgtttgtccatgctggaggcatcggaggaactgagcaaacgacgatgctccaggctcatcatgtttctggaggaacgggaaacagagatgtgaccgttgagaaatctcatcccgctgttgccgctgcttcagacaacagggaagttagcaaaaacagttgcaaaatatttggcatatctttgaccgagaaggttccagcaatgaaagaaaagggctgtggtgacatcaacaccaactatccatcccccttcctgtctttgaagcaacaagtgccgaaatcgctgggcaacagctgtgccaccgttcatgagcagaggcctgttgttgctagggtgattgacgtttcaacagtggatatgatgatctgatgtattggaaaactgtcctggaggctgtgttgcgtagtgtggacagtgtcggtttgatggttcggtatcgtgaagacgggatttgattgaggatctggccagatttgtatcctagttgtagctgttagagcactttgtatgacaaccgtgagtgctccgtgttatcagcactagttgctgctcacaacttgcctctatgttcataatctgtatgccatgtcagacccatttatagagggtttgtttgcttggcatagttctagacttaaagcattattatgagaacaaatttgctctgcaccgtatctttcttactttcaagttggcaacggattaacggtggaggagatgatctgagaggttagttgtgcgacgtattaatggtgttacatatattatgcttaggagcattctgccagctcatttatcatatacatgtcagcacttgatttgttaagtgtagttagtagccttgcactttggattggagctatcctcttagggtgtgtttggttggag

SEQ ID NO: 201239 - DNA, 1333 bp, Zea Mays
cggcagttactacccgctccaccggcggcgcgggcgaccgggcccaggcccgggcgcgggtttaagaaggccgcgggtgcgccggtgcaagatgaagctgatgtacttcctcatggacagggacgagcagcgcgagaagcggctggagctcgagttcgaggtgtcggagctggagacggtgctcgagaaggagcagcagctgggcagggtcctgcagtgctcgctccaggggcgcgtcgtgtgccattgctgcctctccgcgctggttcctaccaacgttaggggccttttagcggagctagcggtggtggaggacgagatattctacttggagaagaaggtggacgacctgcgcctgaggctgcgccgggagcagaagtggacggaccactgcatcctccaccaccagcagcagcagcagcagcacaaccgccagcaacggcactccgtgtccgtgtccaggagggagctccagctccaacaagcaggcgcccagcagctacccaggctaccgtgtccgggtccgggcagcgacgaggctcccgaacgcgagagcaaggcttccgtcggatccgcctccgccaaaggagatgagacagagcacgtcgtcggcaggaggagcagccactgccactcgtcgtcgtcgtcgtcggagaacccgtaccggccgacgcctcccgagcggaagacgtactgcatggcgagcagccccaacaggctctcggaggagctcgtcaggctgacggtgaccatcttccacaagctcaacaagacggcgacggcgacggcggcggacgcgggggagctggatctggagctggagccgagcggcggcggcgcgtcgtcgtccaagctcaacatctcgtgcatcggccccaggagcctcgtccccagggtctccgcgtccgtgaacggcgccgcggcggcgatgagcccgctcaagagccggagagcggcggccaagggcggcggcgcggagaccgggtctgccgccgggtgccagaggaggttcgtcgagttcaccagaggctccgtcgacgtcagccgcatctcactgtgcctcgtcgacatcaagaacctgagaggcctgatgcagaagctctgcgccgtcgaccccagccttatgacgaacaagcagaagctggcgttttggatcaacgtctacaacttctgcgtgatgcatgcgtttctccagcacggtttgcctccgtctccggagaagcttcttgcgctgctgaatcaggcttcggtgaacgtcggcggaacagtgctgaacgttgtgtcgatcgagcacctcatcctgaggcactctcctgacgccaagcaagtatgt

SEQ ID NO: 201240 - DNA, 1973 bp, Zea Mays
tagtacctcttatctatcagatctggtttccttggatgccgccttctcgtactgtactctacctctgtcaactggatcaatcacccaatgcttgcgtggtacagtacaagaaggccatcagtacgacttgacaatggttaggggccttttagcggagctagcggtggtggaggacgagatattctacttggagaagaaggtggacgacctgcgcctgaggctgcgccgggagcagaagtggacggaccactgcatcctccaccaccagcagcagcagcagcagcacaaccgccagcaacggcactccgtgtccgtgtccaggagggagctccagctccaacaagcaggcgcccagcagctacccaggctaccgtgtccgggtccgggcagcgacgaggctcccgaacgcgagagcaaggcttccgtcggatccgcctccgccaaaggagatgagacagagcacgtcgtcggcaggaggagcagccactgccactcgtcgtcgtcgtcgtcggagaacccgtaccggccgacgcctcccgagcggaagacgtactgcatggcgagcagccccaacaggctctcggaggagctcgtcaggctgacggtgaccatcttccacaagctcaacaagacggcgacggcgacggcggcggacgcgggggagctggatctggagctggagccgagcggcggcggcgcgtcgtcgtccaagctcaacatctcgtgcatcggccccaggagcctcgtccccagggtctccgcgtccgtgaacggcgccgcggcggcgatgagcccgctcaagagccggagagcggcggccaagggcggcggcgcggagaccgggtctgccgccgggtgccagaggaggttcgtcgagttcaccagaggctccgtcgacgtcagccgcatctcactgtgcctcgtcgacatcaagaacctgagaggcctgatgcagaagctctgcgccgtcgaccccagccttatgacgaacaagcagaagctggcgttttggatcaacgtctacaacttctgcgtgatgcatgcgtttctccagcacggtttgcctccgtctccggagaagcttcttgcgctgctgaatcaggcttcggtgaacgtcggcggaacagtgctgaacgttgtgtcgatcgagcacctcatcctgaggcactctcctgacgccaagcaaggcattatgggcgacgacggacagacggatctgctgcactcgtacgggctagggtatcccgagcccaacgtcgtcttcgcgctgtgcagaggcagccgctcctcgccagcactgcgcgtgtacacggcggaggacgtgtcgaacgagctggagcgggccaaggtggagtacctggagtcttcggtgcgcgtcgccggcaggaagcagcgcgccgtcgtggtgcccaagctgctgcactggcacatgcgcgacttcgccgacgacgccgcgtcgctgctggagtgggtgcacagccagctgcccagggcgtcggggccgctccgccgggccatcagggaggtcctgggcgccaacatgggcagcggcagcagggcgcccacgccggcgccggcggccaagatgctggaggtcgagccgtacgacgccgacttctgctacctgctgcccgtctggtgagcgtcagcgaccgtccgtgtccatgtaagcaaggcattgctagctgcgcgccgcgcgggtcaagttctgctgtgaccattgctgcagtgcgaggtggtgacgatgtcgtgcatgtgaagcgtgaactacttccgccgtatgatagttttactacgtacatttttttgtgcgttgtgttgacgtgcagaagtatcaatcaataaggccttgttcatattctatatggattcgaaaaattgcgaagaattttgacttgctatgaattttaacacatccaattctgtccaatagatatagattgtggtcaaaacgaacattgccctaataataa

SEQ ID NO: 201241 - DNA, 2330 bp, Zea Mays
gtttggttcaacagtcaccgtcatccaccctccgtcttccccccacccgtccgtcaccagtcaccacctcactccacgtctcctcggtccctcccgcgctgctcactgcccaccgacactctcctgcgctgcgccgccatggaccgcgacccttccgtctccgacgaggacgacgacctcgagaccctcgtaccacagaaccacgccaagcccccgtccccctccgcccgctcccgctcgccgccctcctccttcagcgtcgccgcgctccgtccgacgcttccgtccctccgccgcctccctccggcgcgtcctctggtcccgccgctacctcgtgctcttcgtttccctcccgcttctcttcctaatcctcttcttctcctacgggggtgcgtcctccctccgcctgcccgcctccatccgcctcccctccgccgcacccgccgccgaccccgcggcctcccgcatgcgcgaggccgagctgcacgcgctctacctcctccgctcccagcgctccggtctcctcagcctcttcaaccgcaccgcagcccccaccaacggctccgcccccgcccccatctcgctctccgatctccagtccgcgctcgagagccagatcaagatcaaccgcgagattcaagcggcgctcctctcctcgcaccgctcagggtccggcaatgcgaccgaggacggcctggatctcgatctccctttctccggctgcaggaagagggaattgccggccagccggcggaccattgagtggaaccccaagaaagaccggttcctcctagtcatctgcatctccgggcaaatgtccaaccacttgatttgcttggagaagcacatgttcatggcagcgcttcttggacgtaccctggtggtgcccagccagaaggcagattaccagtatgatcgggtgcttgatatcaaccacattaatgactgcattgggaggaaggttgtgatcacctatgaggagtttgtggagaagaggaagaaagtggccatcgatcagttcatatgctatgcagcctcgcctccatgtttccttgatgaggaacatattaagaagctgaaaggacttgggatttctctgagcaagattgaggcagcttggccagaggatgcaaagctgaaggagccaaagaagagatctgttggggatattgcaccaaagttttcgacagaggctgaggtccttgccattggcgacatgttttatgctgacatggaggatgagtggctgaatcaacctggtggtccattggctcacaagtgcaaggcattgattcaaccaagtaggctcatagtgctcactgctcaacgtttcgtccagactttcttgggaggaaactatattgccttgcattttcgacggcatggattcctgaaattctgtaatgtgaagaaagagagctgcttcttccccatcccccaggctgcagaatgcattctgcgaatcgttgagaaggccaatgcacctgtgatatatttatctactgatgctgctgagagcgaaacaaatcttctgcagtccttggttgtgttcaacgacaggcaagtccctctcgtgaagaggccagagcaccacagctccgagaaatgggatgccttgctaaacagaaaccgcatgggtggagatggtcaggttgacgcgatgcttgacaagacgatctgtgcgctatcaaacgtattcataggatcgtcagggtccaccttcacggaggacatcttccggctgcggaggggctggggatcggcgtcgcactgtgacgagtacctctgccagggcgagctgcctaacttcatagcagagctagattgagaaggcaacttcccaggaggatcgatagctgcaattttctcccattcgtgtccatatgtcctgtaaaaaaaatggtggtgtgtacatctagtgtgatttgtggtggtgctggtgtgtgtgtgtgttggggggcggggggaaggtctctgtatcggggatgtccattgatttgttcggtgttattcttgcacaggtaccttcggacccgagtcggaattacagtaggagaagcctaatacgaaggttgatacagcgccgaagatgtgagcgggaaagcttcggcgtgctagcagaaaatgaaaccgacttaaagatgaaaagactattcagacctcggtggaatactatagaattattaccaaatgtaaagggcatgaatgtaattttgtatgggctgtgtctcgtgtctataaataggtgaacagtacccccgtactgttcacgctgatttgacactggcttttgcgtcatacctgtactttcatctcttttcaagttgaaa

SEQ ID NO: 201242 - DNA, 1467 bp, Zea Mays
gtacaataaatgttgttattgcatagtacatacttatacgagactaacgcaactggaacggatcaaatcagagttaaaatggaggagttatgaatttataaagttttaaatgttggataaaagattaattaggatattaattttaatgtggctttcatgtcaaaacagtggcactaattgtaattgataaacaataatattacaaaattataggactgaaatgggtcaatttggactaaatatggattttctaaggattaaataagttttctggatttatcttaatactaaaaatcaatttatatgtaattaattattcattttcattgttctctgaactgcgcgctaaatactggaaagtccaggggctctcgcgcaacttgcagtaagactcaggcaacaacaggacgtactgcgggttgatttggtgtaacagcgagggttcttatgtaaaatgggcacggccgagggaaccacttgatctgagctgtcagatcaaaatagacgacccagattatatcctcgacgaatgaaccggtactcgacagcagcagtcggatctatcacctacggtctagatttgatttcacgacgagttactctaacacccaatcttggtcgcacacagggatatccacggtccacatgcccccactgaaacgttatccactaaccctcatccccaccattgatctaaggatcaatggcaactgctcatcttcttccctaccatgacacctagcgcggctatggagtcgacgacgtggttgaccacgtcagatggcggatccgtggccaccgcatcagaccgacgagcaaattcggacgagtccgcccatcacctcgctcccgggagttacctctaggtttgctgcacaccggtagtccctcgccctcctcccgaggccggaccgtcagccaaggtaggatccgaacgcgacggcgacgagctcggcttgcagctgcccagcggcgaaccacggactccataggaaacaaacccaataccccgatgaacttctatgctcatcagcgaacctctctagcaggccctggtgccgcgaccttcgctccacatgatccgacgaactccccctttctctctcctcgagtgcggctccagatctcccctgttggtttcctgcgctcaccctctctctccaatggccacgacacaccatgggcgaacgcgctgccttacttctggttgactagggcggtgagttccagggccatgatcgctcctcttttatgcgcagcgaacgagtggtcaattcccctccggactgcaagggatccgcaccccacggatctctccgtccactgcgcgcgcgtctggtaggaggagtaacgtgaagctaggcagtgggtcccgccagcggccagccccatccatccgttggccgcgtgagcgagggacttcggtggatcctggcgcgattcagttgcgcagctgagcggatcttg

SEQ ID NO: 201243 - DNA, 1590 bp, Zea Mays
aagatgttaagtagagtatcttgcacttgcatatactgtacctagtcttggagtggcgctgttgtaggctgccattgtaaacagaaacagtaaactctgcctagtctaggatggtacgagcactgttccgtgtgacaggttgcactgtttggtctttggtgttgcggtgggaggctgaactgtacacgccacgccattaaaggcgggcataaatgtagcagcagcgtagcgtcgagcgaaccgtcccgtcgccaatcataaatgcacccgccgtttgcgatgcgacggacgacgacgcggccggaggcgaggcccgcgaccgaggcgaagcgcaggaccgccggcagtcgatcgaaaggcgctctcaaaagctctgcgctgcgctggcagctttgagctttctcgggccggagaaaagccgaaacaaacaaacggactggccgagtcgaggagagagagagggtgagagggagaagagaaggcggagagagaaagcgagctgaggagcgcaggcgctgtcgctggcgaggacatgctcgcggcagcgcggtatgggctcaaaccataggcgtgtcaggaacggtggagagcggcgaccactactcgtcttcgtctcggtcctcgcgcgctcctgggctgcctcttggtgctagaaaccctcgcgtcgcgggtgcttggttgcgactgcaagcgccaagctgctgtgctgtgccgtgggtggcggcggcgggagtggaagtggaaccgcagccggtgctgtgatggacgcgcagcagcagctggatttggtcatgcgtcaccagagcatggccaccgtctgcgagagcgaggacgcgctggggtcgtcggagtcggatcccgcgaggccggcgcgcccgcgcggcaagaggagccgcgccgccgaggtgcacaacctctccgagaaggtgggtgccggaggaggaggagcaggatcaacgagaagatgaaggcgctgcagaccctcatacccaactcgagcaagacggacaaggcttccatgcttgatgatgccattgagtacctgaagcatcttcagctccaggtgcaggtggtaagacccttgcaaaattcccaaacagcatagagcttgggaagcttggactctgtcaagatccgaagaagaacggcggagcactcatttacatgtttaatatgtagctgtctttttctattttgattttagcgagcaggcgtttacatgagattagttgagttggcaccaaaatgaaaaatgatggcgcctttgaaagaaaaaccgtttgcatctgtttgtggtcagcaactagagtcagtaatcaggaggtaatatttaagtctaaaaaggtatcatcaggaggtataagtttctacgagatgctttaaagttctatacccgatgttgtagtatgtacaccatggaattggtggctgggattaatcacaatgctccgatcctatcgtaaaagagaaatggagaacacaacattttgccatcattgttttctgtattgttctataatctatactactagctctgaagtgctttagccattccagtcatgattcatgtattcctcatttctgcagccc

SEQ ID NO: 201244 - DNA, 4139 bp, Zea Mays
caaacctccccgtcgcggcgccctccccgccttcccattcccggccccgcccgcccacatctagtctcccacctcgccctcgcggcgccggtgtagcagccatgctagtctccgtcgccgccgacgactccggctggcaggagtccccgtcgcaggccgtcctcttcgccgacgagatcgctgccgtccgcgctgtcctgggcgggaccctctccgaggccagcatcattgccgcgctctcccagtgcggtggcaacgctgagcgcgccatcaacgcgatcctcgacgacgccgaggtcgtttccgcccccaagcgggccaaggtcgagctcgacgtcggtggtgttccggtgcaggtgccggtagctgtcaaggtgaaggccgaatccatcgacgtcggggccgtggcgccggcagctgtcaaggtgaaggccgagcccattgacggcgatgtcgtggggagccaacaatccgatggctcctccgcgaaggccaccgccaagatgaagagcgagccggccgaatggtccgccaagacacccgaccgattcgtccccgacgcgcgcagtgtaggtgcgcctgtggcggtggcgagcgccggcgccggcataagcatcgtcccgcggcagaataagaggccgaggcaggaggtggggaccatcgaactcactaccacgcacccggtgccgtacctcaactcgcggcccatccgggcgctgccacccatgccacccatgggcggggacggggaggtgtacgacccgaagcctatccagatggtgccgcccctggaaatccagatgcacgatccgaggaccaccctacctgcgccgtcacccatcgacatcgagatgtaccaacaaccgccgcggccgccgcccgtggacgtcgagatgtgcgagcagaggtcgcggccccggccccggcccctcagggcggttgtgcctgcctcggtgacggacatgaggatggtggtggcgccaccggacggcgagtttggcgacttccctgtggagcgcgactggatgctcgtcggcaagtcctatgtgcccgggctgtccaccaaccgtgggaggaggaggttggacgctggggagattgtccatttcgccttcccttcgtacgagaagatctatggcgggttaaagatgactgccaagaaggcggcggctctggcacagattgttcgcttttccaccaaacgagccggagagattgggaagctgtccccagagtggacgcaatgccttgtcccgcttgtcaactcgtccaaggtgaagattcaggggaagctcgtgttcccaacaatggagctgaggctgatgcaggagatattgctctatgttagcttctacatccacaaatctgtgctagccgaaatggacaactcaccctgtgacatgctcgatcatgcaaatgttgatttcactcccagtcctctccataaattgcttagtttgctcaacctaaagccatccaacaaggatgctttctcccttgacgatctcaccactagaaagctgaagcaaattctaaggggtaacaataataatggtgatgattctactccggtgcttggccatacatttctcgagcaaggcgctgatgagcaggcgatttcagaggctgccttgaacaaacttgttggcactgctgaaacatttgacttagaggaagcagagcctcccactacccttgtctctgttctaaagccataccagaaacaagctctcttctggatgtctaaattggagaagggaattgatgctaatgaagagacaaaaactcttaatccgtgttggagtgcctacaatattgcagacaggagagctcctccagtctatgttaatctttttactggtcaagcaacaacacaatttccaagtatgactgagactgtaagaggaggggggggagttctctaactgtataaaaggagacacaaggtatctaggagatcgtgcgaccagaggatacacctcaacatcctctgtgagaggaggtacccttgttgtttgccctatgtcattattgggccaatggaaggatgagttggaggcacattcggcacaaggagctctttctgtgtttgtgcattatgctggtgataaaactagtagcctcatgctgatggctcaacatgatgtcgttttaacaacctatggtgtcctctcagctgcatgcaaaacggaatgcaacagcatttttcacaggatggattggtataggattgtgcttgatgaagctcacacaatcaaatctcctaaaactaaaagtgcccaagcagcttatagattaaagtcggaatgcagatggtgccttacaggcacaccattgcaaaataatttggaggacctctacagtcttctctgcttcctacatgttgaaccatggtgcaatgcaaaatggtggcagaggcttattcagaaaccttatgagaatggtgatgatagagggttgaaacttgttagagctattcttaggccactaatgctaaggaggaccaaggaaacaaaagacaagattggcaatcccatactggttctacctccagctcgtattgaagttgtagagtgcgaacaatctgaacatgaacgtgatttctatgaagcacttttcaggagatcaaaggttcagtttgacaaatttgtagcacaaggcagtgttctgaacaattacgctaatattctcgagttacttctccggctaaggcagtgctgcgatcacccttttctggttatcagccgagctgaccctaaaaagtatgctgacctcaaccagcttgcacagcaattccttgaaggggtgcagcagagttcgtctggaagacagaacgtagtgccttcactggcttatgtagaaggggtcgtcgaggaaattcgccagggtgctacgatggagtgccctatctgtctcgagtcagcttcggacgatccagtgctcacgccttgcgcacaccggatgtgtggcgaatgccttgtttctagctggaggactccagacggagggccatgcccactctgtagacgtcacatcagcaagtctgacctgatcatactgcctgctcagagtcgtttccaggtggatgccaagaacaactggaaggactcgtgcaaagtgaaaacgctcgtaacgatgctggagagccttcagaggaagcaggagaagagcatcgtgttcagccagtttacttccttcttcgatcttctggagatccgcttcacccagaagggtatcaagttcttgaggtttgatggcaagctgagccagaagcacaaagagaaagttctgaaggagttcagtgagagccaggacaagctggtgctaatgatgtcgctcaaggctggaggtgtagggctaaatctaactgctgcctccaacgtttttatgatggatccgtggtggaatccggctgtggaagagcaggctatcatgagaattcaccgcattgggcagaaaagagaggtccgagtcaaacgcttcatcgtcaagggtactgtcgaggagcggatgcagcaggtccagatgcgcaagcagaggatggtttctggggcgctcaccgacgaggagattcgtggcgctcgcattgagcatctcaagatgttgtttaaataaatgatcattgccgatgtgtatagctgacgctacgccgttgatactttggtagtgtcaagtaggttgtcgagggcatgtttggtaggagtaagatctgggtttagaccattgtagatggggatggccggatgggagtgggtggaaccttgcccttccgatatgacggtcttcctttctaacgtgaatcagactggcatagagaatgggcattttggaaaacatgactacgataaatcacttttctcttgagtcttggattgcaggtgttaatctgtcatgttgttcttgttttactccctaccctttctgtatgctgtgccttttgttctctccttcagacttcccaggaatactgattctagtatgtccactaaggtatcttttgatcttgaaacatcatccttcgtggctgttgatggcatataatagaaaagcttttgggccacttccattattgctcttcgatgtaatcttttgtttggggcaagggcaagcgtgtacaatcatgagatctcatctgattt

SEQ ID NO: 201245 - DNA, 4200 bp, Zea Mays
caaacctccccgtcgcggcgccctccccgccttcccattcccggccccgcccgcccacatctagtctcccacctcgccctcgcggcgccggtgtagcagccatgctagtctccgtcgccgccgacgactccggctggcaggagtccccgtcgcaggccgtcctcttcgccgacgagatcgctgccgtccgcgctgtcctgggcgggaccctctccgaggccagcatcattgccgcgctctcccagtgcggtggcaacgctgagcgcgccatcaacgcgatcctcgacgacgccgaggtcgtttccgcccccaagcgggccaaggtcgagctcgacgtcggtggtgttccggtgcaggtgccggtagctgtcaaggtgaaggccgaatccatcgacgtcggggccgtggcgccggcagctgtcaaggtgaaggccgagcccattgacggcgatgtcgtggggagccaacaatccgatggctcctccgcgaaggccaccgccaagatgaagagcgagccggccgaatggtccgccaagacacccgaccgattcgtccccgacgcgcgcagtgtaggtgcgcctgtggcggtggcgagcgccggcgccggcataagcatcgtcccgcggcagaataagaggccgaggcaggaggtggggaccatcgaactcactaccacgcacccggtgccgtacctcaactcgcggcccatccgggcgctgccacccatgccacccatgggcggggacggggaggtgtacgacccgaagcctatccagatggtgccgcccctggaaatccagatgcacgatccgaggaccaccctacctgcgccgtcacccatcgacatcgagatgtaccaacaaccgccgcggccgccgcccgtggacgtcgagatgtgcgagcagaggtcgcggccccggccccggcccctcagggcggttgtgcctgcctcggtgacggacatgaggatggtggtggcgccaccggacggcgagtttggcgacttccctgtggagcgcgactggatgctcgtcggcaagtcctatgtgcccgggctgtccaccaaccgtgggaggaggaggttggacgctggggagattgtccatttcgccttcccttcgtacgagaagatctatggcgggttaaagatgactgccaagaaggcggcggctctggcacagattgttcgcttttccaccaaacgagccggagagattgggaagctgtccccagagtggacgcaatgccttgtcccgcttgtcaactcgtccaaggtgaagattcaggggaagctcgtgttcccaacaatggagctgaggctgatgcaggagatattgctctatgttagcttctacatccacaaatctgtgctagccgaaatggacaactcaccctgtgacatgctcgatcatgcaaatgttgatttcactcccagtcctctccataaattgcttagtttgctcaacctaaagccatccaacaaggatgctttctcccttgacgatctcaccactagaaagctgaagcaaattctaaggggtaacaataataatggtgatgattctactccggtgcttggccatacatttctcgagcaaggcgctgatgagcaggcgatttcagaggctgccttgaacaaacttgttggcactgctgaaacatttgacttagagagcctcccactacccttgtctctgttctaaagccataccagaaacaagctctcttctggatgtctaaattggagaagggaattgatgctaatgaagagacaaaaactcttaatccgtgttggagtgcctacaatattgcagacaggagagctcctccagtctatgttaatctttttactggtcaagcaacaacacaatttccaagtatgactgagactgtaagaggagggatactagcagacgcaatgggtcttggcaaaactgtgatgaccattgctctgatactttccaatcctaggggggagttctctaactgtataaaaggagacacaaggtatctaggagatcgtgcgaccagaggatacacctcaacatcctctgtgagaggaggtacccttgttgtttgccctatgtcattattgggccaatggaaggatgagttggaggcacattcggcacaaggagctctttctgtgtttgtgcattatgctggtgataaaactagtagcctcatgctgatggctcaacatgatgtcgttttaacaacctatggtgtcctctcagctgcatgcaaaacggaatgcaacagcatttttcacaggatggattggtataggattgtgcttgatgaagctcacacaatcaaatctcctaaaactaaaagtgcccaagcagcttatagattaaagtcggaatgcagatggtgccttacaggcacaccattgcaaaataatttggaggacctctacagtcttctctgcttcctacatgttgaaccatggtgcaatgcaaaatggtggcagaggcttattcagaaaccttatgagaatggtgatgatagagggttgaaacttgttagagctattcttaggccactaatgctaaggaggaccaaggaaacaaaagacaagattggcaatcccatactggttctacctccagctcgtattgaagttgtagagtgcgaacaatctgaacatgaacgtgatttctatgaagcacttttcaggagatcaaaggttcagtttgacaaatttgtagcacaaggcagtgttctgaacaattacgctaatattctcgagttacttctccggctaaggcagtgctgcgatcacccttttctggttatcagccgagctgaccctaaaaagtatgctgacctcaaccagcttgcacagcaattccttgaaggggtgcagcagagttcgtctggaagacagaacgtagtgccttcactggcttatgtagaaggggtcgtcgaggaaattcgccagggtgctacgatggagtgccctatctgtctcgagtcagcttcggacgatccagtgctcacgccttgcgcacaccggatgtgtggcgaatgccttgtttctagctggaggactccagacggagggccatgcccactctgtagacgtcacatcagcaagtctgacctgatcatactgcctgctcagagtcgtttccaggtggatgccaagaacaactggaaggactcgtgcaaagtgaaaacgctcgtaacgatgctggagagccttcagaggaagcaggagaagagcatcgtgttcagccagtttacttccttcttcgatcttctggagatccgcttcacccagaagggtatcaagttcttgaggtttgatggcaagctgagccagaagcacaaagagaaagttctgaaggagttcagtgagagccaggacaagctggtgctaatgatgtcgctcaaggctggaggtgtagggctaaatctaactgctgcctccaacgtttttatgatggatccgtggtggaatccggctgtggaagagcaggctatcatgagaattcaccgcattgggcagaaaagagaggtccgagtcaaacgcttcatcgtcaagggtactgtcgaggagcggatgcagcaggtccagatgcgcaagcagaggatggtttctggggcgctcaccgacgaggagattcgtggcgctcgcattgagcatctcaagatgttgtttaaataaatgatcattgccgatgtgtatagctgacgctacgccgttgatactttggtagtgtcaagtaggttgtcgagggcatgtttggtaggagtaagatctgggtttagaccattgtagatggggatggccggatgggagtgggtggaaccttgcccttccgatatgacggtcttcctttctaacgtgaatcagactggcatagagaatgggcattttggaaaacatgactacgataaatcacttttctcttgagtcttggattgcaggtgttaatctgtcatgttgttcttgttttactccctaccctttctgtatgctgtgccttttgttctctccttcagacttcccaggaatactgattctagtatgtccactaaggtatcttttgatcttgaaacatcatccttcgtggctgttgatggcatataatagaaaagcttttgggccacttccattattgctcttcgatgtaatcttttgtttggggcaagggcaagcgtgtacaatcatgagatctcatctgattt

SEQ ID NO: 201246 - DNA, 4170 bp, Zea Mays
caaacctccccgtcgcggcgccctccccgccttcccattcccggccccgcccgcccacatctagtctcccacctcgccctcgcggcgccggtgtagcagccatgctagtctccgtcgccgccgacgactccggctggcaggagtccccgtcgcaggccgtcctcttcgccgacgagatcgctgccgtccgcgctgtcctgggcgggaccctctccgaggccagcatcattgccgcgctctcccagtgcggtggcaacgctgagcgcgccatcaacgcgatcctcgacgacgccgaggtcgtttccgcccccaagcgggccaaggtcgagctcgacgtcggtggtgttccggtgcaggtgccggtagctgtcaaggtgaaggccgaatccatcgacgtcggggccgtggcgccggcagctgtcaaggtgaaggccgagcccattgacggcgatgtcgtggggagccaacaatccgatggctcctccgcgaaggccaccgccaagatgaagagcgagccggccgaatggtccgccaagacacccgaccgattcgtccccgacgcgcgcagtgtaggtgcgcctgtggcggtggcgagcgccggcgccggcataagcatcgtcccgcggcagaataagaggccgaggcaggaggtggggaccatcgaactcactaccacgcacccggtgccgtacctcaactcgcggcccatccgggcgctgccacccatgccacccatgggcggggacggggaggtgtacgacccgaagcctatccagatggtgccgcccctggaaatccagatgcacgatccgaggaccaccctacctgcgccgtcacccatcgacatcgagatgtaccaacaaccgccgcggccgccgcccgtggacgtcgagatgtgcgagcagaggtcgcggccccggccccggcccctcagggcggttgtgcctgcctcggtgacggacatgaggatggtggtggcgccaccggacggcgagtttggcgacttccctgtggagcgcgactggatgctcgtcggcaagtcctatgtgcccgggctgtccaccaaccgtgggaggaggaggttggacgctggggagattgtccatttcgccttcccttcgtacgagaagatctatggcgggttaaagatgactgccaagaaggcggcggctctggcacagattgttcgcttttccaccaaacgagccggagagattgggaagctgtccccagagtggacgcaatgccttgtcccgcttgtcaactcgtccaaggtgaagattcaggggaagctcgtgttcccaacaatggagctgaggctgatgcaggagatattgctctatgttagcttctacatccacaaatctgtgctagccgaaatggacaactcaccctgtgacatgctcgatcatgcaaatgttgatttcactcccagtcctctccataaattgcttagtttgctcaacctaaagccatccaacaaggatgctttctcccttgacgatctcaccactagaaagctgaagcaaattctaaggggtaacaataataatggtgatgattctactccggtgcttggccatacatttctcgagcaaggcgctgatgagcaggcgatttcagaggctgccttgaacaaacttgttggcactgctgaaacatttgacttagaggaagcagagcctcccactacccttgtctctgttctaaagccataccagaaacaagctctcttctggatgtctaaattggagaagggaattgatgctaatgaagagacaaaaactcttaatccgtgttggagtgcctacaatattgcagacaggagagctcctccagtctatgttaatctttttactggtcaagcaacaacacaatttccaagtatgactgagactgtaagaggagggatactagcagacgcaatgggtcttggcaaaactgtgatgaccattgctctgatactttccaatcctaggggggagttctctaactgtataaaaggagacacaaggtatctaggagatcgtgcgaccagaggatacacctcaacatcctctgtgagaggaggtacccttgttgtttgccctatgtcattattgggccaatggaaggatgagttggaggcacattcggcacaaggagctctttctgtgtttgtgcattatgctggtgataaaactagtagcctcatgctgatggctcaacatgatgtcgttttaacaacctatggtgtcctctcagctgcatgcaaaacggaatgcaacagcatttttcacaggatggattggtataggattgtgcttgatgaagctcacacaatcaaatctcctaaaactaaaagtgcccaagcagcttatagattaaagtcggaatgcagatggtgccttacaggcacaccattgcaaaataatttggaggacctctacagtcttctctgcttcctacatgttgaaccatggtgcaatgcaaaatggtggcagaggcttattcagaaaccttatgagaatggtgatgatagagggttgaaacttgttagagctattcttaggccactaatgctaaggaggaccaaggaaacaaaagacaagattggcaatcccatactggttctacctccagctcgtattgaagttgtagagtgcgaacaatctgaacatgaacgtgatttctatgaagcacttttcaggagatcaaaggttcagtttgacaaatttgtagcacaaggcagtgttctgaacaattacgctaatattctcgagttacttctccggctaaggcagtgctgcgatcacccttttctggttatcagcttgcacagcaattccttgaaggggtgcagcagagttcgtctggaagacagaacgtagtgccttcactggcttatgtagaaggggtcgtcgaggaaattcgccagggtgctacgatggagtgccctatctgtctcgagtcagcttcggacgatccagtgctcacgccttgcgcacaccggatgtgtggcgaatgccttgtttctagctggaggactccagacggagggccatgcccactctgtagacgtcacatcagcaagtctgacctgatcatactgcctgctcagagtcgtttccaggtggatgccaagaacaactggaaggactcgtgcaaagtgaaaacgctcgtaacgatgctggagagccttcagaggaagcaggagaagagcatcgtgttcagccagtttacttccttcttcgatcttctggagatccgcttcacccagaagggtatcaagttcttgaggtttgatggcaagctgagccagaagcacaaagagaaagttctgaaggagttcagtgagagccaggacaagctggtgctaatgatgtcgctcaaggctggaggtgtagggctaaatctaactgctgcctccaacgtttttatgatggatccgtggtggaatccggctgtggaagagcaggctatcatgagaattcaccgcattgggcagaaaagagaggtccgagtcaaacgcttcatcgtcaagggtactgtcgaggagcggatgcagcaggtccagatgcgcaagcagaggatggtttctggggcgctcaccgacgaggagattcgtggcgctcgcattgagcatctcaagatgttgtttaaataaatgatcattgccgatgtgtatagctgacgctacgccgttgatactttggtagtgtcaagtaggttgtcgagggcatgtttggtaggagtaagatctgggtttagaccattgtagatggggatggccggatgggagtgggtggaaccttgcccttccgatatgacggtcttcctttctaacgtgaatcagactggcatagagaatgggcattttggaaaacatgactacgataaatcacttttctcttgagtcttggattgcaggtgttaatctgtcatgttgttcttgttttactccctaccctttctgtatgctgtgccttttgttctctccttcagacttcccaggaatactgattctagtatgtccactaaggtatcttttgatcttgaaacatcatccttcgtggctgttgatggcatataatagaaaagcttttgggccacttccattattgctcttcgatgtaatcttttgtttggggcaagggcaagcgtgtacaatcatgagatctcatctgattt

SEQ ID NO: 201247 - DNA, 4427 bp, Zea Mays
caaacctccccgtcgcggcgccctccccgccttcccattcccggccccgcccgcccacatctagtctcccacctcgccctcgcggcgccggtgtagcagccatgctagtctccgtcgccgccgacgactccggctggcaggagtccccgtcgcaggccgtcctcttcgccgacgagatcgctgccgtccgcgctgtcctgggcgggaccctctccgaggccagcatcattgccgcgctctcccagtgcggtggcaacgctgagcgcgccatcaacgcgatcctcgacgacgccgaggtcgtttccgcccccaagcgggccaaggtcgagctcgacgtcggtggtgttccggtgcaggtgccggtagctgtcaaggtgaaggccgaatccatcgacgtcggggccgtggcgccggcagctgtcaaggtgaaggccgagcccattgacggcgatgtcgtggggagccaacaatccgatggctcctccgcgaaggccaccgccaagatgaagagcgagccggccgaatggtccgccaagacacccgaccgattcgtccccgacgcgcgcagtgtaggtgcgcctgtggcggtggcgagcgccggcgccggcataagcatcgtcccgcggcagaataagaggccgaggcaggaggtggggaccatcgaactcactaccacgcacccggtgccgtacctcaactcgcggcccatccgggcgctgccacccatgccacccatgggcggggacggggaggtgtacgacccgaagcctatccagatggtgccgcccctggaaatccagatgcacgatccgaggaccaccctacctgcgccgtcacccatcgacatcgagatgtaccaacaaccgccgcggccgccgcccgtggacgtcgagatgtgcgagcagaggtcgcggccccggccccggcccctcagggcggttgtgcctgcctcggtgacggacatgaggatggtggtggcgccaccggacggcgagtttggcgacttccctgtggagcgcgactggatgctcgtcggcaagtcctatgtgcccgggctgtccaccaaccgtgggaggaggaggttggacgctggggagattgtccatttcgccttcccttcgtacgagaagatctatggcgggttaaagatgactgccaagaaggcggcggctctggcacagattgttcgcttttccaccaaacgagccggagagattgggaagctgtccccagagtggacgcaatgccttgtcccgcttgtcaactcgtccaaggtgaagattcaggggaagctcgtgttcccaacaatggagctgaggctgatgcaggagatattgctctatgttagcttctacatccacaaatctgtgctagccgaaatggacaactcaccctgtgacatgctcgatcatgcaaatgttgatttcactcccagtcctctccataaattgcttagtttgctcaacctaaagccatccaacaaggatgctttctcccttgacgatctcaccactagaaagctgaagcaaattctaaggggtaacaataataatggtgatgattctactccggtgcttggccatacatttctcgagcaaggcgctgatgagcaggcgatttcagaggctgccttgaacaaacttgttggcactgctgaaacatttgacttagaggaagcagagcctcccactacccttgtctctgttctaaagccataccagaaacaagctctcttctggatgtctaaattggagaagggaattgatgctaatgaagagacaaaaactcttaatccgtgttggagtgcctacaatattgcagacaggagagctcctccagtctatgttaatctttttactggtcaagcaacaacacaatttccaagtatgactgagactgtaagaggagggatactagcagacgcaatgggtcttggcaaaactgtgatgaccattgctctgatactttccaatcctaggggggagttctctaactgtataaaaggagacacaaggtatctaggagatcgtgcgaccagaggatacacctcaacatcctctgtgagaggaggtacccttgttgtttgccctatgtcattattgggccaatggaaggttagtatcttgatttactattgaagcaattgtcattagtaagctttttatttgtctttgtaatcaatggcagaatatttgaatgtcactgctaattttttcaatcttatcctgttattcatgcactgcatcttgaacaaacttaataattagtttagtttctgcaataaacttaatcacacaagaaaattaattacatccatattgtccatcctcacaggatgagttggaggcacattcggcacaaggagctctttctgtgtttgtgcattatgctggtgataaaactagtagcctcatgctgatggctcaacatgatgtcgttttaacaacctatggtgtcctctcagctgcatgcaaaacggaatgcaacagcatttttcacaggatggattggtataggattgtgcttgatgaagctcacacaatcaaatctcctaaaactaaaagtgcccaagcagcttatagattaaagtcggaatgcagatggtgccttacaggcacaccattgcaaaataatttggaggacctctacagtcttctctgcttcctacatgttgaaccatggtgcaatgcaaaatggtggcagaggcttattcagaaaccttatgagaatggtgatgatagagggttgaaacttgttagagctattcttaggccactaatgctaaggaggaccaaggaaacaaaagacaagattggcaatcccatactggttctacctccagctcgtattgaagttgtagagtgcgaacaatctgaacatgaacgtgatttctatgaagcacttttcaggagatcaaaggttcagtttgacaaatttgtagcacaaggcagtgttctgaacaattacgctaatattctcgagttacttctccggctaaggcagtgctgcgatcacccttttctggttatcagccgagctgaccctaaaaagtatgctgacctcaaccagcttgcacagcaattccttgaaggggtgcagcagagttcgtctggaagacagaacgtagtgccttcactggcttatgtagaaggggtcgtcgaggaaattcgccagggtgctacgatggagtgccctatctgtctcgagtcagcttcggacgatccagtgctcacgccttgcgcacaccggatgtgtggcgaatgccttgtttctagctggaggactccagacggagggccatgcccactctgtagacgtcacatcagcaagtctgacctgatcatactgcctgctcagagtcgtttccaggtggatgccaagaacaactggaaggactcgtgcaaagtgaaaacgctcgtaacgatgctggagagccttcagaggaagcaggagaagagcatcgtgttcagccagtttacttccttcttcgatcttctggagatccgcttcacccagaagggtatcaagttcttgaggtttgatggcaagctgagccagaagcacaaagagaaagttctgaaggagttcagtgagagccaggacaagctggtgctaatgatgtcgctcaaggctggaggtgtagggctaaatctaactgctgcctccaacgtttttatgatggatccgtggtggaatccggctgtggaagagcaggctatcatgagaattcaccgcattgggcagaaaagagaggtccgagtcaaacgcttcatcgtcaagggtactgtcgaggagcggatgcagcaggtccagatgcgcaagcagaggatggtttctggggcgctcaccgacgaggagattcgtggcgctcgcattgagcatctcaagatgttgtttaaataaatgatcattgccgatgtgtatagctgacgctacgccgttgatactttggtagtgtcaagtaggttgtcgagggcatgtttggtaggagtaagatctgggtttagaccattgtagatggggatggccggatgggagtgggtggaaccttgcccttccgatatgacggtcttcctttctaacgtgaatcagactggcatagagaatgggcattttggaaaacatgactacgataaatcacttttctcttgagtcttggattgcaggtgttaatctgtcatgttgttcttgttttactccctaccctttctgtatgctgtgccttttgttctctccttcagacttcccaggaatactgattctagtatgtccactaaggtatcttttgatcttgaaacatcatccttcgtggctgttgatggcatataatagaaaagcttttgggccacttccattattgctcttcgatgtaatcttttgtttggggcaagggcaagcgtgtacaatcatgagatctcatctgattt

SEQ ID NO: 201248 - DNA, 2042 bp, Zea Mays
cctcagccagcctcctgtacttgcataggggaggctaggggctagtagtgcaagtaatccattgctcctcctttccttctcttccttcattccattctcctcctcaactccatcgcattgctattccagtcctcacagagaagaatcccgcgagcgagcgagcgagcgcgcgaggcggcaaggacgaacccaagacgtacgatggcgaggaggctggcgtacacgacggcgctgaccacgctcttcagctacgggctgctcttcgccttcggccagctcagggatctcttccgccacctgctcggctgcttcagacccaacaaggacgacgacgtcaagcaggggtacgcgccgatctgcgtcggcctggaggatttcttcgtgcgacgcctctacctgcgggttcaggattgcttcggcaggccaatcgctagcgcaccggactcatggttcgatgtggtggagcgtacctcagacgacaacaacaagacattgcagcgcacctcaaagaccactagatgcctgaacctgacgtcctacaactacctcgggttcgccgcggccgatgagtactgcgtcccacgcgttgtcgactccctcaagaaatactcggcgagcacctgcagtgctcgagttgatggcggcacgaccaagcttcacaccgagctggaggagctggttgcgcgttttgtcgggaagcctgctgctgtcgtcttcggcatgggttacgttacaaactctgccaccattccctgcctaatcggaaagggtgggctgattatcagtgactcactgaaccacaactcgatcgtcaatggcgcaagaggatccgatgcgactgtcagggttttccggcacaactgccctgcccatctggagaaggtcctgagagagcaggtagctggtggccagccgcggacgcacagagcgtggaagaagatcgtcgtcgtcgtcgaggggatctacagcatggaaggggagctgtgcaaactccccgagatcatagccgtctgcaagaagtacaaggcctacacgtacctggacgaggctcacagcatcggcgccgtcggacggtcgggccgcggcgtctgcgagctcctcggcgtcgacccggccgacgtcgacgtaatgatgggcactttcaccaagtctttcggatcatgcggtggatatatcgctgcatccgaggagatagtccagcacttgaagcacacctgtccgggccatctgtacgctacctccatgtcgccgcctgcagtgcagcaggtgcccagaaactggcgcgcatccgtgagaacagcaacttcttcaggtcagagctcaagaagatgggctttgaggttcttggtgacaacgactctcctgtcatgcccataatgctctacaatccggccaagattcctgcgttttctcgggagtgctttagacaaaaggttgccgttatcactgtggcgtttcctgtgactcctctccttctcgcaagagcacgtttctgcatttcagcttcgcacactagggaggacctgacgaaagccctcgatgttatcagcagagttggtgacctcgtgggcatcaagtacttccctgcacaacgaccaaagattgctgaagctggtcacggcaattgaggcggtagagaggaatgagccctgaaattaccccatgagtggctgaagttgttaagagtccttttaaaagttatcaaataaatagattatcatggaaacaagcacgcgcgcattgatcagtttcgtcgggattctgtcgtattagctgtgttgagcctgcttttgagccggcggacggttcggcactgaggccggacggtccgcggtccggacagttcgcgcctgtgggccggacggtccgcgcatgcgcagagcagtttagggttccgagttttgtgctacgattgttagctatattcgcgggattagctcggaatcagttgtgtaaagagttcaggctccctcctctataaatagagaggtctacggccgatttgtaaggaacaatcgaatcaatacaacttctatttcgca

SEQ ID NO: 201249 - DNA, 2962 bp, Zea Mays
aagagaagaatagaagaaaacaagatagaggaaagagaaattccttataactgctattatgtggaggcgtggaacgctcggagcccaatccaaagaagcccaccggcccacctcacaacggcctgttccgcgccctaagtttgctgcaacgccgccaccaatttgcagctccagcaaacggctcgtcgccgtcgcggactcgcagccactccggagcgttgcctcacctgtgtgctcctcgccggcctcgacaactccccggattgtcatagtcgaggcggttctagtcgctgatggtggccatggcgaggaaggacgaggaagaggggcccgcggaccgcgtgccgcacctgccgtggatgcggtaccccgtcgatatcgacaccttctccggccgccccgtcacacagctaccccgcctcgacccgagactggtagaggctttgcagagaatgggaattgaatcatttttcccagttcaagaagcagcctggctggaaacaattggtcctggcgcttttgagagggatatctgtatcaactccccaactggatctggcaaaactcttgcttatgccctacctattgtgcaaatgctctgcacacggaaagtaaggtgcttgcgagctttggttgtgcttcctacgcgggatctggccttgcaggttaaagaggtttttgatgctattgctcctgtggtgggcttgtcagtaggttcagccgttggtcaatcatcaatagcagatgaagtttctagtcttgtccagaagcccagacaggagttttacccaactattgacaaagaatacgtccaaatggaaccacggactaaaattgatatattggtggcaacccctggaagactcatggatcacattaacatgacaaatggtttcagtctggagcatcttcagtacctggtcattgatgagacagatagaatgttaagagaggcttatcaatcctggttgccaacagtgatccaacttacccactcaattggtcaagatcattcctgtcatgacattgatgggaaaactctacttcatccattgactactattagaagatcgggtgtggagcgtgggtttaaaagtaaatgctatccaagattggcgaagatagttttgtctgctacactgactcaagatcctagcaagctatcacaactcgaattgcaccatcccttgttgttgaatagtgggaagaagcgctatagaattcctacaaaacttgaatcctacaaactgatatgtaaatcaaacttaaaaccactctctctcattgttcttctccaagaactgcaagggaataagtgcttagtttttacctcatcagtggaatcaagccacagactaagcactttactgcgttttttcgaaaacttaccctttaaattcagtgaatattcacgtttgcagcgtgaatctactcgaaggtaagctgtctacattacaattccatgcataccccgcccgcaatcccactcggacgcacagaagaactgcagatccttatattcagaagaaaaggagtccaaaatgactcatacatgccacacacaaactagcatgtatcactcaccagggccatgctagttacatgagcaatcaccagaaagaataagaccatgatcaaagaatgggaatcttcatgattctgccttactcaagtgttgtgggttataattttttttggttcacataaatgcgaattagaatgatacattgaagttgaactactctcaccttgagacatcaatagttatgggatgttataaccatgagctgggcccatgtggaaggttaaactaagagtagatcatgaattaggaacacatcggataaaatagtagattatgtagataggagagtgatgggttttttaaaatgaaaccagggataaatgtcaagtccgtttctataataatatagattagcatcttacacgaccatttcaatgtcataatattagttcgatctctctattgcaggaagacactggaggccttcaaggaagggaaaatcgatgttctaattggcacggatagaatggctcgtggaatacatattgatggtttaagatatgttatcaattatgatatgccaccatatgtgaaaacgtacatacatcgagcaggccggactgctagggcaggggaatctggttcctgcttcacctttttaagaaaacacgaggttaaaacttttgacaaaatgctcaaaaaggcagacaatgctggctgcaatcttcattcattgcctgaagaatcaatagaaacacttcgtccagctttctccggtgctctgaggaaactggaaggagcactggaatcagaagcagtgaagaaatatgatttaggagataaaacgccaggtgcttctaaacgaaagagaccaaatcagttgtgcaagcaatagtgctctagttctaacgtcttgacattacaatgttgcacctgcatgtctacagagttacgcatatatagcttgtcgattgattatcttactggtcccaagctttctaatacggccgtggttgagtgcagcagcagtaggttgttctcagccccaacaacactgcagccggttcgtggttcatcatggatacccaaagtaaaaaaaaaaggtgtctgctttatgctgttcaatgtgctctcccatctccaaacagctttcgcgatgcctgcagcaggccgatccattctgatgaatggcacagtaaatctctcggccttggacagttggacccttatcttcctggtgtggtgctcatcattcactgtacatttttggctgcaaggaggccacccaaaagaaaagttggctttacattcacctcaacatatgtatcggggcattcagggcctttcagttatgctttacgcttagaatgcccctttttccgtcttcgtcaggcttgtggttttccctcaattatttaaggcgtgtttggtttgagg

SEQ ID NO: 201250 - DNA, 1669 bp, Zea Mays
caggttcacttcctagttcctaccccttcagctttgtttgggtactctagtattgacctcaatccacatgtattgagctaaattgagatttcacttaaattaatttacatcctaatctacctcaacacacatatggattgaggatttgaggtcaatattagagtaaccaaacaaaaccttctgtttccctgttagcttctgactgaacatctcaaattctgcaccgatggaaatatgaagttctgtgtgtcctgtcctaaacctttcagggcctctttcttggaggagatccgggtgcaagcaccagttcaggtgcctcatctgatgatacatttctcggcgttctcttcagctgtgtacataccaactgccacggtatgccatttctctctgactgacgagtgacgagtggtgtacgtgtccaggtgccgccatgtttgacgtggagtacgcccggtggctggacaaccacagccggcgcctggccgagctgaacggagccctacacgcgcacctggcagacggtgacctcagagccatcgtcgacgacgccctcacccaccacgacgagctgttccagctcaaggccatggcggccaaatccgacgtgttccacctcatcactggggtgtggacgacccccgccgagcgctgcttcctctggatgggtggattcaggccctccgatctgctcaagacactgctgccccagctagatccactgacagagcagcaagtggtcggcatatgcagccttcagcagtcatcacagcaggcagaggaagctctctcgcagggcttggagcagctgcatcagtcgcttgctgacaccatggccggtgggtctctgactgacgacgccaacatgagcttcatgagccaaatggctcttgccctcggcaaactggccaaccttgaaggctttgtgatacaggccgataacttgaggcaacagactcttcatcagatgcaccggattctgacagttcggcaggcagctcgatgtctcttggcaattggcgagtaccacaaccgccttcgtgccttaagttccctctgggcttctagacctcgagagatactggtgaccgatgaaggcaattgtgagataagcatcgcagcacaaccatcccaaaaccaattttcaaccttctgactgacacatgttgtggaactaaccctcagcataggagcaagagaaaaatgactgggaagagaatgactgggaagagagattgtttggatgcacgtagcagatatctgagagctacagaggaaagctgggaaatagaagaagctctaaaacaaggagtgtttctggaaattctttagttttcaaaaaacactttctgaaaatgtgtgtacaagaaaattccaggaaggtgaaattgcttcattgactgcagtgggaaggggaaagagagaagctagaatctcatgtcgagtactccagtacaatgtgttcttttgtctggtctaaattcttgtaacagctcttcctatgatggaagaatccattcaacaattccacctatgattactggattgagtatgttgaataggttggttgaggctatctagtaatttttatgactatgtttatccattatctaggactatttggttactatattatataatctttatcatatatacatccatttagttc

SEQ ID NO: 201251 - DNA, 2335 bp, Zea Mays
ttctcaggtgaagacaaagccctagacctcctctccggctctccctcccctcttctcccttctctctctctctttctcgggatagccaagggaaagggagaacaaaatcacagtacaaaagcaggccacaaggacaagatcttcctctggactgggggattctcacacccatagaaactgaacctactacactgtcatatcacacaagaagagagcttcagcgtgtgagcaagagcaactctcagaaaagaaacaactagtcaagagtcaagactgcctgcggcctgcctgccctccaaggctccaactctccgaggctccaaagtccaagctacttcggcgtccctgactgggcttgtggatgggggatactagtagttctagccattcaaggcaggatccttctcttcttggctatggcttccatggcgccatcgccaactccactcctcctgcaaacttctttgaccaaggaggaggaggcacctatttcggagagctggaagaagcgttcatgcatcaggtcgcctcgctcagaagaactcaacaggctgcaaccgtctctgcacctcatcatggagacaccaagccctttcccactgctgctggtgctacagctgcaacggctacggctacggctaggccacctcctacactggacatcttcccagcttggcctatgaggtctcgtcttcacacgcccaaggagtgctcgaatgtgacagcagacagcacagacgactcggagagcagcagcaagaaccacagcaaccactcctcagaccagctcggagcagcagcagcagcaaacatggcgagccagttcgagcaagcttcacagcagcagcttcagcacaaaaatatggctacaagttccactccaagaactggcaaggctcttgatccaaaggtaatcagaaggctggctcagaatcgtgaggctgcacgcaaaagccggctgcggaagaaggcgtacattcagcagctcgagagctgtaagctgaagctttctcagatggaacaggacatgcagcgagcccgtacccagggcctctttcttggaggagatccgggtgcaagcaccagttcaggtgccgccatgtttgacgtggagtacgcccggtggctggacaaccacagccggcgcctggccgagctgaacggagccctacacgcgcacctggcagacggtgacctcagagccatcgtcgacgacgccctcacccaccacgacgagctgttccagctcaaggccatggcggccaaatccgacgtgttccacctcatcactggggtgtggacgacccccgccgagcgctgcttcctctggatgggtggattcaggccctccgatctgctcaagacactgctgccccagctagatccactgacagagcagcaagtggtcggcatatgcagccttcagcagtcatcacagcaggcagaggaagctctctcgcagggcttggagcagctgcatcagtcgcttgctgacaccatggccggtgggtctctgactgacgacgccaacatgagcttcatgagccaaatggctcttgccctcggcaaactggccaaccttgaaggctttgtgatacaggccgataacttgaggcaacagactcttcatcagatgcaccggattctgacagttcggcaggcagctcgatgtctcttggcaattggcgagtaccacaaccgccttcgtgccttaagttccctctgggcttctagacctcgagagatactggtgaccgatgaaggcaattgtgagataagcatcgcagcacaaccatcccaaaaccaattttcaaccttctgactgacacatgttgtggaactaaccctcagcataggagcaagagaaaaatgactgggaagagaatgactgggaagagagattgtttggatgcacgtagcagatatctgagagctacagaggaaagctgggaaatagaagaagctctaaaacaaggagtgtttctggaaattctttagttttcaaaaaacactttctgaaaatgtgtgtacaagaaaattccaggaaggtgaaattgcttcattgactgcagtgggaaggggaaagagagaagctagaatctcatgtcgagtactccagtacaatgtgttcttttgtctggtctaaattcttgtaacagctcttcctatgatggaagaatccattcaacaattccacctatgattactggattgagtatgttgaataggttggttgaggctatctagtaatttttatgactatgtttatccattatctaggactatttggttactatattatataatctttatcatatatacatccatttagttc

SEQ ID NO: 201252 - DNA, 330 bp, Zea Mays
agcactctagcatttgtaacatgtgacactgtttacaggcttgagagagatgcttatcctctttttaggacacttcgacagaagtataagacaagcacagatcgtgacgctgtgtttcaggagttactggacgaaatagctgcaaaattttacaatatacagcgccagaaccctttagaaggacttttcagcgaaatgttcaggacggggtccagcattaaactattcagagagctccgtgttgagcaatatgatcacttgatcagtcagaacgaattaagtttttgacagatgtaattaagcaaaaaaaaaatcttgtttacctgtact

SEQ ID NO: 201253 - DNA, 239 bp, Zea Mays
agcactctagcatttgtaacatgtgacactgtttacaggcttgagagagatgcttatcctctttttaggacacttcgacagaagtataagacaagcacagatcgtgacgctgtgtttcaggagttactggacgaaatagctgcaaaattttacaatatacagcgccagaaccctttagaaggacttttcagcgaaatgttcaggggcaccaactgatgtgtttggtttgtccaaatggg

SEQ ID NO: 201254 - DNA, 1248 bp, Zea Mays
gataattagtccctaaggactataggttatatatataggcagtaggcctgggcctaatgggccttaacatcccacaccctgaatgttgccctatttgtgatcaagaatttgaagatattgatcacttgctggtggggtgtgttttttctagacaattctggtacagatggctcgggcaggtcaacctgcagggcctcactcagcctggcgataggagcactatggattggtggaagaaggcctttgatcagttgcagggcattgctgcaaaatggcttaattcccttatcatcctggggttctggacactttggaaccacaggaacggctgcgtttttgagatgctcatctctgatgttgcttcggccattaggaaagttgagaaggaattggagctgtgggagatggcagggtccaagagtctctctcctaacggctcccattcctgcgatttagtggggagttcctttgttgtgtagtttatttactgtttttttggccaccgtttggtgttcctctttgttcttgtatttggtctactttggaccttctttttcttcttaatataatgatgcgcagctctcctgcacgctcaagaaaaaaaaaattcaccaatggggacgctcatttccctatatgcaaaatctgcactgttaagagattcgctaggcttgagagagatgcttatcctctttttaggacacttcgacagaagtataagacaagcacagatcgtgacgctgtgtttcaggagttactggacgaaatagctgcaaaattttacaatatacagcgccagaaccctttagaaggacttttcagcgaaatgttcaggatataatgcatgagaaaagaattttatgtcgatgctttcatcaaaaccattggctaaaataatacagttgctgccacggcagctcatgatcaatgaaggtgcttggctgcttgcccaactagaatgtccaaagccatacatttagcatcttactgcatgaagatatatacttgactctggaaaatcgttgattagtctcagattgttacggagcatgtgtaacttaattttgttttctattacatgttttcctttgttgcccttgccctgtccacttttagagatgtatcttgcgtgacccagagatcaaaatggtaacctatttatattcattgattttaatatacggtgtttatcggtaaacttcattgaatccttggtcattagggatgctttgttttgctcttgctcag

SEQ ID NO: 201255 - DNA, 1249 bp, Zea Mays
gataattagtccctaaggactataggttatatatataggcagtaggcctgggcctaatgggccttaacatcccacaccctgaatgttgccctatttgtgatcaagaatttgaagatattgatcacttgctggtggggtgtgttttttctagacaattctggtacagatggctcgggcaggtcaacctgcagggcctcactcagcctggcgataggagcactatggattggtggaagaaggcctttgatcagttgcagggcattgctgcaaaatggcttaattcccttatcatcctggggttctggacactttggaaccacaggaacggctgcgtttttgagatgctcatctctgatgttgcttcggccattaggaaagttgagaaggaattggagctgtgggagatggcagggtccaagagtctctctcctaacggctcccattcctgcgatttagtggggagttcctttgttgtgtagtttatttactgtttttttggccaccgtttggtgttcctctttgttcttgtatttggtctactttggaccttctttttcttcttaatataatgatgcgcagctctcctgcacgctcaagaaaaaaaaaattcaccaatggggacgctcatttccctatatgcaaaatctgcactgttaagagattcgctagggcttgagagagatgcttatcctctttttaggacacttcgacagaagtataagacaagcacagatcgtgacgctgtgtttcaggagttactggacgaaatagctgcaaaattttacaatatacagcgccagaaccctttagaaggacttttcagcgaaatgttcaggatataatgcatgagaaaagaattttatgtcgatgctttcatcaaaaccattggctaaaataatacagttgctgccacggcagctcatgatcaatgaaggtgcttggctgcttgcccaactagaatgtccaaagccatacatttagcatcttactgcatgaagatatatacttgactctggaaaatcgttgattagtctcagattgttacggagcatgtgtaacttaattttgttttctattacatgttttcctttgttgcccttgccctgtccacttttagagatgtatcttgcgtgacccagagatcaaaatggtaacctatttatattcattgattttaatatacggtgtttatcggtaaacttcattgaatccttggtcattagggatgctttgttttgctcttgctcag

SEQ ID NO: 201256 - DNA, 1007 bp, Zea Mays
gtttggtacagtgattcttagagaagttgcacaaatttaaactggtacacatcattttcccaactattcccactattggggtttggtaatctgcctcagctggtgaaggtggaggaaatatcacaaaccattgattctgagaacttcacagtgcaaaactgtatcaagttttcaggacctttggctacaacctcagttgccactaatgcaaaatttgaaattagaagccccaagcgtgtgcagatcaaatttgatgaagggattgttggtacaccacagttgaccgactccattgtgctaccagagaagtttgagttatttggacagaacatcgacctgagtccactgaaaggcatattttcttccatcgaaaatgcagcatcctcggttgcaaagaccatatctgagcagcctccgctcaaaataccgatcaggacaaacaatgctgaatcgtggttgcttacgacataccttgacgaagagctcaggatctccagaggcgatggcagcagcatctttgtgctgttcaaggagggaagtactcttctatactgagatccaaatcccgagtccatgatcgttgaagctgaaccgtgaagtagttatactgcttatgcttttctttcttatagtaatatgctccgtctcaaaataagtcaatttctagaatcacttaaagtcaaattatcttaagtttgaccaattttataggaaaggcaccatcgtctatgtctctatgacaccaaatgagtacattatgaaaaatattttatggtgcattagtgacactaattcagtgccatgctctttttatgaatttggtcaaacttaaaaatagtttgatttaagataactctgagaaattgatttattttgggacagagagaatgtttctgggttgtcttgtaaatacagttcttgtcattagagtatatgatgactaggaccggtttaatccgaattatataaactctctatatatcagcgaaccccttttttatagttaa

SEQ ID NO: 201257 - DNA, 2655 bp, Zea Mays
ctccccgcgattctattctacgccgctataatcagtcgtgcggcgtcgtcggcgaccttgccgcctgcggcgcggaccacgcggttattatacagctaaccggggctttgagctacagccttctcttgtggggaggcatccccgtcctctacttcgtcgctgccctctgctgcgcctggactggcgtggagtggagatccatccacccgcacttgccacgatctcttccttctcgtgtcgagttggttgcggatttgcttactttggtgcgccgcccggcaatccaaacaatcctgcttgggttcgattcgcttcgccttcgtcttcagcgctcaagatcagtttagccgaggtgccgggcgcggtttggctgtccggaggcttttagagttactggaaccccgatgccccaagtgaagtccagctacgatggcgccggcggggactacattaagtggatgtgcggcgccggcggccgcccgggcggcgccatggccagcctccaccgcggggtgggctcccttgttcgtgacatcagcgacccctgcctcaatccctccccagttaagggaaacagaatgctgaaaccagaaagatggcacgcgtgttttgacagtgacgggaaggctatatgtttccgtaaagcccttaagttcattgtcttaggaggtgtggatccttctattcgagcggaagtttgggaatttcttattggctgctacaccttaagtactacagcggaatataggggaaaactaagagctgctcgaagggagaaatatcgttatttaattaagcaatgccagagcatgcatacaagcattggtacaggtgagcttgcatatgctgttggatcaaagctgatggatgtcaggaccttgcccaaagaaactgaaggtggagaagtcagcacaagtcagcaagctgaacatgaagtgccttgcagtttagcagaaaattcgaatttgatttatggttctggttgcacaacgcggccccataaaaggaaaatttgtagtaaatcagctgaaacagttggtttcaatcaacataatgataactctagaggttctggagattgtgatgtcattggtgaaccaaggtatgacagtgatgccttcatcgattttccttccctaactggtacaaacttggtcgcaaatggtgacggggatagcaatggagttgaagaaaatccttgcaatttcttggtctctgaacatagagtaaggccccatgatgaacacatgcacagcttccagatcaataataacatagatctcataatagagtcaaatacattctccaatgatatatttcgacctagcagtagtgactcagccatctttcactcagatgcgtacaagcatgatagatggttagacgatactggctatagtgaagaaattatagattccttgaggatatctgatgcaccagaatcagatttagttgatggaatgaaatcaaatggttcaatagctgacaaagatagagtctctgaatggctttggacactgcatcgaattgtggttgatgtggtgagaacagatagccaccttgatttctatggagaatcaaggaatatggctagaatgtctgatatacttgctgtttatgcatgggttgatccttccactggatactgtcaaggtatgagtgatctgctgtcaccttttgttgtcatatatgaggatgatgcagatgccttttggtgctttgagatgctactgagaaggatgcgtgaaaatttccagatggagggaccaacaggagttatgaagcaattgcaagcattgtggaagataatggaactgacagatgctgaattatttgaacatttttcggcaattggtgctgaaagccttcattttgcttttcggatgctgctagtcctttttcgtcgagagctgtcctttgaggaatcacttatcatgtgggagatgatgtgggctgctgattttgatgaagaagcagtcaggcatttagaagagaactgcctagaaccattgctagtagatctgagcaatggcttatcatctgaagtcaaagaagtgcatcggatcaacagttccacaagaagaaaacccagaaccaggaaatgccatagtagaaatggtgaaatctgtggagcttgccaccctggaatgaaatctagtacaagaaatcatctctgtggcttgtccggtgctacaatatgggcaagacctcagcagatgccacatccaagtgcaagtgtgctagcaaagggtggagattatgaacttcctatattctgtgtggcggctatcttgataattaaccgccagaagataataagagggactcactcaatagatgatgcgatcaagatgttcaatgataatgtgctcaaaataaatgtaaaaagatgtgtacgcttggcaatcaagctaaggaagaagtacttgtacaagtcattgaaaggtggctctagtgatgataaagaaagctgaagaacctgcacttcccttgtagaaaaaactagatatttctccatcatgcattgctatctaggtgtgctggatcagtattgacctgaagtatggtacatgtccaagatccggcattattcaggattgcaaggcaatctgtacatattatacttgaaaacaacagatgaagctgtggaattaa

SEQ ID NO: 201258 - DNA, 2622 bp, Zea Mays
ctccccgcgattctattctacgccgctataatcagtcgtgcggcgtcgtcggcgaccttgccgcctgcggcgcggaccacgcggttattatacagctaaccggggctttgagctacagccttctcttgtggggaggcatccccgtcctctacttcgtcgctgccctctgctgcgcctggactggcgtggagtggagatccatccacccgcacttgccacgatctcttccttctcgtgtcgagttggttgcggatttgcttactttggtgcgccgcccggcaatccaaacaatcctgcttgggttcgattcgcttcgccttcgtcttcagcgctcaagatcagtttagccgaggtgccgggcgcggtttggctgtccggaggcttttagagttactggaaccccgatgccccaagtgaagtccagctacgatggcgccggcggggactacattaagtggatgtgcggcgccggcggccgcccgggcggcgccatggccagcctccaccgcggggtgggctcccttgttcgtgacatcagcgacccctgcctcaatccctccccagttaagggaaacagaatgctgaaaccagaaagatggcacgcgtgttttgacagtgacgggaaggctatatgtttccgtaaagcccttaagttcattgtcttaggaggtgtggatccttctattcgagcggaagtttgggaatttcttattggctgctacaccttaagtactacagcggaatataggggaaaactaagagctgctcgaagggagaaatatcgttatttaattaagcaatgccagagcatgcatacaagcattggtacaggtgagcttgcatatgctgttggatcaaagctgatggatgtcaggaccttgcccaaagaaactgaaggtggagaagtcagcacaagtcagcaagctgaacatgaagtgccttgcagtttagcagaaaattcgaatttgatttatggttctggttgcacaacgcggccccataaaaggaaaatttgtagtaaatcagctgaaacagttggtttcaatcaacataatgataactctagaggttctggagattgtgatgtcattggtgaaccaaggtatgacagtgatgccttcatcgattttccttccctaactggtacaaacttggtcgcaaatggtgacggggatagcaatggagttgaagaaaatccttgcaatttcttggtctctgaacatagagtaaggccccatgatgaacacatgcacagcttccagatcaataataacatagatctcataatagagtcaaatacattctccaatgatatatttcgacctagcagtagtgactcagccatctttcactcagatgcgtacaagcatgatagatggttagacgatactggctatagtgaagaaattatagattccttgaggatatctgatgcaccagaatcagatttagttgatggaatgaaatcaaatggttcaatagctgacaaagatagagtctctgaatggctttggacactgcatcgaattgtggttgatgtggtgagaacagatagccaccttgatttctatggagaatcaaggaatatggctagaatgtctgatatacttgctgtttatgcatgggttgatccttccactggatactgtcaaggtatgagtgatctgctgtcaccttttgttgtcatatatgaggatgatgcagatgccttttggtgctttgagatgctactgagaaggatgcgtgaaaatttccagatggagggaccaacaggagttatgaagcaattgcaagcattgtggaagataatggaactgacagatgctgaattatttgaacatttttcggcaattggtgctgaaagccttcattttgcttttcggatgctgctagtcctttttcgtcgagagctgtcctttgaggaatcacttatcatgtgggagatgatgtgggctgctgattttgatgaagaagcagtcaggcatttagaagagaactgcctagaaccattgctagtagatctgagcaatggcttatcatctgaagtcaaagaagtgcatcggatcaacagttccacaagaagaaaacccagaaccaggaaatgccatagtagaaatggtgaaatctgtggagcttgccaccctggaatgaaatctagtacaagaaatcatctctgtggcttgtccggtgctacaatatgggcaagacctcagcagatgccacatccaagtgcaagtgtgctagcaaagggtggagattatgaacttcctatattctgtgtggcggctatcttgataattaaccgccagaagataataagagggactcactcaatagatgatgcgatcaagatgttcaatgataatgtgctcaaaataaatgtaaaaagatgtgtacgcttggcaatcaagctaaggaagaagtacttgtacaagtcattgaaaggtggctctagtgatgataaagaaagctgaagaacctgcacttcccttgtagaaaaaactagatatttctccatcatgcattgctatctaggtgtgctggatcagtattgacctgaagtatggtacatgtccaagatccggcattattcaggattgcaagatgaagctgtggaattaa

SEQ ID NO: 201259 - DNA, 2645 bp, Zea Mays
ctccccgcgattctattctacgccgctataatcagtcgtgcggcgtcgtcggcgaccttgccgcctgcggcgcggaccacgcggttattatacagctaaccggggctttgagctacagccttctcttgtggggaggcatccccgtcctctacttcgtcgctgccctctgctgcgcctggactggcgtggagtggagatccatccacccgcacttgccacgatctcttccttctcgtagttggttgcggatttgcttactttggtgcgccgcccggcaatccaaacaatcctgcttgggttcgattcgcttcgccttcgtcttcagcgctcaagatcagtttagccgaggtgccgggcgcggtttggctgtccggaggcttttagagttactggaaccccgatgccccaagtgaagtccagctacgatggcgccggcggggactacattaagtggatgtgcggcgccggcggccgcccgggcggcgccatggccagcctccaccgcggggtgggctcccttgttcgtgacatcagcgacccctgcctcaatccctccccaggaaacagaatgctgaaaccagaaagatggcacgcgtgttttgacagtgacgggaaggctatatgtttccgtaaagcccttaagttcattgtcttaggaggtgtggatccttctattcgagcggaagtttgggaatttcttattggctgctacaccttaagtactacagcggaatataggggaaaactaagagctgctcgaagggagaaatatcgttatttaattaagcaatgccagagcatgcatacaagcattggtacaggtgagcttgcatatgctgttggatcaaagctgatggatgtcaggaccttgcccaaagaaactgaaggtggagaagtcagcacaagtcagcaagctgaacatgaagtgccttgcagtttagcagaaaattcgaatttgatttatggttctggttgcacaacgcggccccataaaaggaaaatttgtagtaaatcagctgaaacagttggtttcaatcaacataatgataactctagaggttctggagattgtgatgtcattggtgaaccaaggtatgacagtgatgccttcatcgattttccttccctaactggtacaaacttggtcgcaaatggtgacggggatagcaatggagttgaagaaaatccttgcaatttcttggtctctgaacatagagtaaggccccatgatgaacacatgcacagcttccagatcaataataacatagatctcataatagagtcaaatacattctccaatgatatatttcgacctagcagtagtgactcagccatctttcactcagatgcgtacaagcatgatagatggttagacgatactggctatagtgaagaaattatagattccttgaggatatctgatgcaccagaatcagatttagttgatggaatgaaatcaaatggttcaatagctgacaaagatagagtctctgaatggctttggacactgcatcgaattgtggttgatgtggtgagaacagatagccaccttgatttctatggagaatcaaggaatatggctagaatgtctgatatacttgctgtttatgcatgggttgatccttccactggatactgtcaaggtatgagtgatctgctgtcaccttttgttgtcatatatgaggatgatgcagatgccttttggtgctttgagatgctactgagaaggatgcgtgaaaatttccagatggagggaccaacaggagttatgaagcaattgcaagcattgtggaagataatggaactgacagatgctgaattatttgaacatttttcggcaattggtgctgaaagccttcattttgcttttcggatgctgctagtcctttttcgtcgagagctgtcctttgaggaatcacttatcatgtgggagatgatgtgggctgctgattttgatgaagaagcagtcaggcatttagaagagaactgcctagaaccattgctagtagatctgagcaatggcttatcatctgaagtcaaagaagtgcatcggatcaacagttccacaagaagaaaacccagaaccaggaaatgccatagtagaaatggtgaaatctgtggagcttgccaccctggaatgaaatctagtacaagaaatcatctctgtggcttgtccggtgctacaatatgggcaagacctcagcagatgccacatccaagtgcaagtgtgctagcaaagggtggagattatgaacttcctatattctgtgtggcggctatcttgataattaaccgccagaagataataagagggactcactcaatagatgatgcgatcaagatgttcaatgataatgtgctcaaaataaatgtaaaaagatgtgtacgcttggcaatcaagctaaggaagaagtacttgtacaagtcattgaaaggtggctctagtgatgataaagaaagctgaagaacctgcacttcccttgtagaaaaaactagatatttctccatcatgcattgctatctaggtgtgctggatcagtattgacctgaagtatggtacatgtccaagatccggcattattcaggattgcaaggcaatctgtacatattatacttgaaaacaacagatgaagctgtggaattaa

SEQ ID NO: 201260 - DNA, 2651 bp, Zea Mays
ctccccgcgattctattctacgccgctataatcagtcgtgcggcgtcgtcggcgaccttgccgcctgcggcgcggaccacgcggttattatacagctaaccggggctttgagctacagccttctcttgtggggaggcatccccgtcctctacttcgtcgctgccctctgctgcgcctggactggcgtggagtggagatccatccacccgcacttgccacgatctcttccttctcgtagttggttgcggatttgcttactttggtgcgccgcccggcaatccaaacaatcctgcttgggttcgattcgcttcgccttcgtcttcagcgctcaagatcagtttagccgaggtgccgggcgcggtttggctgtccggaggcttttagagttactggaaccccgatgccccaagtgaagtccagctacgatggcgccggcggggactacattaagtggatgtgcggcgccggcggccgcccgggcggcgccatggccagcctccaccgcggggtgggctcccttgttcgtgacatcagcgacccctgcctcaatccctccccagttaagggaaacagaatgctgaaaccagaaagatggcacgcgtgttttgacagtgacgggaaggctatatgtttccgtaaagcccttaagttcattgtcttaggaggtgtggatccttctattcgagcggaagtttgggaatttcttattggctgctacaccttaagtactacagcggaatataggggaaaactaagagctgctcgaagggagaaatatcgttatttaattaagcaatgccagagcatgcatacaagcattggtacaggtgagcttgcatatgctgttggatcaaagctgatggatgtcaggaccttgcccaaagaaactgaaggtggagaagtcagcacaagtcagcaagctgaacatgaagtgccttgcagtttagcagaaaattcgaatttgatttatggttctggttgcacaacgcggccccataaaaggaaaatttgtagtaaatcagctgaaacagttggtttcaatcaacataatgataactctagaggttctggagattgtgatgtcattggtgaaccaaggtatgacagtgatgccttcatcgattttccttccctaactggtacaaacttggtcgcaaatggtgacggggatagcaatggagttgaagaaaatccttgcaatttcttggtctctgaacatagagtaaggccccatgatgaacacatgcacagcttccagatcaataataacatagatctcataatagagtcaaatacattctccaatgatatatttcgacctagcagtagtgactcagccatctttcactcagatgcgtacaagcatgatagatggttagacgatactggctatagtgaagaaattatagattccttgaggatatctgatgcaccagaatcagatttagttgatggaatgaaatcaaatggttcaatagctgacaaagatagagtctctgaatggctttggacactgcatcgaattgtggttgatgtggtgagaacagatagccaccttgatttctatggagaatcaaggaatatggctagaatgtctgatatacttgctgtttatgcatgggttgatccttccactggatactgtcaaggtatgagtgatctgctgtcaccttttgttgtcatatatgaggatgatgcagatgccttttggtgctttgagatgctactgagaaggatgcgtgaaaatttccagatggagggaccaacaggagttatgaagcaattgcaagcattgtggaagataatggaactgacagatgctgaattatttgaacatttttcggcaattggtgctgaaagccttcattttgcttttcggatgctgctagtcctttttcgtcgagagctgtcctttgaggaatcacttatcatgtgggagatgatgtgggctgctgattttgatgaagaagcagtcaggcatttagaagagaactgcctagaaccattgctagtagatctgagcaatggcttatcatctgaagtcaaagaagtgcatcggatcaacagttccacaagaagaaaacccagaaccaggaaatgccatagtagaaatggtgaaatctgtggagcttgccaccctggaatgaaatctagtacaagaaatcatctctgtggcttgtccggtgctacaatatgggcaagacctcagcagatgccacatccaagtgcaagtgtgctagcaaagggtggagattatgaacttcctatattctgtgtggcggctatcttgataattaaccgccagaagataataagagggactcactcaatagatgatgcgatcaagatgttcaatgataatgtgctcaaaataaatgtaaaaagatgtgtacgcttggcaatcaagctaaggaagaagtacttgtacaagtcattgaaaggtggctctagtgatgataaagaaagctgaagaacctgcacttcccttgtagaaaaaactagatatttctccatcatgcattgctatctaggtgtgctggatcagtattgacctgaagtatggtacatgtccaagatccggcattattcaggattgcaaggcaatctgtacatattatacttgaaaacaacagatgaagctgtggaattaa

SEQ ID NO: 201261 - DNA, 2618 bp, Zea Mays
ctccccgcgattctattctacgccgctataatcagtcgtgcggcgtcgtcggcgaccttgccgcctgcggcgcggaccacgcggttattatacagctaaccggggctttgagctacagccttctcttgtggggaggcatccccgtcctctacttcgtcgctgccctctgctgcgcctggactggcgtggagtggagatccatccacccgcacttgccacgatctcttccttctcgtagttggttgcggatttgcttactttggtgcgccgcccggcaatccaaacaatcctgcttgggttcgattcgcttcgccttcgtcttcagcgctcaagatcagtttagccgaggtgccgggcgcggtttggctgtccggaggcttttagagttactggaaccccgatgccccaagtgaagtccagctacgatggcgccggcggggactacattaagtggatgtgcggcgccggcggccgcccgggcggcgccatggccagcctccaccgcggggtgggctcccttgttcgtgacatcagcgacccctgcctcaatccctccccagttaagggaaacagaatgctgaaaccagaaagatggcacgcgtgttttgacagtgacgggaaggctatatgtttccgtaaagcccttaagttcattgtcttaggaggtgtggatccttctattcgagcggaagtttgggaatttcttattggctgctacaccttaagtactacagcggaatataggggaaaactaagagctgctcgaagggagaaatatcgttatttaattaagcaatgccagagcatgcatacaagcattggtacaggtgagcttgcatatgctgttggatcaaagctgatggatgtcaggaccttgcccaaagaaactgaaggtggagaagtcagcacaagtcagcaagctgaacatgaagtgccttgcagtttagcagaaaattcgaatttgatttatggttctggttgcacaacgcggccccataaaaggaaaatttgtagtaaatcagctgaaacagttggtttcaatcaacataatgataactctagaggttctggagattgtgatgtcattggtgaaccaaggtatgacagtgatgccttcatcgattttccttccctaactggtacaaacttggtcgcaaatggtgacggggatagcaatggagttgaagaaaatccttgcaatttcttggtctctgaacatagagtaaggccccatgatgaacacatgcacagcttccagatcaataataacatagatctcataatagagtcaaatacattctccaatgatatatttcgacctagcagtagtgactcagccatctttcactcagatgcgtacaagcatgatagatggttagacgatactggctatagtgaagaaattatagattccttgaggatatctgatgcaccagaatcagatttagttgatggaatgaaatcaaatggttcaatagctgacaaagatagagtctctgaatggctttggacactgcatcgaattgtggttgatgtggtgagaacagatagccaccttgatttctatggagaatcaaggaatatggctagaatgtctgatatacttgctgtttatgcatgggttgatccttccactggatactgtcaaggtatgagtgatctgctgtcaccttttgttgtcatatatgaggatgatgcagatgccttttggtgctttgagatgctactgagaaggatgcgtgaaaatttccagatggagggaccaacaggagttatgaagcaattgcaagcattgtggaagataatggaactgacagatgctgaattatttgaacatttttcggcaattggtgctgaaagccttcattttgcttttcggatgctgctagtcctttttcgtcgagagctgtcctttgaggaatcacttatcatgtgggagatgatgtgggctgctgattttgatgaagaagcagtcaggcatttagaagagaactgcctagaaccattgctagtagatctgagcaatggcttatcatctgaagtcaaagaagtgcatcggatcaacagttccacaagaagaaaacccagaaccaggaaatgccatagtagaaatggtgaaatctgtggagcttgccaccctggaatgaaatctagtacaagaaatcatctctgtggcttgtccggtgctacaatatgggcaagacctcagcagatgccacatccaagtgcaagtgtgctagcaaagggtggagattatgaacttcctatattctgtgtggcggctatcttgataattaaccgccagaagataataagagggactcactcaatagatgatgcgatcaagatgttcaatgataatgtgctcaaaataaatgtaaaaagatgtgtacgcttggcaatcaagctaaggaagaagtacttgtacaagtcattgaaaggtggctctagtgatgataaagaaagctgaagaacctgcacttcccttgtagaaaaaactagatatttctccatcatgcattgctatctaggtgtgctggatcagtattgacctgaagtatggtacatgtccaagatccggcattattcaggattgcaagatgaagctgtggaattaa

SEQ ID NO: 201262 - DNA, 2518 bp, Zea Mays
ctccccgcgattctattctacgccgctataatcagtcgtgcggcgtcgtcggcgaccttgccgcctgcggcgcggaccacgcggttattatacagctaaccggggctttgagctacagccttctcttgtggggaggcatccccgtcctctacttcgtcgctgccctctgctgcgcctggactggcgtggagtggagatccatccacccgcacttgccacgatctcttccttctcgtagttggttgcggatttgcttactttggtgcgccgcccggcaatccaaacaatcctgcttgggttcgattcgcttcgccttcgtcttcagcgctcaagatcagtttagccgaggtgccgggcgcggtttggctgtccggaggcttttagagttactggaaccccgatgccccaagtgaagtccagctacgatggcgccggcggggactacattaagtggatgtgcggcgccggcggccgcccgggcggcgccatggccagcctccaccgcggggtgggctcccttgttcgtgacatcagcgacccctgcctcaatccctccccagttaagggaaacagaatgctgaaaccagaaagatggcacgcgtgttttgacagtgacgggaaggctatatgtttccgtaaagcccttaagttcattgtcttaggaggtgtggatccttctattcgagcggaagtttgggaatttcttattggctgctacaccttaagtactacagcggaatataggggaaaactaagagctgctcgaagggagaaatatcgttatttaattaagcaatgccagagcatgcatacaagcattggtacaggtgagcttgcatatgctgttggatcaaagctgatggatgtcaggaccttgcccaaagaaactgaaggtggagaagtcagcacaagtcagcaagctgaacatgaagtgccttgcagtttagcagaaaattcgaatttgatttatggttctggttgcacaacgcggccccataaaaggaaaatttgtagtaaatcagctgaaacagttggtttcaatcaacataatgataactctagaggttctggagattgtgatgtcattggtgaaccaaggtatgacagtgatgccttcatcgattttccttccctaactggtacaaacttggtcgcaaatggtgacggggatagcaatggagttgaagaaaatccttgcaatttcttggtctctgaacatagagtaaggccccatgatgaacacatgcacagcttccagatcaataataacatagatctcataatagagtcaaatacattctccaatgatatatttcgacctagcagtagtgactcagccatctttcactcagatgcgtacaagcatgatagatggttagacgatactggctatagtgaagaaattatagattccttgaggatatctgatgcaccagaatcagatttagttgatggaatgaaatcaaatggttcaatagctgacaaagatagagtctctgaatggctttggacactgcatcgaattgtggttgatgtggtgagaacagatagccaccttgatttctatggagaatcaaggaatatggctagaatgtctgatatacttgctgtttatgcatgggttgatccttccactggatactgtcaaggtatgagtgatctgctgtcaccttttgttgtcatatatgaggatgatgcagatgccttttggtgctttgagatgctactgagaaggatgcgtgaaaatttccagatggagggaccaacaggagttatgaagcaattgcaagcattgtggaagataatggaactgacagatgctgaattatttgaacatttttcggcaattggtgctgaaagccttcattttgcttttcggatgctgctagtcctttttcgtcgagagctgtcctttgaggaatcacttatcatgtgggagatgatgtgggctgctgattttgatgaagaagcagtcaggcatttagaagagaactgcctagaaccattgctagtagatctgagcaatggcttatcatctgaagtcaaagaagtgcatcggatcaacagttccacaagaagaaaacccagaaccaggaaatgccatagtagaaatggtgaaatctgtggagcttgccaccctggaatgaaatctagtacaagaaatcatctctgtggcttgtccggtgctacaatatgggcaagacctcagcagatgccacatccaagtgcaagtgtgctagcaaagggtggagattatgaacttcctatattctgtgtggcggctatcttgataattaaccgccagaagataataagagggactcactcaatagatgatgcgatcaagatgttcaatgataatgtgctcaaaataaatgtaaaaagatgtgtacgcttggcaatcaagctaaggaagaagtacttgtacaaggtgtgctggatcagtattgacctgaagtatggtacatgtccaagatccggcattattcaggattgcaagatgaagctgtggaattaa

SEQ ID NO: 201263 - DNA, 1965 bp, Zea Mays
tggtttgaagttctgaatgataaacagaaaatttccaaggattactctattcgtataactgaacttcaggccaagagtagcaagttggaacaacggtgcttgagcttgtcttcttctcttgaaactgcaaaacgagaatccaatgattggaagagcaaatatgatcatggtattttgcagcaaaaggcagatgagagtaagttaaaatctcaaattgcttccctagagtctagggtgagtatcagtgagggtagattatcggcaacacgtgaacaggctgattctgctcaagaggaagcatccgaatggaaacgcaaatatgaagttgctgttagtgaggccaaaacagctctgcagagagcggcggtagcacaggaacgcacaaataagaaagtgcaagagagggaagatgctttgagggtagagcttgctaaccaactatctgagaaggaagaggaaattgcaagattacatgcaaaacgtagtcaaatggaaattcatgctacaagtttgatctcgaggcttgaggccactgaagcgaagtcgaagagccatgagtctgattcgttggctttgagggaggagatcagattactgactgataacctggagtctattagaagtgaagctctgtcacgtgagaaggaagttgggatcctggaacaggaaaagaaccatcttgaggagaagtatttgtcacagtgcaaaaagtttgatgagacagatattagatgcaaggaagctgaaagggaagcaaaacgagcaacagaattagctgatgtagctcgtgtagaagcttctgctgctcaaaaggataagggggaagctcaacggctcgcaatggagaggtttgcactgatagaaagaatggagcgacaggttgaagctctagaaagggacaaggctaagttggtagaagagattgagagacttcatcagtcagagaaggatgctgtgtccaaggtcgcattgcttgaaagaaatgtaggtgagcgggaaaaagaaattgatgagatgttgaagcagaacaaccagcaaaggtccagcacagttcaagtgcttgagagtctgctggcaacagaacgtgaagcacgtgctgaagccaataagagggcagaggaactgtcgttgatgttgcaagcaactcaaggcaaactggacatgctccaacaagaaaccacacttgatagcaagctcaagacctctgcaaggcgcttaaggggtgatgctacagagtctgtacatgatatggatatcgatggggacaatgggaggcgtcggaaacggtcaaaaagcacaacaagcccgttcaagaacaatcacacagaggatggcggttccgtatttattggcgaagatacttacaacgggagtcagcaagggacagaaagcgaagactatactaaattcactgtgctgaagctgaagcaggagctcaccaagcacgggtttggtgctcaactactccagttgaaaaatcccaacaagaaggatatcgttgccttatatgaaaagcatgtcatcggcaagtagttcctcggcaatacttgtatttatgctttatagacttccctctgtagcgttgaaactttaattgacacgatcggattgaagcaaacaatgcatgtaacttagtttaaatctctggtctgtgtattgcaacaatggtgcagttcattttagcatgcatcgtcggcaagtttgtagttaggagtcgtgattgaaatgtttgtctttccaatcccggcacaggttttcttgtaatgctatgacgacaatctattcggattccatggttttgtggtgtaattttatgccatcgatcttttcagattctaggcagtgttgtactgttatggctgacagtccctatccaatttgttaataactcagtacagtacagcctcgcgaggtgaacacagtccactgcaatgttgtttaaatatcttttcagagcggacaaat

SEQ ID NO: 201264 - DNA, 498 bp, Zea Mays
tccttccttcgcctcccattacgctctgctagcgtcgaccacagatcgggattggccaggaagcagtcggtggaaacattagggtggaccattgtcgaggaggtacgagtgtgcgatcttggtgcaccagggtggagtgcgtctgggttcataacacgcgtggcgggcggcgttctcagcgacatcaagctagagcaccggcacctcgcctcgaagaaacgatgtcgcgcggtcgcctccaatcgcggtacacttcaggatatggttgatggtgtgacttggcctaccaccctgccaccacgttggacggtcgagtgggatgctgctccagcaggagaggagcaggaggagtagtgggctaggccttgccctattcctcacctttcgacgatatcgattatccactgcaatttatcttatgaacttatttcagttgactcgaaaaactccgatttatgtactaacttcagtactttaatttgaggtttcctgttttat

SEQ ID NO: 201265 - DNA, 363 bp, Zea Mays
ttcgcctcccattacgctctgctagcgtcgaccacagatcgggattggccaggaagcagtcggtggaaacattagggtggaccattgtcgaggaggtacgagtgtgcgatcttggtgcaccagggtggagtgcgtctgggttcataacacgcgtggcgggcggcgttctcagcgacatcaagctagagcaccggcacctcgcctcgaagaaacgatgtcgcgcggtcgcctccaatcgcgattgcaacctcgctgacggagagtaggtgctcatccccgagcaaggagttgtccacgaggaagatcaggagccagctaccgagcctgccatcgaggatctccccgtagccccagcaattgaag

SEQ ID NO: 201266 - DNA, 441 bp, Zea Mays
taagtagccgtctgacctagctccttccttcgcctcccattacgctctgctagcgtcgaccacagatcgggattggccaggaagcagtcggtggaaacattagggtggaccattgtcgaggaggtacgagtgtgcgatcttggtgcaccagggtggagtgcgtctgggttcataacacgcgtggcgggcggcgttctcagcgacatcaagctagagcaccggcacctcgcctcgaagaaacgatgtcgcgcggtcgcctccaatcgcggagaagaacatgtggttcaagaggagccacaatgagaagttcgattcgatctaggtggcgtctcctaattgactttatggcgccaaggatggattttagtttgatctatatttatattttattttgtaagtcttccgctatgtaataagtactctgattatattatgacattt

SEQ ID NO: 201267 - DNA, 2285 bp, Zea Mays
gtccacgttgtcgatcgattcatatagcgtcatcatttgtagtcaccaatcatccaacgctgatcccctcgattcgcggcgccctcgcctccaccactccccaaccacccgacgccgacccccctcaattcacgcccccacccgctgcatcggctccctccggcgccccgcctcctggcccagatccgtgcacccctcgccctctctagactcgatgattcacagatccgcccagctgcccaggcaccgactaccggcgtccggatctcctgctccactgctcgctgcctcggggctctctggcgttggctcagcgcggaggaggaggtgtaggagcgaccaccgaccatccgcgtttcaccatccccttctccgatctcaagggtttgtccgctggtttgctaaggcaagcaacgtacatagactgctcgtcttggatccttcaggtttgtatagtgtgttgctttatgatcaattgaccattcattacctccgcctgatggcccttattaacaacagtaagaactaactaagaatgtgcgctaagattttgctatctgaagtggtaaatttgttaatcctaattttttgttgaatgggtatggggttttgtgggtggtggatggtgttgtgggatgagatccttttgaaagggaaatgtgcccttgggccatttctaaagtgttttggtgattaagtgcccaacacattttctctaagtgcaaatttgtgccaaagagtgaagaagtgaaaatcgtattacaaggtatgtttctagacttagtacatttgttattgtgtactaatgaagttacctaagtgctagaaacaggaaaagaaaggattggaaaagagtgtctgtgtgcagccaagactcagctcggcttggcacaccggactgtccggtggtgcaccggacagtgtctggtggtgcaccggacagtgttcggtgcgccaggccagctccggcgaactggccactctcgggaaaacttcggcaacatacggctataattcaccggactgtctggtggtgcaccggactgtccggtgagccaacggccctcagcgcaactgtcggccgtcaaatccgcgggtgacgcgtggctcgctccaacggtcggcagggggcaccggactgaccggtgtgcaccggacagtgtccggtgtgccaactgccacaagtctgcaacggtcggctgcgccagattaggaagggaatcgcgcatcggacatgaacagtggctgtccggtggcgcaccggactgtctggtgcgccacccaacagaaggcaagattagccttccaagaatgcctccaacgactcctagctaccttggggctataaaagggacccctaggtgcatggaggagacacaaaagcattcactaagcaattctaagtctccacactccgtctccacgcatttgattgatcgtgttagtgatttgagctctgttcttgttgtgaactctctatgcttcatttgagctcaagtcttggattgtgtgcgtgtgttgtgctgcggatttgtgtgtgttgctcccaaccttactcttgtgtttacattgtgatctttgttgtaagggcaagaggctccaacgtgtggagattccttgcaaacgggaaaagatataagcaaagaaaagccgtggtattcaagttgatcattggatcacttcaaaggggttgagtgcaaccctcgtccattgggacgccacaacgtggaggtaggcaagtgttatacttggccgaatcacgggataaaccactgtgtctcttgtgttatcttcctttgtgattattgtgattcgcaagagctcactctatagccacttggttcttttgagcactaacatctttataaccaagttttgtggctattagttgttgaattttacaggatcacctattcacccccctctaggtgctctcaattggtatcagagccgttctcttcacgtaagggactaatcgcccgaagagatggatcctaagggaaaggggatggtggtcaacgataaggagaaggagtccatcttcaacgagccaagagatgacaagcccactgactctggctcgagtcacaagaagaaggacgggaagaagaagaggcgcatcaagaagatcgtctactatgacaacgacgaatcttcttcttcaccaagagacaacgacgacgattcttcgtcgaagaaaagaacgggttaatcaaaactattcctttgattactctcgcatgcctttcaattctaatgcccatttactttcaattacacttggg

SEQ ID NO: 201268 - DNA, 1352 bp, Zea Mays
agccttttccagaggtcagaatcccgtcggcgtcagcccgttctgtaaagctgcacggggctgggcctcaaggtactactactacgtgctttcgacggcccaccaggtcggtcagcagtcagcacgtctccgtccccgacgatgccggggagcaatgccaatggagggcgcagcctgtacggacacggccgaccggccatcttcatccccctctccttgccgccctcggttccggactctgctcccctgccccatacccccaccgctcctcacgcctcgcctgactgccaaggcaatcccggaagctcctcccgcgcgcgaacatgatttggcctgcaacaacgcagaggaggtgatcttatgtaactacaaaagatagtaatggggatatccaaggtgacaggcattgccgcgacagcttttcttgtcacatctgttagtctgtgccagttgggaatgaggattattatgcttccattcctagccaccggtattgttgcttccattgtcacggttgcatcgcatgatgccatcaacctaccgtggatcttggggaagaactcggttggaagatttcctctttggtcgattatactgtttggtcctttcttgacgcttgctcggacatatgcgatggttaagagatacatgaggaaggaggccgtgtatgacaagatcgtggaaggcctatatctcggaggatggccgtttctcttgaaacatttgccccctggaaacccatctgtcatagattgcacttgtgagcttccaagaagttcattcgttccagcaaacgagtatctttgccttgcaacttgggataccagagctccaacaccgcaccagatcgaaaaggctgcacgttgggcttgtgaaaagagatctgaggggaagccagtttatgtccattgcgcatttggtcatggaagaagtgcctgtgttgtgtgtgcaattctagtagcgctgggtactgctgagaactggaaagatgctgagaacatcatccgtgaaagaagaaagataaaaatgaacgcccttcaccgtaaaaccttggaagagtggtccaaacaacgagttcgtcagaaaaaggataagtagttgtttgaccagatgcatggggttgccctgaatatggtgttattgctgcaccaatttatttcaatccaatattccatagctcatctgtatagttgagtggaatgaggaatatcatagggagcccagatcgtgtgtaggatctatctacggagtacctatgacactgtcatagtaacatattgatttgagattctagatttggtgagaacccataacctgtatcacaaagccttcaaggttggccagtttgccga

SEQ ID NO: 201269 - DNA, 2294 bp, Zea Mays
aggtcggtcagcagtcagcacgtctccgtccccgacgatgccggggagcaatgccaatggagggcgcagcctgtacggacacggccgaccggccatcttcatccccctctccttgccgccctcggttccggactctgctcccctgccccatacccccaccgctcctcacgcctcgcctgactgccaaggcaatcccggaagctcctcccgcgcgcgaacatggtgatgttctttccctgtcccgtgttacttgtttcggatcagtatatatatatggacatttcatgtttcatgaatatattgttactgtgatattcttgatccgttatatttgtaatctttggatcttgcccgctgcttggatctaggcatctagttttcccggtttgtcataggctgcgcatggcggagtcacactaagcaacatgctctggaccttagacagatggaccaaatgcgcatgcttgttaattcgattccccctcatcagcgccaacaagctgccggcatgctttaacatatgatgcttcgttgctatttctggaatgaatagacctgatgttccgaggcacacatgttttattttcttcttcagaatgaagtcaaatttcactgctctgctagaaatgacctgctggaacgttggtgcagatttggcctgcaacaacgcagaggaggtgatcttatgtaactacaaaagatagtaatggggatatccaaggtgacaggcattgccgcgacagcttttcttgtcacatctgttagtctgtgccagttgggaatgaggattattatgcttccattcctagccaccggtattgttgcttccattgtcacggttgcatcgcatgatgccatcaacctaccgtggatcttggggaagaactcggttggaagatttcctctttggtcgattatactgtttggtcctttcttgacgcttgctcggacatatgcgatggttaagagatacatgaggaaggaggccgtgtatgacaagatcgtggaaggcctatatctcggaggatggccgtttctcttgaaacatttgccccctggaaacccatctgtcatagattgcacttgtgagcttccaagaagttcattcgttccagcaaacgagtatctttgccttgcaacttgggataccagagctccaacaccgcaccagatcgaaaaggctgcacgttgggcttgtgaaaagagatctgaggggaagccagtttatgtccattgcgcatttggtcatggaagaagtgcctgtgttgtgtgtgcaattctagtagcgctgggtactgctgagaactggaaagatgctgagaacatcatccgtgaaagaagaaagataaaaatgaacgcccttcaccgtaaaaccttggaagagtggtccaaacaacgagttcgtcagaaaaaggataagtagttgtaagtggaacattttccatagtgatggacttgttttgcggtgttaacgcctgtcataaaatgacatactccctccgttctttgggggtagtatttgcttaggccaagtgtaatttctgtggcattcttatttatgttttaatcagtagtattagtgtttctacctttaaatgtatatgaatttatatgtatccaggttcgggactgttttttgtccacctggttaattgaatgtgagcaggcattagcttaaatgtatttcttcatggaactaaatggatgtatatatgataaagattatataatatagtaaccaaatagtcctagataatggataaacatagtcataaaaattactagatagcctcaaccaacctattcaacatactcaatccagtaatcataggtggaattgttgaatggattcttccatcataggaagagctgttacaagaatttagaccagacaaaagaacacattgtactggagtactcgacatgagattctagcttctctctttccccttcccactgcagtcaatgaagcaatttcaccttcctggaattttcttgtacacacattttcagaaagtgttttttgaaaactaaagaatttccagaaacactccttgttttagagcttcttctatttcccagctttcctctgtagctctcagatatctgctacgtgcatccaaacaatctctcttcccagtcattctcttcccagtcatttttctcttgctcctatgctgagggttagttccacaacatgtgtcagtcagaaggttgaaaattggttttgggatggttgtgctgcgatgcttatctcacaattgccttcatcggtcaccagtatcctgccagaa

SEQ ID NO: 201270 - DNA, 898 bp, Zea Mays
acgccccaccccgctcggcctccagtccagctccaccgctttcacccgctccgctccgtttccgtcgctcccgtcccaaggagccgcgccacgcgagagggggccacggacggtggcagttttctgtttcggtgggcggggacgtcgtcgaccgaccgaccggagcggaaggccggagatgatggaggagggggcgcccgatctgcgagagctcgtgcgcctgccggatgttctcgtggtatgctcatctactggatggacagatgaaaagcacatgctttatcttcgattattggaagaaacatttgtgcaccaattacatggaagtggttgcatttttaagggactgtttaattgctctccaagatattgtaggcaaatgaaatcatctaagcaaattgttaaatacactacgcctggtcaggggtgtgccatagttgagggtggcaaagtcaagtcctgcataaaggctgagcatgttgagtcaccttcctgttgtggaaatcagcaagatgaaaaagttcgttccctggaagataatgcatcaaccactaagcccatggaaaaagccacttcccatgcaagggcagcaagcccaggacaagcttccacgtgctatgttggcaaacacagacattctccttccagaagtgcaggtagggggtatccattggatgtccttttgcaaatgctgttgcatatcgatctgtagttactccaaaaaggaagaaaaactatttccaaattttgattgtcttctattagattattgcaaaacaaagcaacaaatgatttccccaaatctgctttttattaaggaaaaaaaacattttccctggctgtctgccttgttttgtttaaagtataagctgttaatattgtttgtgggctggaaaaa

SEQ ID NO: 201271 - DNA, 1994 bp, Zea Mays
gggctgtcctgcccttcttcccacggttcacggctgattgagtcggccactgcccacgccacccaaaaactcatggccagcgctgtctgcggcgtcaccgcgcgcgcccacctgccttccgccgtccctgcagccgcaagaaagctcttcttccgctgcagggccgcgtccaccatgaacgaggcatcggcgagctcgccggacgccgaggagaagaagacgacgactgtcttcgtggccggctcgacggggcgcaccggcaagctcgttgtggagaagctgctggccaagggattcggcgtcgtcgccggtacgacggacgtgagcagggcccgcggcagcctgccccaggaccccaaccttcagctcgtcagggctgacgttacggagggcgtcgacaagctggtggaggccgtgcgcggcgtcgatgctgtcgtctgcgcgacgggattccggcggtcctttgacccttttgctccgtggaaggtagacaactttggcacagtgaacctggttgaagcatgcagaaaggctggcgtagcaagattcgtactcgtcagctccattttagtaaatggggccgccatgggtcaacttctgaatccagcctacattgtgctcaatctacttggcttaacactggtcgcaaagctacaggcagagaatcacatcaggaaatcaggaatagattacactatcgtaaggcctggagggctgacagatcaacccccaacagggaatatagtcatggaacctgaggacactctttattcgggatccatatctcggagccaggttgctgaagtagcggttgaagcactggtgtgtccagagtcttcctacaaagttgttgagattatcgcccgtactgatgctccaaatcgctctctgaaggatatgtacgctgcaattaagcaaaattgactgctctatttttttgacaggatggttagtttgttatacaaccatgaatcaatgaagaacacttatagtctatgtatttggcattcgacagtatatttttgactcgcgaaaatctcctgaagccttcagtctaggccggctagttcacctctaaaaccggtcagaccgggtgtccaacatcagctagactggccaaaagttaagtgctcgttcccgtgaaacctggctagccgattttttcagattttgaaccggtttattcgaaatcgatttgtggatctatcttgacgtgaaaaaaattagagaatgcattttgaattgttaagaacgcatctactacatccttctaccctcacttatctatccaccttgttgtttgtcatgtcatcttgcaagatttaacggtgttctaagtggtcttgtcgatccaaggaaaacctctaaatacttgttctcgatgagatgagtcttcacaggaggtactcaggagtctaccaagcaaagaaaaggaccaacattagtctaactaacccctttatcgacaacgggatcaacattggtctaaccaaccccttgattggttttgttagtctgctatgttcttgttgtgatcaagattatttgtaaccatgggtgttctaacttttgctggtgtgtgatccaaatcagcatcaacagacttttctatgactacgggggaaagaagagcaagatctaatctgctagcaacaagtcaggttttgagaacactaaggggaaggaggatcacatcgacccttcaatccaaagaacaccaaccatcctacattgatagaagttcttgatgatcttcatcagaagattgaagccaagtctactgccaatctaaaggctttcttaaagagttaatgattagtgagacaaggttactcaattcgtgagcctaacttcaataattctattgtttctacatctgctataccagaggttctgtttcgggcgacccattggcttaggttttgggcatatttgcagagggttgaagaccaggagataatcaaggagacgtgtcgacggattgaagtcgcatc

SEQ ID NO: 201272 - DNA, 1383 bp, Zea Mays
tacgtatccagagcaagggctgtcctgcccttcttcccacggttcacggctgattgagtcggccactgcccacgccacccaaaaactcatggccagcgctgtctgcggcgtcaccgcgcgcgcccacctgccttccgccgtccctgcagccgcaagaaagctcttcttccgctgcagggccgcgtccaccatgaacgaggcatcggcgagctcgccggacgccgaggagaagaagacgacgactgtcttcgtggccggctcgacggggcgcaccggcaagctcgttgtggagaagctgctggccaagggattcggcgtcgtcgccggtacgacggacgtgagcagggcccgcggcagcctgccccaggaccccaaccttcagctcgtcagggctgacgttacggagggcgtcgacaagctggtggaggccgtgcgcggcgtcgatgctgtcgtctgcgcgacgggattccggcggtcctttgacccttttgctccgtggaaggtagacaactttggcacagtgaacctggttgaagcatgcagaaaggctggcgtagcaagattcgtactcgtcagctccattttagtaaatggggccgccatgggtcaacttctgaatccagcctacattgtgctcaatctacttggcttaacactggtcgcaaagctacaggcagagaatcacatcaggaaatcaggaatagattacactatcgtaaggcctggagggctgacagatcaacccccaacagggaatatagtcatggaacctgaggacactctttattcgggatccatatctcggagccaggttgctgaagtagcggttgaagcactggtgtgtccagagtcttcctacaaagttgttgagattatcgcccgtactgatgctccaaatcgctctctgaaggatatgtacgctgcaattaagcaaaattgactgctctatttttttgacaggatgcatcaacagacttttctatgactacgggggaaagaagagcaagatctaatctgctagcaacaagtcaggttttgagaacactaaggggaaggaggatcacatcgacccttcaatccaaagaacaccaaccatcctacattgatagaagttcttgatgatcttcatcagaagattgaagccaagtctactgccaatctaaaggctttcttaaagagttaatgattagtgagacaaggttactcaattcgtgagcctaacttcaataattctattgtttctacatctgctataccagaggtaaagattgatgaaaaggttctgtttcgggcgacccattggcttaggttttgggcatatttgcagagggttgaagaccaggagataatcaaggagacgtgtcgacggattgaagtcgcatc

SEQ ID NO: 201273 - DNA, 1638 bp, Zea Mays
cctcagcatgcagctctctttccttgaccaaccccctttggttgtggttccccctctccggccgatccctgtcgatcgagccgggcgctacctcttgtcagcccttctttaatcgcgcgcctgctgtcctctcctcgctcatggagacgtcgtcgttctagctagatcagttactgcccagccttagctagctagtcgtcgtcgtcgcccgcccgcgcgcgcgcttcgctcgttcttcgttatctatcgatcgacaaggaagcagctaaaattagggggttcgatcaattcgttgttatgacgtggtgcaatggcttcaacgacgtgcgcgccgccgtggagagcagcctgtctccggccgcagccgccgtgggcaagacggcggcggcgtcgctcgccgtcctggtcaagatgtgcccgtcgtgcggccaccgcgcgcaatatgagcagaagagcacgacgatccaggacttgccggggctgccggccggcgtgaagttcgacccgacggaccaggagctgctggagcacttggaggggaaggcgaggccggacacgcggaagctccaccccctcgtcgacgagttcatccccaccatcgacggcgagaacggcatctgctacacgcacccggagaggctccccggtacgtacgcaccgtgtgagcaaggacgggcttgttcggcacttcttccaccggccgtccagggcgtacacgacggggacgaggaagcggcggaaggtgcacagcggcgacgacggcggcgagacgcggtggcacaagacgggcaagaccaggccggtgctgtccaacggcaggccccgcgggtacaagaagatcctggtgctctacacaaactacggcaagcagcgcaagcccgagaagaccaactgggtgatgcaccagtaccacctcggctccgacgaggaggagcgcgacggcgagctcgtcgtctccaaggtcttcttccagacgcatcctaggcagtgcggctacaccatggccagggagtccgccgtcgtcgtccctgccgccgccgcagtcaccggcagcagcaacgcgtttattgccggccatcaccagagtggtggtggtggtagcgtcctcagagaagcaaacggcggagctgatcagctctacagcccaggagcaatgatggggtatgaccaggaggggcctggaaacagggcacctcctgcccctgctgtggctccccacttcatgcctaactttgttgtccatgcagcaagagctagctttggcccttgaaccgagaattcaggacaagatacaaacctatcaaatttgccagatataaataggcatttaggaattaggagcatgtgcaaactcccaggacctgaacacaattcactacttgtgcagttgtgctggattgtataaaaaatgtcatgttctcaccctctaacttcacgttcatttacaagctcctcccttttagtcatgcaacaatgtgatataagattaaaagatgcatcatagttaaagctgccaaatttactgacagaacataaagcacttaatttgtccgctctgaaaagatatttaaacaacattgcagtggactgtgttcacctcgcgaggctgtactgtactgagttattaacaaattggat

SEQ ID NO: 201274 - DNA, 691 bp, Zea Mays
gtggagattgctgcctgacagaccttaaagcaaaaaacccttagggaacatgctgacaaggcattgcagtacttcatcagtgtggagccgagtaaagcactacctcttcttttgcgttggattgccagctatcagactctgtttacgaaggtttgcagcaaatgcggacggcttctgatgatggacaagtctttggctttgctgttgcctcctgtccaccgcccctatcaccagacttcaaatattggaccagatcttcaagaggcctaccacattggatgttcctcctacgacggctagctggtgcttctaagaaacacccgagactattttggtagcacaggatgtttctcgcgttgtcatcgacgaagcacgtgtacaacagtccttgtgtgtaaaacattgtcctttctggaatgtatccaacccatcaggtgtcctttttgtactttggttagtgtatgcatattgtcatgtgctgtacaaatatattagcattgctactttattacgggtggggcctagcccaaacttgatacagctaggataaagttagagcagttgctacagtttctagctagctaccttattctatacgcatcaccctagctgactgctgcatctgatcccaccatcccttagactgtgttcaacggtgtgcgctgggctccccctcccctagcactgtagc

SEQ ID NO: 201275 - DNA, 1747 bp, Zea Mays
gatttgggctccaccactgcacatgaatcatgatgcagcagcgagcagcctatacggcttactgggccggccgccgatcgcgagcaaacacttccgcagctctggaattcggaggctcaggaatcatgatgcagcagcctcaggcgcatgcgtcggcacttgcggtggcgcacccgcacgatccggcgggcggggacgcgccgccgaagcaggtggctcaggcgatggagcggctgggccgtgcgggccgtctcatcgcagacatccggctcggcgcggaccgcctcctcgaggccctcttcgtctccggcgacgcgcccccgtacagcgtgcgccagcacgtcgacaggatggagcacattatcgtcaaggaggatgccgccatgcgcctccacttccaggacctacgcgccctcggcaggaaggcaactagaggagtctggagttcttaatggggcccttaaagctcgaggcaattcatggggcttgcacatgccacttgtttgtccagatggtgctgttgtagcttatgcttggaagcgacaactagcgggtcaggccggtgcatctgctgtggacaggactaggttagctctcaaggccttcactgaccagaaaagaagattcttccctcatctagaagatgaagttgttagccatctccatgatggtgaacctggtggcaccaaaaagccaaagttgtttaccagcaatggagatctagaggaaaaatctttgtctgacatactgaaaaatttagaacatgaagcatctaacataaaaatattcacatactggcatctggattggtcaaaaagagcttcctcattagcatctctgttggatgatgactttgtggatccatctaaagagctgaacctgcaaaatatgggcaaatcgagatctggtgctctgacaacttccatagaccaagtcgcagttattgaattgctggttccttcagtatttagagctgtagtgtcattgcatcctgctggatctactgatcctgatgcagtggcattcttttctcccactgagggaggaagctatcttcatgcaaggggcacgtcggtacataatgtgtttaaacatgtaaaggaacatgctgacaaggcattgcagtacttcatcagtgtggagccgagtaaagcactacctcttcttttgcgttggattgccagctatcagactctgtttacgaaggtttgcagcaaatgcggacggcttctgatgatggacaagtctttggctttgctgttgcctcctgtccaccgcccctatcaccagacttcaaatattggaccagatcttcaagaggcctaccacattggatgttcctcctacgacggctagctggtgcttctaagaaacacccgagactattttggtagcacaggatgtttctcgcgttgtcatcgacgaagcacgtgtacaacagtccttgtgtgtaaaacattgtcctttctggaatgtatccaacccatcaggtgtcctttttgtactttggttagtgtatgcatattgtcatgtgctgtacaaatatattagcattgctactttattacgggtggggcctagcccaaacttgatacagctaggataaagttagagcagttgctacagtttctagctagctaccttattctatacgcatcaccctagctgactgctgcatctgatcccaccatcccttagactgtgttcaacggtgtgcgctgggctccccctcccctagcactgtagc

SEQ ID NO: 201276 - DNA, 1509 bp, Zea Mays
cttcggcccagcccccacccggccgtccacctaatcccgagtctcgagcgagtagcgacggccgcgcctgcgcctgcctgcgtcttccgtggcggcgcccctacctctcgaacccgtcaggcggtctggccgacctcgcttcctcggctagctacctactcgccagcgtctattgtccagcaggcgcccagctcccaagcggccgcagtgcccctgcttctgcccttgcacgttcggcccctgtgctgcactgcacagtgagccagacagcgagtaaggtttgttttcttccattcagtttgttgtactgtggagatcaaactagctaagggcagagccaaatttggggattcttcaactgaagccttgtatagatatagtttgaaagatgatgaacgaacacagagaggaggatgccttgagaggtcaagcagtcaaaaaccagaaggcgatatgggacaagaccatggaaatgagattcttgctgcagaaggcgttttctacttccaacaagttaccccaggaatccatcagaacaaggttttgcaatcatgataagcagatagagcaagcatatgatgatcttttgaattcgacgaaacatactttgagcagcatgatggagctgcaggaggctttgcttgagagtaatcaggctacaaaggatgccaatgaaattccttctgcctcaaatggagacaatgacgagtggtcagaagtacagagattgcaggcaaggataacaacattcagaaataccgagatagataaatggcacaggaaaatacaggtgacaacgggtgctgctgcacttaaaggaaagctacatgcatttaatcagaacattagtgatcaagttgctggttacatgagagatccaagccggatgattaacaggatgtacttgaccaactctgctgttagagtatttggaaaggatgtgggagaacctggaacagctgaggaggggcacattatggaaggtgatcctgaacttattgatgattctgagttttatcaacaacttctcaaggagttccttgagtcatgtgatagaggggcatcaaagtcggcattttactctctaaaaaagcagcaggttaaaaagagaaagcttgtcgatcgtcgtgcttcgaagagcaggaagatacggtaccatgtccacgagaagatcactaatttcatggcaccggagcccatggttcttcctccaatggctccgaagttgtttgagaatttatttgggaatagcagctagaatccataaactgcagtaggtttacatttctttctgttgccttttctacttctataaactgtagtaggtatgatgtcactagacttagactgaattgtaagttttgatgtcctcatcagttttgtgcgtagacaagcagagcctagttcaccaatcaaattatgcttcgatttgggcctgatgagtgccatttaccggtggacccgcggtgagtcgtgatatacgtgattatcgaaaaatgagttttccta

SEQ ID NO: 201277 - DNA, 1665 bp, Zea Mays
cttcggcccagcccccacccggccgtccacctaatcccgagtctcgagcgagtagcgacggccgcgcctgcgcctgcctgcgtcttccgtggcggcgcccctacctctcgaacccgtcaggcggtctggccgacctcgcttcctcggctagctacctactcgccagcgtctattgtccagcaggcgcccagctcccaagcggccgcagtgcccctgcttctgcccttgcacgttcggcccctgtgctgcactgcacagtaaggtttgttttcttccattcagtttgttgtactgtggagatcaaactagctaagggcagagccaaatttggggattcttcaactgaagccttgtatagatatagtttgaaagatgatgaacgaacacagagaggaggatgccttgagaggtcaagcagtcaaaaaccagaaggcgatatgggacaagaccatggaaatgagattcttgctgcagaaggcgttttctacttccaacaagttaccccaggaatccatcagaacaaggttttgcaatcatgataagcagatagagcaagcatatgatgatcttttgaattcgacgaaacatactttgagcagcatgatggagctgcaggaggctttgcttgagagtaatcaggctacaaaggatgccaatgaaattccttctgcctcaaatggagacaatgacgagtggtcagaagtacagagattgcaggcaaggataacaacattcagaaataccgagatagataaatggcacaggaaaatacaggtgacaacgggtgctgctgcacttaaaggaaagctacatgcatttaatcagaacattagtgatcaagttgctggttacatgagagatccaagccggatgattaacaggatgtacttgaccaactctgctgttagagtatttggaaaggatgtgggagaacctggaacagctgaggaggttcgagcatttactacatttcccttaaaaatatttcaaaccttatttggtctccttcagtctactgaagtgtaacggcctgtagttaattgaagctcatttcttcccctgagatgatttccccttttctatcataaccttggttatttatctgttacactaacattgctatcagaatgctactatttgtacaaatagaagatataatgcggactacactacctgagcttatttcatcgcctttgctataactcaggggcacattatggaagagtcggcattttactctctaaaaaagcagcaggttaaaaagagaaagcttgtcgatcgtcgtgcttcgaagagcaggaagatacggtaccatgtccacgagaagatcactaatttcatggcaccggagcccatggttcttcctccaatggctccgaagttgtttgagaatttatttgggaatagcagctagaatccataaactgcagtaggtttacatttctttctgttgccttttctacttctataaactgtagtaggtatgatgtcactagacttagactgaattgtaagttttgatgtcctcatcagttttgtgcgtagacaagcagagcctagttcaccaatcaaattatgcttcgatttgggcctgatgagtgccatttaccggtggacccgcggtgagtcgtgatatacgtgattatcgaaaaatgagttttccta

SEQ ID NO: 201278 - DNA, 787 bp, Zea Mays
gcacagtgagccagacagcgaatatagtttgaaagatgatgaacgaacacagagaggaggatgccttgagaggtcaagcagtcaaaaaccagaaggcgatatgggacaagaccatggaaatgagattcttgctgcagaaggcgttttctacttccaacaagttaccccaggaatccatcagaacaaggttttgcaatcatgataagcagatagagcaagcatatgatgatcttttgaattcgacgaaacatactttgagcagcatgatggagctgcaggaggctttgcttgagagtaatcaggctacaaaggatgccaatgaaattccttctgcctcaaatggagacaatgacgagtggtcagaagtacagagattgcaggcaaggataacaacattcagaaataccgagatagataaatggcacaggaaaatacaggtgacaacgggtgctgctgcacttaaaggaaagctacatgcatttaatcagaacattagtgatcaagttgctggttacatgagagatccaagccggatgattaacaggatgtacttgaccaactctgctgttagagtatttggaaaggatgtgggagaacctggaacagctgaggaggttcgagcatttactacatttcccttaaaaatatttcaaaccttatttggtctccttcagtctactgaagtgtaacggcctgtagttaattgaagctcatttcttcccctgagatgatttccccttttctatcataaccttggttatttatctgttacactaacattgctatc

SEQ ID NO: 201279 - DNA, 940 bp, Zea Mays
ataaaacgacttggctacgcttcacgcacacggcgtctttgggtgagcacaccgcgcagcaacgagaggggcaaacaagcttgctactgtgatttctcgtccgagcagcggcggaggagagagagagagcatggccgaccacaaggaggagcctgtgccggagtctgtgatggacaagatcaccgagaagttccacggcggggactcgtcgtcgtcgtcgtctgactcggacgacgagaagaaggggtcctcgttggcgtcggcggcggaagccatgaaggccaagatctaccgccttttcggccgggagaggcccgtccactccgtcctcggcggcggcaagcctgccgatcttatcctatggaggaacaggaagatctctggcggggtacttgctggtgccacggccatctggctcctattcgaggtcatggagtaccatctcctcaccttggtgtgccactgtctcatcctctcgctggccatcctcttcctgtggtccaatgcctccactttcatcaacaagtccccaccgaacattcctgaggtcaaaatccctgaggatgtggctgttaatgttgccctgtcactgagatatgagatcaacaggggctttgctaccttaagggagattgggcatggccgtgatctgaagaaattcctaattgttattgcaggtctctggcttctttcagttctcgggagctgctgcaacttcctgacactgttctatattgtctttgtggcactgtacactgtaccagttctgtatgagaaatatgaggacaaggttgatgcttttggtgagaaggctatgactgaactgaagaagtattatgccattttcgatgagaagtgcctatcgaagattccaaagggcccccttaaggataagaagcactagattggtagtaaggttggtaccaaaatactccatttg

SEQ ID NO: 201280 - DNA, 2350 bp, Zea Mays
aaaaggacagtatcctatgcgttgggatcttggattccaaaagcaatcatacaggggctatggcgaggccttacaaacctaagaatatcctcattacaggagctgctggttttatcgcctcccatgtcgcaatccgcattaccaagaagtaccccgattacaagattatcgtccttgacaaacttgactactgctctaatctgaagaacctgcttcctgtgagctcatcaccaaacttcaagtttgtgaagggtgatattgcaagtgttgatcttgtcaacttccttcttgtcacagagaacattgataccataatgcacttcgcggcccagacacatgtcgacaattcatttgggaattctttcgaatttaccaagaacaatatttatggtacacatgtacttcttgaggcctgcaggattagtggccagatcaagaggttcatccatgtcagcactgatgaggtctatggggagactgacgaggatgcagttgttggcaaccatgaagcatcacagctgcttcctacaaacccatatgcagccaccaaagcgggagcggagatgcttgtaatggcatatgggagatcctatggactgccagttatcactactcggggaaacaatgtctatggcccaaatcagttccctgagaagcttatcccaaagttcattctcttggccatgagaggggagcccctccctatccatggtgatggagtcaatgtccgtagctacctctattgtgaggatgttgcggaggcatttgaggtcattcttcatcatggagaagttggacatgtttataatattggaacaaaaagggagaggacagtgcttgatgtggcaaaagatgtttgcagactcttcaatcttgaacctgacaaagtcatcatgtttgtcgagaacagaccttttaatgaccagaggtatttcttggacgatgagaagctcaagagccttggatgggctgagcgcaccccatgggaagaaggcttaaaaaagacaatggagtggtatgtagcaaattctgattattggggtgatgtttctggggccttactgcctcatccaaggacattgatgatgccagggtgcgaggggtctgaggagattaaaggaatactcagccggtttaataacattcaaacaaaggtcggttcaacatcagataatgctccagaaccgcatgccttcaagttcttgatatatggcaggacaggatggatcggcggacttcttgggaaaatatgtgagaagaaaggaattccatatgaatatggaaatggccgcttgcaagagcgttcttcactcgtcctagacatccaaactattaagccaacacatgtcttcaatgccgctggtgtgactggaaggcccaatgttgattggtgtgaatcgcacaagccggacaccatccgtaccaatgttgtgggcaccttgaatctagcagatgtatgtaggaagcatggcttattgatgatgaactatgccactgggtgcatatttgaatacgatgcacatcatcctgaagggtcaggtatcggcttcaaagaggaagatacaccaaattttactggttcgttctactcgaagacgaaggcaatggtcgaggagttattgaaggagtatgagaacgtctgcactctgcgagttcggatgccgatatcctctgacctcagcaacccgcggaacttcgtgacaaagatcagccgttacaacaaggtggtgaacatccccaacagcatgacgatattggacgaactcctgcccatctcagtggagatggcgaagaggaacctgcggggcatctataacttcaccaaccccggcgtcgtcagccacaacgagatcctagagatgtacaagcagtacatcgaccctagcttcaagtggacaaacttcaccctcgaggagcaggcgaaggtcatcgttgctccgcgaagcaacaacgagatggacgcaaccaagctgaagaacgagttccccgagctgctgtcgatcaaggactcgttgatcaagtacgtctttgagcccaacagaaaggtgcccacagactgaagcccgaagggctggcacagctgataccgtacaacacagcaaccattagtgttagactatgtgtgtgggccagcactactttacttttgggctgtcggtctattagggttagagtcctgtgagtctatatattgtacctcatctcttatacaatacatttttgggctgtgagtctatatattgtcgaacagcagaggaggtcgagggcggggctgtccgcccagatccacaccgccgccgcttctagggcaggtcgtcgtgacctggacctcccccgcacggacatcgct

SEQ ID NO: 201281 - DNA, 2352 bp, Zea Mays
gccccggctcggcaccgacagcaggccacgacgccgccgtgccaccgccccggctcgcgccaccgccctggctcggcaccaccgccccggctcggcaccgacagcgggtcgcgccgccgcccctgctcgccaaccccagcggttcaaacattagctcgttttcactgctactgcattgggttctgcatagttcttccttggttgtttgatgtaaaccacagctggggagcttagctgtatagaactgatttcacgtgtttgttgacgagtttagctgcatagggtgcaagaactgtgctaacgtgtgttctaaggtcttccaaatcgaggatgatttcggacgggcaagagtttacgaccaatcaggcagcacagaactgattcaagaagctattgacagttggcaagttcacgctgggagaaaagacaagccaaagtcctggagaaggtaagaaggcggatgagccaagatgattccagaaagggtggctcatggagtgacatctggggagcaccaacaagatacgagaagaacggtacatcccattactaaaggagacatttatgttcccacaaagcttgggcattttaggtggaaaacctggtacatcaacatacattgctggggtacaggatgatagggctctctacctagatccccatgaagttcagatggttgtgccattggagtccctgaacttggcagctgaagattcaggggagaaggataaagatgagaatggcgatgaagcgccatcgaaagtattggcaaatattaagtggcctgaaacactcgagactgattttatctacagtgctttatcatttgggacttcaattaatccacagttcattgcaagctttgcttctgctgctggtaaacgtcctcatcaagatttcgactctcaagaatctgatccagagtggggttggtggacagcaaaccatgagctgaagaagccatcaattagtctgttgtttccaacaatcatcctcctcagccgccgccatcaacagcagcagcagcgatgctaaatagtagtggtggatctggttctaactactctggtggcgagatcctacctccaccattttttatctttattatctgtgattctgcaatccacatgtttgattttttacttagtttctctttgagaccggtcgccatgtttggttagcacatctagaatgcattacaattggaggcaatagctgttcactatccactataacctgaaagcttagctgttcaactgagctttctgattcttccattttttcccattcaagtatatgatattcttgtgtgctattcaatattacaaataacaaatttgcatatgagaataattaagtaaatttggccacctaatcagtaggattgtttggttggaggaatttttgtagcatgtgaaacttgagctaattagaaagcaaccactaccttctcttcagcatgaaaaaatagcttagccatttcttagagttaagcccttagccacttgctggccttatcgtctggaagaagaaatggtactcaactgctggtctctttggcaaatttttctttgcacttttcttgttcgaactggcaatccacaaccaagtaccttgcttgcaccaacaaaagtcccttctactgtagggcaatccatggatttattgcttgtcctgaaatttgatagaggcattcatgatatcagttgctcgttaattccatttgtttcttgttctcttgtgcattgttatgacatatttgcaccttttgcggggaacgatcgaccaacaatggagtggcccactagattaaagatcgctctgggtgctgccaagggtttagctcatcttcatgaagactgtcatccaaagatcatccaccgcgacattaaggcatctaacattcttcttgacttcaaatttgaatataaggttgctgactttggacttgcaaagttcactactgataataacacccatgtttcaacaagagtaatgggaacctttgggtatttggcacctgagtatgcagcgtctggcaagctcacagaaaaatctgatgtattttctttcggagtcatgcttcttgagcttattactgggcggcgaccaattgacacaacccaattggcactgcttgctataagcacatatgtacttccatttgcatgttgtataatactaataccaattgcaaaattatagttattttttctacccttgttagttaataagcatatttctggtcaataggttgtattcttattcttgtaaccgtgttaattaatgttatggacttgtagtcttgtattaccttgtgaatatatctgtccctgcctgccatgtgaacgt

SEQ ID NO: 201282 - DNA, 3880 bp, Zea Mays
aacagaacaaattcagtaaaagaacggagaaaaaaaaaaagagaagtccctcccattcgtcgctaatcacaatcccgatctccaagcaaacccacctcccgtcagttccctactcgccgatccagatctcctacagctttccactccgccactccaaccggacgcctccgccgtcgccggcggcggtcgagccacgcgcgcacgccgctgaggaacccggagagggcggcggcaatggagcagctgcggacgttcgggcgggagctggcgatggggtcgcagggcgggtgggggcagtccaaggatttcctcgacctcgtcaagtctatcggcgaggcgcgctccaaggcggaggaggaccgcatcatcgcgcgcgagctcgagcacctcaagcgccgcctggccgaccccgacgtgccacgccgcaagatgaaggagcttctcctccgcctagtctacgccgagatgctcggccacgacgcttccttcggccacatccacgccgtcaagatgacccacgacgagtcgctaccgctcaagcgtaccggctacctcgccgtcgcactcttcctcgacgagcgccacgacctcgtcatcctcgtggtcaacaccatccagaaggacctcaggtcggacaactacctcgtcgtctgcgcagcactcaccgccgcgtgccgccttattggtgaggaggccatccccgccgtgctgccccaggtcgtagatctgctcgtgcaccccaaggaggctgtgaggaagaaggccgtcatggcattacaccggttctaccagcgatcctcctcctccgtttcccacctcgtctccaacttccgcaagaggctatgtgataatgatccaggggtaatgggtgcaactctatgccccctctatgacctgatttcggaggaaccaaattcgtacaaggatttggttgttagtttcgttaacatcctcaaacaagttgctgagaggaggcttccgacttcctacgattatcaccaaatgcctgcaccatttattcagtggtgataaacaagcaagtggacatatgtacactgtattgggcgacatattcaagaagggtgacactgcgagcaacattggcaatgctatactgtatgaatgcatatgctgcatttcatccattttcccaaaccctaagatgctagtggctgcagctgaaacaacatcaaagtttctgaagagtgatagtcataatcttaagtacatgggcattgatgctcttggcaggttaataaaaataaatccagatattgcagaagagcaccagctggctgtcattgattgcttagaggacccagatgacactttgaagcgcaagacatttgagcttctttataagatgacaaagtcaacaaatgttgaggtgattgttgataggatgattgagtacatgatcaacataactgatcatcattacaagacagaaattgcatcacgttgtgtcgaactcgcagagcaatttgcgcctagcaatcagtggttcatccagaccatgaacagagtttttgagcatgctggagatcttgtcaacatcagagtggcacacaatttgatgcggctaattgctgaaggctttggagatgaggacgaaggtgctgacagtcagctaagatcatcggctgtagattcttatgtccgcattgtcggagagccaaagcttccttcttctttccttcagataatatgctgggtgttgggggaatatggaacagcagatggaaaacattcggcttcttatattattgggaaattgtgtgatgtggcagaggcccacctcactgatgacactgtcaaggcgtatgcaatctcagcaattctgaagatatttgcgtttgaaatcgctcttggaaggaggattgatttgctgcctgagtgtcaaacattggtagatgaattgttagcttcacattcaacagacctgcagcaacgggcatacgagctacatgctttactaggcttgggcaaaaatgatgttgaaagtgttatgcctgcagatgcaagctgtgaagatattgaggtcgacagaaacctctcatttctagacagttatgtgcagcaagccttggaaaacggtgcatcaccttacattccagagagtgaacgctctggtcttacaagtgttggcagctacagaagccaagaacaacaggaaacatctgcccatactcttagattcgaggcctatgagatgcctaaaccttctttgccactagcaacttcacaaaccagcatgtccacaccaaatactgaccttgttccagtttcagagccaggctactataaggaagaccatcaaacatcaaggcctcaaccaccaagcgatgcggtttctggtgagtttggtgtcaaactccgccttgatggggttcaaaagaaatggggaaggtcaacatattcctcttccacaccctcaagctcgatgtccagtcaacaaacaacaaatggggcctctcattctgatgggggagggccaagttcacagccacgggagtcctcatacggttcgaagagacagcagggcacagaagtctcagcagaaaagcaacggctggctgcttcgctttttggttcggcagcagctagagctgacaggaaagcacaagcttctcgaaagacagggaaggacagtccctcaactgagaaagtagctaccactaatgtggctgcccagtctgttaaggagcaagtaatcccagctgctgcaccaccgcctgatctgctggatctgggtgacgagacagttccatcgagccgtccatcggctgaccctttctcacagttggtgggtcttcttggaccagcatctgctgctccggcgctttctgggactccggctaccactaccagtacttccaaagcaccagatcttatgtcaatcttctcagatgatgtaccaactggagtgactagtagtgggtccaccgatcccactccaggtgatgctatttcggtgagctcccacaaaggagcgacggcagtggcaccaaagaagggctcgagccttcaagatgccttgcaaaaggactcgactgcacggcaagtaggtgtgacaccgacagggaacaaccccaatcttttcaaggacttgctaggctaaaggggacagtaaggcacaccgtatgctccgcgtggcctctttgggtagatggagttcatctccgacatgtctcgatcactgaaacagcgatgatctcgctgtttgatcagcgtaggaaaagggttgcaacttgcaagggctatatttgttctcgagtcacaagacacgacctgtcctccttccagttgggaggggggttgcgctgttgagatctgtgaatggttgcgggtatttttcctttaacctcttgtgattttgtgctgagactattgtacatgtgtttacatgacgtgtaatctgtacatgagaccgtggtacagaagcgtgtgccggcgcatttttgttcagctgggctagatacactacaattgctgggcactggaaagtaaaacaatgaaagaattggtgtcattctctggctggaataaaaatataaaacggtaaatgtgtagtgttgtttattgttgatgaaaacagtcgcagatttgtttttgcaacttttaactgttgagaagtaatgcaattctttttttttcggttccattcaaacctacttgctgcgtagggccatggcccatggggcattcagtattttctctcataaaaaggtctactactattcttttctggttctatttagtcgagatcgttgtttttgtctagggagtctctaggtggtcgatggagatctaacggcatcacttcatctgatttcttgcgtcatcgccttgtcgggtaatcgtagccggcagggaccag

SEQ ID NO: 201283 - DNA, 3910 bp, Zea Mays
aacaaattcagtaaaagaacggagaaaaaaaaaaagagaagtccctcccattcgtcgctaatcacaatcccgatctccaagcaaacccacctcccgtcagttccctactcgccgatccagatctcctacagctttccactccgccactccaaccggacgcctccgccgtcgccggcggcggtcgagccacgcgcgcacgccgctgaggaacccggagagggcggcggcaatggagcagctgcggacgttcgggcgggagctggcgatggggtcgcagggcgggtgggggcagtccaaggatttcctcgacctcgtcaagtctatcggcgaggcgcgctccaaggcggaggaggaccgcatcatcgcgcgcgagctcgagcacctcaagcgccgcctggccgaccccgacgtgccacgccgcaagatgaaggagcttctcctccgcctagtctacgccgagatgctcggccacgacgcttccttcggccacatccacgccgtcaagatgacccacgacgagtcgctaccgctcaagcgtaccggctacctcgccgtcgcactcttcctcgacgagcgccacgacctcgtcatcctcgtggtcaacaccatccagaaggacctcaggtcggacaactacctcgtcgtctgcgcagcactcaccgccgcgtgccgccttattggtgaggaggccatccccgccgtgctgccccaggtcgtagatctgctcgtgcaccccaaggaggctgtgaggaagaaggccgtcatggcattacaccggttctaccagcgatcctcctcctccgtttcccacctcgtctccaacttccgcaagaggctatgtgataatgatccaggggtaatgggtgcaactctatgccccctctatgacctgatttcggaggaaccaaattcgtacaaggatttggttgttagtttcgttaacatcctcaaacaagttgctgagaggaggcttccgacttcctacgattatcaccaaatgcctgcaccatttattcagataaaactattgaagatacttgctgtgcttggcagtggtgataaacaagcaagtggacatatgtacactgtattgggcgacatattcaagaagggtgacactgcgagcaacattggcaatgctatactgtatgaatgcatatgctgcatttcatccattttcccaaaccctaagatgctagtggctgcagctgaaacaacatcaaagtttctgaagagtgatagtcataatcttaagtacatgggcattgatgctcttggcaggttaataaaaataaatccagatattgcagaagagcaccagctggctgtcattgattgcttagaggacccagatgacactttgaagcgcaagacatttgagcttctttataagatgacaaagtcaacaaatgttgaggtgattgttgataggatgattgagtacatgatcaacataactgatcatcattacaagacagaaattgcatcacgttgtgtcgaactcgcagagcaatttgcgcctagcaatcagtggttcatccagaccatgaacagagtttttgagcatgctggagatcttgtcaacatcagagtggcacacaatttgatgcggctaattgctgaaggctttggagatgaggacgaaggtgctgacagtcagctaagatcatcggctgtagattcttatgtccgcattgtcggagagccaaagcttccttcttctttccttcagataatatgctgggtgttgggggaatatggaacagcagatggaaaacattcggcttcttatattattgggaaattgtgtgatgtggcagaggcccacctcactgatgacactgtcaaggcgtatgcaatctcagcaattctgaagatatttgcgtttgaaatcgctcttggaaggaggattgatttgctgcctgagtgtcaaacattggtagatgaattgttagcttcacattcaacagacctgcagcaacgggcatacgagctacatgctttactaggcttgggcaaaaatgatgttgaaagtgttatgcctgcagatgcaagctgtgaagatattgaggtcgacagaaacctctcatttctagacagttatgtgcagcaagccttggaaaacggtgcatcaccttacattccagagagtgaacgctctggtcttacaagtgttggcagctacagaagccaagaacaacaggaaacatctgcccatactcttagattcgaggcctatgagatgcctaaaccttctttgccactagcaacttcacaaaccagcatgtccacaccaaatactgaccttgttccagtttcagagccaggctactataaggaagaccatcaaacatcaaggcctcaaccaccaagcgatgcggtttctggtgagtttggtgtcaaactccgccttgatggggttcaaaagaaatggggaaggtcaacatattcctcttccacaccctcaagctcgatgtccagtcaacaaacaacaaatggggcctctcattctgatgggggagggccaagttcacagccacgggagtcctcatacggttcgaagagacagcagggcacagaagtctcagcagaaaagcaacggctggctgcttcgctttttggttcggcagcagctagagctgacaggaaagcacaagcttctcgaaagacagggaaggacagtccctcaactgagaaagtagctaccactaatgtggctgcccagtctgttaaggagcaagtaatcccagctgctgcaccaccgcctgatctgctggatctgggtgacgagacagttccatcgagccgtccatcggctgaccctttctcacagttggtgggtcttcttggaccagcatctgctgctccggcgctttctgggactccggctaccactaccagtacttccaaagcaccagatcttatgtcaatcttctcagatgatgtaccaactggagtgactagtagtgggtccaccgatcccactccaggtgatgctatttcggtgagctcccacaaaggagcgacggcagtggcaccaaagaagggctcgagccttcaagatgccttgcaaaaggactcgactgcacggcaagtaggtgtgacaccgacagggaacaaccccaatcttttcaaggacttgctaggctaaaggggacagtaaggcacaccgtatgctccgcgtggcctctttgggtagatggagttcatctccgacatgtctcgatcactgaaacagcgatgatctcgctgtttgatcagcgtaggaaaagggttgcaacttgcaagggctatatttgttctcgagtcacaagacacgacctgtcctccttccagttgggaggggggttgcgctgttgagatctgtgaatggttgcgggtatttttcctttaacctcttgtgattttgtgctgagactattgtacatgtgtttacatgacgtgtaatctgtacatgagaccgtggtacagaagcgtgtgccggcgcatttttgttcagctgggctagatacactacaattgctgggcactggaaagtaaaacaatgaaagaattggtgtcattctctggctggaataaaaatataaaacggtaaatgtgtagtgttgtttattgttgatgaaaacagtcgcagatttgtttttgcaacttttaactgttgagaagtaatgcaattctttttttttcggttccattcaaacctacttgctgcgtagggccatggcccatggggcattcagtattttctctcataaaaaggtctactactattcttttctggttctatttagtcgagatcgttgtttttgtctagggagtctctaggtggtcgatggagatctaacggcatcacttcatctgatttcttgcgtcatcgccttgtcgggtaatcgtagccggcagggaccag

SEQ ID NO: 201284 - DNA, 1139 bp, Zea Mays
tcatgactttggatacccacagacaacctctactgaagttctcaagtcgtacatattcaatgaacccattatggttgatgctggaaggctgccaccgcttggtcctgctgctatgttcatgcaaggcacgaagcgtatgcctggtacagctgttacaaaatctgttgttgctactgagcctggggggaagaagagggaggaaatttttgttgatatcattgagagaattagtgtaacattcagctcgagtggctatatacttacatctgagattgatggaacaattcaaatgaaaagttacctcactggcaatccggaaatccgtcttgctctcaatgaggatttgagcatcggaagaactggatcttcttcatacgattacagaagttcttctggaggaggaacagtcattcttgatgattgcaatttccatgagtcagtacatctggacagttttgatattgacagaactttgactttaattgttggtggttctgagcacaccctccgtgcaaagctgacattttctcaggagtcacatgggaatatcacaaaggaagctggcccagtgaacatgaatttcactataccgatgtacaatgcatcaaagttgcaggtcaggtatcttcagatcgcaaagaaatcgaaggcatacaacccttatagatgggtgcgatacgttacacaagccaactcctacgtagctcgtctatgaggaatcagcatctgtactcttgtttccagtccattttttttgggtgtaatatttgagcgttatcatggacatagtggcgtgtattgtgtaactgtatattgaggttcgcataccgctcagctcctgtagtaacaattgtttttcgtcgtgcaatgtgcagatgaataattcatgttctaatgctgcaaaactgattgaggcgagtacctattgtcttgcataattcctgcgaggttttagaaactgtgaactgacctcgcctgtgggacattgggtcctattgtttcgcataatttctgcaaggttctagaaactatgaactgagctttggccagtaaagctctttgtattaaagtaataatgtattttcagttgagttcaggtactcatgtattcccgttttttttccccaaaaggatatttg

SEQ ID NO: 201285 - DNA, 3924 bp, Zea Mays
cccccgtcttcccctcagatctacgatccttatccccggttccccgtattctcctctctctcctcagccccagtcgaggagacgccgctgcggctctcgtcccatgttccaatgattgttaggtgattgagacttgagagggtctggaggctaccaactggtttggtggctcggccaagccgagcggttccacgctgttcttgccgcctggtgccggagtttctatgtcgaaggctgtgttcggagtttctgcgttgaaggcggtgttctgctgattggagaaactggtttggtgcggatgtttgatgccgtgttggttatagggaccgggagggtgggtgctggcatgaatttggttttctgtcgattcaattggtgcttaatttgagcctttggaggctttttgggatcagggagttggtctccgtcgaaggaggctgctagcttgcaggctcatcgccattggcgccggacctgcctgtcgtacggtctttcctgtgccgaagtttttgctgctgtgaaaacgctttaagcgattacctttggcgacctttccatgcaaaggcttgaccttttgggttccggaactgattggtggtcgaggagtcttggagtgctggtctacctgcattatcaacagggcatttctgcagaacaaaagttgtatcctgtgcagatagccagatactgctttgctagtgtattaaattgcttcttgtgtttgaacaaagattctattcagccagaagacagtgctcttctttatatcctgtccggagctcaatacagtgctccaaatccatatcagcctgctaggagtggataaggatctttgcctcaacgagtggagcaaaaccatggatgtgcctacgcctcccaaccgtgccggctgcaacagtaacatcagcaacatcggcagccccatgcaatcttttgatgatccctttggtggtgctgccatgacgagctttgatggatactcggagctcagcagcccatcagttgctgatcacatattctccctgctgaatgatccctcgtctgtgcaacatatgtttgccttgtggtcatcttcggggtcatctccgcgtgcttctgctgtgagagaagacatgtcgtttgacacctatcctggacctatggacgtgacagcatcacttgctcaaaggatcaactcagcatcagtattcaatccaactgaagtggacagaggactaaaagactcagatgggcttgttccaaataatggttcacaacaagggagtagcatcattccgaggtcggttggcaacattcttgcagacaggatgctcatggcgctatctttgttcaggaagtcattgagcgatggtgttcttgcccaagtctggatgcctgttgagcacaatggtcgtgtcgtgttgagtacatccgagcagccctatttacttgaccaggatcttgcaggttacagagaagtttctagaaatttcttgttttcagttaaggaggagcctggtctgcacctagggcttccagggagggtcttcatatctggggtgccagagtggacctcaagtgttacgtattacagtaagccagagtatttgagaatggagcatgctcttcttcatgaaatacgagggtcacttgctatgccagtttatgatcccagcaagggttcttgttgtgcagttcttgaacttgtcacaaacaaggagaaacctgattttgatgcagagatggacattggtgtgaacttgcagacaacaacagatcgcagcaatcagaaggtttactctgaaaatcagaaatatgcttctacagagattttggatgttctaagagctatttgccatgcacatatgcttcctttggcccttacatggatccctacatcaaacggcaccgctaatggtttttgtgtcgcaaagaatatcaggcttgattcgcaaccaggaaaatcagtacttcgtatccatgaatcagcttgttatgttaacgatgcaaagatgcagggatttcttcatgcatgtgctgaacgtcatcttgagaaagggcagggtattgcaggccgagcccttaaatctaatcttccattcttttcgcctgatataagagagtacagtatcgaagactacccgcttgcacaccatgctcgtaagtttggtctgcatgctgctgtagccatccgactgaggagtacgtacactggtaaggatgactacatactagaattctttctcccagtcaactgcaagggctgtggagagcagcagatgttattaaacagcctttccagcacaatgcaaagaatatgcaaaagcttgcgaacagtttctgaagcagagaccgatagtgttagtgctactgaaccaatgtatgagaagactaatggaagttgtttaccaactggtaactctgaaagttcctcacatgatgaccagccaatcacagaatctgcattccatgatctatcttcgggtgacaaacaaggagacagagaacctgctaaggcacggagtagctcaaagcgagttgcagagaaaaaacgcagtacatctgaaaagaattttagtctggatgttcttcgcaaatacttttctgggagcctcagggatgctgcaatgagccttggcgtttgtccaacaactttgaaacgaatatgcagacaacatggaatttccagatggccatctcgaaagataaacaaggtcaaccgttcactgaagaagatcgagaaggtcatcaaatcggttcatggtgtggacagatccttgcagtacgatcctgccactggatctcttgttccagcaacctcccttccggataagatgcctacctcatctgcgggcgtaaaaacagtggaggaaaaatctagcccagaaccaggacaggatttctcttcgcctgatggatggcaaagagaaagtagccaacttcatgcctccagtatacctacaagggtaggtgatgaagtccaaatgctggcaatcaacaacgaaggcagcaggaactatgcttctggtatcgcaaatatcgcgcagcattcaaactccgaagacgcacacggtcctttatatcccgtcggtgctgttaattcttcgcgtaccggagaaacaggctacatcgattctccaacctccctccacatggatagcgtcgaaggccaaacaacggtgagggactcaagatctgtacagcaagcagatgtcaccatggccaccaaggagcagacccttccctccacctctggcacaaccgattcttcgagcggcagcgcctcaagtcagcctgctttcaaggggaacccaggacgtgccctcaaagttagcagcagcgatgcactgacggtgaaagctacctgtaacggcgacaccgtgcggttcaagttcctgccggcaatgggctggtaccacctgctggaagaggtagcgaagaggtttaagctggcgacaggagcgttccagctcaaatacaaggacgacgaggacgagtgggtgatcctggcgaacgacgccgacctccaggagtgcgtggacgtcctggactcgatcggctcgcgcagcgtgaagctgcaggtgcgcgacctcccctgcctcgtcagcagctcgggcagcagcagctgctgcttgcaggtggaaggaagcgcctagctcatgacggcaggacggaagcctgggtcatggcacgttgactgttgtagtaggttttagccttctgctgtcgccgtaatggatccatgtctacgctcaatacaaaatggcgagtgcagaaaaggagaagtgtaatactcgtcgcacggctgaaacaatgccgtgaaggccttgccataatctgttgtttgttcacaaaagtcgtggcaataatctgttgccatgaatatgggaggttttaagacgcgacaccaagtttctgagcttgctgtgttccgaattttcagaa

SEQ ID NO: 201286 - DNA, 3949 bp, Zea Mays
attccttcccccgtcttcccctcagatctacgatccttatccccggttccccgtattctcctctctctcctcagccccagtcgaggagacgccgctgcggctctcgtcccatgttccaatgattgttaggtgattgagacttgagagggtctggaggctaccaactggtttggtggctcggccaagccgagcggttccacgctgttcttgccgcctggtgccggagtttctatgtcgaaggctgtgttcggagtttctgcgttgaaggcggtgttctgctgattggagaaactggtttggtgcggatgtttgatgccgtgttggttatagggaccgggagggtgggtgctggcatgaatttggttttctgtcgattcaattggtgcttaatttgagcctttggaggctttttgggatcagggagttggtctccgtcgaaggaggctgctagcttgcaggctcatcgccattggcgccggacctgcctgtcgtacggtctttcctgtgccgaagtttttgctgctgtgaaaacgctttaagcgattacctttggcgacctttccatgcaaaggcttgaccttttgggttccggaactgattggtggtcgaggagtcttggagtgctggtctacctgcattatcaacagggcatttctgcagaacaaaagttgtatcctgtgcagatagccagatactgctttgctagtgtattaaattgcttcttgtgtttgaacaaagattctattcagccagaagacagtgctcttctttatatcctgtccggagctcaatacagtgctccaaatccatatcagcctgctaggagtggataaggatctttgcctcaacgagtggagcaaaaccatggatgtgcctacgcctcccaaccgtgccggctgcaacagtaacatcagcaacatcggcagccccatgcaatcttttgatgatccctttggtggtgctgccatgacgagctttgatggatactcggagctcagcagcccatcagttgctgatcacatattctccctgctgaatgatccctcgtctgtgcaacatatgtttgccttgtggtcatcttcggggtcatctccgcgtgcttctgctgtgagagaagacatgtcgtttgacacctatcctggacctatggacgtgacagcatcacttgctcaaaggatcaactcagcatcagtattcaatccaactgaagtggacagaggactaaaagactcagatgggcttgttccaaataatggttcacaacaagggagtagcatcattccgaggtcggttggcaacattcttgcagacaggatgctcatggcgctatctttgttcaggaagtcattgagcgatggtgttcttgcccaagtctggatgcctgttgagcacaatggtcgtgtcgtgttgagtacatccgagcagccctatttacttgaccaggatcttgcaggttacagagaagtttctagaaatttcttgttttcagttaaggaggagcctggtctgcacctagggcttccagggagggtcttcatatctggggtgccagagtggacctcaagtgttacgtattacagtaagccagagtatttgagaatggagcatgctcttcttcatgaaatacgagggtcacttgctatgccagtttatgatcccagcaagggttcttgttgtgcagttcttgaacttgtcacaaacaaggagaaacctgattttgatgcagagatggacattgtttgtgatgccttgcagggtgtgaacttgcagacaacaacagatcgcagcaatcagaaggtttactctgaaaatcagaaatatgcttctacagagattttggatgttctaagagctatttgccatgcacatatgcttcctttggcccttacatggatccctacatcaaacggcaccgctaatggtttttgtgtcgcaaagaatatcaggcttgattcgcaaccaggaaaatcagtacttcgtatccatgaatcagcttgttatgttaacgatgcaaagatgcagggatttcttcatgcatgtgctgaacgtcatcttgagaaagggcagggtattgcaggccgagcccttaaatctaatcttccattcttttcgcctgatataagagagtacagtatcgaagactacccgcttgcacaccatgctcgtaagtttggtctgcatgctgctgtagccatccgactgaggagtacgtacactggtaaggatgactacatactagaattctttctcccagtcaactgcaagggctgtggagagcagcagatgttattaaacagcctttccagcacaatgcaaagaatatgcaaaagcttgcgaacagtttctgaagcagagaccgatagtgttagtgctactgaaccaatgtatgagaagactaatggaagttgtttaccaactggtaactctgaaagttcctcacatgatgaccagccaatcacagaatctgcattccatgatctatcttcgggtgacaaacaaggagacagagaacctgctaaggcacggagtagctcaaagcgagttgcagagaaaaaacgcagtacatctgaaaagaattttagtctggatgttcttcgcaaatacttttctgggagcctcagggatgctgcaatgagccttggcgtttgtccaacaactttgaaacgaatatgcagacaacatggaatttccagatggccatctcgaaagataaacaaggtcaaccgttcactgaagaagatcgagaaggtcatcaaatcggttcatggtgtggacagatccttgcagtacgatcctgccactggatctcttgttccagcaacctcccttccggataagatgcctacctcatctgcgggcgtaaaaacagtggaggaaaaatctagcccagaaccaggacaggatttctcttcgcctgatggatggcaaagagaaagtagccaacttcatgcctccagtatacctacaagggtaggtgatgaagtccaaatgctggcaatcaacaacgaaggcagcaggaactatgcttctggtatcgcaaatatcgcgcagcattcaaactccgaagacgcacacggtcctttatatcccgtcggtgctgttaattcttcgcgtaccggagaaacaggctacatcgattctccaacctccctccacatggatagcgtcgaaggccaaacaacggtgagggactcaagatctgtacagcaagcagatgtcaccatggccaccaaggagcagacccttccctccacctctggcacaaccgattcttcgagcggcagcgcctcaagtcagcctgctttcaaggggaacccaggacgtgccctcaaagttagcagcagcgatgcactgacggtgaaagctacctgtaacggcgacaccgtgcggttcaagttcctgccggcaatgggctggtaccacctgctggaagaggtagcgaagaggtttaagctggcgacaggagcgttccagctcaaatacaaggacgacgaggacgagtgggtgatcctggcgaacgacgccgacctccaggagtgcgtggacgtcctggactcgatcggctcgcgcagcgtgaagctgcaggtgcgcgacctcccctgcctcgtcagcagctcgggcagcagcagctgctgcttgcaggtggaaggaagcgcctagctcatgacggcaggacggaagcctgggtcatggcacgttgactgttgtagtaggttttagccttctgctgtcgccgtaatggatccatgtctacgctcaatacaaaatggcgagtgcagaaaaggagaagtgtaatactcgtcgcacggctgaaacaatgccgtgaaggccttgccataatctgttgtttgttcacaaaagtcgtggcaataatctgttgccatgaatatgggaggttttaagacgcgacaccaagtttctgagcttgctgtgttccgaattttcagaa

SEQ ID NO: 201287 - DNA, 453 bp, Zea Mays
ctaaatttaaagtgctagtgctgcagcacattgatggtgagcgattgagcccttgggtatcagtcgggtgcttggctatgggaatatccactattttcttctaaggccgaagttttaatctccacaaatttagtctaggacgcagcaccttgtttcacttgtagagaaaaaaaaaactattgtaagcattttgcttcagtttttaatggtgggcactgtaagatctgtatctgcactgagatttctgatattaacaaaaatgttttctcataagatttctgagaaaaaaaaaactttgtagaccttgtagctgtttgaagagtggtaattgatgaactgctgagagaaaaatttgatgttccagtagtgtggccgtgagtgatcagatccattaaactgtaacatttgttgttcggttctctcgagttcaatcccagaaatcttatgagaaac

SEQ ID NO: 201288 - DNA, 676 bp, Zea Mays
cacagcccacacacatcacagcagcaacagccgaaacagcaacagcctacctcttcgtgaatcgtgtcccttcccttggctgcagctgcaggatccaagcaacgcggaaggagggagtcggcgctgttcaacttcaactccttcctgaccgtggtgttgctggtgatctgcacctgctcctacatcaagatgcagttcccggcaatcctcaacgaccgcaccggattccgtggtttcttttggaaagctgccaggataggtgagcgattgagcccttgggtatcagtcgggtgcttggctatgggaatatccactattttcttctaaggccgaagttttaatctccacaaatttagtctaggacgcagcaccttgtttcacttgtagagaaaaaaaaaactattgtaagcattttgcttcagtttttaatggtgggcactgtaagatctgtatctgcactgagatttctgatattaacaaaaatgttttctcataagatttctgagaaaaaaaaaactttgtagaccttgtagctgtttgaagagtggtaattgatgaactgctgagagaaaaatttgatgttccagtagtgtggccgtgagtgatcagatccattaaactgtaacatttgttgttcggttctctcgagttcaatcccagaaatcttatgagaaac

SEQ ID NO: 201289 - DNA, 3974 bp, Zea Mays
ctcaggttcaactatttcggttgcataccttgacgcttccccaacgcatgactccattctttcccgggcctccccaaacaatacggcaagaactcccgagaaaggtttctagctcacaccaatggcgactctgtctcttcgtctacacaccaaggccggcgccgctcctctctggcgacaaaggcaacgacggcatggttcccttgagaggaccaccagccacccggtgaagcatgctgggaaactgcaggcgagctacaggggccttgaggcactgtatgacgatgggtaccagaatgtgaaggacctaggctactactacgaatcacttggcgagctggtggagcatgacactgggccggcgcgatggttttgcccggtccaccccggctccccgatcgaggatgctcctctaatgctatatttgcccggcatagatggaatggggatgggactcttcatgcatcacaaggcacttggaaggatttttgaactaagatgcatgcacgttcctctccatgatcgcacgccatttgaagatcttgttacaatggtagaagatgttgtaacagaagagcatgctacttctcccaataagcccatctatctactggggaattcttttggagggtgtttggcgcttgcagtagctgctcgtaacccacatattaatttggtattggtactagtgaatccaggtacattctgaaataaatcatttcaattgtatgaatattcatagttttataattgaaaaaaaaaagacttacctgtaagtttccccttcctttgtcactgcgaaagcaacatcatatgagaagtcacgcatccaacagcttctatcgctcttgagcctgttctctgatcaagcatgcatggcagttacagctctactgaactacaacatcggtatgtaccctagaaataagcatggtagtaggtctacttgagagtaagtttttgtaaattggaatcagaggacttgcatgtgttttattgtatcttccataaatctaacatacaattgtttggtgtgtcacattctttatatggttgtcttataataagatggtacattttcatgtctttagttactttctaacagtttgtgtttgtttcttctgttgttcttcatcataagaccagacaatgaactggacatggcagtgagtagcatgctaaatgggaagcatccgctagcagcacttaacagaatgacaaataacatgacatcattcctgaagcattcgaacatacttgacaaaataccagaggatacacttaaatggaaaatgaagctgatcaaacgggctgcttcttacgccaattatcgtctacaatcggttcaggccgatgtgctactgttagtcagctgtgctgacaggttacttccaagcaaagacgaagctgacaggctgcagaggttgttaccaaagtgtaaaatctacttctttgagaagcacgggcacagcttactactggaatacggtgttcatgttgcaagtatcatcaagtgcactgacctctaccgccactcgaggcagcaccaccgggtgttcgactacatccctccatctgcaactgaactaaacgaagtagacaaagctacgtgtgatctgagattcaggacttgcccagcgatgtactccactctggaggacggcacagtggtgaggggcctcgctggagtgccccaggacggcccagtgctgctggtcggcaaccacatgcttctggggatcgagctcatctcgctggcggcggagttcctgcggctgaagcgggtggtggtgcgcggcatcgcgcacccgctcctgttcccaaacaagaagagagcgtggtctgagggccatgacttcttcgacttcctcaacctgtggggcggcgtgcccatgaggtacaagtccatctacgacctgctgcgcgccggcgagttcgtgctcctctaccccggcggccaccgggaggcgctgcattgcaagggcgaagagcacaggctgttctggccaacccagacggaatttgttaggctggcagcacagtttaacgcaacgattgtgcctttcggagtcgtcggggaggatgatctgttagaactgctctgtactttcgacgacatcaggaatgcacccttcggcaaggaaatgatccaagcgtacagcaaccatctgaagctaagggacgttgaccatgaggtgatcttcccgggaatgtatctgaaaatgccgggccggttctactaccaattcgggaagccgattccgactagagggaggcaggacgtcctgaccgataagcatgctgcgcatcatctctacatgcatgttaaatcggaggtggagcgtatcatctcctacttgctggagaagagggtggaggacagatacaggaacctcatcccaagaatgttgtaccaggctgctcggggaccgacgtgtgaagtcccagcgtttgatccctaattcaatagtgacttaaattagttatatatcataaaaaatagtgttcaatctataaaaaacaactctaaaaacatcctattttacaaatttctgtaaaaaaatataaaaactattgagaacaccataaagtaacttaaatatacaacacccgaattagtgttatgttcttaatttccacatcatcttcgaacttttgtttctaataatatatattttttaaagtacatgatttagtactcacctcaattctttttgagcgctctaaacactaatggtgtagttttttttattttggaggcactgtttcaaggatgcatattattagagatactgtctctaacagcatgcatgtacagccatggtcggtttgctgtcgtgtactagaaagtagaaatccttacataaacagctgaacaaacaacttatacagttggtcatctatttagttgcaattgaactgtttagggtgtttggtttctatgtgcaagatagatgacagcacctttttatcctcttccttaccgggaaggcgcacttctcttcttcttctggccttcacctcctgcccggcccagaaatagaacccagccccctttctgatccattcatttctgcaagcaggcgggatccagagctaagcccccctcctattcgaagccgggtgtggcctcgcccttttgctcttccttcggtttggctccacgaaggcgccgcctagactaggagccccactcatattcaaaaggcgcccagctttcaagacgatgataataagtagttaggctgccattattccaatatcatggaatagcatggcccggggctaaggtaactccagtgggagagtcgtgttatgggtgaccttattgcacggttcagagagcacttgtgtatgtgatgcaagtgaacgtgtacgaaaaagctgtcgtaaagtttcgttgttcgttccgtcgttgaccctatctatgtttctacgatggcccaagaacacgctcattcttcagccgtagagagacttgtgaattgtgaggtaccattacgagctcaatatatacgagtgttattctgtgaaataactcgaatttcaaatcattcacttgcttcaactactcatgctatggatgtgggagcatcaactccgttcctttgggcttttgaggagcgggagaaattgttggaattctatgaaagagtcccgggagccaggatgcatgccagtttcatacgacctggtggagtggcacaagatctgcctcttggcttatgtcgagatattgattcctccacacaacaatttgcttctcgtatcgacgaattagaagagatgtcaaccggcaaccgtatctggaaacaacgattagtggatattggtactgtcactgcacagcaagcaaaggattggggattcagtggtgtaatgttaagaggtcgtgcgacatgaagacactgatagcaatatgggggaagttcccatcaggcaacaacggttctgcccgaccctacaaaagcatt

SEQ ID NO: 201290 - DNA, 1591 bp, Zea Mays
gcacatttctcttctggaacataagtagcgtgcaaacttcgaccgggaccggcgatatccgccatggccaccaccactgccgccgctcgctggagcttccccgcccgtctccagctcctcaccagccgccgcttttgcttccccgcctcctctgccgcgccgcccagttctgtagcggggttcagttgggccgacgccctccgcgtcgctggggacggcgggcgcggcgacgagtccgacctctccgggtacttccggaaggtcaagagctgcaaccgcggaatggataaaaaagggcagttcgtgaagttctctgtggaggatcaggtcgtggggtacatccacaagggatttatcgaacacatcagagactttcatgatgtttttaccattgtcatggatgacaatggcagcaacactgtggagcatgtgtctctccagtcatcactaaggactccagaagaccgaacacatgctattggaagtgtcattaaaagccttggagaattgattccagctctacccagtaacgtcatcttatggcatgcctgtgtacttctctctggaacgtgctgctgctccttactttggtataaaagcttatggagttcatatgaatgggtatgttgagaaggatggtcagaaatttctttggattggtaaacggagtgatgtgaagcaaacatatccaggaatgcttgatcatcttgttgcgggtggcctgccatacggaatgtcctgcaaagagaatatcatcaaggaatgtgaggaggaagctggaatcacaagatccatatcaacaaatgctacttctgttggagcggtttcttatatggatattgaaggctttagatacaaaagggatgttctcttctgctatgacctccaacttcctgctgattttgttcctaataatgaagatggtgaggttgatagcttcagactagtccctgttatacatgctgcaaacattataaggaggacagattttttcaagccgaactgcaaccttgtgatcatcgacttcctcttccgtcatgggtacataaacccagattctcgttgttacttagatctgctgcaaagcttgaggagtggtgattgttcctaactctcttttgctgtccacatttataatcattgttcaatttaatgaaacaaaaaaaaaatcatggagtagtctggtattatggttgatcataatcataattatgcctgggactccattgtcattttagtatgaacagagcattcacgtgcggttggggattatgcctgggactccattcatcgagttccgttggttggggaagcttctccttcccaaagcatgacgcaagtgctcatcatgtgcggttgctggaggtgccatttctgttcttggattcagccctttgcttgcattggttgttctggttgagagcaaacttgttgcttgcattgacgtatgatcgtgaagtacaaagataggcaatcaaaggacatgaatgattatagaaatttaaaaataattatatcatcttttaattacaaaccaatttagtttatttttctgaatctcgagtttagatagaatattgttttgttagta

SEQ ID NO: 201291 - DNA, 1540 bp, Zea Mays
gcacatttctcttctggaacataagtagcgtgcaaacttcgaccgggaccggcgatatccgccatggccaccaccactgccgccgctcgctggagcttccccgcccgtctccagctcctcaccagccgccgcttttgcttccccgcctcctctgccgcgccgcccagttctgtagcggggttcagttgggccgacgccctccgcgtcgctggggacggcgggcgcggcgacgagtccgacctctccgggtacttccggaaggtcaagagctgcaaccgcggaatgatttatcgaacacatcagagactttcatgatgtttttaccattgtcatggatgacaatggcagcaacactgtggagcatgtgtctctccagtcatcactaaggactccagaagaccgaacacatgctattggaagtgtcattaaaagccttggagaattgattccaggtattcgaaatgagctctacccagtaacgtcatcttatggcatgcctgtgtacttctctctggaacgtgctgctgctccttactttggtataaaagcttatggagttcatatgaatgggtatgttgagaaggatggtcagaaatttctttggattggtaaacggagtgatgtgaagcaaacatatccaggaatgcttgatcatcttgttgcgggtggcctgccatacggaatgtcctgcaaagagaatatcatcaaggaatgtgaggaggaagctggaatcacaagatccatatcaacaaatgctacttctgttggagcggtttcttatatggatattgaaggctttagatacaaaagggatgttctcttctgctatgacctccaacttcctgctgattttgttcctaataatgaagatggtgaggttgatagcttcagactagtccctgttatacatgctgcaaacattataaggaggacagattttttcaagccgaactgcaaccttgtgatcatcgacttcctcttccgtcatgggtacataaacccagattctcgttgttacttagatctgctgcaaagcttgaggagtggtgattgttcctaactctcttttgctgtccacatttataatcattgttcaatttaatgaaacaaaaaaaaaatcatggagtagtctggtattatggttgatcataatcataattatgcctgggactccattgtcattttagtatgaacagagcattcacgtgcggttggggattatgcctgggactccattcatcgagttccgttggttggggaagcttctccttcccaaagcatgacgcaagtgctcatcatgtgcggttgctggaggtgccatttctgttcttggattcagccctttgcttgcattggttgttctggttgagagcaaacttgttgcttgcattgacgtatgatcgtgaagtacaaagataggcaatcaaaggacatgaatgattatagaaatttaaaaataattatatcatcttttaattacaaaccaatttagtttatttttctgaatctcgagtttagatagaatattgttttgttagta

SEQ ID NO: 201292 - DNA, 1205 bp, Zea Mays
gttaaatgtgattataccattagctgtagatgtggttgctattgttgagaggttggctactgtgaaacacaaattgttagttttgtctggaaagggaggtgttggaaaaagcacattctcagcccaactctcgtttgccctagctgaaatggaccatcaggttggccttcttgacatagatatatgtggccctagcatccctaaaatgctaggccttgaaggacaagatattcatcaaagcaaccttggctggtcacctgtgtatgttgagtccaaccttggtgtgatgtcgattggtttcatgctgcctaatccagacgatgctgtcatatggaggggtccccgcaagaatggactgatcaagcagttcttaaaggatgtcgattggggggagattgactatcttgttgtggacgctcctccaggaacatctgatgagcacatctcgatcgtgcaataccttcaagccacaggaatcgatggcgcgataatcgtcacgactccgcagcaggtctctctgattgatgtgaggaaggagataaacttctgcaagaaggtcggtgttcctgtcctaggtgttgtggagaacatgagtggtctgaggcagccgctttcagacctcagattcatcaagtcagatgaggcgggcaagacagatgcgacagaatgggccctgaactacatcaaggagaaagcccctgagcttctgtcggtcatggcctgcagtgaggtatttgatagcagcaagggaggcgccgagaagatgtgccatgaaatgggggttcctttccttggtaaggtgcccatggatccgcagctgtgcaaggcggctgaggaagggaggtcatgctttgctgatcagaaatgcagtgccagtgcgccggctcttcgaaacatcgtgaagaagctgatcaaggccgagtgagaaaataatgttggcctgctggggaatctggtagtgagaaatgagatgaaatgacagatgccagagttctcgttaccaatatatatatatgttacggcgttacacactgaatctgtattagtgcttgtgttggacctgtaagtttttgttcgtgaataatcagtgggtgcacagactattaaaagcttagtttctgctctaccaagtggactatgtttgcttgaacgatatgtactgtacgcaccagaactgaatgagagtgtacggtgttagcaatatc

SEQ ID NO: 201293 - DNA, 1308 bp, Zea Mays
ctcgttcttcctcctctgcctttctgcttaattgccctggaacacagtctgaggaggcaggcaaggcagatgcctgcgctgggtgccccaaccagcagatttgcgccaccgcccccaaggggcctgatcccgatgtggttgctattgttgagaggttggctactgtgaaacacaaattgttagttttgtctggaaagggaggtgttggaaaaagcacattctcagcccaactctcgtttgccctagctgaaatggaccatcaggttggccttcttgacatagatatatgtggccctagcatccctaaaatgctaggccttgaaggacaagatattcatcaaagcaaccttggctggtcacctgtgtatgttgagtccaaccttggtgtgatgtcgattggtttcatgctgcctaatccagacgatgctgtcatatggaggggtccccgcaagaatggactgatcaagcagttcttaaaggatgtcgattggggggagattgactatcttgttgtggacgctcctccaggaacatctgatgagcacatctcgatcgtgcaataccttcaagccacaggaatcgatggcgcgataatcgtcacgactccgcagcaggtctctctgattgatgtgaggaaggagataaacttctgcaagaaggtcggtgttcctgtcctaggtgttgtggagaacatgagtggtctgaggcagccgctttcagacctcagattcatcaagtcagatgaggcgggcaagacagatgcgacagaatgggccctgaactacatcaaggagaaagcccctgagcttctgtcggtcatggcctgcagtgaggtatttgatagcagcaagggaggcgccgagaagatgtgccatgaaatgggggttcctttccttggtaaggtgcccatggatccgcagctgtgcaaggcggctgaggaagggaggtcatgctttgctgatcagaaatgcagtgccagtgcgccggctcttcgaaacatcgtgaagaagctgatcaaggccgagtgagaaaataatgttggcctgctggggaatctggtagtgagaaatgagatgaaatgacagatgccagagttctcgttaccaatatatatatatgttacggcgttacacactgaatctgtattagtgcttgtgttggacctgtaagtttttgttcgtgaataatcagtgggtgcacagactattaaaagcttagtttctgctctaccaagtggactatgtttgcttgaacgatatgtactgtacgcaccagaactgaatgagagtgtacggtgttagcaatatc

SEQ ID NO: 201294 - DNA, 2066 bp, Zea Mays
aaaccgagcgcccaaaccctcgcttaaagtggcaagaggaactggagcagtggcgggactgccgctggaaggaagaacaaggaaagaggagatgacaaagcaaaaggaatcagggttgctggttggaacaagggcgacaagaagaaagaagacaaagggcgccaagtaagtgcgggatcgaagaggcggtggagtgagggagtgccccgggttggtgtgaagagggctgtgtctgggtttgacaggaggaagaggaagatcgatgatgactcgtgggatgatgacggtggcaaggatgtttcatcttccaaatcaaagtttaccagaaagtgttcttccacaataagccgtcgaaaggtttctcctggaaaaggtgacagattgaagtctcaaacgttgtatgaggatgactaccgtgcagggaaaaggagtattagcaaagtttctgatgttagtagaggggtcaagaatcgactggtgaattctgtagcatccaaagggaagaagcttggtgcatccgaaggagtcatacgaacaaagaagggtggtgctaaagaagttgatttggatgaggaggctgttaatagcaagaagtcagatgacttggatcttattattgaagaagagaagcctcgccctcgccttactcgagtactggaccagactggtaagaaaataaagcccgctaagaaggttgtagttcctgacaatgaggaacgtgctcctcctaagaagagaaagcgaatgaagctagatccttatgacacttcaaacaaacggattgaagattcttctatccaagatgtgcagagaaggttctcgtgaattgtacacctgaagaagagactgaaatgtcaataaatgcaaaatttcgtgctatacagccaagttcttcaatcctttcatatgtggaagataatttactaggtcgtaggcgcttaattgagataaaaaatgctggctacaatgtcaagatttctgctcctctggataacgttcccttctcaaccagcacagaacgtgaacgcatagaagacattgcgttcagaaataagctggaattctttgctgctgcaaagatctcttcctcattccccactccaacactcccagagatagcatttgcaggtgtatcgaatgttggtaaatcctcactcctaaattcacttacaagacaatggggtgttgtgcgaacatcagataagcctggacttactcagacaataaatttctttcaacttgcttcaaagttatgtcttgttgatttacctggatatggttttgcttatgcaaaggacgaagttaaggaatcgtgggaggaacttgtgaaagagtatgtttcgaccagagttggcctagaaagggtgtgccttcttgtgcacactaaacgaggaatgaaaccgttggactatgagcttgtagacttaatggaaaggcacaagacgccataccagattgtactgacaaaaactgatttagttttcccaattgatgttgctcgccgtgccatggaaatccaagagagcctgaagaggaataagtcagtggtaaacccagtgatgatggtgagctctaaaacaggagctggcatacgcaacctgagaggcgtgcttggaaagttagctcgcttcatcaaaccgtagcaaagctgcagccaatttcggagtctgcgtctgcgtcggtcgagaccgtgagaggaaactcacaccaggctgtcttaggcaggtgccgcgctacgtcaacgctctaaccagtccaccgccacaagctttgtctgcatcagtttagactatcgaacacttgcagcaagcgttcctagttaggttatgctttggagcctagctgtatcacaggccattccggtaggattgaactgttcaacttttgagtggattatgcgatgctcagattaatccatgaaatatttgagtttccccatttggatatacggaatcgtacatccttaaaaactattatgcatcgttccttgatgtacaatactttttcagtgatgattcatcactcatcagtcattgatgttttatgtgttcttcacgaaaaaggta

SEQ ID NO: 201295 - DNA, 2577 bp, Zea Mays
ctgctccctacgcagctacgctttactcccttcccctgcttcgtcctcgtttctcctcgaacccacccagcagcgccttcttccttcttcccgcccaacctcggccatgcccgtagcggcgctccgtcctcccccggtcgctgtcggcgcgggacgccgcagcgcccgactccaggcgcggttcgccctccgcgcgagctccctcgaggcgtcggcggcagtgacggtgacagtgaacgggtctgcagaggccgcggtggagaggaaggagaaggtgcaggaggataaggacaacgagggactgccggtgaaggaggagcaggagagggggctggaggtcctctacgacgacggcttcggctccgtgaccgtcaaggactacttcgcggcggccaaggtcctgtgccgggacgacggtgggccgccgcgctggttctctcccgtcgagtgcggccacccggccgtggaccaagcgccgctgctgctcttcttgccaggaatggatggcgtcggcacgggactcatcctgcaccacaagtctttgggcaaagtgttcgaggttcggtgcttgcatataccagtcaatgatcgtacaccatttgaaggactagtacaaatcgttgaaaatttgatcaagcacgagcatgatttatccccggacagaccgatatatcttgtcggagattcatttggcggatccctggcactggcagtggcagctcgtaatccgcagattgatttggttctcatactagtaaacccagctacatcatttgcaaagactccattgcagccagtattgcctctactggaatcagtgccaagcgagtttcatgctacagtgccgtatcttctcagttttgtcatgggtgacccactgaagatggctgcagttagcattgaaaacaacctatctcctccagaaactctgcagaaattgtcagacagtctcacatcaatgcttcctttgctttcagaactgtctgatattataccaagggatactcttctatggaagctcaaacttctcaaggcaggagcagcctatgcaaattctcgtctccatgccgtgcaagccgaggttctacttcttgccagtggtaaggacaatcttctaccaagcggagaagaagcggatcgactcttcaaggcactgaaaaactgcagagttcgatacttcaaggacaatggccatacactactgctggaggatggcgtcaacctgttaactgtcataaaaggagcgaacatgtatcggcgtggaaggcaaagggattctgtaaccgattatctcccgcctactctaagtgaattcaggcaaacatttgatgtggatcacaggctgttccaccttgcactgagcccagtcatgatgtccaccctgaaggatgggaaaatcgtccgcgggcttgccggtgtccctgacaaaggcccagtcttgttcgtgggctaccacgcgctcatgggcattgagctgagtcctctgtacgaggagttcctgagggagaagaggacagtcgtccgcggcatggcgcacccgttcctgtttgggaaaaagttcgagtcgtcgcgccaggagacgtcccgtttcgacactgtttctatgtacggtggactgccggtgaccccgatcaatatgtacaggttgttccagaggaaccaatttgttctgctctaccccggcggcgttcgggaagctctgcacaggaagggtgaagagtataagttgttctggccagatcagccagaattcgtaaggatggcggcgcgctttggtgtaactatcataccctttgggtgtgttggagaagacgacgttctcgaggtacatgttttgttaatccgtttgttcaactgaattctatatatagcagaacgcattagagcacatttttcttgctgcagttggttctggactacaacgatcagaagaacattcccgggctccgggaatggatacagtcgatcaacaaagaagccgagagagtgagcgtaaaaggagaggatgggaaccaggacatgtacctgccagctcttctcccaaaagtgcctggccgattctactacctgttcgggcagccgattgagatgaaagggatgggcaaccttgtcagagataggaagagcgcgaacgaggtgtatctacgcatcaaatcgcaggtggaggagatcatgtcgtatctcaagaggaagagggaggaagacccttacaggagcctaccgcagcgtgcactgtaccaggcaacatggggcgcctccgctcaggtccccacttttgagccatgaagattgggagtagggaagggcgtctgcgagcggactgcaattctttgacaagatgcaatgcgttctcatttctgaggagatctccctccctcatacgctgattacatatacggactacggactagtataccgcaaatattgtacatttttaggaaaaatatgaaatgatgtttttaaacaaaaaaaacgcactcagcacattatcttaaaacagatgcgttgagcacacaaaacgtcctcgcggacagtccgcggtccggacggtccacggtggtgacgcggacagtccgc

SEQ ID NO: 201296 - DNA, 2496 bp, Zea Mays
ctacgcagctacgctttactcccttcccctgcttcgtcctcgtttctcctcgaacccacccagcagcgccttcttccttcttcccgcccaacctcggccatgcccgtagcggcgctccgtcctcccccggtcgctgtcggcgcgggacgccgcagcgcccgactccaggcgcggttcgccctccgcgcgagctccctcgaggcgtcggcggcagtgacggtgacagtgaacgggtctgcagaggccgcggtggagaggaaggagaaggtgcaggaggataaggacaacgagggactgccggtgaaggaggagcaggagagggggctggaggtcctctacgacgacggcttcggctccgtgaccgtcaaggactacttcgcggcggccaaggtcctgtgccgggacgacggtgggccgccgcgctggttctctcccgtcgagtgcggccacccggccgtggaccaagcgccgctgctgctcttcttgccaggaatggatggcgtcggcacgggactcatcctgcaccacaagtctttgggcaaagtgttcgaggttcggtgcttgcatataccagtcaatgatcgtacaccatttgaaggactagtacaaatcgttgaaaatttgatcaagcacgagcatgatttatccccggacagaccgatatatcttgtcggagattcatttggcggatccctggcactggcagtggcagctcgtaatccgcagattgatttggttctcatactagtaaacccagctacatcatttgcaaagactccattgcagccagtattgcctctactggaatcagtgccaagcgagtttcatgctacagtgccgtatcttctcagttttgtcatgggtgacccactgaagatggctgcagttagcattgaaaacaacctatctcctccagaaactctgcagaaattgtcagacagtctcacatcaatgcttcctttgctttcagaactgtctgatattataccaagggatactcttctatggaagctcaaacttctcaaggcaggagcagcctatgcaaattctcgtctccatgccgtgcaagccgaggttctacttcttgccagtggtaaggacaatcttctaccaagcggagaagaagcggatcgactcttcaaggcactgaaaaactgcagagttcgatacttcaaggacaatggccatacactactgctggaggatggcgtcaacctgttaactgtcataaaaggagcgaacatgtatcggcgtggaaggcaaagggattctgtaaccgattatctcccgcctactctaagtgaattcaggcaaacatttgatgtggatcacaggctgttccaccttgcactgagcccagtcatgatgtccaccctgaaggatgggaaaatcgtccgcgggcttgccggtgtccctgacaaaggcccagtcttgttcgtgggctaccacgcgctcatgggcattgagctgagtcctctgtacgaggagttcctgagggagaagaggacagtcgtccgcggcatggcgcacccgttcctgtttgggaaaaagttcgagtcgtcgcgccaggagacgtcccgtttcgacactgtttctatgtacggtggactgccggtgaccccgatcaatatgtacaggttgttccagaggaaccaatttgttctgctctaccccggcggcgttcgggaagctctgcacaggaagggtgaagagtataagttgttctggccagatcagccagaattcgtaaggatggcggcgcgctttggtgtaactatcataccctttgggtgtgttggagaagacgacgttctcgagttggttctggactacaacgatcagaagaacattcccgggctccgggaatggatacagtcgatcaacaaagaagccgagagagtgagggacagcgtaaaaggagaggatgggaaccaggacatgtacctgccagctcttctcccaaaagtgcctggccgattctactacctgttcgggcagccgattgagatgaaagggatgggcaaccttgtcagagataggaagagcgcgaacgaggtgtatctacgcatcaaatcgcaggtggaggagatcatgtcgtatctcaagaggaagagggaggaagacccttacaggagcctaccgcagcgtgcactgtaccaggcaacatggggcgcctccgctcaggtccccacttttgagccatgaagattgggagtagggaagggcgtctgcgagcggactgcaattctttgacaagatgcaatgcgttctcatttctgaggagatctccctccctcatacgctgattacatatacggactacggactagtataccgcaaatattgtacatttttaggaaaaatatgaaatgatgtttttaaacaaaaaaaacgcactcagcacattatcttaaaacagatgcgttgagcacacaaaacgtcctcgcggacagtccgcggtccggacggtccacggtggtgacgcggacagtccgc

SEQ ID NO: 201297 - DNA, 2384 bp, Zea Mays
ccttcccctgcttcgtcctcgtttctcctcgaacccacccagcagcgccttcttccttcttcccgcccaacctcggccatgcccgtagcggcgctccgtcctcccccggtcgctgtcggcgcgggacgccgcagcgcccgactccaggcgcggttcgccctccgcgcgagctccctcgaggcgtcggcggcagtgacggtgacagtgaacgggtctgcagaggccgcggtggagaggaaggagaaggtgcaggaggataaggacaacgagggactgccggtgaaggaggagcaggagagggggctggaggtcctctacgacgacggcttcggctccgtgaccgtcaaggactacttcgcggcggccaaggtcctgtgccgggacgacggtgggccgccgcgctggttctctcccgtcgagtgcggccacccggccgtggaccaagcgccgctgctgctcttcttgccaggaatggatggcgtcggcacgggactcatcctgcaccacaagtctttggagtgttcgaggttcggtgcttgcatataccagtcaatgatcgtacaccatttgaaggactagtacaaatcgttgaaaatttgatcaagcacgagcatgatttatccccggacagaccgatatatcttgtcggagattcatttggcggatccctggcactggcagtggcagctcgtaatccgcagattgatttggttctcatactagtaaacccagctacatcatttgcaaagactccattgcagccagtattgcctctactggaatcagtgccaagcgagtttcatgctacagtgccgtatcttctcagttttgtcatgggtgacccactgaagatggctgcagttagcattgaaaacaacctatctcctccagaaactctgcagaaattgtcagacagtctcacatcaatgcttcctttgctttcagaactgtctgatattataccaagggatactcttctatggaagctcaaacttctcaaggcaggagcagcctatgcaaattctcgtctccatgccgtgcaagccgaggttctacttcttgccagtggtaaggacaatcttctaccaagcggagaagaagcggatcgactcttcaaggcactgaaaaactgcagagttcgatacttcaaggacaatggccatacactactgctggaggatggcgtcaacctgttaactgtcataaaaggagcgaacatgtatcggcgtggaaggcaaagggattctgtaaccgattatctcccgcctactctaagtgaattcaggcaaacatttgatgtggatcacaggctgttccaccttgcactgagcccagtcatgatgtccaccctgaaggatgggaaaatcgtccgcgggcttgccggtgtccctgacaaaggcccagtcttgttcgtgggctaccacgcgctcatgggcattgagctgagtcctctgtacgaggagttcctgagggagaagaggacagtcgtccgcggcatggcgcacccgttcctgtttgggaaaaagttgttccagaggaaccaatttgttctgctctaccccggcggcgttcgggaagctctgcacaggaagggtgaagagtataagttgttctggccagatcagccagaattcgtaaggatggcggcgcgctttggtgtaactatcataccctttgggtgtgttggagaagacgacgttctcgagttggttctggactacaacgatcagaagaacattcccgggctccgggaatggatacagtcgatcaacaaagaagccgagagagtgagggacagcgtaaaaggagaggatgggaaccaggacatgtacctgccagctcttctcccaaaagtgcctggccgattctactacctgttcgggcagccgattgagatgaaagggatgggcaaccttgtcagagataggaagagcgcgaacgaggtgtatctacgcatcaaatcgcaggtggaggagatcatgtcgtatctcaagaggaagagggaggaagacccttacaggagcctaccgcagcgtgcactgtaccaggcaacatggggcgcctccgctcaggtccccacttttgagccatgaagattgggagtagggaagggcgtctgcgagcggactgcaattctttgacaagatgcaatgcgttctcatttctgaggagatctccctccctcatacgctgattacatatacggactacggactagtataccgcaaatattgtacatttttaggaaaaatatgaaatgatgtttttaaacaaaaaaaacgcactcagcacattatcttaaaacagatgcgttgagcacacaaaacgtcctcgcggacagtccgcggtccggacggtccacggtggtgacgcggacagtccgc

SEQ ID NO: 201298 - DNA, 918 bp, Zea Mays
ctctccgtcgccaacccagtaacggcccgcttggcgtgcgtcgccgtccaccgccgcgacctcgaggtgtagggccgggttgctgaccgcatcgcccggcgtgtcgctcggcgtcggttcgggcaggccgcggccgcgcgcgtgatcgatggggaagagaccgccgaccgatccgaagcgcttcggggatacgtcgaatgcaggttcatcgtctggatggaccgatgagaagcacatgctctacattacctttttggaggaatcatttgttaaccaattgtacagtagtaagggggaaatgaattcggcagaatcattctatgcaactccaggtgcatggcaaaaatcttcttatagtggaaatggtagaaacacaaaatatgatgagggacatggatattgggggactgtcgaggttgacggagatggagctgattatatggatgatgatgcatcaactaatggtccaagacaagagagagatactagttaccatgcaaggcaaaggaattccagggggtcagctgctttccgtttgcgccagcatgggcattcgttttcttggagagaatcatcagaccagaacttcttggatggggagactcaaggtagcaaggaacaaggaagagggtctagcaaaaaccagcaaaagcatgctgatacgaccaaggttgccaaattctctatttccctctcagtcagcatgtcgtgattgcttcagatgccatctacgatcgcatcaagtctagaaagaaacaggtgcgcttttcaaagccatcttagaggctgtttgacatggttccgcttcaatagaagaactctgtaaggccttgttcgtttgtgtcggattgcacctgcaatcgttccagctaatcaaagtttatataaattagagaagcaatccggttaggaatcgtt

SEQ ID NO: 201299 - DNA, 868 bp, Zea Mays
ctctactcagttagtctggaaagccttgagattgcatattgacgactcagattccagcaatgaagtaacacagccattgccagagctggcgtcatcaccccacggaagtcagtcgatgcatgttcattatggattgatggcttgtgcgattgctctgactggggtagctgtgatggtttacatgagacactctaaagcttgaacttctggagaacaaagaaatttgcaaagcttatatgcacaactcatgcgcatagaaggatcacacacttcggctcatgagaagggtaatagtgaagtaatcatgggctgatgacgatatacactcgattacattgttggtccaagagaaatacgctgactgactgtcatattctccagttaactgaagtcagttcttctggtgggagggaagcctatgctatggtatttcccgtccatttttgacaagtacccgtagtttcatgatgcagtgaaatatgcaacctttagggctagtttgggaactctatttttccaatggattcctattttctcaaggaaaaataaactaatttcaaatcccgtggaaaaatagggttcgcaaactagcccttagggtatgtacaacctttgtggtgcggtttttcatgtaaaaggcagttaagatatatgtaggtacaatgtggttaagtcacatgtgggttcattgtggtgtatctaaactttgtatcttatttaataaaatttctcaagacatgatttatttatgtggtttgtattattgaagttgtctctttgacttggataacctagctagaggtgtgccttgataaaaacatgatttctttatttttttctatattgaatgaaactcgcctatgtggtg

SEQ ID NO: 201300 - DNA, 2394 bp, Zea Mays
gaaaaccagcgcggcgagcagatatcccacgagaaagccctcgaccccttcaattctccagcaaactagtcaccggcgtgtgcactggtgcagtgcacgcacgacgccggcagcatggcgggcagggccagggcacggcggttcgtgctcgccggcgctctgatgatcgcctggctcctctgtcttctcccacgggccacggcggcggccgtccgcaggagcgacttcccgccgtcgttcctcttcggcaccgccacctcctcgtaccagatcgaaggcgcgtacctcgagggcaacaagagcttgagcaactgggatgtcttcagccacgtaccaggaagaatcgaagacggaagcaccggagatgtcgcggatgatcactatcatcgttacgaggatgacattgagctcatgcactctctcggcaccaacgcctacagattttctatatcatgggccagaattcttccgagagggagattcggcgaggtcaacccagcaggcatcgcgttctacaacagactcatcgactcgctcctgctcaaagggatagagccgttcgtgacgctgtcccactacgacatcccgcaagagctggaggacaggtacggggcgtggctcggcggcgccgaggcgcggcgcgacttcggccacctggcggacgtgtgcttcgcggcgttcggggaccgcgtcaggcactgggccaccttcaacgagcccaacgtcgcggtcaccaggggctacatgctcggcacctacccgccgggccgatgctcgcgctcctgcgcccggggtaactccgacgccgagccctacgtcgccgcgcacaacgtcgtcctggcccacgccgccgccgtccagatctacaagaccaagtaccagagcaagcagaagggcttgatcggcatcgtgatgtccactgtctggttcgtgccgctgacggacgcgccggcggaccggctggcgactgagcgggcgctggccttcgacgttccatggtttcttgacccgataatctacggagactaccctccggagatgcgccggctcctgggctccaggctgccgaccttctcgccggaggagaggaggacgctgggctacgggctggacttcatcggcatcaaccactacacgacgctgtacgccagggactgcatgatctcgccaggttattgcccgtcggggcaggagttccaccaatcgctggcggcctacacgggagaaagagacgggattcccatcggacctccgttctgggcggcagacagcgatgccgacgttctacgtcgttcctgacgggatagagaagatggtcacctacatcatgaacagatacagcaatctccccatgttcataaccgaaaatggctacgcacaaggtggggatggttatactacccgtgccgaggactggcttgacgaccagggcaggatacagtacctcgagggctacctcgccaaactcgccaaagtcatcagtgacggcgccgatgtccgtggctacttcatctggtctctcattgacaatttcgagtggctatatgggtacaccctccgcttcggccttcactacgttgactaccaaacgcaggagagaaagccgaagtcgtcggcgctgtggtacaaacggttcctccagagttcacttgaagctcaatagatgaatagagagaggatgccttgttcgaagtacaggcacacaacatgagcttgctacgcacaaggtggggatggttatactacccgtgccgaggactcgcttgacgaccagggcaggatacggtacctcgagggctacctcgcaaaactcgccaaagtcatcagtgacggcgccgatgtccgtggctacttcatctggtatctcattgacaatttcgagtggctatatgggtacaccctccgcttcggccttcactacgttgactaccaaacgcaggagagaaagcccaagtcgttggcgctgtggtacaaacggttcctccagagttcacttgaagctcaatagatgaatagagagaggatgccttgttcgaagtacaggcacacagcatgagcttgtgagtgtgacgactgaacatgctgcttcttcaattcagaaaatgaagggcgtgatctttgtatgaatttattgatccttaataaagggggccactacagttgccatctccgacgtccagcccacagtgaaacttggggtggagcgtttccttccccctaggcgaagtgtgacgtgcagctccagattttaaccattattatagagaccaaatagctcatttattatgcaaaacattgtccacacatgttataggctgaaatcggaactatttgtgataattttagactagcccatttattttgcaaaacatccagaggcagcgctgtagggag

SEQ ID NO: 201301 - DNA, 2158 bp, Zea Mays
gaaaaccagcgcggcgagcagatatcccacgagaaagccctcgaccccttcaattctccagcaaactagtcaccggcgtgtgcactggtgcagtgcacgcacgacgccggcagcatggcgggcagggccagggcacggcggttcgtgctcgccggcgctctgatgatcgcctggctcctctgtcttctcccacgggccacggcggcggccgtccgcaggagcgacttcccgccgtcgttcctcttcggcaccgccacctcctcgtaccagatcgaaggcgcgtacctcgagggcaacaagagcttgagcaactgggatgtcttcagccacgtaccaggaagaatcgaagacggaagcaccggagatgtcgcggatgatcactatcatcgttacgaggatgacattgagctcatgcactctctcggcaccaacgcctacagattttctatatcatgggccagaattcttccgagagggagattcggcgaggtcaacccagcaggcatcgcgttctacaacagactcatcgactcgctcctgctcaaagagccgttcgtgacgctgtcccactacgacatcccgcaagagctggaggacaggtacggggcgtggctcggcggcgccgaggcgcggcgcgacttcggccacctggcggacgtgtgcttcgcggcgttcggggaccgcgtcaggcactgggccaccttcaacgagcccaacgtcgcggtcaccaggggctacatgctcggcacctacccgccgggccgatgctcgcgctcctgcgcccggggtaactccgacgccgagccctacgtcgccgcgcacaacgtcgtcctggcccacgccgccgccgtccagatctacaagaccaagtaccagagcaagcagaagggcttgatcggcatcgtgatgtccactgtctggttcgtgccgctgacggacgcgccggcggaccggctggcgactgagcgggcgctggccttcgacgttccatggtttcttgacccgataatctacggagactaccctccggagatgcgccggctcctgggctccaggctgccgaccttctcgccggaggagaggaggacgctgggctacgggctggacttcatcggcatcaaccactacacgacgctgtacgccagggactgcatgatctcgccaggttattgcccgtcggggcaggagttccaccaatcgctggcggcctacacgggagaaagagacgggattcccatcggacctccgacagcgatgccgacgttctacgtcgttcctgacgggatagagaagatggtcacctacatcatgaacagatacagcaatctccccatgttcataaccgaaaatggctacgcacaaggtggggatggttatactacccgtgccgaggactggcttgacgaccagggcaggatacagtacctcgagggctacctcgccaaactcgccaaagtcatcagtgacggcgccgatgtccgtggctacttcatctggtctctcattgacaatttcgagtggctatatgggtacaccctccgcttcggccttcactacgttgactaccaaacgcaggagagaaagccgaagtcgtcggcgctgtggtacaaacggttcctccagagttcacttgaagctcaatagatgaatagagagaggatgccttgttcgaagtacaggcacacaacatgagcttgtgagtgtgacgactgaacatgctgcttcttcaattcagaaaatgaagggcgtgatctttatatgaatttattgatccttaataaaggggaccactacagttgccatctccgacgtccagcccacagtgaaacttggggtggagcattttcttcccctaggcgaagtgtgacatgcagctccagattttaaccattattatagagaccaaatagctcatttattatgcaaaacattgtccacacatgttataggctgaaatcggaactatttgtgataattttagactagcccatttattttgcaaaacatccagaggcagcgctgtaggagaactaaacttcgttcttgggcttcgcagagagagtcagggttagagagagtaatggagatactttgatctaccaaatctatcaccgaaagaaagatttattgaaaatttggagcccctccccattcgtcg

SEQ ID NO: 201302 - DNA, 2117 bp, Zea Mays
aaaaagcagacgaaaaccagcgcggcgagcagatatcccacgagaaagccctcgaccccttcaattctccagcaaactagtcaccggcgtgtgcactggtgcagtgcacgcacgacgccggcagcatggcgggcagggccagggcacggcggttcgtgctcgccggcgctctgatgatcgcctggctcctctgtcttctcccacgggccacggcggcggccgtccgcaggagcgacttcccgccgtcgttcctcttcggcaccgccacctcctcgtaccagatcgaaggcgcgtacctcgagggcaacaagagcttgagcaactgggatgtcttcagccacgtaccaggaagaatcgaagacggaagcaccggagatgtcgcggatgatcactatcatcgttacgaggatgacattgagctcatgcactctctcggcaccaacgcctacagattttctatatcatgggccagaattcttccgagagggagattcggcgaggtcaacccagcaggcatcgcgttctacaacagactcatcgactcgctcctgctcaaagggatagagccgttcgtgacgctgtcccactacgacatcccgcaagagctggaggacaggtacggggcgtggctcggcggcgccgaggcgcggcgcgacttcggccacctggcggacgtgtgcttcgcggcgttcggggaccgcgtcaggcactgggccaccttcaacgagcccaacgtcgcggtcaccaggggctacatgctcggcacctacccgccgggccgatgctcgcgctcctgcgcccggggtaactccgacgccgagccctacgtcgccgcgcacaacgtcgtcctggcccacgccgccgccgtccagatctacaagaccaagtaccagagcaagcagaagggcttgatcggcatcgtgatgtccactgtctggttcgtgccgctgacggacgcgccggcggaccggctggcgactgagcgggcgctggccttcgacgttccatggtttcttgacccgataatctacggagactaccctccggagatgcgccggctcctgggctccaggctgccgaccttctcgccggaggagaggaggacgctgggctacgggctggacttcatcggcatcaaccactacacgacgctgtacgccagggactgcatgatctcgccaggttattgcccgtcggggcaggagttccaccaatcgctggcggcctacacgggagaaagagacgggattcccatcggacctccgacagcgatgccgacgttctacgtcgttcctgacgggatagagaagatggtcacctacatcatgaacagatacagcaatctccccatgttcataaccgaaaatggctacgcacaaggtggggatggttatactacccgtgccgaggactggcttgacgaccagggcaggatacagtacctcgagggctacctcgccaaactcgccaaagtcatcaggtgcatccatttggtttcgaatttcacagtgacggcgccgatgtccgtggctacttcatctggtctctcattgacaatttcgagtggctatatgggtacaccctccgcttcggccttcactacgttgactaccaaacgcaggagagaaagccgaagtcgtcggcgctgtggtacaaacggttcctccagagttcacttgaagctcaatagatgaatagagagaggatgccttgttcgaagtacaggcacacaacatgagcttgggaccactacagttgccatctccgacgtccagcccacagtgaaacttggggtggagcattttcttcccctaggcgaagtgtgacatgcagctccagattttaaccattattatagagaccaaatagctcatttattatgcaaaacattgtccacacatgttataggctgaaatcggaactatttgtgataattttagactagcccatttattttgcaaaacatccagaggcagcgctgtaggagaactaaacttcgttcttgggcttcgcagagagagtcagggttagagagagtaatggagatactttgatctaccaaatctatcaccgaaagaaagatttattgaaaatttggagcccctccccattcgtcg

SEQ ID NO: 201303 - DNA, 1181 bp, Zea Mays
gacgatatgagcccctcgcagatttggttccctcccttatcctattccctcgtgtcatggcgcttctcctgcgcctcgctgctccgtcggtgccgccccggcggagctccggcctcagagcattgccgcgcgtcgtccttccggaggtcgtttccaaacaatcatttcttcgtttactagttgacagcactgcaagaataatggcatccatgcatctagtgtatatggacatgatctcatgaagtccatgtctgatctccagggctccttgcgagacagaggagaggggagcttgcacgtctaaatgatcaattgcgtcagataaatgctgcattgagaagacaagccaagattgaatcttatgctcctgccttgagctatgccccagttggtagcaagataccagaatcagaagttattgttgatcctcagaaacagcgcctaattgcatatctcaggaccggaaagaactatctgagaaaccaagctcctgacaaggcatttcctgagtttaaggcagctcttgatcttgcacgatctttaggtgatcatgttgaagagaagaaggcagcacgaggattaggggcatccttgcaaagacaaggcaagtacaaggaagccataaattatcattccatggtgctaaacatctccaaggtgaccggagaggatgcgggtgtcactgaagcatacggagcaatagcggattgctacaccgagcttggtgagctcgagaaggcaggcaagttctacgacaagtacatagcaagattggagaacgaatgagaaaacagtgctgattggcaaatctgtgagagcagaaacaaagacaaggctaatcatatctctactcttgtcgtcatgtattctactatagatgtgcagttcccagctggaactgatgtttgttatcatgattcaagtttctttttggcagaattatcccagatgtttaggtacagatcagtatcatgctgtgcacgtagttgttttgttaattagggtctcaatggtccgtacaggcattcatgtcaatctgctagttgcgccggcttaattttatagttttgctatatcgtgcctaggtgaaaatctttcctccacatgtttttttttagtttttgttttcatgttttctttctaagtaacacgcatagaagggatttaaactaagattctcc

SEQ ID NO: 201304 - DNA, 2144 bp, Zea Mays
gcatgattcctcaagcaagaggaacaacatcacgcgggccgaacctgcaatttcacgcagagacgtgtcatcttctcctccgttacgaacccgtgggatctcaagtccgtttcacacttggctccctcgctcgctcgctcgctcgcactgacaacctgggtggccggctggccgccaccgcacacctctgctgtggtctaccgcccctcttcgctcccgctcccgtcgtcggtgagccgcgcccgtccaccctctcaccgatggcttcggcggccgcgaggggcgccgcggtgcgctcccctctcctcgtccaccaccgcgtccccctggtacatcccagcgggggaggctcgctccgggtcggctggcccggaattgggcccggacgggaggggcggcggcggggcgccccggttggggctagggttttcgcgcgctactcccaggcccaggacttctccacacgcctccaagatagagctggtgagctgcctaagttagtcgaggaccttatccagacatcgattagcacagggcctcgaggtgctttcaggatggcccaagggatccaagctgtgcttggggttggtggggagtggctgaatgacctctcaaagacagccaacacatcagcaggaattccatctcagatgcagcttggtttgctttctccactttaccttcgaaggctttttgagcgcatgggtgccacttatatcaagttaggccaggtaggcattgtaaaggatataaaggaatcaatgcttgaggaagttgactttagaaaagaggctgcaaatattcaggcatttcagggatacattgatgcaatggggtttgacaggcaggcaaaagccccatttgtgtatcagcactgtagtacaaaacgtgtattgactatggaaagattgtatggagttccgcttactgatcttgattctataagatctcttgttcctgatcctgagttgactttagtcactgcccttaatgtctggtttggaagcttaatttcatgtgaatccttccatgctgatgtacatgctggaaacctatggttgctccgtgatgggcgaattggttttattgattttgggattgttggtcgaatatctccaagaacttgggcagctatggaggtctttttggcttcttttgcaactgaggattatgatgctatggcctctgccctctctgaaatgggtgctacagggaatgatataaatactaatgaatttgcaaaggacctgcgaaagatattctcatcgatacaggacctggatactgaaatcatagtggcaacagcaaggacccctgatgctacagcagtatctgctaatgttgtccttgatgagaggcagatgaatgctctttttcttgatctggtcagggtgagcgagtcttacgggctgaaatttcctcgggagtttgctcttctcatgaagcagctgctgtattttgatcgctacacaagactgctggctcccagcatgaacatgctgcgagacgagaggatcaacatctccaccaatcgacaaccaagaagaactgatagatttcagtgaagccacgtcgttagtcaccggccacgtactagaggagtcgtgatgggcgataatagcaagctcatgtgacccaatactgtatatagttttgccagaccagcatagaaatgaaccacacgctagaaattgtacactccgtcgtattctgggattgagcgttatatcgtactagtaggtaacatgtaaaggctgtatcccacgaccaaagtaaatttcagatgaactgcttttgtctcatcttttttctggtactagtagcgtgaatctggttaagatgcaactgcactacacttcagctgccatcagaaaaaagtgatcttgcagcagcttaacgaggtgctgaacaaaactggctagagagatggttgcattctctcgtggtcaccacgaacttgtagagttacgggattccactatatggcggcatttcagctttcattactcgttggagcttacacaacagggttcatagtggatattaacttggaaaatatcccgcagctcaggttcgtgtgcgtgcttgtgtgttgggttggggttgggccgttgggtgatagtgcttgaactatcaggctgcca

SEQ ID NO: 201305 - DNA, 2485 bp, Zea Mays
gcatgattcctcaagcaagaggaacaacatcacgcgggccgaacctgcaatttcacgcagagacgtgtcatcttctcctccgttacgaacccgtgggatctcaagtccgtttcacacttggctccctcgctcgctcgctcgctcgcactgacaacctgggtggccggctggccgccaccgcacacctctgctgtggtctaccgcccctcttcgctcccgctcccgtcgtcggtgagccgcgcccgtccaccctctcaccgatggcttcggcggccgcgaggggcgccgcggtgcgctcccctctcctcgtccaccaccgcgtccccctggtacatcccagcgggggaggctcgctccgggtcggctggcccggaattgggcccggacgggaggggcggcggcggggcgccccggttggggctagggttttcgcgcgctactcccaggcccaggacttctccacacgcctccaagatagagctggtgagctgcctaagttagtcgaggaccttatccagacatcgattagcacagggcctcgaggtgctttcaggatggcccaagggatccaagctgtgcttggggttggtggggagtggctgaatgacctctcaaagacagccaacacatcagcaggaattccatctcagatgcagcttggtttgctttctccactttaccttcgaaggctttttgagcgcatgggtgccacttatatcaagttaggccagtttgtagcatctgcgccaactttgtttcctgcagaatatgttgaggaattccagaaatgctttgaccaagcaccagctgtcccatatgacgtgattgaatcaatattacgtgaggagctgcagcggccattagatagtgtgtatgaatacattgatccggtgccaatagcctctgcctcaatagcacaggttcatggggctaggttgaagagctctcagaaagatgtggtgattaaagttctaaagcctggtattgaagatactttggttgctgatctgaattttatctatgttgttgcacgtgttttagagttcttgaaccctgaactacaaaggacatcactggcattgtaaaggatataaaggaatcaatgcttgaggaagttgactttagaaaagaggctgcaaatattcaggcatttcagggatacattgatgcaatggggtttgacaggcaggcaaaagccccatttgtgtatcagcactgtagtacaaaacgtgtattgactatggaaagattgtatggagttccgcttactgatcttgattctataagatctcttgttcctgatcctgagttgactttagtcactgcccttaatgtctggtttggaagcttaatttcatgtgaatccttccatgctgatgtacatgctggaaacctatggttgctccgtgatgggcgaattggttttattgattttgggattgttggtcgaatatctccaagaacttgggcagctatggaggtctttttggcttcttttgcaactgaggattatgatgctatggcctctgccctctctgaaatgggtgctacagggaatgatataaatactaatgaatttgcaaaggacctgcgaaagatattctcatcgatacaggacctggatactgaaatcatagtggcaacagcaaggacccctgatgctacagcagtatctgctaatgttgtccttgatgagaggcagatgaatgctctttttcttgatctggtcagggtgagcgagtcttacgggctgaaatttcctcgggagtttgctcttctcatgaagcagctgctgtattttgatcgctacacaagactgctggctcccagcatgaacatgctgcgagacgagaggatcaacatctccaccaatcgacaaccaagaagaactgatagatttcagtgaagccacgtcgttagtcaccggccacgtactagaggagtcgtgatgggcgataatagcaagctcatgtgacccaatactgtatatagttttgccagaccagcatagaaatgaaccacacgctagaaattgtacactccgtcgtattctgggattgagcgttatatcgtactagtaggtaacatgtaaaggctgtatcccacgaccaaagtaaatttcagatgaactgcttttgtctcatcttttttctggtactagtagcgtgaatctggttaagatgcaactgcactacacttcagctgccatcagaaaaaagtgatcttgcagcagcttaacgaggtgctgaacaaaactggctagagagatggttgcattctctcgtggtcaccacgaacttgtagagttacgggattccactatatggcggcatttcagctttcattactcgttggagcttacacaacagggttcatagtggatattaacttggaaaatatcccgcagctcaggttcgtgtgcgtgcttgtgtgttgggttggggttgggccgttgggtgatagtgcttgaactatcaggctgcca

SEQ ID NO: 201306 - DNA, 2455 bp, Zea Mays
gcatgattcctcaagcaagaggaacaacatcacgcgggccgaacctgcaatttcacgcagagacgtgtcatcttctcctccgttacgaacccgtgggatctcaagtccgtttcacacttggctccctcgctcgctcgctcgctcgcactgacaacctgggtggccggctggccgccaccgcacacctctgctgtggtctaccgcccctcttcgctcccgctcccgtcgtcggtgagccgcgcccgtccaccctctcaccgatggcttcggcggccgcgaggggcgccgcggtgcgctcccctctcctcgtccaccaccgcgtccccctggtacatcccagcgggggaggctcgctccgggtcggctggcccggaattgggcccggacgggaggggcggcggcggggcgccccggttggggctagggttttcgcgcgctactcccaggcccaggacttctccacacgcctccaagatagagctggtgagctgcctaagttagtcgaggaccttatccagacatcgattagcacagggcctcgaggtgctttcaggatggcccaagggatccaagctgtgcttggggttggtggggagtggctgaatgacctctcaaagacagccaacacatcagcaggaattccatctcagatgcagcttggtttgctttctccactttaccttcgaaggctttttgagcgcatgggtgccacttatatcaagttaggccagaatatgttgaggaattccagaaatgctttgaccaagcaccagctgtcccatatgacgtgattgaatcaatattacgtgaggagctgcagcggccattagatagtgtgtatgaatacattgatccggtgccaatagcctctgcctcaatagcacaggttcatggggctaggttgaagagctctcagaaagatgtggtgattaaagttctaaagcctggtattgaagatactttggttgctgatctgaattttatctatgttgttgcacgtgttttagagttcttgaaccctgaactacaaaggacatcactggtaggcattgtaaaggatataaaggaatcaatgcttgaggaagttgactttagaaaagaggctgcaaatattcaggcatttcagggatacattgatgcaatggggtttgacaggcaggcaaaagccccatttgtgtatcagcactgtagtacaaaacgtgtattgactatggaaagattgtatggagttccgcttactgatcttgattctataagatctcttgttcctgatcctgagttgactttagtcactgcccttaatgtctggtttggaagcttaatttcatgtgaatccttccatgctgatgtacatgctggaaacctatggttgctccgtgatgggcgaattggttttattgattttgggattgttggtcgaatatctccaagaacttgggcagctatggaggtctttttggcttcttttgcaactgaggattatgatgctatggcctctgccctctctgaaatgggtgctacagggaatgatataaatactaatgaatttgcaaaggacctgcgaaagatattctcatcgatacaggacctggatactgaaatcatagtggcaacagcaaggacccctgatgctacagcagtatctgctaatgttgtccttgatgagaggcagatgaatgctctttttcttgatctggtcagggtgagcgagtcttacgggctgaaatttcctcgggagtttgctcttctcatgaagcagctgctgtattttgatcgctacacaagactgctggctcccagcatgaacatgctgcgagacgagaggatcaacatctccaccaatcgacaaccaagaagaactgatagatttcagtgaagccacgtcgttagtcaccggccacgtactagaggagtcgtgatgggcgataatagcaagctcatgtgacccaatactgtatatagttttgccagaccagcatagaaatgaaccacacgctagaaattgtacactccgtcgtattctgggattgagcgttatatcgtactagtaggtaacatgtaaaggctgtatcccacgaccaaagtaaatttcagatgaactgcttttgtctcatcttttttctggtactagtagcgtgaatctggttaagatgcaactgcactacacttcagctgccatcagaaaaaagtgatcttgcagcagcttaacgaggtgctgaacaaaactggctagagagatggttgcattctctcgtggtcaccacgaacttgtagagttacgggattccactatatggcggcatttcagctttcattactcgttggagcttacacaacagggttcatagtggatattaacttggaaaatatcccgcagctcaggttcgtgtgcgtgcttgtgtgttgggttggggttgggccgttgggtgatagtgcttgaactatcaggctgcca

SEQ ID NO: 201307 - DNA, 2510 bp, Zea Mays
gtggatttttctaatgctgtcgcatgattcctcaagcaagaggaacaacatcacgcgggccgaacctgcaatttcacgcagagacgtgtcatcttctcctccgttacgaacccgtgggatctcaagtccgtttcacacttggctccctcgctcgctcgctcgctcgcactgacaacctgggtggccggctggccgccaccgcacacctctgctgtggtctaccgcccctcttcgctcccgctcccgtcgtcggtgagccgcgcccgtccaccctctcaccgatggcttcggcggccgcgaggggcgccgcggtgcgctcccctctcctcgtccaccaccgcgtccccctggtacatcccagcgggggaggctcgctccgggtcggctggcccggaattgggcccggacgggaggggcggcggcggggcgccccggttggggctagggttttcgcgcgctactcccaggcccaggacttctccacacgcctccaagatagagctggtgagctgcctaagttagtcgaggaccttatccagacatcgattagcacagggcctcgaggtgctttcaggatggcccaagggatccaagctgtgcttggggttggtggggagtggctgaatgacctctcaaagacagccaacacatcagcaggaattccatctcagatgcagcttggtttgctttctccactttaccttcgaaggctttttgagcgcatgggtgccacttatatcaagttaggccagtttgtagcatctgcgccaactttgtttcctgcagaatatgttgaggaattccagaaatgctttgaccaagcaccagctgtcccatatgacgtgattgaatcaatattacgtgaggagctgcagcggccattagatagtgtgtatgaatacattgatccggtgccaatagcctctgcctcaatagcacaggttcatggggctaggttgaagagctctcagaaagatgtggtgattaaagttctaaagcctggtattgaagatactttggttgctgatctgaattttatctatgttgttgcacgtgttttagagttcttgaaccctgaactacaaaggacatcactggtaggcattgtaaaggatataaaggaatcaatgcttgaggaagttgactttagaaaagaggctgcaaatattcaggcatttcagggatacattgatgcaatggggtttgacaggcaggcaaaagccccatttgtgtatcagcactgtagtacaaaacgtgtattgactatggaaagattgtatggagttccgcttactgatcttgattctataagatctcttgttcctgatcctgagttgactttagtcactgcccttaatgtctggtttggaagcttaatttcatgtgaatccttccatgctgatgtacatgctggaaacctatggttgctccgtgatgggcgaattggttttattgattttgggattgttggtcgaatatctccaagaacttgggcagctatggaggtctttttggcttcttttgcaactgaggattatgatgctatggcctctgccctctctgaaatgggtgctacagggaatgatataaatactaatgaatttgcaaaggacctgcgaaagatattctcatcgatacaggacctggatactgaaatcatagtggcaacagcaaggacccctgatgctacagcagtatctgctaatgttgtccttgatgagaggcagatgaatgctctttttcttgatctggtcagggtgagcgagtcttacgggctgaaatttcctcgggagtttgctcttctcatgaagcagctgctgtattttgatcgctacacaagactgctggctcccagcatgaacatgctgcgagacgagaggatcaacatctccaccaatcgacaaccaagaagaactgatagatttcagtgaagccacgtcgttagtcaccggccacgtactagaggagtcgtgatgggcgataatagcaagctcatgtgacccaatactgtatatagttttgccagaccagcatagaaatgaaccacacgctagaaattgtacactccgtcgtattctgggattgagcgttatatcgtactagtaggtaacatgtaaaggctgtatcccacgaccaaagtaaatttcagatgaactgcttttgtctcatcttttttctggtactagtagcgtgaatctggttaagatgcaactgcactacacttcagctgccatcagaaaaaagtgatcttgcagcagcttaacgaggtgctgaacaaaactggctagagagatggttgcattctctcgtggtcaccacgaacttgtagagttacgggattccactatatggcggcatttcagctttcattactcgttggagcttacacaacagggttcatagtggatattaacttggaaaatatcccgcagctcaggttcgtgtgcgtgcttgtgtgttgggttggggttgggccgttgggtgatagtgcttgaactatcaggctgcca

SEQ ID NO: 201308 - DNA, 942 bp, Zea Mays
gagaagacccatcaaggaggaatatgttgacttgttgaggcatatctctgaagacacaggagctgtatgcacttgtttttgcagcacggtacctggacctgtttgttcattttgtgtctctgtataacactgtcatgaagctggtcttcttggcaagttctttctcgatagtttggtacatgaagcggcataagattgtgcggaggacatatgacaaggatcatgacacctttcgccattacgttttagtgttgccttgtcttcttctggctctcctcattaatgagaagtttacttttagagaggtgatgtgggcattctccatttatttggaagctgtcgcgatatttccacaacttgtgttgctacagcggacaaggaatattgacaacctgactggccaatatgtcttcttcttgggtgcctaccgtgtgctttatatccttaactggatttaccgatacttcactgagccccattttgtccactggataagttggatggcaggaatagtgcaaactctgttgtatgctgacttcttcttttattacataatgagctggaagaacaatgtgaagctagagctgccagcttaaggttgctgctcctgtccccaagatatagtagggtaatatatcagataggcaggccccatacacagcatgatcattgctatcgccaactgggttatgaaaaaagcattttagttgcgtggcttgtatcgccttgtatctctctgctattgttggaagaacaggaaagtcaggctcaccatgtaactttttacaataagctgcgtaagatcagcactagaaggttgtgaattgtgatcgtccttagggaattttgtgctgatgtaaccctttcggcaagtgattctcatacaatataatctcagactataattggtaattgtttgatatccttggcctagcatctgaa

SEQ ID NO: 201309 - DNA, 1415 bp, Zea Mays
agggacagattatcaattgtaattttcaagactgcttcagctcatagttgggcatgcatggatctctacgtttttgcaacaccatataggataacatgggactattattttgctgctcgggagcacactttggagattaaatcatgggaggaagaagcggaattgaaatatgtgaaggagcatggcatttctatttttctcatgccatctggaatgctcggaactttgctatctttgattgatgtcctgcctttgttttcaaacactgcctggggccaacattccaacctagcctttttagagaagcatatgggagcctcatttgagaaacgaacccaaccttgggttgctaacattagaaaggaggatatacaatctggtgactttttggctttatcaaagattcgaggacgatggggtgggtttgagacattagagaaatgggtgactggtgcatttgctgggcatacctcggtttgcttaaaagacgagaagggtgatctttgggttgcagagtcaggctatgaaaacgagaaggtaatggcagttatgtcaatgtggactagattgcagccagtttatgctgcaaacatgtggaatgaagccctaaacaaacgacttggcactgaggatttcgaccttcaggggatcattatggagattgaaagacgtggaatgtcttttgatcagttgctcaccatacccgagcaagacgaatgggtgtacagtgatggtaaatcaactacttgtgtcgccttcattcttgcaatgtacaaggaggctggaatattcacccctttctcggagtcgatccaggtcaccgagttcactattcgtgacgcatacatgctcaagatatttgaagacaacccggcaaggcttccaggttggtgcaacgcaggcacggacaagcttcccttttgccagattctcggagagtacagaatggagctaccagagtacaacacgattgaaccttatgcgaaaatgaacgagaactgtccgtccttgcccccaacgtacaaacgacccgcacgctgctgactacgagattgtctactatgtatctttctgcagctgctgcctttacacagtggcattagagtgttgttgctatgttctgtaaataaaagacactatatatataggtgcttggtagatggtagttcttaccagtaatgtagctgcgatgtattcaggttcacggttttcagtcgatcagttctgaagccacggcgtcggcgaccaatatgaaggttaggatttgtcagctccggaaagttgcttatatgtatcaatgtatgtatgtaggcaacattatggcttggtcataaattgtgaactccgtcaagaaataaatctataatgcaacgtcaggtgattctgatatgtgattaagaaaataaaaaaacaaa

SEQ ID NO: 201310 - DNA, 3335 bp, Zea Mays
cccgtttaacggcggcacgacaagcaagcggtcacgtgagagctgatttttctcgcagcgggtagcggtagccctgtccctgacctgatcctgacccgtgcgggcgtgcggctcctcgcggacagctccagactccagagccgcctcttcgccctctcgccatcggcaggctacggtggctgcttccccgagcctgcagatcgggtggtagatctggttggcctagtcgctgtcggatgcagttgccgagctaggtcgcggctgcgcggcggcggtcggggtcttgcgtcgccagatctggataggaaaacgccgcgcacaagctgagctaaattctgttcgattcgagttcttataggggttcttgtggctgcgtgttttgaattttttcccactggttctggggtgccgagaaagggaatcgtggctgactcttgttgccgtcgtcgagccagatctggtcatgctgctaccgtggatgtcttattgcttgatctcctttgttttttaattccttcggttcaagaatagcatcattaccatgagcatacataccagagaaacggagacagattcggaaattttcatttattgctagcttgtagttttggggtcctataatatttttcttggttctcttaattaattgagctagtaaatcaacaaatctgccactacagccgtcacgggcaaacataaaaaaactgaacaacaccaaattgaggcgcctagtccacaaacctgaactgctgaacttaaatgtctggaagccacagtttctgatttctgatggtttgtttttatgctcatttactctttctttcttccaggtagaccaccttgtgttgattcctcgagtcttcacctggtgcttccgtttgcagcttcatttttaactaagtctgtaatttattggctgtttatctgagtgacactacactctctgttttttcttattagatgtcacaagccaaggaagtgaggtacactgcacggtctattacacctcctgctgatagaaatggcacttcaaggtcgcctcctccaaagagacgcagcccttcaaggtcacctccaccaaagagtgcttcacggtccccacgtccaaggagtccaaagagacgcagcacttcaaggtctcctcctaggagacgtggtagatcaaggtcaagggataggagtcggtccaggagcccagatgatagaaatccagggaataacctttatgtaactggattgtctactcgtgtaacggaagatgatcttgagaagttctttagtaaagaaggaaaggttaagaactgtcatgttgttcttgatcctaggacaaaagaatcccgtggctttgccttcgtgactatggatactcttgaaggtgcaagacgctccatcaagtatctgcaccgcactgtacttgaaggtcgcctggtcactgtagagaaggttagatgctgactgtactgattcattccattatgcatttttctattgtattttttgttgaatagtgctagttttgtcatgttatcgttgtatagtaatgtcaagtagtctaatactagcagtagtacagttaaaaatttaaagctactatacggtcatgcatgttttttgtcttatgcttgtccctccccttcccactttagccttgaaatcactgatgtcttagtaacataaatgcattaatcttgtgcactggaaattatattccattacattaaggggcttcaatgatgctatgctctgttcagtttaaaactctggtgaaggtccttgaggtgaggtatgttatgacttatgagtagaagattacaaatatgctctttccctatgatggaagagtatattctgtaacagacaagcctggaaaccccactcaggtgaaatgtgccagagtaaattgaaaggggatcatttatgatgtgttctgatgcaatcctaatgtggtgaatggggaaaacctcttctgtggctcttcaactggggtcttaactctcatctcgtgctgacttcctgaccttccagtttaacatggtgctgggctgcctctacgtcaacctggttggtccaggctgtgcagtctccaaccatggttgtctccaaaggatgtgcagctgacgtgatggtgcttatcaccacaccctcagagctcatcaccacttgccgtcttcacctcgctcaccgacaatgcatacatgctacatcaacacgacggctgtcgccatagagcgatcttggagtcttgttgtgcatcgcgtcaccaccatcgccaccgcaacttctaccacaaccgccatcgtcaacatcacgctcgtgatccaacaggctctacgatttgtctgcttcgactaagcttacatggtgcatgctgctgccatgtcacgacaccaaccaccaagtctgatgcgaacttcatcgaccagtatcttgatttgatggacatcacgagaggcataatctggcgcttccttggaccatggctacaccgaccacggaacaagtgcacaaaagtcatctttggtttagttggcatgcaacgtaaagtttaatctacctatatcacaagattttgatcaagagttgacaagcttaatggaccatgactatttttcaccaaaagggcaaagctaaaagaactcgtgaaaggacccctactcctggaaaatactgtggtcgaagaggaggatctcaaaggagcccatcaccttaccgccctcgcagaagggagcgttcgcgctcaagggaacgcagaagggagcgttcgcgttcaagggatcgaagggagcggtctcgctcaagggatcgaagggagcggtctcgctcaagggaacgccgaagggagcggtctcgttcaagggaccgcagggagaggtctcgctcaagggaccgccggagggagcgctcacgctcaagggaccgcagaagggagcgctcacgctcaagggaccggaggggcagttcaccccatggcagaaggcatagagatcggtccaggtcacccaccagcaatgggaaccataaggcagactaggaagcgcttttatggacttgtcgttgattgcgtgaacaaaggaacttgtaacactacctataaactggtcagactgagacggttagcatggatttttagtagtgttgctgtattttgttgtttcatacaagtactctattctgttagctttcggatcgaaatgtcggatgatgatggttgttattgttctggaaatcgtagacatgtcctccagaatacctatgaaactatggcatactcgtgtgtttgcttaaggttgctgtggtatgttctgatcttaagattgacacgttgcacggtagat

SEQ ID NO: 201311 - DNA, 2274 bp, Zea Mays
gtttattttcacttagaaaaatagaaatcacttggtgaaataaggttccaaactagaacttaaaaaaatagagttctaaaactagccctgaccctgattattgaatgaccattgtaccggtaaccatttataatcgtacacccaaaagaatcagacagatacccgttcacccctcgctctcgctgccacttctcccgttcggcctctttttccttccaccaatggaagctctcacagcccgctcctccgtactctcgccgccggggattgccggagacacctcgccctcccttcccctgcccctccgccgagcctccgccgcgtttcttgggcctcgcaggagcccctccgccctcgccatctccacgcgctggctgcgcgctccgcctcgacgcggcggccgcctgctcgcgggggaaggggaagaagtgccccccgaccccgccgatgacgcggctggccgggcggaagattttctagtactcgagaataatgtaactctacgccaaagcaatgacatggataccattaaacatgatgatgctggcacttctggaattggtgggagtaacactggtggctctaggactggcctattcagaacacctatttcaggtggtgtgcacagtgcaactgctgttcatgatttaccaccaccagctttggctgttcgcaacctcatggaacaggcaaggtttgctcatctgtgcactgtaatgtctcggatgcatcaccgccgtgagggatacccattcggttccctagtagattttgcacctgacccatttggccgtaagtaattttaatatcacatcttgtacctaccaagtttctagattgattttttatttatttattgcatttttgtcatgaagacccgatcttctcattatccccactagctatccacacaagaaatttgttggcagacccaagatgcacccttgttgtacaggttcctggatggagtgggctatcaaatgcacgagtaactatctttggcgatgtcattccgttgcccactgaacaacaggtttgcactaaaatcactactgatgttatctcttttcctgaataccatctctcacaatgccatgtcacttaattcagtaaattttgtgtttgatatttacactatgaagctatttctggacatgtgtgctatattgccattatttcgttcatatctgaactatgtactgcagaaagctaacccctgctggcttcagcaggctatatgatggtcatacatggaatgaacaaaataaactcaaaatcaagccacctatttgaacttgccttcagcttaagacatgccaaagttgaagtcacagttttttttcctacttatggttactaatccttatagctaccaatcaataggagtcaccctaactgaaaacctgccaaaaatgggggtaaaagactcatgaacatgagttaagcatctgggagttggagttttgtttcctatgaggaatgggctcatcagcagtatgtttcaaagcaccagcagtgggcatcccaacagtggggtaacttttactattacagaatgcacacaataagtgacatatatttcattggaggttttggtactgttgcttgggtagatgtgaacgaatatgaggctctgcaacctgacaagattgctatggatggaggggaacaaaatctgaaggaactcaacgcaatgttctcaaagcctctgaaagagcttttgtcaactgatgaaggagaggtagacgatgttgctcttatttcaatggacagcaaaggtatcgatatccgtgtccgacaaggtgcacagttcaacatacagagggtgccctttgaggtggatcacagcgtcgaaacactggatgaagccactgaagcgctcaggaggataatcagcaagtctaggtggcacacaaagagctcagtcataggacgcccttgaaagctgaagctggaggctctatagaacagtttgtacagtgcggcagcagtctctactatggtatgtgccaataagaggaactccgttccagagtttcgtctactgccaagggcctcgtgtttgtgggtgggttgaataaacacgcaatttgagatgacgctgttttgaccatgaatttagattgaacgcacaacggcaaaaaggattttatgtgaagttgtcgatgggttgaaaaagatgtgaccatctctgacggtctgacctgcttcattcatgaggaattgaggataaagcacatttgaacatgcgcatgccattttgtttttaccaaa

SEQ ID NO: 201312 - DNA, 3941 bp, Zea Mays
cccagaccaggcaggcaggcagccagccactcacctcgaaccaaattattagccccgttgtcgccgccggctgctacacacacttctccgcgttcctcgccgccgccggagcaatcccgcggcgcactgtctaactcaccaccatgctgcagagcaagtcattcgtgaagaagacgaagcaaggccgcatccaaaaggtcgtcagggagcactacctccgcgacgacatctactgcggcttcgtcccctgcaccgcctgcgccgcagccgcggagcgaaagcttggcgccgctgccgccgccatcctcgtcgtcgacaccaacgtcgtgctccaccagatcgatttgctggagaacccggcgattgaggatgtcgtcctgctgtcagtggtgctggacgaggtgaagaataagaacctttcagttttcaacaggatcaaggcactgtgtatcaacaaagcacgtagattctatgttttcgccaacgagcagcatagtttcagcatgattgtatttctttttgaggaaaggggagtgcaaccgagtacggggaaacttacaaagaccagaatcggtgtcttaggcagaatgtgcctagcaactgaaacagctatcctattcagaacgcggatctctgaacaagaatgagtttcagcatgattgtattgatgaaatgtctttatccaatcaccatgaccgcacaattacttatcaaatagtttcatgggaagaattaatagctttggtagatgcccatgttctgagaaggctacagcttcctaatgcaaaattgttaatgtgtgtatcattacttgcaagcttacactcttcttgacattgcatctttcaaagggatatagaaatggattagctgcatgaaaaaaggcaatagaactcctaattctacagaactaggtcaatcgcagcaatctatgttggcctgcaaaaatattctctgccgtctagaatgcaagtgcctatgaatgggaaattttgaaatctaattgcttcagcttctagttgtgtagtcctgtaaatcgtgtaagctttttatatcaatacttgtgtcttgatggcagccttctctttcatttgccattatatgttcaccttttactcaaaaaacagggatacttacgtcaaagacatggttggggagagctctaatgatcgtaatgacagagcaattcgtgttgctgcacgttggtaccaaagtcatcttggtgagagcgtgaaggttctactgatcacaaatgacagagataacaaaaggaaagcgattgaagaaggccttaacgctgagacagttgagtcatatgtaagatcgcttgcacagcctggtttgcttgatttggttgttgttccaactagcggagatgtttctatggaagatgtagacgatcatagaccatcaaagaagaaagtaatctacaatgagcacaaacctatgtcagaaattacatctggtttgcggtgtggaatctaccatcaagggaagcttcgagttaatcgttacaatccgtttgaagcttatgttggaagcgagagcattggtgatgagattgttatccgtggccgctcaaatatgaacagggcctttgatggtgatatagttgctgttgagctcttgccacaagatcaatggcacgagtcaaagtcttttatagcagatgatgatgaagaagaagaagatgttcatttagtccctaatagtgctgatgatgctcctcggaacactaattccacacaatcaacagttggatcatcagctccttccatttctagtcgtccagttgggcgtgttatgggtataatcaagcgaaattggaattcgtactgtggatccttgcagccgatgcccatgcctgctggtagtgggggtgtcgctcatgctttatttgtttcaaaagatcgaagagttcctaagattcgaattcaaaccaggcagcttgagaatcttgtgaacaaaagaattgttgtcgcggttgattcatgggatgttttgtctcgatatccatcaggacactatgtacgaaccattggagatattggtgacaaagaaactgaaacagaggttgtcttaatagagaatgatatcaacaccaggcctttctctacacaagtccttgcttgtttgccacctttaccttggacattatcaccagaagatctggctaatcctaatagacaagacttacgccaagtgagagtctttagtgtggatccaccaggttgtcgagacattgatgatgcactacattgcacactacttccaaatgggaactttgaagttggagttcatatcgctgatgtcactaattttgttcaccctggtacccctcttgatgaggaagctgcgcaaaggggcacttctgtttatcttgttgggcagcggattgatatgcttccaaagcccctgactgaagatgtttgttcacttcgtgctgatgttgaacggttggcattctctgtcatttgggaaatgactccggatgctgatgttatatcaacgagatatacaaagagtgttatcaaatcttgtgctgcaatgtcttatgttgaagcccaggcaagaatggatgacagccgcttagttgatccactaactgtagacttgcggaacttaaattcattggcaaagatcatgcgacaacgccgttgtgaaagaggggctttgactcttgcttctgcagaagtaaaatttgagattgatagtgaaactcatgatcctcttgacataggaatttatcaaatccgtgaggcaaatcaaatgattgaagaatttatgttggctgcaaatgtttctgttgctgagaagattttgaagcatttccccttatgttcattgctaaggcgccatcctagcccaacaaaagagatgcttgagccattactccgtactgcctcttcgattggcctaaatctggacgtgtcatcctcaaaggcattagctgaatcacttgacaacgcaaagagcaatgacccatacttcaacaagcttattagaattttggcgactagatgcatgacacaggctgtttatttctgcagtggagatttgaccttttctgaatattaccattatgggcttgctgcttctctttacactcatttcacttctcccattcgcagatatgcagatgttgttgttcatagattgctagctgcagctctgaatattgcaaagctcccaccaatctttcaggatggtccacaacttacaggcattgctgacaacctgaattacaggcacagaaatgcccagatggcaagcagagcatcagttgaactccacacccacatatatttcaagacaaggccaactgacactgaagctaggatagtaaagatcaaggcaaatggtttcatagtatttgtcccaaagtttggcatagaagggcccatctaccttactccgaagggcgacaaaggcggtgattgggttgttgacgaggtgcaccagagagtaaccaagcccggaacaaacatcagctatgctatcctccagactgtcaggattcatatggaggttgttgaacctcagcctcatcgcccaaagctgcaactcaccctgatatgaaaaatgtacagctgaattgtagcaacattgtagtgttttcccgggcctctcacacctccagctcactctttagttcaacattggtgtgattttcgatttgtaaaactaatcagtaatcaccacatggtcaagattttgtagtatcagatagttttttctcaatacatggggctctatgcatggaagcttagtttctgaatggtactcacaatagagaaaatatacgacattgtattctgtttatgtgaaagagatgtatgttaatgtgacaagggtggttattgtgcgcacgcaccattcatttatatgggaagcgaacattatttttgcatggccaaatcttgctgaacttttaccattac

SEQ ID NO: 201313 - DNA, 3118 bp, Zea Mays
cccagaccaggcaggcaggcagccagccactcacctcgaaccaaattattagccccgttgtcgccgccggctgctacacacacttctccgcgttcctcgccgccgccggagcaatcccgcggcgcactgtctaactcaccaccatgctgcagagcaagtcattcgtgaagaagacgaagcaaggccgcatccaaaaggtcgtcagggagcactacctccgcgacgacatctactgcggcttcgtcccctgcaccgcctgcgccgcagccgcggagcgaaagcttggcgccgctgccgccgccatcctcgtcgtcgacaccaacgtcgtgctccaccagatcgatttgctggagaacccggcgattgaggatgtcgtcctgctgtcagtggtgctggacgaggtgaagaataagaacctttcagttttcaacaggatcaaggcactgtgtatcaacaaagcacgtagattctatgttttcgccaacgagcagcatagggatacttacgtcaaagacatggttggggagagctctaatgatcgtaatgacagagcaattcgtgttgctgcacgttggtaccaaagtcatcttggtgagagcgtgaaggttctactgatcacaaatgacagagataacaaaaggaaagcgattgaagaaggccttaacgctgagacagttgagtcatatgtaagatcgcttgcacagcctggtttgcttgatttggttgttgttccaactagcggagatgtttctatggaagatgtagacgatcatagaccatcaaagaagaaagtaatctacaatgagcacaaacctatgtcagaaattacatctggtttgcggtgtggaatctaccatcaagggaagcttcgagttaatcgttacaatccgtttgaagcttatgttggaagcgagagcattggtgatgagattgttatccgtggccgctcaaatatgaacagggcctttgatggtgatatagttgctgttgagctcttgccacaagatcaatggcacgagtcaaagtcttttatagcagatgatgatgaagaagaagaagaagatgttcatttagtccctaatagtgctgatgatgctcctcggaacactaattccacacaatcaacagttggatcatcagctccttccatttctagtcgtccagttgggcgtgttatgggtataatcaagcgaaattggaattcgtactgtggatccttgcagccgatgcccatgcctgctggtagtgggggtgtcgctcatgctttatttgtttcaaaagatcgaagagttcctaagattcgaattcaaaccaggcagcttgagaatcttgtgaacaaaagaattgttgtcgcggttgattcatgggatgttttgtctcgatatccatcaggacactatgtacgaaccattggagatattggtgacaaagaaactgaaacagaggttgtcttaatagagaatgatatcaacaccaggcctttctctacacaagtccttgcttgtttgccacctttaccttggacattatcaccagaagatctggctaatcctaatagacaagacttacgccaagtgagagtctttagtgtggatccaccagatgtttgttcacttcgtgctgatgttgaacggttggcattctctgtcatttgggaaatgactccggatgctgatgttatatcaacgagatatacaaagagtgttatcaaatcttgtgctgcaatgtcttatgttgaagcccaggcaagaatggatgacagccgcttagttgatccactaactgtagacttgcggaacttaaattcattggcaaagatcatgcgacaacgccgttgtgaaagaggggctttgactcttgcttctgcagaagtaaaatttgagattgatagtgaaactcatgatcctcttgacataggaatttatcaaatccgtgaggcaaatcaaatgattgaagaatttatgttggctgcaaatgtttctgttgctgagaagattttgaagcatttccccttatgttcattgctaaggcgccatcctagcccaacaaaagagatgcttgagccattactccgtactgcctcttcgattggcctaaatctggacgtgtcatcctcaaaggcattagctgaatcacttgacaacgcaaagagcaatgacccatacttcaacaagcttattagaattttggcgactagatgcatgacacaggctgtttatttctgcagtggagatttgaccttttctgaatattaccattatgggcttgctgcttctctttacactcatttcacttctcccattcgcagatatgcagatgttgttgttcatagattgctagctgcagctctgaatattgcaaagctcccaccaatctttcaggatggtccacaacttacaggcattgctgacaacctgaattacaggcacagaaatgcccagatggcaagcagagcatcagttgaactccacacccacatatatttcaagacaaggccaactgacactgaagctaggatagtaaagatcaaggcaaatggtttcatagtatttgtcccaaagtttggcatagaagggcccatctaccttactccgaagggcgacaaaggcggtgattgggttgttgacgaggtgcaccagagagtaaccaagcccggaacaaacatcagctatgctatcctccagactgtcaggattcatatggaggttgttgaacctcagcctcatcgcccaaagctgcaactcaccctgatatgaaaaatgtacagctgaattgtagcaacattgtagtgttttcccgggcctctcacacctccagctcactctttagttcaacattggtgtgattttcgatttgtaaaactaatcagtaatcaccacatggtcaagattttgtagtatcagatagttttttctcaatacatggggctctatgcatggaagcttagtttctgaatggtactcacaatagagaaaatatacgacattgtattctgtttatgtgaaagagatgtatgttaatgtgacaagggtggttattgtgcgcacgcaccattcatttatatgggaagcgaacattatttttgcatggccaaatcttgctgaacttttaccattac

SEQ ID NO: 201314 - DNA, 3749 bp, Zea Mays
cccagaccaggcaggcaggcagccagccactcacctcgaaccaaattattagccccgttgtcgccgccggctgctacacacacttctccgcgttcctcgccgccgccggagcaatcccgcggcgcactgtctaactcaccaccatgctgcagagcaagtcattcgtgaagaagacgaagcaaggccgcatccaaaaggtcgtcagggagcactacctccgcgacgacatctactgcggcttcgtcccctgcaccgcctgcgccgcagccgcggagcgaaagcttggcgccgctgccgccgccatcctcgtcgtcgacaccaacgtcgtgctccaccagatcgatttgctggagaacccggcgattgaggatgtcgtcctgctgtcagtggtgctggacgaggtgaagaataagaacctttcagttttcaacaggatcaaggcactgtgtatcaacaaagcacgtagattctatgttttcgccaacgagcagcatagtttcagcatgattgtatttctttttgaggaaaggggagtgcaaccgagtacggggaaacttacaaagaccagaatcggtgtcttaggcagaatgtgcctagcaactgaaacagctatcctattcagaacgcggatctctgaacaagaatgagtttcagcatgattgtattgatgaaatgtctttatccaatcaccatgaccgcacaattacttatcaaatagtttcatgggaagaattaatagctttggtagatgcccatgttctgagaaggctacagcttcctaatgcaaaattgttaatgtgtgtatcattacttgcaagcttacactcttcttgacattgcatctttcaaagggatatagaaatggattagctgcatgaaaaaaggcaatagaactcctaattctacagaactaggtcaatcgcagcaatctatgttggcctgcaaaaatattctctgccgtctagaatgcaagtgcctatgaatgggaaattttgaaatctaattgcttcagcttctagttgtgtagtcctgtaaatcgtgtaagctttttatatcaatacttgtgtcttgatggcagccttctctttcatttgccattatatgttcaccttttactcaaaaaacagggatacttacgtcaaagacatggttggggagagctctaatgatcgtaatgacagagcaattcgtgttgctgcacgttggtaccaaagtcatcttggtgagagcgtgaaggttctactgatcacaaatgacagagataacaaaaggaaagcgattgaagaaggccttaacgctgagacagttgagtcatatgtaagatcgcttgcacagcctggtttgcttgatttggttgttgttccaactagcggagatgtttctatggaagatgtagacgatcatagaccatcaaagaagaaagtaatctacaatgagcacaaacctatgtcagaaattacatctggtttgcggtgtggaatctaccatcaagggaagcttcgagttaatcgttacaatccgtttgaagcttatgttggaagcgagagcattggtgatgagattgttatccgtggccgctcaaatatgaacagggcctttgatggtgatatagttgctgttgagctcttgccacaagatcaatggcacgagtcaaagtcttttatagcagatgatgatgaagaagaagaagaagatgttcatttagtccctaatagtgctgatgatgctcctcggaacactaattccacacaatcaacagttggatcatcagctccttccatttctagtcgtccagttgggcgtgttatgggtataatcaagcgaaattggaattcgtactgtggatccttgcagccgatgcccatgcctgctggtagtgggggtgtcgctcatgctttatttgtttcaaaagatcgaagagttcctaagattcgaattcaaaccaggcagcttgagaatcttgtgaacaaaagaattgttgtcgcggttgattcatgggatgttttgtctcgatatccatcaggacactatgtacgaaccattggagatattggtgacaaagaaactgaaacagaggttgtcttaatagagaatgatatcaacaccaggcctttctctacacaagtccttgcttgtttgccacctttaccttggacattatcaccagaagatctggctaatcctaatagacaagacttacgccaagtgagagtctttagtgtggatccaccagatgtttgttcacttcgtgctgatgttgaacggttggcattctctgtcatttgggaaatgactccggatgctgatgttatatcaacgagatatacaaagagtgttatcaaatcttgtgctgcaatgtcttatgttgaagcccaggcaagaatggatgacagccgcttagttgatccactaactgtagacttgcggaacttaaattcattggcaaagatcatgcgacaacgccgttgtgaaagaggggctttgactcttgcttctgcagaagtaaaatttgagattgatagtgaaactcatgatcctcttgacataggaatttatcaaatccgtgaggcaaatcaaatgattgaagaatttatgttggctgcaaatgtttctgttgctgagaagattttgaagcatttccccttatgttcattgctaaggcgccatcctagcccaacaaaagagatgcttgagccattactccgtactgcctcttcgattggcctaaatctggacgtgtcatcctcaaaggcattagctgaatcacttgacaacgcaaagagcaatgacccatacttcaacaagcttattagaattttggcgactagatgcatgacacaggctgtttatttctgcagtggagatttgaccttttctgaatattaccattatgggcttgctgcttctctttacactcatttcacttctcccattcgcagatatgcagatgttgttgttcatagattgctagctgcagctctgaatattgcaaagctcccaccaatctttcaggatggtccacaacttacaggcattgctgacaacctgaattacaggcacagaaatgcccagatggcaagcagagcatcagttgaactccacacccacatatatttcaagacaaggccaactgacactgaagctaggatagtaaagatcaaggcaaatggtttcatagtatttgtcccaaagtttggcatagaagggcccatctaccttactccgaagggcgacaaaggcggtgattgggttgttgacgaggtgcaccagagagtaaccaagcccggaacaaacatcagctatgctatcctccagactgtcaggattcatatggaggttgttgaacctcagcctcatcgcccaaagctgcaactcaccctgatatgaaaaatgtacagctgaattgtagcaacattgtagtgttttcccgggcctctcacacctccagctcactctttagttcaacattggtgtgattttcgatttgtaaaactaatcagtaatcaccacatggtcaagattttgtagtatcagatagttttttctcaatacatggggctctatgcatggaagcttagtttctgaatggtactcacaatagagaaaatatacgacattgtattctgtttatgtgaaagagatgtatgttaatgtgacaagggtggttattgtgcgcacgcaccattcatttatatgggaagcgaacattatttttgcatggccaaatcttgctgaacttttaccattac

SEQ ID NO: 201315 - DNA, 649 bp, Zea Mays
gtgtctgatgtggagccatgccatccggatagggatagcctcgcccatagcagctgcctgaaagttctctctgtttcctttgtcttctccagttgcccggcttcgtctccggtaacgccgcagcagcaccggcagagttcacgcagatggaagccgcgcgccagtccctcatcgcgatctcccagtcggtcccggaggtacagggcgaagcttatctccatctccaaccagtcgcccgacgcgcggcctacgacgtgccctcgcaacaacggcgccgcctaaagagccgcgtttgtgtattgtaacgtcgccgcatgtacgtgtacgtgtactggacacctaggtgtgtccgtgtgtgttctgcagttctgctaataatactcgtagcccaagaacaagaaccaggatatgggccttaataatcaccttgaactgccaaagggaacgcctgtgtggctgtgtgcaagcgtgctaaaggccacttagaaaagtctcattagcatctgagttgagttccagttccactcttatgttttcaacagtagacaatgttcctgttcgtgagttgtctgtgtgattttcttctaaatttttttatggactaaaaaaaggctacggtgattttagagagaatatttaatgctagact

SEQ ID NO: 201316 - DNA, 675 bp, Zea Mays
gtgtctgatgtggagccatgccatccggatagggatagcctcgcccatagcagctgcctgaaagttctctctgtttcctttgtcttctccagttgcccggcttcgtctccggtaacgcactcagtcgatggcctcacccacagccgcagcagcaccggcagagttcacgcagatggaagccgcgcgccagtccctcatcgcgatctcccagtcggtcccggaggtacagggcgaagcttatctccatctccaaccagtcgcccgacgcgcggcctacgacgtgccctcgcaacaacggcgccgcctaaagagccgcgtttgtgtattgtaacgtcgccgcatgtacgtgtacgtgtactggacacctaggtgtgtccgtgtgtgttctgcagttctgctaataatactcgtagcccaagaacaagaaccaggatatgggccttaataatcaccttgaactgccaaagggaacgcctgtgtggctgtgtgcaagcgtgctaaaggccacttagaaaagtctcattagcatctgagttgagttccagttccactcttatgttttcaacagtagacaatgttcctgttcgtgagttgtctgtgtgattttcttctaaatttttttatggactaaaaaaaggctacggtgattttagagagaatatttaatgctagact

SEQ ID NO: 201317 - DNA, 2736 bp, Zea Mays
ccgagaccccgacccaccccgcctcccccgccgccgcgctcgcgctcccccgcgacagccgccatacgccctatctccgccgtgcctgcgcctcctcccccgcccgcccgagacccgccaagtttcccttccttgcacggcgagatccaccatcggcgcccccttccctggcgagccacagccgtccatgttcctggccaccggcgacctcccttctctagcccttggcggcgagccaacacctcctcccatggctgccccccagaccccagtcccgtccgcgcatccgctcttccgtcagcgacgcacctattctcccctctctccccgacgtcgcccatggcgtggacggcgacctccctcaccctgcaactctgcacgtgtaagggccgtgttgcccgcctcctttccccacaccggcgcagccccctgtcgccgcggccccttccccaaacagcacggcaccacatgctccccctgccgcgcccgcactctccttccccaaataacacggccccacatcgctggttgcctcgcctcgccggggacccagcacgatggtcagggagctggtgggtgggggagacagggaggagcggaggaggaggtcaagctcaacatggacattgtgttcgtgacgctgccttccccaccgacaccaacgactcactccagaacccggatctggggcccttcctcctcaagccatggtattgggcgagggtggcgccgcctcgcgtgcttgagttcgccgagcgcgccgccagggtgctcgagcgaagaggtgagggcaccgagctcgagctcgccatgaatctccacatcgctgctggcatccactgcggactcagccaccaagccctgacattgtagccagtttcttgcaatcagaacgaatgccagttggtaaccatttaacatttcttttgctgtgtcaacttattggagttggagagaggctatcactatactgacctttatatcatcagaattgacataaatgtgatttacacgtagatacaagtttgtggcagagatttctctgacacgccaatcagtcttcgatgcgaatgcttgttgctcatatggacttgtggttgtgataatgagttcatctccgtgcacatttgtcgtccttgtggttacagcagttaactgagtagtctctcttgactgcaaaacaagcaatctgttgcctctgctgtgatggtggagcaatttcagcgccaagaatgatatctcgcattttagattgtgtcagtgcagaagtattaacattgtttttctttgcataatcagaaaggatgaggtcccttagtgcacactcaaccttcaaccactgttcatcattcagagatggccatatatgatgtgtttcagtaataattgttttgtcaggtatggttcatatattcaaatatccaaacctcatttggagttgtgataccagcaacctttgacatcgattcaagatgctactggagtgttattcatatgccactgcacaaatggacgttgacacgttgtagtgatcacactgtcacgagagctgagcaaactacagcctgcaagagctacacgtggcatgcttgaccacatcatggtggagaatgcaagtgttaaagttgcattgaatcgcattgccgttgtttctgtcctggatgcacataccctgtcagtgatgtcttatgaagcttggaggctcatacatctgtttctgttggctctctctagctatatgcagtggagctgctaatatgcatgaagtttgggctaggtgagcttcctctttcacttttcaaaccagtataggtattggccgatgtcaagaagacaaggccggcgacgagaggacgacagcgtgcaagaagagaaggcccatgttaggcgcaactatagggctcaaggtcaatcagttgtggtcacacttttccatttttacgttcagctaaactgaccccctgtctcatggtgcaactgtgcaaggataggcaacaagtgttcaacaatatgtctgtggatcaattgacctgcatttcagcttttagttgaggatcaaaatctcgtgtcgttcagggccctcggtagagagacattaatgtgtcggcaccgtggatcgtcgcagttgtgggtcactgtaacggcactggtcacaggcaccatctgcctctgttcgtcctcctctattggcctcctcagcacctacagggtccagatggaaaagtttctataatacatatgtaacaaatacatactccttgttcaagagatcgtaagcaagattgtaaacggtatccaacgcagaagcacctaatatggttacagagtattactgatgggcttacctgcagactgcatgctactactcaaggatgttgttgcaaatgagttgtggagaaccgtagatgcaaatggttggagagcatcttctgcaccacacatctattggcctcacataccagctgaatctgagagcaatgggtacttgtgtgtccggtgcaacggcggcttgaccttacaaatcagtgttgtatgactaatataaaactctctctctctaaagtagcatagttcaccatgcaagttttgtgtattcatggcaacatatctgaaagatttaagattacttctaccttgattttgtagatatgaaatgttgttgtcattgcacgaatcattaatgacttgattttgctctctatatgctatcttagaagtttcagagttcattgtttg

SEQ ID NO: 201318 - DNA, 3375 bp, Zea Mays
ccgagaccccgacccaccccgcctcccccgccgccgcgctcgcgctcccccgcgacagccgccatacgccctatctccgccgtgcctgcgcctcctcccccgcccgcccgagacccgccaagtttcccttccttgcacggcgagatccaccatcggcgcccccttccctggcgagccacagccgtccatgttcctggccaccggcgacctcccttctctagcccttggcggcgagccaacacctcctcccatggctgccccccagaccccagtcccgtccgcgcatccgctcttccgtcagcgacgcacctattctcccctctctccccgacgtcgcccatggcgtggacggcgacctccctcaccctgcaactctgcacgtgtaagggccgtgttgcccgcctcctttccccacaccggcgcagccccctgtcgccgcggccccttccccaaacagcacggcaccacatgctccccctgccgcgcccgcactctccttccccaaataacacggccccacatcgctggttgcctcgcctcgccggggacccagcacgatggtcagggagctggtgggtgggggagacagggaggagcggaggaggaggtcaagctcaacatggacattgtgttcgtgacgctgccttccccaccgacaccaacgactcactccagaacccggatctggggcccttcctcctcaagccatggtattgggcgagggtggcgccgcctcgcgtgcttgagttcgccgagcgcgccgccagggtgctcgagcgaagaggtgagggcaccgagctcgagctcgccatgaatctccacatcgctgctggcatccactgcggactcagccaccaagccctgacattgtagccagtttcttgcaatcagaacgaatgccagttggtaaccatttaacatttcttttgctgtgtcaacttattggagttggagagaggctatcactatactgacctttatatcatcagaattgacataaatgtgatttacacgtagatacaagtttgtggcagagatttctctgacacgccaatcagtcttcgatgcgaatgcttgttgctcatatggacttgtggttgtgataatgagttcatctccgtgcacatttgtcgtccttgtggttacagcagttaactgagtagtctctcttgactgcaaaacaagcaatctgttgcctctgctgtgatggtggagcaatttcagcgccaagaatgatatctcgcattttagattgtgtcagtgcagaagtattaacattgtttttctttgcataatcagaaaggatgaggtcccttagtgcacactcaaccttcaaccactgttcatcattcagagatggccatatatgatgtgtttcagtaataattgttttgtcaggtttgagcaacatctttgccttctcattattcacatgaagtgcacgtagaataagcacaatgtgggagaatgttgtgtatgatgatatacttttcaaccaatcatcatatatattataaagaaccatctgtggttcagttgccttcagtataagatcaccaaacttctcaatcttcaagcaagcctggaaaggaagctgcagctcactgcccttaataacaatgttagggaagtcaggtagatggacctccaagggatccaacatgcccttccttgtcacaacaatttgctttggctgctcttctacaggaagagatcgaaccaatgcagcaacctcctcagcggttttccacttggccagctgcccaagacgcttttgccccgcccatacacttgtgtggataacctgcacattattatccatactcagtttaaacctacctatgttcagggttttacagaaaaacaaaatcacatgaaaactagagcagaaattcgaaaagaacaaaccttaagaaaaagttgacccgttcttggattgaaaaatgaaaatagcaccattaattggtttggtggtcaagttaccctaaaatgttttgtgaatagtgactcgatacacatttgtatcatccacgaaccatatgatttgattgctgaatatctctccatagttctgtgaagacaggtatggttcatatattcaaatatccaaacctcatttggagttgtgataccagcaacctttgacatcgattcaagatgctactggagtgttattcatatgccactgcacaaatggacgttgacacgttgtagtgatcacactgtcacgagagctgagcaaactacagcctgcaagagctacacgtggtagcctatactcctgccttgctataattttcttaattttcttttgttaatgagtgcagtttctctggctaatggtaaaaataatttgttctacaggcatgcttgaccacatcatggtggagaatgcaagtgttaaagttgcattgaatcgcattgccgttgtttctgtcctggatgcacataccctgtcagtgatgtcttatgaagcttggaggctcatacatctgtttctgttggctctctctagctatatgcagtggagctgctaatatgcatgaagtttgggctaggtgagcttcctctttcacttttcaaaccagtataggtattggccgatgtcaagaagacaaggccggcgacgagaggacgacagcgtgcaagaagagaaggcccatgttaggcgcaactatagggctcaaggtcaatcagttgtggtcacacttttccatttttacgttcagctaaactgaccccctgtctcatggtgcaactgtgcaaggataggcaacaagtgttcaacaatatgtctgtggatcaattgacctgcatttcagcttttagttgaggatcaaaatctcgtgtcgttcagggccctcggtagagagacattaatgtgtcggcaccgtggatcgtcgcagttgtgggtcactgtaacggcactggtcacaggcaccatctgcctctgttcgtcctcctctattggcctcctcagcacctacagggtccagtgctactactcaaggatgttgttgcaaatgagttgtggagaaccgtagatgcaaatggttggagagcatcttctgcaccacacatctattggcctcacataccagctgaatctgagagcaatgggtacttgtgtgtccggtgcaacggcggcttgaccttacaaatcagtgttgtatgactaatataaaactctctctctctaaagtagcatagttcaccatgcaagttttgtgtattcatggcaacatatctgaaagatttaagattacttctaccttgattttgtagatatgaaatgttgttgtcattgcacgaatcattaatgacttgattttgctctctatatgctatcttagaagtttcagagttcattgtttg

SEQ ID NO: 201319 - DNA, 2621 bp, Zea Mays
ccgagaccccgacccaccccgcctcccccgccgccgcgctcgcgctcccccgcgacagccgccatacgccctatctccgccgtgcctgcgcctcctcccccgcccgcccgagacccgccaagtttcccttccttgcacggcgagatccaccatcggcgcccccttccctggcgagccacagccgtccatgttcctggccaccggcgacctcccttctctagcccttggcggcgagccaacacctcctcccatggctgccccccagaccccagtcccgtccgcgcatccgctcttccgtcagcgacgcacctattctcccctctctccccgacgtcgcccatggcgtggacggcgacctccctcaccctgcaactctgcacgtgtaagggccgtgttgcccgcctcctttccccacaccggcgcagccccctgtcgccgcggccccttccccaaacagcacggcaccacatgctccccctgccgcgcccgcactctccttccccaaataacacggccccacatcgctggttgcctcgcctcgccggggacccagcacgatggtcagggagctggtgggtgggggagacagggaggagcggaggaggaggtcaagctcaacatggacattgtgttcgtgacgctgccttccccaccgacaccaacgactcactccagaacccggatctggggcccttcctcctcaagccatggtattgggcgagggtggcgccgcctcgcgtgcttgagttcgccgagcgcgccgccagggtgctcgagcgaagaggtgagggcaccgagctcgagctcgccatgaatctccacatcgctgctggcatccactgcggactcagccaccaagccctgacattgtagccagtttcttgcaatcagaacgaatgccagttggtaaccatttaacatttcttttgctgtgtcaacttattggagttggagagaggctatcactatactgacctttatatcatcagaattgacataaatgtgatttacacgtagatacaagtttgtggcagagatttctctgacacgccaatcagtcttcgatgcgaatgcttgttgctcatatggacttgtggttgtgataatgagttcatctccgtgcacatttgtcgtccttgtggttacagcagttaactgagtagtctctcttgactgcaaaacaagcaatctgttgcctctgctgtgatggtggagcaatttcagcgccaagaatgatatctcgcattttagattgtgtcagtgcagaagtattaacattgtttttctttgcataatcagaaaggatgaggtcccttagtgcacactcaaccttcaaccactgttcatcattcagagatggccatatatgatgtgtttcagtaataattgttttgtcagttctgtgaagacaggtatggttcatatattcaaatatccaaacctcatttggagttgtgataccagcaacctttgacatcgattcaagatgctactggagtgttattcatttgttcctgacagatgccactgcacaaatggacgttgacacgttgtagtgatcacactgtcacgagagctgagcaaactacagcctgcaagagctacacgtggcatgcttgaccacatcatggtggagaatgcaagtgttaaagttgcattgaatcgcattgccgttgtttctgtcctggatgcacataccctgtcagtgatgtcttatgaagcttggaggctcatacatctgtttctgttggctctctctagctatatgcagtggagctgctaatatgcatgaagtttgggctaggtgagcttcctctttcacttttcaaaccagtataggtattggccgatgtcaagaagacaaggccggcgacgagaggacgacagcgtgcaagaagagaaggcccatgttaggcgcaactatagggctcaaggtcaatcagttgtggtcacacttttccatttttacgttcagctaaactgaccccctgtctcatggtgcaactgtgcaaggataggcaacaagtgttcaacaatatgtctgtggatcaattgacctgcatttcagcttttagttgaggatcaaaatctcgtgtcgttcagggccctcggtagagagacattaatgtgtcggcaccgtggatcgtcgcagttgtgggtcactgtaacggcactggtcacaggcaccatctgcctctgttcgtcctcctctattggcctcctcagcacctacagggtccagtgctactactcaaggatgttgttgcaaatgagttgtggagaaccgtagatgcaaatggttggagagcatcttctgcaccacacatctattggcctcacataccagctgaatctgagagcaatgggtacttgtgtgtccggtgcaacggcggcttgaccttacaaatcagtgttgtatgactaatataaaactctctctctctaaagtagcatagttcaccatgcaagttttgtgtattcatggcaacatatctgaaagatttaagattacttctaccttgattttgtagatatgaaatgttgttgtcattgcacgaatcattaatgacttgattttgctctctatatgctatcttagaagtttcagagttcattgtttg

SEQ ID NO: 201320 - DNA, 3798 bp, Zea Mays
ccgagaccccgacccaccccgcctcccccgccgccgcgctcgcgctcccccgcgacagccgccatacgccctatctccgccgtgcctgcgcctcctcccccgcccgcccgagacccgccaagtttcccttccttgcacggcgagatccaccatcggcgcccccttccctggcgagccacagccgtccatgttcctggccaccggcgacctcccttctctagcccttggcggcgagccaacacctcctcccatggctgccccccagaccccagtcccgtccgcgcatccgctcttccgtcagcgacgcacctattctcccctctctccccgacgtcgcccatggcgtggacggcgacctccctcaccctgcaactctgcacgtgtaagggccgtgttgcccgcctcctttccccacaccggcgcagccccctgtcgccgcggccccttccccaaacagcacggcaccacatgctccccctgccgcgcccgcactctccttccccaaataacacggccccacatcgctggttgcctcgcctcgccggggacccagcacgatggtcagggagctggtgggtgggggagacagggaggagcggaggaggaggtcaagctcaacatggacattgtgttcgtgacgctgccttccccaccgacaccaacgactcactccagaacccggatctggggcccttcctcctcaagccatggtattgggcgagggtggcgccgcctcgcgtgcttgagttcgccgagcgcgccgccagggtgctcgagcgaagaggtgagggcaccgagctcgagctcgccatgaatctccacatcgctgctggcatccactgcggactcagccaccaagccctgacattgtagccagtttcttgcaatcagaacgaatgccagttggtaaccatttaacatttcttttgctgtgtcaacttattggagttggagagaggctatcactatactgacctttatatcatcagaattgacataaatgtgatttacacgtagatacaagtttgtggcagagatttctctgacacgccaatcagtcttcgatgcgaatgcttgttgctcatatggacttgtggttgtgataatgagttcatctccgtgcacatttgtcgtccttgtggttacagcagttaactgagtagtctctcttgactgcaaaacaagcaatctgttgcctctgctgtgatggtggagcaatttcagcgccaagaatgatatctcgcattttagattgtgtcagtgcagaagtattaacattgtttttctttgcataatcagaaaggatgaggtcccttagtgcacactcaaccttcaaccactgttcatcattcagagatggccatatatgatgtgtttcagtaataattgttttgtcaggtttgagcaacatctttgccttctcattattcacatgaagtgcacgtagaataagcacaatgtgggagaatgttgtgtatgatgatatacttttcaaccaatcatcatatatattataaagaaccatctgtggttcagttgccttcagtataagatcaccaaacttctcaatcttcaagcaagcctggaaaggaagctgcagctcactgcccttaataacaatgttagggaagtcaggtagatggacctccaagggatccaacatgcccttccttgtcacaacaatttgctttggctgctcttctacaggaagagatcgaaccaatgcagcaacctcctcagcggttttccacttggccagctgcccaagacgcttttgccccgcccatacacttgtgtggataacctgcacattattatccatactcagtttaaacctacctatgttcagggttttacagaaaaacaaaatcacatgaaaactagagcagaaattcgaaaagaacaaaccttaagaaaaagttgacccgttcttggattgaaaaatgaaaatagcaccattaattggtttggtggtcaagttaccctaaaatgttttgtgaatagtgactcgatacacatttgtatcatccacgaaccatatgatttgattgctgaatatctctccatagttctgtgaagacaggtatggttcatatattcaaatatccaaacctcatttggagttgtgataccagcaacctttgacatcgattcaagatgctactggagtgttattcatgtgagtgtaatttagtacatgatccaactggtaacaaactttatgatactagcatatcacataatagatgagattactagaaacagctcatgttattgaatatagaaatttcagttctattgtttttacacaaatttgtttgtgatgcttcaaaccgctaatgattttttttaaaaaagttgtgcaatgagcatatcacataatatatgagaatcttaggaataaaccaagttgctaatgagtaaaattttggctttgctttttaaaaaatatgggttcaagttgttcctgacagatgccactgcacaaatggacgttgacacgttgtagtgatcacactgtcacgagagctgagcaaactacagcctgcaagagctacacgtggtagcctatactcctgccttgctataattttcttaattttcttttgttaatgagtgcagtttctctggctaatggtaaaaataatttgttctacaggcatgcttgaccacatcatggtggagaatgcaagtgttaaagttgcattgaatcgcattgccgttgtttctgtcctggatgcacataccctgtcagtgatgtcttatgaagcttggaggctcatacatctgtttctgttggctctctctagctatatgcagtggagctgctaatatgcatgaagtttgggctaggtgagcttcctctttcacttttcaaaccagtataggtattggccgatgtcaagaagacaaggccggcgacgagaggacgacagcgtgcaagaagagaaggcccatgttaggcgcaactatagggctcaaggtcaatcagttgtggtcacacttttccatttttacgttcagctaaactgaccccctgtctcatggtgcaactgtgcaaggataggcaacaagtgttcaacaatatgtctgtggatcaattgacctgcatttcagcttttagttgaggatcaaaatctcgtgtcgttcagggccctcggtagagagacattaatgtgtcggcaccgtggatcgtcgcagttgtgggtcactgtaacggcactggtcacaggcaccatctgcctctgttcgtcctcctctattggcctcctcagcacctacagggtccagatggaaaagtttctataatacatatgtaacaaatacatactccttgttcaagagatcgtaagcaagattgtaaacggtatccaacgcagaagcacctaatatggttacagagtattactgatgggcttacctgcagactgcagatgttgttgcaaatgagttgtggagaaccgtagatgcaaatggttggagagcatcttctgcaccacacatctattggcctcacataccagctgaatctgagagcaatgggtacttgtgtgtccggtgcaacggcggcttgaccttacaaatcagtgttgtatgactaatataaaactctctctctctaaagtagcatagttcaccatgcaagttttgtgtattcatggcaacatatctgaaagatttaagattacttctaccttgattttgtagatatgaaatgttgttgtcattgcacgaatcattaatgacttgattttgctctctatatgctatcttagaagtttcagagttcattgtttg

SEQ ID NO: 201321 - DNA, 3948 bp, Zea Mays
ccgagaccccgacccaccccgcctcccccgccgccgcgctcgcgctcccccgcgacagccgccatacgccctatctccgccgtgcctgcgcctcctcccccgcccgcccgagacccgccaagtttcccttccttgcacggcgagatccaccatcggcgcccccttccctggcgagccacagccgtccatgttcctggccaccggcgacctcccttctctagcccttggcggcgagccaacacctcctcccatggctgccccccagaccccagtcccgtccgcgcatccgctcttccgtcagcgacgcacctattctcccctctctccccgacgtcgcccatggcgtggacggcgacctccctcaccctgcaactctgcacgtgtaagggccgtgttgcccgcctcctttccccacaccggcgcagccccctgtcgccgcggccccttccccaaacagcacggcaccacatgctccccctgccgcgcccgcactctccttccccaaataacacggccccacatcgctggttgcctcgcctcgccggggacccagcacgatggtcagggagctggtgggtgggggagacagggaggagcggaggaggaggtcaagctcaacatggacattgtgttcgtgacgctgccttccccaccgacaccaacgactcactccagaacccggatctggggcccttcctcctcaagccatggtattgggcgagggtggcgccgcctcgcgtgcttgagttcgccgagcgcgccgccagggtgctcgagcgaagaggtgagggcaccgagctcgagctcgccatgaatctccacatcgctgctggcatccactgcggactcagccaccaagccctgacattgtagccagtttcttgcaatcagaacgaatgccagttggtaaccatttaacatttcttttgctgtgtcaacttattggagttggagagaggctatcactatactgacctttatatcatcagaattgacataaatgtgatttacacgtagatacaagtttgtggcagagatttctctgacacgccaatcagtcttcgatgcgaatgcttgttgctcatatggacttgtggttgtgataatgagttcatctccgtgcacatttgtcgtccttgtggttacagcagttaactgagtagtctctcttgactgcaaaacaagcaatctgttgcctctgctgtgatggtggagcaatttcagcgccaagaatgatatctcgcattttagattgtgtcagtgcagaagtattaacattgtttttctttgcataatcagaaaggatgaggtcccttagtgcacactcaaccttcaaccactgttcatcattcagagatggccatatatgatgtgtttcagtaataattgttttgtcaggtttgagcaacatctttgccttctcattattcacatgaagtgcacgtagaataagcacaatgtgggagaatgttgtgtatgatgatatacttttcaaccaatcatcatatatattataaagaaccatctgtggttcagttgccttcagtataagatcaccaaacttctcaatcttcaagcaagcctggaaaggaagctgcagctcactgcccttaataacaatgttagggaagtcaggtagatggacctccaagggatccaacatgcccttccttgtcacaacaatttgctttggctgctcttctacaggaagagatcgaaccaatgcagcaacctcctcagcggttttccacttggccagctgcccaagacgcttttgccccgcccatacacttgtgtggataacctgcacattattatccatactcagtttaaacctacctatgttcagggttttacagaaaaacaaaatcacatgaaaactagagcagaaattcgaaaagaacaaaccttaagaaaaagttgacccgttcttggattgaaaaatgaaaatagcaccattaattggtttggtggtcaagttaccctaaaatgttttgtgaatagtgactcgatacacatttgtatcatccacgaaccatatgatttgattgctgaatatctctccatagttctgtgaagacaggtatggttcatatattcaaatatccaaacctcatttggagttgtgataccagcaacctttgacatcgattcaagatgctactggagtgttattcattgatcacactgtcacgagagctgagcaaactacagcctgcaagagctacacgtggcatgcttgaccacatcatggtggagaatgcaagtgttaaagttgcattgaatcgcattgccgttgtttctgtcctggatgcacataccctgtcagtgatgtcttatgaagcttggaggctcatacatctgtttctgttggctctctctagctatatgcagtggagctgctaatatgcatgaagtttgggctaggtgagcttcctctttcacttttcaaaccagtataggtattggccgatgtcaagaagacaaggccggcgacgagaggacgacagcgtgcaagaagagaaggcccatgttaggcgcaactatagggctcaaggtcaatcagttgtggtcacacttttccatttttacgttcagctaaactgaccccctgtctcatggtgcaactgtgcaaggataggcaacaagtgttcaacaatatgtctgtggatcaattgacctgcatttcagcttttagttgaggatcaaaatctcgtgtcgttcagggccctcggtagagagacattaatgtgtcggcaccgtggatcgtcgcagttgtgggtcactgtaacggcactggtcacaggcaccatctgcctctgttcgtcctcctctattggcctcctcagcacctacagggtccagatggaaaagtttctataatacatatgtaacaaatacatactccttgttcaagagatcgtaagcaagattgtaaacggtatccaacgcagaagcacctaatatggttacagagtattactgatgggcttacctgcagactgcagtaagttgcgatagttctttccaaagttgtttagatccaacttttccataactattattttgcttaatcagcacccccaagtatgtagcttactgttcctatgaaaaactgagaaacataaacaattagtttgctgcattatagtagacatgtaatgtaaacattgaagcatgcgagcaggttacgacataaatgtaaggacatttgtaaaattgataattgacacatgatgtttcataacctcagttttgctagcttaggctgtcagggaagtgatgcatcaatggatcaatactgtttattgattataatgaaaagactcgagtaaggaattgataaataactgttaaaatcaagtcagcgcaatgtatggatctatgcatcttgttatggcacataatatttaatgtataaggaataatgttaaaaataaatggcctaatttgtctcagacatttttttggtgcatcactgattgagttatgctatatgcatggaattgaattgtatatacaatgtttatttgaattttctatcaaactatatcttgtaccaatatcagtgctactactcaaggatgttgttgcaaatgagttgtggagaaccgtagatgcaaatggttggagagcatcttctgcaccacacatctattggcctcacataccagctgaatctgagagcaatgggtacttgtgtgtccggtgcaacggcggcttgaccttacaaatcagtgttgtatgactaatataaaactctctctctctaaagtagcatagttcaccatgcaagttttgtgtattcatggcaacatatctgaaagatttaagattacttctaccttgattttgtagatatgaaatgttgttgtcattgcacgaatcattaatgacttgattttgctctctatatgctatcttagaagtttcagagttcattgtttg

SEQ ID NO: 201322 - DNA, 3545 bp, Zea Mays
ccgagaccccgacccaccccgcctcccccgccgccgcgctcgcgctcccccgcgacagccgccatacgccctatctccgccgtgcctgcgcctcctcccccgcccgcccgagacccgccaagtttcccttccttgcacggcgagatccaccatcggcgcccccttccctggcgagccacagccgtccatgttcctggccaccggcgacctcccttctctagcccttggcggcgagccaacacctcctcccatggctgccccccagaccccagtcccgtccgcgcatccgctcttccgtcagcgacgcacctattctcccctctctccccgacgtcgcccatggcgtggacggcgacctccctcaccctgcaactctgcacgtgtaagggccgtgttgcccgcctcctttccccacaccggcgcagccccctgtcgccgcggccccttccccaaacagcacggcaccacatgctccccctgccgcgcccgcactctccttccccaaataacacggccccacatcgctggttgcctcgcctcgccggggacccagcacgatggtcagggagctggtgggtgggggagacagggaggagcggaggaggaggtcaagctcaacatggacattgtgttcgtgacgctgccttccccaccgacaccaacgactcactccagaacccggatctggggcccttcctcctcaagccatggtattgggcgagggtggcgccgcctcgcgtgcttgagttcgccgagcgcgccgccagggtgctcgagcgaagaggtgagggcaccgagctcgagctcgccatgaatctccacatcgctgctggcatccactgcggactcagccaccaagccctgacattgtagccagtttcttgcaatcagaacgaatgccagttgatacaagtttgtggcagagatttctctgacacgccaatcagtcttcgatgcgaatgcttgttgctcatatggacttgtggttgtgataatgagttcatctccgtgcacatttgtcgtccttgtggttacagcagttaactgagtagtctctcttgactgcaaaacaagcaatctgttgcctctgctgtgatggtggagcaatttcagcgccaagaatgatatctcgcattttagattgtgtcagtgcagaagtattaacattgtttttctttgcataatcagaaaggatgaggtcccttagtgcacactcaaccttcaaccactgttcatcattcagagatggccatatatgatgtgtttcagtaataattgttttgtcaggtttgagcaacatctttgccttctcattattcacatgaagtgcacgtagaataagcacaatgtgggagaatgttgtgtatgatgatatacttttcaaccaatcatcatatatattataaagaaccatctgtggttcagttgccttcagtataagatcaccaaacttctcaatcttcaagcaagcctggaaaggaagctgcagctcactgcccttaataacaatgttagggaagtcaggtagatggacctccaagggatccaacatgcccttccttgtcacaacaatttgctttggctgctcttctacaggaagagatcgaaccaatgcagcaacctcctcagcggttttccacttggccagctgcccaagacgcttttgccccgcccatacacttgtgtggataacctgcacattattatccatactcagtttaaacctacctatgttcagggttttacagaaaaacaaaatcacatgaaaactagagcagaaattcgaaaagaacaaaccttaagaaaaagttgacccgttcttggattgaaaaatgaaaatagcaccattaattggtttggtggtcaagttaccctaaaatgttttgtgaatagtgactcgatacacatttgtatcatccacgaaccatatgatttgattgctgaatatctctccatagttctgtgaagacaggtatggttcatatattcaaatatccaaacctcatttggagttgtgataccagcaacctttgacatcgattcaagatgctactggagtgttattcatgtgagtgtaatttagtacatgatccaactggtaacaaactttatgatactagcatatcacataatagatgagattactagaaacagctcatgttattgaatatagaaatttcagttctattgtttttacacaaatttgtttgtgatgcttcaaaccgctaatgattttttttaaaaaagttgtgcaatgagcatatcacataatatatgagaatcttaggaataaaccaagttgctaatgagtaaaattttggctttgctttttaaaaaatatgggttcaagttgttcctgacagatgccactgcacaaatggacgttgacacgttgtagtgatcacactgtcacgagagctgagcaaactacagcctgcaagagctacacgtggtagcctatactcctgccttgctataattttcttaattttcttttgttaatgagtgcagtttctctggctaatggtaaaaataatttgttctacaggcatgcttgaccacatcatggtggagaatgcaagtgttaaagttgcattgaatcgcattgccgttgtttctgtcctggatgcacataccctgtcagtgatgtcttatgaagcttggaggctcatacatctgtttctgttggctctctctagctatatgcagtggagctgctaatatgcatgaagtttgggctaggtgagcttcctctttcacttttcaaaccagtataggtattggccgatgtcaagaagacaaggccggcgacgagaggacgacagcgtgcaagaagagaaggcccatgttaggcgcaactatagggctcaaggtcaatcagttgtggtcacacttttccatttttacgttcagctaaactgaccccctgtctcatggtgcaactgtgcaaggataggcaacaagtgttcaacaatatgtctgtggatcaattgacctgcatttcagcttttagttgaggatcaaaatctcgtgtcgttcagggccctcggtagagagacattaatgtgtcggcaccgtggatcgtcgcagttgtgggtcactgtaacggcactggtcacaggcaccatctgcctctgttcgtcctcctctattggcctcctcagcacctacagggtccaggatgttgttgcaaatgagttgtggagaaccgtagatgcaaatggttggagagcatcttctgcaccacacatctattggcctcacataccagctgaatctgagagcaatgggtacttgtgtgtccggtgcaacggcggcttgaccttacaaatcagtgttgtatgactaatataaaactctctctctctaaagtagcatagttcaccatgcaagttttgtgtattcatggcaacatatctgaaagatttaagattacttctaccttgattttgtagatatgaaatgttgttgtcattgcacgaatcattaatgacttgattttgctctctatatgctatcttagaagtttcagagttcattgtttg

SEQ ID NO: 201323 - DNA, 2753 bp, Zea Mays
ccgagaccccgacccaccccgcctcccccgccgccgcgctcgcgctcccccgcgacagccgccatacgccctatctccgccgtgcctgcgcctcctcccccgcccgcccgagacccgccaagtttcccttccttgcacggcgagatccaccatcggcgcccccttccctggcgagccacagccgtccatgttcctggccaccggcgacctcccttctctagcccttggcggcgagccaacacctcctcccatggctgccccccagaccccagtcccgtccgcgcatccgctcttccgtcagcgacgcacctattctcccctctctccccgacgtcgcccatggcgtggacggcgacctccctcaccctgcaactctgcacgtgtaagggccgtgttgcccgcctcctttccccacaccggcgcagccccctgtcgccgcggccccttccccaaacagcacggcaccacatgctccccctgccgcgcccgcactctccttccccaaataacacggccccacatcgctggttgcctcgcctcgccggggacccagcacgatggtcagggagctggtgggtgggggagacagggaggagcggaggaggaggtcaagctcaacatggacattgtgttcgtgacgctgccttccccaccgacaccaacgactcactccagaacccggatctggggcccttcctcctcaagccatggtattgggcgagggtggcgccgcctcgcgtgcttgagttcgccgagcgcgccgccagggtgctcgagcgaagaggtgagggcaccgagctcgagctcgccatgaatctccacatcgctgctggcatccactgcggactcagccaccaagccctgacattgtagccagtttcttgcaatcagaacgaatgccagttggtaaccatttaacatttcttttgctgtgtcaacttattggagttggagagaggctatcactatactgacctttatatcatcagaattgacataaatgtgatttacacgtagatacaagtttgtggcagagatttctctgacacgccaatcagtcttcgatgcgaatgcttgttgctcatatggacttgtggttgtgataatgagttcatctccgtgcacatttgtcgtccttgtggttacagcagttaactgagtagtctctcttgactgcaaaacaagcaatctgttgcctctgctgtgatggtggagcaatttcagcgccaagaatgatatctcgcattttagattgtgtcagtgcagaagtattaacattgtttttctttgcataatcagaaaggatgaggtcccttagtgcacactcaaccttcaaccactgttcatcattcagagatggccatatatgatgtgtttcagtaataattgttttgtcagacaggtatggttcatatattcaaatatccaaacctcatttggagttgtgataccagcaacctttgacatcgattcaagatgctactggagtgttattcatttgttcctgacagatgccactgcacaaatggacgttgacacgttgtagtgatcacactgtcacgagagctgagcaaactacagcctgcaagagctacacgtggcatgcttgaccacatcatggtggagaatgcaagtgttaaagttgcattgaatcgcattgccgttgtttctgtcctggatgcacataccctgtcagtgatgtcttatgaagcttggaggctcatacatctgtttctgttggctctctctagctatatgcagtggagctgctaatatgcatgaagtttgggctaggtgagcttcctctttcacttttcaaaccagtataggtattggccgatgtcaagaagacaaggccggcgacgagaggacgacagcgtgcaagaagagaaggcccatgttaggcgcaactatagggctcaaggtcaatcagttgtggtcacacttttccatttttacgttcagctaaactgaccccctgtctcatggtgcaactgtgcaaggataggcaacaagtgttcaacaatatgtctgtggatcaattgacctgcatttcagcttttagttgaggatcaaaatctcgtgtcgttcagggccctcggtagagagacattaatgtgtcggcaccgtggatcgtcgcagttgtgggtcactgtaacggcactggtcacaggcaccatctgcctctgttcgtcctcctctattggcctcctcagcacctacagggtccagatggaaaagtttctataatacatatgtaacaaatacatactccttgttcaagagatcgtaagcaagattgtaaacggtatccaacgcagaagcacctaatatggttacagagtattactgatgggcttacctgcagactgcatgctactactcaaggatgttgttgcaaatgagttgtggagaaccgtagatgcaaatggttggagagcatcttctgcaccacacatctattggcctcacataccagctgaatctgagagcaatgggtacttgtgtgtccggtgcaacggcggcttgaccttacaaatcagtgttgtatgactaatataaaactctctctctctaaagtagcatagttcaccatgcaagttttgtgtattcatggcaacatatctgaaagatttaagattacttctaccttgattttgtagatatgaaatgttgttgtcattgcacgaatcattaatgacttgattttgctctctatatgctatcttagaagtttcagagttcattgtttg

SEQ ID NO: 201324 - DNA, 3310 bp, Zea Mays
ccgagaccccgacccaccccgcctcccccgccgccgcgctcgcgctcccccgcgacagccgccatacgccctatctccgccgtgcctgcgcctcctcccccgcccgcccgagacccgccaagtttcccttccttgcacggcgagatccaccatcggcgcccccttccctggcgagccacagccgtccatgttcctggccaccggcgacctcccttctctagcccttggcggcgagccaacacctcctcccatggctgccccccagaccccagtcccgtccgcgcatccgctcttccgtcagcgacgcacctattctcccctctctccccgacgtcgcccatggcgtggacggcgacctccctcaccctgcaactctgcacgtgtaagggccgtgttgcccgcctcctttccccacaccggcgcagccccctgtcgccgcggccccttccccaaacagcacggcaccacatgctccccctgccgcgcccgcactctccttccccaaataacacggccccacatcgctggttgcctcgcctcgccggggacccagcacgatggtcagggagctggtgggtgggggagacagggaggagcggaggaggaggtcaagctcaacatggacattgtgttcgtgacgctgccttccccaccgacaccaacgactcactccagaacccggatctggggcccttcctcctcaagccatggtattgggcgagggtggcgccgcctcgcgtgcttgagttcgccgagcgcgccgccagggtgctcgagcgaagaggtgagggcaccgagctcgagctcgccatgaatctccacatcgctgctggcatccactgcggactcagccaccaagccctgacattgtagccagtttcttgcaatcagaacgaatgccagttgatacaagtttgtggcagagatttctctgacacgccaatcagtcttcgatgcgaatgcttgttgctcatatggacttgtggttgtgataatgagttcatctccgtgcacatttgtcgtccttgtggttacagcagttaactgagtagtctctcttgactgcaaaacaagcaatctgttgcctctgctgtgatggtggagcaatttcagcgccaagaatgatatctcgcattttagattgtgtcagtgcagaagtattaacattgtttttctttgcataatcagaaaggatgaggtcccttagtgcacactcaaccttcaaccactgttcatcattcagagatggccatatatgatgtgtttcagtaataattgttttgtcaggtttgagcaacatctttgccttctcattattcacatgaagtgcacgtagaataagcacaatgtgggagaatgttgtgtatgatgatatacttttcaaccaatcatcatatatattataaagaaccatctgtggttcagttgccttcagtataagatcaccaaacttctcaatcttcaagcaagcctggaaaggaagctgcagctcactgcccttaataacaatgttagggaagtcaggtagatggacctccaagggatccaacatgcccttccttgtcacaacaatttgctttggctgctcttctacaggaagagatcgaaccaatgcagcaacctcctcagcggttttccacttggccagctgcccaagacgcttttgccccgcccatacacttgtgtggataacctgcacattattatccatactcagtttaaacctacctatgttcagggttttacagaaaaacaaaatcacatgaaaactagagcagaaattcgaaaagaacaaaccttaagaaaaagttgacccgttcttggattgaaaaatgaaaatagcaccattaattggtttggtggtcaagttaccctaaaatgttttgtgaatagtgactcgatacacatttgtatcatccacgaaccatatgatttgattgctgaatatctctccatagttctgtgaagacaggtatggttcatatattcaaatatccaaacctcatttggagttgtgataccagcaacctttgacatcgattcaagatgctactggagtgttattcatatgccactgcacaaatggacgttgacacgttgtagtgatcacactgtcacgagagctgagcaaactacagcctgcaagagctacacgtggcatgcttgaccacatcatggtggagaatgcaagtgttaaagttgcattgaatcgcattgccgttgtttctgtcctggatgcacataccctgtcagtgatgtcttatgaagcttggaggctcatacatctgtttctgttggctctctctagctatatgcagtggagctgctaatatgcatgaagtttgggctaggtgagcttcctctttcacttttcaaaccagtataggtattggccgatgtcaagaagacaaggccggcgacgagaggacgacagcgtgcaagaagagaaggcccatgttaggcgcaactatagggctcaaggtcaatcagttgtggtcacacttttccatttttacgttcagctaaactgaccccctgtctcatggtgcaactgtgcaaggataggcaacaagtgttcaacaatatgtctgtggatcaattgacctgcatttcagcttttagttgaggatcaaaatctcgtgtcgttcagggccctcggtagagagacattaatgtgtcggcaccgtggatcgtcgcagttgtgggtcactgtaacggcactggtcacaggcaccatctgcctctgttcgtcctcctctattggcctcctcagcacctacagggtccagatggaaaagtttctataatacatatgtaacaaatacatactccttgttcaagagatcgtaagcaagattgtaaacggtatccaacgcagaagcacctaatatggttacagagtattactgatgggcttacctgcagactgcatgctactactcaaggatgttgttgcaaatgagttgtggagaaccgtagatgcaaatggttggagagcatcttctgcaccacacatctattggcctcacataccagctgaatctgagagcaatgggtacttgtgtgtccggtgcaacggcggcttgaccttacaaatcagtgttgtatgactaatataaaactctctctctctaaagtagcatagttcaccatgcaagttttgtgtattcatggcaacatatctgaaagatttaagattacttctaccttgattttgtagatatgaaatgttgttgtcattgcacgaatcattaatgacttgattttgctctctatatgctatcttagaagtttcagagttcattgtttg

SEQ ID NO: 201325 - DNA, 3463 bp, Zea Mays
ccgagaccccgacccaccccgcctcccccgccgccgcgctcgcgctcccccgcgacagccgccatacgccctatctccgccgtgcctgcgcctcctcccccgcccgcccgagacccgccaagtttcccttccttgcacggcgagatccaccatcggcgcccccttccctggcgagccacagccgtccatgttcctggccaccggcgacctcccttctctagcccttggcggcgagccaacacctcctcccatggctgccccccagaccccagtcccgtccgcgcatccgctcttccgtcagcgacgcacctattctcccctctctccccgacgtcgcccatggcgtggacggcgacctccctcaccctgcaactctgcacgtgtaagggccgtgttgcccgcctcctttccccacaccggcgcagccccctgtcgccgcggccccttccccaaacagcacggcaccacatgctccccctgccgcgcccgcactctccttccccaaataacacggccccacatcgctggttgcctcgcctcgccggggacccagcacgatggtcagggagctggtgggtgggggagacagggaggagcggaggaggaggtcaagctcaacatggacattgtgttcgtgacgctgccttccccaccgacaccaacgactcactccagaacccggatctggggcccttcctcctcaagccatggtattgggcgagggtggcgccgcctcgcgtgcttgagttcgccgagcgcgccgccagggtgctcgagcgaagaggtgagggcaccgagctcgagctcgccatgaatctccacatcgctgctggcatccactgcggactcagccaccaagccctgacattgtagccagtttcttgcaatcagaacgaatgccagttgatacaagtttgtggcagagatttctctgacacgccaatcagtcttcgatgcgaatgcttgttgctcatatggacttgtggttgtgataatgagttcatctccgtgcacatttgtcgtccttgtggttacagcagttaactgagtagtctctcttgactgcaaaacaagcaatctgttgcctctgctgtgatggtggagcaatttcagcgccaagaatgatatctcgcattttagattgtgtcagtgcagaagtattaacattgtttttctttgcataatcagaaaggatgaggtcccttagtgcacactcaaccttcaaccactgttcatcattcagagatggccatatatgatgtgtttcagtaataattgttttgtcaggtttgagcaacatctttgccttctcattattcacatgaagtgcacgtagaataagcacaatgtgggagaatgttgtgtatgatgatatacttttcaaccaatcatcatatatattataaagaaccatctgtggttcagttgccttcagtataagatcaccaaacttctcaatcttcaagcaagcctggaaaggaagctgcagctcactgcccttaataacaatgttagggaagtcaggtagatggacctccaagggatccaacatgcccttccttgtcacaacaatttgctttggctgctcttctacaggaagagatcgaaccaatgcagcaacctcctcagcggttttccacttggccagctgcccaagacgcttttgccccgcccatacacttgtgtggataacctgcacattattatccatactcagtttaaacctacctatgttcagggttttacagaaaaacaaaatcacatgaaaactagagcagaaattcgaaaagaacaaaccttaagaaaaagttgacccgttcttggattgaaaaatgaaaatagcaccattaattggtttggtggtcaagttaccctaaaatgttttgtgaatagtgactcgatacacatttgtatcatccacgaaccatatgatttgattgctgaatatctctccatagttctgtgaagacaggtatggttcatatattcaaatatccaaacctcatttggagttgtgataccagcaacctttgacatcgattcaagatgctactggagtgttattcatgtgagtgtaatttagtacatgatccaactggtaacaaactttatgatactagcatatcacataatagatgagattactagaaacagctcatgttattgaatatagaaatttcagttctattgtttttacacaaatttgtttgtgatgcttcaaaccgctaatgattttttttaaaaaagttgtgcaatgagcatatcacataatatatgagaatcttaggaataaaccaagttgctaatgagtaaaattttggctttgctttttaaaaaatatgggttcaagttgttcctgacagatgccactgcacaaatggacgttgacacgttgtagtgatcacactgtcacgagagctgagcaaactacagcctgcaagagctacacgtggcatgcttgaccacatcatggtggagaatgcaagtgttaaagttgcattgaatcgcattgccgttgtttctgtcctggatgcacataccctgtcagtgatgtcttatgaagcttggaggctcatacatctgtttctgttggctctctctagctatatgcagtggagctgctaatatgcatgaagtttgggctaggtgagcttcctctttcacttttcaaaccagtataggtattggccgatgtcaagaagacaaggccggcgacgagaggacgacagcgtgcaagaagagaaggcccatgttaggcgcaactatagggctcaaggtcaatcagttgtggtcacacttttccatttttacgttcagctaaactgaccccctgtctcatggtgcaactgtgcaaggataggcaacaagtgttcaacaatatgtctgtggatcaattgacctgcatttcagcttttagttgaggatcaaaatctcgtgtcgttcagggccctcggtagagagacattaatgtgtcggcaccgtggatcgtcgcagttgtgggtcactgtaacggcactggtcacaggcaccatctgcctctgttcgtcctcctctattggcctcctcagcacctacagggtccagtgctactactcaaggatgttgttgcaaatgagttgtggagaaccgtagatgcaaatggttggagagcatcttctgcaccacacatctattggcctcacataccagctgaatctgagagcaatgggtacttgtgtgtccggtgcaacggcggcttgaccttacaaatcagtgttgtatgactaatataaaactctctctctctaaagtagcatagttcaccatgcaagttttgtgtattcatggcaacatatctgaaagatttaagattacttctaccttgattttgtagatatgaaatgttgttgtcattgcacgaatcattaatgacttgattttgctctctatatgctatcttagaagtttcagagttcattgtttg

SEQ ID NO: 201326 - DNA, 3605 bp, Zea Mays
ccgagaccccgacccaccccgcctcccccgccgccgcgctcgcgctcccccgcgacagccgccatacgccctatctccgccgtgcctgcgcctcctcccccgcccgcccgagacccgccaagtttcccttccttgcacggcgagatccaccatcggcgcccccttccctggcgagccacagccgtccatgttcctggccaccggcgacctcccttctctagcccttggcggcgagccaacacctcctcccatggctgccccccagaccccagtcccgtccgcgcatccgctcttccgtcagcgacgcacctattctcccctctctccccgacgtcgcccatggcgtggacggcgacctccctcaccctgcaactctgcacgtgtaagggccgtgttgcccgcctcctttccccacaccggcgcagccccctgtcgccgcggccccttccccaaacagcacggcaccacatgctccccctgccgcgcccgcactctccttccccaaataacacggccccacatcgctggttgcctcgcctcgccggggacccagcacgatggtcagggagctggtgggtgggggagacagggaggagcggaggaggaggtcaagctcaacatggacattgtgttcgtgacgctgccttccccaccgacaccaacgactcactccagaacccggatctggggcccttcctcctcaagccatggtattgggcgagggtggcgccgcctcgcgtgcttgagttcgccgagcgcgccgccagggtgctcgagcgaagaggtgagggcaccgagctcgagctcgccatgaatctccacatcgctgctggcatccactgcggactcagccaccaagccctgacattgtagccagtttcttgcaatcagaacgaatgccagttgatacaagtttgtggcagagatttctctgacacgccaatcagtcttcgatgcgaatgcttgttgctcatatggacttgtggttgtgataatgagttcatctccgtgcacatttgtcgtccttgtggttacagcagttaactgagtagtctctcttgactgcaaaacaagcaatctgttgcctctgctgtgatggtggagcaatttcagcgccaagaatgatatctcgcattttagattgtgtcagtgcagaagtattaacattgtttttctttgcataatcagaaaggatgaggtcccttagtgcacactcaaccttcaaccactgttcatcattcagagatggccatatatgatgtgtttcagtaataattgttttgtcaggtttgagcaacatctttgccttctcattattcacatgaagtgcacgtagaataagcacaatgtgggagaatgttgtgtatgatgatatacttttcaaccaatcatcatatatattataaagaaccatctgtggttcagttgccttcagtataagatcaccaaacttctcaatcttcaagcaagcctggaaaggaagctgcagctcactgcccttaataacaatgttagggaagtcaggtagatggacctccaagggatccaacatgcccttccttgtcacaacaatttgctttggctgctcttctacaggaagagatcgaaccaatgcagcaacctcctcagcggttttccacttggccagctgcccaagacgcttttgccccgcccatacacttgtgtggataacctgcacattattatccatactcagtttaaacctacctatgttcagggttttacagaaaaacaaaatcacatgaaaactagagcagaaattcgaaaagaacaaaccttaagaaaaagttgacccgttcttggattgaaaaatgaaaatagcaccattaattggtttggtggtcaagttaccctaaaatgttttgtgaatagtgactcgatacacatttgtatcatccacgaaccatatgatttgattgctgaatatctctccatagttctgtgaagacaggtatggttcatatattcaaatatccaaacctcatttggagttgtgataccagcaacctttgacatcgattcaagatgctactggagtgttattcatgtgagtgtaatttagtacatgatccaactggtaacaaactttatgatactagcatatcacataatagatgagattactagaaacagctcatgttattgaatatagaaatttcagttctattgtttttacacaaatttgtttgtgatgcttcaaaccgctaatgattttttttaaaaaagttgtgcaatgagcatatcacataatatatgagaatcttaggaataaaccaagttgctaatgagtaaaattttggctttgctttttaaaaaatatgggttcaagttgttcctgacagatgccactgcacaaatggacgttgacacgttgtagtgatcacactgtcacgagagctgagcaaactacagcctgcaagagctacacgtggcatgcttgaccacatcatggtggagaatgcaagtgttaaagttgcattgaatcgcattgccgttgtttctgtcctggatgcacataccctgtcagtgatgtcttatgaagcttggaggctcatacatctgtttctgttggctctctctagctatatgcagtggagctgctaatatgcatgaagtttgggctaggtgagcttcctctttcacttttcaaaccagtataggtattggccgatgtcaagaagacaaggccggcgacgagaggacgacagcgtgcaagaagagaaggcccatgttaggcgcaactatagggctcaaggtcaatcagttgtggtcacacttttccatttttacgttcagctaaactgaccccctgtctcatggtgcaactgtgcaaggataggcaacaagtgttcaacaatatgtctgtggatcaattgacctgcatttcagcttttagttgaggatcaaaatctcgtgtcgttcagggccctcggtagagagacattaatgtgtcggcaccgtggatcgtcgcagttgtgggtcactgtaacggcactggtcacaggcaccatctgcctctgttcgtcctcctctattggcctcctcagcacctacagggtccagatggaaaagtttctataatacatatgtaacaaatacatactccttgttcaagagatcgtaagcaagattgtaaacggtatccaacgcagaagcacctaatatggttacagagtattactgatgggcttacctgcagactgcatgctactactcaaggatgttgttgcaaatgagttgtggagaaccgtagatgcaaatggttggagagcatcttctgcaccacacatctattggcctcacataccagctgaatctgagagcaatgggtacttgtgtgtccggtgcaacggcggcttgaccttacaaatcagtgttgtatgactaatataaaactctctctctctaaagtagcatagttcaccatgcaagttttgtgtattcatggcaacatatctgaaagatttaagattacttctaccttgattttgtagatatgaaatgttgttgtcattgcacgaatcattaatgacttgattttgctctctatatgctatcttagaagtttcagagttcattgtttg

SEQ ID NO: 201327 - DNA, 3181 bp, Zea Mays
ccgagaccccgacccaccccgcctcccccgccgccgcgctcgcgctcccccgcgacagccgccatacgccctatctccgccgtgcctgcgcctcctcccccgcccgcccgagacccgccaagtttcccttccttgcacggcgagatccaccatcggcgcccccttccctggcgagccacagccgtccatgttcctggccaccggcgacctcccttctctagcccttggcggcgagccaacacctcctcccatggctgccccccagaccccagtcccgtccgcgcatccgctcttccgtcagcgacgcacctattctcccctctctccccgacgtcgcccatggcgtggacggcgacctccctcaccctgcaactctgcacgtgtaagggccgtgttgcccgcctcctttccccacaccggcgcagccccctgtcgccgcggccccttccccaaacagcacggcaccacatgctccccctgccgcgcccgcactctccttccccaaataacacggccccacatcgctggttgcctcgcctcgccggggacccagcacgatggtcagggagctggtgggtgggggagacagggaggagcggaggaggaggtcaagctcaacatggacattgtgttcgtgacgctgccttccccaccgacaccaacgactcactccagaacccggatctggggcccttcctcctcaagccatggtattgggcgagggtggcgccgcctcgcgtgcttgagttcgccgagcgcgccgccagggtgctcgagcgaagaggtgagggcaccgagctcgagctcgccatgaatctccacatcgctgctggcatccactgcggactcagccaccaagccctgacattgtagccagtttcttgcaatcagaacgaatgccagttgatacaagtttgtggcagagatttctctgacacgccaatcagtcttcgatgcgaatgcttgttgctcatatggacttgtggttgtgataatgagttcatctccgtgcacatttgtcgtccttgtggttacagcagttaactgagtagtctctcttgactgcaaaacaagcaatctgttgcctctgctgtgatggtggagcaatttcagcgccaagaatgatatctcgcattttagattgtgtcagtgcagaagtattaacattgtttttctttgcataatcagaaaggatgaggtcccttagtgcacactcaaccttcaaccactgttcatcattcagagatggccatatatgatgtgtttcagtaataattgttttgtcaggtttgagcaacatctttgccttctcattattcacatgaagtgcacgtagaataagcacaatgtgggagaatgttgtgtatgatgatatacttttcaaccaatcatcatatatattataaagaaccatctgtggttcagttgccttcagtataagatcaccaaacttctcaatcttcaagcaagcctggaaaggaagctgcagctcactgcccttaataacaatgttagggaagtcaggtagatggacctccaagggatccaacatgcccttccttgtcacaacaatttgctttggctgctcttctacaggaagagatcgaaccaatgcagcaacctcctcagcggttttccacttggccagctgcccaagacgcttttgccccgcccatacacttgtgtggataacctgcacattattatccatactcagtttaaacctacctatgttcagggttttacagaaaaacaaaatcacatgaaaactagagcagaaattcgaaaagaacaaaccttaagaaaaagttgacccgttcttggattgaaaaatgaaaatagcaccattaattggtttggtggtcaagttaccctaaaatgttttgtgaatagtgactcgatacacatttgtatcatccacgaaccatatgatttgattgctgaatatctctccatagttctgtgaagacaggtatggttcatatattcaaatatccaaacctcatttggagttgtgataccagcaacctttgacatcgattcaagatgctactggagtgttattcatttgttcctgacagatgccactgcacaaatggacgttgacacgttgtagtgatcacactgtcacgagagctgagcaaactacagcctgcaagagctacacgtggcatgcttgaccacatcatggtggagaatgcaagtgttaaagttgcattgaatcgcattgccgttgtttctgtcctggatgcacataccctgtcagtgatgtcttatgaagcttggaggctcatacatctgtttctgttggctctctctagctatatgcagtggagctgctaatatgcatgaagtttgggctaggtgagcttcctctttcacttttcaaaccagtataggtattggccgatgtcaagaagacaaggccggcgacgagaggacgacagcgtgcaagaagagaaggcccatgttaggcgcaactatagggctcaaggtcaatcagttgtggtcacacttttccatttttacgttcagctaaactgaccccctgtctcatggtgcaactgtgcaaggataggcaacaagtgttcaacaatatgtctgtggatcaattgacctgcatttcagcttttagttgaggatcaaaatctcgtgtcgttcagggccctcggtagagagacattaatgtgtcggcaccgtggatcgtcgcagttgtgggtcactgtaacggcactggtcacaggcaccatctgcctctgttcgtcctcctctattggcctcctcagcacctacagggtccagtgctactactcaaggatgttgttgcaaatgagttgtggagaaccgtagatgcaaatggttggagagcatcttctgcaccacacatctattggcctcacataccagctgaatctgagagcaatgggtacttgtgtgtccggtgcaacggcggcttgaccttacaaatcagtgttgtatgactaatataaaactctctctctctaaagtagcatagttcaccatgcaagttttgtgtattcatggcaacatatctgaaagatttaagattacttctaccttgattttgtagatatgaaatgttgttgtcattgcacgaatcattaatgacttgattttgctctctatatgctatcttagaagtttcagagttcattgtttg

SEQ ID NO: 201328 - DNA, 3323 bp, Zea Mays
ccgagaccccgacccaccccgcctcccccgccgccgcgctcgcgctcccccgcgacagccgccatacgccctatctccgccgtgcctgcgcctcctcccccgcccgcccgagacccgccaagtttcccttccttgcacggcgagatccaccatcggcgcccccttccctggcgagccacagccgtccatgttcctggccaccggcgacctcccttctctagcccttggcggcgagccaacacctcctcccatggctgccccccagaccccagtcccgtccgcgcatccgctcttccgtcagcgacgcacctattctcccctctctccccgacgtcgcccatggcgtggacggcgacctccctcaccctgcaactctgcacgtgtaagggccgtgttgcccgcctcctttccccacaccggcgcagccccctgtcgccgcggccccttccccaaacagcacggcaccacatgctccccctgccgcgcccgcactctccttccccaaataacacggccccacatcgctggttgcctcgcctcgccggggacccagcacgatggtcagggagctggtgggtgggggagacagggaggagcggaggaggaggtcaagctcaacatggacattgtgttcgtgacgctgccttccccaccgacaccaacgactcactccagaacccggatctggggcccttcctcctcaagccatggtattgggcgagggtggcgccgcctcgcgtgcttgagttcgccgagcgcgccgccagggtgctcgagcgaagaggtgagggcaccgagctcgagctcgccatgaatctccacatcgctgctggcatccactgcggactcagccaccaagccctgacattgtagccagtttcttgcaatcagaacgaatgccagttgatacaagtttgtggcagagatttctctgacacgccaatcagtcttcgatgcgaatgcttgttgctcatatggacttgtggttgtgataatgagttcatctccgtgcacatttgtcgtccttgtggttacagcagttaactgagtagtctctcttgactgcaaaacaagcaatctgttgcctctgctgtgatggtggagcaatttcagcgccaagaatgatatctcgcattttagattgtgtcagtgcagaagtattaacattgtttttctttgcataatcagaaaggatgaggtcccttagtgcacactcaaccttcaaccactgttcatcattcagagatggccatatatgatgtgtttcagtaataattgttttgtcaggtttgagcaacatctttgccttctcattattcacatgaagtgcacgtagaataagcacaatgtgggagaatgttgtgtatgatgatatacttttcaaccaatcatcatatatattataaagaaccatctgtggttcagttgccttcagtataagatcaccaaacttctcaatcttcaagcaagcctggaaaggaagctgcagctcactgcccttaataacaatgttagggaagtcaggtagatggacctccaagggatccaacatgcccttccttgtcacaacaatttgctttggctgctcttctacaggaagagatcgaaccaatgcagcaacctcctcagcggttttccacttggccagctgcccaagacgcttttgccccgcccatacacttgtgtggataacctgcacattattatccatactcagtttaaacctacctatgttcagggttttacagaaaaacaaaatcacatgaaaactagagcagaaattcgaaaagaacaaaccttaagaaaaagttgacccgttcttggattgaaaaatgaaaatagcaccattaattggtttggtggtcaagttaccctaaaatgttttgtgaatagtgactcgatacacatttgtatcatccacgaaccatatgatttgattgctgaatatctctccatagttctgtgaagacaggtatggttcatatattcaaatatccaaacctcatttggagttgtgataccagcaacctttgacatcgattcaagatgctactggagtgttattcatttgttcctgacagatgccactgcacaaatggacgttgacacgttgtagtgatcacactgtcacgagagctgagcaaactacagcctgcaagagctacacgtggcatgcttgaccacatcatggtggagaatgcaagtgttaaagttgcattgaatcgcattgccgttgtttctgtcctggatgcacataccctgtcagtgatgtcttatgaagcttggaggctcatacatctgtttctgttggctctctctagctatatgcagtggagctgctaatatgcatgaagtttgggctaggtgagcttcctctttcacttttcaaaccagtataggtattggccgatgtcaagaagacaaggccggcgacgagaggacgacagcgtgcaagaagagaaggcccatgttaggcgcaactatagggctcaaggtcaatcagttgtggtcacacttttccatttttacgttcagctaaactgaccccctgtctcatggtgcaactgtgcaaggataggcaacaagtgttcaacaatatgtctgtggatcaattgacctgcatttcagcttttagttgaggatcaaaatctcgtgtcgttcagggccctcggtagagagacattaatgtgtcggcaccgtggatcgtcgcagttgtgggtcactgtaacggcactggtcacaggcaccatctgcctctgttcgtcctcctctattggcctcctcagcacctacagggtccagatggaaaagtttctataatacatatgtaacaaatacatactccttgttcaagagatcgtaagcaagattgtaaacggtatccaacgcagaagcacctaatatggttacagagtattactgatgggcttacctgcagactgcatgctactactcaaggatgttgttgcaaatgagttgtggagaaccgtagatgcaaatggttggagagcatcttctgcaccacacatctattggcctcacataccagctgaatctgagagcaatgggtacttgtgtgtccggtgcaacggcggcttgaccttacaaatcagtgttgtatgactaatataaaactctctctctctaaagtagcatagttcaccatgcaagttttgtgtattcatggcaacatatctgaaagatttaagattacttctaccttgattttgtagatatgaaatgttgttgtcattgcacgaatcattaatgacttgattttgctctctatatgctatcttagaagtttcagagttcattgtttg

SEQ ID NO: 201329 - DNA, 3207 bp, Zea Mays
ccgagaccccgacccaccccgcctcccccgccgccgcgctcgcgctcccccgcgacagccgccatacgccctatctccgccgtgcctgcgcctcctcccccgcccgcccgagacccgccaagtttcccttccttgcacggcgagatccaccatcggcgcccccttccctggcgagccacagccgtccatgttcctggccaccggcgacctcccttctctagcccttggcggcgagccaacacctcctcccatggctgccccccagaccccagtcccgtccgcgcatccgctcttccgtcagcgacgcacctattctcccctctctccccgacgtcgcccatggcgtggacggcgacctccctcaccctgcaactctgcacgtgtaagggccgtgttgcccgcctcctttccccacaccggcgcagccccctgtcgccgcggccccttccccaaacagcacggcaccacatgctccccctgccgcgcccgcactctccttccccaaataacacggccccacatcgctggttgcctcgcctcgccggggacccagcacgatggtcagggagctggtgggtgggggagacagggaggagcggaggaggaggtcaagctcaacatggacattgtgttcgtgacgctgccttccccaccgacaccaacgactcactccagaacccggatctggggcccttcctcctcaagccatggtattgggcgagggtggcgccgcctcgcgtgcttgagttcgccgagcgcgccgccagggtgctcgagcgaagaggtgagggcaccgagctcgagctcgccatgaatctccacatcgctgctggcatccactgcggactcagccaccaagccctgacattgtagccagtttcttgcaatcagaacgaatgccagttggtaaccatttaacatttcttttgctgtgtcaacttattggagttggagagaggctatcactatactgacctttatatcatcagaattgacataaatgtgatttacacgtagatacaagtttgtggcagagatttctctgacacgccaatcagtcttcgatgcgaatgcttgttgctcatatggacttgtggttgtgataatgagttcatctccgtgcacatttgtcgtccttgtggttacagcagttaactgagtagtctctcttgactgcaaaacaagcaatctgttgcctctgctgtgatggtggagcaatttcagcgccaagaatgatatctcgcattttagattgtgtcagtgcagaagtattaacattgtttttctttgcataatcagaaaggatgaggtcccttagtgcacactcaaccttcaaccactgttcatcattcagagatggccatatatgatgtgtttcagtaataattgttttgtcaggtttgagcaacatctttgccttctcattattcacatgaagtgcacgtagaataagcacaatgtgggagaatgttgtgtatgatgatatacttttcaaccaatcatcatatatattataaagaaccatctgtggttcagttgccttcagtataagatcaccaaacttctcaatcttcaagcaagcctggaaaggaagctgcagctcactgcccttaataacaatgttagggaagtcaggtagatggacctccaagggatccaacatgcccttccttgtcacaacaatttgctttggctgctcttctacaggaagagatcgaaccaatgcagcaacctcctcagcggttttccacttggccagctgcccaagacgcttttgccccgcccatacacttgtgtggataacctgcacattattatccatactcagtttaaacctacctatgttcagggttttacagaaaaacaaaatcacatgaaaactagagcagaaattcgaaaagaacaaaccttaagaaaaagttgacccgttcttggattgaaaaatgaaaatagcaccattaattggtttggtggtcaagttaccctaaaatgttttgtgaatagtgactcgatacacatttgtatcatccacgaaccatatgatttgattgctgaatatctctccatagttctgtgaagacaggtatggttcatatattcaaatatccaaacctcatttggagttgtgataccagcaacctttgacatcgattcaagatgctactggagtgttattcatatgccactgcacaaatggacgttgacacgttgtagtgatcacactgtcacgagagctgagcaaactacagcctgcaagagctacacgtggcatgcttgaccacatcatggtggagaatgcaagtgttaaagttgcattgaatcgcattgccgttgtttctgtcctggatgcacataccctgtcagtgatgtcttatgaagcttggaggctcatacatctgtttctgttggctctctctagctatatgcagtggagctgctaatatgcatgaagtttgggctaggtgagcttcctctttcacttttcaaaccagtataggtattggccgatgtcaagaagacaaggccggcgacgagaggacgacagcgtgcaagaagagaaggcccatgttaggcgcaactataggtgcaactgtgcaaggataggcaacaagtgttcaacaatatgtctgtggatcaattgacctgcatttcagcttttagttgaggatcaaaatctcgtgtcgttcagggccctcggtagagagacattaatgtgtcggcaccgtggatcgtcgcagttgtgggtcactgtaacggcactggtcacaggcaccatctgcctctgttcgtcctcctctattggcctcctcagcacctacagggtccagtgctactactcaaggatgttgttgcaaatgagttgtggagaaccgtagatgcaaatggttggagagcatcttctgcaccacacatctattggcctcacataccagctgaatctgagagcaatgggtacttgtgtgtccggtgcaacggcggcttgaccttacaaatcagtgttgtatgactaatataaaactctctctctctaaagtagcatagttcaccatgcaagttttgtgtattcatggcaacatatctgaaagatttaagattacttctaccttgattttgtagatatgaaatgttgttgtcattgcacgaatcattaatgacttgattttgctctctatatgctatcttagaagtttcagagttcattgtttg

SEQ ID NO: 201330 - DNA, 1786 bp, Zea Mays
ttccgttccaggcaacagcacacacgcggccggccggccgcccggggagcctatagctagctaggttaaggttgggagagcatgggcggcgacggggcggacgcgcacggcgcgtcggcgcagctggagagcgtcctgacgtcgtcgtcgtcgtcgttcccgtgggccgcggccgccatcgagctgcggctgctgacgcggctggcggcgccggcggtggtgacgtacatgatcaactacctcatgtccatgtcgacgcagatcttctcgggccacctcggcaacctggagctcgccgccgcctccctcggcaacaccggcgtccagatcttcgcctacggccttatgctgggcatgggcagcgcggtggagacactgtgcgggcaggcctatggcgcccacaagtacgagatgctgggcatctacctgcaacgctcggccgtgctcctgtgcgccacgggagttccactggccgtcatctatgccttctccgagccgatcctggtctttctagggcagtcgccggagatcgcccgcgccgcagccatcttcgtgtacggtctcatcccgcagatcttcgcgtacgccatcaacttcccgatccagaagttcatgcaggcgcagagcatcgtgctcccgagcgcctacatctccaccgcaaccctggcgctgcacgtgctgctcagctgggtcgtcgtctacaaggtcggtctgggcttactgggggcttccctgctgctcagcctcagctggtggctcatcgtcgccgcgcagttcgcgtacatcgtggtgagccccaggtgccgccacacctggaccggcttcagcttccaggccttctcgggcctgtggggcttcctcaagctctccgccgcgtccgcggtcatgctctgtctcgaggcctggtactaccaggtcctggtgctcattgccgggttgctccccaaccctgaacttgcattggatgcgttgtctgtatgcatgactattaatgggttggtgttcatgatctcagtagggttcaatgctgctgccagcgtgagagtgagcaatgagctcggtgccggccacccgaaatctgcctacttctcggtgtgggtagtgactgcgatctctacgataatatctatcatgcttgccattgtgatcctctgcctccgcaactacatcagctacatcttcacggagggtgaggtggtgtcaaacgcggtggcggatctctgcccgttgcttgccatcacgctcatcctcaacggcatccaaccagttctgtcaggtgtcgccgttgggtgtgggtggcaagaattcgtagcctacgtgaacattggctgctactacatagttggtgttcccctcggcgccatcctcgggtttgtcttcaagttcggtgtaaagggcatttggagtggcatgattggaggaactttcatgcagacggctatcttactgtgggccaccttgagaactgattggaacaaagagaaaaggctacacaaatgggaggatcagaagacgacgacgacggagcccctccttgcgggggtcgtcggcaatggcaatgccaattagtttactggatggacatcattctcccagacggcttcaccagcgtcaccgtcaggatatggacccggcctgcaaagtgtttctccggagtgtttaggttttctttcccgtatcaaaatttgcgaaacagagaaggaaggtttttttttggaaacagaactgacgtctatcttttgagttaaagaattcggagcatacatgtggatttttttgaaaggag

SEQ ID NO: 201331 - DNA, 2952 bp, Zea Mays
gacagggataaaacgatgtccgtttctctctccacacccgcccgtctcgactctcgagtcccgagggatccttccgctccaccattctcttggtcaaaccgcccctcctcctccgcccctcaccctgctctctctctctctcgttctcagcctctgttccagtgttccttcctcctccactctttattatattttactcttctctctccagcgtaaaaaacaaatcgtgctgtgcgaacgatgagagagaaaagagagacggaggcaagtaatggcaggaggaaccttcttttcctgactccctgtggctgcagagtgcccatcatttgtccctgatccttgtgcttcgttcctgttgcgctttccttgggccatcggtagactgagccgtcgcgaagccttcccgttcccacaaggggtgtggcgtggagcgagcctcgccaccactgggctcctccggcgacctcctccctccagtcacaggttgagcaatccaagctgagatggaaggccatgtagcaatggggtggaaggatcctaatccaggccaagaatcttccatggtcttccaatccagagctgttcggccagacaccgtagaggggcacagcaacgaggacgttgaagccggatttgagaagcatggcttgtcagccgccttaaactcgcctcagcacgaaggccgatcactgccactgaccccacagtttggccagaactccagtcctggaagcagcctcgccgagaggatgcaggcaagagccggattcaaggtgccgaagctgaacatgcctttcagcacggtagctggagatgatagttcagtgccaggagctccatcgccctacctcacgatcccgcctggcttgagcccagcaacgctgctggagtcacctgtcttcatttcgaatgccctgggacaagcctcaccaaccacggggaagctattcttgtttggtagcacaaatgacaacgatcctattcgacctggaggccctccagttggagatggcactgatgctttttctttcaagcccttagatctgaaatcctcacactacactgctgaagtaatgaaggaacaaaatacgcagtcttctgtgaagactgaagctaagactcaggcagtccaagaggctaatttgctgggccaactgaaccagcagaatcacgatgggcagacaaacatgaatagtgacggtgctcgtgactccaagctcagccgtcttgcgtctggcaccggtgcaggcaatgaacacgcatcacccccggattacggccagagagccgaggaagctgatgcgagggaagactacccggcggcaatggccgttacagcgccagcggaggacgggtacagctggaggaagtacgggcagaagcaggtgaagcacagcgagtacccgcgcagctacttcaagtgcacgcatcccaactgcctggtgaagaagaaggttgagcgctcgcacgaggggcacgtcacggagatcatctacaagggaacgcacaaccacccgaagcccacgcagagccgccggccaggcgcaggcgcgcacccgttgggcggcggtgcgcaggcggacgcagccgacaacctgcaggggtcacaggcaaacgcggcggaagccaaccaggcgtggcgtgcgggtgtccaggatggcgtggacgcgacgtcgcccccgtcggttcccggtgagctctgtgactcggcggcgtcgatgcaggtcgactgcgcggcccggtttgggtcccccgagggcgcggacgtgacgtctgccgtgtctgacgaggtggacggggacgacagggtgactctgactcatggcggtgccaacgcggcggagggcgacgaactggaatctaaacgaaggaagctggagtcatacgccattgacatgagcactgcgtcgagagctgttcgcgagcctcgagtggtgatccaaacgacgagcgaggtggacatcctcgatgacggctaccgctggcgcaagtacgggcagaaggtcgtcaagggcaacccgaatccaaggagctactacaagtgcacgcaaccgggctgcacggtgcggaagcacgtggagcgcgcgtcgcacgacctcaaggccgtgatcaccacgtacgagggcaagcacaaccacgaggttcccgccgcgaggaacagcggccacccgagcgccgcggcggcgccaggcgcgggtggcccgcgcaggcaggagcacccgtccgtgcacgacggcctgatgagacagcacctgggcggctgcggcgtgccgttcggcctgccgccgccgccgccgccgccaagggacccgctggcgccgatgcgcaactacccgacgtacggcttcactgcccttggcgccggctccacgtcactgccgagcctgccgatgctcccggtgttggcgccgtcctccctgcaccagcacccgctgctgaggcaccggcaggcggtgcaggctgccggtctcgcgtggcgcccaaggccgacgtgaaggtagagggcagcgttgccggcggcgggatcccgtcggtgtaccagcagatgatccgctgcgggctgcgtctgccccaccagatgtagatacttaaaagtggagaggattagagtgattctcaagttcgtttcttaccattcctgttagtatgagttcgtgataagtattatagcgtggaaactgacgcccgctgcattcgttttttttcacccttctgttccacttcattttttcccgtatttatttatttactacccttcctcaatgatattcggttcttcttgttcagcaagacagcaactggcatcagttaatgttcatttgagaaatgaccaacagtttctgggctggcaacttggtatcagcccagaaagcactttagccggtgagcccagctgattagctactgtttctagtaccaagcccatcagaccctactcttgttaggggcccc

SEQ ID NO: 201332 - DNA, 2859 bp, Zea Mays
ccaccattctcttggtcaaaccgcccctcctcctccgcccctcaccctgctctctctctctctcgttctcagcctctgttccagtgttccttcctcctccactctttattatattttactcttctctctccagcgtaaaaaacaaatcgtgctgtgcgaacgatgagagagaaaagagagacggaggcaagtaatggcaggaggaaccttcttttcctgactccctgtggctgcagagtgcccatcatttgtccctgatccttgtgcttcgttcctgttgcgctttccttgggccatcggtagactgagccgtcgcgaagccttcccgttcccacaaggggtgtggcgtggagcgagcctcgccaccactgggctcctccggcgacctcctccctccagtcacaggttgagcaatccaagctgagatggaaggccatgtagcaatggggtggaaggatcctaatccaggccaagaatcttccatggtcttccaatccagagctgttcggccagacaccgtagaggggcacagcaacgaggacgttgaagccggatttgagaagcatggcttgtcagccgccttaaactcgcctcagcacgaaggccgatcactgccactgaccccacagtttggccagaactccagtcctggaagcagcctcgccgagaggatgcaggcaagagccggattcaaggtgccgaagctgaacatgcctttcagcacggtagctggagatgatagttcagtgccaggagctccatcgccctacctcacgatcccgcctggcttgagcccagcaacgctgctggagtcacctgtcttcatttcgaatgccctgggacaagcctcaccaaccacggggaagctattcttgtttggtagcacaaatgacaacgatcctattcgacctggaggccctccagttggagatggcactgatgctttttctttcaagcccttagatctgaaatcctcacactacactgctgaagtaatgaagtcttctgtgaagactgaagctaagactcaggcagtccaagaggctaatttgctgggccaactgaaccagcagaatcacgatgggcagacaaacatgaatagtgacggtgctcgtgactccaagctcagccgtcttgcgtctggcaccggtgcaggcaatgaacacgcatcacccccggattacggccagagagccgaggaagctgatgcgagggaagactacccggcggcaatggccgttacagcgccagcggaggacgggtacagctggaggaagtacgggcagaagcaggtgaagcacagcgagtacccgcgcagctacttcaagtgcacgcatcccaactgcctggtgaagaagaaggttgagcgctcgcacgaggggcacgtcacggagatcatctacaagggaacgcacaaccacccgaagcccacgcagagccgccggccaggcgcaggcgcgcacccgttgggcggcggtgcgcaggcggacgcagccgacaacctgcaggggtcacaggcaaacgcggcggaagccaaccaggcgtggcgtgcgggtgtccaggatggcgtggacgcgacgtcgcccccgtcggttcccggtgagctctgtgactcggcggcgtcgatgcaggtcgactgcgcggcccggtttgggtcccccgagggcgcggacgtgacgtctgccgtgtctgacgaggtggacggggacgacagggtgactctgactcatggcggtgccaacgcggcggagggcgacgaactggaatctaaacgaaggaagctggagtcatacgccattgacatgagcactgcgtcgagagctgttcgcgagcctcgagtggtgatccaaacgacgagcgaggtggacatcctcgatgacggctaccgctggcgcaagtacgggcagaaggtcgtcaagggcaacccgaatccaaggagctactacaagtgcacgcaaccgggctgcacggtgcggaagcacgtggagcgcgcgtcgcacgacctcaaggccgtgatcaccacgtacgagggcaagcacaaccacgaggttcccgccgcgaggaacagcggccacccgagcgccgcggcggcgccaggcgcgggtggcccgcgcaggcaggagcacccgtccgtgcacgacggcctgatgagacagcacctgggcggctgcggcgtgccgttcggcctgccgccgccgccgccgccgccaagggacccgctggcgccgatgcgcaactacccgacgtacggcttcactgcccttggcgccggctccacgtcactgccgagcctgccgatgctcccggtgttggcgccgtcctccctgcaccagcacccgctgctgaggcaccggcaggcggtgcaggctgccggtctcgcgtggcgcccaaggccgacgtgaaggtagagggcagcgttgccggcggcgggatcccgtcggtgtaccagcagatgatccgctgcgggctgcgtctgccccaccagatgtagatacttaaaagtggagaggattagagtgattctcaagttcgtttcttaccattcctgttagtatgagttcgtgataagtattatagcgtggaaactgacgcccgctgcattcgttttttttcacccttctgttccacttcattttttcccgtatttatttatttactacccttcctcaatgatattcggttcttcttgttcagcaagacagcaactggcatcagttaatgttcatttgagaaatgaccaacagtttctgggctggcaacttggtatcagcccagaaagcactttagccggtgagcccagctgattagctactgtttctagtaccaagcccatcagaccctactcttgttaggggcccc

SEQ ID NO: 201333 - DNA, 2921 bp, Zea Mays
ctctctgtttctcggcctgccatttgtcgcgacgcgaggggattcggttgtatcctatcgagccccctcgcgtgttttctcgttgtatggcccgagtttgtctgttcttacgtggactgctccagaaattttggcacaggatttcctatatttctttctaaatacaatgtcgttcacttctgggtcgtcagtatcttattgaatatttctgtatttttttcttcttttcgtcacccttatgttctcttcgaggagatgttttcgtcattgtcatcttaagtcgatctatcattctgaagagctcttgcgaaaggctgttccatgttgtttatgcgtatgcgcttcgagctccgagccacaggagagtcccccactcacaggttgagcaatccaagctgagatggaaggccatgtagcaatggggtggaaggatcctaatccaggccaagaatcttccatggtcttccaatccagagctgttcggccagacaccgtagaggggcacagcaacgaggacgttgaagccggatttgagaagcatggcttgtcagccgccttaaactcgcctcagcacgaaggccgatcactgccactgaccccacagtttggccagaactccagtcctggaagcagcctcgccgagaggatgcaggcaagagccggattcaaggtgccgaagctgaacatgcctttcagcacggtagctggagatgatagttcagtgccaggagctccatcgccctacctcacgatcccgcctggcttgagcccagcaacgctgctggagtcacctgtcttcatttcgaatgccctgggacaagcctcaccaaccacggggaagctattcttgtttggtagcacaaatgacaacgatcctattcgacctggaggccctccagttggagatggcactgatgctttttctttcaagcccttagatctgaaatcctcacactacactgctgaagtaatgaaggaacaaaatacgcagtcttctgtgaagactgaagctaagactcaggcagtccaagaggctaatttgctgggccaactgaaccagcagaatcacgatgggcagacaaacatgaatagtgacggtgctcgtgactccaagctcagccgtcttgcgtctggcaccggtgcaggcaatgaacacgcatcacccccggattacggccagagagccgaggaagctgatgcgagggaagactacccggcggcaatggccgttacagcgccagcggaggacgggtacagctggaggaagtacgggcagaagcaggtgaagcacagcgagtacccgcgcagctacttcaagtgcacgcatcccaactgcctggtgaagaagaaggttgagcgctcgcacgaggggcacgtcacggagatcatctacaagggaacgcacaaccacccgaagcccacgcagagccgccggccaggcgcaggcgcgcacccgttgggcggcggtgcgcaggcggacgcagccgacaacctgcaggggtcacaggcaaacgcggcggaagccaaccaggcgtggcgtgcgggtgtccaggatggcgtggacgcgacgtcgcccccgtcggttcccggtgagctctgtgactcggcggcgtcgatgcaggtcgactgcgcggcccggtttgggtcccccgagggcgcggacgtgacgtctgccgtgtctgacgaggtggacggggacgacagggtgactctgactcatggcggtgccaacgcggcggagggcgacgaactggaatctaaacgaaggtaatagaatatctaataataatttatttagcagtgtcagtctagagctgaccgtctgtctggttatttcaggaagctggagtcatacgccattgacatgagcactgcgtcgagagctgttcgcgagcctcgagtggtgatccaaacgacgagcgaggtggacatcctcgatgacggctaccgctggcgcaagtacgggcagaaggtcgtcaagggcaacccgaatccaaggagctactacaagtgcacgcaaccgggctgcacggtgcggaagcacgtggagcgcgcgtcgcacgacctcaaggccgtgatcaccacgtacgagggcaagcacaaccacgaggttcccgccgcgaggaacagcggccacccgagcgccgcggcggcgccaggcgcgggtggcccgcgcaggcaggagcacccgtccgtgcacgacggcctgatgagacagcacctgggcggctgcggcgtgccgttcggcctgccgccgccgccgccgccgccaagggacccgctggcgccgatgcgcaactacccgacgtacggcttcactgcccttggcgccggctccacgtcactgccgagcctgccgatgctcccggtgttggcgccgtcctccctgcaccagcacccgctgctgaggcaccggcaggcggtgcaggctgccggtctcgcgtggcgcccaaggccgacgtgaaggtagagggcagcgttgccggcggcgggatcccgtcggtgtaccagcagatgatccgctgcgggctgcgtctgccccaccagatgtagatacttaaaagtggagaggattagagtgattctcaagttcgtttcttaccattcctgttagtatgagttcgtgataagtattatagcgtggaaactgacgcccgctgcattcgttttttttcacccttctgttccacttcattttttcccgtatttatttatttactacccttcctcaatgatattcggttcttcttgttcagcaagacagcaactggcatcagttaatgttcatttgagaaatgaccaacagtttctgggctggcaacttggtatcagcccagaaagcactttagccggtgagcccagctgattagctactgtttctagtaccaagcccatcagaccctactcttgttaggggcccc

SEQ ID NO: 201334 - DNA, 2736 bp, Zea Mays
tggggagtgtgccggtcgcatcgactttaacatttcgtgttacaccacggttattatgagttgtcgtttactcacatcgacacggttcctgttttggaatcagctccacggagaattttgagtttgtgggaaaaaaactgatgataattggactgggaatatagtgtctctgattagaagtataaaagttggtgttcttccagttggaggagattgcctgccatctctgagaaatctctggttgagcaatccaagctgagatggaaggccatgtagcaatggggtggaaggatcctaatccaggccaagaatcttccatggtcttccaatccagagctgttcggccagacaccgtagaggggcacagcaacgaggacgttgaagccggatttgagaagcatggcttgtcagccgccttaaactcgcctcagcacgaaggccgatcactgccactgaccccacagtttggccagaactccagtcctggaagcagcctcgccgagaggatgcaggcaagagccggattcaaggtgccgaagctgaacatgcctttcagcacggtagctggagatgatagttcagtgccaggagctccatcgccctacctcacgatcccgcctggcttgagcccagcaacgctgctggagtcacctgtcttcatttcgaatgccctgggacaagcctcaccaaccacggggaagctattcttgtttggtagcacaaatgacaacgatcctattcgacctggaggccctccagttggagatggcactgatgctttttctttcaagcccttagatctgaaatcctcacactacactgctgaagtaatgaaggaacaaaatacgcagtcttctgtgaagactgaagctaagactcaggcagtccaagaggctaatttgctgggccaactgaaccagcagaatcacgatgggcagacaaacatgaatagtgacggtgctcgtgactccaagctcagccgtcttgcgtctggcaccggtgcaggcaatgaacacgcatcacccccggattacggccagagagccgaggaagctgatgcgagggaagactacccggcggcaatggccgttacagcgccagcggaggacgggtacagctggaggaagtacgggcagaagcaggtgaagcacagcgagtacccgcgcagctacttcaagtgcacgcatcccaactgcctggtgaagaagaaggttgagcgctcgcacgaggggcacgtcacggagatcatctacaagggaacgcacaaccacccgaagcccacgcagagccgccggccaggcgcaggcgcgcacccgttgggcggcggtgcgcaggcggacgcagccgacaacctgcaggggtcacaggcaaacgcggcggaagccaaccaggcgtggcgtgcgggtgtccaggatggcgtggacgcgacgtcgcccccgtcggttcccggtgagctctgtgactcggcggcgtcgatgcaggtcgactgcgcggcccggtttgggtcccccgagggcgcggacgtgacgtctgccgtgtctgacgaggtggacggggacgacagggtgactctgactcatggcggtgccaacgcggcggagggcgacgaactggaatctaaacgaagagctgaccgtctgtctggttatttcaggaagctggagtcatacgccattgacatgagcactgcgtcgagagctgttcgcgagcctcgagtggtgatccaaacgacgagcgaggtggacatcctcgatgacggctaccgctggcgcaagtacgggcagaaggtcgtcaagggcaacccgaatccaaggagctactacaagtgcacgcaaccgggctgcacggtgcggaagcacgtggagcgcgcgtcgcacgacctcaaggccgtgatcaccacgtacgagggcaagcacaaccacgaggttcccgccgcgaggaacagcggccacccgagcgccgcggcggcgccaggcgcgggtggcccgcgcaggcaggagcacccgtccgtgcacgacggcctgatgagacagcacctgggcggctgcggcgtgccgttcggcctgccgccgccgccgccgccgccaagggacccgctggcgccgatgcgcaactacccgacgtacggcttcactgcccttggcgccggctccacgtcactgccgagcctgccgatgctcccggtgttggcgccgtcctccctgcaccagcacccgctgctgaggcaccggcaggcggtgcaggctgccggtctcgcgtggcgcccaaggccgacgtgaaggtagagggcagcgttgccggcggcgggatcccgtcggtgtaccagcagatgatccgctgcgggctgcgtctgccccaccagatgtagatacttaaaagtggagaggattagagtgattctcaagttcgtttcttaccattcctgttagtatgagttcgtgataagtattatagcgtggaaactgacgcccgctgcattcgttttttttcacccttctgttccacttcattttttcccgtatttatttatttactacccttcctcaatgatattcggttcttcttgttcagcaagacagcaactggcatcagttaatgttcatttgagaaatgaccaacagtttctgggctggcaacttggtatcagcccagaaagcactttagccggtgagcccagctgattagctactgtttctagtaccaagcccatcagaccctactcttgttaggggcccc

SEQ ID NO: 201335 - DNA, 2490 bp, Zea Mays
tcttgatgcatttggatcctggttgagcaatccaagctgagatggaaggccatgtagcaatggggtggaaggatcctaatccaggccaagaatcttccatggtcttccaatccagagctgttcggccagacaccgtagaggggcacagcaacgaggacgttgaagccggatttgagaagcatggcttgtcagccgccttaaactcgcctcagcacgaaggccgatcactgccactgaccccacagtttggccagaactccagtcctggaagcagcctcgccgagaggatgcaggcaagagccggattcaaggtgccgaagctgaacatgcctttcagcacggtagctggagatgatagttcagtgccaggagctccatcgccctacctcacgatcccgcctggcttgagcccagcaacgctgctggagtcacctgtcttcatttcgaatgccctgggacaagcctcaccaaccacggggaagctattcttgtttggtagcacaaatgacaacgatcctattcgacctggaggccctccagttggagatggcactgatgctttttctttcaagcccttagatctgaaatcctcacactacactgctgaagtaatgaaggaacaaaatacgcagtcttctgtgaagactgaagctaagactcaggcagtccaagaggctaatttgctgggccaactgaaccagcagaatcacgatgggcagacaaacatgaatagtgacggtgctcgtgactccaagctcagccgtcttgcgtctggcaccggtgcaggcaatgaacacgcatcacccccggattacggccagagagccgaggaagctgatgcgagggaagactacccggcggcaatggccgttacagcgccagcggaggacgggtacagctggaggaagtacgggcagaagcaggtgaagcacagcgagtacccgcgcagctacttcaagtgcacgcatcccaactgcctggtgaagaagaaggttgagcgctcgcacgaggggcacgtcacggagatcatctacaagggaacgcacaaccacccgaagcccacgcagagccgccggccaggcgcaggcgcgcacccgttgggcggcggtgcgcaggcggacgcagccgacaacctgcaggggtcacaggcaaacgcggcggaagccaaccaggcgtggcgtgcgggtgtccaggatggcgtggacgcgacgtcgcccccgtcggttcccggtgagctctgtgactcggcggcgtcgatgcaggtcgactgcgcggcccggtttgggtcccccgagggcgcggacgtgacgtctgccgtgtctgacgaggtggacggggacgacagggtgactctgactcatggcggtgccaacgcggcggagggcgacgaactggaatctaaacgaaggaagctggagtcatacgccattgacatgagcactgcgtcgagagctgttcgcgagcctcgagtggtgatccaaacgacgagcgaggtggacatcctcgatgacggctaccgctggcgcaagtacgggcagaaggtcgtcaagggcaacccgaatccaaggagctactacaagtgcacgcaaccgggctgcacggtgcggaagcacgtggagcgcgcgtcgcacgacctcaaggccgtgatcaccacgtacgagggcaagcacaaccacgaggttcccgccgcgaggaacagcggccacccgagcgccgcggcggcgccaggcgcgggtggcccgcgcaggcaggagcacccgtccgtgcacgacggcctgatgagacagcacctgggcggctgcggcgtgccgttcggcctgccgccgccgccgccgccgccaagggacccgctggcgccgatgcgcaactacccgacgtacggcttcactgcccttggcgccggctccacgtcactgccgagcctgccgatgctcccggtgttggcgccgtcctccctgcaccagcacccgctgctgaggcaccggcaggcggtgcaggctgccggtctcgcgtggcgcccaaggccgacgtgaaggtagagggcagcgttgccggcggcgggatcccgtcggtgtaccagcagatgatccgctgcgggctgcgtctgccccaccagatgtagatacttaaaagtggagaggattagagtgattctcaagttcgtttcttaccattcctgttagtatgagttcgtgataagtattatagcgtggaaactgacgcccgctgcattcgttttttttcacccttctgttccacttcattttttcccgtatttatttatttactacccttcctcaatgatattcggttcttcttgttcagcaagacagcaactggcatcagttaatgttcatttgagaaatgaccaacagtttctgggctggcaacttggtatcagcccagaaagcactttagccggtgagcccagctgattagctactgtttctagtaccaagcccatcagaccctactcttgttaggggcccc

SEQ ID NO: 201336 - DNA, 473 bp, Zea Mays
aaggataattctcaagaatccgaagaaaaattcattttcgagatgaacgaacagtccagaacccactgctcgaaaccgcagccactggccagtcgatgcccatgactgcggtgcccaggaccggccccggttgcctggggtcgccgccggctcaggctctgtcgagctcactagccggggttcaaggcgccccgaagcgactgggcgcatcgaagccgtcgtggatcgttcgcactgagtcaaacgtgaggagggagagagcaaaacgacctgatcctccttgcaccatctgcaagggcacagggagaatagactgccgcaactgctttggccgaggaagaacaaaccatgccgatgtggccatgcttccgaacggcgaatggccacaatggtgtcgaatttgtggtggtagtggactggattactgcctccggtgccatggaactgccttcatcacaaaagccatggaaaga

SEQ ID NO: 201337 - DNA, 1164 bp, Zea Mays
ggtgcatcccctaatggaatttcagtcaaacgtgaggagggagagagcaaaacgacctgatcctccttgcaccatctgcaagggcacagggagaatagactgccgcaactgctttggccgaggaagaacaaaccatgccgatgtggccatgcttccgaacggcgaatggccacaatggtgtcgaatttgtggtggtagtggactggattactgcctccggtgccatggaactgatattctggagaaaaggtttcggttcgccgtgcccgtgcgtacgtttggggttgtttacttgtttctctctcgcttcttcctggcggcggaagacagagaagggcgagcggccgcgcggaacatcgacgaccgagaggccccctcgtcagcaaccccatctgctattctccctgacggcattctggcagcaaggacattccaagttgtgggaacttcaaaatatggaggaactagaaatatgttttggcagcatcacaagtattggttttgatcattggtctcctcatatggccactgcttccaccattgctgaacaaggaggtacaccacacgaggcaatcaattgtgacacacaagaagatggtgacaccaatgaatgtgaagtttcaccggtcaatccaaatggcaagtgaccgccaaggttcaatcaaaacaaaggcaagaagcagaaaacagaaaatagggacaacactaatcatcgttcaataaacagttacatctatgtctgtttcaactaattcttatgctgcaaaaaagggaaaaatttccattgatgaagtgatgaaacatgtgcttgcttgtggtgccacctatggtagtaacgagcacttcattgcaactgaattatttgtcaaactgacccaaaaagagatgttcatgacctttcttaccgaacatagattcaactggctttcagggaaatacataaccaagtatggtaattataaagggccatgggtgtgatatgagttgtaaatgtttgtttttttatctcgttatgtgagacttatttgtttcttgttactttcatttctttatgtgagactcaatggatcattgtatctgctatctcatttgatgatggttatgtattattgtactattacttgtgtttgtataaaatctcatatttgctatcttatttgacat

SEQ ID NO: 201338 - DNA, 987 bp, Zea Mays
aatcttatcctcttctcattctcctttctccctcttgtgtcttccaccaggaacaagccgccgccgcacgcctccgcttgctcccacccgcgcccgccggtgcacccgccccggccccgcccgtcgcggctgcccccaccccgcccgcccctaccaccggcgcggccgcctccggccccggccccaaacgctgcacccaacagccccagccgtcccactcccagggtccatctcagtcgccgtcgcagaccacgcagcaggcgtcaccccagcagcagcaggtggcggcggtggcagcggcataggcacaagcacagacccaggcggcatgggtacgaagccccgagatggagatggcgctgcaggacgccatgcgggtctgcaatccggacgtcaatacgcccttccagtccatcgaggacgctgtcaacaggctgcatatggcgaggcgatgtctagtcagcacggaccatactatgactagaggacctcacctattgatccccaggctgtgtatgcaagtggtggaaaagctcatggaaggtgcagactctacatatcttatattgtttcattggttgagtgcaatacatgtattcttaatctgtcgtgatgttacttattttgtaggtacacaatgtttgctaacgtcatcgacttgagccaggtgagggttcagcgtggaggtttgtcgaggtctgctgctcgtagctcccgtcgctccactcaagatccagcaaaagtggagcaactgcgcgaagaacttaggcgaaatcctcttcgctagtggaggtatcgaccatcactcgtcactgtaacccgatggtgatcgacgaccatgagcttccatgttattgtgttctgatacttgagaattttattatgagtatgatgatgagatgtgtcttattatgattatggatgagacttttgtgatgtaattgatgagactatggatttaaatattgttatgtgattgtgtgtgag

SEQ ID NO: 201339 - DNA, 1216 bp, Zea Mays
cacgccgagccgagcggagcagcaaccgccggttcgcaccaaacctacgcgcaggcaggctgcaggggtagaaagagaaagagcagtgggtgtgggttggctttggcttggctggtcgcagtcgcagcatatataccacctcggcattagagcggagcggttgctctctccacctcctctctctctttctctttcggtatcgcagtcgtcgtcgccgctccccggccgggctcgctcgcgtgcgcgacccacccagccagcacaccagccagtcggcgcagcaaagcatggggaactgccaggcggcggaggtggcgacggtgctgctccagcacccgggcgggcgggtggagcggctctactggtccaccagcgccgccgaggtcatgcgcgccaacccgggccactacgtcgcgctcgtcacgctccgcgtcgccgaggaccggcaggacgccccgggcgggcagcggcgcaccgtgcgcctcacgcgcgtcaagctgctcaagcccaaggagacgctgctcctcggtcacgtgtaccgcctcatcaccacccaggaggtgacgaaggcggtgcaggcgaggaagcaggacaagcagaggaaagcgcagcagcagctgctggagccgaggcagggccagggcgtggcgagtggcgccgcggccgaggaggaggacgacgacgacgaggcagccttggacgccagccttgatcaggacaacggcagccggagctccagtgcgcggcaccggcaatggcggccgtcgctgcagagcatcgacgaggccacgacctgagatgtcagctccatacagccgtagcgccgtaatcattgactaccggtgggcctgtactttcggcgatcacctggcctcggtcagttcatcgcaagggttgctatttggcctactgctacgattgcacactgtggagtggagtgagttgggagcttgacaccccgggatgagagggcactgcttcggatgcagcatgtagcctcggatccgtgtaaattttcaggtcttggtcaggagtttgttagtgagactgctttgcttcttcttcttcttattttctctcgatccatacggtttgcacatggaattatatcagtaacaaattagagtagcttactattagatttacagccagacatgtcatgtacttgctgctactctcttgcagatgggaatcgagcgtgtagccttttgagagt

SEQ ID NO: 201340 - DNA, 2095 bp, Zea Mays
ctctgcatggtcctttggatacgaacaggacgtcccgtgttcgatcgcctggcagcagcgtgagatgattatgatgatttgttcggcagcttgtttgggcgtccgtgtccctgcccgcagaagcaccgaaaggtgtcacctctgctcgccttcgccttcaccttcaccttcaccttcaaatgtgactcggcttggcgcaaggggaatgaactccaggagacaggagcagcaggctcggcggaccatcagagcgctgctggccaagaacggagcgctgtgcacaggtgtttggagatgcaggagcggaggcgcagatatagcctcgcgagccccgacgatggccaccaccgcggtgtcggtcgacgagaagctcgataagcttcgcgccgaggtcgccaagctcgaccagatcagcgagaacgagaagtccgggttcatcagcctcgtgtcacggtacctcagtggggaggcggagcagatcgagtggagcaagatccagacccctacggatgaggtggtggtgccctacgataccgtcgcgtcgcctcccgaagatctcgaggagacgaagaagctgctggataagctcgttgtgctcaagcttaacggagggctcgggacgaccatgggctgcactgggcccaagtctgtcattgaagtccgcaatgggttcacattccttgaccttattgtgattcaaattgagtccctgaacaagaagtatggatgcaatgtccctttacttctgatgaactctttcaacacccatgatgacacacagaagattgttgagaagtattccaactccaacatcgaaattcatactttcaatcagagccagtatcctcgcattgttaccgaggacttcttgccacttcccagcaaagggaaatctgggaaggatggctggtatcctcctggtcatggtgatgtgtttccttctttgaataacagcggaaaacttgacatcttattggctcagggcaaggagtatgtctttgttgcaaactcagacaacttgggtgctatagtcgacatcaagatcctaaaccatctgatcaataaccagaacgagtactgcatggaggttactccaaagacgctggctgacgttaagggtggcactctcatctcttacgaaggaagagttcagcttttggagattgcccaagtacccgatgagcatgtgaatgaatttaaatcaatcgagaagtttaagatattcaacactaacaacttgtgggtgaaccttaaagctatcaagagactcgtagaggctgaggcacttaagatggaaattattccaaaccccaaggaagttgatggtgtgaaagtccttcaactcgaaaccgcagctggtgcagctattcggttcttcgacaaagcgattggaattaatgttccccgctcaaggtttctcccagtgaaggctacatctgatctgttgcttgtgcagtctgatctttacaccttggttgatggctttgtcatccgcaacccatccagagcgaatccagctaacccttcaattgagcttggacctgagttcaagaaggttgccaatttccttgctcggttcaagtccatccccagcatagttgagcttgacagcttgaaggtgtctggtgatgtctggtttggctctggaattacactcaagggcaaggtgacaattatcgccaagcctggagtgaagttggagattccagatggagacgtacttgagaacaaggatgtcaatggccctgaggatctttaagcaatgtttgaactgccgagcctaatcactcctactgagctctatatttttgacgtatatttttactgaaatgatactccgaagagcacgtatggtgtcttaccgggaggactcattgccgccattctgccacatgcccccggtgctcgagaatattgttatggaaagggcacaaagtggccatattcccaaggtgataaacgccgtcatgcgggacacttttcgagcgaatggcgtttgtggtccgggagaccgggaccttgcggataagttcctcgcctgcttgttcgaatccaagggtgcaaataatcacgaacgagcatggctgcacatgta

SEQ ID NO: 201341 - DNA, 2131 bp, Zea Mays
gcgagaaccgcctccgcaacacccttccccaaacccattctccccacgcgcggcgcctccgcaacagcaaccgccgcgcccgagcccctccaccatgtcccattcccaccgctaccaatggcgcccgagcccgagcccaaacccacgcgctgcggcggccgagatcctgccttcaacgacgcgaaccccatcccccacgcgccgcggcggccgagatcccgccttcaacgacgcgaacgccaacggagcccgagcccacctcgccttcaacgcccctgcctccctctttctcctcctcccccgcatgcttccactgcttctctccagcggcgccgccaccgtccctctcgctccagcgagatccagatccggcgcggctcagagtggcaacgcgccgcaaccgcggccgcgccccacacgtgccctatccaaccaccatggagctcttccccatccatccaccacgccgagcgggaggtcgaagtgcgagcgctggccgaccaggcggcccacatagaggccgaggcgcgggccgtcgcgtgcaagaaggtcttccgctcctaccaggcgcttggcggacaccgcgccagcaacgtgcgcggcggcagaggcggctgctgcgcgcctcccgtggctcctccggccccacccccgcagccccagccgccgctgtcgccattgccggagcaccgtgacggaggcgaggacgatgacatgaacgcaaagcagcagccgcgcgagtgtccccactgcggccgcgtgttcttggggcaggctctcggggagcacatcatgcagtcccatgtgtgcgcctcgtcgccgcttgccggcaccgccaccgcctccaccacctcagccgccactcctgcgtcaccgaccaacagtccctccatgatcgatctgaacgtggcgccgcagtccgaggaggtggagcactctgccgtgtcagatccccgcttcaatccaggtgcctgaagctgaagcaggcagatcagcgccctcattctggatagttccgttgctcggaggtgattctaggttgagctttctcttgaagctgcaaatttagcacagggaaatgcaactctaggaataagtgactcttcagcagtatctgcaacaagagccagggcactggctgaggatgcatttttccatccatccattatgtcaatcagttatgcttcagtagagcactatttcgccatttacatggtcagtacactattgcagacttgcatcagtttccaaaattttaaaatggcgctcataattttgtttccatgtgcatgttaatcagtacagtactacattaaaaactccatacttcctgcagccatttttcgcaccagtttccttgcatgtgctgctggcggcaatcaaagagctgaaacgttacaaggcagagcgagcaaaatattcggcatttcttgcttcccaggcgacatcctcctgatctggtggtgattagggtttagggtttagggtttagggtttaggcaagtactacgagaagaaggggctcatcgctgaagcttgggaatccttcaatcgacccagaccatgccatgagtcatctttgttgaccttacccccacctcttagcgagagaattcttgtgattttcttgatttttgttgttcatgtttgatgtcactaattttatttgttgttgttgttgtgcagatttgagatcgagcgaagctaagcttttcatcaagatggcgcttgtggccaccacaagcgaggggtctgcttcaacttcttgacagagacagatcggaggctttcttggcaatggaaagttttgttggtagtagtattagctttatagggggacatgtcattagggttgatcttgtgcttttgaggccttgcttacaggcacggtactactgaaatagttagcaaaagatggcaatactgatgtaatccagaatgtagcagtacatatcaactgccgtcttagtttcagttcatgaagtgaataatgcataccaaactatgtcccagttcaaagcatctagaacagtgaagtattatgtctgtcgcgttttctcattctgataattcatatcaactgcttgtgatgctttgccattatggaattgagtatgctgtgagttcagat

SEQ ID NO: 201342 - DNA, 2132 bp, Zea Mays
tccccacgcgcggcgcctccgcaacagcaaccgccgcgcccgagcccctccaccatgtcccattcccaccgctaccaatggcgcccgagcccgagcccaaacccacgcgctgcggcggccgagatcctgccttcaacgacgcgaaccccatcccccacgcgccgcggcggccgagatcccgccttcaacgacgcgaacgccaacggagcccgagcccacctcgccttcaacgcccctgcctccctctttctcctcctcccccgcatgcttccactgcttctctccagcggcgccgccaccgtccctctcgctccagcgagatccagatccggcgcggctcagagtggcaacgcgccgcaaccgcggccgcgccccacacgtgccctatccaaccaccatggagctcttccccatccatccaccacgccgagcgggaggtcgaagtgcgagcgctggccgaccaggcggcccacatagaggccgaggcgcgggccgtcgcgtgcaagaaggtcttccgctcctaccaggcgcttggcggacaccgcgccagcaacgtgcgcggcggcagaggcggctgctgcgcgcctcccgtggctcctccggccccacccccgcagccccagccgccgctgtcgccattgccggagcaccgtgacggaggcgaggacgatgacatgaacgcaaagcagcagccgcgcgagtgtccccactgcggccgcgtgttcttggggcaggctctcggggagcacatcatgcagtcccatgtgtgcgcctcgtcgccgcttgccggcaccgccaccgcctccaccacctcagccgccactcctgcgtcaccgaccaacagtccctccatgatcgatctgaacgtggcgccgcagtccgaggaggtggagcactctgccgtgtcagatccccgcttcaatccaggtgcctgaagctgaagcaggcagatcagcgccctcattctggatagttccgttgctcggaggtgattctaggttgagctttctcttgaagctgcaaatttagcacagggaaatgcaactctaggaataagtgactcttcagcagtatctgcaacaagagccagggcactggctgaggatgcatttttccatccatccattatgtcaatcagttatgcttcagtagagcactatttcgccatttacatgccatttttcgcaccagtttccttgcatgtgctgctggcggcaatcaaagagctgaaacgttacaaggcagagcgagcaaaatattcggcatttcttgcttcccaggcgacatcctcctgatctggtggtgattagggtttagggtttagggtttagggtttaggcaagtactacgagaagaaggggctcatcgctgaagcttgggaatccttcaatcgacccagaccatgccatgagtcatctttgttgaccttacccccacctcttagcgagagaattcttgtgattttcttgatttttgttgttcatgtttgatgtcactaattttatttgttgttgttgttgtgcagatttgagatcgagcgaagctaagcttttcatcaagatggcgcttgtaagtgtttattcaattagtagttgtttaagtagcctctatctcttacttttttatatgctagaggtgtgtttaagttgattgcattggtgagattattttattgtagtttcgacttgtggtgtggcatgtcatgatggcctcaaatcatcagtgttacaggtggccaccacaagcgaggggtctgcttcaacttcttgacagagacagatcggaggctttcttggcaatggaaagttttgttggtagtagtattagctttatagggggacatgtcattagggttgatcttgtgcttttgaggccttgcttacaggcacggtactactgaaatagttagcaaaagatggcaatactgatgtaatccagaatgtagcagtacatatcaactgccgtcttagtttcagttcatgaagtgaataatgcataccaaactatgtcccagttcaaagcatctagaacagtgaagtattatgtctgtcgcgttttctcattctgataattcatatcaactgcttgtgatgctttgccattatggaattgagtatgctgtgagttcagat

SEQ ID NO: 201343 - DNA, 2424 bp, Zea Mays
cacgcgcggcgcctccgcaacagcaaccgccgcgcccgagcccctccaccatgtcccattcccaccgctaccaatggcgcccgagcccgagcccaaacccacgcgctgcggcggccgagatcctgccttcaacgacgcgaaccccatcccccacgcgccgcggcggccgagatcccgccttcaacgacgcgaacgccaacggagcccgagcccacctcgccttcaacgcccctgcctccctctttctcctcctcccccgcatgcttccactgcttctctccagcggcgccgccaccgtccctctcgctccagcgagatccagatccggcgcggctcagagtggcaacgcgccgcaaccgcggccgcgccccacacgtgccctatccaaccaccatggagctcttccccatccatccaccacgccgagcgggaggtcgaagtgcgagcgctggccgaccaggcggcccacatagaggccgaggcgcgggccgtcgcgtgcaagaaggtcttccgctcctaccaggcgcttggcggacaccgcgccagcaacgtgcgcggcggcagaggcggctgctgcgcgcctcccgtggctcctccggccccacccccgcagccccagccgccgctgtcgccattgccggagcaccgtgacggaggcgaggacgatgacatgaacgcaaagcagcagccgcgcgagtgtccccactgcggccgcgtgttcttggggcaggctctcggggagcacatcatgcagtcccatgtgtgcgcctcgtcgccgcttgccggcaccgccaccgcctccaccacctcagccgccactcctgcgtcaccgaccaacagtccctccatgatcgatctgaacgtggcgccgcagtccgaggaggtggagcactctgccgtgtcagatccccgcttcaatccaggtgcctgaagctgaagcaggcagatcagcgccctcattctggatagttccgttgctcggaggtgattctaggttgagctttctcttgaagctgcaaatttagcacagggaaatgcaactctaggaataagtgactcttcagcagtatctgcaacaagagccagggcactggctgaggatgcatttttccatccatccattatgtcaatcagttatgcttcagtagagcactatttcgccatttacatgccatttttcgcaccagtttccttgcatgtgctgctggcggcaatcaaagagctgaaacgttacaaggcagagcgagcaaaatattcggcatttcttgcttcccaggcgacatcctcctgatctggtggtgattagggtttagggtttagggtttagggtttaggcaagtactacgagaagaaggggctcatcgctgaagcttgggaatccttcaatcgacccagaccatgccatgagtcatctttgttgaccttacccccacctcttagcgagagaattcttgtgattttcttgatttttgttgttcatgtttgatgtcactaattttatttgttgttgttgttgtgcagatttgagatcgagcgaagctaagcttttcatcaagatggcgcttgtaagtgtttattcaattagtagttgtttaagtagcctctatctcttacttttttatatgctagaggtgtgtttaagttgattgcattggtgagattattttattgtagtttcgacttgtggtgtggcatgtcatgatggcctcaaatcatcaggtaaattacttctctactgttgtaatggaaaacctgggccaagggagtaatttcgacttgcgtagtaatggaaaaaattaccttctctctttgagggttccaatccatttcgttctctatgattgtcacctacctttcctgagcctacttttgttgctactataagaataagtcaatgaaaaaaatcttcatctctatttgtttccgctatgtattgtgtagcttagagttgtctctcttagaggttaatttgtcatcatgctaatatttggtttgaaatctatgtatttctgcagtgttacaggtggccaccacaagcgaggggtctgcttcaacttcttgacagagacagatcggaggctttcttggcaatggaaagttttgttggtagtagtattagctttatagggggacatgtcattagggttgatcttgtgcttttgaggccttgcttacaggcacggtactactgaaatagttagcaaaagatggcaatactgatgtaatccagaatgtagcagtacatatcaactgccgtcttagtttcagttcatgaagtgaataatgcataccaaactatgtcccagttcaaagcatctagaacagtgaagtattatgtctgtcgcgttttctcattctgataattcatatcaactgcttgtgatgctttgccattatggaattgagtatgctgtgagttcagat

SEQ ID NO: 201344 - DNA, 2351 bp, Zea Mays
gcggcgcctccgcaacagcaaccgccgcgcccgagcccctccaccatgtcccattcccaccgctaccaatggcgcccgagcccgagcccaaacccacgcgctgcggcggccgagatcctgccttcaacgacgcgaaccccatcccccacgcgccgcggcggccgagatcccgccttcaacgacgcgaacgccaacggagcccgagcccacctcgccttcaacgcccctgcctccctctttctcctcctcccccgcatgcttccactgcttctctccagcggcgccgccaccgtccctctcgctccagcgagatccagatccggcgcggctcagagtggcaacgcgccgcaaccgcggccgcgccccacacgtgccctatccaaccaccatggagctcttccccatccatccaccacgccgagcgggaggtcgaagtgcgagcgctggccgaccaggcggcccacatagaggccgaggcgcgggccgtcgcgtgcaagaaggtcttccgctcctaccaggcgcttggcggacaccgcgccagcaacgtgcgcggcggcagaggcggctgctgcgcgcctcccgtggctcctccggccccacccccgcagccccagccgccgctgtcgccattgccggagcaccgtgacggaggcgaggacgatgacatgaacgcaaagcagcagccgcgcgagtgtccccactgcggccgcgtgttcttggggcaggctctcggggagcacatcatgcagtcccatgtgtgcgcctcgtcgccgcttgccggcaccgccaccgcctccaccacctcagccgccactcctgcgtcaccgaccaacagtccctccatgatcgatctgaacgtggcgccgcagtccgaggaggtggagcactctgccgtgtcagatccccgcttcaatccaggtgcctgaagctgaagcaggcagatcagcgccctcattctggatagttccgttgctcggaggtgattctaggtgagcatcgtcagggggagataaaggttgagctttctcttgaagctgcaaatttagcacagggaaatgcaactctaggaataagtgactcttcagcagtatctgcaacaagagccagggcactggctgaggatgcatttttccatccatccattatgtcaatcagttatgcttcagtagagcactatttcgccatttacatgccatttttcgcaccagtttccttgcatgtgctgctggcggcaatcaaagagctgaaacgttacaaggcagagcgagcaaaatattcggcatttcttgcttcccaggcgacatcctcctgatctggtggtgattagggtttagggtttagggtttagggtttaggcaagtactacgagaagaaggggctcatcgctgaagcttgggaatccttcaatcgacccagaccatgccatgagtcatctttgttgaccttacccccacctcttagcgagagaattcttgtgattttcttgatttttgttgttcatgtttgatgtcactaattttatttgttgttgttgttgtgcagatttgagatcgagcgaagctaagcttttcatcaagatggcgcttattattttattgtagtttcgacttgtggtgtggcatgtcatgatggcctcaaatcatcaggtaaattacttctctactgttgtaatggaaaacctgggccaagggagtaatttcgacttgcgtagtaatggaaaaaattaccttctctctttgagggttccaatccatttcgttctctatgattgtcacctacctttcctgagcctacttttgttgctactataagaataagtcaatgaaaaaaatcttcatctctatttgtttccgctatgtattgtgtagcttagagttgtctctcttagaggttaatttgtcatcatgctaatatttggtttgaaatctatgtatttctgcagtgttacaggtggccaccacaagcgaggggtctgcttcaacttcttgacagagacagatcggaggctttcttggcaatggaaagttttgttggtagtagtattagctttatagggggacatgtcattagggttgatcttgtgcttttgaggccttgcttacaggcacggtactactgaaatagttagcaaaagatggcaatactgatgtaatccagaatgtagcagtacatatcaactgccgtcttagtttcagttcatgaagtgaataatgcataccaaactatgtcccagttcaaagcatctagaacagtgaagtattatgtctgtcgcgttttctcattctgataattcatatcaactgcttgtgatgctttgccattatggaattgagtatgctgtgagttcagat

SEQ ID NO: 201345 - DNA, 1641 bp, Zea Mays
cgcctccgcaacagcaaccgccgcgcccgagcccctccaccatgtcccattcccaccgctaccaatggcgcccgagcccgagcccaaacccacgcgctgcggcggccgagatcctgccttcaacgacgcgaaccccatcccccacgcgccgcggcggccgagatcccgccttcaacgacgcgaacgccaacggagcccgagcccacctcgccttcaacgcccctgcctccctctttctcctcctcccccgcatgcttccactgcttctctccagcggcgccgccaccgtccctctcgctccagcgagatccagatccggcgcggctcagagtggcaacgcgccgcaaccgcggccgcgccccacacgtgccctatccaaccaccatggagctcttccccatccatccaccacgccgagcgggaggtcgaagtgcgagcgctggccgaccaggcggcccacatagaggccgaggcgcgggccgtcgcgtgcaagaaggtcttccgctcctaccaggcgcttggcggacaccgcgccagcaacgtgcgcggcggcagaggcggctgctgcgcgcctcccgtggctcctccggccccacccccgcagccccagccgccgctgtcgccattgccggagcaccgtgacggaggcgaggacgatgacatgaacgcaaagcagcagccgcgcgagtgtccccactgcggccgcgtgttcttggggcaggctctcggggagcacatcatgcagtcccatgtgtgcgcctcgtcgccgcttgccggcaccgccaccgcctccaccacctcagccgccactcctgcgtcaccgaccaacagtccctccatgatcgatctgaacgtggcgccgcagtccgaggaggtggagcactctgccgtgtcagatccccgcttcaatccaggtgcctgaagctgaagcaggcagatcagcgccctcattctggatagttccgttgctcggaggtgattctaggtgagcatcgtcagggggagataaaggttgagctttctcttgaagctgcaaatttagcacagggaaatgcaactctaggaataagtgactcttcagcagtatctgcaacaagagccagggcactggctgaggatgcatttttccatccatccattatgtcaatcagttatgcttcagtagagcactatttcgccatttacatgatttgagatcgagcgaagctaagcttttcatcaagatggcgctttgttacaggtggccaccacaagcgaggggtctgcttcaacttcttgacagagacagatcggaggctttcttggcaatggaaagttttgttggtagtagtattagctttatagggggacatgtcattagggttgatcttgtgcttttgaggccttgcttacaggcacggtactactgaaatagttagcaaaagatggcaatactgatgtaatccagaatgtagcagtacatatcaactgccgtcttagtttcagttcatgaagtgaataatgcataccaaactatgtcccagttcaaagcatctagaacagtgaagtattatgtctgtcgcgttttctcattctgataattcatatcaactgcttgtgatgctttgccattatggaattgagtatgctgtgagttcagat

SEQ ID NO: 201346 - DNA, 1901 bp, Zea Mays
atggcgcccgagcccgagcccaaacccacgcgctgcggcggccgagatcctgccttcaacgacgcgaaccccatcccccacgcgccgcggcggccgagatcccgccttcaacgacgcgaacgccaacggagcccgagcccacctcgccttcaacgcccctgcctccctctttctcctcctcccccgcatgcttccactgcttctctccagcggcgccgccaccgtccctctcgctccagcgagatccagatccggcgcggctcagagtggcaacgcgccgcaaccgcggccgcgccccacacgtgccctatccaaccaccatggagctcttccccatccatccaccacgccgagcgggaggtcgaagtgcgagcgctggccgaccaggcggcccacatagaggccgaggcgcgggccgtcgcgtgcaagaaggtcttccgctcctaccaggcgcttggcggacaccgcgccagcaacgtgcgcggcggcagaggcggctgctgcgcgcctcccgtggctcctccggccccacccccgcagccccagccgccgctgtcgccattgccggagcaccgtgacggaggcgaggacgatgacatgaacgcaaagcagcagccgcgcgagtgtccccactgcggccgcgtgttcttggggcaggctctcggggagcacatcatgcagtcccatgtgtgcgcctcgtcgccgcttgccggcaccgccaccgcctccaccacctcagccgccactcctgcgtcaccgaccaacagtccctccatgatcgatctgaacgtggcgccgcagtccgaggaggtggagcactctgccgtgtcagatccccgcttcaatccaggtgcctgaagctgaagcaggcagatcagcgccctcattctggatagttccgttgctcggaggtgattctaggttgagctttctcttgaagctgcaaatttagcacagggaaatgcaactctaggaataagtgactcttcagcagtatctgcaacaagagccagggcactggctgaggatgcatttttccatccatccattatgtcaatcagttatgcttcagtagagcactatttcgccatttacatgccatttttcgcaccagtttccttgcatgtgctgctggcggcaatcaaagagctgaaacgttacaaggcagagcgagcaaaatattcggcatttcttgcttcccaggcgacatcctcctgatctggtggtgattagggtttagggtttagggtttagggtttaggcaagtactacgagaagaaggggctcatcgctgaagcttgggaatccttcaatcgacccagaccatgccatgagtcatctttgttgaccttacccccacctcttagcgagagaattcttgtgattttcttgatttttgttgttcatgtttgatgtcactaattttatttgttgttgttgttgtgcagatttgagatcgagcgaagctaagcttttcatcaagatggcgctttgttacaggtggccaccacaagcgaggggtctgcttcaacttcttgacagagacagatcggaggctttcttggcaatggaaagttttgttggtagtagtattagctttatagggggacatgtcattagggttgatcttgtgcttttgaggccttgcttacaggcacggtactactgaaatagttagcaaaagatggcaatactgatgtaatccagaatgtagcagtacatatcaactgccgtcttagtttcagttcatgaagtgaataatgcataccaaactatgtcccagttcaaagcatctagaacagtgaagtattatgtctgtcgcgttttctcattctgataattcatatcaactgcttgtgatgctttgccattatggaattgagtatgctgtgagttcagat

SEQ ID NO: 201347 - DNA, 3175 bp, Zea Mays
aatccaacaatccaaaccacccacaccacaccaccctgctcttcacgagctcctccactctgttcttccccgccgctccactgcgcccttcctcccgccgggatcctaaaccctagcccctagggagcgggagaggctgctgctgctgctgctaccgcggcggcgccggaggggatgggcaccgggggagacgggagcaaggcgggcccggcgctgccgctcgaggcgctgctggcgctcggcctcgaccagcgcaccgccgagaacgcgctcgtcaacgccaaggtcaccgccaacctcgcctccgtcatagccgaggctggtataaaggaatgcgacaagtcagtcggcaatcttctgtatgcagtcgccaccaagtacccaactaatgcacttgttcaccgtcctgtccttattagctatgtcttgtcaacaaagataaagaaccccgcacagctagatgctgctctgtcatttcttactaatactggtcctgattctctagatgtggtcaaatttgaagaagcatgtggtgtaggtgtggttgtttctattgaggaaattaaatctactgttactgatgtgcttgaggagaatatggaagctataaaggagcagcgatatcacataaatgttggtacactatgcggacaggtcaggaagagacacccctggggtgatgctaaggcgataaaggaggaaattgacaagaggcttgcagaaatcctaggtcccaagacagaagctgacaatataaaaccagtgaaaaagaagaaggaaaaaccagcaaaagttgaggagaaaaaagttgcagttgccactgctgccccaccatctgaggaggaattgaacccgtacactatatttccccaaccagaggaaaacttcaaggttcatacagaaatatttttcagtgatgggaacatatggagagcgcataacacaaaggaaattttagaaaaacatcttaaagcaactggaggaaaagtgatgacccgttttccaccagaacctaatggatatcttcatattggtcatgccaaggctatgtttattgattttggtctggctaaggagcgaaatggccattgctaccttagatttgatgacacaaatccagaagctgaaaagaaagaatacatagatcacattcaggaaatcgtccattggatgggatgggagccctacaaagtaacatacacgagtgactatttccaagctttgtatgaacatgccgttgagttaatacagaaagggctagcatatgtggatcaccagactgcagaagaaatcaaggaatacagggaaaagaagatggatagtccatggaggggtaggccaattgaagagtctctgaaattatttgaagacatgaggcgtgggttgattgcagagggtgcagcaactctccgtatgaagcaggatatgcaaaatgagaacaaaaatatgtctgacttaatagcatatagaataaaattcaccccccatccacatgctggcgacaagtggtgtgtctatccgagctatgactacgctcattgcatggtggattctcttgaaaacatcacacattcgctgtgcacacttgagtttgacatacgtcgcccttcatactactggctacttgttgccttgggcctttatcaaccatatgtgtgggaatattcgaggctaaacatatcaaatactgtgatgtctaaaagaaagttgaatcgacttgtgacagagaagtgggtagatgggtgggatgatccccgcttgttgacactggctggtctccggcgacggggagtatcatcaactgcaataaattcctttattcgtggaatcgggataacgagaagtgacaatagcttaattcgtgttgatcgtctagaatatcacatcagggaggagcttaacaaaacagcccctcgaaccatggttgttttgcgacctctaaaggtggtaataactaacttggaagaaggaaaagtactagaccttgatggcaaaatgtggcctgatgcttctgatactgatgcttcctcccactataaggttccgttctcaagaactgtctacattgagaaaactgattttcgcctaaaggactcaaaagactactatgggctagcccctggtatgcgttccccataaaatgcacagatgttatctctggtgatagtcctgatgatattgttgaaattcgagctgaatatgatcctttgaagacttctaaactgaagggtgttcttcactggattgctgagccagcacctggtgtagagccattgaaggtggaagtaagattattcgagaaattgttcatgtcagagaatcctgctgaattggaagattggcttggcgatcttaacccacactcgaaagaggtgataaaggatgcttatgctgtaccatcacttgccactgcggttctgggtgacaagttccagtttgagcggcttggttacttcgccgtggatactgactccacacctgagaaactcgtgttcaacagaactgttaccctccgtgattcgttcgggaaagctggacccaagtgactgttcagtgtaatttagggagggcgctggttttgatcggttgcagaggcgcacctgaactatacagtttgtgaagaaaatggtcgtctaatacagaacagtttaaaggccttactctttataaaatttagggttttttaatctggtgccctcagttttggtgatgtgttcatttgtaccccttgtttacttcgaatcagattttgtatgatagtgttagtgtcccgattctaccgtctgtaaccgaaaggtcccgggttcgagccccagcctctgcatattatgcgggtaaggcttggcgcttaaagatacaattcccaagaccccgcacagtgcgggaagcctacagcactgggtacgcctagtgttagtgtcccgattcccattctgtttgatgtcatactattgtgatgggagttctgttttcccctgcgtcctcttttttttgcaaatccttactgtgatactactccctttaattttcaaattataagccattttgatttccttggagagtcacatcacaagtctattaaaattataaagaaaacgaagatttatcaaaattataaagaacaaatatttataacataaaatagatatagtataaaaatattataaaaacataa

SEQ ID NO: 201348 - DNA, 2703 bp, Zea Mays
aatccaacaatccaaaccacccacaccacaccaccctgctcttcacgagctcctccactctgttcttccccgccgctccactgcgcccttcctcccgccgggatcctaaaccctagcccctagggagcgggagaggcgctgctggcgctcggcctcgaccagcgcaccgccgagaacgcgctcgtcaacgccaaggtcaccgccaacctcgcctccgtcatagccgaggctggtataaaggaatgcgacaagtcagtcggcaatcttctgtatgcagtcgccaccaagtacccaactaatgcacttgttcaccgtcctgtccttattagctatgtcttgtcaacaaagataaagaaccccgcacagctagatgctgctctgtcatttcttactaatactggtcctgattctctagatgtggtcaaatttgaagaagcatgtggtgtaggtgtggttgtttctattgaggaaattaaatctactgttactgatgtgcttgaggagaatatggaagctataaaggagcagcgatatcacataaatgttggtacactatgcggacaggtcaggaagagacacccctggggtgatgctaaggcgataaaggaggaaattgacaagaggcttgcagaaatcctaggtcccaagacagaagctgacaatataaaaccagtgaaaaagaagaaggaaaaaccagcaaaagttgaggagaaaaaagttgcagttgccactgctgccccaccatctgaggaggaattgaacccgtacactatatttccccaaccagaggaaaacttcaaggttcatacagaaatatttttcagtgatgggaacatatggagagcgcataacacaaaggaaattttagaaaaacatcttaaagcaactggaggaaaagtgatgacccgttttccaccagaacctaatggatatcttcatattggtcatgccaaggctatgtttattgattttggtctggctaaggagcgaaatggccattgctaccttagatttgatgacacaaatccagaagctgaaaagaaagaatacatagatcacattcaggaaatcgtccattggatgggatgggagccctacaaagtaacatacacgagtgactatttccaagctttgtatgaacatgccgttgagttaatacagaaagggctagcatatgtggatcaccagactgcagaagaaatcaaggaatacagggaaaagaagatggatagtccatggaggggtaggccaattgaagagtctctgaaattatttgaagacatgaggcgtgggttgattgcagagggtgcagcaactctccgtatgaagcaggatatgcaaaatgagaacaaaaatatgtctgacttaatagcatatagaataaaattcaccccccatccacatgctggcgacaagtggtgtgtctatccgagctatgactacgctcattgcatggtggattctcttgaaaacatcacacattcgctgtgcacacttgagtttgacatacgtcgcccttcatactactggctacttgttgccttgggcctttatcaaccatatgtgtgggaatattcgaggctaaacatatcaaatactgtgatgtctaaaagaaagttgaatcgacttgtgacagagaagtgggtagatgggtgggatgatccccgcttgttgacactggctggtctccggcgacggggagtatcatcaactgcaataaattcctttattcgtggaatcgggataacgagaagtgacaatagcttaattcgtgttgatcgtctagaatatcacatcagggaggagcttaacaaaacagcccctcgaaccatggttgttttgcgacctctaaaggtggtaataactaacttggaagaaggaaaagtactagaccttgatggcaaaatgtggcctgatgcttctgatactgatgcttcctcccactataaggttccgttctcaagaactgtctacattgagaaaactgattttcgcctaaaggactcaaaagactactatgggctagcccctggtaaatctgtcatgctaaggtatgcgttccccataaaatgcacagatgttatctctggtgatagtcctgatgatattgttgaaattcgagctgaatatgatcctttgaagacttctaaactgaagggtgttcttcactggattgctgagccagcacctggtgtagagccattgaaggtggaagtaagattattcgagaaattgttcatgtcagagaatcctgctgaattggaagattggcttggcgatcttaacccacactcgaaagaggtgataaaggatgcttatgctgtaccatcacttgccactgcggttctgggtgacaagttccagtttgagcggcttggttacttcgccgtggatactgactccacacctgagaaactcgtgttcaacagaactgttaccctccgtgattcgttcgggaaagctggacccaagtgactgttcagtgtaatttagggagggcgctggttttgatcggttgcagaggcgcacctgaactatacagtttgtgaagaaaatggtcgtctaatacagaacagtttaaaggccttactctttataaaatttagggttttttaatctggtgccctcagttttggtgatgtgttcatttgtaccccttgtttacttcgaatcagattttgtatgatagtgttaaaaaaaaat

SEQ ID NO: 201349 - DNA, 555 bp, Zea Mays
gtaatgcaatggcctccaaacatctctgtgtatacatacctgcaagaaacaaggccagagaacgcgctccgtgtctcctgggaggaaggtgggcacagtggcgcaagtgggaatgttcttgatccttatcaggggctccttcagcacctggacaacgatccttccctgcagttcgggtaccatcatcaagcctacatggatcagctgaacaacgaggacctggtggacccgaatgagcatggtcgatctggatggatatgaaatgctctgatgacccaaaataaagttgatgcacagcagggattcaccctgcaggacgcgagactatgtattgaagctaagacctcgtgtgtgttgtgttgtgtgcgaagcttggaactttataaatcgttgtcatgcccatggctttctatttctttctcggagctgcgcaaaaccgtctccatttctgggcttctcaggacagctggacgcgggaagccggaaccaaaaactctgttccgcactcatctcctctgctccaggcttcaacatccgcgcaggagcgaaaacgcg

SEQ ID NO: 201350 - DNA, 3262 bp, Zea Mays
ctcatagaagcgacggttgtgttgtataggacacataaattcgaacagtgtcgtacaaagaattttgaattttcagggccatagaaggaataagtgagtttcagaggtccacagatgatgatgcaattagcaaagtcttcctggatcttgcaccttaactgcaacaaacgccgagtggctcccattgctgcactactatctgcagtattgcacccagcaatattttgtaatttggaaatgcaccagacaaatgaaaaagggccaggccctttaaaatggtttgttgagaatcttcttaatgaaggctcaaaaagtcctcgaactattcgcctagcagctttgcatttaagtggtctatggttgatgtacccaaaaactcttagattttatatggaggaactgaagctgctctcgttatacggatctgtggcattcgacgaagattttgaagctgaactctctgaaaaccatgaagcaagatttgaggtttccatgctagcacaaagtcctgatcgtgaattcacagaggtgttcattaatacagaattatatgctcgtgtttcggttgctgttctctttcatcagctttggaaacaaatcaaagaacatagtatattggaaactgaagaagctcttgaatgcggcaaactatttctactagaacttctggactcagcggtgaacagcaaagatctttcaaaagaactctacaagaaatatagcagtgtacataggcgtaaagttcgtgtgtggcaaatgatatgtgttctatcacactatgtagaagatgatattgttggagaagtgacatctagcattcacatctgtctttatagaaataatttgccagctgtccggcagtacttggagacgtttgctatactcttatacttaaaatttccaaccttggcagaggagcaacttattcctatttttcatgacaaagggatgcgacaacaggcactatcttcatatgtttttatagcagcaaacgtcatacttcactcaagacagtccgtccagatataccacctgaatcaattgcttcctccaatactgccgtttttaacatcccatcatcacagtttacgtggttttactcagcttcttgtccattcagtgctatcgaggttgtggcctactctgcatcccgaaacttcagaagatgcagtctttgagaggaggtgctttcaagaattgaaagattatttggcagaaaattctgactgtgttaggcttagagtttcaatcgaaggtttccttgatgtctttgatcccaatgcatctgggaccccccctggaatatttagcgcccgtcctgaggtgtctgacttcgaatgtgttccggtgtcagtgatggagcgtgtgattgagttcctgaacgatgtgagggaggacttgagacaagctatagcaaatgatacagtaacaatcaagaatgaggatctcgcggtgggagagcatcacaagagtgacgagagcgtgtctgagatggtaaaaactggtcaagaggtacttgatttccagaagaaaataacaccccataggggggactccgagcaagcattgaacttgaacaccagaggtcattcaggcgttggtgacgaatacatttcaagaataatttcagagatggaggaagatgaccaagttttcgacctagcgctagaagcaagattgcatgctgcggaaacgatcaagcagagccggcaagaactgatcgtggttgcgtcattggtggaacgcataccaaatcttgcggggctgacgagaacgtgcgaggtcttcagagcagccggtctggttgttgccgacaagagcgttcttcaggataagcagttccggctgatcagtgtgaccgctgagaaatggctgcctgtgacggaggtccccgtggacagcgtgaaggcttacttggagaggaagcggggcgatggttactcggtgattgggctggagcagacggccaacagcatgcctctggaccggttcgggttcccggaccggacggttctggtgctggggcgggagaaggaaggcatccccgtcgacatcatccacattctggacgcgtgcgtggagatcccgcagctggggcgtggtgaggtcgctcaatgtccatgtcagcggcgccatagccgtctgggagtacacgcgtcaacaacgcaatcagcgttagcttgttgcttgtttttgctccattgaccattgacgacgaagactactactactacctgggagggagagtagaaatcaacatgcagcactcacaggaaggagagaaagacctgggctgggctgggccgacagtaatgaacgctagcccaccttcctttcccaccaccaagacgtacaagtcagactatattacttcatttatttgtgctaatatcgtaacgttttattgtgtaagcaatttggtacttgaagcctgcctgcatttggatttggagcggcatcagaagttttttaaagtatttattcgtagaggggtcgatcgagctcgcccttttattgctgcaaatatataatacacattattactgctgcaaacataagattacgttacattacattaaatgaaaagctatattacctcccgttctcgttatcccgctagttcatttttaacgaaacagtgacaaatatgaactaaacagcaacaaataaaaagaaacggaggggtactacgcttttttttatttcagtgcgcgcgtgtctgctccagacggtgctgctgcgcccagtccttgacgatgtgcggctgctgacccgacgacgaggtcgtggtctgaaggtagcggtacacccacgccagcacagccaccgcagccacgccgaaccctcccgacgaaacgatgcctaccgtgagcagcgccaccgtgatggccgccggcaccagcacggggctgaagatcaccatcaatggcgtcgccacgatgagcgccagcaccgtgcccgtcaccgccagccccgacaacaacaacatggagaaggctgccgtggctgtggctaacgccttggccaccgccatgggcgcgggcggcggccgctgctgctgctggtgaccgtagtgggtggcgttgtagtcatcgtcgccgtagaggcccctcatgtagttctctccgacggcctcgcttcttctccctgcacgatggtcatccgcatgatgagcagtggccatacaagctctggctagctagctagctagtatacaatgattcaaaagaaatagatgagtggagcagctagtaggttcttg

SEQ ID NO: 201351 - DNA, 3244 bp, Zea Mays
atgaccttgttcctccccggctccaccattgctcgaagacgacgatgcggcctcgtgaggacggaggagtttgagatgatgatgcaattagcaaagtcttcctggatcttgcaccttaactgcaacaaacgccgagtggctcccattgctgcactactatctgcagtattgcacccagcaatattttgtaatttggaaatgcaccagacaaatgaaaaagggccaggccctttaaaatggtttgttgagaatcttcttaatgaaggctcaaaaagtcctcgaactattcgcctagcagctttgcatttaagtggtctatggttgatgtacccaaaaactcttagattttatatggaggaactgaagctgctctcgttatacggatctgtacttcatatatattgaatagtggcattcgacgaagattttgaagctgaactctctgaaaaccatgaagcaagatttgaggtttccatgctagcacaaagtcctgatcgtgaattcacagaggtgttcattaatacagaattatatgctcgtgtttcggttgctgttctctttcatcagctttggaaacaaatcaaagaacatagtatattggaaactgaagaagctcttgaatgcggcaaactatttctactagaacttctggactcagcggtgaacagcaaagatctttcaaaagaactctacaagaaatatagcagtgtacataggcgtaaagttcgtgtgtggcaaatgatatgtgttctatcacactatgtagaagatgatattgttggagaagtgacatctagcattcacatctgtctttatagaaataatttgccagctgtccggcagtacttggagacgtttgctatactcttatacttaaaatttccaaccttggcagaggagcaacttattcctatttttcatgacaaagggatgcgacaacaggcactatcttcatatgtttttatagcagcaaacgtcatacttcactcaagacagtccgtccagatataccacctgaatcaattgcttcctccaatactgccgtttttaacatcccatcatcacagtttacgtggttttactcagcttcttgtccattcagtgctatcgaggttgtggcctactctgcatcccgaaacttcagaagatgcagtctttgagaggaggtgctttcaagaattgaaagattatttggcagaaaattctgactgtgttaggcttagagtttcaatcgaaggtttccttgatgtctttgatcccaatgcatctgggaccccccctggaatatttagcgcccgtcctgaggtgtctgacttcgaatgtgttccggtgtcagtgatggagcgtgtgattgagttcctgaacgatgtgagggaggacttgagacaagctatagcaaatgatacagtaacaatcaagaatgaggatctcgcggtgggagagcatcacaagagtgacgagagcgtgtctgagatggtaaaaactggtcaagaggtacttgatttccagaagaaaataacaccccataggggggactccgagcaagcattgaacttgaacaccagaggtcattcaggcgttggtgacgaatacatttcaagaataatttcagagatggaggaagatgaccaagttttcgacctagcgctagaagcaagattgcatgctgcggaaacgatcaagcagagccggcaagaactgatcgtggttgcgtcattggtggaacgcataccaaatcttgcggggctgacgagaacgtgcgaggtcttcagagcagccggtctggttgttgccgacaagagcgttcttcaggataagcagttccggctgatcagtgtgaccgctgagaaatggctgcctgtgacggaggtccccgtggacagcgtgaaggcttacttggagaggaagcggggcgatggttactcggtgattgggctggagcagacggccaacagcatgcctctggaccggttcgggttcccggaccggacggttctggtgctggggcgggagaaggaaggcatccccgtcgacatcatccacattctggacgcgtgcgtggagatcccgcagctggggcgtggtgaggtcgctcaatgtccatgtcagcggcgccatagccgtctgggagtacacgcgtcaacaacgcaatcagcgttagcttgttgcttgtttttgctccattgaccattgacgacgaagactactactactacctgggagggagagtagaaatcaacatgcagcactcacaggaaggagagaaagacctgggctgggctgggccgacagtaatgaacgctagcccaccttcctttcccaccaccaagacgtacaagtcagactatattacttcatttatttgtgctaatatcgtaacgttttattgtgtaagcaatttggtacttgaagcctgcctgcatttggatttggagcggcatcagaagttttttaaagtatttattcgtagaggggtcgatcgagctcgcccttttattgctgcaaatatataatacacattattactgctgcaaacataagattacgttacattacattaaatgaaaagctatattacctcccgttctcgttatcccgctagttcatttttaacgaaacagtgacaaatatgaactaaacagcaacaaataaaaagaaacggaggggtactacgcttttttttatttcagtgcgcgcgtgtctgctccagacggtgctgctgcgcccagtccttgacgatgtgcggctgctgacccgacgacgaggtcgtggtctgaaggtagcggtacacccacgccagcacagccaccgcagccacgccgaaccctcccgacgaaacgatgcctaccgtgagcagcgccaccgtgatggccgccggcaccagcacggggctgaagatcaccatcaatggcgtcgccacgatgagcgccagcaccgtgcccgtcaccgccagccccgacaacaacaacatggagaaggctgccgtggctgtggctaacgccttggccaccgccatgggcgcgggcggcggccgctgctgctgctggtgaccgtagtgggtggcgttgtagtcatcgtcgccgtagaggcccctcatgtagttctctccgacggcctcgcttcttctccctgcacgatggtcatccgcatgatgagcagtggccatacaagctctggctagctagctagctagtatacaatgattcaaaagaaatagatgagtggagcagctagtaggttcttg

SEQ ID NO: 201352 - DNA, 6519 bp, Zea Mays
tttcgccggtcttcgcttcgctgccgccatggcgtctcctcccgagcgtgaggtcgccgcactcgagagctgcttccgtgccctctccgcggctgacgccgtcccagcggttgtcgactgcgtcctcgcttcctccgcctcgtcctccccttcccaactcttccacgcgctcctccgttcctttcctccctcccagcgggagcagggtctccaagcccagtctgaccgtcatgccgccatctgccacgccgcggcgctccgccatttgctcgcgcaactcgacagcccccctaaggttagggaggctctgcgcttgctgctgtggagggtcttcctgcccttgctccaggatatcattgaacccactcatcctgcccactttgacctggtaatcgagatgatgtgcaatgcagtctctgacactggatgctgggacctgcttggagctacaatagtatcattctgcattcggtcatctgttgttgccatgggtttgtccgccgcagacgccaactctatactttaccaaagtataatggaagcggattttcctgcggagactctctcatgcctactaccgctctccaattcaagcagtgtgttagcatcattgctggtggacatgctggagaggcgaaggactatacctacctcccaggaaggtgctgctgatctagctgcattggttcagaatttgacatgggaccttgccaagttggtactcaagatgtttacacatgctcaagagtatcggtcttgtgccactcgggtccttcttcagcctgtactcatatcgcttacagatgtttcttctgtcactgtatcgtttggtgcagtccagcataagctatcgaggtttggtttcctagaatgtatatggaattcctgtatttctctatttcctttggggcctggtgagcggcttgatgcatacagaatactctctgtatacttctcaacactgaaatcaggacatcaagccgctgtcttgggagttggcattgtccaggaatttgaccttaagaatgtcagtgaattctgggatgaactgcgcaggggactggttgacaaggattctttagtaaggaaacaggccttctatgtcttgacaatatcacttagcatctttacctcttcatctggaaatgatagctgccagcatttttccagtaggagcccagctgctttgcctgctcaaatcaaagcaaatgctggggaaacaaaaagggaaaggtgggctaacaaagaagccaagtcccttggtgttggagagatggaccaatcaggtgaaaattgctcaaatggtcaagatcggtggaaggtctttttgttactctatgagatgctccaggagtatggcacacatttagttgaagcagcttggacacaccatgtagtgcggctgtttgagtgtacgctacaaaatgactatctaaatcacacctcctgtggagcctttcatgctcagatggaatcttgggaaagaattttgtactggatggcagttttgtgggagcgtgggttcagtcatgagaatcctcaagtgagatgcctggttatgcaatcctttttggatattgcatgggaacgctacaaggtttgcactcatataattccaaggggttttgtgctcggccctctgatacgtggtttgaatgatgtggttcatcataaggattttggcattgggggtgcttatagttcgaaaaccataaaagatgctcagagatttttcagaacttatacccacaacttggcgagatgtgaccgcatacatctggtttggagtctggcttctgcggctaagcaagattcatttggccgagcaggattgatgactcttgcatcctgtgttgcttcatgcacacgtcagtcagagacaaatgatgtgccatgtgctatatctgggaaagcagtgaccaaatgtgatggatgtgtacctacagaagttaggccaacagatttgttagatgtcttatggattctcagtgagaggagtaaacaacactttaatccaaagtatcgtctgaaagtttgtgaacaggttatccaagttgcaacatcactgataaatgccactgaaattccacttaaccagcttctgcatttcattgccacaattcctcgagagttcactgattatattggaccattgagagtagtagttcaaaaatggttttttcagaaggaagaatgttctcctggtgacactttgttgagtaagctgatcgatttctctgccaccttcgtaagtcaaaaacggaatgaaggttcgaatgtttttgatgacgaggatgtggatgcatgggaagctgaagcaaggaggtgggctagaacccttcttcttgtaaccgaggaggaggaacatttgaaacgaatcttcaggtttttggaggcatatggctacaagctctctgagcaatgtcccagtggagatttcatacccataaaattttttatcattgttttaagcttcattgaggaacttgagctgagacagagaaagcttgtttgccggagtaatacaatcttaagaggttcagatacattaaatggattagtgctcgatgatctcaacaaaatgttcacagaatcacttttgctaattttggaaaatatggtggcattcagtaaactgtcttgctccattttctggttagatgtggacaacaaggatttacccccttctatcaaaggaaagcttggaggcccaagccagcgtcgtttggctacctccattacttcttcagtattacagggtatttggtcaatgcgatgtgttagttctgttgcctcatggtgtaatccttacaactccgatgattctgtttcttctgcattttccgtgctatgggacttctatttgaatgttacccatcactccactattgccaatgagatcggagctgaacttcacctggcagcttatgaagctcttgcctatgttctggcagttctatctactgcttccagtactcagtttttggattttgtggaagcgaagcagacagatcaagcccacaagttttcattggacattttggtcaccactttccttgacaacatcaaccatcttcttacagagggaactctgacgcgaagcagaagagctgttttgatgacttggaagtggctttgtatggattctcttctatctatttcaagctgctatagtgacaatgaatctcaaatgaagaggttggaacctttattttctgattcaaccctccgatgcatttttcttgatattatcgaaagccttgaaaacactggtgaaaattctgtcttatctatcttgagatgtgtgagatctgttttgagattgctacacctgaatgagggcaacacaattttttcctctttaggcatcagctatgagatgatgatgcaattagcaaagtcttcctggatcttgcaccttaactgcaacaaacgccgagtggctcccattgctgcactactatctgcagtattgcacccagcaatattttgtaatttggaaatgcaccagacaaatgaaaaagggccaggccctttaaaatggtttgttgagaatcttcttaatgaaggctcaaaaagtcctcgaactattcgcctagcagctttgcatttaagtggtctatggttgatgtacccaaaaactcttagattttatatggaggaactgaagctgctctcgttatacggatctgtggcattcgacgaagattttgaagctgaactctctgaaaaccatgaagcaagatttgaggtttccatgctagcacaaagtcctgatcgtgaattcacagaggtgttcattaatacagaattatatgctcgtgtttcggttgctgttctctttcatcagctttggaaacaaatcaaagaacatagtatattggaaactgaagaagctcttgaatgcggcaaactatttctactagaacttctggactcagcggtgaacagcaaagatctttcaaaagaactctacaagaaatatagcagtgcgtaaagttcgtgtgtggcaaatgatatgtgttctatcacactatgtagaagatgatattgttggagaagtgacatctagcattcacatctgtctttatagaaataatttgccagctgtccggcagtacttggagacgtttgctatactcttatacttaaaatttccaaccttggcagaggagcaacttattcctatttttcatgacaaagggatgcgacaacaggcactatcttcatatgtttttatagcagcaaacgtcatacttcactcaagacagtccgtccagatataccacctgaatcaattgcttcctccaatactgccgtttttaacatcccatcatcacagtttacgtggttttactcagcttcttgtccattcagtgctatcgaggttgtggcctactctgcatcccgaaacttcagaagatgcagtctttgagaggaggtgctttcaagaattgaaagattatttggcagaaaattctgactgtgttaggcttagagtttcaatcgaaggtttccttgatgtctttgatcccaatgcatctgggaccccccctggaatatttagcgcccgtcctgaggtgtctgacttcgaatgtgttccggtgtcagtgatggagcgtgtgattgagttcctgaacgatgtgagggaggacttgagacaagctatagcaaatgatacagtaacaatcaagaatgaggatctcgcggtgggagagcatcacaagagtgacgagagcgtgtctgagatggtaaaaactggtcaagaggtacttgatttccagaagaaaataacaccccataggggggactccgagcaagcattgaacttgaacaccagaggtcattcaggcgttggtgacgaatacatttcaagaataatttcagagatggaggaagatgaccaagttttcgacctagcgctagaagcaagattgcatgctgcggaaacgatcaagcagagccggcaagaactgatcgtggttgcgtcattggtggaacgcataccaaatcttgcggggctgacgagaacgtgcgaggtcttcagagcagccggtctggttgttgccgacaagagcgttcttcaggataagcagttccggctgatcagtgtgaccgctgagaaatggctgcctgtgacggaggtccccgtggacagcgtgaaggcttacttggagaggaagcggggcgatggttactcggtgattgggctggagcagacggccaacagcatgcctctggaccggttcgggttcccggaccggacggttctggtgctggggcgggagaaggaaggcatccccgtcgacatcatccacattctggacgcgtgcgtggagatcccgcagctggggcgtggtgaggtcgctcaatgtccatgtcagcggcgccatagccgtctgggagtacacgcgtcaacaacgcaatcagcgttagcttgttgcttgtttttgctccattgaccattgacgacgaagactactactactacctgggagggagagtagaaatcaacatgcagcactcacaggaaggagagaaagacctgggctgggctgggccgacagtaatgaacgctagcccaccttcctttcccaccaccaagacgtacaagtcagactatattacttcatttatttgtgctaatatcgtaacgttttattgtgtaagcaatttggtacttgaagcctgcctgcatttggatttggagcggcatcagaagttttttaaagtatttattcgtagaggggtcgatcgagctcgcccttttattgctgcaaatatataatacacattattactgctgcaaacataagattacgttacattacattaaatgaaaagctatattacctcccgttctcgttatcccgctagttcatttttaacgaaacagtgacaaatatgaactaaacagcaacaaataaaaagaaacggaggggtactacgcttttttttatttcagtgcgcgcgtgtctgctccagacggtgctgctgcgcccagtccttgacgatgtgcggctgctgacccgacgacgaggtcgtggtctgaaggtagcggtacacccacgccagcacagccaccgcagccacgccgaaccctcccgacgaaacgatgcctaccgtgagcagcgccaccgtgatggccgccggcaccagcacggggctgaagatcaccatcaatggcgtcgccacgatgagcgccagcaccgtgcccgtcaccgccagccccgacaacaacaacatggagaaggctgccgtggctgtggctaacgccttggccaccgccatgggcgcgggcggcggccgctgctgctgctggtgaccgtagtgggtggcgttgtagtcatcgtcgccgtagaggcccctcatgtagttctctccgacggcctcgcttcttctccctgcacgatggtcatccgcatgatgagcagtggccatacaagctctggctagctagctagctagtatacaatgattcaaaagaaatagatgagtggagcagctagtaggttcttg

SEQ ID NO: 201353 - DNA, 6495 bp, Zea Mays
tttttggtttcgccggtcttcgcttcgctgccgccatggcgtctcctcccgagcgtgaggtcgccgcactcgagagctgcttccgtgccctctccgcggctgacgccgtcccagcggttgtcgactgcgtcctcgcttcctccgcctcgtcctccccttcccaactcttccacgcgctcctccgttcctttcctccctcccagtctgaccgtcatgccgccatctgccacgccgcggcgctccgccatttgctcgcgcaactcgacagcccccctaaggttagggaggctctgcgcttgctgctgtggagggtcttcctgcccttgctccaggatatcattgaacccactcatcctgcccactttgacctggtaatcgagatgatgtgcaatgcagtctctgacactggatgctgggacctgcttggagctacaatagtatcattctgcattcggtcatctgttgttgccatgggtttgtccgccgcagacgccaactctatactttaccaaagtataatggaagcggattttcctgcggagactctctcatgcctactaccgctctccaattcaagcagtgtgttagcatcattgctggtggacatgctggagaggcgaaggactatacctacctcccaggaaggtgctgctgatctagctgcattggttcagaatttgacatgggaccttgccaagttggtactcaagatgtttacacatgctcaagagtatcggtcttgtgccactcgggtccttcttcagcctgtactcatatcgcttacagatgtttcttctgtcactgtatcgtttggtgcagtccagcataagctatcgaggtttggtttcctagaatgtatatggaattcctgtatttctctatttcctttggggcctggtgagcggcttgatgcatacagaatactctctgtatacttctcaacactgaaatcaggacatcaagccgctgtcttgggagttggcattgtccaggaatttgaccttaagaatgtcagtgaattctgggatgaactgcgcaggggactggttgacaaggattctttagtaaggaaacaggccttctatgtcttgacaatatcacttagcatctttacctcttcatctggaaatgatagctgccagcatttttccagtaggagcccagctgctttgcctgctcaaatcaaagcaaatgctggggaaacaaaaagggaaaggtgggctaacaaagaagccaagtcccttggtgttggagagatggaccaatcaggtgaaaattgctcaaatggtcaagatcggtggaaggtctttttgttactctatgagatgctccaggagtatggcacacatttagttgaagcagcttggacacaccatgtagtgcggctgtttgagtgtacgctacaaaatgactatctaaatcacacctcctgtggagcctttcatgctcagatggaatcttgggaaagaattttgtactggatggcagttttgtgggagcgtgggttcagtcatgagaatcctcaagtgagatgcctggttatgcaatcctttttggatattgcatgggaacgctacaaggtttgcactcatataattccaaggggttttgtgctcggccctctgatacgtggtttgaatgatgtggttcatcataaggattttggcattgggggtgcttatagttcgaaaaccataaaagatgctcagagatttttcagaacttatacccacaacttggcgagatgtgaccgcatacatctggtttggagtctggcttctgcggctaagcaagattcatttggccgagcaggattgatgactcttgcatcctgtgttgcttcatgcacacgtcagtcagagacaaatgatgtgccatgtgctatatctgggaaagcagtgaccaaatgtgatggatgtgtacctacagaagttaggccaacagatttgttagatgtcttatggattctcagtgagaggagtaaacaacactttaatccaaagtatcgtctgaaagtttgtgaacaggttatccaagttgcaacatcactgataaatgccactgaaattccacttaaccagcttctgcatttcattgccacaattcctcgagagttcactgattatattggaccattgagagtagtagttcaaaaatggttttttcagaaggaagaatgttctcctggtgacactttgttgagtaagctgatcgatttctctgccaccttcgtaagtcaaaaacggaatgaaggttcgaatgtttttgatgacgaggatgtggatgcatgggaagctgaagcaaggaggtgggctagaacccttcttcttgtaaccgaggaggaggaacatttgaaacgaatcttcaggtttttggaggcatatggctacaagctctctgagcaatgtcccagtggagatttcatacccataaaattttttatcattgttttaagcttcattgaggaacttgagctgagacagagaaagcttgtttgccggagtaatacaatcttaagaggttcagatacattaaatggattagtgctcgatgatctcaacaaaatgttcacagaatcacttttgctaattttggaaaatatggtggcattcagtaaactgtcttgctccattttctggttagatgtggacaacaaggatttacccccttctatcaaaggaaagcttggaggcccaagccagcgtcgtttggctacctccattacttcttcagtattacagggtatttggtcaatgcgatgtgttagttctgttgcctcatggtgtaatccttacaactccgatgattctgtttcttctgcattttccgtgctatgggacttctatttgaatgttacccatcactccactattgccaatgagatcggagctgaacttcacctggcagcttatgaagctcttgcctatgttctggcagttctatctactgcttccagtactcagtttttggattttgtggaagcgaagcagacagatcaagcccacaagttttcattggacattttggtcaccactttccttgacaacatcaaccatcttcttacagagggaactctgacgcgaagcagaagagctgttttgatgacttggaagtggctttgtatggattctcttctatctatttcaagctgctatagtgacaatgaatctcaaatgaagaggttggaacctttattttctgattcaaccctccgatgcatttttcttgatattatcgaaagccttgaaaacactggtgaaaattctgtcttatctatcttgagatgtgtgagatctgttttgagattgctacacctgaatgagggcaacacaattttttcctctttaggcatcagctatgagatgatgatgcaattagcaaagtcttcctggatcttgcaccttaactgcaacaaacgccgagtggctcccattgctgcactactatctgcagtattgcacccagcaatattttgtaatttggaaatgcaccagacaaatgaaaaagggccaggccctttaaaatggtttgttgagaatcttcttaatgaaggctcaaaaagtcctcgaactattcgcctagcagctttgcatttaagtggtctatggttgatgtacccaaaaactcttagattttatatggaggaactgaagctgctctcgttatacggatctgattttgaagctgaactctctgaaaaccatgaagcaagatttgaggtttccatgctagcacaaagtcctgatcgtgaattcacagaggtgttcattaatacagaattatatgctcgtgtttcggttgctgttctctttcatcagctttggaaacaaatcaaagaacatagtatattggaaactgaagaagctcttgaatgcggcaaactatttctactagaacttctggactcagcggtgaacagcaaagatctttcaaaagaactctacaagaaatatagcagtgtacataggcgtaaagttcgtgtgtggcaaatgatatgtgttctatcacactatgtagaagatgatattgttggagaagtgacatctagcattcacatctgtctttatagaaataatttgccagctgtccggcagtacttggagacgtttgctatactcttatacttaaaatttccaaccttggcagaggagcaacttattcctatttttcatgacaaagggatgcgacaacaggcactatcttcatatgtttttatagcagcaaacgtcatacttcactcaagacagtccgtccagatataccacctgaatcaattgcttcctccaatactgccgtttttaacatcccatcatcacagtttacgtggttttactcagcttcttgtccattcagtgctatcgaggttgtggcctactctgcatcccgaaacttcagaagatgcagtctttgagaggaggtgctttcaagaattgaaagattatttggcagaaaattctgactgtgttaggcttagagtttcaatcgaaggtttccttgatgtctttgatcccaatgcatctgggaccccccctggaatatttagcgcccgtcctgaggtgtctgacttcgaatgtgttccggtgtcagtgatggagcgtgtgattgagttcctgaacgatgtgagggaggacttgagacaagctatagcaaatgatacagtaacaatcaagaatgaggatctcgcggtgggagagcatcacaagagtgacgagagcgtgtctgagatggtaaaaactggtcaagaggtacttgatttccagaagaaaataacaccccataggggggactccgagcaagcattgaacttgaacaccagaggtcattcaggcgttggtgacgaatacatttcaagaataatttcagagatggaggaagatgaccaagttttcgacctagcgctagaagcaagattgcatgctgcggaaacgatcaagcagagccggcaagaactgatcgtggttgcgtcattggtggaacgcataccaaatcttgcggggctgacgagaacgtgcgaggtcttcagagcagccggtctggttgttgccgacaagagcgttcttcaggataagcagttccggctgatcagtgtgaccgctgagaaatggctgcctgtgacggaggtccccgtggacagcgtgaaggcttacttggagaggaagcggggcgatggttactcggtgattgggctggagcagacggccaacagcatgcctctggaccggttcgggttcccggaccggacggttctggtgctggggcgggagaaggaaggcatccccgtcgacatcatccacattctggacgcgtgcgtggagatcccgcagctggggcgtggtgaggtcgctcaatgtccatgtcagcggcgccatagccgtctgggagtacacgcgtcaacaacgcaatcagcgttagcttgttgcttgtttttgctccattgaccattgacgacgaagactactactactacctgggagggagagtagaaatcaacatgcagcactcacaggaaggagagaaagacctgggctgggctgggccgacagtaatgaacgctagcccaccttcctttcccaccaccaagacgtacaagtcagactatattacttcatttatttgtgctaatatcgtaacgttttattgtgtaagcaatttggtacttgaagcctgcctgcatttggatttggagcggcatcagaagttttttaaagtatttattcgtagaggggtcgatcgagctcgcccttttattgctgcaaatatataatacacattattactgctgcaaacataagattacgttacattacattaaatgaaaagctatattacctcccgttctcgttatcccgctagttcatttttaacgaaacagtgacaaatatgaactaaacagcaacaaataaaaagaaacggaggggtactacgcttttttttatttcagtgcgcgcgtgtctgctccagacggtgctgctgcgcccagtccttgacgatgtgcggctgctgacccgacgacgaggtcgtggtctgaaggtagcggtacacccacgccagcacagccaccgcagccacgccgaaccctcccgacgaaacgatgcctaccgtgagcagcgccaccgtgatggccgccggcaccagcacggggctgaagatcaccatcaatggcgtcgccacgatgagcgccagcaccgtgcccgtcaccgccagccccgacaacaacaacatggagaaggctgccgtggctgtggctaacgccttggccaccgccatgggcgcgggcggcggccgctgctgctgctggtgaccgtagtgggtggcgttgtagtcatcgtcgccgtagaggcccctcatgtagttctctccgacggcctcgcttcttctccctgcacgatggtcatccgcatgatgagcagtggccatacaagctctggctagctagctagctagtatacaatgattcaaaagaaatagatgagtggagcagctagtaggttcttg

SEQ ID NO: 201354 - DNA, 6380 bp, Zea Mays
aatcagtagggtttttggtttcgccggtcttcgcttcgctgccgccatggcgtctcctcccgagcgtgaggtcgccgcactcgagagctgcttccgtgccctctccgcggctgacgccgtcccagcggttgtcgactgcgtcctcgcttcctccgcctcgtcctccccttcccaactcttccacgcgctcctccgttcctttcctccctcccagcgggagcagggtctccaagcccagtctgaccgtcatgccgccatctgccacgccgcggcgctccgccatttgctcgcgcaactcgacagcccccctaaggttagggaggctctgcgcttgctgctgtggagggtcttcctgcccttgctccaggatatcattgaacccactcatcctgcccactttgacctggtaatcgagatgatgtgcaatgcagtctctgacactggatgctgggacctgcttggagctacaatagtatcattctgcattcggtcatctgttgttgccatgggtttgtccgccgcagacgccaactctatactttaccaaagtataatggaagcggattttcctgcggagactctctcatgcctactaccgctctccaattcaagcagtgtgttagcatcattgctggtggacatgctggagaggcgaaggactatacctacctcccaggaaggtgctgctgatctagctgcattggttcagaatttgacatgggaccttgccaagttggtactcaagatgtttacacatgctcaagagtatcggtcttgtgccactcgggtccttcttcagcctgtactcatatcgcttacagatgtttcttctgtcactgtatcgtttggtgcagtccagcataagctatcgaggtttggtttcctagaatgtatatggaattcctgtatttctctatttcctttggggcctggtgagcggcttgatgcatacagaatactctctgtatacttctcaacactgaaatcaggacatcaagccgctgtcttgggagttggcattgtccaggaatttgaccttaagaatgtcagtgaattctgggatgaactgcgcaggggactggttgacaaggattctttagtaaggaaacaggccttctatgtcttgacaatatcacttagcatctttacctcttcatctggaaatgatagctgccagcatttttccagtaggagcccagctgctttgcctgctcaaatcaaagcaaatgctggggaaacaaaaagggaaaggtgggctaacaaagaagccaagtcccttggtgttggagagatggaccaatcaggtgaaaattgctcaaatggtcaagatcggtggaaggtctttttgttactctatgagatgctccaggagtatggcacacatttagttgaagcagcttggacacaccatgtagtgcggctgtttgagtgtacgctacaaaatgactatctaaatcacacctcctgtggagcctttcatgctcagatggaatcttgggaaagaattttgtactggatggcagttttgtgggagcgtgggttcagtcatgagaatcctcaagtgagatgcctggttatgcaatcctttttggatattgcatgggaacgctacaaggtttgcactcatataattccaaggggttttgtgctcggccctctgatacgtggtttgaatgatgtggttcatcataaggattttggcattgggggtgcttatagttcgaaaaccataaaagatgctcagagatttttcagaacttatacccacaacttggcgagatgtgaccgcatacatctggtttggagtctggcttctgcggctaagcaagattcatttggccgagcaggattgatgactcttgcatcctgtgttgcttcatgcacacgtcagtcagagacaaatgatgtgccatgtgctatatctgggaaagcagtgaccaaatgtgatggatgtgtacctacagaagttaggccaacagatttgttagatgtcttatggattctcagtgagaggagtaaacaacactttaatccaaagtatcgtctgaaagtttgtgaacaggttatccaagttgcaacatcactgataaatgccactgaaattccacttaaccagcttctgcatttcattgccacaattcctcgagagttcactgattatattggaccattgagagtagtagttcaaaaatggttttttcagaaggaagaatgttctcctggtgacactttgttgagtaagctgatcgatttctctgccaccttcgtaagtcaaaaacggaatgaaggttcgaatgtttttgatgacgaggatgtggatgcatgggaagctgaagcaaggaggtgggctagaacccttcttcttgtaaccgaggaggaggaacatttgaaacgaatcttcaggtttttggaggcatatggctacaagctctctgagcaatgtcccagtggagatttcatacccataaaattttttatcattgttttaagcttcattgaggaacttgagctgagacagagaaagcttgtttgccggagtaatacaatcttaagaggttcagatacattaaatggattagtgctcgatgatctcaacaaaatgttcacagaatcacttttgctaattttggaaaatatggtggcattcagtaaactgtcttgctccattttctggttagatgtggacaacaaggatttacccccttctatcaaaggaaagcttggaggcccaagccagcgtcgtttggctacctccattacttcttcagtattacagggtatttggtcaatgcgatgtgttagttctgttgcctcatggtgtaatccttacaactccgatgattctgtttcttctgcattttccgtgctatgggacttctatttgaatgttacccatcactccactattgccaatgagatcggagctgaacttcacctggcagcttatgaagctcttgcctatgttctggcagttctatctactgcttccagtactcagtttttggattttgtggaagcgaagcagacagatcaagcccacaagttttcattggacattttggtcaccactttccttgacaacatcaaccatcttcttacagagggaactctgacgcgaagcagaagagctgttttgatgacttggaagtggctttgtatggattctcttctatctatttcaagctgctatagtgacaatgaatctcaaatgaagaggttggaacctttattttctgattcaaccctccgatgcatttttcttgatattatcgaaagccttgaaaacactggtgaaaattctgtcttatctatcttgagatgtgtgagatctgttttgagattgctacacctgaatgagggcaacacaattttttcctctttaggcatcagctatgagtttgttgagaatcttcttaatgaaggctcaaaaagtcctcgaactattcgcctagcagctttgcatttaagtggtctatggttgatgtacccaaaaactcttagattttatatggaggaactgaagctgctctcgttatacggatctgtggcattcgacgaagattttgaagctgaactctctgaaaaccatgaagcaagatttgaggtttccatgctagcacaaagtcctgatcgtgaattcacagaggtgttcattaatacagaattatatgctcgtgtttcggttgctgttctctttcatcagctttggaaacaaatcaaagaacatagtatattggaaactgaagaagctcttgaatgcggcaaactatttctactagaacttctggactcagcggtgaacagcaaagatctttcaaaagaactctacaagaaatatagcagtgtacataggcgtaaagttcgtgtgtggcaaatgatatgtgttctatcacactatgtagaagatgatattgttggagaagtgacatctagcattcacatctgtctttatagaaataatttgccagctgtccggcagtacttggagacgtttgctatactcttatacttaaaatttccaaccttggcagaggagcaacttattcctatttttcatgacaaagggatgcgacaacaggcactatcttcatatgtttttatagcagcaaacgtcatacttcactcaagacagtccgtccagatataccacctgaatcaattgcttcctccaatactgccgtttttaacatcccatcatcacagtttacgtggttttactcagcttcttgtccattcagtgctatcgaggttgtggcctactctgcatcccgaaacttcagaagatgcagtctttgagaggaggtgctttcaagaattgaaagattatttggcagaaaattctgactgtgttaggcttagagtttcaatcgaaggtttccttgatgtctttgatcccaatgcatctgggaccccccctggaatatttagcgcccgtcctgaggtgtctgacttcgaatgtgttccggtgtcagtgatggagcgtgtgattgagttcctgaacgatgtgagggaggacttgagacaagctatagcaaatgatacagtaacaatcaagaatgaggatctcgcggtgggagagcatcacaagagtgacgagagcgtgtctgagatggtaaaaactggtcaagaggtacttgatttccagaagaaaataacaccccataggggggactccgagcaagcattgaacttgaacaccagaggtcattcaggcgttggtgacgaatacatttcaagaataatttcagagatggaggaagatgaccaagttttcgacctagcgctagaagcaagattgcatgctgcggaaacgatcaagcagagccggcaagaactgatcgtggttgcgtcattggtggaacgcataccaaatcttgcggggctgacgagaacgtgcgaggtcttcagagcagccggtctggttgttgccgacaagagcgttcttcaggataagcagttccggctgatcagtgtgaccgctgagaaatggctgcctgtgacggaggtccccgtggacagcgtgaaggcttacttggagaggaagcggggcgatggttactcggtgattgggctggagcagacggccaacagcatgcctctggaccggttcgggttcccggaccggacggttctggtgctggggcgggagaaggaaggcatccccgtcgacatcatccacattctggacgcgtgcgtggagatcccgcagctggggcgtggtgaggtcgctcaatgtccatgtcagcggcgccatagccgtctgggagtacacgcgtcaacaacgcaatcagcgttagcttgttgcttgtttttgctccattgaccattgacgacgaagactactactactacctgggagggagagtagaaatcaacatgcagcactcacaggaaggagagaaagacctgggctgggctgggccgacagtaatgaacgctagcccaccttcctttcccaccaccaagacgtacaagtcagactatattacttcatttatttgtgctaatatcgtaacgttttattgtgtaagcaatttggtacttgaagcctgcctgcatttggatttggagcggcatcagaagttttttaaagtatttattcgtagaggggtcgatcgagctcgcccttttattgctgcaaatatataatacacattattactgctgcaaacataagattacgttacattacattaaatgaaaagctatattacctcccgttctcgttatcccgctagttcatttttaacgaaacagtgacaaatatgaactaaacagcaacaaataaaaagaaacggaggggtactacgcttttttttatttcagtgcgcgcgtgtctgctccagacggtgctgctgcgcccagtccttgacgatgtgcggctgctgacccgacgacgaggtcgtggtctgaaggtagcggtacacccacgccagcacagccaccgcagccacgccgaaccctcccgacgaaacgatgcctaccgtgagcagcgccaccgtgatggccgccggcaccagcacggggctgaagatcaccatcaatggcgtcgccacgatgagcgccagcaccgtgcccgtcaccgccagccccgacaacaacaacatggagaaggctgccgtggctgtggctaacgccttggccaccgccatgggcgcgggcggcggccgctgctgctgctggtgaccgtagtgggtggcgttgtagtcatcgtcgccgtagaggcccctcatgtagttctctccgacggcctcgcttcttctccctgcacgatggtcatccgcatgatgagcagtggccatacaagctctggctagctagctagctagtatacaatgattcaaaagaaatagatgagtggagcagctagtaggttcttg

SEQ ID NO: 201355 - DNA, 890 bp, Zea Mays
atactgattgtttcgaacaaaacggatcttcttttctgtacaagtacacggataagagtgatgtgtacgcccttggcatgatcctgggcgtgctgctcactgggagagacccgacagactctttcttctcgggagagagtaccgggcagggcggcctcccaagatggctccggcacacgcagcagtccgcggacccgaaagaaacgctggatagcagcatcctgggggacgagggagaagaggaggagatgctgatggccattcgggttgccattgtctgcctctcggactcgccaaccgaccggccatccagcgacgagctcgtcgccatgctaacgcagctccacagcttatgattaatcaccatatatcgcaaatttcttgagcggctgccgctgcgcatggccttaaaaccatgggggggcgatcatgttggatcagtgcttcctgtttcacagctagcacgggggagtgtgcagcagatctcattgtgtggtgcttgtgagtcacaagcgctgaaatggtcgacaagggaactgacagttcaaggccatataggacaggcgcagtcgctgtgttccctgtacgattcatcagtgatgtagtagctaggtacaatacaagatggtggttgagcttcctgggttgttttgcgcgtgggctgtgaatatgtcttggtagaaaaaaagctctgtgccgtggatctgatctgttggtgttagctgtagcctgtgtatagcctgtagaaagacgtgcttgtgctgtgcactgagacccatcatgtacacccccccggctccactccaatttgcctgagagcagagagactatgatgccgagtatttaacaggctgctggggccaacggtttccatatcatttctctgcgtc

SEQ ID NO: 201356 - DNA, 2185 bp, Zea Mays
agaaagagattcgaaacagtgtgggcaattgctgtgcacgggcatcaaggcatctctgctccgtcttgggctcctcctctctcgcccatcggccatcgccctccgctacggccacgcgccgcgctgcacccctgggccccgcgggtaaatatcacgagcaccatgctcgagttcttgtagctccgcagcttcctcgcttcttgcatcctttgcaacttgtctcctgttgttttcctctgatttccatggaggaaagatgctgggtgtgccagtgatgtgggcgtggagcaggcaacaattggctcgtcctggacattgatcgattctcccctattctcgtccaaggaattttattcgtttctcctagcaagtcgtgtatgcttgtttcgtggaggtaggagctaggatgacgagcaggaaccctaccaaaaccctgtcggtcctgaccactctcctgctgctgcttgagttcctcgcgctgtgcgcgcccgcctccgcccagccgctccactcggagcccatggctacgcagtccccgccgccgccgctgccgccggggtccacgattccccgggcgcaggccggcggcgccgcacgcctccgccgcattgcgctcggggtcctcttcggctccctctccggtttcctcctcgcgctcgccttcctctacgccatccgcctcgccatcctccacgccaagagcacgcccgcgatcgccaagggccccgtctccttcgccccgcaaatctccgccaagaacctcctggccgcgctccccgccgcgcagccgctcgcccatgggccccatggcaagtactacaagctggcactcgacaacgacctcaccgtcgccgtcaagcgcctcgaggcggccagccgccccgaggcctcgccgtccatgtccccgagcgcgtccaagtcggacatgaggagggtgcagaggcagcttgaggcacttgctcgggtcaggcaccagaatgtgttgtcgttgaaggcatacgttcgcgaggcggaccgcctctcgctcgtgtacgacttcgtccatgggggcagcctcgaggatctgatgaagagggtaaggtcgcagcaagtcagcctcggttgggatgcgaggagcaggattgctgttgggattgccaagggactgaggcacttgcattttgagtgcaatccgaggatagtccactgcaacctcaagccgtccaatgtgatgctagacgaaggtttggagccattattggcagattgtggtgttgcaaggctgattgcagcaggttcaggtgatccagaattgtgcactggcctctacgctgctccagaatgctatcaaagcagcaggtacacggataagagtgatgtgtacgcccttggcatgatcctgggcgtgctgctcactgggagagacccgacagactctttcttctcgggagagagtaccgggcagggcggcctcccaagatggctccggcacacgcagcagtccgcggacccgaaagaaacgctggatagcagcatcctgggggacgagggagaagaggaggagatgctgatggccattcgggttgccattgtctgcctctcggactcgccaaccgaccggccatccagcgacgagctcgtcgccatgctaacgcagctccacagcttatgattaatcaccatatatcgcaaatttcttgagcggctgccgctgcgcatggccttaaaaccatgggggggcgatcatgttggatcagtgcttcctgtttcacagctagcacgggggagtgtgcagcagatctcattgtgtggtgcttgtgagtcacaagcgctgaaatggtcgacaagggaactgacagttcaaggccatataggacaggcgcagtcgctgtgttccctgtacgattcatcagtgatgtagtagctaggtacaatacaagatggtggttgagcttcctgggttgttttgcgcgtgggctgtgaatatgtcttggtagaaaaaaagctctgtgccgtggatctgatctgttggtgttagctgtagcctgtgtatagcctgtagaaagacgtgcttgtgctgtgcactgagacccatcatgtacacccccccggctccactccaatttgcctgagagcagagagactatgatgccgagtatttaacaggctgctggggccaacggtttccatatcatttctctgcgtc

SEQ ID NO: 201357 - DNA, 2411 bp, Zea Mays
cacgcttgaacacaccagagtacctgcaagcactgtaaagtatagactgctacatcagttaccagttacatcacacccaatgatgtggactttggtacccgcagtaggttgtacctgtctctacgacaagacatatctaccactgcagcaaggcatactcaaaattgcggtacaaccatagcatgccactgtgtacgactccatgatcatgacaagttaggagttattgaacctctgctggcttgttgctctctccttttttttggcctataaaagggagaagtagagcaacatagaacggaaagagatctttggtggattcaatccaactgactccacccgagagatccaattcagaggactcactcaaagatactaaaagggcaggtgtagaggtgaacgggagaccagtagtctagaattctcaccaggtcctgccttgatgaaaataaggcttttctatcgaccgcagattctgctgtgcaattactcacagaagccaccaaaccagtttcaggatggaaggggattgagtatcgagcagcatttcctctacataagcctcccggtgctaacttctatcctcctgacatggacaaagcggagtttgaactttggaagagtaaactgacagataaagaacaaaatgatgccactgggtttttcaccgtcataaaacgacatgactctctgtcttcatcgtcattaacacaatcagatggatcggatcagaccaagactaaagatgatctttttattgttccatactccaaggagtatagaccattcctagagaaagcagctgagcttcttgagaaagcatcagcgtgctctgattctccaagcctcaagaatttgctgagaaccaaggcgaatgctttcctttcaaatgattactatgaatccgatatagcttggatggaattggactccaacttagatctcacaattggcccatatgaaacatatgaagatagcctttttagttataaggcaacttttgaagcatttgtcggaatacgtgatgacacagcaacttctcaagttaaactctttggtgatcagctccaggatttggagaaaaaccttccaatggacaatattttcaaatcagatagtatatctgctgctcctattcgtgtgatcaatcttctctacaatgctggggatgtgaagggtccacaaaccattgctttcaatttgcccaatgatgaaaggattgtgaatgaacgaggaacttccatggttatgctcaaaaacatttcagaagccaagttcaagcatatcttaaagcctatagctgatgcctgcatcagagaggaacaaaaggaatatgttgatttcgagccatattatacacatatagtctgtcatgaatgctgccatggaattggacctcattctatcacccttccaagtggtaaaaaaacaacagttagaagggaacttcaagaattccattcagcattggaggaggcaaaagctgatatagttggtctctgggcactgaatttccttattaagaagggattgcttcctaagagcctgtcacaatctatgtatgtctctttcctggctggctgcttccggtcaatccgctttgggctggaagaagctcacggaaaaggacaagctctgcagtttaactggttgtatgagaaaggggcttttgtgttgcagtctgacggaaaattctcagttgattttacaatggttgaggatgctgtagaaagcctgagcagggagatactgacaatacaggcaaagggcgataagccttctgcccaatctcttctccagtcccgtgcaacattgacacaaccattgagaatggcattggagaggatagagcacatgcaggtacctgttgacatagccccggtattcagcacggcaaacaagctatttgcagacatttaactatttgggctcagaatcgttgtgctttagtaccgcccacaatacctggacgaaaccaggaattgctcaagaataaggcggcactaggaattgctcaagaataaggaagcgccccatgttaagcaaagctgataaaaccatggcgatatgtgagtgacctttttatcggaaggaaaattgtttgcatgcttatgtattgacctcaatttttacgtattggagtgatttgatgtgaaatttaaccaaattccacgtccagtacatggccatccaaacatggcctaaagtggtgtttgatcagtgagaattggaataaacccagctttgcctgaacagttgcgaagtactgagttacatcaatgcatattttgtaacaccaaaaaaagatgtattatcctaatggatgattgaacgaaggcattgtatatcgatccccaatggcccaatctttatgcacattctggcttgatcagatctagtttattagttag

SEQ ID NO: 201358 - DNA, 2007 bp, Zea Mays
cacaatattcaatgatattttgttcatgtcctgccttgatgaaaataaggcttttctatcgaccgcagattctgctgtgcaattactcacagaagccaccaaaccagtttcaggatggaaggggattgagtatcgagcagcatttcctctacataagcctcccggtgctaacttctatcctcctgacatggacaaagcggagtttgaactttggaagagtaaactgacagataaagaacaaaatgatgccactgggtttttcaccgtcataaaacgacatgactctctgtcttcatcgtcattaacacaatcagatggatcggatcagaccaagactaaagatgatctttttattgttccatactccaaggagtatagaccattcctagagaaagcagctgagcttcttgagaaagcatcagcgtgctctgattctccaagcctcaagaatttgctgagaaccaaggcgaatgctttcctttcaaatgattactatgaatccgatatagcttggatggaattggactccaacttagatctcacaattggcccatatgaaacatatgaagatagcctttttagttataaggcaacttttgaagcatttgtcggaatacgtgatgacacagcaacttctcaagttaaactctttggtgatcagctccaggatttggagaaaaaccttccaatggacaatattttcaaatcagatagtatatctgctgctcctattcgtgtgatcaatcttctctacaatgctggggatgtgaagggtccacaaaccattgctttcaatttgcccaatgatgaaaggattgtgaatgaacgaggaacttccatggttatgctcaaaaacatttcagaagccaagttcaagcatatcttaaagcctatagctgatgcctgcatcagagaggaacaaaaggaatatgttgatttcgagccatattatacacatatagtctgtcatgaatgctgccatggaattggacctcattctatcacccttccaagtggtaaaaaaacaacagttagaagggaacttcaagaattccattcagcattggaggaggcaaaagctgatatagttggtctctgggcactgaatttccttattaagaagggattgcttcctaagagcctgtcacaatctatgtatgtctctttcctggctggctgcttccggtcaatccgctttgggctggaagaagctcacggaaaaggacaagctctgcagtttaactggttgtatgagaaaggggcttttgtgttgcagtctgacggaaaattctcagttgattttacaatggttgaggatgctgtagaaagcctgagcagggagatactgacaatacaggcaaagggcgataagccttctgcccaatctcttctccagtcccgtgcaacattgacacaaccattgagaatggcattggagaggatagagcacatgcaggtacctgttgacatagccccggtattcagcacggcaaacaagctatttgcagacatttaactatttgggctcagaatcgttgtgctttagtaccgcccacaatacctggacgaaaccaggaattgctcaagaataaggcggcactaggaattgctcaagaataaggaagcgccccatgttaagcaaagctgataaaaccatggcgatatgtgagtgacctttttatcggaaggaaaattgtttgcatgcttatgtattgacctcaatttttacgtattggagtgatttgatgtgaaatttaaccaaattccacgtccagtacatggccatccaaacatggcctaaagtggtgtttgatcagtgagaattggaataaacccagctttgcctgaacagttgcgaagtactgagttacatcaatgcatattttgtaacaccaaaaaaagatgtattatcctaatggatgattgaacgaaggcattgtatatcgatccccaatggcccaatctttatgcacattctggcttgatcagatctagtttattagttag

SEQ ID NO: 201359 - DNA, 2838 bp, Zea Mays
tctacgtacccgattgcccaacgcttcgctttctcgctgactcgctcccactcccagacgaccggccgccagcgccgccgcgttgatggccgccgcaccggaggagcgcctcgacgtcctcaacgccgctggggacaagatcggcgtctccaagcccaggtcggaggtgcacagggacggcgactatcaccgggcggtgcacgtgtggatctacagcgagagcaccggggagctgctgctgcagcgccgcgctgactgcaaggactcgtggcctggacagtgggacatctccagcgccggtcacatctccgccggcgaatcctcgctcttctcggcacagagggagcttgaggaagaactaggcatcaaccttccagtcgatgctttcgagcttatatttgtatttcttcaggaatgcgttatcaacaatgggacatacacaaacaatgagtacaatgatgtttaccttgtgactactttaactccaattccacttgaggcattcactctccaagaaagtgaagtatctgcagttaggtatatgcgttgtgatgagtacaaaagctgccttgcaaaagaaagtagagaatatgttccttatgatgtgaacgggcaatatggtcaactgtttagcattattgaagaaaggtacaaagagaatacagagtcacagagtttaactttgcaaaagcaaatgaaccgttatgttcccatccatttggaaccagatttgactagtctctctgaaggagacagggaggccttgggatatatccttaaagccgcaatagttattgatgacatattctatgaacaggtatggaatagtaacaaaatgcttagagactggctgaaaggacattctgaattctcaccattcgataaattgaagtgggcatattattctattaataagagtacctggtcctgccttgatgaaaataaggcttttctatcgaccgcagattctgctgtgcaattactcacagaagccaccaaaccagtttcaggatggaaggggattgagtatcgagcagcatttcctctacataagcctcccggtgctaacttctatcctcctgacatggacaaagcggagtttgaactttggaagagtaaactgacagataaagaacaaaatgatgccactgggtttttcaccgtcataaaacgacatgactctctgtcttcatcgtcattaacacaatcagatggatcggatcagaccaagactaaagatgatctttttattgttccatactccaaggagtatagaccattcctagagaaagcagctgagcttcttgagaaagcatcagcgtgctctgattctccaagcctcaagaatttgctgagaaccaaggcgaatgctttcctttcaaatgattactatgaatccgatatagcttggatggaattggcaacttttgaagcatttgtcggaatacgtgatgacacagcaacttctcaagttaaactctttggtgatcagctccaggatttggagaaaaaccttccaatggacaatattttcaaatcagatagtatatctgctgctcctattcgtgtgatcaatcttctctacaatgctggggatgtgaagggtccacaaaccattgctttcaatttgcccaatgatgaaaggattgtgaatgaacgaggaacttccatggttatgctcaaaaacatttcagaagccaagttcaagcatatcttaaagcctatagctgatgcctgcatcagagaggaacaaaaggaatatgttgatttcgagccatattatacacatatagtctgtcatgaatgctgccatggaattggacctcattctatcacccttccaagtggtaaaaaaacaacagttagaagggaacttcaagaattccattcagcattggaggaggcaaaagctgatatagttggtctctgggcactgaatttccttattaagaagggattgcttcctaagagcctgtcacaatctatgtatgtctctttcctggctggctgcttccggtcaatccgctttgggctggaagaagctcacggaaaaggacaagctctgcagtttaactggttgtatgagaaaggggcttttgtgttgcagtctgacggaaaattctcagttgattttacaatggttgaggatgctgtagaaagcctgagcagggagatactgacaatacaggcaaagggcgataagccttctgcccaatctcttctccagtcccgtgcaacattgacacaaccattgagaatggcattggagaggatagagcacatgcaggtacctgttgacatagccccggtattcagcacggcaaacaagctatttgcagacatttaactatttgggctcagaatcgttgtgctttagtaccgcccacaatacctggacgaaaccaggaattgctcaagaataaggcggcactaggaattgctcaagaataaggaagcgccccatgttaagcaaagctgataaaaccatggcgatatgtgagtgacctttttatcggaaggaaaattgtttgcatgcttatgtattgacctcaatttttacgtattggagtgatttgatgtgaaatttaaccaaattccacgtccagtacatggccatccaaacatggcctaaagtggtgtttgatcagtgagaattggaataaacccagctttgcctgaacagttgcgaagtactgagttacatcaatgcatattttgtaacaccaaaaaaagatgtattatcctaatggatgattgaacgaaggcattgtatatcgatccccaatggcccaatctttatgcacattctggcttgatcagatctagtttattagttag

SEQ ID NO: 201360 - DNA, 3011 bp, Zea Mays
tctacgtacccgattgcccaacgcttcgctttctcgctgactcgctcccactcccagacgaccggccgccagcgccgccgcgttgatggccgccgcaccggaggagcgcctcgacgtcctcaacgccgctggggacaagatcggcgtctccaagcccaggtcggaggtgcacagggacggcgactatcaccgggcggtgcacgtgtggatctacagcgagagcaccggggagctgctgctgcagcgccgcgctgactgcaaggactcgtggcctggacagtgggacatctccagcgccggtcacatctccgccggcgaatcctcgctcttctcggcacagtgagctgtcttgcctcacgatagtactgtgcgcttgaagagctaccgtctgaactctgaacaccacactgagtgcgtagagtagcgtgtgcacactaagcagctaggagggagcttgaggaagaactaggcatcaaccttccagtcgatgctttcgagcttatatttgtatttcttcaggaatgcgttatcaacaatgggacatacacaaacaatgagtacaatgatgtttaccttgtgactactttaactccaattccacttgaggcattcactctccaagaaagtgaagtatctgcagttaggtatatgcgttgtgatgagtacaaaagctgccttgcaaaagaaagtagagaatatgttccttatgatgtgaacgggcaatatggtcaactgtttagcattattgaagaaaggtacaaagagaatacagagtcacagagtttaactttgcaaaagcaaatgaaccgttatgttcccatccatttggaaccagatttgactagtctctctgaaggagacagggaggccttgggatatatccttaaagccgcaatagttattgatgacatattctatgaacaggtatggaatagtaacaaaatgcttagagactggctgaaaggacattctgaattctcaccattcgataaattgaagtgggcatattattctattaataagagtacctggtcctgccttgatgaaaataaggcttttctatcgaccgcagattctgctgtgcaattactcacagaagccaccaaaccagtttcaggatggaaggggattgagtatcgagcagcatttcctctacataagcctcccggtgctaacttctatcctcctgacatggacaaagcggagtttgaactttggaagagtaaactgacagataaagaacaaaatgatgccactgggtttttcaccgtcataaaacgacatgactctctgtcttcatcgtcattaacacaatcagatggatcggatcagaccaagactaaagatgatctttttattgttccatactccaaggagtatagaccattcctagagaaagcagctgagcttcttgagaaagcatcagcgtgctctgattctccaagcctcaagaatttgctgagaaccaaggcgaatgctttcctttcaaatgattactatgaatccgatatagcttggatggaattggactccaacttagatctcacaattggcccatatgaaacatatgaagatagcctttttagttataaggcaacttttgaagcatttgtcggaatacgtgatgacacagcaacttctcaagttaaactctttggtgatcagctccaggatttggagaaaaaccttccaatggacaatattttcaaatcagatagtatatctgctgctcctattcgtgtgatcaatcttctctacaatgctggggatgtgaagggtccacaaaccattgctttcaatttgcccaatgatgaaaggattgtgaatgaacgaggaacttccatggttatgctcaaaaacatttcagaagccaagttcaagcatatcttaaagcctatagctgatgcctgcatcagagaggaacaaaaggaatatgttgatttcgagccatattatacacatatagtctgtcatgaatgctgccatggaattggacctcattctatcacccttccaagtggtaaaaaaacaacagttagaagggaacttcaagaattccattcagcattggaggaggcaaaagctgatatagttggtctctgggcactgaatttccttattaagaagggattgcttcctaagagcctgtcacaatctatgtatgtctctttcctggctggctgcttccggtcaatccgctttgggctggaagaagctcacggaaaaggacaagctctgcagtttaactggttgtatgagaaaggggcttttgtgttgcagtctgacggaaaattctcagttgattttacaatggttgaggatgctgtagaaagcctgagcagggagatactgacaatacaggcaaagggcgataagccttctgcccaatctcttctccagtcccgtgcaacattgacacaaccattgagaatggcattggagaggatagagcacatgcaggtacctgttgacatagccccggtattcagcacggcaaacaagctatttgcagacatttaactatttgggctcagaatcgttgtgctttagtaccgcccacaatacctggacgaaaccaggaattgctcaagaataaggcggcactaggaattgctcaagaataaggaagcgccccatgttaagcaaagctgataaaaccatggcgatatgtgagtgacctttttatcggaaggaaaattgtttgcatgcttatgtattgacctcaatttttacgtattggagtgatttgatgtgaaatttaaccaaattccacgtccagtacatggccatccaaacatggcctaaagtggtgtttgatcagtgagaattggaataaacccagctttgcctgaacagttgcgaagtactgagttacatcaatgcatattttgtaacaccaaaaaaagatgtattatcctaatggatgattgaacgaaggcattgtatatcgatccccaatggcccaatctttatgcacattctggcttgatcagatctagtttattagttag

SEQ ID NO: 201361 - DNA, 2797 bp, Zea Mays
tctacgtacccgattgcccaacgcttcgctttctcgctgactcgctcccactcccagacgaccggccgccagcgccgccgcgttgatggccgccgcaccggaggagcgcctcgacgtcctcaacgccgctggggacaagatcggcgtctccaagcccaggtcggaggtgcacagggacggcgactatcaccgggcggtgcacgtgtggatctacagcgagagcaccggggagctgctgctgcagcgccgcgctgactgcaaggactcgtggcctggacagtgggacatctccagcgccggtcacatctccgccggcgaatcctcgctcttctcggcacagagggagcttgaggaagaactaggcatcaaccttccagtcgatgctttcgagcttatatttgtatttcttcaggaatgcgttatcaacaatgggacatacacaaacaatgagtacaatgatgtttaccttgtgactactttaactccaattccacttgaggcattcactctccaagaaagtgaagtatctgcagttaggtatatgcgttgtgatgagtacaaaagctgccttgcaaaagaaagtagagaatatgttccttatgatgtgaacgggcaatatggtcaactgtttagcattattgaagaaaggtacaaagagaatacagagtcacagagtttaactttgcaaaagcaaatgaaccgttatgttcccatccatttggaaccagatttgactagtctctctgaaggagacagggaggccttgggatatatccttaaagccgcaatagttattgatgacatattctatgaacaggtcctgccttgatgaaaataaggcttttctatcgaccgcagattctgctgtgcaattactcacagaagccaccaaaccagtttcaggatggaaggggattgagtatcgagcagcatttcctctacataagcctcccggtgctaacttctatcctcctgacatggacaaagcggagtttgaactttggaagagtaaactgacagataaagaacaaaatgatgccactgggtttttcaccgtcataaaacgacatgactctctgtcttcatcgtcattaacacaatcagatggatcggatcagaccaagactaaagatgatctttttattgttccatactccaaggagtatagaccattcctagagaaagcagctgagcttcttgagaaagcatcagcgtgctctgattctccaagcctcaagaatttgctgagaaccaaggcgaatgctttcctttcaaatgattactatgaatccgatatagcttggatggaattggactccaacttagatctcacaattggcccatatgaaacatatgaagatagcctttttagttataaggcaacttttgaagcatttgtcggaatacgtgatgacacagcaacttctcaagttaaactctttggtgatcagctccaggatttggagaaaaaccttccaatggacaatattttcaaatcagatagtatatctgctgctcctattcgtgtgatcaatcttctctacaatgctggggatgtgaagggtccacaaaccattgctttcaatttgcccaatgatgaaaggattgtgaatgaacgaggaacttccatggttatgctcaaaaacatttcagaagccaagttcaagcatatcttaaagcctatagctgatgcctgcatcagagaggaacaaaaggaatatgttgatttcgagccatattatacacatatagtctgtcatgaatgctgccatggaattggacctcattctatcacccttccaagtggtaaaaaaacaacagttagaagggaacttcaagaattccattcagcattggaggaggcaaaagctgatatagttggtctctgggcactgaatttccttattaagaagggattgcttcctaagagcctgtcacaatctatgtatgtctctttcctggctggctgcttccggtcaatccgctttgggctggaagaagctcacggaaaaggacaagctctgcagtttaactggttgtatgagaaaggggcttttgtgttgcagtctgacggaaaattctcagttgattttacaatggttgaggatgctgtagaaagcctgagcagggagatactgacaatacaggcaaagggcgataagccttctgcccaatctcttctccagtcccgtgcaacattgacacaaccattgagaatggcattggagaggatagagcacatgcaggtacctgttgacatagccccggtattcagcacggcaaacaagctatttgcagacatttaactatttgggctcagaatcgttgtgctttagtaccgcccacaatacctggacgaaaccaggaattgctcaagaataaggcggcactaggaattgctcaagaataaggaagcgccccatgttaagcaaagctgataaaaccatggcgatatgtgagtgacctttttatcggaaggaaaattgtttgcatgcttatgtattgacctcaatttttacgtattggagtgatttgatgtgaaatttaaccaaattccacgtccagtacatggccatccaaacatggcctaaagtggtgtttgatcagtgagaattggaataaacccagctttgcctgaacagttgcgaagtactgagttacatcaatgcatattttgtaacaccaaaaaaagatgtattatcctaatggatgattgaacgaaggcattgtatatcgatccccaatggcccaatctttatgcacattctggcttgatcagatctagtttattagttag

SEQ ID NO: 201362 - DNA, 605 bp, Zea Mays
aagaatcatagctgagaaggaaggtgccaaccaagctggtgatgcagagaaaaaggaagatgctactgtcccctcagagagcaagacctccaagaagaagaaaaagaaggacaagagttcaaaggagggaagaaaagaaacacaagaagcagccgaggggtcagaggagactgccagtgcaggacctgatgaagaagataccactgctgtggacgtgaaggagcgtttgaagaagatggcttcaatgaagaagaagagatcgagcaaagagacggacaccggtgccaaaatcgccgctgccgaggccacagcaaggagcgcaaggcttgcggcggccaagaagaaagagaagagtcattacaaccagcagcctgtgcggtaaatgggcataaagttttggatttgggtgctctgaattttatatttccttgtagttggactcacaataatacttttttgatctgtcgtatttatgaccgggaagttcctttgagttccatttcagaattcatgaaaggcctttgtggttgcaaacggtggtgtaattgtgttttaaattgttcatccagcgaaaacttcatggacaacacgaccaattagggcta

SEQ ID NO: 201363 - DNA, 886 bp, Zea Mays
cggcattctggcagcaagaaataaagaacaaatgggacaagttgaaagaattcaaggcatggaagaagttgatgaggcagacatgtactggttggtgctctacaaaaggaaccatcgatatggatggcgagtggtggaaaaagctgaagacattccaagttgtgggaacttcaaaatatggaggaactagaaatatgttttggcagcatcacaagtattggttttgatcattggtctcctcatatggccactgcttccaccattgctgaacaaggaggtacaccacacgaggcaatcaattgtgacacacaagaagatggtgacaccaatgaatgtgaagtttcaccggtcaatccaaatggcaagtgaccgccaaggttcaatcaaaacaaaggcaagaagcagaaaacagaaaatagggacaacactaatcatcgttcaataaacagttacatctatgtctgtttcaactaattcttatgctgcaaaaaagggaaaaatttccattgatgaagtgatgaaacatgtgcttgcttgtggtgccacctatggtagtaacgagcacttcattgcaactgaattatttgtcaaactgacccaaaaagagatgttcatgacctttcttaccgaacatagattcaactggctttcagggaaatacataaccaagtatggtaattataaagggccatgggtgtgatatgagttgtaaatgtttgtttttttatctcgttatgtgagacttatttgtttcttgttactttcatttctttatgtgagactcaatggatcattgtatctgctatctcatttgatgatggttatgtattattgtactattacttgtgtttgtataaaatctcatatttgctatcttatttgacat

SEQ ID NO: 201364 - DNA, 1665 bp, Zea Mays
caggaatcaggcggaaaccaaataccccgaacgtccacagcgagcgagaggccgcaaactcccgagaccgtacgaaccagacgattcaccaatcaccatggcggcgccggcgcggcgcaggtcctgcatctcctccggtggagccggagcgcctccttccgctgctgcttcgcctcttctccgccctccgccgcccgctgcgaggccggtccaaggccatgctcaaggggatggactactgactactccgaacccgagataaggacatgatttaagacatgtgtgtgtttcaagtagttcgttgattgggtgcaggcgcaggggtttcggccaggccaggccttgatgctgtggaaatgcctgtacgggaacaacgtttgggctcatttttacgacgagctggctggaagatgataactgagcatgctgatctcaaggcattaattgtgaaggacattcatcggatagaacccgtaaggatgttacagatactggtttctattgaagatggttcagtgatttaaacagttatcattccttgcactaggggcaggacaactgtctgtgtttcaaatgaagttggttgggccatgaaatgtcagttttgcttcactagaagggcatgggtcaaccatttcacaatatcgacaatgtaataaaagcctcagcaataatggttcatgagcaaggccattttagccctcgcaaggttactgtctccacaagtggttttgtccctcagttaggaacccaattgcttgctgccgccagtcttaatgcaaggacagatgaggttagaaactggataatgactataaacagaaaggagaaccttaacttgcttcttggcactttaagaggtgaacttaacctcagaaaaaaaaacaaatagtgctatctgaatatgccatgctttctggagtgaacggcagtggatgatgccaaaagtcttttgtagagctactccaagggatcccatgcaagcaagataaacctcatctctttgagttccctcgacggttcccaatccaagcccacatcagacgataaaatgattgagttcggcaaacttttaattcaaggtgggctcactgtctttgttcggtcagcagaggggatgatcagatcagatggctgcctgcgggcagctcagagagcctggagactaccagctgcctctgcaccgtgcacctgagaaaattttgaggtcgtcttgtgatgctagacagtgcattacagtaaactggtcctgaggcctgagaaaattttgaggtcgttttgtgatgctagacagtgcattacagtaaactttagcgtcgtcgagaccgaagtgggctgaaaagcgctgcatcgtgcagccgcgtgacagtgggcgtctttcgcatggttggttcgtcgctgcggtctgagtcgccaaagctgaattctgttgtcatcggggagtgattcgaaaagtttggaacgaacctatcggtggtcaggaatgaggtaagaatctgaaggactacaaggttggcttgcctgagcgagataccttaaccattaaggtgtgcatggcacttggcacctagtcaccagaccagatcaccctaaatggtggaaagaaaaaagcgaaagatctagcgcaagccccacccggatcaaagtttctctctctctcttttc

SEQ ID NO: 201365 - DNA, 1524 bp, Zea Mays
caggaatcaggcggaaaccaaataccccgaacgtccacagcgagcgagaggccgcaaactcccgagaccgtacgaaccagacgattcaccaatcaccatggcggcgccggcgcggcgcaggtcctgcatctcctccggtggagccggagcgcctccttccgctgctgcttcgcctcttctccgccctccgccgcccgctgcgaggccggtccaaggccatgctcaaggggatggactactgactactccgaacccgagataaggacatgatttaagacatgtgtgtgtttcaagtagttcgttgattgggtgcaggcgcaggggtttcggccaggccaggccttgatgctgtggaaatgcctgtacgggaacaacgtttgggctcatttttacgacgagctggctggggcaggacaactgtctgtgtttcaaatgaagttggttgggccatgaaatgtcagttttgcttcactagaagggcatgggtcaaccatttcacaatatcgacaatgtaataaaagcctcagcaataatggttcatgagcaaggccattttagccctcgcaaggttactgtctccacaagtggttttgtccctcagttaggaacccaattgcttgctgccgccagtcttaatgcaaggacagatgaggttagaaactggataatgactataaacagaaaggagaaccttaacttgcttcttggcactttaagaggtgaacttaacctcagaaaaaaaaacaaatagtgctatctgaatatgccatgctttctggagtgaacggcagtggatgatgccaaaagtcttttgtagagctactccaagggatcccatgcaagcaagataaacctcatctctttgagttccctcgacggttcccaatccaagcccacatcagacgataaaatgattgagttcggcaaacttttaattcaaggtgggctcactgtctttgttcggtcagcagaggggatgatcagatcagatggctgcctgcgggcagctcagagagcctggagactaccagctgcctctgcaccgtgcacctgagaaaattttgaggtcgtcttgtgatgctagacagtgcattacagtaaactggtcctgaggcctgagaaaattttgaggtcgttttgtgatgctagacagtgcattacagtaaactttagcgtcgtcgagaccgaagtgggctgaaaagcgctgcatcgtgcagccgcgtgacagtgggcgtctttcgcatggttggttcgtcgctgcggtctgagtcgccaaagctgaattctgttgtcatcggggagtgattcgaaaagtttggaacgaacctatcggtggtcaggaatgaggtaagaatctgaaggactacaaggttggcttgcctgagcgagataccttaaccattaaggtgtgcatggcacttggcacctagtcaccagaccagatcaccctaaatggtggaaagaaaaaagcgaaagatctagcgcaagccccacccggatcaaagtttctctctctctcttttc

SEQ ID NO: 201366 - DNA, 1419 bp, Zea Mays
caggaatcaggcggaaaccaaataccccgaacgtccacagcgagcgagaggccgcaaactcccgagaccgtacgaaccagacgattcaccaatcaccatggcggcgccggcgcggcgcaggtcctgcatctcctccggtggagccggagcgcctccttccgctgctgcttcgcctcttctccgccctccgccgcccgctgcgaggccggtccaaggccatgctcaaggggatggactactgactactccgaacccgagataaggacatgatttaagacatgtgtgtgtttcaagtagttcgttgattgggtgcaggcgcaggggtttcggccaggccaggccttgatgctgtggaaatgcctgtacgggaacaacgtttgggctcatttttacgacgagctggctggatgttacagatactggtttctattgaagatggttcagtgatttaaacagttatcattccttgcactaggggcaggacaactgtctgtgtttcaaatgaagttggttgggccatgaaatgtcagttttgcttcactagaaggttagaaactggataatgactataaacagaaaggagaaccttaacttgcttcttggcactttaagaggtgaacttaacctcagaaaaaaaaacaaatagtgctatctgaatatgccatgctttctggagtgaacggcagtggatgatgccaaaagtcttttgtagagctactccaagggatcccatgcaagcaagataaacctcatctctttgagttccctcgacggttcccaatccaagcccacatcagacgataaaatgattgagttcggcaaacttttaattcaaggtgggctcactgtctttgttcggtcagcagaggggatgatcagatcagatggctgcctgcgggcagctcagagagcctggagactaccagctgcctctgcaccgtgcacctgagaaaattttgaggtcgtcttgtgatgctagacagtgcattacagtaaactggtcctgaggcctgagaaaattttgaggtcgttttgtgatgctagacagtgcattacagtaaactttagcgtcgtcgagaccgaagtgggctgaaaagcgctgcatcgtgcagccgcgtgacagtgggcgtctttcgcatggttggttcgtcgctgcggtctgagtcgccaaagctgaattctgttgtcatcggggagtgattcgaaaagtttggaacgaacctatcggtggtcaggaatgaggtaagaatctgaaggactacaaggttggcttgcctgagcgagataccttaaccattaaggtgtgcatggcacttggcacctagtcaccagaccagatcaccctaaatggtggaaagaaaaaagcgaaagatctagcgcaagccccacccggatcaaagtttctctctctctcttttc

SEQ ID NO: 201367 - DNA, 1674 bp, Zea Mays
caggaatcaggcggaaaccaaataccccgaacgtccacagcgagcgagaggccgcaaactcccgagaccgtacgaaccagacgattcaccaatcaccatggcggcgccggcgcggcgcaggtcctgcatctcctccggtggagccggagcgcctccttccgctgctgcttcgcctcttctccgccctccgccgcccgctgcgaggccggtccaaggccatgctcaaggggatggactactgactactccgaacccgagataaggacatgatttaagacatgtgtgtgtttcaagtagttcgttgattgggtgcaggcgcaggggtttcggccaggccaggccttgatgctgtggaaatgcctgtacgggaacaacgtttgggctcatttttacgacgagctggctggtttaaacaaggatttcaggaagatgataactgagcatgctgatctcaaggcattaattgtgaaggacattcatcggatagaacccgtaagatactggtttctattgaagatggttcagtgatttaaacagttatcattccttgcactaggggcaggacaactgtctgtgtttcaaatgaagttggttgggccatgaaatgtcagttttgcttcactagaagggcatgggtcaaccatttcacaatatcgacaatgtaataaaagcctcagcaataatggttcatgagcaaggccattttagccctcgcaaggttactgtctccacaagtggttttgtccctcagttaggaacccaattgcttgctgccgccagtcttaatgcaaggacagatgaggttagaaactggataatgactataaacagaaaggagaaccttaacttgcttcttggcactttaagaggtgaacttaacctcagaaaaaaaaacaaatagtgctatctgaatatgccatgctttctggagtgaacggcagtggatgatgccaaaagtcttttgtagagctactccaagggatcccatgcaagcaagataaacctcatctctttgagttccctcgacggttcccaatccaagcccacatcagacgataaaatgattgagttcggcaaacttttaattcaaggtgggctcactgtctttgttcggtcagcagaggggatgatcagatcagatggctgcctgcgggcagctcagagagcctggagactaccagctgcctctgcaccgtgcacctgagaaaattttgaggtcgtcttgtgatgctagacagtgcattacagtaaactggtcctgaggcctgagaaaattttgaggtcgttttgtgatgctagacagtgcattacagtaaactttagcgtcgtcgagaccgaagtgggctgaaaagcgctgcatcgtgcagccgcgtgacagtgggcgtctttcgcatggttggttcgtcgctgcggtctgagtcgccaaagctgaattctgttgtcatcggggagtgattcgaaaagtttggaacgaacctatcggtggtcaggaatgaggtaagaatctgaaggactacaaggttggcttgcctgagcgagataccttaaccattaaggtgtgcatggcacttggcacctagtcaccagaccagatcaccctaaatggtggaaagaaaaaagcgaaagatctagcgcaagccccacccggatcaaagtttctctctctctcttttc

SEQ ID NO: 201368 - DNA, 1679 bp, Zea Mays
caggaatcaggcggaaaccaaataccccgaacgtccacagcgagcgagaggccgcaaactcccgagaccgtacgaaccagacgattcaccaatcaccatggcggcgccggcgcggcgcaggtcctgcatctcctccggtggagccggagcgcctccttccgctgctgcttcgcctcttctccgccctccgccgcccgctgcgaggccggtccaaggccatgctcaaggggatggactactgactactccgaacccgagataaggacatgatttaagacatgtgtgtgtttcaagtagttcgttgattgggtgcaggcgcaggggtttcggccaggccaggccttgatgctgtggaaatgcctgtacgggaacaacgtttgggctcatttttacgacgagctggctggtttaaacaaggatttcaggaagatgataactgagcatgctgatctcaaggcattaattgtgaaggacattcatcggatagaacccgatgttacagatactggtttctattgaagatggttcagtgatttaaacagttatcattccttgcactaggggcaggacaactgtctgtgtttcaaatgaagttggttgggccatgaaatgtcagttttgcttcactagaagggcatgggtcaaccatttcacaatatcgacaatgtaataaaagcctcagcaataatggttcatgagcaaggccattttagccctcgcaaggttactgtctccacaagtggttttgtccctcagttaggaacccaattgcttgctgccgccagtcttaatgcaaggacagatgaggttagaaactggataatgactataaacagaaaggagaaccttaacttgcttcttggcactttaagaggtgaacttaacctcagaaaaaaaaacaaatagtgctatctgaatatgccatgctttctggagtgaacggcagtggatgatgccaaaagtcttttgtagagctactccaagggatcccatgcaagcaagataaacctcatctctttgagttccctcgacggttcccaatccaagcccacatcagacgataaaatgattgagttcggcaaacttttaattcaaggtgggctcactgtctttgttcggtcagcagaggggatgatcagatcagatggctgcctgcgggcagctcagagagcctggagactaccagctgcctctgcaccgtgcacctgagaaaattttgaggtcgtcttgtgatgctagacagtgcattacagtaaactggtcctgaggcctgagaaaattttgaggtcgttttgtgatgctagacagtgcattacagtaaactttagcgtcgtcgagaccgaagtgggctgaaaagcgctgcatcgtgcagccgcgtgacagtgggcgtctttcgcatggttggttcgtcgctgcggtctgagtcgccaaagctgaattctgttgtcatcggggagtgattcgaaaagtttggaacgaacctatcggtggtcaggaatgaggtaagaatctgaaggactacaaggttggcttgcctgagcgagataccttaaccattaaggtgtgcatggcacttggcacctagtcaccagaccagatcaccctaaatggtggaaagaaaaaagcgaaagatctagcgcaagccccacccggatcaaagtttctctctctctcttttc

SEQ ID NO: 201369 - DNA, 1615 bp, Zea Mays
caggaatcaggcggaaaccaaataccccgaacgtccacagcgagcgagaggccgcaaactcccgagaccgtacgaaccagacgattcaccaatcaccatggcggcgccggcgcggcgcaggtcctgcatctcctccggtggagccggagcgcctccttccgctgctgcttcgcctcttctccgccctccgccgcccgctgcgaggccggtccaaggccatgctcaaggggatggactactgactactccgaacccgagataaggacatgatttaagacatgtgtgtgtttcaagtagttcgttgattgggtgcaggcgcaggggtttcggccaggccaggccttgatgctgtggaaatgcctgtacgggaacaacgtttgggctcatttttacgacgagctggctggtttaaacaaggatttcaggaagatgataactgagcatgctgatctcaaggcattaattgtgaaggacattcatcggatagaacccgtaaggggcaggacaactgtctgtgtttcaaatgaagttggttgggccatgaaatgtcagttttgcttcactagaagggcatgggtcaaccatttcacaatatcgacaatgtaataaaagcctcagcaataatggttcatgagcaaggccattttagccctcgcaaggttactgtctccacaagtggttttgtccctcagttaggaacccaattgcttgctgccgccagtcttaatgcaaggacagatgaggttagaaactggataatgactataaacagaaaggagaaccttaacttgcttcttggcactttaagaggtgaacttaacctcagaaaaaaaaacaaatagtgctatctgaatatgccatgctttctggagtgaacggcagtggatgatgccaaaagtcttttgtagagctactccaagggatcccatgcaagcaagataaacctcatctctttgagttccctcgacggttcccaatccaagcccacatcagacgataaaatgattgagttcggcaaacttttaattcaaggtgggctcactgtctttgttcggtcagcagaggggatgatcagatcagatggctgcctgcgggcagctcagagagcctggagactaccagctgcctctgcaccgtgcacctgagaaaattttgaggtcgtcttgtgatgctagacagtgcattacagtaaactggtcctgaggcctgagaaaattttgaggtcgttttgtgatgctagacagtgcattacagtaaactttagcgtcgtcgagaccgaagtgggctgaaaagcgctgcatcgtgcagccgcgtgacagtgggcgtctttcgcatggttggttcgtcgctgcggtctgagtcgccaaagctgaattctgttgtcatcggggagtgattcgaaaagtttggaacgaacctatcggtggtcaggaatgaggtaagaatctgaaggactacaaggttggcttgcctgagcgagataccttaaccattaaggtgtgcatggcacttggcacctagtcaccagaccagatcaccctaaatggtggaaagaaaaaagcgaaagatctagcgcaagccccacccggatcaaagtttctctctctctcttttc

SEQ ID NO: 201370 - DNA, 1684 bp, Zea Mays
caggaatcaggcggaaaccaaataccccgaacgtccacagcgagcgagaggccgcaaactcccgagaccgtacgaaccagacgattcaccaatcaccatggcggcgccggcgcggcgcaggtcctgcatctcctccggtggagccggagcgcctccttccgctgctgcttcgcctcttctccgccctccgccgcccgctgcgaggccggtccaaggccatgctcaaggggatggactactgactactccgaacccgagataaggacatgatttaagacatgtgtgtgtttcaagtagttcgttgattgggtgcaggcgcaggggtttcggccaggccaggccttgatgctgtggaaatgcctgtacgggaacaacgtttgggctcatttttacgacgagctggctggtttaaacaaggatttcaggaagatgataactgagcatgctgatctcaaggcattaattgtgaaggacattcatcggatagaacccgtaaggatgttacagatactggtttctattgaagatggttcagtgatttaaacagttatcattccttgcactaggggcaggacaactgtctgtgtttcaaatgaagttggttgggccatgaaatgtcagttttgcttcactagaagggcatgggtcaaccatttcacaatatcgacaatgtaataaaagcctcagcaataatggttcatgagcaaggccattttagccctcgcaaggttactgtctccacaagtggttttgtccctcagttaggaacccaattgcttgctgccgccagtcttaatgcaaggacagatgaggttagaaactggataatgactataaacagaaaggagaaccttaacttgcttcttggcactttaagaggtgaacttaacctcagaaaaaaaaacaaatagtgctatctgaatatgccatgctttctggagtgaacggcagtggatgatgccaaaagtcttttgtagagctactccaagggatcccatgcaagcaagataaacctcatctctttgagttccctcgacggttcccaatccaagcccacatcagacgataaaatgattgagttcggcaaacttttaattcaaggtgggctcactgtctttgttcggtcagcagaggggatgatcagatcagatggctgcctgcgggcagctcagagagcctggagactaccagctgcctctgcaccgtgcacctgagaaaattttgaggtcgtcttgtgatgctagacagtgcattacagtaaactggtcctgaggcctgagaaaattttgaggtcgttttgtgatgctagacagtgcattacagtaaactttagcgtcgtcgagaccgaagtgggctgaaaagcgctgcatcgtgcagccgcgtgacagtgggcgtctttcgcatggttggttcgtcgctgcggtctgagtcgccaaagctgaattctgttgtcatcggggagtgattcgaaaagtttggaacgaacctatcggtggtcaggaatgaggtaagaatctgaaggactacaaggttggcttgcctgagcgagataccttaaccattaaggtgtgcatggcacttggcacctagtcaccagaccagatcaccctaaatggtggaaagaaaaaagcgaaagatctagcgcaagccccacccggatcaaagtttctctctctctcttttc

SEQ ID NO: 201371 - DNA, 1518 bp, Zea Mays
caggaatcaggcggaaaccaaataccccgaacgtccacagcgagcgagaggccgcaaactcccgagaccgtacgaaccagacgattcaccaatcaccatggcggcgccggcgcggcgcaggtcctgcatctcctccggtggagccggagcgcctccttccgctgctgcttcgcctcttctccgccctccgccgcccgctgcgaggccggtccaaggccatgctcaaggggatggactactgactactccgaacccgagataaggacatgatttaagacatgtgtgtgtttcaagtagttcgttgattgggtgcaggcgcaggggtttcggccaggccaggccttgatgctgtggaaatgcctgtacgggaacaacgtttgggctcatttttacgacgagctggctggacaactgtctgtgtttcaaatgaagttggttgggccatgaaatgtcagttttgcttcactagaagggcatgggtcaaccatttcacaatatcgacaatgtaataaaagcctcagcaataatggttcatgagcaaggccattttagccctcgcaaggttactgtctccacaagtggttttgtccctcagttaggaacccaattgcttgctgccgccagtcttaatgcaaggacagatgaggttagaaactggataatgactataaacagaaaggagaaccttaacttgcttcttggcactttaagaggtgaacttaacctcagaaaaaaaaacaaatagtgctatctgaatatgccatgctttctggagtgaacggcagtggatgatgccaaaagtcttttgtagagctactccaagggatcccatgcaagcaagataaacctcatctctttgagttccctcgacggttcccaatccaagcccacatcagacgataaaatgattgagttcggcaaacttttaattcaaggtgggctcactgtctttgttcggtcagcagaggggatgatcagatcagatggctgcctgcgggcagctcagagagcctggagactaccagctgcctctgcaccgtgcacctgagaaaattttgaggtcgtcttgtgatgctagacagtgcattacagtaaactggtcctgaggcctgagaaaattttgaggtcgttttgtgatgctagacagtgcattacagtaaactttagcgtcgtcgagaccgaagtgggctgaaaagcgctgcatcgtgcagccgcgtgacagtgggcgtctttcgcatggttggttcgtcgctgcggtctgagtcgccaaagctgaattctgttgtcatcggggagtgattcgaaaagtttggaacgaacctatcggtggtcaggaatgaggtaagaatctgaaggactacaaggttggcttgcctgagcgagataccttaaccattaaggtgtgcatggcacttggcacctagtcaccagaccagatcaccctaaatggtggaaagaaaaaagcgaaagatctagcgcaagccccacccggatcaaagtttctctctctctcttttc

SEQ ID NO: 201372 - DNA, 1593 bp, Zea Mays
caggaatcaggcggaaaccaaataccccgaacgtccacagcgagcgagaggccgcaaactcccgagaccgtacgaaccagacgattcaccaatcaccatggcggcgccggcgcggcgcaggtcctgcatctcctccggtggagccggagcgcctccttccgctgctgcttcgcctcttctccgccctccgccgcccgctgcgaggccggtccaaggccatgctcaaggggatggactactgactactccgaacccgagataaggacatgatttaagacatgtgtgtgtttcaagtagttcgttgattgggtgcaggcgcaggggtttcggccaggccaggccttgatgctgtggaaatgcctgtacgggaacaacgtttgggctcatttttacgacgagctggctggatgttacagatactggtttctattgaagatggttcagtgatttaaacagttatcattccttgcactaggggcaggacaactgtctgtgtttcaaatgaagttggttgggccatgaaatgtcagttttgcttcactagaagggcatgggtcaaccatttcacaatatcgacaatgtaataaaagcctcagcaataatggttcatgagcaaggccattttagccctcgcaaggttactgtctccacaagtggttttgtccctcagttaggaacccaattgcttgctgccgccagtcttaatgcaaggacagatgaggttagaaactggataatgactataaacagaaaggagaaccttaacttgcttcttggcactttaagaggtgaacttaacctcagaaaaaaaaacaaatagtgctatctgaatatgccatgctttctggagtgaacggcagtggatgatgccaaaagtcttttgtagagctactccaagggatcccatgcaagcaagataaacctcatctctttgagttccctcgacggttcccaatccaagcccacatcagacgataaaatgattgagttcggcaaacttttaattcaaggtgggctcactgtctttgttcggtcagcagaggggatgatcagatcagatggctgcctgcgggcagctcagagagcctggagactaccagctgcctctgcaccgtgcacctgagaaaattttgaggtcgtcttgtgatgctagacagtgcattacagtaaactggtcctgaggcctgagaaaattttgaggtcgttttgtgatgctagacagtgcattacagtaaactttagcgtcgtcgagaccgaagtgggctgaaaagcgctgcatcgtgcagccgcgtgacagtgggcgtctttcgcatggttggttcgtcgctgcggtctgagtcgccaaagctgaattctgttgtcatcggggagtgattcgaaaagtttggaacgaacctatcggtggtcaggaatgaggtaagaatctgaaggactacaaggttggcttgcctgagcgagataccttaaccattaaggtgtgcatggcacttggcacctagtcaccagaccagatcaccctaaatggtggaaagaaaaaagcgaaagatctagcgcaagccccacccggatcaaagtttctctctctctcttttc

SEQ ID NO: 201373 - DNA, 1669 bp, Zea Mays
caggaatcaggcggaaaccaaataccccgaacgtccacagcgagcgagaggccgcaaactcccgagaccgtacgaaccagacgattcaccaatcaccatggcggcgccggcgcggcgcaggtcctgcatctcctccggtggagccggagcgcctccttccgctgctgcttcgcctcttctccgccctccgccgcccgctgcgaggccggtccaaggccatgctcaaggggatggactactgactactccgaacccgagataaggacatgatttaagacatgtgtgtgtttcaagtagttcgttgattgggtgcaggcgcaggggtttcggccaggccaggccttgatgctgtggaaatgcctgtacgggaacaacgtttgggctcatttttacgacgagctggctggtttaaacaaggatttcaggaagatgataactgagcatgctgatctcaaggcattaattgtgaaggacattcatcggatagaacccatactggtttctattgaagatggttcagtgatttaaacagttatcattccttgcactaggggcaggacaactgtctgtgtttcaaatgaagttggttgggccatgaaatgtcagttttgcttcactagaagggcatgggtcaaccatttcacaatatcgacaatgtaataaaagcctcagcaataatggttcatgagcaaggccattttagccctcgcaaggttactgtctccacaagtggttttgtccctcagttaggaacccaattgcttgctgccgccagtcttaatgcaaggacagatgaggttagaaactggataatgactataaacagaaaggagaaccttaacttgcttcttggcactttaagaggtgaacttaacctcagaaaaaaaaacaaatagtgctatctgaatatgccatgctttctggagtgaacggcagtggatgatgccaaaagtcttttgtagagctactccaagggatcccatgcaagcaagataaacctcatctctttgagttccctcgacggttcccaatccaagcccacatcagacgataaaatgattgagttcggcaaacttttaattcaaggtgggctcactgtctttgttcggtcagcagaggggatgatcagatcagatggctgcctgcgggcagctcagagagcctggagactaccagctgcctctgcaccgtgcacctgagaaaattttgaggtcgtcttgtgatgctagacagtgcattacagtaaactggtcctgaggcctgagaaaattttgaggtcgttttgtgatgctagacagtgcattacagtaaactttagcgtcgtcgagaccgaagtgggctgaaaagcgctgcatcgtgcagccgcgtgacagtgggcgtctttcgcatggttggttcgtcgctgcggtctgagtcgccaaagctgaattctgttgtcatcggggagtgattcgaaaagtttggaacgaacctatcggtggtcaggaatgaggtaagaatctgaaggactacaaggttggcttgcctgagcgagataccttaaccattaaggtgtgcatggcacttggcacctagtcaccagaccagatcaccctaaatggtggaaagaaaaaagcgaaagatctagcgcaagccccacccggatcaaagtttctctctctctcttttc

SEQ ID NO: 201374 - DNA, 2017 bp, Zea Mays
ttcattgtgtcaaggagattccatctatttagtattggtatatgctattaactattaacatctacgcctgtgtttcaaatcacacttcggtttagctttgtcctaactcaaacgtctctaactgaaaactattaacatctaccagttacgtacaacaaattcactagcaagacatctaatgaaaaaaataatgaactggtttcatgttgtacatgttgatacatttttttttctctggtaagaattagttgcgtggcctgtttctctcattaagtttacaacattttctattgtccaatggggtctattgcttttcagttggagaacctacaatatacctatgattcttctcaatgtatgtcatttgatgtgttgttaagatgttagttaattagacgtcacctatgtgtatctctaaaatccttcagccccgtttgtttcctttcatttcgaggaattggaatcttactaatggaataggctatttttttagaatatgacattccaccgctttccaaagttatcatataagcctacctcaaattcatgggagtgagagatggaaatttattctatagatttacatgctatttttccgatgtagaacttatatcacattcttctacttgcgcctctataacataaatgtagtatataactatctctctcataagatttaggatagtatacaaatatattacatatataaatatataaacttaattagttttgtctaaattataattattaaaatggaattcaattccaacgaaacaaacgggccctcaggtttaaacaaggatttcaggaagatgataactgagcatgctgatctcaaggcattaattgtgaaggacattcatcggatagaacccgtaagttatcattccttgcactaggggcaggacaactgtctgtgtttcaaatgaagttggttgggccatgaaatgtcagttttgcttcactagaagggcatgggtcaaccatttcacaatatcgacaatgtaataaaagcctcagcaataatggttcatgagcaaggccattttagccctcgcaaggttactgtctccacaagtggttttgtccctcagttaggaacccaattgcttgctgccgccagtcttaatgcaaggacagatgaggttagaaactggataatgactataaacagaaaggagaaccttaacttgcttcttggcactttaagaggtgaacttaacctcagaaaaaaaaacaaatagtgctatctgaatatgccatgctttctggagtgaacggcagtggatgatgccaaaagtcttttgtagagctactccaagggatcccatgcaagcaagataaacctcatctctttgagttccctcgacggttcccaatccaagcccacatcagacgataaaatgattgagttcggcaaacttttaattcaaggtgggctcactgtctttgttcggtcagcagaggggatgatcagatcagatggctgcctgcgggcagctcagagagcctggagactaccagctgcctctgcaccgtgcacctgagaaaattttgaggtcgtcttgtgatgctagacagtgcattacagtaaactggtcctgaggcctgagaaaattttgaggtcgttttgtgatgctagacagtgcattacagtaaactttagcgtcgtcgagaccgaagtgggctgaaaagcgctgcatcgtgcagccgcgtgacagtgggcgtctttcgcatggttggttcgtcgctgcggtctgagtcgccaaagctgaattctgttgtcatcggggagtgattcgaaaagtttggaacgaacctatcggtggtcaggaatgaggtaagaatctgaaggactacaaggttggcttgcctgagcgagataccttaaccattaaggtgtgcatggcacttggcacctagtcaccagaccagatcaccctaaatggtggaaagaaaaaagcgaaagatctagcgcaagccccacccggatcaaagtttctctctctctcttttc

SEQ ID NO: 201375 - DNA, 1667 bp, Zea Mays
attgcacacaccaattttggcaacaatcaaaatggtagccatggtaaggttcatagggatccaaaccaaatagttctcaagagtcaagagtcctatggtggtgcggccaagcagatgtctgttgtctcctcccctgtcccctctcttcctgccactcctgtttcatcctagtgaagcagagatccatccatcctgaccttgattggctgattcttctgctggttgttcttctctggcgctcaaggccatatccttggtaaccgattgattaaggtgcgggcacaactcttttttgggggtgggggttggtctgttgccatgacaagtccatgcatggtgtggagatcaccaatgaggtgcttaagagcgtgaagatagggttgaccttccaaggaatggtagaattagttctatggattttcacagcaaggctaccaactatcttgtgacagctagcgacgatgaatcaatccgcctatacgacactcaaaatgcagtatgtttgaagactattaatagcaaaaaatatggggtcgaactagtgtgcttcactgataacccaaatattgtcttatattcatcaaaaaatggctgggatgggttgtctgcatctcattttgctctgagaaagaaaattttctctctggttcacttgaccgtactgttctcttatgggatcaacgggctgaaaaatcacagggcttactgcgtgtgcaagggaggcctgcagtttcatatgacgatcagggcatggtatttgcagttgcctatggtggtcacataaggatgtttgatgctcgaaaatttgaaaaggggccttttgagatcttctctgttggtaataacgattcagaggcccatgtcataaagttcagcagtgatggcaggcggattctgttaaccactaaagctggacgtgtccatgtgctagattcattccatggcaatagcattgcgtcgtgcaatgtgaagccagtggtaaccaactcaacactggaggcgtcgttcagccctgatggaaaccatatcatatctggctccggtgacggtagtgtttatgcttggaatgttaggagtggaaaggtcgcgcgctggggaagcacagacgacgaaccgccgctggtaaggtgggctccaggatccttgatgttcgtgacaggatcatcagaactgtcatgctgggttccggacctgtctaagctgggatcctttaccattagcaagtaggtgaaaatgatgagaggtggactgcccttgcaaaccctgttcgtccctgtatggtatgtcgtgtggctggttgaagcgactcatcctttagccaggtggccgtggtaaacttgcaacctgttacaattgaatgacttgtatagagcatcggctgtggcgatctggcttctgaagccagcggctagacaatgaagatggatccatgctttagttctgtaaaccggagattgtagctgagtattgctgtatctctttgtttctggaaggcgtcttggctcgtaaagattctgcaactcagagcagatggctaatatatagagagagcaaagaaacaatggatagctgggctggttgttctgttttcagttggattccttgtactgacgtgtgattccgttgtgcatgcaccgattcatatttcagattcgattgtttgccct

SEQ ID NO: 201376 - DNA, 1994 bp, Zea Mays
cgacattttggcaaggcaaatagacattggtattgcacacaccaattttggcaacaatcaaaatggtagccatggtaaggttcatagggatccaaaccaaatagttctcaagagtcaagagtcctatggtggtgcggccaagcagatgtctgttgtctcctcccctgtcccctctcttcctgccactcctgtttcatcctagtgaagcagagatccatccatcctgaccttgattggctgattcttctgctggttgttcttctctggcgctcaaggccatatccttggtaaccgattgattaaggtgcgggcacaactcttttttgggggtgggggttggtctgttgccatgacaagtccatgcatggtgtggagatcaccaatgaggtgcttaagagcgtgaagatagggttgaccttccaaggaatggtagaattagttctatggattttcacagcaaggctaccaactatcttgtgacagctagcgacgatgaatcaatccgcctatacgacactcaaaatgcagtatgtttgaagactattaatagcaaaaaatatggggtcgaactagtgtgcttcactgataacccaaatattgtcttatattcatcaaaaaatggctgggatggtaagtcctcttttatgttaatttgaaaatgattgatttcatgtactgaaaataagtaatagtgcagaatctctgcgtctactctcactgaatgataatcggtttcttagatattttaaaggtcaccttgacaggtatgtcacactatcttaaaataaattgtactccctactttcctatgtcaaacttgttgaacttcaaccaagcttataggaaaatgcacaaattaaatgtcttgatagtgcaatatactttcctaaggcttggtcaaatttagagaagtttgactgacgacaaaagccaaagggaactataatttggaaaggagggagtagttaacattttggtcgtgctaatgccagtggaggatgctaatatgctgtgttttgtccagggttgtctgcatctcattttgctctgagaaagaaaattttctctctggttcacttgaccgtactgttctcttatgggatcaacgggctgaaaaatcacagggcttactgcgtgtgcaagggaggcctgcagtttcatatgacgatcagggcatggtatttgcagttgcctatggtggtcacataaggatgtttgatgctcgaaaatttgaaaaggggccttttgagatcttctctgttggtaataacgattcagaggcccatgtcataaagttcagcagtgatggcaggcggattctgttaaccactaaagctggacgtgtccatgtgctagattcattccatggcaatagcattgcgtcgtgcaatgtgaagccagtggtaaccaactcaacactggaggcgtcgttcagccctgatggaaaccatatcatatctggctccggtgacggtagtgtttatgcttggaatgttaggagtggaaaggtcgcgcgctggggaagcacagacgacgaaccgccgctgcaagtaggtgaaaatgatgagaggtggactgcccttgcaaaccctgttcgtccctgtatggtatgtcgtgtggctggttgaagcgactcatcctttagccaggtggccgtggtaaacttgcaacctgttacaattgaatgacttgtatagagcatcggctgtggcgatctggcttctgaagccagcggctagacaatgaagatggatccatgctttagttctgtaaaccggagattgtagctgagtattgctgtatctctttgtttctggaaggcgtcttggctcgtaaagattctgcaactcagagcagatggctaatatatagagagagcaaagaaacaatggatagctgggctggttgttctgttttcagttggattccttgtactgacgtgtgattccgttgtgcatgcaccgattcatatttcagattcgattgtttgccct

SEQ ID NO: 201377 - DNA, 1674 bp, Zea Mays
cttttcaggatgactcagccctcttttagcaagtctatccgctgtccagagacgattttgtgcaaccagccagatgaagaaacgacattttggcaaggcaaatagacattggtattgcacacaccaattttggcaacaatcaaaatggtagccatggtaaggttcatagggatccaaaccaaatagttctcaagagtcaagagtcctatggtggtgcggccaagcagatgtctgttgtctcctcccctgtcccctctcttcctgccactcctgtttcatcctagtgaagcagagatccatccatcctgaccttgattggctgattcttctgctgaatggtagaattagttctatggattttcacagcaaggctaccaactatcttgtgacagctagcgacgatgaatcaatccgcctatacgacactcaaaatgcagtatgtttgaagactattaatagcaaaaaatatggggtcgaactagtgtgcttcactgataacccaaatattgtcttatattcatcaaaaaatggctgggatgaatctctgcgtctactctcactgaatgataatcggtttcttagatattttaaaggtcaccttgacagggttgtctgcatctcattttgctctgagaaagaaaattttctctctggttcacttgaccgtactgttctcttatgggatcaacgggctgaaaaatcacagggcttactgcgtgtgcaagggaggcctgcagtttcatatgacgatcagggcatggtatttgcagttgcctatggtggtcacataaggatgtttgatgctcgaaaatttgaaaaggggccttttgagatcttctctgttggtaataacgattcagaggcccatgtcataaagttcagcagtgatggcaggcggattctgttaaccactaaagctggacgtgtccatgtgctagattcattccatggcaatagcattgcgtcgtgcaatgtgaagccagtggtaaccaactcaacactggaggcgtcgttcagccctgatggaaaccatatcatatctggctccggtgacggtagtgtttatgcttggaatgttaggagtggaaaggtcgcgcgctggggaagcacagacgacgaaccgccgctggtaaggtgggctccaggatccttgatgttcgtgacaggatcatcagaactgtcatgctgggttccggacctgtctaagctgggatcctttaccattagcaagtaggtgaaaatgatgagaggtggactgcccttgcaaaccctgttcgtccctgtatggtatgtcgtgtggctggttgaagcgactcatcctttagccaggtggccgtggtaaacttgcaacctgttacaattgaatgacttgtatagagcatcggctgtggcgatctggcttctgaagccagcggctagacaatgaagatggatccatgctttagttctgtaaaccggagattgtagctgagtattgctgtatctctttgtttctggaaggcgtcttggctcgtaaagattctgcaactcagagcagatggctaatatatagagagagcaaagaaacaatggatagctgggctggttgttctgttttcagttggattccttgtactgacgtgtgattccgttgtgcatgcaccgattcatatttcagattcgattgtttgccct

SEQ ID NO: 201378 - DNA, 1857 bp, Zea Mays
aaaaggggcacttttcaggatgactcagccctcttttagcaagtctatccgctgtccagagacgattttgtgcaaccagccagatgaagaaacgacattttggcaaggcaaatagacattggtattgcacacaccaattttggcaacaatcaaaatggtagccatggtaaggttcatagggatccaaaccaaatagttctcaagagtcaagagtcctatggtggtgcggccaagcagatgtctgttgtctcctcccctgtcccctctcttcctgccactcctgtttcatcctagtgaagcagagatccatccatcctgaccttgattggctgattcttctgctggttgttcttctctggcgctcaaggccatatccttggtaaccgattgattaaggtgcgggcacaactcttttttgggggtgggggttggtctgttgccatgacaagtccatgcatggtgtggagatcaccaatgaggtgcttaagagcgtgaagatagggttgaccttccaaggaatggtagaattagttctatggattttcacagcaaggctaccaactatcttgtgacagctagcgacgatgaatcaatccgcctatacgacactcaaaatgcagtatgtttgaagactattaatagcaaaaaatatggggtcgaactagtgtgcttcactgataacccaaatattgtcttatattcatcaaaaaatggctgggatgaatctctgcgtctactctcactgaatgataatcggtttcttagatattttaaaggtcaccttgacagggttgtctgcatctcattttgctctgagaaagaaaattttctctctggttcacttgaccgtactgttctcttatgggatcaacgggctgaaaaatcacagggcttactgcgtgtgcaagggaggcctgcagtttcatatgacgatcagggcatggtatttgcagttgcctatggtggtcacataaggatgtttgatgctcgaaaatttgaaaaggggccttttgagatcttctctgttggtaataacgattcagaggcccatgtcataaagttcagcagtgatggcaggcggattctgttaaccactaaagctggacgtgtccatgtgctagattcattccatggcaatagcattgcgtcgtgcaatgtgaagccagtggtaaccaactcaacactggaggcgtcgttcagccctgatggaaaccatatcatatctggctccggtgacggtagtgtttatgcttggaatgttaggagtggaaaggtcgcgcgctggggaagcacagacgacgaaccgccgctggtaaggtgggctccaggatccttgatgttcgtgacaggatcatcagaactgtcatgctgggttccggacctgtctaagctgggatcctttaccattagcaagtaggtgaaaatgatgagaggtggactgcccttgcaaaccctgttcgtccctgtatggtatgtcgtgtggctggttgaagcgactcatcctttagccaggtggccgtggtaaacttgcaacctgttacaattgaatgacttgtatagagcatcggctgtggcgatctggcttctgaagccagcggctagacaatgaagatggatccatgctttagttctgtaaaccggagattgtagctgagtattgctgtatctctttgtttctggaaggcgtcttggctcgtaaagattctgcaactcagagcagatggctaatatatagagagagcaaagaaacaatggatagctgggctggttgttctgttttcagttggattccttgtactgacgtgtgattccgttgtgcatgcaccgattcatatttcagattcgattgtttgccct

SEQ ID NO: 201379 - DNA, 2120 bp, Zea Mays
gatcaatagtttcatcttcttgatcacaaaaggggcacttttcaggatgactcagccctcttttagcaagtctatccgctgtccagagacgattttgtgcaaccagccagatgaagaaacgacattttggcaaggcaaatagacattggtattgcacacaccaattttggcaacaatcaaaatggtagccatggtaaggttcatagggatccaaaccaaatagttctcaagagtcaagagtcctatggtggtgcggccaagcagatgtctgttgtctcctcccctgtcccctctcttcctgccactcctgtttcatcctagtgaagcagagatccatccatcctgaccttgattggctgattcttctgctggttgttcttctctggcgctcaaggccatatccttggtaaccgattgattaaggtgcgggcacaactcttttttgggggtgggggttggtctgttgccatgacaagtccatgcatggtgtggagatcaccaatgaggtgcttaagagcgtgaagatagggttgaccttccaaggaatggtagaattagttctatggattttcacagcaaggctaccaactatcttgtgacagctagcgacgatgaatcaatccgcctatacgacactcaaaatgcagtttttcagatgtttgaagactattaatagcaaaaaatatggggtcgaactagtgtgcttcactgataacccaaatattgtcttatattcatcaaaaaatggctgggatggtaagtcctcttttatgttaatttgaaaatgattgatttcatgtactgaaaataagtaatagtgcagaatctctgcgtctactctcactgaatgataatcggtttcttagatattttaaaggtcaccttgacaggtatgtcacactatcttaaaataaattgtactccctactttcctatgtcaaacttgttgaacttcaaccaagcttataggaaaatgcacaaattaaatgtcttgatagtgcaatatactttcctaaggcttggtcaaatttagagaagtttgactgacgacaaaagccaaagggaactataatttggaaaggagggagtagttaacattttggtcgtgctaatgccagtggaggatgctaatatgctgtgttttgtccagggttgtctgcatctcattttgctctgagaaagaaaattttctctctggttcacttgaccgtactgttctcttatgggatcaacgggctgaaaaatcacagggcttactgcgtgtgcaagggaggcctgcagtttcatatgacgatcagggcatggtatttgcagttgcctatggtggtcacataaggatgtttgatgctcgaaaatttgaaaaggggccttttgagatcttctctgttggtaataacgattcagaggcccatgtcataaagttcagcagtgatggcaggcggattctgttaaccactaaagctggacgtgtccatgtgctagattcattccatggcaatagcattgcgtcgtgcaatgtgaagccagtggtaaccaactcaacactggaggcgtcgttcagccctgatggaaaccatatcatatctggctccggtgacggtagtgtttatgcttggaatgttaggagtggaaaggtcgcgcgctggggaagcacagacgacgaaccgccgctgcaagtaggtgaaaatgatgagaggtggactgcccttgcaaaccctgttcgtccctgtatggtatgtcgtgtggctggttgaagcgactcatcctttagccaggtggccgtggtaaacttgcaacctgttacaattgaatgacttgtatagagcatcggctgtggcgatctggcttctgaagccagcggctagacaatgaagatggatccatgctttagttctgtaaaccggagattgtagctgagtattgctgtatctctttgtttctggaaggcgtcttggctcgtaaagattctgcaactcagagcagatggctaatatatagagagagcaaagaaacaatggatagctgggctggttgttctgttttcagttggattccttgtactgacgtgtgattccgttgtgcatgcaccgattcatatttcagattcgattgtttgccct

SEQ ID NO: 201380 - DNA, 2357 bp, Zea Mays
atttataaacactgccaattagtccgcgccggacctccaacccgcccccacggcccacgccatcctccgcaccccccacgccggacaaccggggctcgccgcgccgctacgctcccaagccggaactccgaactcgccgcgccgttctcactgtggcaccagagctgctcgatctgccccgccctcgcccctcgcccctcgcccccttgccggaggggcgcgaactcgcaaaaattattgggtgtgcatttatacacccatgttctttgctgaccctgtctggtagcagattaaggtttggttgcggaaaatattggtgggttgtccaccatgacgagtccgccaagggtgagcatggagatcaccgacgacatgctcaagagcatggaggtcggcctagctttccgggactataatggtagaattagttctatggattttcacagcaaggctaccaactatcttgtgacagctagcgacgatgaatcaatccgcctatacgacactcaaaatgcagtgtgagtgcaaaacgttattctgtcttcagaagtatttattataagtaaatagggtctctagttggttttttttttgtcttaaaagaagcaatctgttccattctagtagtttgctaggtttcactgttgtcctgtagaatttactcttcattttccagttcctaacattaatactgcactgatacaaattctcgtgtatgtttattagtttgttttagtgtctaatataacttatattcgactttggtattgcacacaacaagatttagtttatgacaacagtttagtaccttttgtagcgatttattttttttcctctaaactgtttctgtcttcgtgatatgtattggttgctcactcattcaagttttcagatgtttgaagactattaatagcaaaaaatatggggtcgaactagtgtgcttcactgataacccaaatattgtcttatattcatcaaaaaatggctgggatggtaagtcctcttttatgttaatttgaaaatgattgatttcatgtactgaaaataagtaatagtgcagaatctctgcgtctactctcactgaatgataatcggtttcttagatattttaaaggtcaccttgacaggtatgtcacactatcttaaaataaattgtactccctactttcctatgtcaaacttgttgaacttcaaccaagcttataggaaaatgcacaaattaaatgtcttgatagtgcaatatactttcctaaggcttggtcaaatttagagaagtttgactgacgacaaaagccaaagggaactataatttggaaaggagggagtagttaacattttggtcgtgctaatgccagtggaggatgctaatatgctgtgttttgtccagggttgtctgcatctcattttgctctgagaaagaaaattttctctctggttcacttgaccgtactgttctcttatgggatcaacgggctgaaaaatcacagggcttactgcgtgtgcaagggaggcctgcagtttcatatgacgatcagggcatggtatttgcagttgcctatggtggtcacataaggatgtttgatgctcgaaaatttgaaaaggggccttttgagatcttctctgttggtaataacgattcagaggcccatgtcataaagttcagcagtgatggcaggcggattctgttaaccactaaagctggacgtgtccatgtgctagattcattccatggcaatagcattgcgtcgtgcaatgtgaagccagtggtaaccaactcaacactggaggcgtcgttcagccctgatggaaaccatatcatatctggctccggtgacggtagtgtttatgcttggaatgttaggagtggaaaggtcgcgcgctggggaagcacagacgacgaaccgccgctgcaagtaggtgaaaatgatgagaggtggactgcccttgcaaaccctgttcgtccctgtatggtatgtcgtgtggctggttgaagcgactcatcctttagccaggtggccgtggtaaacttgcaacctgttacaattgaatgacttgtatagagcatcggctgtggcgatctggcttctgaagccagcggctagacaatgaagatggatccatgctttagttctgtaaaccggagattgtagctgagtattgctgtatctctttgtttctggaaggcgtcttggctcgtaaagattctgcaactcagagcagatggctaatatatagagagagcaaagaaacaatggatagctgggctggttgttctgttttcagttggattccttgtactgacgtgtgattccgttgtgcatgcaccgattcatatttcagattcgattgtttgccct

SEQ ID NO: 201381 - DNA, 2219 bp, Zea Mays
tgctattacacatggaataaacttagttcaaaaataatctgatagacgataaatattcgataactatgtgtattgtttaaccctattttttatttataaacactgccaattagtccgcgccggacctccaacccgcccccacggcccacgccatcctccgcaccccccacgccggacaaccggggctcgccgcgccgctacgctcccaagccggaactccgaactcgccgcgccgttctcactgtggcaccagagctgctcgatctgccccgccctcgcccctcgcccctcgcccccttgccggaggggcgcgaactcgcaaaaattattgggtgtgcatttatacacccatgttctttgctgaccctgtctggtagcagattaaggtttggttgcggaaaatattggtgggttgtccaccatgacgagtccgccaagggtgagcatggagatcaccgacgacatgctcaagagcatggaggtcggcctagctttccgggactataatggtagaattagttctatggattttcacagcaaggctaccaactatcttgtgacagctagcgacgatgaatcaatccgcctatacgacactcaaaatgcagtgtgagtgcaaaacgttattctgtcttcagaagtatttattataagtaaatagggtctctagttggttttttttttgtcttaaaagaagcaatctgttccattctagtagtttgctaggtttcactgttgtcctgtagaatttactcttcattttccagttcctaacattaatactgcactgatacaaattctcgtgtatgtttattagtttgttttagtgtctaatataacttatattcgactttggtattgcacacaacaagatttagtttatgacaacagtttagtaccttttgtagcgatttattttttttcctctaaactgtttctgtcttcgtgatatgtattggttgctcactcattcaagttttcagatgtttgaagactattaatagcaaaaaatatggggtcgaactagtgtgcttcactgataacccaaatattgtcttatattcatcaaaaaatggctgggatgaatctctgcgtctactctcactgaatgataatcggtttcttagatattttaaaggtcaccttgacagggttgtctgcatctcattttgctctgagaaagaaaattttctctctggttcacttgaccgtactgttctcttatgggatcaacgggctgaaaaatcacagggcttactgcgtgtgcaagggaggcctgcagtttcatatgacgatcagggcatggtatttgcagttgcctatggtggtcacataaggatgtttgatgctcgaaaatttgaaaaggggccttttgagatcttctctgttggtaataacgattcagaggcccatgtcataaagttcagcagtgatggcaggcggattctgttaaccactaaagctggacgtgtccatgtgctagattcattccatggcaatagcattgcgtcgtgcaatgtgaagccagtggtaaccaactcaacactggaggcgtcgttcagccctgatggaaaccatatcatatctggctccggtgacggtagtgtttatgcttggaatgttaggagtggaaaggtcgcgcgctggggaagcacagacgacgaaccgccgctggtaaggtgggctccaggatccttgatgttcgtgacaggatcatcagaactgtcatgctgggttccggacctgtctaagctgggatcctttaccattagcaagtaggtgaaaatgatgagaggtggactgcccttgcaaaccctgttcgtccctgtatggtatgtcgtgtggctggttgaagcgactcatcctttagccaggtggccgtggtaaacttgcaacctgttacaattgaatgacttgtatagagcatcggctgtggcgatctggcttctgaagccagcggctagacaatgaagatggatccatgctttagttctgtaaaccggagattgtagctgagtattgctgtatctctttgtttctggaaggcgtcttggctcgtaaagattctgcaactcagagcagatggctaatatatagagagagcaaagaaacaatggatagctgggctggttgttctgttttcagttggattccttgtactgacgtgtgattccgttgtgcatgcaccgattcatatttcagattcgattgtttgccct

SEQ ID NO: 201382 - DNA, 911 bp, Zea Mays
ccacccaaattttcgtctatataccacgtgtgcgcgctggagtctggaggtgcaggcagcggataacgtgctaaagtgtcctcactgctgctctcctccgctccgcagctcatggcttcctcggtctccctccgtggcgccatcctccagcgcccccacctcacgccccgccccgacgcccgccgcgcgcccacgacgaggcgccgcgccgtgcctgcaaagatctgctgcatcggatgggaccccgagggcatcctgggcgcgccgcagggcggccacatcgcgcgcctcgagttccgccgccgcctcgagagggactccgaggcgcgcgaggacttcgagcgccaggtgcgcgaggagaaggagcggcgccgcagcgagcgcgaggcgcgggtgatcccggacacggacgccggcctcgtcgagttcttcctcgacaccgacgcgcgcgagatcgagatcgagatcggcaggctgcggcccaggctcagccaggacttcttcggccacgtctcgcgcgagatagcgcagatcaaatttgcagtcaccaggacagcggagatggaagacagactgatcgagctggaggcgatgcagaaggttcttcttgagggagttgaggcgtacgacaagttgcagaacgaccttgttacagcgaaagaacggctcatgaagattctgcagtcaagtgacagaaaatcgacactgctggaaatggtggagcggaacgagctcaatatatccatactaacacttctcgatgagaacatcgcgagcgcgaagacgagtaatcaggatgaggcggccgctttcatggaggacgtgaggtcatctcttgtgaaatatataacaatatagatctgggacgcttttacataccaatgggatggcagtgccatggagacaacgag

SEQ ID NO: 201383 - DNA, 1409 bp, Zea Mays
tagcaacaacacaaaggagagttattgaactttccccagaagaggctgagagcacaactggtggatatgcgaaaagcattagccacgtaatcattggcttaaagactgtcaaagggactaagcaattgaaattagacccttcaatttatgatgctttgatcaaggaaaaggtggcagtgggtgatgttatatacattgaagcaaatagtggagcagtgaaaagagttggtagatgtgattcttttgctacagaatatgatcttgaagctgaagagtatgttcctatccccaaaggtgaagtccataagaaaaaggaaatagtgcaggatgtcacactccatgaccttgatgcagcaaatgcccagccacaaggtggccaagatattttgtcccttatgggccagatgatgaagccacggaagactgaaatcaccgaaaagctacgccaagaaatcaataaggtggtaaacagatatatcgacgaaggaatcgcagagcttgtacctggtgttttgttcattgatgaggtccacatgttggatattgaatgcttttcttatcttaaccgtgcattggagagcccattatcaccaattgtgatactcgctacgaatagaggaatatgtaatgtgagaggaaccgatatgacgagtccacatggtataccagtggaccttctagataggttggtgattattcggacagaaacatatggccctactgagatgatacagatactggctatccgagcacaagtggaagagattgatatcgatgaagaaagtcttgcttatttaggcgagatcggacagcagacatctttgagacatgctattcagttgctatcacctgccagcgtggtcgcaaagaccaacgggagagaaaagatgtgcaaggctgacctcgaggaagtcagcgggctctatttggatgccaaatcctcggctcgcctgctccaggagcaacaagaaagatacatcacctagacttgcatctcctgctgtggaaggaaaagcctcgaagagaaatgcattctgcaaagtgcgtcgatctgcttcagtatgtcgtagtctacaagtcttggagagagcacgtttctgcggggaaggaaaactgtttgaattttgtagtacctgttttttgttagcctccagcgaagacttgattccggcatattgcttgttcacgcaccgttaacaccgattaagattggcccagccgtgcaggaattgccgggtgtgttttcaccccctcgctaatcgatgtccagaatctgtgtgcccacgggtgttgtattgaccctagctttgtaaccatgcacatgatttcttttttaacgctgatggatggcacctggatctctgtccatggccatcgtaatcccactgtctggagcagggtttcatgaa

SEQ ID NO: 201384 - DNA, 1711 bp, Zea Mays
aaagcacacgcacaccaaactaccaaaccaacagagcaacatcaatgcgccttccgccgccatcaaccaccgcggccgcagccgctgccaccgtcggggccgtactcgccgcagtcgccctccgccgctacctgtccgcttctcgccaccgcgaacccgcccgcgtgcccatgtccgcggccgccggagccaccacgcttgtggtgtacggcaaatcggcgcaggagcaggagctgctggcctccgcggccggttccgtcgtcctcggtgagggcgatccgtccggtgatgtcgccatcgcgctcgcctacgagagcgcgggcttcgacgccgccgcgtacatgagcgcgctccgggcgcgccggttcgggaggtggatgctctggacgcccaggattggttccacgcaggatctcatcacgcggaactttgcaaagctaccggtgggcgttgtgtgcgttgccgacgtgcagttcaaagggagaggccgttcaaagaatgtgtgggaatcgccaccaggctgtctcatgttctctttcacatcacagatgcaggatgcacggaagttgccccttatgcaatatgttgtctgcctttcgataactgaagctatcaaggagctgtgccgtgccaagaacttgatgtgagaataaaatggcctaatgatctctatctgaaaggattaaaagttggtggcattctatgtacctcatcttatgaacccaaagtgtacaatatttgtactggtgttggtttgaatgttgacaatgagaagcctaccacatgcttgaatgctgcacttcaagaggcaaatcatacatcacccatattgaaacgagaagacatattggcatacttcttcaataaatttgaaaaccttttcgagatcttcatgaaccatggatttcaggttcttgaggagcaatactataactcatggcttcatagtggccagagagttgtcgtacatgatgcacatgaaaacaagtcaggcagtgtcgtcaccatccaggggttaacaccaactgggtacttacatgctattggtgaggataacaaaagctatgagttgcacccagatggcaacagctttgatttcttcactggattggtgaggaggaagatggaagcttagggtatcaatacaatgggatacatggatagattcaacagactgtacaaatgaatggaatgagaacatgatttaagcatcagccccctccatctgtattcaaaccttgtgcttggaataaatagaaggaatgctcttatcacaatcctgaacggccgctttgagacctcaaaccttaacaagtgccccaccctcgcaattccatttgcgacagctcagcataaacaattaagaagacaatcaaccgtgactgaagcccaggcatgagttcagatctcaggtgaagaaatcgcagtgactgaagaccgtttacttgaatgattcatatttcataggaagaatgcatgaaaattatgaagcacatctgctccattgatgggcggacagcttcttcggcagtgtttggggctcatgtttgcatcaggttctgtataactgcagtgttttttctattagtgaactaagttggaaatctgctgcaactgcaagatttgtagcggtgatgtatgagttggtaacttgtatttgcacagatgcttaactgaaaggacatgttatatattatccatgctgtcgttg

SEQ ID NO: 201385 - DNA, 1659 bp, Zea Mays
aaagcacacgcacaccaaactaccaaaccaacagagcaacatcaatgcgccttccgccgccatcaaccaccgcggccgcagccgctgccaccgtcggggccgtactcgccgcagtcgccctccgccgctacctgtccgcttctcgccaccgcgaacccgcccgcgtgcccatgtccgcggccgccggagccaccacgcttgtggtgtacggcaaatcggcgcaggagcaggagctgctggcctccgcggccggttccgtcgtcctcggtgagggcgatccgtccggtgatgtcgccatcgcgctcgcctacgagagcgcgggcttcgacgccgccgcgtacatgagcgcgctccgggcgcgccggttcgggaggtggatgctctggacgcccaggattggttccacgcaggatctcatcacgcggaactttgcaaagctaccggtgggcgttgtgtgcgttgccgacgtgcagttcaaagggagagatgcaggatgcacggaagttgccccttatgcaatatgttgtctgcctttcgataactgaagctatcaaggagctgtgccgtgccaagggactaccagaacttgatgtgagaataaaatggcctaatgatctctatctgaaaggattaaaagttggtggcattctatgtacctcatcttatgaacccaaagtgtacaatatttgtactggtgttggtttgaatgttgacaatgagaagcctaccacatgcttgaatgctgcacttcaagaggcaaatcatacatcacccatattgaaacgagaagacatattggcatacttcttcaataaatttgaaaaccttttcgagatcttcatgaaccatggatttcaggttcttgaggagcaatactataactcatggcttcatagtggccagagagttgtcgtacatgatgcacatgaaaacaagtcaggcagtgtcgtcaccatccaggggttaacaccaactgggtacttacatgctattggtgaggataacaaaagctatgagttgcacccagatggcaacagctttgatttcttcactggattggtgaggaggaagatggaagcttagggtatcaatacaatgggatacatggatagattcaacagactgtacaaatgaatggaatgagaacatgatttaagcatcagccccctccatctgtattcaaaccttgtgcttggaataaatagaaggaatgctcttatcacaatcctgaacggccgctttgagacctcaaaccttaacaagtgccccaccctcgcaattccatttgcgacagctcagcataaacaattaagaagacaatcaaccgtgactgaagcccaggcatgagttcagatctcaggtgaagaaatcgcagtgactgaagaccgtttacttgaatgattcatatttcataggaagaatgcatgaaaattatgaagcacatctgctccattgatgggcggacagcttcttcggcagtgtttggggctcatgtttgcatcaggttctgtataactgcagtgttttttctattagtgaactaagttggaaatctgctgcaactgcaagatttgtagcggtgatgtatgagttggtaacttgtatttgcacagatgcttaactgaaaggacatgttatatattatccatgctgtcgttg

SEQ ID NO: 201386 - DNA, 1227 bp, Zea Mays
cacccgacgcctaccgcgccgccaagggggaggccggcaagaacgaggtcgccgcggatggccacaagcctggccccgtgccattcttcgctgcgggtattagctcggtgcttcaccccaaaaatccatttgctccaacattgcattttaactaccgttactttgagacagatgcacccaaaggcttaaaatagatgaagtttcctagatattggtgagagaactgggttcatcttatttttatttactttaacaagatgcacctggtgcaccaagacagtggtggtttggcggtggtactgacttgactccctcatacatcattgaagaggacgtgaagcattttcattctgttcaaaagcaagcatgtgataaatttgatccaagttttcacccaagattcaaaaaatggtgtgatgattatttctatattaagcaccgtaacgagcggcgtgggcttggtggaatattttttgatgaccttaatgattacgatcaagaaatgcttctcaacttcgctacaaaatgtgcggactctgtacttcctgcctacataccgatcatagaacggcggaaggacaccccattcaatgaggagcacaaggaatggcagcagttgaggagaggtcgttatgtggagttcaaccttgtctacgaccgtggtacaacattcggcctaaagactggaggaagaatcgagagcatactcgtgtcccttccactcacagcacggtggcagtatgatcataaaccggaagaagggactgaagaatggaaacttctggacgcgtgcataaatccgaaggattggatctgattagccgaagtttctttattcttgagatcttttgttagttttcccttgtgtagcgctaagatatcagaccacgtgtagtttctttatttcttttgtatatctgtaggatcgtgaacaaatctgatataattctgcagctgtttgtatctaatctgctgctcccccccttccccccccccccatgtgaatgagagaatcattgccttgtgtatctacaaaggcttcaggtgtatcatttacctcctgcctattggaaatactcactgatgcaggcaggtctgtatatacccatagtgcttgatgttgtgcatcaacagcaacaaatagtttaaattgtttagggccacaaaacatttacagtttcaacaattgagccttatcatattattaggaaataaatcatgttattt

SEQ ID NO: 201387 - DNA, 1400 bp, Zea Mays
gtctgtcaccgtagggcacataggctctgggctctggcgctaatgttcgagcaaggcgctgctcctgttgctgtagaagggattttttgaccaaccctccaaccggtgcggcttcgatctttcctctcctatcacctgaatccctcgagtattcatcgccggcgcagcgcggtctcttcccttcgctggagaagggggaaggggacacgaacggagcagaaggccatggacacgatgcggggcgcgctggagcgggccaagatgctggtgggcatggaggtcgacgaggagtccgcgttgccaccgcccgaggagcagtccttcttcgacgacatcaatcggcactgcaccctcaacaccactcagaggctctatggtttcgcgatatgcttggctgccggactgacgtgcacattcttgtcaatgcttgtcttcttcaatccagtgaaatttggggtagcattcacccttggcaatttgatggcccttggaagcatttctcataggccccaaaagacagtttgatatgatgcttgattctgtgcgaatatatgccactgctatatatattgcaagcatcataattgctctattctgtgctatctacgttcgcagcaagctgctgactctagtggccatcattttggaatttggtgcccttatttgaataattgaccgtcattcggagccagacaccatcccatgaggtatttctgtgtatttatagtgacgatatatttagcgaatgaaatttgaaagaattgtttgacatgtctctagggagtagggataaaagtgaaaaaatggaaattcccatccgggttttgttttttgtgggtttgcatcttagggtaatatggaaatggtaaccgaaaatatgaaaacaaaattatggaaaataaagctattttaggtctttaaaatcgtttccgagttctccatatttcaccaataattactgatggtaaatttcccttttttcccacccttattcaagagcctaagagggtaaaagactaaggctctgtttgtttccttccagtattatataatttagcttatggattatagaagcacctaatgagctgcttatgaattatcataatctagttatctagatcatataatccacctaataatctatgttgtttgtttgtaccttatttaagctggattatataatctagagagtaaacgaacagggcctaaaagacctagcccagccaaacccaacaggattcacttttctcaagtactttattgcattgctgtaatatgtgtatatatatgatgacttgaatatcgatcatgcattcattccttagtcgttcttatctatggtgatgcgatacggttttgtgttctgactaagaattatcagttccccaccaatatcaatc

SEQ ID NO: 201388 - DNA, 1492 bp, Zea Mays
caccgctttaaatccgcctcctcccagcgtctccctcctcccggcctgtcccctcacctccctccccctatctctccaccgccgcagctagctgcgacgtcatgcactcgccggcgccaccgccaccgcatactatctacaattagccagccgtaggcttacctatcctgtgtcaagcaagcctctcgcaagcaacaaggaaggaagctagctagttttatagctgctgtcggcggcggcggctgaagcgacgtgcctgagctaggatttaggttgagatcaggagagggagaaggcggcggcgatggggcgcgggaaggtgcagctgaagcggatcgagaacaagatcaaccgccaggtgacattctccaagcgccgctcggggctactcaagaaggcgcacgagatctccgtgctctgcgacgccgaggtcgcgctcatcatcttctccaccaagggcaagctctacgagtactctaccgattcatgtatggacaaaattcttgaacggtatgagcgctactcctatgcagaaaaggttctcatttccgcagaatatgaaactcagggcaattggtgccatgaatatagaaaactaaaggcgaaggtcgagacaatacagaaatgtcaaaagcacctcatgggagaggatcttgaaactttgaatctcaaagagcttcagcaactagagcagcagctggagagttcactgaaacatatcagaacaaggaagagccagcttatggtcgagtcaatttcagcgctccaacggaaggaggagaacaaggttctgcagaaggagaaagcgttactcctgcatgcagctcgcggagaagcagaaagaccagcggcagcaagtgcaacgggaccaaactcaacagcagaccagttcgtcttccacgtccttcatgttaagggaagctgccccaacaacaaatgtcagcatcttccctgtggcagcaggcgggagggtggtggaaggggcagcagcgcagccgcaggctcgcgttggactgccaccatggatgcttagccatctgagctgctgaaggtttgccctcaccgtcgcgatgtgatagcccaaaatccagcaagtcttccccggaccccggactgtccccgcttctccgcctggtgcagtatcgtcgtgatcgcgagaagcagcagcagcggtttgccgtattttttaccactgtgtataagtagcatatctgcaatgtgtatattttgttcaccgttcctgctggggcggccgcacggtactttacgcatgtaatatatgtgcttcatcaaatcactttcactaccatagcatgtgccggtttgtggtagtttcatgtctcacataatgggtacacattcatatcccagtggtctcggttcttcacatcaaagttctatttcttcatgcagcaacttctatatcttcatggccgttcaaaaatacgtacagattaaagatgcagctgcatatgtaacatcaatagagaaa

SEQ ID NO: 201389 - DNA, 720 bp, Zea Mays
ggctttctgaatcatgtcttcattaaaactaaaccctaggaggtcatcactggtgtaccacatacaagtgccattgattggtgggctcttggaattctcttgtatgaaatgttgtatggacgtacaccttttcgaggaaagaacaggaaaaggacatttcataatatcctgcacaaagaccttacatttccaagtagcattccgagagatccctcttctcgacttggttcaagtgctgctgcaaacgatatcaagcaacatcccttttttgaagatatacactggccactcatccgttgcatggagcccccagagcttgatgttccactgaaactaactcggaaggaacctgaacaaaaagtgaagcctgaggaggatatatactcatgttcagattattgagacattttaaggttgtacgatcccccctcccgaccccgtgcatgactttcagcctgaagagattttatattaccgagtggaaataacgttgctgagcatgtacatagtaataaaagaggtttataggcatgcaagatttccagcctgaattgcacaagaggtcgttgtaagtcattcttttggttaggttaagtgaataatccatcaacaggataaagttcttgtaaatgtacactttctttggcatatataataaaaatcttactaatttccgttggtcaaaggtctacgcaaattaggctttgcccacaaaaatat

SEQ ID NO: 201390 - DNA, 3318 bp, Zea Mays
ggattgcattatccgctcgctgtgcctgccctgcttcttccgccattctttccgtctctgctctactttcttggtcgcctgtccggaggctcctccccgcggcccctgagcaaactgtaccatagccgcgtgattgattggttcacgggagggacagggagcggcgtcaagctggttttgaagcggtgcttgcttcggcagatggttgttctcccgcacctgtcctaccgccgttgatcgcgagagtctcgtacgtagtcttcgggggcaagcatccatggcggagtcatcgtcaaggcaagcggccgagatggtggagaagtggatggcgttcccgtctggctccgacgccggcagcggcttcgcgttcccggcgccacgctcagtgtcgggcgcgggcaaggagatagtggagctggcgtcgccctccacagccacggccacggccacggccacgaccacggccagtgccggcaacaggcaggcctcgttccagcgcggccgcgacagtggcgtgggcagcaccaggtcgtccatggacggcgcgcgcgcgtcgggggactcgtcgatgccgcgggtgtcgcaggagctcaaggacgcgctgtccagcctgcagcagaccttcgtggtctccgacgccacccgcccggactgccccatcatctacgccagcgccggcttctacaccatgaccggctacacccccaaggaagtcaccggccgcaactgccgcttcctgcagggccccgacacggacatgaacgaggttgccaagatccgggacgccgttaaaaccggccgcagtttctgcggccgcttgctcaactaccgcaaggacggcacgcccttctggaacatgctcaccgtcacccccatccgcgacgacaacggcaaggtcatcaagttcatcgggatgcaagtcgaggtgagcaagtacacggaggggctcagcgaaaagcgcatgcggccaaacgagatgccagtgtccctcatccactacgacgaccggcagaaggagacggcaatgtcatcgatcacggaggtggtgcagacggtgaagcacccgcgcgctcgctccgagggtgaacaggagcccgtggagcctgcaccgcccgtcatggcgtcgccgttggtggcccctggcacgccgtcgggcggtgccagcctcaagtccccgctctgggacgtgaagaaggaggactcacggctgagccggaagtcgagccgccgctcttccctcatggggttcaagatggggaagaggagctcgataggaagcaaggatgcccttccagcggaggtggaggccccggcgccggcgccggcgccaccggagtcaacgacggagaagcagcgcaagaacagctgggagcaagaggggagggagagggacatcaggcaggggatcgatctagccacgacactagagcgtatcgagaagaacttcgtcatcacggatcccaggctccccgacaaccccatcatcttcgcgtcggatagcttcttggagctgacggagtacacgcgggaagagatcctcgggaggaattgcagatttcttcaagggccagagaccgacatgtccacagttgataagatccgggaagctatccgggaacagaaagaaatcactgtccagctaatcaactacaccaagagcgggaagaagttttggaacttgttccacctacagccaatgcgagaccagaaaggagagcttcaatacttcattggagttcaattggatggaagcgaccatgttgaaccccttaggaatcgtctctctgagaacactgaactacaaagtgctaaattggtcaaagctacggcagagaatgtggatgaagcagtcagagagcttcctgatcccaacctgagaccagaggatctatgggacatttactcacgatatgtttccccaaagcctcataaacgttacaactcttcttggattgcgatggaaaagattataaaatctggtgtgaagattggcttgaagcacttcaagcctataaaacctttgggttatggtgacactggcagtgtacatttggtggagttgcaaggaagcggtgaattatttgcaatgaaggcaatggacaaatcagtgatgttgaaccgcaacaaggttcatcgagcttgtatggaaagagaaatatactcactattggatcatccttttctcccaacattatatacttcattccagacaccaacacatgtttgtctcataacagacttttgtcctggaggagaattatttgcactactcgatatgcaaccaatgaaacttttcagagaagaatctgcaaggttttatgctgcagaggttgtaattggcctggagtatctccattgccttggaataatataccgtgacctaaagccagaaaacattttgctccaagaggatggccacatcgttctgactgattttgacctctcttttttgacttcctcaaaacctcatgtgataaagcattctacatcaaggcgaagaagatctaaggagtatctgcccccaagttttgtttcagatcctgccactccatcaaattcttttgttggaactgaagagtacatagctccagaggtcatcactggtgtaccacatacaagtgccattgattggtgggctcttggaattctcttgtatgaaatgttgtatggacgtacaccttttcgaggaaagaacaggaaaaggacatttcataatatcctgcacaaagaccttacatttccaagtagcattccggttagtcctgcggctaagcaattaatccatggattgctacagagagatccctcttctcgacttggttcaagtgctgctgcaaacgatatcaagcaacatcccttttttgaagatatacactggccactcatccgttgcatggagcccccagagcttgatgttccactgaaactaactcggaaggaacctgaacaaaaagtgaagcctgaggaggatatatactcatgttcagattattgagacattttaagggcaggttgtacgatcccccctcccgaccccgtgcatgactttcagcctgaagagattttatattaccgagtggaaataacgttgctgagcatgtacatagtaataaaagaggtttataggcatgcaagatttccagcctgaattgcacaagaggtcgttgtaagtcattcttttggttaggttaagtgaataatccatcaacaggataaagttcttgtaaatgtacactttctttggcatatataataaaaatcttactaatttccgttggtcaaaggtctacgcaaattaggctttgcccacaaaaatat

SEQ ID NO: 201391 - DNA, 3326 bp, Zea Mays
caaggacaaggccggattgcattatccgctcgctgtgcctgccctgcttcttccgccattctttccgtctctgctctactttcttggtcgcctgtccggaggctcctccccgcggcccctgagcaaactgtaccatagccgcgtgattgattggttcacgggagggacagggagcggcgtcaagctggttttgaagcggtgcttgcttcggcagatggttgttctcccgcacctgtcctaccgccgttgatcgcgagagtctcgtacgtagtcttcgggggcaagcatccatggcggagtcatcgtcaaggcaagcggccgagatggtggagaagtggatggcgttcccgtctggctccgacgccggcagcggcttcgcgttcccggcgccacgctcagtgtcgggcgcgggcaaggagatagtggagctggcgtcgccctccacagccacggccacggccacggccacgaccacggccagtgccggcaacaggcaggcctcgttccagcgcggccgcgacagtggcgtgggcagcaccaggtcgtccatggacggcgcgcgcgcgtcgggggactcgtcgatgccgcgggtgtcgcaggagctcaaggacgcgctgtccagcctgcagcagaccttcgtggtctccgacgccacccgcccggactgccccatcatctacgccagcgccggcttctacaccatgaccggctacacccccaaggaagtcaccggccgcaactgccgcttcctgcagggccccgacacggacatgaacgaggttgccaagatccgggacgccgttaaaaccggccgcagtttctgcggccgcttgctcaactaccgcaaggacggcacgcccttctggaacatgctcaccgtcacccccatccgcgacgacaacggcaaggtcatcaagttcatcgggatgcaagtcgaggtgagcaagtacacggaggggctcagcgaaaagcgcatgcggccaaacgagatgccagtgtccctcatccactacgacgaccggcagaaggagacggcaatgtcatcgatcacggaggtggtgcagacggtgaagcacccgcgcgctcgctccgagggtgaacaggagcccgtggagcctgcaccgcccgtcatggcgtcgccgttggtggcccctggcacgccgtcgggcggtgccagcctcaagtccccgctctgggacgtgaagaaggaggactcacggctgagccggaagtcgagccgccgctcttccctcatggggttcaagatggggaagaggagctcgataggaagcaaggatgcccttccagcggaggtggaggccccggcgccggcgccggcgccaccggagtcaacgacggagaagcagcgcaagaacagctgggagcaagaggggagggagagggacatcaggcaggggatcgatctagccacgacactagagcgtatcgagaagaacttcgtcatcacggatcccaggctccccgacaaccccatcatcttcgcgtcggatagcttcttggagctgacggagtacacgcgggaagagatcctcgggaggaattgcagatttcttcaagggccagagaccgacatgtccacagttgataagatccgggaagctatccgggaacagaaagaaatcactgtccagctaatcaactacaccaagagcgggaagaagttttggaacttgttccacctacagccaatgcgagaccagaaaggagagcttcaatacttcattggagttcaattggatggaagcgaccatgttgaaccccttaggaatcgtctctctgagaacactgaactacaaagtgctaaattggtcaaagctacggcagagaatgtggatgaagcagtcagagagcttcctgatcccaacctgagaccagaggatctatgggacatttactcacgatatgtttccccaaagcctcataaacgttacaactcttcttggattgcgatggaaaagattataaaatctggtgtgaagattggcttgaagcacttcaagcctataaaacctttgggttatggtgacactggcagtgtacatttggtggagttgcaaggaagcggtgaattatttgcaatgaaggcaatggacaaatcagtgatgttgaaccgcaacaaggttcatcgagcttgtatggaaagagaaatatactcactattggatcatccttttctcccaacattatatacttcattccagacaccaacacatgtttgtctcataacagacttttgtcctggaggagaattatttgcactactcgatatgcaaccaatgaaacttttcagagaagaatctgcaaggttttatgctgcagaggttgtaattggcctggagtatctccattgccttggaataatataccgtgacctaaagccagaaaacattttgctccaagaggatggccacatcgttctgactgattttgacctctcttttttgacttcctcaaaacctcatgtgataaagcattctacatcaaggcgaagaagatctaaggagtatctgcccccaagttttgtttcagatcctgccactccatcaaattcttttgttggaactgaagagtacatagctccagaggtcatcactggtgtaccacatacaagtgccattgattggtgggctcttggaattctcttgtatgaaatgttgtatggacgtacaccttttcgaggaaagaacaggaaaaggacatttcataatatcctgcacaaagaccttacatttccaagtagcattccggttagtcctgcggctaagcaattaatccatggattgctacagagagatccctcttctcgacttggttcaagtgctgctgcaaacgatatcaagcaacatcccttttttgaagatatacactggccactcatccgttgcatggagcccccagagcttgatgttccactgaaactaactcggaaggaacctgaacaaaaagtgaagcctgaggaggatatatactcatgttcagattattgagacattttaaggttgtacgatcccccctcccgaccccgtgcatgactttcagcctgaagagattttatattaccgagtggaaataacgttgctgagcatgtacatagtaataaaagaggtttataggcatgcaagatttccagcctgaattgcacaagaggtcgttgtaagtcattcttttggttaggttaagtgaataatccatcaacaggataaagttcttgtaaatgtacactttctttggcatatataataaaaatcttactaatttccgttggtcaaaggtctacgcaaattaggctttgcccacaaaaatat

SEQ ID NO: 201392 - DNA, 1283 bp, Zea Mays
gcaggcgtcgtcgtcgtccgtctgcatttcactggagtgcttgatggctgccgcaaggggcattaaccagcttctgaagagaattctccacaaccagtccgctggtccatggctgctttcttcatttcggggaaatcatgaagagtcctctgctggattgagagcattggcgcttcttggagttggtgcctccggtcttttgagttttgctacaatagcatctgctgatgaagctgagcatggtttggcagccccagattatccgtggccacatgctggcatcatgagctcttatgatcatgcatcaattcgccgagggcatcaagtttacacacaagtttgtgcttcttgtcactccatgtccttgatttcataccgtgatttggttggggtggcctatactgaggaggaaacaaaggcaatggctgctgagattgaggtcgttgatggtcctaatgatgagggtgaaatgttcacccgccctggtaaactcagcgatcgctttccacagccttatgcaaatgagcaagcagcccgatttgctaatggtggcgcctacccgccggaccttagtcttatcacaaaggcaaggcacaatggtcagaactatgttttcgctcttcttactggataccgtgatccacctgctggtgttcagattcgtgagggtctgcactacaacccctacttccctggtggtgccatagccatgcccaagatgctcaatgatggagctgttgagtatgaggatggtactcctgcaactgaagcccagatgggtaaggatgttgtatcattcctttcatgggcagctgagcctgagatggaagagagaaagctgatgggagtgaaatggatctttctactatcactagcgcttcttcaagctgcatactaccgccgcatgaggtggtcagtcttgaagtcccgtaagctggtcctggatgttgtcaactgaggactaccattacccttttttatatttaaatatgagctgttaaggagtattcaaaataatgaatttgtgatgtacaattttgccactgggggctaggttccatgcctagagattattttgttttctttactctgctgagctgcaaaagcatttcaccaacgggtacatttcacgtttttttggtttgcaatgcctcgatgttatcagcaaccttgtaacttaacagctgatgagagttgataaattcttgtgctatgaaatacacctatcgtatgtcttggtctcgcttgcgggagtattgtgtttgctattcagttattcttgc

SEQ ID NO: 201393 - DNA, 2230 bp, Zea Mays
ccttggcagaatcgcagcgcagcgcacacgcacggacggccccgagggtttagagcccaacttctctcttcacatcgccgcgaagccagctccccgatgcgatctggccgagggaagatggcgactccgccgccgccaatccgccccgccgccgcgctcctcctcctcgtcctcgctggcgtcctcgcctccgccgcgagcgccgatctcgtcatctccaaggcagatcggagggttgatctgacctcgcatatcgttcgcgtcctcgcttccctcaaggctgaaaatgttggaccagaccctgtctctcaagttttactgccttttcccaatattcaagccaagaacttggcagctattagagcattcggcagtgaagggaaagtgaagggtcaaagtactgttctgccaattgaagttgttcaaccttctggagctcccccggagctgacattcttttcagcattgttgcccaaacctttggaaaaaggaaagactctgtacttggatgttctgactgtgttcacacactctcttcaaccattcccagaagaaatcactcaagccgaagcacaacttgttgtctatcaggatagtgctcactatctgtcaccttaccctgttaaggctcagacacttgctatcagattgcctggtggaagggttgaatcatacacaaggcatccaaacgcaaaacttgtggattcagaactgaaatatggaccatttcatgaccttcccccgttctcctacttacctgtgattgtgcattttgagaacaacaatccttttgcagttgcaaaggaagttataagggagattgagatatctcactggggaaatgtacagattacggaacactacaacattgctcatggtggtgccagactcaagggtgaattttccaggattgattatcaatctagaccttacgtaaggggtgtttcatcttttagacatcttattgcaaaactgcctccaagggcacactctatttattaccgagatgagattggtaatatttccacatcacatttgtggagtgattctatgaagaaccaaggtttccattgtttggtgggtggcaaacaaccttcactgttggttatggtttaccacttgaagactttgttttctattctgatggaaagagatttctcaatatcacatttggttctccattggaggaaattctcattgaaaagcttatcgtaaaggttgttctacctgaagggtcaaaggatatcgaagtttcagctccctttccaacacagcagcagcaagaggttaagtattcacaccttgacattgtcggaagaccagttgttgtcttggagaaacctgatgttattccagagcataatttgtatttccaggtttactacagattcaacaacatatccttgctcagagagccgttgatgctgattactggtttcttcctcctgtttgtggcctgtattgtttacatgcgtactgatatgtcaatatccaagagctctccttcctacttggccaagctgcaatgggatgaggtgcaagcaactgttcagaaaatccagggtatctttgagcaatgcttagcagttcatgataaactggaggcctcattgcgggatttgtctaggacaggagacattcagtcttgcaaggcagctcgtaaagctgctgacacgcagtttaaggagctatcgaaagatctgaagccactgttggcgactctacagtcatctccccagtcttatcagatattgccaaaggtagaggacttgatcgtaaaggagagagagatgcaggagaagctcatgacaaggcattccaccgttgtcgacagctttgagaagaagctgcgcgggcaagatgtagagaacaggattgctttgcagcagcagaaaattgctgccctgaggcaggaggttgaatctcttttagagtacattagtgagatttgagcaaatgagtgctgctgtggcgtgatacatctttagcgattagactgcctttgtttggtttagggtttaccccaatattgaaatctactactctgagattgtgtcggtaaccatctagtttcccagttgagagacctggaagttgcaatgaccttgtaacatgataatcagtgtaattctggagctgactaaatttttgcatttaatatcaatatcacaggaaccgtcatcttttggactgaatgtgtgaatccatttgtttgaaaagttttagctgg

SEQ ID NO: 201394 - DNA, 2409 bp, Zea Mays
ccttggcagaatcgcagcgcagcgcacacgcacggacggccccgagggtttagagcccaacttctctcttcacatcgccgcgaagccagctccccgatgcgatctggccgagggaagatggcgactccgccgccgccaatccgccccgccgccgcgctcctcctcctcgtcctcgctggcgtcctcgcctccgccgcgagcgccgatctcgtcatctccaaggcagatcggagggttgatctgacctcgcatatcgttcgcgtcctcgcttccctcaaggctgaaaatgttggaccagaccctgtctctcaagttttactgccttttcccaatattcaagccaagaacttggcagctattagagcattcggcagtgaagggaaagtgaagggtcaaagtactgttctgccaattgaagttgttcaaccttctggagctcccccggagctgacattcttttcagcattgttgcccaaacctttggaaaaaggaaagactctgtacttggatgttctgactgtgttcacacactctcttcaaccattcccagaagaaatcactcaagccgaagcacaacttgttgtctatcaggatagtgctcactatctgtcaccttaccctgttaaggctcagacacttgctatcagattgcctggtggaagggttgaatcatacacaaggcatccaaacgcaaaacttgtggattcagaactgaaatatggaccatttcatgaccttcccccgttctcctacttacctgtgattgtgcattttgagaacaacaatccttttgcagttgcaaaggaagttataagggagattgagatatctcactggggaaatgtacagattacggaacactacaacattgctcatggtggtgccagactcaagggtgaattttccaggattgattatcaatctagaccttacgtaaggggtgtttcatcttttagacatcttattgcaaaactgcctccaagggcacactctatttattaccgagatgagattggtaatatttccacatcacatttgtggagtgattctatgaagacccaactggaaatagaaccaaggtttccattgtttggtgggtggcaaacaaccttcactgttggttatggtttaccacttgaagactttgttttctattctgatggaaagagatttctcaatatcacatttggttctccattggaggaaattctcattgaaaagcttatcgtaaaggtacgtgtgaatgtgcatcaaacgaataaattatatttcgtttgtttaaggctacatggcatactttgcagatttgtggccattgtgtttggtattcattataaactgccatctttatttgtgtcgtgatcataggaatgtggatagcaagaataatgacagggttgttctacctgaagggtcaaaggatatcgaagtttcagctccctttccaacacagcagcagcaagaggttaagtattcacaccttgacattgtcggaagaccagttgttgtcttggagaaacctgatgttattccagagcataatttgtatttccaggtttactacagattcaacaacatatccttgctcagagagccgttgatgctgattactggtttcttcctcctgtttgtggcctgtattgtttacatgcgtactgatatgtcaatatccaagagctctccttcctacttggccaagctgcaatgggatgaggtgcaagcaactgttcagaaaatccagggtatctttgagcaatgcttagcagttcatgataaactggaggcctcattgcgggatttgtctaggacaggagacattcagtcttgcaaggcagctcgtaaagctgctgacacgcagtttaaggagctatcgaaagatctgaagccactgttggcgactctacagtcatctccccagtcttatcagatattgccaaaggtagaggacttgatcgtaaaggagagagagatgcaggagaagctcatgacaaggcattccaccgttgtcgacagctttgagaagaagctgcgcgggcaagatgtagagaacaggattgctttgcagcagcagaaaattgctgccctgaggcaggaggttgaatctcttttagagtacattagtgagatttgagcaaatgagtgctgctgtggcgtgatacatctttagcgattagactgcctttgtttggtttagggtttaccccaatattgaaatctactactctgagattgtgtcggtaaccatctagtttcccagttgagagacctggaagttgcaatgaccttgtaacatgataatcagtgtaattctggagctgactaaatttttgcatttaatatcaatatcacaggaaccgtcatcttttggactgaatgtgtgaatccatttgtttgaaaagttttagctgg

SEQ ID NO: 201395 - DNA, 2016 bp, Zea Mays
acacagaccacgcaccagggacctcaccgagcacaggtagggtttcggccaccagccatggccgactccgcgccgtccatcccgggcgtcatcgcctccctccaggcctactccacggccctctccgcctttaccgccgcatggcgtgccgtcgagacccacgcctccaccctcgactccgccctcgccgcccgcctagccggcttctcggagctcgagctgatctgctcggcgatggacggagccggcctccgcgcgtacctcaccgagcacagggacgagctcaaggatcccacgcgcgccctcgacgcagccctccaagttgcgcccgacccggggcttctggtcctctccgcggcagcgagtttctgccgcacgctgccggaggtggccaagagcgacggtagcgtcaaggcgtcctgccgcctgctcatcgccttgctcgaccggctgcgcgcgattggtgtcaagccgtcgcctgaggcgcgcgaggaggccagagctgttgcgacggactggaagcgaggcaagcggatcgggacggagacgatgtttaagcaggagacgttcgccttcttgcatctcgtgggagtgtttgggctcgtggaggatgtgggcggtaccagcgaggtgcttgatcttgtcgtgtcgatctcaggtcgtgagcgcgccgttgatgcgttcgtcgtcctgggcctggacctcgaccagcatatgccaatcctcattcagaaaatggtaaacaaaaacaaacagctagaggcagtcaaattcattcaagctcttaatatagcgcacaaatacgctttgttgcctattatgagatcgtacattgatcatgccgcagttgctggtaagatgatccgcatcaggggagatgatcttgctactcagctgatgcaaaagagcgcacacttattggaacattgcagaagttcattaaggaacagaagctagaagaactgcccatttttgaagaagctaacaagcgaatggcacatttggatcagcaaagtgctgagagaaaaagaactgctgctgcagcggctgcggctgctcgaaaggttagtaagaacattgaggagcagcagaaaaggatacaggagctgatgcagcctgctaagagaccaaggtctgagaatgtggtgaaaggatcttcgggccagaacgtgaactttgctggaacctctactcaacagtttaagccacaacagagcattcataaagctggagtgtcaaatcagtatcaagctgctttaacccagaatgtactgccagcaatcgctcagatttcacagctagttgctgggagccatcgtccagttggcatcccaaatcaggcccttgctgttccgcctcaatatggtagtggtagtgcaaattattatggagtgacgtccaccaggccatacaggcccatcactctacctcctggacctggtgctttgaatggtccaagtgcgcaggcatcttcaagatcaaggctctattctggagatccccttgcggctgtctcccgatcatcagataagaagggatcgtcttacaagtattctttgtccagtatgtcaacttatgatcgtaaatgaggatttgttttatctgccagtggacgaacctagtgaaccttgaaagtttgggtttcagaccagagatttggtccctccgtagatgttaagtcattgtagctaacaatgggccttttttacagtaaaggatgtgggtttgtatctagaagagattctcctacagagtctaataaatattgtaggaattctaacttataaggacaagttaggtgtaatggtgagagttatcttaccgagccaccagatcctaggtttgaagtagcctcttcctattttcattgggtcatgaatttgtagtatctgtatttgcagcggaaagcttaccttgttttatgcctttgtcgtgtgagtcttcggtagtgagtctaccctttagggtttgttcgattatttccattccatatggattggaggggattgatatgga

SEQ ID NO: 201396 - DNA, 2758 bp, Zea Mays
gtactggccggctataaaaagaaagaaaaggtcaagctggttaaatgtttggtacaaaacattgttgtagacatctcagttaatcagattggtgggctgtgcacactatgttttcttgagaaggttgatcaacactttggaaaagatcacctatttaagaaaagcataattcttataaaagactggtgttactatgaaagccggattcttggtgctcaccacggcctaatttccacgtatgccttggagactctagttctatacattttccatatcttccacaagtctttggatggtccattggctgttctctataggtttctagactattatagtaaatttgattgggataataaggggatcagcttatttggacctgtttccttatcttcactacctgagctagttactgacccaccagatatccaagatgatgattttcttcaacgggaggaatttctaaaagaatgcatagaatcttttagtgttctccctagaaactctgagacgaatcctagactattctcacggagatttttaaatattgttgatccactaaagcagagtaataatcttggacgcagtgtcagtaaaggaaacttttaccggatacgcagcgcatttgattttggtgctcgtaagcttggcaagattcttcaagtgccttcttgtctcactgttggtgaagtcaatcagtttttcaggaacactctaaagagaaaccgtactggtttaaggccagatgttttggttgtctcttctgaccttgttacaaatgatcctgtatcatcagacttagatgtggaaagagtcaacaatgttgcgcctaacaattcctgtgatgttctgtctaatcagctcagtaacatcaacatttcagattccaataatcatggctcaataaagcaaaaagaatgtaactctatggctgatcacaaggagacaaaatctgtttctttgggtttgctagatagtgatgccacaaatcatgcaactaccgattcattaagtataaggggtggtggcaacttctctgaagcttcaccagtacctagtgaaaccagtaccttgcaatcagaaacaggcaagaaagttgatgttagaaatgacacaaccccatcatactatggggtttcagcaaagcagtttacaggcagatctcaccactatattgaagatactaagcataatgcttacccctattctactggtttagttgatggtctgggcacatctaattcagttttaacatcggatacacaacctggaggtaacaacaatgacacagtgccaaatctcactggagatttcgatacaaatttgcataatcttctgtatgcacgggggttccatcaggacaatcctatgactcaattatactatccaatgcccatgccaccacccctgcaatatcagaacatgcacccatcaaatggccatggcagaaaaaatccgtatggatatgctggtaggaatggggttgtccctggtcatgtttatccacctagctattttgtgtataggccattgtatcaagcagatgatcatatgactttgaggactcgtggaacaggcacctactttcctgacccaaatttgcgcaaggaccgaccacctactggacgtggggagagaggaaggaatcattcccatcagaataattatcataagtttcaccaccacacccgaccggatatgcctgtagatatgatacctttggaggaattgcggcatgagctgccactgcagacatatgctcctaatgcaaatggtcatggaatcccatctccaatgaatataccaatatcatccccatcttcccagtctccaagggatcctttgaatgtaccaatgcattccccatcttcccatgtccgaaaggataattttcatggcaatggttttatgctcccgcaagacagtaaacttgagtttgggaccttgggggcattgccttcggaagttgcctctaaagaccatgccaacagatcaggttctgtctccaacaatcaagcttctgggcctgtgagccccatgtctgtggccaaaaatactggaatgggttccaatggaatgaggaatgttcagccataccgtctcaaggacagtggtgacttcccgccactgtccagttgatgtcgattccgtgtgtatgagaggcagcaggataatgatgagtggtgtgcttccgacacgaatgggacatcgtgtaatggcgccgagttctttggcagaagcatacgccatgatgtacatcctgttttttttttccttcccttttctctagttgccattaagcaccaccactgcaacgcagcctgtgctttcttgcgacaagagagaaggcagaagtaaaaagagatgaaaaacgagagaaggaaaaatgtaagggaaaaaaatgaaagcaaaagggtggagatacttttaggggtatagtcccgttgtttcagttctacagctcaagaggaacagatggtgctggtgaaagatagatctagctagctagctagttttgttgttttgattgacctcagggtgattggagaactggattttgtcgtccatgtccacgtgtaacgaggatagagttgtagctccctgtttgcatttagagggggggaggccttggtgttgaaaggccccaaagtttgaagctactttagctgcttgaaaatggattaggtacacagaatgtgttaaatctgctgtccaaacgaaaatgcgcttgctgtgtgtttccgtttatgcataatctgta

SEQ ID NO: 201397 - DNA, 3721 bp, Zea Mays
atcgtcctggcaacagtggtgaggagggggacgacgcgaattgcaactgcaatcagccaatcaatcaaggctttcctcgtttaacccgcgacgcattctccatccgcgacaaacaacaaaccgctttagaaacgaagcaagaaattcgcaaacccatcacatcatccataagccggtgaagctgtgaggtcgccgaattggatctgatcgaaggacgaaaaaaaagcggaaaggaaatcgtgccttgaagcctcctcttcgtcttcttcttgctccggcggcggcctgcgggcggagagattgagccgagcagcgcgcgtgcagccggccgagccccgaaaagcagcagcagaagcaagccgcgggagcgtctcgtcagcgtcatctctatccgcggcgtgcgcagatcagacgagcaagcgaggaagtggaggtggaggcaaggcaaggaggaaagcgaagcaacggatgcccgcctaaaaaaaaactgactcctgatctcctcacattaaaatccccccgctcgtcttcccccgtgctcccaaatcccgagctctccccctcttccctgccctgccctacctcgccggcggcggcgcgcagatcgcggcccctcgcccgcaccgattcgccccgcggcgcccaccttcccgtccgttctgcttgggcgacggcgattcctgcatcgcatcgcctccttctttagcggctgcttcggctacagcggcggttcctgcgtcgcccgcctcctccagcggctgcttggcggcgtctccagctctggggaagaagcaagcggctagcggctctctcccggcgcccatggtggacatcagcgagtgctcgccggtgcccgagtccgtgccggcgcacccggaccccgcgtccgtttctccggacgcctggcggcgcttcgagaccgccgcgctcgccgtggtgaacaagatccagcccaccgccgcctccgaacacctccgcgccgccgtcgtcgactacgtccagcgcctcttctggttccaagcccggtctttccatttggatctgttccattgaaaacatatcttccagatggagatattgacctgacattatttggccctgctatttctgatgagaatctagcaaatgaagtatgcactattctaaaatcggaagagcgaaggaaagattctgaatttgaggttaaagatgtccagtatgtccctgctgaggtcaagctggttaaatgtttggtacaaaacattgttgtagacatctcagttaatcagattggtgggctgtgcacactatgttttcttgagaaggttgatcaacactttggaaaagatcacctatttaagaaaagcataattcttataaaagactggtgttactatgaaagccggattcttggtgctcaccacggcctaatttccacgtatgccttggagactctagttctatacattttccatatcttccacaagtctttggatggtccattggctgttctctataggtttctagactattatagtaaatttgattgggataataaggggatcagcttatttggacctgtttccttatcttcactacctgagctagttactgacccaccagatatccaagatgatgattttcttcaacgggaggaatttctaaaagaatgcatagaatcttttagtgttctccctagaaactctgagacgaatcctagactattctcacggagatttttaaatattgttgatccactaaagcagagtaataatcttggacgcagtgtcagtaaaggaaacttttaccggatacgcagcgcatttgattttggtgctcgtaagcttggcaagattcttcaagtgccttcttgtctcactgttggtgaagtcaatcagtttttcaggaacactctaaagagaaaccgtactggtttaaggccagatgttttggttgtctcttctgaccttgttacaaatgatcctgtatcatcagacttagatgtggaaagagtcaacaatgttgcgcctaacaattcctgtgatgttctgtctaatcagctcagtaacatcaacatttcagattccaataatcatggctcaataaagcaaaaagaatgtaactctatggctgatcacaaggagacaaaatctgtttctttgggtttgctagatagtgatgccacaaatcatgcaactaccgattcattaagtataaggggtggtggcaacttctctgaagcttcaccagtacctagtgaaaccagtaccttgcaatcagaaacaggcaagaaagttgatgttagaaatgacacaaccccatcatactatggggtttcagcaaagcagtttacaggcagatctcaccactatattgaagatactaagcataatgcttacccctattctactggtttagttgatggtctgggcacatctaattcagttttaacatcggatacacaacctggaggtaacaacaatgacacagtgccaaatctcactggagatttcgatacaaatttgcataatcttctgtatgcacgggggttccatcaggacaatcctatgactcaattatactatccaatgcccatgccaccacccctgcaatatcagaacatgcacccatcaaatggccatggcagaaaaaatccgtatggatatgctggtaggaatggggttgtccctggtcatgtttatccacctagctattttgtgtataggccattgtatcaagcagatgatcatatgactttgaggactcgtggaacaggcacctactttcctgacccaaatttgcgcaaggaccgaccacctactggacgtggggagagaggaaggaatcattcccatcagaataattatcataagtttcaccaccacacccgaccggatatgcctgtagatatgatacctttggaggaattgcggcatgagctgccactgcagacatatgctcctaatgcaaatggtcatggaatcccatctccaatgaatataccaatatcatccccatcttcccagtctccaagggatcctttgaatgtaccaatgcattccccatcttcccatgtccgaaaggataattttcatggcaatggttttatgctcccgcaagacagtaaacttgagtttgggaccttgggggcattgccttcggaagttgcctctaaagaccatgccaacagatcaggttctgtctccaacaatcaagcttctgggcctgtgagccccatgtctgtggccaaaaatactggaatgggttccaatggaatgaggtaagtatgctgcgagattttagttgacagcaccaaaatttatttctgatgggaagaacatgcaattggtatactagtctcattgtacgagttccaacccccccccccccccccccctttctaaatataacggtaagtagctctccttgcatatttgagggaaaaacatgcaattagtgaacatttccatggtacaaacaatgagataaaatttagctctttgttaggaacttaggttggtgtttagaaggacaagcttggcatagtggtaagaaggcttccccactgagccaggcagcctctctgcattaaatgcagaggtaaggcttgccttggttatttcttcccagaaccttatgggagccatcagtagttggtctgtcttttttgctagattggtgtttctgttaaattatttagatgctcttattgttcacttttggacaattgatatgtggattg

SEQ ID NO: 201398 - DNA, 3651 bp, Zea Mays
atcgtcctggcaacagtggtgaggagggggacgacgcgaattgcaactgcaatcagccaatcaatcaaggctttcctcgtttaacccgcgacgcattctccatccgcgacaaacaacaaaccgctttagaaacgaagcaagaaattcgcaaacccatcacatcatccataagccggtgaagctgtgaggtcgccgaattggatctgatcgaaggacgaaaaaaaagcggaaaggaaatcgtgccttgaagcctcctcttcgtcttcttcttgctccggcggcggcctgcgggcggagagattgagccgagcagcgcgcgtgcagccggccgagccccgaaaagcagcagcagaagcaagccgcgggagcgtctcgtcagcgtcatctctatccgcggcgtgcgcagatcagacgagcaagcgaggaagtggaggtggaggcaaggcaaggaggaaagcgaagcaacggatgcccgcctaaaaaaaaactgactcctgatctcctcacattaaaatccccccgctcgtcttcccccgtgctcccaaatcccgagctctccccctcttccctgccctgccctacctcgccggcggcggcgcgcagatcgcggcccctcgcccgcaccgattcgccccgcggcgcccaccttcccgtccgttctgcttgggcgacggcgattcctgcatcgcatcgcctccttctttagcggctgcttcggctacagcggcggttcctgcgtcgcccgcctcctccagcggctgcttggcggcgtctccagctctggggaagaagcaagcggctagcggctctctcccggcgcccatggtggacatcagcgagtgctcgccggtgcccgagtccgtgccggcgcacccggaccccgcgtccgtttctccggacgcctggcggcgcttcgagaccgccgcgctcgccgtggtgaacaagatccagcccaccgccgcctccgaacacctccgcgccgccgtcgtcgactacgtccagcgcctcttctggttccaagcccggtctttccatttggatctgttccattgaaaacatatcttccagatggagatattgacctgacattatttggccctgctatttctgatgagaatctagcaaatgaagtatgcactattctaaaatcggaagagcgaaggaaagattctgaatttgaggttaaagatgtccagtatgtccctgctgaggtcaagctggttaaatgtttggtacaaaacattgttgtagacatctcagttaatcagattggtgggctgtgcacactatgttttcttgagaaggttgatcaacactttggaaaagatcacctatttaagaaaagcataattcttataaaagactggtgttactatgaaagccggattcttggtgctcaccacggcctaatttccacgttctctataggtttctagactattatagtaaatttgattgggataataaggggatcagcttatttggacctgtttccttatcttcactacctgagctagttactgacccaccagatatccaagatgatgattttcttcaacgggaggaatttctaaaagaatgcatagaatcttttagtgttctccctagaaactctgagacgaatcctagactattctcacggagatttttaaatattgttgatccactaaagcagagtaataatcttggacgcagtgtcagtaaaggaaacttttaccggatacgcagcgcatttgattttggtgctcgtaagcttggcaagattcttcaagtgccttcttgtctcactgttggtgaagtcaatcagtttttcaggaacactctaaagagaaaccgtactggtttaaggccagatgttttggttgtctcttctgaccttgttacaaatgatcctgtatcatcagacttagatgtggaaagagtcaacaatgttgcgcctaacaattcctgtgatgttctgtctaatcagctcagtaacatcaacatttcagattccaataatcatggctcaataaagcaaaaagaatgtaactctatggctgatcacaaggagacaaaatctgtttctttgggtttgctagatagtgatgccacaaatcatgcaactaccgattcattaagtataaggggtggtggcaacttctctgaagcttcaccagtacctagtgaaaccagtaccttgcaatcagaaacaggcaagaaagttgatgttagaaatgacacaaccccatcatactatggggtttcagcaaagcagtttacaggcagatctcaccactatattgaagatactaagcataatgcttacccctattctactggtttagttgatggtctgggcacatctaattcagttttaacatcggatacacaacctggaggtaacaacaatgacacagtgccaaatctcactggagatttcgatacaaatttgcataatcttctgtatgcacgggggttccatcaggacaatcctatgactcaattatactatccaatgcccatgccaccacccctgcaatatcagaacatgcacccatcaaatggccatggcagaaaaaatccgtatggatatgctggtaggaatggggttgtccctggtcatgtttatccacctagctattttgtgtataggccattgtatcaagcagatgatcatatgactttgaggactcgtggaacaggcacctactttcctgacccaaatttgcgcaaggaccgaccacctactggacgtggggagagaggaaggaatcattcccatcagaataattatcataagtttcaccaccacacccgaccggatatgcctgtagatatgatacctttggaggaattgcggcatgagctgccactgcagacatatgctcctaatgcaaatggtcatggaatcccatctccaatgaatataccaatatcatccccatcttcccagtctccaagggatcctttgaatgtaccaatgcattccccatcttcccatgtccgaaaggataattttcatggcaatggttttatgctcccgcaagacagtaaacttgagtttgggaccttgggggcattgccttcggaagttgcctctaaagaccatgccaacagatcaggttctgtctccaacaatcaagcttctgggcctgtgagccccatgtctgtggccaaaaatactggaatgggttccaatggaatgaggtaagtatgctgcgagattttagttgacagcaccaaaatttatttctgatgggaagaacatgcaattggtatactagtctcattgtacgagttccaacccccccccccccccccccctttctaaatataacggtaagtagctctccttgcatatttgagggaaaaacatgcaattagtgaacatttccatggtacaaacaatgagataaaatttagctctttgttaggaacttaggttggtgtttagaaggacaagcttggcatagtggtaagaaggcttccccactgagccaggcagcctctctgcattaaatgcagaggtaaggcttgccttggttatttcttcccagaaccttatgggagccatcagtagttggtctgtcttttttgctagattggtgtttctgttaaattatttagatgctcttattgttcacttttggacaattgatatgtggattg

SEQ ID NO: 201399 - DNA, 3248 bp, Zea Mays
ctttatcccctgggactgctgaccttgtgtttcaggagtggtggagggaggctgaaagcaaggtcggaggatcttgctgcactttgaagctgttgattctgcattctttgcttgggtaaatggagtactagttgggtatagccaggatagcagacttcctgctgagtttgaaattactgattgctgccatccttgtgattcggacaaggaaaatgttcttgctgttcaagttatgaggtggagtgatggctcttatcttgaagatcaggatcactggaggttgtctggtattcacagggatgtgctcctactatcaaagccacagatttttatcacagattacttcttcaaagcaaccttggatgaaaatttcagtttagccgatattgaggttgaggtggagattgactcacacaagcaagaccaggagcacgtcccaactttgtctattgaagcaacactcattgataactctggactatctaacagtatagatgctgatctttcatccgctaatgcagtcaatttgaaaccgaagccaaaacgaactcgaagcccttgtcttggttttcatggttatgtacttggtggaaaaatagaaaatccaaaactttggtctagtgagcatcctaacttatacacgcttgttgttctccttaaagatgccaatgggaagcttattgactgtgaatcatgccaagtgggcattcgtaatgtggtcatggcacacaagcaaatgctcgtcaatggatgtcctgttgtgctaagaggtgtcaacagacatgagcaccatccacgccttggaaagacaaatttagaagcatgcatgatcaaggacctgattttgatgaggcaaaacaatatcaatgctgttagaaatagccattacccacagcacccaaggtggtatgagttatgtgacatttttggtctttatgtcatagatgaagccaacattgagacacatggttttgatgaatctaacactttcaaacatcctacacttgaacctatttgggcaaatgcaatgcttgatcgtgttgttagcatggtggagagagataagaatcatgcatgcattattgtttggtctctaggaaatgaatcttcatatggacctaatcatgcttccatgtctggttggattcgtgaaagggatccaacaagactcctccattatgagggaggtggttccagaacatcatccacagatattgtgtgccccatgtatatgcgtgtctgggatgttgttaagatagcaaaagatccatctgaaacaaggcctctaattctttgcgaatattcacatgctatgggaaacagtaatgggaatattgatgcgtattggatggccatagacaacacttttggactccaaggaggttttatatgggactgggctgatcagggtttactgaaggaggactcagatgggtctaaattttgggcatatggcggcgactttggagatactccaaatgactccaatttttgcctcaatggcattgtgtggcctgatcggacgattcacccagctcttcatgaagtaaaataccttcaccagcctatcaaaatatcatcagcagataatatgcttaagattgaaaatggacacttttttgagacaacagaagctttggacttcagttgggttcttcatggagatggttgtgtcttgggctctggtccattgaatattccaactttggcaccacaaactagtcagctcatcaacatggaatcatcaccttggtttgccctttggagtgcctgtgcagcaaaagaagtatttttgtctgtgaatgtgaaacaaaggcatgaaacacgatgggctaaagctggtcatctcttggcttcagcacaactgtgtttgcctcagaaaaatggctttgtccccagcgtgatagcattgtccagtagccctttggtctgtgaacgcattggtgataatgtaaccatctgcaagaataatgcctggaaaattaaagtaaacagtcagttgggaacaatcgacagctggaaggtcaacgacgttgagcttatgagcaaggggatactcccatgcttttggcgcgcaccaactgacaacgacaaaggaggtttcttcaccaagccatatgactcgcgatggagagaagccttcctcgacaatgtctcgttccacagcagccagttctctgtcaaggagttgccggacaacaccgtggagttctccaccctctactacggtgttcccgggcacctacccaagcctgacgacgaagcctccgagtccattctcttccgggtgaagatggtatgccggatccacgggtcaggcgacgtggttctcgactacgaggtaaaccccaggagcgacctccctccccttccccgggtgggcgtcgtgttcagcgccgggaggtccctgagccacgtcacgtggtacgggcgcgggcccttcgagtgctacccggaccgcaaggcggcggcgcacgtcggcgtgtacgagagcagcgtggaggagctgcacgtgccgtacattgcccccgtggagtgcggcgggcgggcggacgtcaggtgggtggcactccgcgacgccggcgggctcggcctgtacgcgtcggcgcacggcggctccccgccgatgcagatgagcgcgagctactacggcgccgcggagctggacagggcaacgcacgtccacaggctggtgaagggggacgacatcgaggtgcatcttgaccacaggcacatggggctgggcggcgacgacagctggtcgccgtgcgtgcacgagcagtacctgctgccgccgacgcggtacgccttctccctgcggctctgccccctgctgccgtcgtcgtcgtgccatgacatctacaggtctcagctccccagctgatggtgccgtgtgccggagacccgtcgacgtcgagccttgggaaacaacaatgaacgcaatggcctggccagtgaatgaaagtatataatattgtaataaagcagagacgtattagctcctgcaacggcctcgcgatcgcctggatatgtctatgctgagggggtgtttagttaactaataacctaactacatatggcgccaagttactaaaacttaataaataactattactaactaataaatagtaactgaattcctaacttaataaatacttcctccgtttataaatatatgacaccgttgattttttaaaaacaacttagatcactcgtcttattaaaaaaaataatgagttaccatttat

SEQ ID NO: 201400 - DNA, 3953 bp, Zea Mays
ctcttccgacgcgacggcagatttgggaggtgtcgcggccagagagtgcacaggcacaactgacggtgctcgctcctctgctctgtgactcatcgctcgacgacgaaaacactcgttggatgttgcgctgtgttccaatccaatccgctccgctccgctccgctccgcaacccaattcccatctccgccggacatgtgtctttgacagatcgttacaggaggaaagaggtgcccctgtttgtccacaatggctttagctcatgccagcgccatgtttcctccctcgagcccctcacataaaacttgggaggacccgtcattcttcaagtggagaaagcgtgaggcgcatgtaccactgcgctcacaggacacgctggaagcggctctgaagtattggcatgaacggaggaatgtgaactatcacaatgctgacactgctgtctggaacgatgacgctgttcgcggtgctctggaaagtgctgccttttggtccaagggcttaccgtacgccaaatctctaagcggatactggaaattccttctgtcgccttcagcggaaagtattccggagagattctattatgctcattttgatgattcaaactggtcgggtttgccagttccctcaaattggcaaatgcatgggtttgaccgtccaatctacacaaatgtcacatatcctttcccattgaacccaccatttgtgccggctgataatcccacaggttgttacaggacagtctttcacatcccaaaagagtggaaaggtcggaggatcttgctgcactttgaagctgttgattctgcattctttgcttgggtaaatggagtactagttgggtatagccaggatagcagacttcctgctgagtttgaaattactgattgctgccatccttgtgattcggacaaggaaaatgttcttgctgttcaagttatgaggtggagtgatggctcttatcttgaagatcaggatcactggaggttgtctggtattcacagggatgtgctcctactatcaaagccacagatttttatcacagattacttcttcaaagcaaccttggatgaaaatttcagtttagccgatattgaggttgaggtggagattgactcacacaagcaagaccaggagcacgtcccaactttgtctattgaagcaacactcattgataactctggactatctaacagtatagatgctgatctttcatccgctaatgcagtcaatttgaaaccgaagccaaaacgaactcgaagcccttgtcttggttttcatggttatgtacttggtggaaaaatagaaaatccaaaactttggtctagtgagcatcctaacttatacacgcttgttgttctccttaaagatgccaatgggaagcttattgactgtgaatcatgccaagtgggcattcgtaatgtggtcatggcacacaagcaaatgctcgtcaatggatgtcctgttgtgctaagaggtgtcaacagacatgagcaccatccacgccttggaaagacaaatttagaagcatgcatgatcaaggacctgattttgatgaggcaaaacaatatcaatgctgttagaaatagccattacccacagcacccaaggtggtatgagttatgtgacatttttggtctttatgtcatagatgaagccaacattgagacacatggttttgatgaatctaacactttcaaacatcctacacttgaacctatttgggcaaatgcaatgcttgatcgtgttgttagcatggtggagagagataagaatcatgcatgcattattgtttggtctctaggaaatgaatcttcatatggacctaatcatgcttccatgtctggttggattcgtgaaagggatccaacaagactcctccattatgagggaggtggttccagaacatcatccacagatattgtgtgccccatgtatatgcgtgtctgggatgttgttaagatagcaaaagatccatctgaaacaaggcctctaattctttgcgaatattcacatgctatgggaaacagtaatgggaatattgatgcgtattggatggccatagacaacacttttggactccaaggaggttttatatgggactgggctgatcagggtttactgaaggaggactcagatgggtctaaattttgggcatatggcggcgactttggagatactccaaatgactccaatttttgcctcaatggcattgtgtggcctgatcggacgattcacccagctcttcatgaagtaaaataccttcaccagcctatcaaaatatcatcagcagataatatgcttaagattgaaaatggacacttttttgagacaacagaagctttggacttcagttgggttcttcatggagatggttgtgtcttgggctctggtccattgaatattccaactttggcaccacaaactagtcagctcatcaacatggaatcatcaccttggtttgccctttggagtgcctgtgcagcaaaagaagtatttttgtctgtgaatgtgaaacaaaggcatgaaacacgatgggctaaagctggtcatctcttggcttcagcacaactgtgtttgcctcagaaaaatggctttgtccccagcgtgatagcattgtccagtagccctttggtctgtgaacgcattggtgataatgtaaccatctgcaagaataatgcctggaaaattaaagtaaacagtcagttgggaacaatcgacagctggaaggtcaacgacgttgagcttatgagcaaggggatactcccatgcttttggcgcgcaccaactgacaacgacaaaggaggtttcttcaccaagccatatgactcgcgatggagagaagccttcctcgacaatgtctcgttccacagcagccagttctctgtcaaggagttgccggacaacaccgtggagttctccaccctctactacggtgttcccgggcacctacccaagcctgacgacgaagcctccgagtccattctcttccgggtgaagatggtatgccggatccacgggtcaggcgacgtggttctcgactacgaggtaaaccccaggagcgacctccctccccttccccgggtgggcgtcgtgttcagcgccgggaggtccctgagccacgtcacgtggtacgggcgcgggcccttcgagtgctacccggaccgcaaggcggcggcgcacgtcggcgtgtacgagagcagcgtggaggagctgcacgtgccgtacattgcccccgtggagtgcggcgggcgggcggacgtcaggtgggtggcactccgcgacgccggcgggctcggcctgtacgcgtcggcgcacggcggctccccgccgatgcagatgagcgcgagctactacggcgccgcggagctggacagggcaacgcacgtccacaggctggtgaagggggacgacatcgaggtgcatcttgaccacaggcacatggggctgggcggcgacgacagctggtcgccgtgcgtgcacgagcagtacctgctgccgccgacgcggtacgccttctccctgcggctctgccccctgctgccgtcgtcgtcgtgccatgacatctacaggtctcagctccccagctgatggtgccgtgtgccggagacccgtcgacgtcgagccttgggaaacaacaatgaacgcaatggcctggccagtgaatgaaagtatataatattgtaataaagcagagacgtattagctcctgcaacggcctcgcgatcgcctggatatgtctatgctgagggggtgtttagttaactaataacctaactacatatggcgccaagttactaaaacttaataaataactattactaactaataaatagtaactgaattcctaacttaataaatacttcctccgtttataaatatatgacaccgttgattttttaaaaacaacttagatcactcgtcttattaaaaaaaataatgagttaccatttat

SEQ ID NO: 201401 - DNA, 3973 bp, Zea Mays
ctcttccgacgcgacggcagatttgggaggtgtcgcggccagagagtgcacaggcacaactgacggtgctcgctcctctgctctgtgactcatcgctcgacgacgaaaacactcgttggatgttgcgctgtgttccaatccaatccgctccgctccgctccgctccgcaacccaattcccatctccgccggtgagggattcgccacaccacacgccaggccgcccctcggtcgcggaacccacttcctgctggcgcgcgccgtcttccgttggtccggacatgtgtctttgacagatcgttacaggaggaaagaggtgcccctgtttgtccacaatggctttagctcatgccagcgccatgtttcctccctcgagcccctcacataaaacttgggaggacccgtcattcttcaagtggagaaagcgtgaggcgcatgtaccactgcgctcacaggacacgctggaagcggctctgaagtattggcatgaacggaggaatgtgaactatcacaatgctgacactgctgtctggaacgatgacgctgttcgcggtgctctggaaagtgctgccttttggtccaagggcttaccgtacgccaaatctctaagcggatactggaaattccttctgtcgccttcagcggaaagtattccggagagattctattatgctcattttgatgattcaaactggtcgggtttgccagttccctcaaattggcaaatgcatgggtttgaccgtccaatctacacaaatgtcacatatcctttcccattgaacccaccatttgtgccggctgataatcccacaggttgttacaggacagtctttcacatcccaaaagagtggaaaggtcggaggatcttgctgcactttgaagctgttgattctgcattctttgcttgggtaaatggagtactagttgggtataggaaaatgttcttgctgttcaagttatgaggtggagtgatggctcttatcttgaagatcaggatcactggaggttgtctggtattcacagggatgtgctcctactatcaaagccacagatttttatcacagattacttcttcaaagcaaccttggatgaaaatttcagtttagccgatattgaggttgaggtggagattgactcacacaagcaagaccaggagcacgtcccaactttgtctattgaagcaacactcattgataactctggactatctaacagtatagatgctgatctttcatccgctaatgcagtcaatttgaaaccgaagccaaaacgaactcgaagcccttgtcttggttttcatggttatgtacttggtggaaaaatagaaaatccaaaactttggtctagtgagcatcctaacttatacacgcttgttgttctccttaaagatgccaatgggaagcttattgactgtgaatcatgccaagtgggcattcgtaatgtggtcatggcacacaagcaaatgctcgtcaatggatgtcctgttgtgctaagaggtgtcaacagacatgagcaccatccacgccttggaaagacaaatttagaagcatgcatgatcaaggacctgattttgatgaggcaaaacaatatcaatgctgttagaaatagccattacccacagcacccaaggtggtatgagttatgtgacatttttggtctttatgtcatagatgaagccaacattgagacacatggttttgatgaatctaacactttcaaacatcctacacttgaacctatttgggcaaatgcaatgcttgatcgtgttgttagcatggtggagagagataagaatcatgcatgcattattgtttggtctctaggaaatgaatcttcatatggacctaatcatgcttccatgtctggttggattcgtgaaagggatccaacaagactcctccattatgagggaggtggttccagaacatcatccacagatattgtgtgccccatgtatatgcgtgtctgggatgttgttaagatagcaaaagatccatctgaaacaaggcctctaattctttgcgaatattcacatgctatgggaaacagtaatgggaatattgatgcgtattggatggccatagacaacacttttggactccaaggaggttttatatgggactgggctgatcagggtttactgaaggaggactcagatgggtctaaattttgggcatatggcggcgactttggagatactccaaatgactccaatttttgcctcaatggcattgtgtggcctgatcggacgattcacccagctcttcatgaagtaaaataccttcaccagcctatcaaaatatcatcagcagataatatgcttaagattgaaaatggacacttttttgagacaacagaagctttggacttcagttgggttcttcatggagatggttgtgtcttgggctctggtccattgaatattccaactttggcaccacaaactagtcagctcatcaacatggaatcatcaccttggtttgccctttggagtgcctgtgcagcaaaagaagtatttttgtctgtgaatgtgaaacaaaggcatgaaacacgatgggctaaagctggtcatctcttggcttcagcacaactgtgtttgcctcagaaaaatggctttgtccccagcgtgatagcattgtccagtagccctttggtctgtgaacgcattggtgataatgtaaccatctgcaagaataatgcctggaaaattaaagtaaacagtcagttgggaacaatcgacagctggaaggtcaacgacgttgagcttatgagcaaggggatactcccatgcttttggcgcgcaccaactgacaacgacaaaggaggtttcttcaccaagccatatgactcgcgatggagagaagccttcctcgacaatgtctcgttccacagcagccagttctctgtcaaggagttgccggacaacaccgtggagttctccaccctctactacggtgttcccgggcacctacccaagcctgacgacgaagcctccgagtccattctcttccgggtgaagatggtatgccggatccacgggtcaggcgacgtggttctcgactacgaggtaaaccccaggagcgacctccctccccttccccgggtgggcgtcgtgttcagcgccgggaggtccctgagccacgtcacgtggtacgggcgcgggcccttcgagtgctacccggaccgcaaggcggcggcgcacgtcggcgtgtacgagagcagcgtggaggagctgcacgtgccgtacattgcccccgtggagtgcggcgggcgggcggacgtcaggtgggtggcactccgcgacgccggcgggctcggcctgtacgcgtcggcgcacggcggctccccgccgatgcagatgagcgcgagctactacggcgccgcggagctggacagggcaacgcacgtccacaggctggtgaagggggacgacatcgaggtgcatcttgaccacaggcacatggggctgggcggcgacgacagctggtcgccgtgcgtgcacgagcagtacctgctgccgccgacgcggtacgccttctccctgcggctctgccccctgctgccgtcgtcgtcgtgccatgacatctacaggtctcagctccccagctgatggtgccgtgtgccggagacccgtcgacgtcgagccttgggaaacaacaatgaacgcaatggcctggccagtgaatgaaagtatataatattgtaataaagcagagacgtattagctcctgcaacggcctcgcgatcgcctggatatgtctatgctgagggggtgtttagttaactaataacctaactacatatggcgccaagttactaaaacttaataaataactattactaactaataaatagtaactgaattcctaacttaataaatacttcctccgtttataaatatatgacaccgttgattttttaaaaacaacttagatcactcgtcttattaaaaaaaataatgagttaccatttat

SEQ ID NO: 201402 - DNA, 4049 bp, Zea Mays
ttggactctctctcctctctctctgagtctctgtctctgtctcttccgacgcgacggcagatttgggaggtgtcgcggccagagagtgcacaggcacaactgacggtgctcgctcctctgctctgtgactcatcgctcgacgacgaaaacactcgttggatgttgcgctgtgttccaatccaatccgctccgctccgctccgctccgcaacccaattcccatctccgccggtgagggattcgccacaccacacgccaggccgcccctcggtcgcggaacccacttcctgctggcgcgcgccgtcttccgttggtccggacatgtgtctttgacagatcgttacaggaggaaagaggtgcccctgtttgtccacaatggctttagctcatgccagcgccatgtttcctccctcgagcccctcacataaaacttgggaggacccgtcattcttcaagtggagaaagcgtgaggcgcatgtaccactgcgctcacaggacacgctggaagcggctctgaagtattggcatgaacggaggaatgtgaactatcacaatgctgacactgctgtctggaacgatgacgctgttcgcggtgctctggaaagtgctgccttttggtccaagggcttaccgtacgccaaatctctaagcggatactggaaattccttctgtcgccttcagcggaaagtattccggagagattctattatgctcattttgatgattcaaactggtcgggtttgccagttccctcaaattggcaaatgcatgggtttgaccgtccaatctacacaaatgtcacatatcctttcccattgaacccaccatttgtgccggctgataatcccacaggttgttacaggacagtctttcacatcccaaaagagtggaaaggtcggaggatcttgctgcactttgaagctgttgattctgcattctttgcttgggtaaatggagtactagttgggtatagccaggatagcagacttcctgctgagtttgaaattactgattgctgccatccttgtgattcggacaaggaaaatgttcttgctgttcaagttatgaggtggagtgatggctcttatcttgaagatcaggatcactggaggttgtctggtattcacagggatgtgctcctactatcaaagccacagatttttatcacagattacttcttcaaagcaaccttggatgaaaatttcagtttagccgatattgaggttgaggtggagattgactcacacaagcaagaccaggagcacgtcccaactttgtctattgaagcaacactcattgataactctggactatctaacagtatagatgctgatctttcatccgctaatgcagtcaatttgaaaccgaagccaaaacgaactcgaagcccttgtcttggttttcatggttatgtacttggtggaaaaatagaaaatccaaaactttggtctagtgagcatcctaacttatacacgcttgttgttctccttaaagatgccaatgggaagcttattgactgtgaatcatgccaagtgggcattcgtaatgtggtcatggcacacaagcaaatgctcgtcaatggatgtcctgttgtgctaagaggtgtcaacagacatgagcaccatccacgccttggaaagacaaatttagaagcatgcatgatcaaggacctgattttgatgaggcaaaacaatatcaatgctgttagaaatagccattacccacagcacccaaggtggtatgagttatgtgacatttttggtctttatgtcatagatgaagccaacattgagacacatggttttgatgaatctaacactttcaaacatcctacacttgaacctatttgggcaaatgcaatgcttgatcgtgttgttagcatggtggagagagataagaatcatgcatgcattattgtttggtctctaggaaatgaatcttcatatggacctaatcatgcttccatgtctggttggattcgtgaaagggatccaacaagactcctccattatgagggaggtggttccagaacatcatccacagatattgtgtgccccatgtatatgcgtgtctgggatgttgttaagatagcaaaagatccatctgaaacaaggcctctaattctttgcgaatattcacatgctatgggaaacagtaatgggaatattgatgcgtattggatggccatagacaacacttttggactccaaggaggttttatatgggactgggctgatcagggtttactgaaggaggactcagatgggtctaaattttgggcatatggcggcgactttggagatactccaaatgactccaatttttgcctcaatggcattgtgtggcctgatcggacgattcacccagctcttcatgaagtaaaataccttcaccagcctatcaaaatatcatcagcagataatatgcttaagaagctttggacttcagttgggttcttcatggagatggttgtgtcttgggctctggtccattgaatattccaactttggcaccacaaactagtcagctcatcaacatggaatcatcaccttggtttgccctttggagtgcctgtgcagcaaaagaagtatttttgtctgtgaatgtgaaacaaaggcatgaaacacgatgggctaaagctggtcatctcttggcttcagcacaactgtgtttgcctcagaaaaatggctttgtccccagcgtgatagcattgtccagtagccctttggtctgtgaacgcattggtgataatgtaaccatctgcaagaataatgcctggaaaattaaagtaaacagtcagttgggaacaatcgacagctggaaggtcaacgacgttgagcttatgagcaaggggatactcccatgcttttggcgcgcaccaactgacaacgacaaaggaggtttcttcaccaagccatatgactcgcgatggagagaagccttcctcgacaatgtctcgttccacagcagccagttctctgtcaaggagttgccggacaacaccgtggagttctccaccctctactacggtgttcccgggcacctacccaagcctgacgacgaagcctccgagtccattctcttccgggtgaagatggtatgccggatccacgggtcaggcgacgtggttctcgactacgaggtaaaccccaggagcgacctccctccccttccccgggtgggcgtcgtgttcagcgccgggaggtccctgagccacgtcacgtggtacgggcgcgggcccttcgagtgctacccggaccgcaaggcggcggcgcacgtcggcgtgtacgagagcagcgtggaggagctgcacgtgccgtacattgcccccgtggagtgcggcgggcgggcggacgtcaggtgggtggcactccgcgacgccggcgggctcggcctgtacgcgtcggcgcacggcggctccccgccgatgcagatgagcgcgagctactacggcgccgcggagctggacagggcaacgcacgtccacaggctggtgaagggggacgacatcgaggtgcatcttgaccacaggcacatggggctgggcggcgacgacagctggtcgccgtgcgtgcacgagcagtacctgctgccgccgacgcggtacgccttctccctgcggctctgccccctgctgccgtcgtcgtcgtgccatgacatctacaggtctcagctccccagctgatggtgccgtgtgccggagacccgtcgacgtcgagccttgggaaacaacaatgaacgcaatggcctggccagtgaatgaaagtatataatattgtaataaagcagagacgtattagctcctgcaacggcctcgcgatcgcctggatatgtctatgctgagggggtgtttagttaactaataacctaactacatatggcgccaagttactaaaacttaataaataactattactaactaataaatagtaactgaattcctaacttaataaatacttcctccgtttataaatatatgacaccgttgattttttaaaaacaacttagatcactcgtcttattaaaaaaaataatgagttaccatttat

SEQ ID NO: 201403 - DNA, 4046 bp, Zea Mays
ttggactctctctcctctctctctgagtctctgtctctgtctcttccgacgcgacggcagatttgggaggtgtcgcggccagagagtgcacaggcacaactgacggtgctcgctcctctgctctgtgactcatcgctcgacgacgaaaacactcgttggatgttgcgctgtgttccaatccaatccgctccgctccgctccgctccgcaacccaattcccatctccgccggtgagggattcgccacaccacacgccaggccgcccctcggtcgcggaacccacttcctgctggcgcgcgccgtcttccgttggtccggacatgtgtctttgacagatcgttacaggaggaaagaggtgcccctgtttgtccacaatggctttagctcatgccagcgccatgtttcctccctcgagcccctcacataaaacttgggaggacccgtcattcttcaagtggagaaagcgtgaggcgcatgtaccactgcgctcacaggacacgctggaagcggctctgaagtattggcatgaacggaggaatgtgaactatcacaatgctgacactgctgtctggaacgatgacgctgttcgcggtgctctggaaagtgctgccttttggtccaagggcttaccgtacgccaaatctctaagcggatactggaaattccttctgtcgccttcagcggaaagtattccggagagattctattatgctcattttgatgattcaaactggtcgggtttgccagttccctcaaattggcaaatgcatgggtttgaccgtccaatctacacaaatgtcacatatcctttcccattgaacccaccatttgtgccggctgataatcccacaggttgttacaggacagtctttcacatcccaaaagagtggaaaggtcggaggatcttgctgcactttgaagctgttgattctgcattctttgcttgggtaaatggagtactagttgggtatagccaggatagcagacttcctgctgagtttgaaattactgattgctgccatccttgtgattcggacaaggaaaatgttcttgctgttcaagttatgaggtggagtgatggctcttatcttgaagatcaggatcactggaggttgtctggtattcacagggatgtgctcctactatcaaagccacagatttttatcacagattacttcttcaaagcaaccttggatgaaaatttcagtttagccgatattgaggttgaggtggagattgactcacacaagcaagaccaggagcacgtcccaactttgtctattgaagcaacactcattgataactctggactatctaacagtatagatgctgatctttcatccgctaatgcagtcaatttgaaaccgaagccaaaacgaactcgaagcccttgtcttggttttcatggttatgtacttggtggaaaaatagaaaatccaaaactttggtctagtgagcatatgccaatgggaagcttattgactgtgaatcatgccaagtgggcattcgtaatgtggtcatggcacacaagcaaatgctcgtcaatggatgtcctgttgtgctaagaggtgtcaacagacatgagcaccatccacgccttggaaagacaaatttagaagcatgcatgatcaaggacctgattttgatgaggcaaaacaatatcaatgctgttagaaatagccattacccacagcacccaaggtggtatgagttatgtgacatttttggtctttatgtcatagatgaagccaacattgagacacatggttttgatgaatctaacactttcaaacatcctacacttgaacctatttgggcaaatgcaatgcttgatcgtgttgttagcatggtggagagagataagaatcatgcatgcattattgtttggtctctaggaaatgaatcttcatatggacctaatcatgcttccatgtctggttggattcgtgaaagggatccaacaagactcctccattatgagggaggtggttccagaacatcatccacagatattgtgtgccccatgtatatgcgtgtctgggatgttgttaagatagcaaaagatccatctgaaacaaggcctctaattctttgcgaatattcacatgctatgggaaacagtaatgggaatattgatgcgtattggatggccatagacaacacttttggactccaaggaggttttatatgggactgggctgatcagggtttactgaaggaggactcagatgggtctaaattttgggcatatggcggcgactttggagatactccaaatgactccaatttttgcctcaatggcattgtgtggcctgatcggacgattcacccagctcttcatgaagtaaaataccttcaccagcctatcaaaatatcatcagcagataatatgcttaagattgaaaatggacacttttttgagacaacagaagctttggacttcagttgggttcttcatggagatggttgtgtcttgggctctggtccattgaatattccaactttggcaccacaaactagtcagctcatcaacatggaatcatcaccttggtttgccctttggagtgcctgtgcagcaaaagaagtatttttgtctgtgaatgtgaaacaaaggcatgaaacacgatgggctaaagctggtcatctcttggcttcagcacaactgtgtttgcctcagaaaaatggctttgtccccagcgtgatagcattgtccagtagccctttggtctgtgaacgcattggtgataatgtaaccatctgcaagaataatgcctggaaaattaaagtaaacagtcagttgggaacaatcgacagctggaaggtcaacgacgttgagcttatgagcaaggggatactcccatgcttttggcgcgcaccaactgacaacgacaaaggaggtttcttcaccaagccatatgactcgcgatggagagaagccttcctcgacaatgtctcgttccacagcagccagttctctgtcaaggagttgccggacaacaccgtggagttctccaccctctactacggtgttcccgggcacctacccaagcctgacgacgaagcctccgagtccattctcttccgggtgaagatggtatgccggatccacgggtcaggcgacgtggttctcgactacgaggtaaaccccaggagcgacctccctccccttccccgggtgggcgtcgtgttcagcgccgggaggtccctgagccacgtcacgtggtacgggcgcgggcccttcgagtgctacccggaccgcaaggcggcggcgcacgtcggcgtgtacgagagcagcgtggaggagctgcacgtgccgtacattgcccccgtggagtgcggcgggcgggcggacgtcaggtgggtggcactccgcgacgccggcgggctcggcctgtacgcgtcggcgcacggcggctccccgccgatgcagatgagcgcgagctactacggcgccgcggagctggacagggcaacgcacgtccacaggctggtgaagggggacgacatcgaggtgcatcttgaccacaggcacatggggctgggcggcgacgacagctggtcgccgtgcgtgcacgagcagtacctgctgccgccgacgcggtacgccttctccctgcggctctgccccctgctgccgtcgtcgtcgtgccatgacatctacaggtctcagctccccagctgatggtgccgtgtgccggagacccgtcgacgtcgagccttgggaaacaacaatgaacgcaatggcctggccagtgaatgaaagtatataatattgtaataaagcagagacgtattagctcctgcaacggcctcgcgatcgcctggatatgtctatgctgagggggtgtttagttaactaataacctaactacatatggcgccaagttactaaaacttaataaataactattactaactaataaatagtaactgaattcctaacttaataaatacttcctccgtttataaatatatgacaccgttgattttttaaaaacaacttagatcactcgtcttattaaaaaaaataatgagttaccatttat

SEQ ID NO: 201404 - DNA, 3825 bp, Zea Mays
cgacggcatagcgtcttggactctctctcctctctctctgagtctctgtctctgtctcttccgacgcgacggcagatttgggaggtgtcgcggccagagagtgcacaggcacaactgacggtgctcgctcctctgctctgtgactcatcgctcgacgacgaaaacactcgttggatgttgcgctgtgttccaatccaatccgctccgctccgctccgctccgcaacccaattcccatctccgccggtgagggattcgccacaccacacgccaggccgcccctcggtcgcggaacccacttcctgctggcgcgcgccgtcttccgttggtccggacatgtgtctttgacagatcgttacaggaggaaagaggtgcccctgtttgtccacaatggctttagctcatgccagcgccatgtttcctccctcgagcccctcacataaaacttgggaggacccgtcattcttcaagtggagaaagcgtgaggcgcatgtaccactgcgctcacaggacacgctggaagcggctctgaagtattggcatgaacggaggaatgtgaactatcacaatgctgacactgctgtctggaacgatgacgctgttcgcggtgctctggaaagtgctgccttttggtccaagggcttaccgtacgccaaatctctaagcggatactggaaattccttctgtcgccttcagcggaaagtattccggagagattctattatgctcattttgatgattcaaactggtcgggtttgccagttccctcaaattggcaaatgcatgggtttgaccgtccaatctacacaaatgtcacatatcctttcccattgaacccaccatttgtgccggctgataatcccacaggttgttacaggacagtctttcacatcccaaaagagtggaaaggtcggaggatcttgctgcactttgaagctgttgattctgcattctttgcttgggtaaatggagtactagttgggtatagccaggatagcagacttcctgctgagtttgaaattactgattgctgccatccttgtgattcggacaaggaaaatgttcttgctgttcaagttatgaggtggagtgatggctcttatcttgaagatcaggatcactggaggttgtctggtattcacagggatgtgctcctactatcaaagccacagatttttatcacagattacttcttcaaagcaaccttggatgaaaatttcagtttagccgatattgaggttgaggtggagattgactcacacaagcaagaccaggagcacgtcccaactttgtctattgaagcaacactcattgataactctggactatctaacagtatagatgctgatctttcatccgctaatgcagtcaatttgaaaccgaagccaaaacgaactcgaagcccttgtcttggttttcatggttatgtacttggtggaaaaatagaaaatccaaaactttggtctagtgagcatatgccaatgggaagcttattgactgtgaatcatgccaagtgggcattcgtaatgtggtcatggcacacaagcaaatgctcgtcaatggatgtcctgttgtgctaagaggtgtcaacagacatgagcaccatccacgccttggaaagacaaatttagaagcatgcatgatcaaggacctgattttgatgaggcaaaacaatatcaatgctgttagaaatagccattacccacagcacccaaggttggattcgtgaaagggatccaacaagactcctccattatgagggaggtggttccagaacatcatccacagatattgtgtgccccatgtatatgcgtgtctgggatgttgttaagatagcaaaagatccatctgaaacaaggcctctaattctttgcgaatattcacatgctatgggaaacagtaatgggaatattgatgcgtattggatggccatagacaacacttttggactccaaggaggttttatatgggactgggctgatcagggtttactgaaggaggactcagatgggtctaaattttgggcatatggcggcgactttggagatactccaaatgactccaatttttgcctcaatggcattgtgtggcctgatcggacgattcacccagctcttcatgaagtaaaataccttcaccagcctatcaaaatatcatcagcagataatatgcttaagattgaaaatggacacttttttgagacaacagaagctttggacttcagttgggttcttcatggagatggttgtgtcttgggctctggtccattgaatattccaactttggcaccacaaactagtcagctcatcaacatggaatcatcaccttggtttgccctttggagtgcctgtgcagcaaaagaagtatttttgtctgtgaatgtgaaacaaaggcatgaaacacgatgggctaaagctggtcatctcttggcttcagcacaactgtgtttgcctcagaaaaatggctttgtccccagcgtgatagcattgtccagtagccctttggtctgtgaacgcattggtgataatgtaaccatctgcaagaataatgcctggaaaattaaagtaaacagtcagttgggaacaatcgacagctggaaggtcaacgacgttgagcttatgagcaaggggatactcccatgcttttggcgcgcaccaactgacaacgacaaaggaggtttcttcaccaagccatatgactcgcgatggagagaagccttcctcgacaatgtctcgttccacagcagccagttctctgtcaaggagttgccggacaacaccgtggagttctccaccctctactacggtgttcccgggcacctacccaagcctgacgacgaagcctccgagtccattctcttccgggtgaagatggtatgccggatccacgggtcaggcgacgtggttctcgactacgaggtaaaccccaggagcgacctccctccccttccccgggtgggcgtcgtgttcagcgccgggaggtccctgagccacgtcacgtggtacgggcgcgggcccttcgagtgctacccggaccgcaaggcggcggcgcacgtcggcgtgtacgagagcagcgtggaggagctgcacgtgccgtacattgcccccgtggagtgcggcgggcgggcggacgtcaggtgggtggcactccgcgacgccggcgggctcggcctgtacgcgtcggcgcacggcggctccccgccgatgcagatgagcgcgagctactacggcgccgcggagctggacagggcaacgcacgtccacaggctggtgaagggggacgacatcgaggtgcatcttgaccacaggcacatggggctgggcggcgacgacagctggtcgccgtgcgtgcacgagcagtacctgctgccgccgacgcggtacgccttctccctgcggctctgccccctgctgccgtcgtcgtcgtgccatgacatctacaggtctcagctccccagctgatggtgccgtgtgccggagacccgtcgacgtcgagccttgggaaacaacaatgaacgcaatggcctggccagtgaatgaaagtatataatattgtaataaagcagagacgtattagctcctgcaacggcctcgcgatcgcctggatatgtctatgctgagggggtgtttagttaactaataacctaactacatatggcgccaagttactaaaacttaataaataactattactaactaataaatagtaactgaattcctaacttaataaatacttcctccgtttataaatatatgacaccgttgattttttaaaaacaacttagatcactcgtcttattaaaaaaaataatgagttaccatttat

SEQ ID NO: 201405 - DNA, 3996 bp, Zea Mays
ctcaggccagcaaatcctccgaaatgcaagcggcccacctgcttccgacggcatagcgtcttggactctctctcctctctctctgagtctctgtctctgtctcttccgacgcgacggcagatttgggaggtgtcgcggccagagagtgcacaggcacaactgacggtgctcgctcctctgctctgtgactcatcgctcgacgacgaaaacactcgttggatgttgcgctgtgttccaatccaatccgctccgctccgctccgctccgcaacccaattcccatctccgccggtgagggattcgccacaccacacgccaggccgcccctcggtcgcggaacccacttcctgctggcgcgcgccgtcttccgttggtccggacatgtgtctttgacagatcgttacaggaggaaagaggtgcccctgtttgtccacaatggctttagctcatgccagcgccatgtttcctccctcgagcccctcacataaaacttgggaggacccgtcattcttcaagtggagaaagcgtgaggcgcatgtaccactgcgctcacaggacacgctggaagcggctctgaagtattggcatgaacggaggaatgtgaactatcacaatgctgacactgctgtctggaacgatgacgctgttcgcggtgctctggaaagtgctgccttttggtccaagggcttaccgtacgccaaatctctaagcggatactggaaattccttctgtcgccttcagcggaaagtattccggagagattctattatgctcattttgatgattcaaactggtcgggtttgccagttccctcaaattggcaaatgcatgggtttgaccgtccaatctacacaaatgtcacatatcctttcccattgaacccaccatttgtgccggctgataatcccacaggttgttacaggacagtctttcacatcccaaaagagtggaaaggtcggaggatcttgctgcactttgaagctgttgattctgcattctttgcttgggtaaatggagtactagttgggtatagccaggatagcagacttcctgctgagtttgaaattactgattgctgccatccttgtgattcggacaaggaaaatgttcttgctgttcaagttatgaggtggagtgatggctcttatcttgaagatcaggatcactggaggttgtctggtattcacagggatgtgctcctactatcaaagccacagatttttatcacagattacttcttcaaagcaaccttggatgaaaatttcagtttagccgatattgaggttgaggtggagattgactcacacaagcaagaccaggagcacgtcccaactttgtctattgaagcaacactcattgataactctggactatctaacagtatagatgctgatctttcatccgctaatgcagtcaatttgaaaccgaagccaaaacgaactcgaagcccttgtcttggttttcatggttatgtacttggtggaaaaatagaaaatccaaaactttggtctagtgagcatcctaacttatacacgcttgttgttctccttaaagatgccaatgggaagcttattgactgtgaatcatgccaagtgggcattcgtaatgtggtcatggcacacaagcaaatgctcgtcaatggatgtcctgttgtgctaagaggtgtcaacagacatgagcaccatccacgccttggaaagacaaatttagaagcatgcatgatcaaggacctgattttgatgaggcaaaacaatatcaatgctgttagaaatagccattacccacagcacccaagcatggtggagagagataagaatcatgcatgcattattgtttggtctctaggaaatgaatcttcatatggacctaatcatgcttccatgtctggttggattcgtgaaagggatccaacaagactcctccattatgagggaggtggttccagaacatcatccacagatattgtgtgccccatgtatatgcgtgtctgggatgttgttaagatagcaaaagatccatctgaaacaaggcctctaattctttgcgaatattcacatgctatgggaaacagtaatgggaatattgatgcgtattggatggccatagacaacacttttggactccaaggaggttttatatgggactgggctgatcagggtttactgaaggaggactcagatgggtctaaattttgggcatatggcggcgactttggagatactccaaatgactccaatttttgcctcaatggcattgtgtggcctgatcggacgattcacccagctcttcatgaagtaaaataccttcaccagcctatcaaaatatcatcagcagataatatgcttaagattgaaaatggacacttttttgagacaacagaagctttggacttcagttgggttcttcatggagatggttgtgtcttgggctctggtccattgaatattccaactttggcaccacaaactagtcagctcatcaacatggaatcatcaccttggtttgccctttggagtgcctgtgcagcaaaagaagtatttttgtctgtgaatgtgaaacaaaggcatgaaacacgatgggctaaagctggtcatctcttggcttcagcacaactgtgtttgcctcagaaaaatggctttgtccccagcgtgatagcattgtccagtagccctttggtctgtgaacgcattggtgataatgtaaccatctgcaagaataatgcctggaaaattaaagtaaacagtcagttgggaacaatcgacagctggaaggtcaacgacgttgagcttatgagcaaggggatactcccatgcttttggcgcgcaccaactgacaacgacaaaggaggtttcttcaccaagccatatgactcgcgatggagagaagccttcctcgacaatgtctcgttccacagcagccagttctctgtcaaggagttgccggacaacaccgtggagttctccaccctctactacggtgttcccgggcacctacccaagcctgacgacgaagcctccgagtccattctcttccgggtgaagatggtatgccggatccacgggtcaggcgacgtggttctcgactacgaggtaaaccccaggagcgacctccctccccttccccgggtgggcgtcgtgttcagcgccgggaggtccctgagccacgtcacgtggtacgggcgcgggcccttcgagtgctacccggaccgcaaggcggcggcgcacgtcggcgtgtacgagagcagcgtggaggagctgcacgtgccgtacattgcccccgtggagtgcggcgggcgggcggacgtcaggtgggtggcactccgcgacgccggcgggctcggcctgtacgcgtcggcgcacggcggctccccgccgatgcagatgagcgcgagctactacggcgccgcggagctggacagggcaacgcacgtccacaggctggtgaagggggacgacatcgaggtgcatcttgaccacaggcacatggggctgggcggcgacgacagctggtcgccgtgcgtgcacgagcagtacctgctgccgccgacgcggtacgccttctccctgcggctctgccccctgctgccgtcgtcgtcgtgccatgacatctacaggtctcagctccccagctgatggtgccgtgtgccggagacccgtcgacgtcgagccttgggaaacaacaatgaacgcaatggcctggccagtgaatgaaagtatataatattgtaataaagcagagacgtattagctcctgcaacggcctcgcgatcgcctggatatgtctatgctgagggggtgtttagttaactaataacctaactacatatggcgccaagttactaaaacttaataaataactattactaactaataaatagtaactgaattcctaacttaataaatacttcctccgtttataaatatatgacaccgttgattttttaaaaacaacttagatcactcgtcttattaaaaaaaataatgagttaccatttat

SEQ ID NO: 201406 - DNA, 4645 bp, Zea Mays
ccatcgcatccaagaattgaccgactcccagtgacgccctgtgtgctggcttggctctgcctctgtgtgttggcctgttgggtagagagagactggtgaccgaagaagcaaggaaggcagctgtgctgtgcagtgagaggtccgtgcaggcaaagcctagctgcagttgcttgcttgccatccacaccacacacccacagcaaagccacgaaccaactcatcgggcgcggagaccaccgcggggggaaaagcgagggaggggggagaggactgaagagaaatcatggagccgatttgctgtggagattcgggcgcgtgatccggtcggatcttgctttcccggggggcgatcgaggccacgccgctgctgccgcggtgccctccctctgcctctgggctctgcgtgtgacgtgccgtgccatggcgctcgccctcgcctatatccccagcctccctcgccccgccgctggccgccgcattcagtaaaaagccacctaccctaccctcctgcgctggtactacttactacctagccaggccaaggagcccaacgagggggaacgctgcggtaggcgcgcgctgctcgtcccaccccacgccgccatgacggtgccagatgccgagtcgcgcttccatgtcctcgcggtggacgacagcctcgtcgacaggaaactcatcgagatgctgctcaagacctcgtcctaccaagtgaccacggtggattccgggagcaaggcgctggagctgctggggctgagggacgcgtcgtcgccgtctccgtcctcgcctgaccaccaggagatcgacgtgaatctcatcatcactgactactgcatgccaggcatgacaggatacgatctgctcaagagagtgaaggggtcctcctcgctcaaggacattcctgtggtgatcatgtcgtctgagaatgtgcctgcccggatcagcaggacatgtgtctttgacagatcgttacaggaggaaagaggtgcccctgtttgtccacaatggctttagctcatgccagcgccatgtttcctccctcgagcccctcacataaaacttgggaggacccgtcattcttcaagtggagaaagcgtgaggcgcatgtaccactgcgctcacaggacacgctggaagcggctctgaagtattggcatgaacggaggaatgtgaactatcacaatgctgacactgctgtctggaacgatgacgctgttcgcggtgctctggaaagtgctgccttttggtccaagggcttaccgtacgccaaatctctaagcggatactggaaattccttctgtcgccttcagcggaaagtattccggagagattctattatgctcattttgatgattcaaactggtcgggtttgccagttccctcaaattggcaaatgcatgggtttgaccgtccaatctacacaaatgtcacatatcctttcccattgaacccaccatttgtgccggctgataatcccacaggttgttacaggacagtctttcacatcccaaaagagtggaaaggtcggaggatcttgctgcactttgaagctgttgattctgcattctttgcttgggtaaatggagtactagttgggtatagccaggatagcagacttcctgctgagtttgaaattactgattgctgccatccttgtgattcggacaaggaaaatgttcttgctgttcaagttatgaggtggagtgatggctcttatcttgaagatcaggatcactggaggttgtctggtattcacagggatgtgctcctactatcaaagccacagatttttatcacagattacttcttcaaagcaaccttggatgaaaatttcagtttagccgatattgaggttgaggtggagattgactcacacaagcaagaccaggagcacgtcccaactttgtctattgaagcaacactcattgataactctggactatctaacagtatagatgctgatctttcatccgctaatgcagtcaatttgaaaccgaagccaaaacgaactcgaagcccttgtcttggttttcatggttatgtacttggtggaaaaatagaaaatccaaaactttggtctagtgagcatatgccaatgggaagcttattgactgtgaatcatgccaagtgggcattcgtaatgtggtcatggcacacaagcaaatgctcgtcaatggatgtcctgttgtgctaagaggtgtcaacagacatgagcaccatccacgccttggaaagacaaatttagaagcatgcatgatcaaggacctgattttgatgaggcaaaacaatatcaatgctgttagaaatagccattacccacagcacccaaggtggtatgagttatgtgacatttttggtctttatgtcatagatgaagccaacattgagacacatggttttgatgaatctaacactttcaaacatcctacacttgaacctatttgggcaaatgcaatgcttgatcgtgttgttagcatggtggagagagataagaatcatgcatgcattattgtttggtctctaggaaatgaatcttcatatggacctaatcatgcttccatgtctggttggattcgtgaaagggatccaacaagactcctccattatgagggaggtggttccagaacatcatccacagatattgtgtgccccatgtatatgcgtgtctgggatgttgttaagatagcaaaagatccatctgaaacaaggcctctaattctttgcgaatattcacatgctatgggaaacagtaatgggaatattgatgcgtattggatggccatagacaacacttttggactccaaggaggttttatatgggactgggctgatcagggtttactgaaggaggactcagatgggtctaaattttgggcatatggcggcgactttggagatactccaaatgactccaatttttgcctcaatggcattgtgtggcctgatcggacgattcacccagctcttcatgaagtaaaataccttcaccagcctatcaaaatatcatcagcagataatatgcttaagaagctttggacttcagttgggttcttcatggagatggttgtgtcttgggctctggtccattgaatattccaactttggcaccacaaactagtcagctcatcaacatggaatcatcaccttggtttgccctttggagtgcctgtgcagcaaaagaagtatttttgtctgtgaatgtgaaacaaaggcatgaaacacgatgggctaaagctggtcatctcttggcttcagcacaactgtgtttgcctcagaaaaatggctttgtccccagcgtgatagcattgtccagtagccctttggtctgtgaacgcattggtgataatgtaaccatctgcaagaataatgcctggaaaattaaagtaaacagtcagttgggaacaatcgacagctggaaggtcaacgacgttgagcttatgagcaaggggatactcccatgcttttggcgcgcaccaactgacaacgacaaaggaggtttcttcaccaagccatatgactcgcgatggagagaagccttcctcgacaatgtctcgttccacagcagccagttctctgtcaaggagttgccggacaacaccgtggagttctccaccctctactacggtgttcccgggcacctacccaagcctgacgacgaagcctccgagtccattctcttccgggtgaagatggtatgccggatccacgggtcaggcgacgtggttctcgactacgaggtaaaccccaggagcgacctccctccccttccccgggtgggcgtcgtgttcagcgccgggaggtccctgagccacgtcacgtggtacgggcgcgggcccttcgagtgctacccggaccgcaaggcggcggcgcacgtcggcgtgtacgagagcagcgtggaggagctgcacgtgccgtacattgcccccgtggagtgcggcgggcgggcggacgtcaggtgggtggcactccgcgacgccggcgggctcggcctgtacgcgtcggcgcacggcggctccccgccgatgcagatgagcgcgagctactacggcgccgcggagctggacagggcaacgcacgtccacaggctggtgaagggggacgacatcgaggtgcatcttgaccacaggcacatggggctgggcggcgacgacagctggtcgccgtgcgtgcacgagcagtacctgctgccgccgacgcggtacgccttctccctgcggctctgccccctgctgccgtcgtcgtcgtgccatgacatctacaggtctcagctccccagctgatggtgccgtgtgccggagacccgtcgacgtcgagccttgggaaacaacaatgaacgcaatggcctggccagtgaatgaaagtatataatattgtaataaagcagagacgtattagctcctgcaacggcctcgcgatcgcctggatatgtctatgctgagggggtgtttagttaactaataacctaactacatatggcgccaagttactaaaacttaataaataactattactaactaataaatagtaactgaattcctaacttaataaatacttcctccgtttataaatatatgacaccgttgattttttaaaaacaacttagatcactcgtcttattaaaaaaaataatgagttaccatttat

SEQ ID NO: 201407 - DNA, 4727 bp, Zea Mays
ccatcgcatccaagaattgaccgactcccagtgacgccctgtgtgctggcttggctctgcctctgtgtgttggcctgttgggtagagagagactggtgaccgaagaagcaaggaaggcagctgtgctgtgcagtgagaggtccgtgcaggcaaagcctagctgcagttgcttgcttgccatccacaccacacacccacagcaaagccacgaaccaactcatcgggcgcggagaccaccgcggggggaaaagcgagggaggggggagaggactgaagagaaatcatggagccgatttgctgtggagattcgggcgcgtgatccggtcggatcttgctttcccggggggcgatcgaggccacgccgctgctgccgcggtgccctccctctgcctctgggctctgcgtgtgacgtgccgtgccatggcgctcgccctcgcctatatccccagcctccctcgccccgccgctggccgccgcattcagtaaaaagccacctaccctaccctcctgcgctggtactacttactacctagccaggccaaggagcccaacgagggggaacgctgcggtaggcgcgcgctgctcgtcccaccccacgccgccatgacggtgccagatgccgagtcgcgcttccatgtcctcgcggtggacgacagcctcgtcgacaggaaactcatcgagatgctgctcaagacctcgtcctaccaagtgaccacggtggattccgggagcaaggcgctggagctgctggggctgagggacgcgtcgtcgccgtctccgtcctcgcctgaccaccaggagatcgacgtgaatctcatcatcactgactactgcatgccaggcatgacaggatacgatctgctcaagagagtgaaggggtcctcctcgctcaaggacattcctgtggtgatcatgtcgtctgagaatgtgcctgcccggatcagcaggacatgtgtctttgacagatcgttacaggaggaaagaggtgcccctgtttgtccacaatggctttagctcatgccagcgccatgtttcctccctcgagcccctcacataaaacttgggaggacccgtcattcttcaagtggagaaagcgtgaggcgcatgtaccactgcgctcacaggacacgctggaagcggctctgaagtattggcatgaacggaggaatgtgaactatcacaatgctgacactgctgtctggaacgatgacgctgttcgcggtgctctggaaagtgctgccttttggtccaagggcttaccgtacgccaaatctctaagcggatactggaaattccttctgtcgccttcagcggaaagtattccggagagattctattatgctcattttgatgattcaaactggtcgggtttgccagttccctcaaattggcaaatgcatgggtttgaccgtccaatctacacaaatgtcacatatcctttcccattgaacccaccatttgtgccggctgataatcccacaggttgttacaggacagtctttcacatcccaaaagagtggaaaggtcggaggatcttgctgcactttgaagctgttgattctgcattctttgcttgggtaaatggagtactagttgggtatagccaggatagcagacttcctgctgagtttgaaattactgattgctgccatccttgtgattcggacaaggaaaatgttcttgctgttcaagttatgaggtggagtgatggctcttatcttgaagatcaggatcactggaggttgtctggtattcacagggatgtgctcctactatcaaagccacaggttactccttgattcttacatgatttttatcacagattacttcttcaaagcaaccttggatgaaaatttcagtttagccgatattgaggttgaggtggagattgactcacacaagcaagaccaggagcacgtcccaactttgtctattgaagcaacactcattgataactctggactatctaacagtatagatgctgatctttcatccgctaatgcagtcaatttgaaaccgaagccaaaacgaactcgaagcccttgtcttggttttcatggttatgtacttggtggaaaaatagaaaatccaaaactttggtctagtgagcatcctaacttatacacgcttgttgttctccttaaagatgccaatgggaagcttattgactgtgaatcatgccaagtgggcattcgtaatgtggtcatggcacacaagcaaatgctcgtcaatggatgtcctgttgtgctaagaggtgtcaacagacatgagcaccatccacgccttggaaagacaaatttagaagcatgcatgatcaaggacctgattttgatgaggcaaaacaatatcaatgctgttagaaatagccattacccacagcacccaaggtggtatgagttatgtgacatttttggtctttatgtcatagatgaagccaacattgagacacatggttttgatgaatctaacactttcaaacatcctacacttgaacctatttgggcaaatgcaatgcttgatcgtgttgttagcatggtggagagagataagaatcatgcatgcattattgtttggtctctaggaaatgaatcttcatatggacctaatcatgcttccatgttggattcgtgaaagggatccaacaagactcctccattatgagggaggtggttccagaacatcatccacagatattgtgtgccccatgtatatgcgtgtctgggatgttgttaagatagcaaaagatccatctgaaacaaggcctctaattctttgcgaatattcacatgctatgggaaacagtaatgggaatattgatgcgtattggatggccatagacaacacttttggactccaaggaggttttatatgggactgggctgatcagggtttactgaaggaggactcagatgggtctaaattttgggcatatggcggcgactttggagatactccaaatgactccaatttttgcctcaatggcattgtgtggcctgatcggacgattcacccagctcttcatgaagtaaaataccttcaccagcctatcaaaatatcatcagcagataatatgcttaagattgaaaatggacacttttttgagacaacagaagctttggacttcagttgggttcttcatggagatggttgtgtcttgggctctggtccattgaatattccaactttggcaccacaaactagtcagctcatcaacatggaatcatcaccttggtttgccctttggagtgcctgtgcagcaaaagaagtatttttgtctgtgaatgtgaaacaaaggcatgaaacacgatgggctaaagctggtcatctcttggcttcagcacaactgtgtttgcctcagaaaaatggctttgtccccagcgtgatagcattgtccagtagccctttggtctgtgaacgcattggtgataatgtaaccatctgcaagaataatgcctggaaaattaaagtaaacagtcagttgggaacaatcgacagctggaaggtcaacgacgttgagcttatgagcaaggggatactcccatgcttttggcgcgcaccaactgacaacgacaaaggaggtttcttcaccaagccatatgactcgcgatggagagaagccttcctcgacaatgtctcgttccacagcagccagttctctgtcaaggagttgccggacaacaccgtggagttctccaccctctactacggtgttcccgggcacctacccaagcctgacgacgaagcctccgagtccattctcttccgggtgaagatggtatgccggatccacgggtcaggcgacgtggttctcgactacgaggtaaaccccaggagcgacctccctccccttccccgggtgggcgtcgtgttcagcgccgggaggtccctgagccacgtcacgtggtacgggcgcgggcccttcgagtgctacccggaccgcaaggcggcggcgcacgtcggcgtgtacgagagcagcgtggaggagctgcacgtgccgtacattgcccccgtggagtgcggcgggcgggcggacgtcaggtgggtggcactccgcgacgccggcgggctcggcctgtacgcgtcggcgcacggcggctccccgccgatgcagatgagcgcgagctactacggcgccgcggagctggacagggcaacgcacgtccacaggctggtgaagggggacgacatcgaggtgcatcttgaccacaggcacatggggctgggcggcgacgacagctggtcgccgtgcgtgcacgagcagtacctgctgccgccgacgcggtacgccttctccctgcggctctgccccctgctgccgtcgtcgtcgtgccatgacatctacaggtctcagctccccagctgatggtgccgtgtgccggagacccgtcgacgtcgagccttgggaaacaacaatgaacgcaatggcctggccagtgaatgaaagtatataatattgtaataaagcagagacgtattagctcctgcaacggcctcgcgatcgcctggatatgtctatgctgagggggtgtttagttaactaataacctaactacatatggcgccaagttactaaaacttaataaataactattactaactaataaatagtaactgaattcctaacttaataaatacttcctccgtttataaatatatgacaccgttgattttttaaaaacaacttagatcactcgtcttattaaaaaaaataatgagttaccatttat

SEQ ID NO: 201408 - DNA, 4439 bp, Zea Mays
ccatcgcatccaagaattgaccgactcccagtgacgccctgtgtgctggcttggctctgcctctgtgtgttggcctgttgggtagagagagactggtgaccgaagaagcaaggaaggcagctgtgctgtgcagtgagaggtccgtgcaggcaaagcctagctgcagttgcttgcttgccatccacaccacacacccacagcaaagccacgaaccaactcatcgggcgcggagaccaccgcggggggaaaagcgagggaggggggagaggactgaagagaaatcatggagccgatttgctgtggagattcgggcgcgtgatccggtcggatcttgctttcccggggggcgatcgaggccacgccgctgctgccgcggtgccctccctctgcctctgggctctgcgtgtgacgtgccgtgccatggcgctcgccctcgcctatatccccagcctccctcgccccgccgctggccgccgcattcagtaaaaagccacctaccctaccctcctgcgctggtactacttactacctagccaggccaaggagcccaacgagggggaacgctgcggtaggcgcgcgctgctcgtcccaccccacgccgccatgacggtgccagatgccgagtcgcgcttccatgtcctcgcggtggacgacagcctcgtcgacaggaaactcatcgagatgctgctcaagacctcgtcctaccaagtgaccacggtggattccgggagcaaggcgctggagctgctggggctgagggacgcgtcgtcgccgtctccgtcctcgcctgaccaccaggagatcgacgtgaatctcatcatcactgactactgcatgccaggcatgacaggatacgatctgctcaagagagtgaaggggtcctcctcgctcaaggacattcctgtggtgatcatgtcgtctgagaatgtgcctgcccggatcagcaggacatgtgtctttgacagatcgttacaggaggaaagaggtgcccctgtttgtccacaatggctttagctcatgccagcgccatgtttcctccctcgagcccctcacataaaacttgggaggacccgtcattcttcaagtggagaaagcgtgaggcgcatgtaccactgcgctcacaggacacgctggaagcggctctgaagtattggcatgaacggaggaatgtgaactatcacaatgctgacactgctgtctggaacgatgacgctgttcgcggtgctctggaaagtgctgccttttggtccaagggcttaccgtacgccaaatctctaagcggatactggaaattccttctgtcgccttcagcggaaagtattccggagagattctattatgctcattttgatgattcaaactggtcgggtttgccagttccctcaaattggcaaatgcatgggtttgaccgtccaatctacacaaatgtcacatatcctttcccattgaacccaccatttgtgccggctgataatcccacaggttgttacaggacagtctttcacatcccaaaagagtggaaaggtcggaggatcttgctgcactttgaagctgttgattctgcattctttgcttgggtaaatggagtactagttgggtatagccaggatagcagacttcctgctgagtttgaaattactgattgctgccatccttgtgattcggacaaggaaaatgttcttgctgttcaagttatgaggtggagtgatggctcttatcttgaagatcaggatcactggaggttgtctggtattcacagggatgtgctcctactatcaaagccacagatttttatcacagattacttcttcaaagcaaccttggatgaaaatttcagtttagccgatattgagatgccaatgggaagcttattgactgtgaatcatgccaagtgggcattcgtaatgtggtcatggcacacaagcaaatgctcgtcaatggatgtcctgttgtgctaagaggtgtcaacagacatgagcaccatccacgccttggaaagacaaatttagaagcatgcatgatcaaggacctgattttgatgaggcaaaacaatatcaatgctgttagaaatagccattacccacagcacccaaggtggtatgagttatgtgacatttttggtctttatgtcatagatgaagccaacattgagacacatggttttgatgaatctaacactttcaaacatcctacacttgaacctatttgggcaaatgcaatgcttgatcgtgttgttagcatggtggagagagataagaatcatgcatgcattattgtttggtctctaggaaatgaatcttcatatggacctaatcatgcttccatgtctggttggattcgtgaaagggatccaacaagactcctccattatgagggaggtggttccagaacatcatccacagatattgtgtgccccatgtatatgcgtgtctgggatgttgttaagatagcaaaagatccatctgaaacaaggcctctaattctttgcgaatattcacatgctatgggaaacagtaatgggaatattgatgcgtattggatggccatagacaacacttttggactccaaggaggttttatatgggactgggctgatcagggtttactgaaggaggactcagatgggtctaaattttgggcatatggcggcgactttggagatactccaaatgactccaatttttgcctcaatggcattgtgtggcctgatcggacgattcacccagctcttcatgaagtaaaataccttcaccagcctatcaaaatatcatcagcagataatatgcttaagattgaaaatggacacttttttgagacaacagaagctttggacttcagttgggttcttcatggagatggttgtgtcttgggctctggtccattgaatattccaactttggcaccacaaactagtcagctcatcaacatggaatcatcaccttggtttgccctttggagtgcctgtgcagcaaaagaagtatttttgtctgtgaatgtgaaacaaaggcatgaaacacgatgggctaaagctggtcatctcttggcttcagcacaactgtgtttgcctcagaaaaatggctttgtccccagcgtgatagcattgtccagtagccctttggtctgtgaacgcattggtgataatgtaaccatctgcaagaataatgcctggaaaattaaagtaaacagtcagttgggaacaatcgacagctggaaggtcaacgacgttgagcttatgagcaaggggatactcccatgcttttggcgcgcaccaactgacaacgacaaaggaggtttcttcaccaagccatatgactcgcgatggagagaagccttcctcgacaatgtctcgttccacagcagccagttctctgtcaaggagttgccggacaacaccgtggagttctccaccctctactacggtgttcccgggcacctacccaagcctgacgacgaagcctccgagtccattctcttccgggtgaagatggtatgccggatccacgggtcaggcgacgtggttctcgactacgaggtaaaccccaggagcgacctccctccccttccccgggtgggcgtcgtgttcagcgccgggaggtccctgagccacgtcacgtggtacgggcgcgggcccttcgagtgctacccggaccgcaaggcggcggcgcacgtcggcgtgtacgagagcagcgtggaggagctgcacgtgccgtacattgcccccgtggagtgcggcgggcgggcggacgtcaggtgggtggcactccgcgacgccggcgggctcggcctgtacgcgtcggcgcacggcggctccccgccgatgcagatgagcgcgagctactacggcgccgcggagctggacagggcaacgcacgtccacaggctggtgaagggggacgacatcgaggtgcatcttgaccacaggcacatggggctgggcggcgacgacagctggtcgccgtgcgtgcacgagcagtacctgctgccgccgacgcggtacgccttctccctgcggctctgccccctgctgccgtcgtcgtcgtgccatgacatctacaggtctcagctccccagctgatggtgccgtgtgccggagacccgtcgacgtcgagccttgggaaacaacaatgaacgcaatggcctggccagtgaatgaaagtatataatattgtaataaagcagagacgtattagctcctgcaacggcctcgcgatcgcctggatatgtctatgctgagggggtgtttagttaactaataacctaactacatatggcgccaagttactaaaacttaataaataactattactaactaataaatagtaactgaattcctaacttaataaatacttcctccgtttataaatatatgacaccgttgattttttaaaaacaacttagatcactcgtcttattaaaaaaaataatgagttaccatttat

SEQ ID NO: 201409 - DNA, 4607 bp, Zea Mays
cgggcctccgctttgcttggaagacctgcgcgcgccgggccgacgcccatccaccatccatcgcatccaagaattgaccgactcccagtgacgccctgtgtgctggcttggctctgcctctgtgtgttggcctgttgggtagagagagactggtgaccgaagaagcaaggaaggcagctgtgctgtgcagtgagaggtccgtgcaggcaaagcctagctgcagttgcttgcttgccatccacaccacacacccacagcaaagccacgaaccaactcatcgggcgcggagaccaccgcggggggaaaagcgagggaggggggagaggactgaagagaaatcatggagccgatttgctgtggagattcgggcgcgtgatccggtcggatcttgctttcccggggggcgatcgaggccacgccgctgctgccgcggtgccctccctctgcctctgggctctgcgtgtgacgtgccgtgccatggcgctcgccctcgcctatatccccagcctccctcgccccgccgctggccgccgcattcagtaaaaagccacctaccctaccctcctgcgctggtactacttactacctagccaggccaaggagcccaacgagggggaacgctgcggtaggcgcgcgctgctcgtcccaccccacgccgccatgacggtgccagatgccgagtcgcgcttccatgtcctcgcggtggacgacagcctcgtcgacaggaaactcatcgagatgctgctcaagacctcgtcctaccaagtgaccacggtggattccgggagcaaggcgctggagctgctggggctgagggacgcgtcgtcgccgtctccgtcctcgcctgaccaccaggagatcgacgtgaatctcatcatcactgactactgcatgccaggcatgacaggatacgatctgctcaagagagtgaaggggtcctcctcgctcaaggacattcctgtggtgatcatgtcgtctgagaatgtgcctgcccggatcagcaggacatgtgtctttgacagatcgttacaggaggaaagaggtgcccctgtttgtccacaatggctttagctcatgccagcgccatgtttcctccctcgagcccctcacataaaacttgggaggacccgtcattcttcaagtggagaaagcgtgaggcgcatgtaccactgcgctcacaggacacgctggaagcggctctgaagtattggcatgaacggaggaatgtgaactatcacaatgctgacactgctgtctggaacgatgacgctgttcgcggtgctctggaaagtgctgccttttggtccaagggcttaccgtacgccaaatctctaagcggatactggaaattccttctgtcgccttcagcggaaagtattccggagagattctattatgctcattttgatgattcaaactggtcgggtttgccagttccctcaaattggcaaatgcatgggtttgaccgtccaatctacacaaatgtcacatatcctttcccattgaacccaccatttgtgccggctgataatcccacaggttgttacaggacagtctttcacatcccaaaagagtggaaaggtcggaggatcttgctgcactttgaagctgttgattctgcattctttgcttgggtaaatggagtactagttgggtatagccaggatagcagacttcctgctgagtttgaaattactgattgctgccatccttgtgattcggacaaggaaaatgttcttgctgttcaagttatgaggtggagtgatggctcttatcttgaagatcaggatcactggaggttgtctggtattcacagggatgtgctcctactatcaaagccacagatttttatcacagattacttcttcaaagcaaccttggatgaaaatttcagtttagccgatattgaggttgaggtggagattgactcacacaagcaagaccaggagcacgtcccaactttgtctattgaagcaacactcattgataactctggactatctaacagtatagatgctgatctttcatccgctaatgcagtcaatttgaaaccgaagccaaaacgaactcgaagcccttgtcttggttttcatggttatgtacttggtggaaaaatagaaaatccaaaactttggtctagtgagcatcctaacttatacacgcttgttgttctccttaaagatgccaatgggaagcttattgactgtgaatcatgccaagtgggcattcgtaatgtggtcatggcacacaagcaaatgctcgtcaatggatgtcctgttgtgctaagaggtgtcaacagacatgagcaccatccacgccttggaaagacaaatttagaagcatgcatgatcaaggacctgattttgatgaggcaaaacaatatcaatgctgttagaaatagccattacccacagcacccaaggtggtatgagttatgtgacatttttggtctttatgtcatagatgaagccaacattgagacacatggttttgatgaatctaacactttcaaacatcctacacttgaacctatttgggcaaatgcaatgcttgatcgtgttgttagcatggtggagagagataagaatcatgcatgcattattgtttggtctctaggaaatgaatcttcatatggacctaatcatgcttccatgtctgatattcacatgctatgggaaacagtaatgggaatattgatgcgtattggatggccatagacaacacttttggactccaaggaggttttatatgggactgggctgatcagggtttactgaaggaggactcagatgggtctaaattttgggcatatggcggcgactttggagatactccaaatgactccaatttttgcctcaatggcattgtgtggcctgatcggacgattcacccagctcttcatgaagtaaaataccttcaccagcctatcaaaatatcatcagcagataatatgcttaagattgaaaatggacacttttttgagacaacagaagctttggacttcagttgggttcttcatggagatggttgtgtcttgggctctggtccattgaatattccaactttggcaccacaaactagtcagctcatcaacatggaatcatcaccttggtttgccctttggagtgcctgtgcagcaaaagaagtatttttgtctgtgaatgtgaaacaaaggcatgaaacacgatgggctaaagctggtcatctcttggcttcagcacaactgtgtttgcctcagaaaaatggctttgtccccagcgtgatagcattgtccagtagccctttggtctgtgaacgcattggtgataatgtaaccatctgcaagaataatgcctggaaaattaaagtaaacagtcagttgggaacaatcgacagctggaaggtcaacgacgttgagcttatgagcaaggggatactcccatgcttttggcgcgcaccaactgacaacgacaaaggaggtttcttcaccaagccatatgactcgcgatggagagaagccttcctcgacaatgtctcgttccacagcagccagttctctgtcaaggagttgccggacaacaccgtggagttctccaccctctactacggtgttcccgggcacctacccaagcctgacgacgaagcctccgagtccattctcttccgggtgaagatggtatgccggatccacgggtcaggcgacgtggttctcgactacgaggtaaaccccaggagcgacctccctccccttccccgggtgggcgtcgtgttcagcgccgggaggtccctgagccacgtcacgtggtacgggcgcgggcccttcgagtgctacccggaccgcaaggcggcggcgcacgtcggcgtgtacgagagcagcgtggaggagctgcacgtgccgtacattgcccccgtggagtgcggcgggcgggcggacgtcaggtgggtggcactccgcgacgccggcgggctcggcctgtacgcgtcggcgcacggcggctccccgccgatgcagatgagcgcgagctactacggcgccgcggagctggacagggcaacgcacgtccacaggctggtgaagggggacgacatcgaggtgcatcttgaccacaggcacatggggctgggcggcgacgacagctggtcgccgtgcgtgcacgagcagtacctgctgccgccgacgcggtacgccttctccctgcggctctgccccctgctgccgtcgtcgtcgtgccatgacatctacaggtctcagctccccagctgatggtgccgtgtgccggagacccgtcgacgtcgagccttgggaaacaacaatgaacgcaatggcctggccagtgaatgaaagtatataatattgtaataaagcagagacgtattagctcctgcaacggcctcgcgatcgcctggatatgtctatgctgagggggtgtttagttaactaataacctaactacatatggcgccaagttactaaaacttaataaataactattactaactaataaatagtaactgaattcctaacttaataaatacttcctccgtttataaatatatgacaccgttgattttttaaaaacaacttagatcactcgtcttattaaaaaaaataatgagttaccatttat

SEQ ID NO: 201410 - DNA, 4814 bp, Zea Mays
cggatcggaggggctcgtggctccgcctccgggctccccgccccggtcgggcctccgctttgcttggaagacctgcgcgcgccgggccgacgcccatccaccatccatcgcatccaagaattgaccgactcccagtgacgccctgtgtgctggcttggctctgcctctgtgtgttggcctgttgggtagagagagactggtgaccgaagaagcaaggaaggcagctgtgctgtgcagtgagaggtccgtgcaggcaaagcctagctgcagttgcttgcttgccatccacaccacacacccacagcaaagccacgaaccaactcatcgggcgcggagaccaccgcggggggaaaagcgagggaggggggagaggactgaagagaaatcatggagccgatttgctgtggagattcgggcgcgtgatccggtcggatcttgctttcccggggggcgatcgaggccacgccgctgctgccgcggtgccctccctctgcctctgggctctgcgtgtgacgtgccgtgccatggcgctcgccctcgcctatatccccagcctccctcgccccgccgctggccgccgcattcagtaaaaagccacctaccctaccctcctgcgctggtactacttactacctagccaggccaaggagcccaacgagggggaacgctgcggtaggcgcgcgctgctcgtcccaccccacgccgccatgacggtgccagatgccgagtcgcgcttccatgtcctcgcggtggacgacagcctcgtcgacaggaaactcatcgagatgctgctcaagacctcgtcctaccaagtgaccacggtggattccgggagcaaggcgctggagctgctggggctgagggacgcgtcgtcgccgtctccgtcctcgcctgaccaccaggagatcgacgtgaatctcatcatcactgactactgcatgccaggcatgacaggatacgatctgctcaagagagtgaaggggtcctcctcgctcaaggacattcctgtggtgatcatgtcgtctgagaatgtgcctgcccggatcagcaggacatgtgtctttgacagatcgttacaggaggaaagaggtgcccctgtttgtccacaatggctttagctcatgccagcgccatgtttcctccctcgagcccctcacataaaacttgggaggacccgtcattcttcaagtggagaaagcgtgaggcgcatgtaccactgcgctcacaggacacgctggaagcggctctgaagtattggcatgaacggaggaatgtgaactatcacaatgctgacactgctgtctggaacgatgacgctgttcgcggtgctctggaaagtgctgccttttggtccaagggcttaccgtacgccaaatctctaagcggatactggaaattccttctgtcgccttcagcggaaagtattccggagagattctattatgctcattttgatgattcaaactggtcgggtttgccagttccctcaaattggcaaatgcatgggtttgaccgtccaatctacacaaatgtcacatatcctttcccattgaacccaccatttgtgccggctgataatcccacaggttgttacaggacagtctttcacatcccaaaagagtggaaaggtcggaggatcttgctgcactttgaagctgttgattctgcattctttgcttgggtaaatggagtactagttgggtatagccaggatagcagacttcctgctgagtttgaaattactgattgctgccatccttgtgattcggacaaggaaaatgttcttgctgttcaagttatgaggtggagtgatggctcttatcttgaagatcaggatcactggaggttgtctggtattcacagggatgtgctcctactatcaaagccacagatttttatcacagattacttcttcaaagcaaccttggatgaaaatttcagtttagccgatattgaggttgaggtggagattgactcacacaagcaagaccaggagcacgtcccaactttgtctattgaagcaacactcattgataactctggactatctaacagtatagatgctgatctttcatccgctaatgcagtcaatttgaaaccgaagccaaaacgaactcgaagcccttgtcttggttttcatggttatgtacttggtggaaaaatagaaaatccaaaactttggtctagtgagcatcctaacttatacacgcttgttgttctccttaaagatgccaatgggaagcttattgactgtgaatcatgccaagtgggcattcgtaatgtggtcatggcacacaagcaaatgctcgtcaatggatgtcctgttgtgctaagaggtgtcaacagacatgagcaccatccacgccttggaaagacaaatttagaagcatgcatgatcaaggacctgattttgatgaggcaaaacaatatcaatgctgttagaaatagccattacccacagcacccaaggtggtatgagttatgtgacatttttggtctttatgtcatagatgaagccaacattgagacacatggttttgatgaatctaacactttcaaacatcctacacttgaacctatttgggcaaatgcaatgcttgatcgtgttgttagcatggtggagagagataagaatcatgcatgcattattgtttggtctctaggaaatgaatcttcatatggacctaatcatgcttccatgtctggttggattcgtgaaagggatccaacaagactcctccattatgagggaggtggttccagaacatcatccacagatattgtgtgccccatgtatatgcgtgtctgggatgttgttaagatagcaaaagatccatctgaaacaaggcctctaattctttgcgaatattcacatgctatgggaaacagtaatgggaatattgatgcgtattggatggccatagacaacacttttggactccaaggaggttttatatgggactgggctgatcagggtttactgaaggaggactcagatgggtctaaattttgggcatatggcggcgactttggagatactccaaatgactccaatttttgcctcaatggcattgtgtggcctgatcggacgattcacccagctcttcatgaagtaaaataccttcaccagcctatcaaaatatcatcagcagataatatgcttaagattgaaaatggacacttttttgagacaacagaagctttggacttcagttgggttcttcatggagatggttgtgtcttgggctctggtccattgaatattccaactttggcaccacaaactagtcagctcatcaacatggaatcatcaccttggtttgccctttggagtgcctgtgcagcaaaagaagtatttttgtctgtgaatgtgaaacaaaggcatgaaacacgatgggctaaagctggtcatctcttggcttcagcacaactgtgtttgcctcagaaaaatggctttgtccccagcgtgatagcattgtccagtagccctttggtctgtgaacgcattggtgataatgtaaccatctgcaagaataatgcctggaaaattaaagtaaacagtcagttgggaacaatcgacagctggaaggtcaacgacgttgagcttatgagcaaggggatactcccatgcttttggcgcgcaccaactgacaacgacaaaggaggtttcttcaccaagccatatgactcgcgatggagagaagccttcctcgacaatgtctcgttccacagcagccagttctctgtcaaggagttgccggacaacaccgtggagttctccaccctctactacggtgttcccgggcacctacccaagcctgacgacgaagcctccgagtccattctcttccgggtgaagatggtatgccggatccacgggtcaggcgacgtggttctcgactacgaggtaaaccccaggagcgacctccctccccttccccgggtgggcgtcgtgttcagcgccgggaggtccctgagccacgtcacgtggtacgggcgcgggcccttcgagtgctacccggaccgcaaggcggcggcgcacgtcggcgtgtacgagagcagcgtggaggagctgcacgtgccgtacattgcccccgtggagtgcggcgggcgggcggacgtcaggtgggtggcactccgcgacgccggcgggctcggcctgtacgcgtcggcgcacggcggctccccgccgatgcagatgagcgcgagctactacggcgccgcggagctggacagggcaacgcacgtccacaggctggtgaagggggacgacatcgaggtgcatcttgaccacaggcacatggggctgggcggcgacgacagctggtcgccgtgcgtgcacgagcagtacctgctgccgccgacgcggtacgccttctccctgcggctctgccccctgctgccgtcgtcgtcgtgccatgacatctacaggtctcagctccccagctgatggtgccgtgtgccggagacccgtcgacgtcgagccttgggaaacaacaatgaacgcaatggcctggccagtgaatgaaagtatataatattgtaataaagcagagacgtattagctcctgcaacggcctcgcgatcgcctggatatgtctatgctgagggggtgtttagttaactaataacctaactacatatggcgccaagttactaaaacttaataaataactattactaactaataaatagtaactgaattcctaacttaataaatacttcctccgtttataaatatatgacaccgttgattttttaaaaacaacttagatcactcgtcttattaaaaaaaataatgagttaccatttat

SEQ ID NO: 201411 - DNA, 2778 bp, Zea Mays
ctcttccgacgcgacggcagatttgggaggtgtcgcggccagagagtgcacaggcacaactgacggtgctcgctcctctgctctgtgactcatcgctcgacgacgaaaacactcgttggatgttgcgctgtgttccaatccaatccgctccgctccgctccgctccgcaacccaattcccatctccgccggtgagggattcgccacaccacacgccaggccgcccctcggtcgcggaacccacttcctgctggcgcgcgccgtcttccgttggtccggacatgtgtctttgacagatcgttacaggaggaaagaggtgcccctgtttgtccacaatggctttagctcatgccagcgccatgtttcctccctcgagcccctcacataaaacttgggaggacccgtcattcttcaagtggagaaagcgtgaggcgcatgtaccactgcgctcacaggacacgctggaagcggctctgaagtattggcatgaacggaggaatgtgaactatcacaatgctgacactgctgtctggaacgatgacgctgttcgcggtgctctggaaagtgctgccttttggtccaagggcttaccgtacgccaaatctctaagcggatactggaaattccttctgtcgccttcagcggaaagtattccggagagattctattatgctcattttgatgattcaaactggtcgggtttgccagttccctcaaattggcaaatgcatgggtttgaccgtccaatctacacaaatgtcacatatcctttcccattgaacccaccatttgtgccggctgataatcccacaggttgttacaggacagtctttcacatcccaaaagagtggaaaggtcggaggatcttgctgcactttgaagctgttgattctgcattctttgcttgggtaaatggagtactagttgggtatagccaggatagcagacttcctgctgagtttgaaattactgattgctgccatccttgtgattcggacaaggaaaatgttcttgctgttcaagttatgaggtggagtgatggctcttatcttgaagatcaggatcactggaggttgtctggtattcacagggatgtgctcctactatcaaagccacagatttttatcacagattacttcttcaaagcaaccttggatgaaaatttcagtttagccgatattgaggtaactctgatcccaatcttggcagggttatgcgaataggttgaggtggagattgactcacacaagcaagaccaggagcacgtcccaactttgtctattgaagcaacactcattgataactctggactatctaacagtatagatgctgatctttcatccgctaatgcagtcaatttgaaaccgaagccaaaacgaactcgaagcccttgtcttggttttcatggttatgtacttggtggaaaaatagaaaatccaaaactttggtctagtgagcatcctaacttatacacgcttgttgttctccttaaagatgccaatgggaagcttattgactgtgaatcatgccaagtgggcattcgtaatgtggtcatggcacacaagcaaatgctcgtcaatggatgtcctgttgtgctaagaggtgtcaacagacatgagcaccatccacgccttggaaagacaaatttagaagcatgcatgatcaaggacctgattttgatgaggcaaaacaatatcaatgctgttagaaatagccattacccacagcacccaaggtggtatgagttatgtgacatttttggtctttatgtcatagatgaagccaacattgagacacatggttttgatgaatctaacactttcaaacatcctacacttgaacctatttgggcaaatgcaatgcttgatcgtgttgttagcatggtggagagagataagaatcatgcatgcattattgtttggtctctaggaaatgaatcttcatatggacctaatcatgcttccatgtctggtaaaatattcttacctgtcagtttaatttctgtacttctcatctaatggtaacattcttctaggttggattcgtgaaagggatccaacaagactcctccattatgagggaggtggttccagaacatcatccacagatattgtgtgccccatgtatatgcgtgtctgggatgttgttaagatagcaaaagatccatctgaaacaaggcctctaattctttgcgaatattcacatgctatgggaaacagtaatgggaatattgatgcgtattggatggccatagacaacacttttggactccaaggaggttttatatgggactgggctgatcagggtttactgaaggaggactcagatgggtctaaattttgggcatatggcggcgactttggagatactccaaatgactccaatttttgcctcaatggcattgtgtggcctgatcggacgattcacccagctcttcatgaagtaaaataccttcaccagcctatcaaaatatcatcagcagataatatgcttaagaagctttggacttcagttgggttcttcatggagatggttgtgtcttgggctctggtccattgaatattccaactttggcaccacaaactagtcagctcatcaacatggaatcatcaccttggtttgccctttggagtgcctgtgcagcaaaagaagtatttttgtctgtgaatgtgaaacaaaggcatgaaacacgatgggctaaagctggtcatctcttggcttcagcacaactgtgtttgcctcagaaaaatggctttgtccccagccttaatatcatctt

SEQ ID NO: 201412 - DNA, 864 bp, Zea Mays
gccgggagcaaagcttgtccgggatgcattccagcttgccaaagagaaagctccttgtattatatttattgatgagatagatgccattggcaccaaacgttttgatagtgaagttagcggtgatagagaagttcagcggacaatgttggaattattgaatcaactggatggattcagcagcgatgagagaataaaggtcatagctgcaactaaccgtgctgacatccttgaccctgctctgatgcgatctggacggttggaccgaaagattgagttccctcacccatccgaagaagcaagagctagaatcttgcaaatccattcaaggaaaatgaatgtaaatcctgatgtcaactttgaagaattggctcgctcaactgatgacttcaacggagcacagctaaaggcagtttgtgtagaagctggtatgcttgccctacggcgggatgctacagaggtaactcacgaggatttcaatgaagggatcgtacaggtccaggcgaagaaaaagtcaagcttgaactactatgcttaagctgtttgtcaaaacatatggaccataaggtgtttgtaacactactgtatgaataatcgaagctatgtttttaatgcaagatttttacagcatataagaccccacgccagcacacctgatttttttttgtattttagctcttttcttgaaaagtattcacgtttagaccgttggatgatttaatctcatttttgtaccctttgctcggcgtcacagcctgtggcgccgaggtaacatagtttagcgccacagattttgatgtcgaggtgcatgctccactggcgacgaggggctgacatggcgtcggtgccatgatttatgggccaagc

SEQ ID NO: 201413 - DNA, 1537 bp, Zea Mays
ggatcttcaatttcatgcccagtttctcttggatgcatctatatgcttctcacaaagagttcaagatcgcctgccttactgtcgatgacagcagtttgggcccgggggatgaatatgagtctgacccccgcatgccaggcgaggatgagttcgaccatttctaccgtgttctcgccaagaagactgacaacctgctcagctgctacattccaatgccgcttgcactttctgaagaggagaaggccgtgcagaaggagttcaagctgatcgcgagcggatgcatcgacctcctggttggtgcgatgcgccgcacccccgcagagaaaaggcgcccactgttcttggtgtttggtgagctgtacccggtatttgagtttgtgaggtggactgccgaggcggggtgtgccaagtggtggatggcgctgcagatcatcgagaagctggagatcgtgcgcaagatggtgtcgagcgctttcggcggcgcccctgttgacagaagcatggtgttcgccaggaaggtggacctcaccggtgtcgacggcgaggcgctcgccggccacggcctcgggagcaacttatcagtggtgatcttcgtgctgatggacagcgtcttcagcaacgtcaagtcggacatcgatgccatggtgtctgacccttgccgcatggcagacgaggatgtgcaggagttcgaccattactaccgtcatctggccaagagggctgccaagctgcatgccatctacccgcctgaactaccaaagccgctttcagaatctgaagatgagaaggccgtgcaggagaggttcaaggagatggcgaacgagagcatcgacctcgcggctggtgcgatgcgccgcatccccgcggagaaatggcgcccactgatctcggtgtttgcttatgtgttccttgtatttgtgcgggtgaggtggtatgccgagagagggtgtgccaagtggtggatggcgccgcagatcatcgaggggctccaaaccgtgcgcaggatggtgtcgagcgcatgcggcggcacccctcttgacattgacaaggtgttcgacaggatggtggccctctccggtgtcagcgttcaggcggcgcccggcggccacggcgtcgtcgggagcaacgacttatcagaggtgatcttcgccctgatcgacaacgtcttcggcaacgtcaagtcggacatctatgacatggtctctgcttccactccttgttagccatcgtcaccaagctacgtacgtgtctacatacaggatcgagatttgcagtcactagcctcaagtgattggatcatgcatgtgattagctctagtcttgatgtgatcatgcatgtgatacctggtgcccaaagtactacgtttctgttctacacttctacccagtagcaacttcactgtgttggatcagtcacattatatgatttctgaaattagccagcagtatactccattgtgttggatcagtcatatcataagatttctgatattagcctttcattccttctgtttttcgctgttgtttctaaaaccat

SEQ ID NO: 201414 - DNA, 3491 bp, Zea Mays
cgctagctagcctacacacatacggcctaccgagcacaagtagagcgctcacgtctgatctgataaataaaaagagagtgaagaagcgctcagctagctcacacgccatcattgctgcgctgcctcccaacgttcgggcaagaacgaaggcgtctttcgcttccattgctgctgcgagggagaagaagccagaacaagaacgtgagacacacatacatcgtgtgaggtggcgtgctgacggcgagggatgcgggcgggggcatacactatccaccagtcgctcaccgccgaggcggccgccgtgctcaagctcgcgctcgcgctcgcgcgccggcgcggccatgcgcaggtcacgccactgcacgtcgcgttcgcgctgctgaccggccccgccgcgtgcgcgcagcctctcgcggccttctcctcacccgcgtctccggcggtgccgtacggtctactcaaacgtgcctgcttgcggtcgcacccggcgcccggtccggcggcgtgtcacggcgcgccccagcacccactgcagtgccgcgcgcttgagctgtgcttcaatgtagcgctcaaccgcctgcccgcttccggcccgcagtcggcgccctcctcgacgtcgccattcacgtcgccgcttatccagcccagccccacactctccaacgcgctcgtcgccgccctcaagcgcgcgcaggccaaccagcgccgcgggtgcgttgagctccagcagccgccgccaccagcaaatgcgccgccagcacagcagcaggcgctcctcgccatcaaggtggagctggagcagctggtcatctccatcctcgaagaccccagcgtgagccgcgtcatgcgggaagccggcttctccagcgccaccgtcaagagcaacctcgaggaggagagcgcgctcatgccgccgcgttcctcgtcgtccccaccgctgccgctgccgccgccgcccatccctccccacttcttcatcgaccccagcattccctccagcggcaaagctggtgaccgcttcgggctctggccggcgcacttcttgtccgcggcgccgggcccgggcgcatgcaacgacgacgtccgcgcggtcctggaggtgatggtccggaagcaggagcggcgaagcaaccccgttgtggttggcgactcggtgtccatggcggaggccgtggccgacgagctgctccggcgcctcgagcgcggcgacgtcccagaagagctcgccggcgcacacctcctcaaactgcagctctcctacgtgcacatccgcctcatgagccgcggcgacgtgaacgcccgggcctccgagctccgccgtagcgtggacgccgtccagctccagcgcggcggcgggctggtggtctacgtgggcgacctgcggtgggcgctcgacgaggaagcccacgacaaccacgcggtctcgtcgtacagccccgtggagcacatggtcgccgagctcggccgcctcctcgacgacctccgagcttcctgcggccgcgcctggctcgtggccactgccagctaccagacgtacatgaggtggcagcagcggcgccggcggccgctggagtcagcatggacgctgcaggccgtggtggtccccaccggcagcggcaccggtctgtccctcaacagcctcggttcctcatcgtcttgttcctccctccaaagaatccttttccagaggtcggggcggcgacggcgtttgcaggcagagatgagcaggaggatgagatgcagctggcgctctgcaccgagtgcaccaagaactacgagagggaggcgacgctcgtgaaggcagaggctgatgcggagggcccacgtgccagcctcccgggctggctggtgctggacagaccaccggcagaccaaacaccacacgagaagtatctgaccgtgttgaagaggaaatggagccggctgtgcaggaagcttcacctctgctctgatccaggctcccctcagtgtccatggtggtctggttcttgctcgcaaccggccagcaagggtaagccaagcgagccgaggttcttgggcttggatggcttgatggggcaacacacgagcaggaggtccccgccgtcaccatcgaggagtcctcgttgggctccgagtccaccgatggggtcgggatgccagggcgtgggaactacgcttgctctcgccagccacctgctctcggactcggcgacctccgacagccgcgccccgggaagcggtgatggatccgcggcggcgcgcgagctggagcagaggctgcgcaggaacatcccgtggcaaccccgagccatcgtcgcggagattgccaatgcggtggtcgctagccgagagagcgacgacggggcgacgggcgtgtggctgtacgtgaaggggagcgaccacgtcgccacgcggcgcgctgtcacggtgatcgcggagacgcgctgcggctcggctgaccgcgtgatctgcgcggacccgagcaagttcagctccgcagagaggttgtgctcagatgttgtctccagggcgtccgcgatgggtggcaagatggtggtggtggtcgtcgacgatgtcgagaacgcgtcacgcgacgtcgccgactgcctagtcgccgcatcgaagagcggttctctgaaggatcgtcagtccggacaagcactggatctctccggctgcatcgtgatcctgctagcatcgaagtggaccggcggctccagcgaccagatcagcctgcgtctgtgggcggagaacgaggcgtcgtccgccgctctcaagaggaagacggagtcaccgctgcgcgagagcaagcgagcacggcacgacgccgggctgggcggccttgatctcaacctctgcgccgaggatgacccagcagacgaagacgacgaagcccttcccagcgacataaccgacgaaggcgactctagcgacacgagtgagcacggacaaccccacggcctcctcgaggccctcgcggcccgcgtggtcaccctcgacaatgacgacggcgacggcgacgccacagcctccatccgcgcgaggcttgccagggccatcggccaaggatggacacgtgtggaggagacggcggtgcaaatgcttgcagcggcgtccggacagttcctcgaggacgagtttgagagttggacgtcggaggtgcttgaaccggcagtggcgctggcaacggtcaaaaatggcgggaaagggaaggtgatagtacttggattggggccctgtggcgagagccgggagacaccagggtttatgggctctgtccttccaagtagggtccaggtggactgagctgtgtactgttttttagttctcatttttttagaggggaagtggtttgtatgtatggtatgtaaagcgtgggattggggcctggaaatgaaagggatcaaatgtactattattatatataagtagttttgcaggattaattatcactacggactaatttggaaacttaaatcctctggagattagagagcattgaggtgaaa

SEQ ID NO: 201415 - DNA, 3814 bp, Zea Mays
ggacctcgcccccgcgcctcccctctcatcagttcttgcacacacgagttgcagttccagcagacaaatcctcccactggtacttccaccacaccacagtccacaggcagagaagagcgaagatgcttcttcccaggcacagattcttcaagttcaggtccttgtagatgagctgcagctgcaggatctcagaatcagctaactattttccacgcatagtcgcctttaattccaggtgacagcaagggcaggtcgactgcgcttgttgcctactgctactccgatcgatacatacatacagattccctgcaccggccgatcgcgatcagagattgaggaggcatcctgtccagctgttccacttccatccatccatccaccaccagagaagagcatacagtagtgcaccactcatctcatccccttctgctgtgcccctgtggtatagcaatagcttcattaatttgcttgtggtgctgctagctgtgctgtgtgcctacctgccctgccactgccacacacaccacatataactccctggtgtccgtgtccacagatgagtgcacggccctgcccctgccgctgcggcctcggcgccgcgcaccacgcgcacgcgggtgcctccccttgctcctccggggtgccgtcgacgtcgtcgtccacgtccatggagccgcgtgccggcacggacttctcctgcctcagctggctcctcttccgcgtctccgcctacgacgacgacgacacccacaacctcctcctcctcgccgccggcgccctctagcgcgcgcctcctgccgcccacagctcttcttccctccacttctaccaatttgctccctccatccacacatacatacatagctaggttagttagttagttgagttctctctccgccgtctgtcagtgtcagctgctgcaactcatcaatacaactgctgctagctagcttattagccttagctgcggtacacccaaaccaagaaagctaattaagggaaggaaataaagctccgtcgtctcgagccgatcgacgaccaccatgtcggcggcacggcggtgcggcggcgtccggcgtcggctggatagggcggcggcgggagacaacgccaacggatacgtcgagactgaccccaccggtcgctatggacggttcgacgagctcctgggcaaaggcgccatgaagtcggtgtaccggggcttcgacgaggagcgcggcgtggaggtggcgtggaaccaggcgagcctcgccgacgtgctccgctccccggacgccgtgcagcgcatgtactcggaggtgcagctgctgagcgagctccggcacgacggcatcatcggcttccacgcgtcctgggtggacgtgcccgggcgcagcttcaacttcatcaccgagctcttctcctccggcacgctccgctcctaccgcctccggtacccccgcgtgaacctgcgcgccgtccggtcgtgggcgcggcagctgctggggggcctcgcctacctgcacgcgcgcgacccgccggtcatccaccgcgacctcaagtgcgacaacatcttcgtcaacggccaccagggccacgtcaagatcggcgacctcgggctcgccgcggtgctccgccggggcggcgccgcgcacagcgtcatcggcacgcccgagttcatggcgcccgagatgtacgacgaggagtacgacgagcgcgtcgacgtctacgccttcgggatgtgcatgctggagatgctcaccgtcgagtacccctacagcgagtgcaccaacccggcgcagatctacaagaaggtcaccgcaggcaggctccccgacgcgttctaccgggtggacgacgacgacgcgcgcaggttcatcggccgctgcctcgtccccgccgccaaccgcccgtccgccgccgagctgctgctggaccctttcctcctccaccaccaccaccatgctgctgctgctgctggcacggtaccagtgccgtcaccattgccaactaccgctgttgccgccggcgctccgccgccctcgacgtgtagtagctccgcggccgacgatgatgtcgtctcggcgttggacgacgacgacgaggtggacgtgccgcccaggaatgacatgaccatcaccgggaagctgaacgcggaggaggacaccatcttcctgaaggtgcagatcgccgacgaggcgtcggggcacgcgcgcaacatctacttcccgttcgacatggcgagcgacacggcggcggaggtggcgcaggagatggtgaaggagctggacatcacggaccgccacgcgtcggagatcgccgccatgatccaacaggagatcggcaggctgctgccggggcgagcgcagcagcacgagtacacgtacgcgtcacgcggcggcgactacgacgacgaggagcggcctcctcccttctactacctctcctcgtcccccgcatcctcccatggttctcactgcggggtggggccatatgccttcggaggcttctctggcccatgtggcagtgcttggaccaaaggtaaacctaaccaccacatccatctccacattaatttgttttatttaatttggtgtttattttaaggctacggtcccgaacctcggcttacaaatccccctttacaaattgattggttcttttttctaaagttataataaaatgattgaacgtgatttgagattatttgttttaaaaagtggaaggtattttatataaaaatctccttttcaattttttgtttttgttttcgcactgcaaaaatgtcaccgtaccgtacgtgcaagggcgggaaattttgctggcgcccagcagctgcagtaggcatcatcggtcactgtatgccgacatctatttcgttcttagtccacgtaggaaatacagtgctatctgcatagtactctctccgtccaaattttataattcttttaacattcttttacaagttttaccgatacgtcttattcaattattttttggaaaaaaattcgaagtaataatagtcatatattttttttaaacaaagtgttcaaatttagtgtaaaaaaggtactaaacggagagtactgtgataatgagccatgacatttgtgcattcttgtgcaaaaaaaaaaaactttgttggtgtagatcatgactggtacgctttaagcgacaacgacgatgacatgagctccgtgcactccggtaagtactctcctgtgcactacgcgtcaggtgccggccacgaggaggcgccggccagcagcagcggctcgtccaagacaaggttcggcggcggcggctccggttccgccgcggcgctcgcgcggcagctggagcggcagtgcagcgtgtcgccgcagcacgcggggcggccgcggcggcgggaggacgacgacgaccgggccggcaggcggaggaggatgacgcggaaccggtccatggtggacatgcggagccagctgctgcaccgcacgctggtggaggagctcaaccgccgcctcttcttcaacaccgtcggcgccgtcgagaacatcggcttccgcgcgcccaccaccaccgccgcctcgtcctcctcgtctgcgcgcggcggcctcgaccgcggcaggagaccaggcggcggcggcaagcagcggcagctggacgacaaggagcagcagtatttcatgctttgattgccgctccgcatacgaccgactttttttttttgacaacatatctggtgtcacatattaaatcatcaccactcattttagatctaatatctctagttgtttggtacattttattaaggataccctccaacgtggtgttgtatagtggtggaaggtgt

SEQ ID NO: 201416 - DNA, 2357 bp, Zea Mays
ttgtatttaattattagtgcttcccacctgctacatatatggtgttccagctctgaaccgagctgcatcgatcgtggacctcgcccccgcgcctcccctctcatcagttcttgcacacacgagttgcagttccagcagacaaatcctcccactggtacttccaccacaccacagtccacaggcagagaagagcgaagatgcttcttcccaggcacagattcttcaagttcaggtccttgtagatgagctgcagctgcaggatctcagaatcagctaactattttccacgcatagtcgcctttaattccaggtgacagcaagggcaggtcgactgcgcttgttgcctactgctactccgatcgatacatacatacagattccctgcaccggccgttcgacgagctcctgggcaaaggcgccatgaagtcggtgtaccggggcttcgacgaggagcgcggcgtggaggtggcgtggaaccaggcgagcctcgccgacgtgctccgctccccggacgccgtgcagcgcatgtactcggaggtgcagctgctgagcgagctccggcacgacggcatcatcggcttccacgcgtcctgggtggacgtgcccgggcgcagcttcaacttcatcaccgagctcttctcctccggcacgctccgctcctaccgcctccggtacccccgcgtgaacctgcgcgccgtccggtcgtgggcgcggcagctgctggggggcctcgcctacctgcacgcgcgcgacccgccggtcatccaccgcgacctcaagtgcgacaacatcttcgtcaacggccaccagggccacgtcaagatcggcgacctcgggctcgccgcggtgctccgccggggcggcgccgcgcacagcgtcatcggcacgcccgagttcatggcgcccgagatgtacgacgaggagtacgacgagcgcgtcgacgtctacgccttcgggatgtgcatgctggagatgctcaccgtcgagtacccctacagcgagtgcaccaacccggcgcagatctacaagaaggtcaccgcaggcaggctccccgacgcgttctaccgggtggacgacgacgacgcgcgcaggttcatcggccgctgcctcgtccccgccgccaaccgcccgtccgccgccgagctgctgctggaccctttcctcctccaccaccaccaccatgctgctgctgctgctggcacggtaccagtgccgtcaccattgccaactaccgctgttgccgccggcgctccgccgccctcgacgtgtagtagctccgcggccgacgatgatgtcgtctcggcgttggacgacgacgacgaggtggacgtgccgcccaggaatgacatgaccatcaccgggaagctgaacgcggaggaggacaccatcttcctgaaggtgcagatcgccgacgaggcgtcggggcacgcgcgcaacatctacttcccgttcgacatggcgagcgacacggcggcggaggtggcgcaggagatggtgaaggagctggacatcacggaccgccacgcgtcggagatcgccgccatgatccaacaggagatcggcaggctgctgccggggcgagcgcagcagcacgagtacacgtacgcgtcacgcggcggcgactacgacgacgaggagcggcctcctcccttctactacctctcctcgtcccccgcatcctcccatggttctcactgcggggtggggccatatgccttcggaggcttctctggcccatgtggcagtgcttggaccaaaggtgccggccacgaggaggcgccggccagcagcagcggctcgtccaagacaaggttcggcggcggcggctccggttccgccgcggcgctcgcgcggcagctggagcggcagtgcagcgtgtcgccgcagcacgcggggcggccgcggcggcgggaggacgacgacgaccgggccggcaggcggaggaggatgacgcggaaccggtccatggtggacatgcggagccagctgctgcaccgcacgctggtggaggagctcaaccgccgcctcttcttcaacaccgtcggcgccgtcgagaacatcggcttccgcgcgcccaccaccaccgccgcctcgtcctcctcgtctgcgcgcggcggcctcgaccgcggcaggagaccaggcggcggcggcaagcagcggcagctggacgacaaggagcagcagtatttcatgctttgattgccgctccgcatacgaccgactttttttttttgacaacatatctggtgtcacatattaaatcatcaccactcattttagatctaatatctctagttgtttggtacattttattaaggataccctccaacgtggtgttgtatagtggtggaaggtgt

SEQ ID NO: 201417 - DNA, 1029 bp, Zea Mays
aatacttcattgagtttgtagaacaagatatgtatgatttcatggccctcgatagaccttcaactcctaccattgatcgtgggatagcattacataagatgattagacttatcacaatgggtttaggaggagagggctatcttaatttcatgggaaatgagtttggacatcctgaatggatagattttccaagaggtccgcaaagacttccaagtggtaagtttattccagggaataacaacagttatgacaaatgtcgtcgaagatttgacctgggtgatgcagactatcttaggtatcatggtatgcaagagtttgatcaggcaatgcaacatcttgagcaaaaatatgaattcatgacatctgatcaccagtatatttcccggaaacatgaggaggataaggtgattgtgttcgaaaagggagatttggtatttgtgttcaacttccactgcaacaacagctattttgactaccgtattggttgtcgaaagcctggggtgtataaggtggtcttggactccgacgctggactatttggtggatttagcaggatccatcacgcagccgagcacttcaccgccgactgttcgcatgataataggccatattcattctcggtttatacaccaagcagaacatgtgtcgtctatgctccagtggagtgatagcggggtactcgttgctgcgcggcatgtgtggggctgtcgatgtgaggaaaaaccttcttccaaaaccggcagatgcatgcatgcatgctacaataaggttctgatactttaatcgatgctggaaagcccatgcatctcgctgcgttgtcctctctatatatttaagaccttcaaggtgtcaattaaacatagagttttcgtttttcgctttcctaatgcttgatggctgattgtttgcacttgtttcattccgttgggcactgatggtcttagagttagacaatcggctgcagcgcataggtttcaagctggggggttgcatgtccgactacagagcagccagcaatgtggcccctgc

SEQ ID NO: 201418 - DNA, 1277 bp, Zea Mays
cgacatggtagcgtgccctgcctcggttagtggaatgcctacatttgcccttcctgttcacgatggtggggtaggttttgactatcggatgcatatggctgtggctgacaaatggattgaccttctcaagcaaagtgatgaaacttggaagatgggtgatattgtgcacacactgacaaataggaggtggttagagaagtgtgtaacttatgctgaaagtcatgatcaagcattagtcggcgacaagactattgcgttttggttgatggacaaggatatgtatgatttcatggccctcgatagaccttcaactcctaccattgatcgtgggatagcattacataagatgattagacttatcacaatgggtttaggaggagagggctatcttaatttcatgggaaatgagtttggacatcctgaatggatagattttccaagaggtccgcaaagacttccaagtggtaagtttattccagggaataacaacagttatgacaaatgtcgtcgaagatttgacctgggtgatgcagactatcttaggtatcatggtatgcaagagtttgatcaggcaatgcaacatcttgagcaaaaatatgaattcatgacatctgatcaccagtatatttcccggaaacatgaggaggataaggtgattgtgttcgaaaagggagatttggtatttgtgttcaacttccactgcaacaacagctattttgactaccgtattggttgtcgaaagcctggggtgtataaggtggtcttggactccgacgctggactatttggtggatttagcaggatccatcacgcagccgagcacttcaccgccgactgttcgcatgataataggccatattcattctcggtttatacaccaagcagaacatgtgtcgtctatgctccagtggagtgatagcggggtactcgttgctgcgcggcatgtgtggggctgtcgatgtgaggaaaaaccttcttccaaaaccggcagatgcatgcatgcatgctacaataaggttctgatactttaatcgatgctggaaagcccatgcatctcgctgcgttgtcctctctatatatttaagaccttcaaggtgtcaattaaacatagagttttcgtttttcgctttcctaatgcttgatggctgattgtttgcacttgtttcattccgttgggcactgatggtcttagagttagacaatcggctgcagcgcataggtttcaagctggggggttgcatgtccgactacagagcagccagcaatgtggcccctgc

SEQ ID NO: 201419 - DNA, 1378 bp, Zea Mays
agaactttcgggtttatactgagcctggactataaagaagatttctcttgaagttcaatgagttctcgacttaaatattctttctaaactactggatggataccaaagacacaaaaaattgaaattgttagtggaatgcctacatttgcccttcctgttcacgatggtggggtaggttttgactatcggatgcatatggctgtggctgacaaatggattgaccttctcaagcaaagtgatgaaacttggaagatgggtgatattgtgcacacactgacaaataggaggtggttagagaagtgtgtaacttatgctgaaagtcatgatcaagcattagtcggcgacaagactattgcgttttggttgatggacaaggatatgtatgatttcatggccctcgatagaccttcaactcctaccattgatcgtgggatagcattacataagatgattagacttatcacaatgggtttaggaggagagggctatcttaatttcatgggaaatgagtttggacatcctgaatggatagattttccaagaggtccgcaaagacttccaagtggtaagtttattccagggaataacaacagttatgacaaatgtcgtcgaagatttgacctgggtgatgcagactatcttaggtatcatggtatgcaagagtttgatcaggcaatgcaacatcttgagcaaaaatatgaattcatgacatctgatcaccagtatatttcccggaaacatgaggaggataaggtgattgtgttcgaaaagggagatttggtatttgtgttcaacttccactgcaacaacagctattttgactaccgtattggttgtcgaaagcctggggtgtataaggtggtcttggactccgacgctggactatttggtggatttagcaggatccatcacgcagccgagcacttcaccgccgactgttcgcatgataataggccatattcattctcggtttatacaccaagcagaacatgtgtcgtctatgctccagtggagtgatagcggggtactcgttgctgcgcggcatgtgtggggctgtcgatgtgaggaaaaaccttcttccaaaaccggcagatgcatgcatgcatgctacaataaggttctgatactttaatcgatgctggaaagcccatgcatctcgctgcgttgtcctctctatatatttaagaccttcaaggtgtcaattaaacatagagttttcgtttttcgctttcctaatgcttgatggctgattgtttgcacttgtttcattccgttgggcactgatggtcttagagttagacaatcggctgcagcgcataggtttcaagctggggggttgcatgtccgactacagagcagccagcaatgtggcccctgc

SEQ ID NO: 201420 - DNA, 1899 bp, Zea Mays
tatcatcttctcacattggtcttccttatctaagcgaaccgaagataaacacatatgtaaactttagggatgaagtcctcccaagaataaaaaaacttggatacaatgcagtgcaaataatggcaatccaagagcactcatattatggaagctttggataccatgtaactaatttttttgcgccaagtagtcgttttggtaccccagaagaattgaagtctttgattgatagagcacatgagcttggtttgctagttctcatggatgtggttcatagtcatgcgtcaagtaatactctggatgggttgaatggttttgatggtacagatacacattactttcacagtggtccacgtggccatcactggatgtgggattctcgcctatttaactatgggaactgggaagttttaagatttcttctctccaatgctagatggtggctcgaggaatataagtttgatggtttccgttttgatggtgtgacctccatgatgtacactcatcacggattacaagtaacatttacggggaacttcaatgagtattttggctttgccaccgatgtagatgcagtggtttacttgatgctggtaaatgatctaattcatggactttatcctgaggctgtaaccattggtgaagatgttagtggaatgcctacatttgcccttcctgttcacgatggtggggtaggttttgactatcggatgcatatggctgtggctgacaaatggattgaccttctcaagcaaagtgatgaaacttggaagatgggtgatattgtgcacacactgacaaataggaggtggttagagaagtgtgtaacttatgctgaaagtcatgatcaagcattagtcggcgacaagactattgcgttttggttgatggacaaggatatgtatgatttcatggccctcgatagaccttcaactcctaccattgatcgtgggatagcattacataagatgattagacttatcacaatgggtttaggaggagagggctatcttaatttcatgggaaatgagtttggacatcctgaatggatagattttccaagaggtccgcaaagacttccaagtggtaagtttattccagggaataacaacagttatgacaaatgtcgtcgaagatttgacctgggtgatgcagactatcttaggtatcatggtatgcaagagtttgatcaggcaatgcaacatcttgagcaaaaatatgaattcatgacatctgatcaccagtatatttcccggaaacatgaggaggataaggtgattgtgttcgaaaagggagatttggtatttgtgttcaacttccactgcaacaacagctattttgactaccgtattggttgtcgaaagcctggggtgtataaggtggtcttggactccgacgctggactatttggtggatttagcaggatccatcacgcagccgagcacttcaccgccgactgttcgcatgataataggccatattcattctcggtttatacaccaagcagaacatgtgtcgtctatgctccagtggagtgatagcggggtactcgttgctgcgcggcatgtgtggggctgtcgatgtgaggaaaaaccttcttccaaaaccggcagatgcatgcatgcatgctacaataaggttctgatactttaatcgatgctggaaagcccatgcatctcgctgcgttgtcctctctatatatttaagaccttcaaggtgtcaattaaacatagagttttcgtttttcgctttcctaatgcttgatggctgattgtttgcacttgtttcattccgttgggcactgatggtcttagagttagacaatcggctgcagcgcataggtttcaagctggggggttgcatgtccgactacagagcagccagcaatgtggcccctgc

SEQ ID NO: 201421 - DNA, 2328 bp, Zea Mays
attagtcaggtacagcctctatagaagaatccgttcagacattgatgaacatgaaggaggcttggaagccttctcccgtagttatgagaagtttggatttaatcgcagcgcggaaggtatcacatatcgagaatgggctcctggagcattttctgcagcattggtgggtgacttcaacaactgggatccaaatgcagatcgtatgagcaaaaatgagtttggtgtttgggaaatttttctgcctaacaatgcagatggtacatcacctattcctcatggatctcgtgtaaaggtgagaatggatactccatcagggataaaggattcaattccagcctggatcaagtactcagtgcaggccccaggagaaataccatatgatgggatttattatgatcctcctgaagaggtaaagtatgtgttcaggcatgcgcaacctaaacgaccaaaatcattgcggatatatgaaacacatgtcggaatgagtagcccggaaccgaagataaacacatatgtaaactttagggatgaagtcctcccaagaataaaaaaacttggatacaatgcagtgcaaataatggcaatccaagagcactcatattatggaagctttggataccatgtaactaatttttttgcgccaagtagtcgttttggtaccccagaagaattgaagtctttgattgatagagcacatgagcttggtttgctagttctcatggatgtggttcatagtcatgcgtcaagtaatactctggatgggttgaatggttttgatggtacagatacacattactttcacagtggtccacgtggccatcactggatgtgggattctcgcctatttaactatgggaactgggaaatggtggctcgaggaatataagtttgatggtttccgttttgatggtgtgacctccatgatgtacactcatcacggattacaagtaacatttacggggaacttcaatgagtattttggctttgccaccgatgtagatgcagtggtttacttgatgctggtaaatgatctaattcatggactttatcctgaggctgtaaccattggtgaagatgttagtggaatgcctacatttgcccttcctgttcacgatggtggggtaggttttgactatcggatgcatatggctgtggctgacaaatggattgaccttctcaagcaaagtgatgaaacttggaagatgggtgatattgtgcacacactgacaaataggaggtggttagagaagtgtgtaacttatgctgaaagtcatgatcaagcattagtcggcgacaagactattgcgttttggttgatggacaaggatatgtatgatttcatggccctcgatagaccttcaactcctaccattgatcgtgggatagcattacataagatgattagacttatcacaatgggtttaggaggagagggctatcttaatttcatgggaaatgagtttggacatcctgaatggatagattttccaagaggtccgcaaagacttccaagtggtaagtttattccagggaataacaacagttatgacaaatgtcgtcgaagatttgacctgggtgatgcagactatcttaggtatcatggtatgcaagagtttgatcaggcaatgcaacatcttgagcaaaaatatgaattcatgacatctgatcaccagtatatttcccggaaacatgaggaggataaggtgattgtgttcgaaaagggagatttggtatttgtgttcaacttccactgcaacaacagctattttgactaccgtattggttgtcgaaagcctggggtgtataaggtggtcttggactccgacgctggactatttggtggatttagcaggatccatcacgcagccgagcacttcaccgccgactgttcgcatgataataggccatattcattctcggtttatacaccaagcagaacatgtgtcgtctatgctccagtggagtgatagcggggtactcgttgctgcgcggcatgtgtggggctgtcgatgtgaggaaaaaccttcttccaaaaccggcagatgcatgcatgcatgctacaataaggttctgatactttaatcgatgctggaaagcccatgcatctcgctgcgttgtcctctctatatatttaagaccttcaaggtgtcaattaaacatagagttttcgtttttcgctttcctaatgcttgatggctgattgtttgcacttgtttcattccgttgggcactgatggtcttagagttagacaatcggctgcagcgcataggtttcaagctggggggttgcatgtccgactacagagcagccagcaatgtggcccctgc

SEQ ID NO: 201422 - DNA, 3158 bp, Zea Mays
cgcgtgaacgcccactcccctcaccgctcgtctccgtgctatataggcagcccgcgcccctcctaattgtagccctgcagtcacccagagcagacccggatttcgctcttgcggtcgctggggttttagcattggctgatcagttcgatccgatccggctgcgaaggcgagatggcgttcgcggtttctggggcggtgctcggtggggccgtaagggctccccgactcaccggcggcggggagggtagtctagtcttccggcacaccggcctcttcttaactcggggtgctcgagttggatgttcggggacgcacggggccatgcgcgcggcggccgcggccaggaaggcggtcatggttcctgagggcgagaatgatggcctcgcatcaagggctgactcggctcaattccagtcggatgaactggaggtaccagacatttctgaagagacaacgtgcggtgctggtgtggctgatgctcaagccttgaacagagttcgagtggtccccccaccaagcgatggacaaaaaatattccagattgaccccatgttgcaaggctataagtaccatcttgagtatcggtacagcctctatagaagaatccgttcagacattgatgaacatgaaggaggcttggaagccttctcccgtagttatgagaagtttggatttaatcgcagcgcggaaggtatcacatatcgagaatgggctcctggagcattttctgcagcattggtgggtgacttcaacaactgggatccaaatgcagatcgtatgagcaaaaatgagtttggtgtttgggaaatttttctgcctaacaatgcagatggtacatcacctattcctcatggatctcgtgtaaaggtgagaatggatactccatcagggataaaggattcaattccagcctggatcaagtactcagtgcaggccccaggagaaataccatatgatgggatttattatgatcctcctgaagaggtaaagtatgtgttcaggcatgcgcaacctaaacgaccaaaatcattgcggatatatgaaacacatgtcggaatgagtagcccggaaccgaagataaacacatatgtaaactttagggatgaagtcctcccaagaataaaaaaacttggatacaatgcagtgcaaataatggcaatccaagagcactcatattatggaagctttggataccatgtaactaatttttttgcgccaagtagtcgttttggtaccccagaagaattgaagtctttgattgatagagcacatgagcttggtttgctagttctcatggatgtggttcatagtcatgcgtcaagtaatactctggatgggttgaatggttttgatggtacagatacacattactttcacagtggtccacgtggccatcactggatgtgggattctcgcctatttaactatgggaactgggaagttttaagatttcttctctccaatgctagatggtggctcgaggaatataagtttgatggtttccgttttgatggtgtgacctccatgatgtacactcatcacggattacaagtaacatttacggggaacttcaatgagtattttggctttgccaccgatgtagatgcagtggtttacttgatgctggtaaatgatctaattcatggactttatcctgaggctgtaaccattggtgaagatgttagtggaatgcctacatttgcccttcctgttcacgatggtggggtaggttttgactatcggatgcatatggctgtggctgacaaatggattgaccttctcaagcaaagtgatgaaacttggaagatgggtgatattgtgcacacactgacaaataggaggtggttagagaagtgtgtaacttatgctgaaagtcatgatcaagcattagtcggcgacaagactattgcgttttggttgatggacaaggatatgtatgatttcatggccctcgatagaccttcaactcctaccattgatcgtgggatagcattacataagatgattagacttatcacaatgggtttaggaggagagggctatcttaatttcatgggaaatgagtttggacatcctgaatggatagattttccaagaggtccgcaaagacttccaagtggtaagtttattccagggaataacaacagttatgacaaatgtcgtcgaagatttgacctggtaaactttctttgattgtgcaaaagtccaagtttgtatttacttttaccactgatccagtgctttaatcagcaaggtgccattataatagttccttctttattcatattagcatgttccagaagtaaaaatattactacctttgtaaaagttttctttaatatatgtcgctttgtttggtcaataattcgtcattatcggaattgtgttatttttacattgtcagggtgatgcagactatcttaggtatcatggtatgcaagagtttgatcaggcaatgcaacatcttgagcaaaaatatgaattcatgacatctgatcaccagtatatttcccggaaacatgaggaggataaggtgattgtgttcgaaaagggagatttggtatttgtgttcaacttccactgcaacaacagctattttgactaccgtattggttgtcgaaagcctggggtgtataaggtggtcttggactccgacgctggactatttggtggatttagcaggatccatcacgcagccgagcacttcaccgccgactgttcgcatgataataggccatattcattctcggtttatacaccaagcagaacatgtgtcgtctatgctccagtggagtgatagcggggtactcgttgctgcgcggcatgtgtggggctgtcgatgtgaggaaaaaccttcttccaaaaccggcagatgcatgcatgcatgctacaataaggttctgatactttaatcgatgctggaaagcccatgcatctcgctgcgttgtcctctctatatatttaagaccttcaaggtgtcaattaaacatagagttttcgtttttcgctttcctaatgcttgatggctgattgtttgcacttgtttcattccgttgggcactgatggtcttagagttagacaatcggctgcagcgcataggtttcaagctggggggttgcatgtccgactacagagcagccagcaatgtggcccctgc

SEQ ID NO: 201423 - DNA, 3321 bp, Zea Mays
aaaaaagcctcgcccgtgaagcgaactccctctccttcgaccttcgttcttccactgcggcctgcgcgacccgtgcagctgcgcgctccacctggccgcgcctggggcccacaccgcctggcatctggagcattgcccccggacttcgcgcggccgcccgcagccccgctccccaccgaaaagcgaagcgcgattgccatccccacgccaccgcgaagcacaaggtccccgccctgcacgatcagcaggacctcgccacgccgccgctggagctgcgcgtgcgcgtgtgcgcttggaccgacgcgcaacggcctgcctcgaccgcccgtgcacgccactgctcatgcagccgtccgcctcgcccccgccccgaactgccgaggtcgcgtgaacgcccactcccctcaccgctcgtctccgtgctatataggcagcccgcgcccctcctaattgtagccctgcagtcacccagagcagacccggatttcgctcttgcggtcgctggggttttagcattggctgatcagttcgatccgatccggctgcgaaggcgagatggcgttcgcggtttctggggcggtgctcggtggggccgtaagggctccccgactcaccggcggcggggagggtagtctagtcttccggcacaccggcctcttcttaactcggggtgctcgagttggatgttcggggacgcacggggccatgcgcgcggcggccgcggccaggaaggcggtcatggttcctgagggcgagaatgatggcctcgcatcaagggctgactcggctcaattccagtcggatgaactggaggtaccagacatttctgaagagacaacgtgcggtgctggtgtggctgatgctcaagccttgaacagagttcgagtggtccccccaccaagcgatggacaaaaaatattccagattgaccccatgttgcaaggctataagtaccatcttgagtatcgaacaggtacagcctctatagaagaatccgttcagacattgatgaacatgaaggaggcttggaagccttctcccgtagttatgagaagtttggatttaatcgcagcgcggaaggtatcacatatcgagaatgggctcctggagcattttctgcagcattggtgggtgacttcaacaactgggatccaaatgcagatcgtatgagcaaaaatgagtttggtgtttgggaaatttttctgcctaacaatgcagatggtacatcacctattcctcatggatctcgtgtaaaggtgagaatggatactccatcagggataaaggattcaattccagcctggatcaagtactcagtgcaggccccaggagaaataccatatgatgggatttattatgatcctcctgaagaggtaaagtatgtgttcaggcatgcgcaacctaaacgaccaaaatcattgcggatatatgaaacacatgtcggaatgagtagcccggaaccgaagataaacacatatgtaaactttagggatgaagtcctcccaagaataaaaaaacttggatacaatgcagtgcaaataatggcaatccaagagcactcatattatggaagctttggataccatgtaactaatttttttgcgccaagtagtcgttttggtaccccagaagaattgaagtctttgattgatagagcacatgagcttggtttgctagttctcatggatgtggttcatagtcatgcgtcaagtaatactctggatgggttgaatggttttgatggtacagatacacattactttcacagtggtccacgtggccatcactggatgtgggattctcgcctatttaactatgggaactgggaagttttaagatttcttctctccaatgctagatggtggctcgaggaatataagtttgatggtttccgttttgatggtgtgacctccatgatgtacactcatcacggattacaagtaacatttacggggaacttcaatgagtattttggctttgccaccgatgtagatgcagtggtttacttgatgctggtaaatgatctaattcatggactttatcctgaggctgtaaccattggtgaagatgttagtggaatgcctacatttgcccttcctgttcacgatggtggggtaggttttgactatcggatgcatatggctgtggctgacaaatggattgaccttctcaagcaaagtgatgaaacttggaagatgggtgatattgtgcacacactgacaaataggaggtggttagagaagtgtgtaacttatgctgaaagtcatgatcaagcattagtcggcgacaagactattgcgttttggttgatggacaaggatatgtatgatttcatggccctcgatagaccttcaactcctaccattgatcgtgggatagcattacataagatgattagacttatcacaatgggtttaggaggagagggctatcttaatttcatgggaaatgagtttggacatcctgaatggatagattttccaagaggtccgcaaagacttccaagtggtaagtttattccagggaataacaacagttatgacaaatgtcgtcgaagatttgacctgggtgatgcagactatcttaggtatcatggtatgcaagagtttgatcaggcaatgcaacatcttgagcaaaaatatgaattcatgacatctgatcaccagtatatttcccggaaacatgaggaggataaggtgattgtgttcgaaaagggagatttggtatttgtgttcaacttccactgcaacaacagctattttgactaccgtattggttgtcgaaagcctggggtgtataaggtggtcttggactccgacgctggactatttggtggatttagcaggatccatcacgcagccgagcacttcaccgccgactgttcgcatgataataggccatattcattctcggtttatacaccaagcagaacatgtgtcgtctatgctccagtggagtgatagcggggtactcgttgctgcgcggcatgtgtggggctgtcgatgtgaggaaaaaccttcttccaaaaccggcagatgcatgcatgcatgctacaataaggttctgatactttaatcgatgctggaaagcccatgcatctcgctgcgttgtcctctctatatatttaagaccttcaaggtgtcaattaaacatagagttttcgtttttcgctttcctaatgcttgatggctgattgtttgcacttgtttcattccgttgggcactgatggtcttagagttagacaatcggctgcagcgcataggtttcaagctggggggttgcatgtccgactacagagcagccagcaatgtggcccctgc

SEQ ID NO: 201424 - DNA, 1374 bp, Zea Mays
ctcagtgctggcaattgctgcctgcgctcgtagtcactctcacagtgcccccccgccctgctgccagagaaccagaaggaaaggaggatcccgagcagtcaattgccctgatcctcccccccaccctggggtagtaagagaaagagcgaggctgaattgctgtgaggcaggcgagggtggttgtgtgtgtgtgtgttgctgcgctgcgcaggctcagtgcgggcgatggggcgatcgccgtgctgcgacaaggaggggctcaagaagggcccgtggacgccggaggaggaccagaagctgctcgcctacattgagcagcacggccacggctgctggcgctcgctgcccgccaaagccgggctgcagcggtgcggcaagagctgccgcctccggtggacgaactacctccggccggacatcaagcggggcaagttcagcctgcaggaggagcagaccatcatccagctccacgctctgctcggcaacaggtggtcggcgatcgcgacgcacctcccgaaacgcaccgacaacgagatcaagaactactggaacacgcacctcaagaagcggctggccaagatgggcatcgacccggtcacgcacaagccgcgctccgacgcgctggggacgggcggcgggggaggcgccgcgggcgcgcagcacgccaaggccgcggcgcacctcagccacacggcgcagtgggagagcgccaggctcgaggccgaggcgcgcctggcgcgcgaggccaggctgcgcgcgctcgcggcctccgcctcggcgccgccgcagatgcccgccgccgccgcgcaccggctcgactcgcccacgtccacgttgagcttctccgagagcgccgcgctcgcctcggtcctgcaggaggcgcacggcgccgcggcggcggcggccgcggccgcgcgcgccgccatgcagcccatgcaggcgtacgaggaggcgtgcaaggagcacgagcagcagcagtggggcgatcacgtcgtcgatgtcgccgacgcaggcttcgccgcggcggggttcacgggcctgcttctcgacggctccttgagccagcatgatctgaggccggcgccggcgacgacgacgagggacgacgaggcggacgccggcctgcacgagacggaggaggagaagagctactgggacagcataatgaacctggtgaactcgtcgtcgttgccgacgactctccggcgatggagttctgctgactcgtgagccctggacacatgcatgtccgccggcatgtggccgttcaaatgacacagtaaatagctagctatttcggaacaataagatcgaactactaatgttgatggttaaatcgcgttctcgtgttaaatctgacagcaccctgattaa

SEQ ID NO: 201425 - DNA, 703 bp, Zea Mays
gtaacctcttgcagatgtgattctagggcgaaacttttgttccagagagcattgtcaggtttggaaagagaacagaaggcagagatggagttgtaacaataatggcggaagatgaacggatcaagtatcaaggtcttcatcatggatccagctacttggagcacctcaatttcttgtctgctataagggctcaaggtgcatccggaccatctgtgaacttgagtgacggcctactatctgttgccgtcggtgtggctgggcaattatcaatcgagcagggccggtttgtaaccatggaagaggtcttaggtttgtagcctggtgataattcaggcatcctaatgtactgtaaaaccttttgtgtattattaggtatatgttcttaataatgctgcggactgacgagtttatgcaaagttaggataacattataacatgcatttcaaatagaggaatatgatgataatcttcaagcaaatgtcatggagtagcagggttatgttatctgcaagtgatatcttggacctcttggttgtgattaatggaccaatatctagaacatgtcatattatttcttgatttttctcttagttttttttgagaattttaatggcgtatcaacaatatcactatattatattttcctataaggattttggaggattgaagctattgattgatctcaagactggaccgaatcaag

SEQ ID NO: 201426 - DNA, 2064 bp, Zea Mays
caaaaaagcacccctccatatgccccgctgtcctatccgctcgccagtcgccacctccgtttcggcatttttttcccactcccacccactcccccgtcttcctcctcccgacacacctctttaactcgcgtcggcttccaaaaaatgctccagctataatttaatccagacgaggaatcgcctcgcccgggatctctccccccccgcgaatccccaggcccgctcgccgacaggaccccgcgatcggctccagcgtgagcttgacttgcgttgcggcggggacgtcgccgacgctcggcacggggctcgtcggttcggcggtcgctttaggctcgggccccgtcgaggccagcggtgccggggcaatgcggtcagttcgtggagctgtttgaggcgcttggctgggatctgagggtgccagcgtgccagaatggagcacgtagtcgggggcaagttcaagctcgggaagaagatcgggagtggatcatttggggaactttacctcgccgtgaacgtgcagaatggcgaggaggtggctgtcaaactggaatcagtcacatcacgacatccacagcttcactatgaatcaaaactatacatgcttttgcagggtggaactgggattccacatcttaagtggttcggggtggaggggcagtacaatgtcatggtgattgatctgcttggtccaagtctggaggacttatttaactactgcagcagaaagttctcccttaaaacagtactaatgcttgctgatcagatgatcagtagagtagaatacatgcacacaagggggtttctacatcgtgacatcaagcctgataattttctcatgggtttaggacgtaaagcaaaccaggtatttgtcatcgactatggccttgcgaagaagtatcgagatctccaaactcataagcacataccatacagggaaaacaaaaatctcacaggaacagcacgatatgccagtgtaaatacccatcttggagttgagcaaagcagaagagatgatctggaatctcttggttatgtgctcatgtatttcttaagaggaagtctcccttggcaaggcctgaaagctggcacaaagaagcagaagtatgataggatcagtgaaaagaaaatgctgacgccagttgaggtcctctgtaaatcatatccatcagagtttactgcatactttcattactgtagatcactacgattcgaagataaaccagattactcctatttgaagagactcttccgtgacttatttatccgcgaggggtaccaactagattatgtatttgactggaccattatgaaatatcctcagtttagagataaaagcaaaattcagtctagcggcaagatgagtgggttggcaggcccttctgcagaaaggactgatagaactgcagctgaagctttgtttagaaggactggatctggttctggtcacaatcgagagcacaccaagcacagaagtcttctggagtcactgatgccatccaaggctgttgattcggataaagcaaggccacaatcatcgtcgcgcaacgggagcacatcaagaagagctgtcatttcatcaagcaaaccaagctcttctggggatctaagcgacccgaaccgcttggggggccgcctggcccctagtagcagcagccgcccaccgactgcccaaagggagatcagatcctcgtctttgtcaaaaatcggaaggtcttcacatgacgacgctatcaggaacctcgagctgctctcacttggtgctgacaagagaaaataagggaaccgacgaaatgggctagggtctggactctggatgatgacgatgcagggctgagcaggcagctccattatctgtatgttgaaaatattcttttcggaataaaagagattatataacttatgggattgtttcccggagctgtgctgctccaatccaataacccgcaagagttacgtagcaaagctaaattatgctgtcctagtagatcactgtatatctgaggacaggcggtgagacaacgaaggggagttgatagcaagatacaccattgcaggagttctatg

SEQ ID NO: 201427 - DNA, 638 bp, Zea Mays
ccctgctcccgtaggaggccctaggaattctgcaactcctccatgcccaaagcgaaaatctggagtcgaagtagaaagatgtcccaagaagagcaagcctcaagagaacaaatcagttcttccaaaacgaaggcacgatgtactcagcgatgaaatcatccttggtctaaagagaaggctcaggctggacgacccaatcccagctaagaagattacgcaagtacaatgcagttcagagacacaacgaccagttaaattttcttgcggctttgtgaatgcaaatggaaagcggctatgggatgtggagacacagcaaccagttaaattttcctgcagttttgtgaacgcaaatggaaagcggctacgggatgaggagatgatcacctcgctttcatgtaaaaaagctcggtgacaggagctgaggtaaatgccctaccatatgttccagcagtcatgtaatcttgaacaaaagggcgtatacttcgcttggaggcagttccagacgcagctgttgtatgtacatccatgcaccttgtgaatatcacattgattgtaactaaacaacatttttagagtgataatcctggtgacaagacgtgcaagtccgtaatcagtgcgcttgttgcatgacagcagct

SEQ ID NO: 201428 - DNA, 742 bp, Zea Mays
ggcacaagtttgttgttcctcttatccgcggaggaagaacgttggctcgacaccatgctcccaatggccgtccaccccacgagcacgccgtccctgtcgccgcgcgcccgcgtctccccgcccaggccttccacctctctggccgccacctcgtcctcgccctgctctcgcatcgtcagtttcaagagcaggaggctgccacttcgctctgtccgcagcgtcgtcgccgctgccgctgccgccgctgcagaggaagaagagaataaggtggtggtacctgagaggcaggacccgatgctggtgctcaagttcatctggatggagaagaacatcggcatagctctcgaccaattggttcctggctatggaagcatcccgttaagcccatactacttttggccgcgaaaagacgcgtgggaggagcttagagcgaagttggaagagaaagagtggatctcacagaagcagatgatcatccttctcaaccaggccaccgatatcatcaacctctggcagcagggtggcgggagcctctcgacatgacttgtgttttgttggttaattggtttccttacatgccctctctgttgttaattttgaagttatggtacataatgtagatcagtcgaatctgttctcacgtatggtttttttacatggaaatgatcttgtgatttatcttagttattacgtgtatcagtcggttttttgttgggaaaatcaagaaacacaaataaaatcc

SEQ ID NO: 201429 - DNA, 2072 bp, Zea Mays
gtcagtggttgtctggatctgggggctccaagtgtggatccagtcctaccttctccagatctgttttcctctcacctgggtgggcttcgtcttgccactggtctcctcctcgggctcgtcggcgtagccgcggtgggcacaacccgcggcgtgcagaagaaccggaggctcggctggtgttggtaccagaggaggaggcggtgagttcttgaaagatgatggaggggagacagacttggaccaccaacatatgcacgaggtggtgaatggggttccctatgagcttctccatcggctggcgtctcagctcccgtcagtcgcacttggaagcggatttcatttaccctttctcctcaaggtggccctcgatctagagacgccgtctatctccagcaagagcgataccgtcgaggcgcctatccacgccagacacaacgtccgcagtgatgggcgacctctaaggcctgaacggtgccaccataggcttctcggcggccggcggcccggaggaggcgactgaagaggaggacatgcggggctgcgagggatgcgctcgccggtggccgaagttggggctaagctggggctgtgcacagtcgagaagacgaaggcaaggcgagtcactccatcacgctatgcatgtcaccaaggcgcggcctcccaatctcggctttggttttggatgtccaggataatgtaagtgtaaaataatctgggccattaaccgagtcaattgtgatgtggagaactgacgaagttgtctgcatgcacggattgaggccaagtcattctttgtttgcgaactgcaaggagaaacagagcctatacttttcaatgagggttatggatttagcagcaggggaactcccggagattgtgcctcttggaaaaggcttctttcttgccaactatcctatttcaattttggattgaccattatcgttcgcgttcctttgttctccatcttcagatttattggaacttgagctagcacctgtatgagtcaagagcctagacttttcaacgagggttatggatttggcagcaggggaactcccagagattgtgcctcttggaaaaggcttctttcttgccaactatcctatttcaattttggattgaccattatcgttcgcgttcctttgttctccatcttttacctcttgtagttacacaagaacaacttgattgtgctaaacatgcaatcaaatctgcagttctgatgaacttggaatcaagggctcaagtaacctgtctctttttggtcattgtgctccaacgtgacatcacaacaatcattgaggagtgtaaccggcaacctcagctctgaaagaaccctagagtaaacactcacatcaagacactccactgttcactcttgtgctgctcctaccaatggagcaagagcatctccacctggcaatggtccactcgttgtattcatcactaagtcagctcgattccaccaatgggtgttcatgctgttggatggaaaatgacaacccctctttgcatcatgcactgttttgtctttctaaaatatttctgtttgctcctagcggcttgaacccctacaagtgcacctggcattggttaccaatctgcagattcataacatctcatgaaaaggatacgtgttggacaaccagataaggtattacagagaatatgaataatctggaggttctactgatgcatgtaaattatggaattatggtttcaattctagattatttgataatggcacctctatatgctcattgggcaatgatcagaaagttggaggtcatagaaatactgagaatggtgaattttgtttacatttatgggcacttttgaaaagaaattattttgtatggtagtattgttgaaaagatcaataattttagagactttgatgatcgctatgtggatcattgtgcacggaataagcggagctgctcatatcttctactaacaagacacttagcattcgttgcccactcttagcagctgccaggtttatttcccctcttccgatctcctgcccttatatgtgaattcctttcatcctcccaatatttgtttccctg

SEQ ID NO: 201430 - DNA, 1435 bp, Zea Mays
gtcagtggttgtctggatctgggggctccaagtgtggatccagtcctaccttctccagatctgttttcctctcacctgggtgggcttcgtcttgccactggtctcctcctcgggctcgtcggcgtagccgcggtgggcacaacccgcggcgtgcagaagaaccggaggctcggctggtgttggtaccagaggaggaggcggtgagttcttgaaagatgatggaggggagacagacttggaccaccaacatatgcacgaggtggtgaatggggttccctatgagcttctccatcggctggcgtctcagctcccgtcagtcgcacttggaagcggatttcatttaccctttctcctcaaggtggccctcgatctagagacgccgtctatctccagcaagagcgataccgtcgaggcgcctatccacgccagacacaacgtccgcagtgatgggcgacctctaaggcctgaacggtgccaccataggcttctcggcggccggcggcccggaggaggcgactgaagaggaggacatgcggggctgcgagggatgcgctcgccggtggccgaagttggggctaagctggggctgtgcacagtcgagaagacgaaggcaaggcgagtcactccatcacgctatgcatgtcaccaaggcgcggcctcccaatctcgtgtaaccggcaacctcagctctgaaagaaccctagagtaaacactcacatcaagacactccactgttcactcttgtgctgctcctaccaatggagcaagagcatctccacctggcaatggtccactcgttgtattcatcactaagtcagctcgattccaccaatgggtgttcatgctgttggatggaaaatgacaacccctctttgcatcatgcactgttttgtctttctaaaatatttctgtttgctcctagcggcttgaacccctacaagtgcacctggcattggttaccaatctgcagattcataacatctcatgaaaaggatacgtgttggacaaccagataaggtattacagagaatatgaataatctggaggttctactgatgcatgtaaattatggaattatggtttcaattctagattatttgataatggcacctctatatgctcattgggcaatgatcagaaagttggaggtcatagaaatactgagaatggtgaattttgtttacatttatgggcacttttgaaaagaaattattttgtatggtagtattgttgaaaagatcaataattttagagactttgatgatcgctatgtggatcattgtgcacggaataagcggagctgctcatatcttctactaacaagacacttagcattcgttgcccactcttagcagctgccaggtttatttcccctcttccgatctcctgcccttatatgtgaattcctttcatcctcccaatatttgtttccctg

SEQ ID NO: 201431 - DNA, 1567 bp, Zea Mays
gttttctccaaagcatggaaacctacattgtttcggcttctggcagcttctggtcaccaaaagctgctgcggactgccaaacgctcagcttttcagacagcttctataaaattcgttggggcaaaaaccatccaaaatcaacataaacacataatcagttgagtcgttgtgatagtaggaatccgtcactttctagatcctgagccctatgaacaactttatcttcctccacacgtaatcgtaatgatactcagattctcctcacagccagattctccccacagctagattttcagaaaagctggtcagaaaaaagctgaaccaaacaggcccataggctatataattttgaagcatattgatcgtcctgcacatcttggttccagtgaatacaaaaaagtgtacggagaataatggaagggaaccatcggatgggaatggttgctattgattcggcaacgggtactgtagcagattgtggctgtgaggtggaaatttcagagtgtgaaccacttccagatgggcgcttttatttagaggtggaaggcacacgtcggtttcgtatcgtgcgatcatgggatcaagatggatatagagttgctgaagttgaatggttgaaagatatacctctgccagaaggttcacaagggagaagagaactaatggaactggccaatggagcttcagagctggccagggcatatatcagacatgctagagataccgtacggactgcaaggcgaacaagacatctggatcttgagggcatgcctgggccacaggacccggaaaaatttagtttctggctagccaacttgataagtttgaggccctcggatagattagatacgttacgccttcgcgacactagggagagaatttctagtagcatcagtttgctccgtgattccgaacaaggctgccgtgtacaatgacggaaacagtacaagaatcgtttccacagaccaattcgttcgtctaggagtatatcgatttggagctactccgtgattccgaacaaggctgccgtgtacaatgacggaaacagtacaagaatcgtttccacgtaccaattcgttcgtctaggagtatatcgatttggagctacaccgtgattccgaacaaggctgccgtatacaatgacggaaacagtacaagaatcgtttccacagaccaattcgttcgtctaggagtatatcgatttggagctagggatgtaatatggttcagaaaatatctgtccagatccagactcgaagatggtgaatactggttcggatagaattttcggatatccggacttttttcggataacggatataaatacggatattttattcggatattgaattcgaatacaatatgtttgatatctgtcggatatcaaatatccagatattttctcggataaatcttctcggatatccggatatcttatctggatagctgtgtgtattttgttgatttttttagaaaaaatttaataatacacaaatatcctcagaaattcatgaaaatttatggaggcataccacatgtccacatataattctccaaaatatttgga

SEQ ID NO: 201432 - DNA, 1203 bp, Zea Mays
gatcgtcctgcacatcttggttccagtgaatacaaaaaagtgtacggagaataatggaagggaaccatcggatgggaatggttgctattgattcggcaacgggtactgtagcagattgtggctgtgaggtggaaatttcagagtgtgaaccacttccagatgggcgcttttatttagaggtggaaggcacacgtcggtttcgtatcgtgcgatcatgggatcaagatggatatagagttgctgaagttgaatggttgaaagatatacctctgccagaaggttcacaagggagaagagaactaatggaactggccaatggagcttcagagctggccagggcatatatcagacatgctagagataccgtacggactggcgaacaagacatctggatcttgagggcatgcctgggccacaggacccggaaaaatttagtttctggctagccaacttgataagtttgaggccctcggatagattagatacgttacgccttcgcgacactagggagagaatttctagtagcatcagtttgctccgtgattccgaacaaggctgccgtgtacaatgacggaaacagtacaagaatcgtttccacagaccaattcgttcgtctaggagtatatcgatttggagctactccgtgattccgaacaaggctgccgtgtacaatgacggaaacagtacaagaatcgtttccacgtaccaattcgttcgtctaggagtatatcgatttggagctacaccgtgattccgaacaaggctgccgtatacaatgacggaaacagtacaagaatcgtttccacagaccaattcgttcgtctaggagtatatcgatttggagctagggatgtaatatggttcagaaaatatctgtccagatccagactcgaagatggtgaatactggttcggatagaattttcggatatccggacttttttcggataacggatataaatacggatattttattcggatattgaattcgaatacaatatgtttgatatctgtcggatatcaaatatccagatattttctcggataaatcttctcggatatccggatatcttatctggatagctgtgtgtattttgttgatttttttagaaaaaatttaataatacacaaatatcctcagaaattcatgaaaatttatggaggcataccacatgtccacatataattctccaaaatatttgga

SEQ ID NO: 201433 - DNA, 1158 bp, Zea Mays
cttggttccagtgaatacaaaaaagtgtacggagaataatggaagggaaccatcggatgggaatgattgtggctgtgaggtggaaatttcagagtgtgaaccacttccagatgggcgcttttatttagaggtggaaggcacacgtcggtttcgtatcgtgcgatcatgggatcaagatggatatagagttgctgaagttgaatggttgaaagatatacctctgccagaaggttcacaagggagaagagaactaatggaactggccaatggagcttcagagctggccagggcatatatcagacatgctagagataccgtacggactgcaaggcgaacaagacatctggatcttgagggcatgcctgggccacaggacccggaaaaatttagtttctggctagccaacttgataagtttgaggccctcggatagattagatacgttacgccttcgcgacactagggagagaatttctagtagcatcagtttgctccgtgattccgaacaaggctgccgtgtacaatgacggaaacagtacaagaatcgtttccacagaccaattcgttcgtctaggagtatatcgatttggagctactccgtgattccgaacaaggctgccgtgtacaatgacggaaacagtacaagaatcgtttccacgtaccaattcgttcgtctaggagtatatcgatttggagctacaccgtgattccgaacaaggctgccgtatacaatgacggaaacagtacaagaatcgtttccacagaccaattcgttcgtctaggagtatatcgatttggagctagggatgtaatatggttcagaaaatatctgtccagatccagactcgaagatggtgaatactggttcggatagaattttcggatatccggacttttttcggataacggatataaatacggatattttattcggatattgaattcgaatacaatatgtttgatatctgtcggatatcaaatatccagatattttctcggataaatcttctcggatatccggatatcttatctggatagctgtgtgtattttgttgatttttttagaaaaaatttaataatacacaaatatcctcagaaattcatgaaaatttatggaggcataccacatgtccacatataattctccaaaatatttgga

SEQ ID NO: 201434 - DNA, 956 bp, Zea Mays
acctaaaccttgctaccatataaaccttttcactgctccagccgccgccgccgccgtttcttcgtcttcctcgcagcgccgccgctccatcttccgctgatccgctcgctcccgcctctcgccacgcaggcggcggcgctcaggcccgtgatttcagcgacggcgtcagcggcttcccctcccgtctcttcccagtcgcctcgcgccctcgcctccggtcctccgcacaccggccggtgaccctgcatccaccatgactggtgtcagcactggattgttgacgggcttgaggagggtcatggaacagcaaaggatttcaaccgctttctgcagacaatcacgagtttcgagctctactgtttctttctctgacctcgatgagaagggtgacatggaatatgatgataactctccaaattcaaagagggagttacgaccccaaggtgtagatcccaataagggctgggaattccgtggtgtgcacagggcaagattcaattggttaaatctggggacagtgctgctaacatatcattagatgaactaagagaaggactgttctagctatagtgaaagatgtcaggagtatgcttctggcttgagtgtgttttgctggcaccgggcaggctatcagctcatctgcattgtgtccagatgagatgctctgtgctgcggttgttttgctgaatgcttggagcatggtatccttgaactgaagtggcgcttgagaattggaggagttttggtttgacatgagaaaggctggcatggttttcccttcactcacaccgggaacgcagaagcctgcagttctcttccctgcctaaaacactagtaaaatgacaacgcgaggctccatgatgttgatgtccttgcccgcgagtagatgcgcaccaatagttcgcaccctgttctcacatcctcaacgacacagtgacaccctgtgcatgggcgac

SEQ ID NO: 201435 - DNA, 1266 bp, Zea Mays
acctaaaccttgctaccatataaaccttttcactgctccagccgccgccgccgccgtttcttcgtcttcctcgcagcgccgccgctccatcttccgctgatccgctcgctcccgcctctcgccacgcaggcggcggcgctcaggcccgtgatttcagcgacggcgtcagcggcttcccctcccgtctcttcccagtcgcctcgcgccctcgcctccggtcctccgcacaccggccggtgaccctgcatccaccatgactggtgtcagcactggattgttgacgggcttgaggagggtcatggaacagcaaaggatttcaaccgctttctgcagacaatcacgagtttcgagctctactgtttctttctctgacctcgatgagaagggtgacatggaatatgatgataactctccaaattcaaagagggagttacgaccccaaggtgtagatcccaataagggctgggaattccgtggtgtgcacagggccatcatctgtggcaaagttggacaagtccctgtgcaaaaaattttaaggaatgggcatacagtaaccgtttttactgttggaactggtggcatgtttgaccagagggtaattgggcctaaggatttgccaaagccagctcagtggcaccgcatagctgtccataatgactacttaagtgcttatgctgttcagaagctggtgaagaattctgctgtctatgttgagggtgatattgaaaccagggtctacaatgacagtgttaatgatcaagtcaaaaacatacctgagatatgtgttcgacgtgatggcaagattcaattggttaaatctggggacagtgctgctaacatatcattagatgaactaagagaaggactgttctagctatagtgaaagatgtcaggagtatgcttctggcttgagtgtgttttgctggcaccgggcaggctatcagctcatctgcattgtgtccagatgagatgctctgtgctgcggttgttttgctgaatgcttggagcatggtatccttgaactgaagtggcgcttgagaattggaggagttttggtttgacatgagaaaggctggcatggttttcccttcactcacaccgggaacgcagaagcctgcagttctcttccctgcctaaaacactagtaaaatgacaacgcgaggctccatgatgttgatgtccttgcccgcgagtagatgcgcaccaatagttcgcaccctgttctcacatcctcaacgacacagtgacaccctgtgcatgggcgac

SEQ ID NO: 201436 - DNA, 2009 bp, Zea Mays
caacaacacggttaatcagtgtaaccgtcctgttttcccgccttcgccagtcgccagtagtggccactgccatcccatcagctgctggccgggttgggatgggtgaacgactcacgtgtttcctgtgcaaggttggcagctcacccatggcccctgcgcgcgccctttctgttcgtccgcctttcccttctgcgcgctgcagtcagccctcatggccgccgcacaatgccagtgccagaccttcaccacgggccgggcgtgcatggcagatcttccatttaggtagagtagtggacaaccaagcccaaggccaaagccattgcttgctcagcctctctgcactgcagggcgatgatgaggcaacggcaaactggcagcagcaagtactactagcgcttgctaaaggtcggtgagttcctcctcagtcctcacctcctccttttgccggttttttccaggttgaagaatgagagtgctgtgtgtacttcagatttcaggctatctctctgtttatctgcttgctaccactattctctgccgtttccttttttttcagcatgcttttcagctttacacccagtcatgggaggatagtacatagtagtagtgggtgttcgttgtgaatctctctctctctctctctctctctctctctctctctctctctctctctctatccagttttggatacatttctgaaacttgcgccgctgagagcctgagatcaagcgagcgcgcggcgcttggaagagccacggcgtgagtgacgcattgcggcaaaggcatcactgtttctcgttctggtttggactttggagtcccacagcaaaaaaatgcctatccctacccactcatgcctaccaagaaacaacaactcaactctcgggaggcgcaacaaacgatgccgcatttcccttcccctttcgttttttttttacctcttcagtgttcacatgtactagaacgtgtgatatgtcttcgcaagcgtcacatggtctcgcgcgggcacgagagacaggacggcctcgagtcctctcaactcaactgccctctgatgcctgcatttcttctaccaggccaggagcccaggacccggaggtgctcgctgtcgctgatcaaccgcgcgccgtcgcaggcagcacagcaaccagcaacagccaacagctaggcaggtagtagtagtatacatgagcaggttcgcggggcagacgtccaccaggccgtgggtggggatggcgggctctggcgccaccgcgtccgagcctgccgccgccgacgtcgcgagggacgacgccacggcggccatgaggggcgccggcgccggcgccggcaccaacgccagcgccatctccttcggcttcgcggccacggcggtcctcgtctccatgttcctcctcatggccatcttcgagcacctcatcaagcccggcctggcttcctcctcctcccgcggcgcatcgggctcccatgaagacgccgccgacgacgatggcgaaggccgcggccaccgccaccgcatggggggatcacccccggctcgactgcgcgagcgcgacgacgcggcgccggacaagctctgtcacctgccaaaggtggaggccgtggtggacttgacggtgctgatgccggggcagcggtacccgacgttcctggcgcagccggcgccgctcgcgccgtgccacagggaaggcgtgctctggccttcccacgaccgtcgccgctcgtttgtgccaccgtgattttttccccccaccacatcgttctttctgtacagaggttattgtaaatggcagcgccctggcttattcgaggctgatatatcatatggctgttgtcacatgtgatgtggaacactgtttcggtatggtagatatagcgatggtaggatagatcttcacatgcgtacggccggtacgtagtttcagcaacttgctaattaggctgggaaatgtcgttgggtaagtttggcccatcatgaaggcggcccatcagttggttcgagtcatctg

SEQ ID NO: 201437 - DNA, 1257 bp, Zea Mays
gttttggatacatttctgaaacttgcgccgctgagagcctgagatcaagcgagcgcgcggcgcttggaagagccacggcgccaggagcccaggacccggaggtgctcgctgtcgctgatcaaccgcgcgccgtcgcaggcagcacagcaaccagcaacagccaacagctaggcaggtagtagtagtatacatgagcaggttcgcggggcagacgtccaccaggccgtgggtggggatggcgggctctggcgccaccgcgtccgagcctgccgccgccgacgtcgcgagggacgacgccacggcggccatgaggggcgccggcgccggcgccggcaccaacgccagcgccatctccttcggcttcgcggccacggcggtcctcgtctccatgttcctcctcatggccatcttcgagcacctcatcaagcccggcctggcttcctcctcctcccgcggcgcatcgggctcccatgaagacgccgccgacgacgatggcgaaggccgcggccaccgccaccgcatggggggatcacccccggctcgactgcgcgagcgcgacgacgcggcgccggacaagctctgtcacctgccaaaggtactactgtgtctgttgacgtctcattaccgcaatgccactgttctgtcctcgtgctcgccctgcattgcgacatacccccgccccgctcatctctgcagctgcggcagcatatatccatccatgtcgcacacactgtagcactagcgagaggcaatgtggcgtgcgaagccgaaacctgaaggccaggctgcccctggcagggctcgtcggttccctgattcccttgggtttgccgtctgcaggtggaggccgtggtggacttgacggtgctgatgccggggcagcggtacccgacgttcctggcgcagccggcgccgctcgcgccgtgccacagggaaggcgtgctctggccttcccacgaccgtcgccgctcgtttgtgccaccgtgattttttccccccaccacatcgttctttctgtacagaggttattgtaaatggcagcgccctggcttattcgaggctgatatatcatatggctgttgtcacatgtgatgtggaacactgtttcggtatggtagatatagcgatggtaggatagatcttcacatgcgtacggccggtacgtagtttcagcaacttgctaattaggctgggaaatgtcgttgggtaagtttggcccatcatgaaggcggcccatcagttggttcgagtcatctg

SEQ ID NO: 201438 - DNA, 2977 bp, Zea Mays
aatcgcacaagtttcccacccggagcgaggcaacattcatgaagcggagcagccgagcagaggcggcggcggcggagccagcgagggagcagccttgacgcagcagcatcacggtcacgggccgggcctcgtgcgctccgcccgttccgagtcgcatcgtatcgatacgcccgatgcgtcgtcacaggcacagctccgccgctcatgtccgcacccgagttattatatactactactacggcccgccaccttcgcttcgctagcggtccgcacccgttgcctccaaactcatttctcccgagcgccgccgcgagcctccgttccagcttcgtccatggcttccctcaccggatccgctctctcctttgcgaggcccgtcaaggcaatcagcattaagtctgtctctttctctggtttaaggaaggataatgtagccttccgcttgcagccagtgccacaaagattcgcagtctgctgtcctgtaagtaacaaattgttgtactgtggatctgtcaccacgtaatttaatcactgcatgatgctgcagctacacatctctatttattttctttttctatgtcaaatgtgccaattgtttcaactactttgtttggcttctaaagagattttgtatttattgtgcactgaagtgcttccattatgtacttgattgtatttttgtgaacacatagctccgatgaaagaaattttcaagagaattcctaaggtactggttatctttttttttcctttgcatttggcaccccaggatttttctgtcacgtgttagcatctgatgtggatgtaaaacgtcccatcacattgtgtttgtgtttttagctggtagattatactggtgcaatcttctttaaactgaagtttgtgttacctaatgattatgatcattccactgttgctgtgcttaccattttaccaggctaaaaaggagactgtggatcgggtttgtgatattgtcaagaagcagcttgcacttcctgagggcactgaggtctgtggctcctctaagtttcaagacctcggcgctgattcgttggacactgtaagtgcttttaagtttgcaacacctgaatttatctatttaatttttgaatgattcttggggtagcagaacaacaattagctattttgttttgtacatgtaccaatcataaattgattacatttccagggaataacatctaggatcagtgctctggttctctactcaagtctgcaagttatctgttatgccagtagataaattctggactgaagtctattggcatttgtgttgagttgaatataaacttggattactcttctttcccaaaagagactaaatcttccatggacctgttttttaggttgagattgttatgggccttgaggaggctttcaagatcactgtagaggagtcgagcgcgcagtcaatcgcaactgtggaagatgctgctaatctcatcgacgaacttgttgcaggagcagcaaaatcgtgttaaactggtcgtattgcgttgggtgctgtaccagggcatcacttgttgttctatgcccccttgcctactagattttctaccctgggcctggagagatgtttctgtcatgactgtcattgtggatctcgcgatattgttatattgaagcttttgtgcttgttcaagaaaagaaaatgttgttgcgatatatatgttattatattgaattttttttgtccatgttcaaggatattttatatattttaagtgatctgaggggtactggtaggctcgctcatgctgtgcttttttatggcatgattattttgttcattgcgagtctacgccatcattgtggttgcagatcgccaagcacgcgcacaaacgaaaacgcacgagcctcaggcgtgctgcttccctagctacctttattcagtcacagactgcagtgccggccatggctgtggagcagtgaagaatattctgcacttgtcggagcaaattccccgacagccatcagcacggcctgcgtggctgtcggtgcccatcgatcgagctgacaactttgtttcaagctcttcaagttcatcagtgcaaaagcagcagctgtacatactacatatataatagctgcctagctccaccgcaaagccgagcaggaggcgacgaaaccaactgagggtgcgtgtcggatggcgaggccgagggaggaggagctcgtggaggccgcgctggtcgcggcggccgcagcgctgatcgtgtcgggcgttaagaggctggtggcgccgcccgagcccgtagctccgtggtggtggcctgcgtcgctctcggtgccgtctcccgcgctgttcctgctcctcaacgtcatcatcgcgtctatcgttgtggcgtccgtgcagccgcggcggggaggagcggcagcttcggcgtcgtccgggggagccatcgacgacgaacgggaggcgcggggagacgccgcgaagaggaggaggagcaagagcaagagcaagagcaagaagcggacggcggccgaggccgccattccagatggctgctacatggcgctggtcgttacgggcgagccgatagagacggcggcggtgatggaggaggtggcggcagcagatgaggatgcggccgccgaggtgaacaaacgggctgaggagttcatctcggcgttccggcaccacctcagggtcgactccttctcgtctactacaacccggcgaagcaacgctagagcggcggcaccatgctctatctagatagttctggattgcaaacatatttttatggtttccccactttcaaagaatttttaatttgtgctccaagtttttcttcttcttttgagttgtagttgtatactctcttaacgtcagtttcatccaaattccctcactttgccttttcatttgactactcaacaatttaatcaactccctccgtgccataaagagcacagtttttatttccctaaaagtcaaacatttatatttttc

SEQ ID NO: 201439 - DNA, 2228 bp, Zea Mays
atagccggccggacgccactctatcccggccgtcggccgcggttcaggctctccttccattagaagcactcttctagtttagactttataatagaggcgctgaggcctcacccttttccctggtgttgcaagttgcaacacacagcgtccggcgagatcggcgatcagaaaccacgagcccacccaccatccggaacgcgcgcgatgtgtcccatcagaggtggtggttgttcttggccagcgtccgtcgtcggctctgccacggcggcgctgctcctcgccgccgtcatcgtgcggctcttcgtcccccgtgcctgttcttcaggaattatcaaggggcggcggcaggtaggtgctggtgctgccggaggagcacggctccctgccggctcgctcgggtggccgctcctcggcgagacgctggcgttcatccgggccgcgtactcgcctcgcccggagtccttcgtcgagaaacgccgcgtcttgtacgggaaggtgttcaagtcgcacctgtgggggtcgccggcggtggtgagctcggacccggaggtgagccgcgcggtgctgcaggccgacgcgtcggcgttcgttccatggtacccgcgatcgctcatggagctgatggggcaatcgtccatcctagtgctcggcggcggcctccagcgccgggtgcacggcctcgcgggcgccttcttcaagtcgccgcagctcaaggcgcaggtcaccctggacatgcagcgccgcgtcggccgcgccatggacatgtggggcaggcggcgccatcggagcatgggcgacgacagcggtggtatgcccgtgcgtgtgcagaacgaggccaagtcgattgtgttcgaaatcctagtgagggcgctgatagggttagaggaaggggacaagatgcagtacctcaggcaacagtttcaagaattcattgccggtttgatatcacttccggttaagcttccggggactcaactctatagatccctcaagagcaggctaagaagaggatgacaaagttgataaaaacgatcatccaagagaagaggaagaagatgatgtcggaaggcgacgatctgcgtggtgggactcatccacgtgatatgatcgacgtcctgctaggcaacggcaacgacgagctcaccgacgagctgatatctgacaacatgatcgacttcatgatccctgcagaggactccgtgcccgtgctcatcacgctggccgtcaagtacctcagcgaatgcccacaggctctgcagcaactcgaggaggagaacatggagctcaagaggcagaaatcaggcgcgggagaaaccctagaatggacagactacatgtcgctcgccttcacacagcacgtgatcacggagacgctgcggatgggcaacatcatcaacgggatcatgcggaaggcggtgcgagacgtggaggtgagaggccacctggtcccgaagggctggcgcgtcctcgtctacttccgcgccgtccacctcgacgccgccgtccacgacgacccgcacgccttcaacccctggaggtggaaggagaggcccgacgtcgtggccatgagcggcggcggcggcggcggcttcaccccgttcggcggcggccagaggctgtgccctgggctcgacctggcaaggctcgaggcctccatctttctgcaccatctcgtcaccaatttcaggtgggtggcggaggaggacaccgtcgtcaacttccccacagtgcggctcaagcgagggatgccaatcgcagtgacgcccagaacctgctgaacgcaacgcaacttgccaggcaaaaccatactatacatttatactcaactaaagaggtgtgagaaataatacagtacatgcatgcatgtaatggagggcgaaattaaaagttggcacggcaaagaagctgctggtatgccaaaagttcagtttgcaaattatatagtttaattactattacactagggagaccctatgcatgtctgatgcctcgttgtgaatctgtcctgctccttcaagcagacaaatctacgctgccacaacaataagcatacaattttcgacggtcaaagccatcaaaattaagctcttaaccgtcggaaaataagttacttctcatagcttaagccttattgctcacagtcgatttgtaaatcatcagaaataacgctactttcgacggatgcggaaataacttattttcgaccgacgttagcggccatcaataat

SEQ ID NO: 201440 - DNA, 2649 bp, Zea Mays
cccaattctccacggccagagggagtccaactccgcctccagcactcacgcttcgtctgctgaccctacccatcgcggccgccgccggctcgccgctgctgccaggcgctatgcggccttgctcccgcatactcgcggcgcgtcacttcgtccgcagcttccggttcgatccctcccaaactacctcccccgctgccggatttcgtcggctgaccggagccaacaggccgttcgtgccgaaacctctctttggcattctcctcggaggcttcagatcgaactgtggcgtactgcctgggaaaggggtccccttgggcagcctcggcagcttcctgccggactctgcctaccagctgcacggcgcgcggcttcaacgagatacgagaggtaatgcattctccacatccgccaatgctgtgacagttaagaagccagttggtgacaaggtccagaaagatgcatcaaaaaaggatattgatgaggagattgctgattctcagatattgaaaaaccttgggaagtacttattgttgaatgacagccctgacttccgctttagggttgccttgtcgttggtcctgttagttggtgcaaagcagctgttctgataggatatggaatcgcacgatcaggagtatcagcctgtacagaactgcgaaacgctgtattttctaaagtgactttgagagcaatccgttcagtatccagaaaggtattttctcacttgcatgagcttgatcttcgatatcatctaagccggcaaactggtgctataaatcgcgtaattgatcgaggaagccgtgcaataaattacatcctcacagtcatggtgtttaatgtcgtgcccacgatactagagattggtatggtgtcaagcatacttgcctacaaatttggttcaacttttgcttggatcacttcagtttcagttgctacttatattgctttcactttggctgtcacacagtggcggactaagttcaggatggccatgaataaagctgataatgcttctagtacggtggcagttgactctcttctcaattatgagactgtgaaatacttcaacaatgaacaatttgaagttgagaagtacgacaaatatttaaggaattatgaggatgctgcattgaagacccaaagtagtcttgcctacctgaactttggccaaaatgttatctttagctcagctttatctacagcaatggttttgagctcatatggaataatgagtggtgctctgactgtgggtgatttggtcatggttaatgggcttttattccagctttcattacctctgaacttccttgggagtgtgtatcgagaatctagacaaagcctcattgacatgaagtcaatgtttcagttgcttgaggaaaaacctgcaataaaggatgagcctcatgcacaacctttgcagttcaagggagggtgcattgaattcgagaatgttcattttgggtatgtaccagaaaggaagattcttgatggtgccactttcaccgtacctgcaggaaagagtgtggccattgttggaactagcggaagcgggaaatcaactattcttagacttcttttcagattctttgattcgacttcaggatctatacgaattgacgggcaagatatccgaggagtgacactggggagccttcgaaaatgtctaggtgtggtacctcaggacacagtactttttaatgacacgattaagcataatatacagtatgggcggttatcagcaaaagatgaggaggtctttgatgctgcccgacgtgctgctattcatgatacaattatgaacttcccagacaagtatgacaccgtagtaggagaacgaggattgaagttaagcggcggggagaaacaacgagtgtcaatagcccgtgtattcttgaaggagccttccattctgttatgtgatgaagcaactagtgctcttgacagcactactgaagcatcaattttgaattctctgaaatccttatcttccgatcgaacatcaatctttattgctcatcgactcacaactgcaatgcagtgtgatcagataattgttttggaggatgggaaggtagtagaacaaggaccacatgattttcttctgtcacagggtgggcgatacgcagaattgtggtatcagcagaacagcactgacgccatggattctgctgcagctagcgtagaggtttgattgaccatgtttaccttttccttctgcaaggggaaaagaagggaaaacacaatcataaccgtgagagagagggatggagccaacttgtctgccttgtaattagaggtaggttttttggttcgggggggaggggggggggggggggggcataaacgtacagttccattttcaagatagccgggaggattttccccccttttgagattgtatagacgatccctgcatgttatgataaccgtaacgtttctgtagcataagggataaagcccagtaagggcctgtttgtttcgcatggaataaagggtagaataaatctggcttggattcctttaataattactataatttttggagatttagaattaattctggtctgttccagtagaaacgaacgggccctaaatattcagttgcctcaggcgtactaccgtttcaatataaatgctcccatgattgct

SEQ ID NO: 201441 - DNA, 1031 bp, Zea Mays
ttttacctcatttttttttctattctctgccccaaacgcacaagccctagccgccgaccaccatggcggcggcgccacctccggacccgacggttctaattgaagacctcgtcgaggagttcctcctccgcattcccccggatgaccccgccagcctcgctcgcgccgccctcgtcagtaggcactggcaccgcgtgatcaccggccccgtcttccgccgtagattccaggacggcaggctaggagttgccaaaacaagcaattcaacgcttggttgttcaacacttcacctgtggataagggaccatgaaagatgggaagaaagaaggcccattgagcttcgtatgctgctcccagatgatgccctacgcgatcctcaattcccgcctgaattttttccagacaagccttggctggctggctttgcagggacaggagctggtgtcattttctttaagacacgtcttgggtattttgctgttgatctgaattcagggaggagcaagaacataggcgggtgcttaggttggggttgcattattccctatgtgagcttctgcattccagcgccaggagcaatatccacagatgagggaccagaagctggtctcgagggctaggagctctggcttgtgaagtgaataagaagctctaaatcaagaaggatatttactagaccagaagcatggtttgggtgggatatctctacatgattttgttgctgttctgaccttgtttgtgctcccgaacttgagtttgcaatcaaattatgataatggtattgactctcatatgaaagcatggcatatggaatttaatactgtgtatgactgtggacaattttcctcttctactttttatcataggaccaagggataaaatcagcttactccaatccagttttatgaattgttcatttgatagctttgttgaatatgaaggactacttttttatgcactgtgtctttgagcaagatcggtgaacaacactgagcatgggcttttgaggcttttgactgatgacagcacag

SEQ ID NO: 201442 - DNA, 1174 bp, Zea Mays
caagagactcctctcttatcccgtcgtcctcttctctcgcctccaataattcgtaacccttctccttccaggccgggctcctgctggccggagttcccatctccctctttccttctcggttactatccgtgaagtctgcttgcgccgtgtgtgcgtgtgagaccggacgcagcttaacgatggggcgtggcaagatagtgatccgccggatcgacaactccacgagccggcaggtgacgttctccaagcggcggaacgggatcttcaagaaggcaagggagctcgccatcctctgcgacgcagaggtcgggttggtcatcttctccagcaccggtcgtctctatgaatacgccagcacaagcataaagtcagtgattgatcgatatggtcgagcaaaggaggaggagcatgtagcagaccccaacacagagcttaagttctggcaaagggaggcagcaagcttgagacaacaactgcacaacttgcaagaaaatcatcggcagttgatgggacaagatctttctggactaggtgtcaagggacttcaaaatctagaaaatcagctagagatgagcatttgttgcatccggacaaaaaaggaccaactcttggttgacgaaattcacgaactgaatcgaaagggaagtctcatccaacaagacaacatgggattacacagaaaggtcaacctaattcgtcaagaaaatgctgaattatataagaagctctatgagaaagaagcagaaggtgaagtcaaccgagattcaacaactccgtacaactttgtagttgcagagggtgccaacgttcctatccatcttgagcttaatattccactgcaagaaaatggtgttgagcaacctgtggctcctaaattagggttgcaattaaatcaatgaagacatgcaggacattgcctttgttctcattgtccttgtagtctgcaactcaaagcagcctaaaatgattggttgtaacaggcctaaaaacatagcaagacaaataaagtatgcatgccagagacagtggcaatggtagtgcaaatctatctcaaataacttgtgttatattgaataatccagcaaatggtttgttttttacacgttatgcaagtttgtttgaccaaaatggtatgtaacatgtacaaatttccaagtgaacttattgaaaaaat

SEQ ID NO: 201443 - DNA, 1555 bp, Zea Mays
cacctgtctacagggaaggccgccatttaaacggccctacgtatacatggacacttggaccacctgccttctctccttccttccatccattcctccctgtctccgccctcttctgactcccgtaggccgtggtgccgccgccgactgctgggactgccctacaccaagtgcccaggtcatcttcgggccattcgccggcgacgagcaccaccaggtgtgccaggttgaccgagctatggacagcctgtggcatcttggggacgagctccgcgggcagcccaaggtggtggaggaccgccagtggtctctcatgacgtccaagctggcggagatcaccaggtccaagggcgagaggatgaacaccgtccctgacgccaagcagtgggacaagacgtcctaccagcttcacgacgacagcaggatcggccacatcggcctcatgaacctggatctcaagatgaacgaggctgccgccatgaagctccccttccgtggcatgccgtataacatgaaccagatgtacctcaaggggagcaatgccaattccaatgtcaatgcgttcaagatgaatgttggagtcaacaagtactccaatagtccaaacgggaaagacgccaatgggaaaaacaatggcggcagtggcggcaacaacaacaatgggagcgccaacggcacttctgtggctgacaagcgcttcaagacattgccgacgagtgagatgctaccgaggaatgaagtccttggtggatacatctttgtctgcaacaacgataccatgcaggaggatctcaagaggcagctttttggtttgccagcaagatatcgtgattcagtccgagcaatcactcctggcttgcctcttttcctctataactacacaacccaccagcttcatggggtatttgaggctgccagttttggtgggtccaatatcgatcctactgcatgggaggataagaagtgtaaaggtgaatctagattcccagcgcaggtgaggatctgcattaggaagctgtgcaagccgttggaagaggattccttcaggccagttttgcaccattatgatgggccaaagttccgccttgagctctccatcgcggagacattgtcactgctagacctatgcgggaaggaaggcatctgagctgtcgaggaggtggtggtggttgccttgtgagcttctagtaaataccaatcatctttgtatgttttgtggatggtggttggcaacgttgtttatttatgcgcaagctgctgctggtttcgggatggaaggaaagacctggtccctgaaacaagctgcggagagtgagcctgtcagtgtattgtgtctggcgtggtcaagaaccaaatcaatgttggaccgaccgactgagagtttggagtgtgtatgttttgctattactcttatctctagtagagtgtgggtatacctgggcagaatgtgtccccaaaagttgggggcctgtctgtgtactgtgtgcgatggacgccctaagtaaaaaaagggcaggtgatggtcgtgctccagatttacattgcgagagctcatggc

SEQ ID NO: 201444 - DNA, 2665 bp, Zea Mays
ccccaaccactccgaccaaaccaaaacccagacccactctcccccgaaacccagggcctcgtgtcgtttgatgcgattccggcggcgatcgcgagcgcctccaccaccacccgctcccccgtcctagcgcgcgtttgggcgatctcccctctcgcggcgggcatggctggcggcggcggcggggcacgcggctccgacagggcgggggcggcgcgctctcccacaaccaccacggcgatacagtcgaccatccaatcgatcaaggaggtcgtcgtcggccactccgacgccgacatcttggacaccctccgcgaatccaacatggaccccaacgagacggcgcagaagctgctcaaccaagatccatttcatgaagtaaaaagaaaaagggacaagaagaaggagagtgctggccagaagagctttgctgatagcactgcacaagttgagcaaaactcacaatggatgaagccacatacacaaaagatggaaaatgatcaaagaactcccaagcagggtcagatgtcaggccctactcgtgaatttcgggttgtgagggacaacagatttcaacatggtgtggtggagaacagaccagaattaggacacaaaggttcagcaaatgtacaaatgtctgataggagtactcttgttcagtctggtcgaaaccgctcacctgctacaacctcaggtgaccagatcacacatcaaaatgctatgcagaactccaactctgacacaacccaagggaagagggatgctcaaggtactacagagaagcatgtgaagccatatttgaagaaccctcagaatgagcagcactttccaggttctgacccagctcatgggtcagccaatgttagaattgccggtggaactgttggacctgctcaacgtcatgttggagttgttaattctactaggcaatttgctgcccgttcgggttctcagatgcatgcaccaagtggttcttatgcaaatattcagagggggagttttacctcagtaggggcatctgggcgttactcagctttcatgtctagaaacattcaacaaaaccagagacctgatacaatgtttcgtggaaggcccactgttagatcttttgttgcacaaaacaccaacagatatcaccagggttctactagcaaccaaaaagcagtacaccctattaaggagtggaagccaaaatcgacaaagaagtcaccgaccattgatgcagataacagtatagctgatgctacatctccttcagctagcaactgtgaaagtgccaacacactgaatgtaaacgaattgcctgaaaaaatttcacaaactaacttgcatgaggtggagcatgttattattccggaacatcttcgtgtgccagaatatgagcagaccaagttaaggtttggcagtttcacatctggtttggattcggaacaagtatctgcctcgaccccacaagacactgagcaaccagaacatgtacaagagtcagttcaacaggcaagtgaatatgatagtttggatgctggacctgatgacatggatgagcaagctagatcttcacaacacctgtccacatcaacggctgagatttccttgcccccatctgaggatagtgatcgaatgagtggtcaagtagagaatgatgatggcctgggcttagttcagagcgacactccaattggagcagcagacggtgacaatacccaaatcacctcgactttgactgctttttcggcttatagtcatgaagatcctaatatgcatacaaacaatgaggcccagttatacggactggtggagcctaatgtacatccgcaagtattagcttcctcttctcaggctttaaatccacagattgtgagcaacagccctgtttcgatctcgtcacagcagcagcagcatatctcccagcaacaagccgcagcacagatgtaccctcaaatgcatgtgcagcattttccaaatttcatgccatatcgacaactctattctccagtttaccccatgcctatgccaaactattcgccaaatgtcccttatccatcaaatggaaataattatcttcagatgcccagtggaggttcacatttaactgcaggaagcgtgaagtatggagtttcacagtttaaaccactcccatctggtaacccttctggctatggaaattacactcatccagctggttttacaatgggttctcctggtgttattggagccacagttggtgttgatgatgtcaataggatgaagtacaaggacaacatttatgcctcaactccacaggtcgagacatctgacatctggattcagcaagctagagagatgccacctatgcaggttccttcatattacaacataccaggtcaagcaacaccaggtgcttttgtgccaaatccagcaaatgcatctttcaatgctacagctcaatcctctcatgtgcagttcccaggcttgtaccatcctcagcaacctccctctattggttttagtgtgttatgcaatctaatgcaatgtgataacctggtcagggttctttgtaactgggtacatttggatgattctttggaacaagagtctacaacctaattgcatgtggaaatatatttgttcattgtcactgtagtcttcattgataagtacacatcagaaagtttctgtggtacctgag

SEQ ID NO: 201445 - DNA, 2838 bp, Zea Mays
ccgagcccggccgcccccaaccactccgaccaaaccaaaacccagacccactctcccccgaaacccagggcctcgtgtcgtttgatgcgattccggcggcgatcgcgagcgcctccaccaccacccgctcccccgtcctagcgcgcgtttgggcgatctcccctctcgcggcgggcatggctggcggcggcggcggggcacgcggctccgacagggcgggggcggcgcgctctcccacaaccaccacggcgatacagtcgaccatccaatcgatcaaggaggtcgtcgtcggccactccgacgccgacatcttggacaccctccgcgaatccaacatggaccccaacgagacggcgcagaagctgctcaaccaagatccatttcatgaagtaaaaagaaaaagggacaagaagaaggagagtgctggccagaagagctttgctgatagcactgcacaagttgagcaaaactcacaatggatgaagccacatacacaaaagatggaaaatgatcaaagaactcccaagcagggtcagatgtcaggccctactcgtgaatttcgggttgtgagggacaacagatttcaacatggtgtggtggagaacagaccagaattaggacacaaaggttcagcaaatgtacaaatgtctgataggaggtttgatgtttctttgttccgtgcctatggtacacgaacaaatcctatgaaattgcagggtacatttgttgagtctggtcgaaaccgctcacctgctacaacctcaggtgaccagatcacacatcaaaatgctatgcagaactccaactctgacacaacccaagggaagagggatgctcaaggtactacagagaagcatgtgaagccatatttgaagaaccctcagaatgagcagcactttccaggttctgacccagctcatgggtcagccaatgttagaattgccggtggaactgttggacctgctcaacgtcatgttggagttgttaattctactaggcaatttgctgcccgttcgggttctcagatgcatgcaccaagtggttcttatgcaaatattcagagggggagttttacctcagtaggggcatctgggcgttactcagctttcatgtctagaaacattcaacaaaaccagagacctgatacaatgtttcgtggaaggcccactgttagatcttttgttgcacaaaacaccaacagatatcaccagggttctactagcaaccaaaaagcagtacaccctattaaggagtggaagccaaaatcgacaaagaagtcaccgaccattgatgcagataacagtatagctgatgctacatctccttcagctagcaactgtgaaagtgccaacacactgaatgtaaacgaattgcctgaaaaaatttcacaaactaacttgcatgaggtggagcatgttattattccggaacatcttcgtgtgccagaatatgagcagaccaagttaaggtttggcagtttcacatctggtttggattcggaacaagtatctgcctcgaccccacaagacactgagcaaccagaacatgtacaagagtcagttcaacaggcaagtgaatatgatagtttggatgctggacctgatgacatggatgagcaagctagatcttcacaacacctgtccacatcaacggctgagatttccttgcccccatctgaggatagtgatcgaatgagtggtcaagtagagaatgatgatggcctgggcttagttcagagcgacactccaattggagcagcagacggtgacaatacccaaatcacctcgactttgactgctttttcggcttatagtcatgaagatcctaatatgcatacaaacaatgaggcccagttatacggactggtggagcctaatgtacatccgcaagtattagcttcctcttctcaggggtacccttcagaaaacccggaagcagataatgctgtgcaagtcttcaggatgccagaatctaatgttcactcacaagttctcccttccacatctgaggctttaaatccacagattgtgagcaacagccctgtttcgatctcgtcacagcagcagcagcatatctcccagcaacaagccgcagcacagatgtaccctcaaatgcatgtgcagcattttccaaatttcatgccatatcgacaactctattctccagtttaccccatgcctatgccaaactattcgccaaatgtcccttatccatcaaatggaaataattatcttcagatgcccagtggaggttcacatttaactgcaggaagcgtgaagtatggagtttcacagtttaaaccactcccatctggtaacccttctggctatggaaattacactcatccagctggttttacaatgggttctcctggtgttattggagccacagttggtgttgatgatgtcaataggatgaagtacaaggacaacatttatgcctcaactccacaggtcgagacatctgacatctggattcagcaagctagagagatgccacctatgcaggttccttcatattacaacataccaggtcaagcaacaccaggtgcttttgtgccaaatccagcaaatgcatctttcaatgctacagctcaatcctctcatgtgcagttcccaggcttgtaccatcctcagcaacctccctctattggttttagtgtgttatgcaatctaatgcaatgtgataacctggtcagggttctttgtaactgggtacatttggatgattctttggaacaagagtctacaacctaattgcatgtggaaatatatttgttcattgtcactgtagtcttcattgataagtacacatcagaaagtttctgtggtacctgag

SEQ ID NO: 201446 - DNA, 2850 bp, Zea Mays
gcagcaacaccgcccccggcctcgctttgcagccccctccctccaccgcctcctccacgccctagcgctccggcccccgccccgagctcgtcgtggccggctgcgctgcggtgcccgcacctgtgggggcgtgcgggccggtggtgaaacgacccgcgacctcggtgcctctcgacgtctgcccgcttcctcgccggcgccattttgttcgtctaaatcccctgtgataagcaccactgctcgtgatgcattcttcggaaaataaactgggttggaatgagacctctatggggttggttcctgtaccaaaaagaccagctagacctgatgcttcccaccaatgcaaatctgattcctttatgaagcgatcaccaaggaaagttagaaatgctactctggcaaaaagcataaagagcaaataccactatagtcccctcaaacagcggaagggttcagattctgttcctgggaaaatcgtaacaggactaaccgcaaggaaaaagaagaaaaggaaaatccaaattacagacgaggcaactcgtttggaacgaagagcgagatattttctaatcaagataaaactggagcagaatttgctagatgcttactctggagatggatggaatgggcaaagccgagagaaaataaagccagagaaggaactgcaacgtgccaggaaacaaatcataaaatgcaaaattgctatacgtgatatcatccgccaacttgatttgtatacttctactgggagtgttgatgacccactaatgcctacagatcagtccaccaatcccgaacatgtataccatgtgctcaacatgcaagtctcatgaatcatttcccagcaataaaattatcttctgcaaagggccctgcaaaagggcatgtcatgagaaatgtttggaacctcccttaaacaaaagcgtacttccaacaagtagccatgggtggctttgcaaattctgtttgtgcaaggtgaggattttagaaactattaatgcacatctagggacgagttttacagtgaagtgccactttgaagatatattcaaggaaactactgaactaatagactctgaggatgcactagatgaagattggctttctgagtattcaggtgatgaggactatgatcctgatgaaaatgaggccagtggcgactgtatggacagcggggagaagattatgtctgatgattccaatggttcaggaagccccctttattctccaaatgacgatattcctgacttcatatcagcagacttaaatgttgtggaagggttttgtcataccaatttagatttaggcattgatgccgttgaagatgattttgcacagatcctcacctaccaaaggccaagaagagatgttgattatagaaggcttaacgaggaaatgtttgggaaaataaccgggaatgaagaacagagcgaggacgaagattggggccatgaaaggagaaagaaaaggacacattcaggtgttgctggggataattctgttggtttcttgaacgttatatctgatgaaaagagccagaagaaggggagaaaacttttcaggattcctcctgcagctgttgaggtacttcgcagagcttttgctgaaaatgagcttccaccccgggatgttaaagaaaatctctcaagagaattgggaatttcttttgaaaagattgataaatggttcaaaaatacacggtgtgctgctctcagagatcggaaggctgaaggaaacagtcataatacagctcccagcaaaagctcaaaaaataaaggaaaagctggaatctcaggcaagactggaaggaatggtcatgttactggtccctgcaataatttgagaacaaatgaagaaaaaacaggtatatcggggaagtttgattcaggagacaactcttgtttggttcccttctctgaagtcatcaatgtgcctacgcgattgccacacaactttgagatgaggaagatggaatcaactagaagtcctgcgaggctacacaataaaggagggttcctgtctgcaacagtccaaattaaggagagtacgttgttacccacaggcaagccttgttggcagtcagaaatgagccatccaacaactaatgaagtgagcacttcagcgcaagctactacttggatcgacgcgggggcgtgtgccgaggagcaagaacctactccttgggtggacatcggggtctcagactaccagcctttcctggatgtgatcgacgacatgtgcggacttgagtggaggctgcagagactgaaggagaacatgctctcatctagcatagacggccaaaccgccgccagtgagagtgacaaaagaaaccagaccgtggtgctagtgccaaccgccgagctcaaggaaaagctgccgcatgacggtttattcgggcattattgcccataggtcttatatacatagcggataaactgtacagagaaccaagaagaagaagaaaacaaaagggaaacagcaaacagacaggtgcccgcttacataccggtccatactgtcaggcactactctcctttcttgggcctcgacacgactaatactgtgctagtccagaacagatgagccatagccattacctgtgtgcctcccaggttcagttcatatgttgtatgtattaatgtatatcagaagagtcgtgcttagtagtagcaagaacctagtcctgatccagaccgtgaatctggatcatcttgtcctgtggttgtaccgtgcagaacagacagatgtcggctagtcgtttggttctgaagtaagaaactataagcatgcgtgattttggcccgttgcgtgacaaaaaaaaaagaggtggtgaggcgcaggtttgta

SEQ ID NO: 201447 - DNA, 1741 bp, Zea Mays
cccacatcatccttctccagttctcctccgcctctccgggtttgactctgctgcgagcccgaacccgaagcagcagagctgcaaaatctagtctagagcgaaagaaatggcgagcgtggcctccgcgaggtgttacggccttctcctcccgccaagcttcgccggagcacggtgctgctcccgtccgtcctcttcgctccgtctgcggccgcggtggggcctgcgccggccgaggacccccctcgcctgcgtcgcgccgcccgactccgcggagccacagacggatgagcaggctgtgaaagctgaatctatccaagaagatgctccgactagtacacccgaggatgctgggcttccagctctcccgaataaggatctcaacagaagggtagcactactgtccactcttggagcggtggctctgtttgcatcccagaggctcaatcttagcgaggcatctcttaaagatcttgcagccaattcggttccatatgaagaggctctttcaaatggcaggcccactgtggttgagttttatgcagactggtgcgaggtctgcagagaattagctccggatatctacaaagtggaacagcaatacaaggaccgtgtcaattttgtgatgctgaatgttgacaacacgaagtgggagcaagagcttgacgagttcggggtggaaggcattcctcacttcgcctttctggataaggaaggaaacgaggaaggcaatgttgtcgggagacttccaaagcagtatttccttgacaacgtggttgcgcttgcttctggtgatcccgagataccgcacgcacgagtggtcggtcagttctcgagcgctgaatctaggaaagttcatcaagtcgctgatcccagaagtcatggctagcagtagttgttttctatgtggacagctgtaatcatagttctaatgccaagaccgtttgacaagaggagatcctaggctatatactatagttcattcagccctccctgtatcgaacatgcgggcgctgcaaagagctggtagattccacaaaacccggaagaaaaggctggcgcggattccttcagtgatactgaaacggttgcatgttattattatacgagatactgttacgttttttaaaagcagtatagagggtcgaaaaggagagagccagcctcggcccaccatattcgcatcgccgtctcctttgtgtgatcaggctgtctgccactctgttgcccggcaaccttttatgcgtctcttgttttttttttaaagggagagagagttactcttgatttcacaatcaatgatcgcggtgataagataatcgtgagttcaactccgaactccataaatccacgagataaaatatattacaggcttgtgttttgcagcatatacgtgcagtgacataccttttggcttcccgttttatgacgaagaaacgggctactcctatattgtactattaaattatacagcattaatttacaggcaaaagtcgtgcgacggagactcgggagggcaggcaaaaggagggcgtgatcccggtggaacgctgaccgcgcggtcaagtcagccattggagccgcggtgcgaaagagcgcgtggtcagatgagtcaaaccggagcaggagggcgtgatctcgccgcggacgtagccgaggcgctgcttctccagccaaatcgatttttttttaacaaaaaaaaattattttgaaagaaaaatctttaaatttatatctattgagt

SEQ ID NO: 201448 - DNA, 940 bp, Zea Mays
gtcgggtgtgtccccactctccatttctcagcgtgcgcgctctcttctctctcttttgtggtaactggcggcggccgacgccgacgccctagctcacgtcttcgtcggtcccttcccagccttcgtcgcgtccttcgccgtcgacgagaacacacgaggaaacacttgcaggactgaagaatagagaaacatgtcgtctggtggtgtgaaagatttttaccggcagaaaaagaaaggaggcgtggcgaagacagcttcatcctcaaagaataagacacggcattacactggtggggcttctgttggtgcctcagatgcagctcagacatcagctctagtttctcatggctcctgggatctcaaagatgactttggtgatgaagaagagcagctgcgacagtttgacgtggacatgaagtttggtccttgcatcggtgttactcggcttcagcgctgggagcgagcctctgccatgggcctccagccaccagctcatctccgggacctcctactgcacgcggcatcgacaaagaatcgcggtggcggtagcccctctgtcgagtgcctttgggagggtaaagtctagaagaaatatcttctaatcccccatcccaggtcaacttcaggtggttaactggagacgcttgttgtaccatgcagcctcttgttgatgtatgttggcactcgtttgtttctccaaggcacgtgttcggtaacagtatatagatggctacctgtgcgtatgttggcgcacttcatgctgaattctcttctcgtattgagatcctgttgcgttgtctgtatctgagtgcgtcaagcacgcacatgaacacatctcctatgtgctgccagttgcattgtgatcgaccgttttgggtgctgcgatttgacgcttatttagcagtcaaatcacgtgggtagcggtccatctacctcacga

SEQ ID NO: 201449 - DNA, 856 bp, Zea Mays
gtccatgtcctttaccgtgaccgtcgctgctgccgttccaattgatccatcaatcggtcgattaggaattcaaggaaacacttgcaggactgaagaatagagaaacatgtcgtctggtggtgtgaaagatttttaccggcagaaaaagaaaggaggcgtggcgaagacagcttcatcctcaaagaataagacacggcattacactggtggggcttctgttggtgcctcagatgcagctcagacatcagctctagtttctcatggctcctgggatctcaaagatgactttggtgatgaagaagagcagctgcgacagtttgacgtggacatgaagtttggtccttgcatcggtgttactcggcttcagcgctgggagcgagcctctgccatgggcctccagccaccagctcatctccgggacctcctactgcacgcggcatcgacaaagaatcgcggtggcggtagcccctctgtcgagtgcctttgggagggtaaagtctagaagaaatatcttctaatcccccatcccaggtcaacttcaggtggttaactggagacgcttgttgtaccatgcagcctcttgttgatgtatgttggcactcgtttgtttctccaaggcacgtgttcggtaacagtatatagatggctacctgtgcgtatgttggcgcacttcatgctgaattctcttctcgtattgagatcctgttgcgttgtctgtatctgagtgcgtcaagcacgcacatgaacacatctcctatgtgctgccagttgcattgtgatcgaccgttttgggtgctgcgatttgacgcttatttagcagtcaaatcacgtgggtagcggtccatctacctcacga

SEQ ID NO: 201450 - DNA, 1343 bp, Zea Mays
ctggatcgaaggggatcaaaccaaacaagcccggtacggttgcagtttaatttgaaaagacatcgggattcaaccgaacatccaatccgtgctctggaagcgcaatggattggcgaccgaggagcatttctaatgtttccttcaggacatgagcatgatgattgtcattattcaagatcgttctttcttgaaaacattgcctatgcatatccaagtgaccataatatatatgatgataatattagattactgctacattagatccgactgtatgcattttagctctactacaatgatgctaacagtttagtgaacagtgactggaccaatgtttcactacctaagggctgactatatgcaaattggttatattgcaatgatgctagcagcttcgtaaacatcgaccgggggtccggggccagtgtttcactacctacagcagtacagctgcccattttcagttctttatttacacaatagtacaataccatgtttcatgctcaggattagagctcttgatgttagggtttctggtggctctttggatgcactcttgtagtgtaggagtatatatacctttcaaccaaaggggaaaaaaaatccagagtaggtctgattccaaattttctgctggaaggaattcaaggaaacacttgcaggactgaagaatagagaaacatgtcgtctggtggtgtgaaagatttttaccggcagaaaaagaaaggaggcgtggcgaagacagcttcatcctcaaagaataagacacggcattacactggtggggcttctgttggtgcctcagatgcagctcagacatcagctctagtttctcatggctcctgggatctcaaagatgactttggtgatgaagaagagcagctgcgacagtttgacgtggacatgaagtttggtccttgcatcggtgttactcggcttcagcgctgggagcgagcctctgccatgggcctccagccaccagctcatctccgggacctcctactgcacgcggcatcgacaaagaatcgcggtggcggtagcccctctgtcgagtgcctttgggaggcctcttgttgatgtatgttggcactcgtttgtttctccaaggcacgtgttcggtaacagtatatagatggctacctgtgcgtatgttggcgcacttcatgctgaattctcttctcgtattgagatcctgttgcgttgtctgtatctgagtgcgtcaagcacgcacatgaacacatctcctatgtgctgccagttgcattgtgatcgaccgttttgggtgctgcgatttgacgcttatttagcagtcaaatcacgtgggtagcggtccatctacctcacga

SEQ ID NO: 201451 - DNA, 1405 bp, Zea Mays
cagcgcacctcatctcgctccaagcacaccaccactccacagtgcacttcactctctacagcaacagaaaagtgagcagcagacagcagcagctgctgccatggaggcgtggagatctctcctcgcgagcttcgtgctcgccgtgctggccgcgcaggccttggtggccgtggtcgagtccaggaccggtcccgtggagcaggcgagcgaaggtgacgacgtgaagaagccggactgcgtgccggggatggacccgcgctcgttcccggggaccggcggcggccacggcatcacgcccgtgacgccatcgcacggaggctccagctccccgacgccgtcccacggcggcggcggcgggtacgttccaacgccgtcgcatggcgggacgctgcctttcccgtcccacggcggctccggctccggctcctctccgacgtcgccctccaccggcggcggcgcgtacggtgggtctccgtccacccccggcggtggcgcgtacggtgggtctcctccgtccacccccagcggcggcggcgcgtatggtgggtctccgtctactcccagcggtggcggcgcctacggaggcgggtccccctcgcctgctcatggtgctggtggcgcctatgggagctctccgacgcccgcgtacggcgattcccccttgcacggcggcatcgggacctcgtcaccgacgacatttgtccccatggacccccacagcttcggcacctgcgattccatcatcgtcgatcgaccgagcagctactggaggtcgcacccgatggagatctggtcggcggtcggcggccggttcccgagcacgtcatcgtcgatgggccacttcttcggcgcggcggcgggcagcgtgggcggggctgacgtgatgagcatccaggacgcggtgggcaacacgcgggcggacggcacgggcgcgctgctgcgcgagggcgccgccgcgctgctcaactccatgacccgcgccgggttcccctacaccacggagcaggtccgcgacgctttcgcggcggcggcggcggccgggtccgacggcgcggccgcggcgcaggcggcggccttccggaaggccaacgagggcaaggcgtagctgcctgtgctgtgcatatgcatgtgtggttaattagctggagtgctccggtcgcttaatctgttggatttgatggtttgttggttgtgtgcgcgtgtgtttcagtgatttgctcctttttttttctttctcgtggatctatcgatggatgaacatgaatgaatgaaccgaactgcacagctccgttgtgagctgatgcatgcatgcactagctagtagctactcggtgtctaacctgtggaaagaacactacggagtgaagtgtagtactgctagcttgcaaagagattactgcacggc

SEQ ID NO: 201452 - DNA, 1490 bp, Zea Mays
aaaaaagttcggacggagccgctccatcccaagttcccaactagctccactaccgtagcgtttggttttgaagaccgttgggatggaatggctccacggttccctccgagagatttggggagccggatggttaacatttgaacatgattttttttaagtcattctgtcgtgctcacacaaaatactccgcgaatacaagcttgacgtaggtaccctatagattatgggggcatgcatggaccctaacccaagtttggaagagcatcatttccttgctttgcttggcaaaccggcccaattcctcagcctagcttgcgctcttgcacggcagagcatgcatcatctccttctattcttccctttccctcgcatgcaatgcaatccaatcctttgcttgcgagccggtcatgcacggatcgcctgcaaagaccgactcctcggcgacgtataagacgccggcggcggcggcacgtccttttcgcacctcctgctgtctccatccggctccatggactccaccctgctgctgccgcgtcttcctcctcctcccctcccgtcgtcgcttcgtcgccgtcaccggcagccgcactgtcttcctccgcaccgccgacccaaaaccgtcccgagacatggcaggatgccgccggcggcgcgagaaggacgcgccgacgccggcacgaagttccgcgcccgagggctgttcggcggcggcggaggaggagacaggctccgggccgtgatgaggatggtgaagctcaactcggccatccagaaccggagcgtcagggagctgctggagctgctcggcgacgagtgcctctacttcctcgggaacctccggtccgtcgacgttccgcggctgggcaaggacatgttcctgctcctccacgcgctgatggtccggcaccacgtgtcgttcgtgctcaagccgtcgccggacgacgaggcaggcttcgacctgggcgtcaagtggtctctagagtggaaggggaagaagctgccctgggacctcgactgcaacgtctccaccacccacgtctaccgcggcctcctgctcatcagccaagtgaacaagacctgcgtgccgctgctccagaggattcttgggatcatgcagcagaacctggacgcggtagtcctggccgtcgtgcacaaggtgctgccagaaggcaccctcgacgagaagcagaggagcacgatggttttctgcgccgtcatcggcctcctcgtcatgctgctgttctacgcattgctcaagaacttgtagcttcgtcgtcgccgtcgccaccagcagcaccaccaggagggcaaggagcaagtatctagccttgtacagtaggcaggatcttgtaaacggcctgcatcatgcaggaacagaaaaaagcagtagctagctgttcctttcgtaaacagctgctgccgcatacgatgcacacacaatgatgatacatgcaggggttcaggaaaaggatgagtaaggataacgatct

SEQ ID NO: 201453 - DNA, 1556 bp, Zea Mays
ggacactactccatctcgtgatattttctctcttccatatctccccggaagtcgctggacatctcctaaataatcctcagccggtacttctgctagtccgtgccatgcttatactggtgatcaagatgcctatgtctccaccaccgtcgctcagctgcttgcctctgtgttggctcgccggacctactgtttgcgctgtgcttaaggtcctactcaccggtcttctcgtcgacagcgccagtcgtgtctcccaccacgccgacactttttctccatcgctcgactccgtgctcagcgctctcaccatcaccgcgtctctcctcgccggtgttcgccggacatacgctcaacctcgccaccgtgggacttacctctcctccaaaccgtgttcgccgcagcctagccatcgtctacctctatgctcagcacgaaaccgctcgccctacagcctcgtcgcgtcaccgtcctgcaggcactgagctccacccacctcggcgaaggccaccgtccccttcttcactgtgcactcggcatcaacttcctggtgcacaccgacacaacgctctggtcgcgcgccctccatcgcacgctcagacacttgcccctgttcgtcacctcgggacttcgccgtcacccgtacttcgctggttgtcaacttcgctggctgtgttcgacctccagccacgtcaccatcgtgcccttcatccgttcgaagaacacctagaaaaagtgatgtttgaaggagttcacttcagtgcctgttgatccagtggtggagtttcatctaactacttaccagagtagaataattttgggatcttctgctgcaataaggacatgttcctgctcctccacgcgctgatggtccggcaccacgtgtcgttcgtgctcaagccgtcgccggacgacgaggcaggcttcgacctgggcgtcaagtggtctctagagtggaaggggaagaagctgccctgggacctcgactgcaacgtctccaccacccacgtctaccgcggcctcctgctcatcaggtaccttctgctagctgctttcgcatgcttgcacgtgcagcaaaagaacgaccggctaaataaccgccttgtctccccgtcgccgtcgcaccgcacgcagccaagtgaacaagacctgcgtgccgctgctccagaggattcttgggatcatgcagcagaacctggacgcggtagtcctggccgtcgtgcacaaggtgctgccagaaggcaccctcgacgagaagcagaggagcacgatggttttctgcgccgtcatcggcctcctcgtcatgctgctgttctacgcattgctcaagaacttgtagcttcgtcgtcgccgtcgccaccagcagcaccaccaggagggcaaggagcaagtatctagccttgtacagtaggcaggatcttgtaaacggcctgcatcatgcaggaacagaaaaaagcagtagctagctgttcctttcgtaaacagctgctgccgcatacgatgcacacacaatgatgatacatgcaggggttcaggaaaaggatgagtaaggataacgatct

SEQ ID NO: 201454 - DNA, 1292 bp, Zea Mays
ggaagtcgctggacatctcctaaataatcctcagccggtacttctgctagtccgtgccatgcttatactggtgatcaagatgcctatgtctccaccaccgtcgctcagctgcttgcctctgtgttggctcgccggacctactgtttgcgctgtgcttaaggtcctactcaccggtcttctcgtcgacagcgccagtcgtgtctcccaccacgccgacactttttctccatcgctcgactccgtgctcagcgctctcaccatcaccgcgtctctcctcgccggtgttcgccggacatacgctcaacctcgccaccgtgggacttacctctcctccaaaccgtgttcgccgcagcctagccatcgtctacctctatgctcagcacgaaaccgctcgccctacagcctcgtcgcgtcaccgtcctgcaggcactgagctccacccacctcggcgaaggccaccgtccccttcttcactgtgcactcggcatcaacttcctggtgcacaccgacacaacgctctggtcgcgcgccctccatcgcacgctcagacacttgcccctgttcgtcacctcgggacttcgccgtcacccgtacttcgctggttgtcaacttcgctggctgtgttcgacctccagccacgtcaccatcgtgcccttcatccgttcgaaggagaagttttattcccttatctttgggttagttacttcatgtggaggacttgaagcttagaatgtttttatatatctcttatggagaggcttcacccttccaattattgtagttaagttatgcacttcgagtactatcaggacttgtaataaatacatctctttctaccatgtaaaacttgagttctggaatgtaaagcgtactttgtaaaagtcttccgctctatctccaatgtctgtgtatcaaatgtgattactgtaatatacctgttatgtgggagatccttgggatgatgagttccagttggcgaactcgatagccttgttaagttgcccggtacacgtgcacagccatttaggccagtaaggcaaggattcgtgcatttgagcctgataacttgggagggctgtcacagtccggacaccgtagcgggttctttcatgagtaatttatggaattaaagttaacctatcatttgtattgcattgtgaaatttattattaactatgatcaattatttaattgggttggtatacatttatacgtacagtaattgctaataaaattttgaacaacttattaaaagcaatgtttagccttaaccattctccatagtaagcctt

SEQ ID NO: 201455 - DNA, 719 bp, Zea Mays
aaaagttaggcaaagtgtgccaagtgaggctgcaatccaaacatgcccacgtcttcgaagaaagcgacgggtgccggatccagacttcattccccaaaaccaaaataatcgccaccgctctccgcaccgaaccgaagcagcggcgatgtcggcggagaagccggctcccgtgcgcgtgctctactgcggcgtctgcggcctcccggccgagtactgcgagttcggccccgacttcgagcgctgcaagccctggctgcgcgcgcacgcgcccggcgtctaccccgacgaccttgtcgccgcctcctcctcacccggcggcggcgacaaggacgtcgacaaggtcggggatcgcctccagggcgtcgggatctccgacggctccaccagcgccgcaggggatgcttccgcgtctaagccccaagaggcgaaacgcctgcctggtggtaagctcaagaaaaaggagaagcaagaagtggtcattgagaagattgtccgtaacaagcgcaaatgtgttactgtggtgaaagggcttgaattgtttggtgtaaagcttagtgatgcttcgaagaagcttgggaagaagtttgcaaccggagcttctgttgttaagggccctacggagaaggagcaaatcgacgtacaaggggacatctcatatgatattgtggagttcattacagatacatggcctgatcagtcaccatgtgctggagttggtt

SEQ ID NO: 201456 - DNA, 4844 bp, Zea Mays
gtgctcccgtgcgtaagtggctgtcttaagtactagcgtagccgaaagagacggtatgcattttgtaaggaaaacttagtatcctggaatagaactcctctggttctcctattcttctcctcctccttccaggttgctaacagagtggtatcaaagacacctttccttggccgtccgccatggcttctccacccatcgattcagccctcacgctcgccctcgaacaccaaacccgctccctgttgtccgagttggacaaacggttgtccgccatggatgtcaagtgggaatcccgtgtcggagagcttgaatctcaggtctctgcatccagccgccgcctggattccgtcaccaccgacctccgtgcggatgtggagatccagttctcctcagccgccgatcacctccaccagatcgaagctgacgtcaaaactcgcgtcgccgccctccaatcgactatgcacgtcttcgagctgtggcgccctcgcgtggaggcatcggtcgagtccctccactcctccgtcgattcgatccgcgccgaggtctccaagatggggatccgctggtccaccgacgcccgtgtggatggatctggacaacccggtctcctcggtgcgcacgggtctggatccggaagggtccctgctcctgaagaacctccagatcgcccacgttttgggtcctgcttcgagaattactaccgggatagtgggcacgtgcaccccggtgccgacgctcactacccggtcacgggaagctggggactcgtctcggcgtccggatcctgttcatggcgattcatcttatgctggccgttcgtcgtggaagtcggctgttccacagtctgctcgctgggatccatcgcgcggtttggctccagaatcctccaaaactccaactcagccagcgccaacaattgattccaaagtggcttctcttcgttcatatcggcgtgccagtggattatgccagtattgtgctgaaaagtggaacaagggccataaatgttctccaactgttcaactacatgcagtccaagagatgtgggaactctttgatcatgaccagtcagatactgatcctgatttccaagattcatcagaccagttcgcagtaatgttgtcccaggcagccatttcaaccccagccaaggcccaagcattcagacttcaaggctgtttgcaaggcgtggaattgttgatgcttcttgactctggcagttcacattgttttctgaacaccaacagcgttgcggcaatcactggccttactcttgtgtcgactccgctaatggtcaccgtagccaatggtgaggtccttacatgcacttcagagctggtggaagcagactggactttacagggtgtcccgtttcgcacaacattcaagttactgtccttacctcactatgacgcaatccttggtatggattggctacagcagttcagcccaatgttgatagattggaagaacaaatggctgtctataccatttcaagatcagcttattgtcctgcgtgattgtcagtcattggttcctgctggttcgttgttggaaatccgttccgtgtcctcgacatcgacaccacaacatttattttcagccacgacttctgctgttcctgagccggttcgttccttgctgcaacagtttgatgccttgtttcaacctcctacaacgttgccaccgagccgtgcatgtgatcactccattccattagtggatggtgctcgcccagttaatatacgaccttatcggttgtcccctgcactgaaggacgaagtggaatcccaagtggctgaaatgcttcaaaatggcataattcaaaacagttccagtgccttttcctcgcctgtcctcatggtcaagaaaaaggacaattcatggaggttctgtgtcgattataggcacttgaatgccctcacagttaaatctaagtacccagttcccatcatcgatgaattattggatgaactagctggcgcctgttggttctctatattggatttgcgagctggattccatcaaatattgctcaagcctggggaagagtacaaaacagcatttcaaacccacacaggacactatgaattccgggtcatggcattcggtctcactggggcgcctggcacatttcaaaaagccatgaatcatactttggctcctcttcttcgtaaatgcactattgtgttctttgatgatattttagtctacagccgctcccttcaagaccacttcactcacctacaacaagtattcgagctgctgtcgtctgatcactggaagattaaaatgtctaagtgcagtttcgctcagccccaagtaacttacttaggccacattatcagctcagccggtgtcgctaccgacccagcaaagatccaagctattgtggcatggcctgttcccaagtgtgtgaaggaattgcggagcttcctaggactctctggatattacagaaaattcatacggcattacggcgtgatctgccaacccctgacagcactgttaaaaaagggcgctctgtacgtttggacagctgatcatgatactgcattctgcactctcaaacaagcgatgtcatcggctccggtgttggctctaccagattttaatgtcatatttcagattgaaactgatgccagcgccaatggtgtaggggctgttctttcacagcaaggtcaccctctggcattcctgagtaaggcccttggagttaaatctcgtggtctctcgacttatgaaaaagagtatctagctgtccaacaatggcgtgcttaccttcaacaccagaaattcgtgattataactgaccacaaaagtctatcacaattaaatgagcaacgtctccatactccttggcagcacaaagtgttcaccaaattattgggccttcaatatagagtgcagtatcgtccagggacagaaaaccgggcagctgacgccctctcgcgctatggtcctgctgaaatcaatgcggtttctgttgttatccctcaatggctgactgatatccaacagacttacgattcggacagcaagactaaagagttagtggctaaactagctatcgatccagcagctgttgcccacttctcactgaaggatggtctgatccgttacaagaaccgtctttggataggcgaggatccccacctccaggctaagattgtttcagcactgcattcctctccgatcggtggtcactctggtgtgccggttacctacagccgtgtcaaaagcatatttgcgtggaagaatatgaagtcgttcgtccgttcatttgtgcagcaatgtcagatttgcctgcaagccaaacctgacagggcagcttatcctggtaagctccaaccattacctgttccaccctctgcctggcacaccatctccatggatttcgtggaagggttacctcgttctggctcgtgggactgcatccttgttgttgttgacaagttctccaaatttggccattttgttccattatctcatccatatacagcacactctgttgcgcagctgttcctatctcacatatacaggctccatggttttccagcggccattgtatctgacagagaccccatcttcaccagcgccttttggcgtcagctgttccaactggctggtacggaattacgcctcagttcctcctatcacccccagtcagatggtcagacagagcgtctgaaccaatgcttggaaacgttcctgcgatgctttgtcagcgcgtgtcctaaaaagtggtcctcttggctgccagcagctgaatattggtataacacaagtctgcattcagctttgggttgttctccgtttgaagtgctttatggccgcaagccacgttccttgggtctttcttttgatgctgctgccccagttgccctgtcagcctggttacaagaaagatctgtgatgcaaaatctcatccaccagcaccttattcgcgcccaaactcggatgaaaaaacaggcagataaacaccgctctgaacgctccttctcagttggcgattgggtttacatgaagctccaaccctacgtccagtcttcagtgcttccacgtgcccaccaaaaactcagttacaagttctttggcccttatcgagtggccaacagggtcggttcagtggcctaccgattggaactcccaaattccagcaggattcatcccgtcgttcatgtctcccaactgaagctggcaaaaggtttctcgggctctgctacttcttccttaccggatgaactgccagagttcagcataccactccgtattttgcagactcgtggctttgctaaaggtaaacgctttgtgaaacaggttctggtgcagtggtccaaccttcctactgagttagccacatgggaagaccaagacaacctgaggcaatgttatccttttgctcctgcttgggggcaagcaggattccaagggggggaaaatgtcaacaatgagagtatggattcccctacagtcagccgaggcgtaccaaacggcgaaccggaagcagctccagttgtccgcacacgccgtgtctgtcgcgccaacgtccgtcagcaaggaccagagtgggtgcagtgagtcggcatattggtgttgggtctgagcctgcgtgctcccgtgcgtaagtggctgtcttaagtactagcgtagccgaaagagacggtatgcattttgtaaggaaaacttagtatcctggaatagaactcctctggttctcctattcttctcctcctccttccaggttgctaacaaatagcgtgtggaccgcaacgtataacggaatttcacatgaagatgtagctgaaatcttttcgaaggatgttgaaggtaagagccaatct

SEQ ID NO: 201457 - DNA, 5124 bp, Zea Mays
gtgctcccgtgcgtaagtggctgtcttaagtactagcgtagccgaaagagacggtatgcattttgtaaggaaaacttagtatcctggaatagaactcctctggttctcctattcttctcctcctccttccaggttgctaacagagtggtatcaaagacacctttccttggccgtccgccatggcttctccacccatcgattcagccctcacgctcgccctcgaacaccaaacccgctccctgttgtccgagttggacaaacggttgtccgccatggatgtcaagtgggaatcccgtgtcggagagcttgaatctcaggtctctgcatccagccgccgcctggattccgtcaccaccgacctccgtgcggatgtggagatccagttctcctcagccgccgatcacctccaccagatcgaagctgacgtcaaaactcgcgtcgccgccctccaatcgactatgcacgtcttcgagctgtggcgccctcgcgtggaggcatcggtcgagtccctccactcctccgtcgattcgatccgcgccgaggtctccaagatggggatccgctggtccaccgacgcccgtgtggatggatctggacaacccggtctcctcggtgcgcacgggtctggatccggaagggtccctgctcctgaagaacctccagatcgcccacgttttgggtcctgcttcgagaattactaccgggatagtgggcacgtgcaccccggtgccgacgctcactacccggtcacgggtatgtggagctcccctcactcgccctcattttcattcaacgctcattgtggccatagtcagggtgattggggtcagcgtggcccacttagccgtcactgtggggggttacctaaattaaatttccctacgtttgatggtacctaccctaagctctggcaaaagcgttgcgaagattactttgagatgtatgctactgagacttttgtctgggttaaggtctccaccatgcactttgtgggtgctgcggctcgatggttacagtccattgaaccgcgtcttccgtccatgtcatggcgccaattttgtcaagctatccatgataggttcggcagggagcaacacgaacttgttattcgcaaactcttccacattaagcagacctccacagtccaagactatgttgatcgtttttcagagttagttgatttgttagtcacatatgaacacacaacagacccgttatactataccatgaaattcattgatgggttgagggatgacatcaaatctgtgattcttgtacaacgtcctggcgatctcgatactgcctgctccttggctctattgcaggaagctggggactcgtctcggcgtccggatcctgttcatggcgattcatcttatgctggccgttcgtcgtggaagtcggctgttccacagtctgctcgctgggatccatcgcgcggtttggctccagaatcctccaaaactccaactcagccagcgccaacaattgattccaaagtggcttctcttcgttcatatcggcgtgccagtggattatgccagtattgtgctgaaaagtggaacaagggccataaatgttctccaactgttcaactacatgcagtccaagagatgtgggaactctttgatcatgaccagtcagatactgatcctgatttccaagattcatcagaccagttcgcagtaatgttgtcccaggcagccatttcaaccccagccaaggcccaagcattcagacttcaaggctgtttgcaaggcgtggaattgttgatgcttcttgactctggcagttcacattgttttctgaacaccaacagcgttgcggcaatcactggccttactcttgtgtcgactccgctaatggtcaccgtagccaatggtgaggtccttacatgcacttcagagctggtggaagcagactggactttacagggtgtcccgtttcgcacaacattcaagttactgtccttacctcactatgacgcaatccttggtatggattggctacagcagttcagcccaatgttgatagattggaagaacaaatggctgtctataccatttcaagatcagcttattgtcctgcgtgattgtcagtcattggttcctgctggttcgttgttggaaatccgttccgtgtcctcgacatcgacaccacaacatttattttcagccacgacttctgctgttcctgagccggttcgttccttgctgcaacagtttgatgccttgtttcaacctcctacaacgttgccaccgagccgtgcatgtgatcactccattccattagtggatggtgctcgcccagttaatatacgaccttatcggttgtcccctgcactgaaggacgaagtggaatcccaagtggctgaaatgcttcaaaatggcataattcaaaacagttccagtgccttttcctcgcctgtcctcatggtcaagaaaaaggacaattcatggaggttctgtgtcgattataggcacttgaatgccctcacagttaaatctaagtacccagttcccatcatcgatgaattattggatgaactagctggcgcctgttggttctctatattggatttgcgagctggattccatcaaatattgctcaagcctggggaagagtacaaaacagcatttcaaacccacacaggacactatgaattccgggtcatggcattcggtctcactggggcgcctggcacatttcaaaaagccatgaatcatactttggctcctcttcttcgtaaatgcactattgtgttctttgatgatattttagtctacagccgctcccttcaagaccacttcactcacctacaacaagtattcgagctgctgtcgtctgatcactggaagattaaaatgtctaagtgcagtttcgctcagccccaagtaacttacttaggccacattatcagctcagccggtgtcgctaccgacccagcaaagatccaagctattgtggcatggcctgttcccaagtgtgtgaaggaattgcggagcttcctaggactctctggatattacagaaaattcatacggcattacggcgtgatctgccaacccctgacagcactgttaaaaaagggcgctctgtacgtttggacagctgatcatgatactgcattctgcactctcaaacaagcgatgtcatcggctccggtgttggctctaccagattttaatgtcatatttcagattgaaactgatgccagcgccaatggtgtaggggctgttctttcacagcaaggtcaccctctggcattcctgagtaaggcccttggagttaaatctcgtggtctctcgacttatgaaaaagagtatctagctgtccaacaatggcgtgcttaccttcaacaccagaaattcgtgattataactgaccacaaaagtctatcacaattaaatgagcaacgtctccatactccttggcagcacaaagtgttcaccaaattattgggccttcaatatagagtgcagtatcgtccagggacagaaaaccgggcagctgacgccctctcgcgctatggtcctgctgaaatcaatgcggtttctgttgttatccctcaatggctgactgatatccaacagacttacgattcggacagcaagactaaagagttagtggctaaactagctatcgatccagcagctgttgcccacttctcactgaaggatggtctgatccgttacaagaaccgtctttggataggcgaggatccccacctccaggctaagattgtttcagcactgcattcctctccgatcggtggtcactctggtgtgccggttacctacagccgtgtcaaaagcatatttgcgtggaagaatatgaagtcgttcgtccgttcatttgtgcagcaatgtcagatttgcctgcaagccaaacctgacagggcagcttatcctgctgttcctatctcacatatacaggctccatggttttccagcggccattgtatctgacagagaccccatcttcaccagcgccttttggcgtcagctgttccaactggctggtacggaattacgcctcagttcctcctatcacccccagtcagatggtcagacagagcgtctgaaccaatgcttggaaacgttcctgcgatgctttgtcagcgcgtgtcctaaaaagtggtcctcttggctgccagcagctgaatattggtataacacaagtctgcattcagctttgggttgttctccgtttgaagtgctttatggccgcaagccacgttccttgggtctttcttttgatgctgctgccccagttgccctgtcagcctggttacaagaaagatctgtgatgcaaaatctcatccaccagcaccttattcgcgcccaaactcggatgaaaaaacaggcagataaacaccgctctgaacgctccttctcagttggcgattgggtttacatgaagctccaaccctacgtccagtcttcagtgcttccacgtgcccaccaaaaactcagttacaagttctttggcccttatcgagtggccaacagggtcggttcagtggcctaccgattggaactcccaaattccagcaggattcatcccgtcgttcatgtctcccaactgaagctggcaaaaggttctggtgcagtggtccaaccttcctactgagttagccacatgggaagaccaagacaacctgaggcaatgttatccttttgctcctgcttgggggcaagcaggattccaagggggggaaaatgtcaacaatgagagtatggattcccctacagtcagccgaggcgtaccaaacggcgaaccggaagcagctccagttgtccgcacacgccgtgtctgtcgcgccaacgtccgtcagcaaggaccagagtgggtgcagtgagtcggcatattggtgttgggtctgagcctgcgtgctcccgtgcgtaagtggctgtcttaagtactagcgtagccgaaagagacggtatgcattttgtaaggaaaacttagtatcctggaatagaactcctctggttctcctattcttctcctcctccttccaggttgctaacaaatagcgtgtggaccgcaacgtataacggaatttcacatgaagatgtagctgaaatcttttcgaaggatgttgaaggtaagagccaatct

SEQ ID NO: 201458 - DNA, 5123 bp, Zea Mays
atgcatcttccatctccctagagcttgttgtgagggtggcacagtttgttgtgagggcgtgcagaggggtggcgcaggttgctgtgtgggcaggagagggggagcaggactcaccagagcttgctgtgagggcgtgcagaggaggggcgggcggcggccagaggggttggaggcggctagaggctcttctcagacttaaccagatgattacagattctcttgatccgagtaatggtagtggtatttgggaagatcctggaatcttgagattaaaccatgatgatgttcgtaccagaagatacgcaccatactttctctcgaatgacacatcattgccctttaggttcaaggtgtaccgaggtgctgttaattcagatgatattggcagtttctctgtaatagatgaaaactctgtgccggcggggtatgctgtcccaatttacgtcgaagaaactcctgatgaatttttcttccaacacagagaagcacgatcatcagaccatctcatcgagaaacgaatgagtgctctatcacactacatgatctccattgagtttgatggaacatcaggcccttcaaaaccaatgtcaatggaccttgtgggcatttacttctttgaagtaaatttctcttcaagtaaaaagccaattctcggcgaagaaagtttaggagcattttcgtctaatgcaaaaggcaacgatgggttaattgtgcctgtggtgctcgatgtttccttacagaactacagcaagcgtatacgagtttattcgacggtaatactatacaatgcaacatcaatgcccctcgagttgaggtttgatataccatttggtcttgcatcaaaggtaattgggcccattcctccaaacaaagagattccactgccggttcatttgtctgaagctggccagattaggtggcaccctgtcggcagaacatacttgtggagtgaaacccgctccttgtcaagtttgctttcacgtgaaaacagggttgggttcatgaaatcatctgtttgttatccttctcaccctagtaatgacccatttcgttgttgtgtatctgttgaagaatacaatgtcccttcatctgttagtaccaagaaaaaacagttgtgcagtgaaagattgaacacacaagtttctggaagttctactccaaatacttttaagcaaaatttgacaaggacacattttatacggcatgtcaagcttaataccccgcttctcataaagaactatctgcctgtttacatttccttggcaatagataatggtgggtctgcgcgggtaatttcgctaaaggaggtagggtctgcctctattttgtttgttgatccctccaatgatcttggaattacaattgatattcaagattataggtccttgaacataaagtttccccgggctgaatcattctcaactacagccaagttaaatggcttcaaattctccataactgagtcaattactttctactcaaatttgtctaattttcctcttaatgttatgctggaaaaatcaatggatgctcgttctggcgcaagagagttgtatctttctgttccattcttgttgtacaattgcacagatctattgcttactgtcactgaaagcagctctgagaggagtgggcctactcttgtgattccccctagttttgaattggatggatatgcaagacatatgcttgaaaagggtggtctttctcttgtcaatccttctgtacaatgctttacaggcaaaatgccccagatatatttgatggatggacactgctcttcttcagatataagttgtacacgtaacagtgagtctgtaaagaaagatttggacaacagtgttaaagcttatatgtttgctcctgatgggcacactccagcaactgaactttcagttaagttgaatgcttctccgcctaataatggaactgaaacaactcggcgaaattggtcaaatcccttcctccttgtccctgccagtggttcaacaaatgttactattcctcagtcatctacttctggtgccttcttagttgcagtggcatctatacctgtttcaacagaactttttggcaggacaagggctattgctttcaggccaagatacgtcatatgtaatgcatgcagcaatgatttgttctttcgacaaaaaggaacacggttttctaagcacttaagttctgggcaacactcttttcttcactggtctgatacagccagagatctgctggtatccattcggattgatggcccaggatggcaatggtcaggaagttttttccctgatcacctgggagatgctcaattgaaaatgcggaatagtgcctcaggtttatcatatatggttcgagttgaagtgcaaaatgccgatctagacttaaacagcaatagattttctggaaaaaataatatcaatactggtacagtactgattctgctttctgatgataagactggttttgtaccttacaggatcgacaatttttcaatggagaaactgcggatatatcaacagagatgtgaatctattgaaacaattgtttatccctacacatcctgtcaatatgcttgggatgagccttgctatcctcatcgccttactgttgagattcctggagaacggagtttgggtacattcaatctggacattctcaatgatgatgttcatgtgtcactaccatccacatccgagaaagctgcaagacaattctgcatctcaatacatgcggaaggagcaattaaggtgctaagtgttcttgattcaaattgccacaataaggaaacaaatgaaaaggattttctgggatcaaaggaacctaaagttgttgatcacaaactggagcttgatatgaattttgctgaggttatcaaattacacttaccattcatcgggatatctttaataagttcttgtccacaggaattgttgtttgcttctgccaaggagatgactgttgttgccatgcagagtttagatcagcagagatttacggttcagatacaatctatgcaaatcgataatcagttccctgatagcccacacccggtcatgttgtcatttgagggcagtcataagggaaaatccatgaacttttttaagagtaaagatactaagctgaaatcagcaaatgacattctttccagtaccagtgaacctgtgctgcagtttgctgcagctaaatggagaaccaaagatgtatcatttgtttcctatcaatatataaacataagtctagcacctcttcgccttgaacttgaagaacgacttgtcttgagcatgattgaattttttagatctgtttcctctcgaataaatattggacacttggagaaaagtattgagctaagtataggtggtgctacggacatgttaagagaatatgaaaaaatctcaaagaatatatcagacaagctcctggtgcaagacagtgaattgttgccttctgttgtcccagttggggctccatggcaacagatacaccttttagccagaaaacagaaaaaggtgtacattgaattgtttcagttgactcctgtcaagttgactttcagttttacgagcacaccttggctcaataggaatgaaggtggttcagaccccagcgtaggtttcaacaacgctactgcaatccagagaggtcttatggccctcttggacgttgaaggagtaccagtttaccttggagaaattatagtggaaaatcttatggccagctggcaatctgttcaggacattcttatgaggcattatagtaggcaaatcctccacgaactttataaggttttgggttctgctggcgttataggaaatcctatgggttttgctaggaatgttgggtttggtttaaaggacttcatatctgcttcaagaaaagggaaattgcagagcccagttgaactattaaacggtatagcacaaggttcaaagactcttattggaagtacggtttatgcagtcagcagtgccacttctcacttcagtaaaactgcttataagggccttgttgcctttacatatgatgagcaagctgcttcgaagatggaagaacgggaaagacagctaggtttgcatggggaaggagtactgaatggttttctagagggtctgactgggctccttcaatcaccgattaggggagctgagaaacatggtcttcccggggtcatctcaggtttagcaatgggaacagctgggcttgtggcacggcctatggctagcattcttgaagccacaggcagaactgcccagagcattagaaaccgaagcaaccctcacgaatccaactacttgcgagtacgtttccccaggcctgttgccagagatcgccctttgtttccctactcctgggaagaagccatcggtgaatcgttgcttgcccaagctgacagtggcagactaaaggaggagacatttgtcatgtgcaagacactcaagggggctgggaagttccttgtgctaactgagaagctgcttctgctagtctcaagcccatacttggtggatctaggatcgcctcggttcatcggtgttcctcctgacccgcagtggtcgatcgacacggagatgcacctcaagagcgttgttcatctggacaggtctcaggaggtagtgaacattgttgggagcaacggacagacctcacctagggacaaaagaggtggcacgagaaacagggtcatgagctcggccttcgtccccctgtttcacctcagcatagagctgccaaatgaggaggatgcagaagggacggtgcaggtcctacaggcactcatcgagaagggcaaggcacggaggtgggacaagaacatcctacaccggagcaacatcagttgaggttttcacaacagtagtagaggttggtgttttgattgaagtggaagataaactaaattccaccccgtgactcaggtggattaaatatacaaacaaggcctcaaggcagagcagtcaccagcatacataagcttagtgtgaataagaaaacaaagtgttccataggtggtcaccgttggacacgtgcttcggttttgttttaagcttagtgtgaataagaaaacaaagtgttccataggtgatcaccgttggacacgtgcttcggttttttttttttttttgcggtct

SEQ ID NO: 201459 - DNA, 8866 bp, Zea Mays
caccattctgcatggaacaacccaatgagccttgtgggtggcaagagaaccatcagagtggaacttgtgcttaaatatttcacttgcccgtcacaatgttggcgctgggccccaaggtactttcttctctaaatcggttcaataatttgggaacaagacttgtctccaaactgaagtacatgtctgctaatcgtaaaaaacttatttgggatttgaggatttatcatttcgtcattaggataccatcacagaattgtgaaaggaaagaacttgccatggttattgatgctggggatgtattcattcagtctaaagatacaattgacgatatttctcgaacacaagaaagcaattcctttcttgatcacatatcaaaaagtcttcctagttatttttctgatgatctgttactcggtatccagttggatgagctttataaccagtttgagcttggccttactgggtttcaggtgaaggtattgttgcctgacagacataatgtttcctctacactgattaagcttgatgcttccattgcacttcgattgtgtgtattcctagatgaaccagtgctaaaacaattggaggtcggttttattgtgtcatctattgatgcatacctctctcagacaatgtacagtaccattgttaatttgcctagaatgaaagaaactaaccttttcaagaacagcgtatttgataataccaagacacatgtacccaagaaattggccttgaatgtgtctgtgtctctgaagctcgccaagttaggtttacatgttgaccttgatggtaattttgaggaaagttctggtctcattgttggcattgaagacattgatatcaggtatgctatctgtgaattgtcagatctttctcttgccatgaagacggtcaatgttactttcagatattggaaggataaatcagattcacatgtgctatgcttatctgggaacttaacacgatgtcctgaaaattctgttgaaacttgtttggatctgcattatagaactcacaagcatgacgatcaaatacatcatgtataccggctgattttatgtgatgttgatctgcatgttaacccatctgttattggtcagataaggatgtttttaagaaaacttgattcaggaccttcaattggcagtgatgttgaatccacaatgattggtcagagttccatgaaatccggggcagctaatggcatacttcccatgttctttttgtcaaatttatgtggtgcagatggcactgtattcgcaggagtttctgttgaccacttcccatttttagttgcagatcacagttgtggatataattttgggtgcttaggaactcaaaatgttgaagcacaagaaagtttatactcaaagaatgagcactgtcatgacacttcaggtttgaatggttatcatgcatcagatctcaccagcaatacatacggtaaaacccagcgttcagattgttcatctggctcatcaaatgaccccaagaatgccagcagaactgttctggatctatcacttatttctgttagaatacattttcctgaatcatgtggtactttagtaacaataaccattcctgaatcgatatcaacactcacttattttgatgcaagctcatgggacttactattgtctgctaacaatttgactcttgcttcaccatggactccaccaaatgtcaacgagctggtctggggcacagcttcacatcgcaatgctagtgtactcaacgttcgagttaaaaaggacttacctgcactgtcaaccgaaaacaggaattccttgtggcagataacaaccttgaaggcttgagagaatcacatgactgtgtaacatataaatttgatatcagtgattgtgttgtattttttcctgtggaagagcaaggtttatcgtgtctaaagctggaggttccacattttttctgtgagttcattgcgaacggaagctctgtagaatttgcaaagcgtatccccaaagaattcttcagttcagagtgcatagtttccagaagagttgatgtcatctgcatatatgcaagaaatgcatccatatcacttctaattgtaagcgaccaaacagattttatgctaaagcttgatgagaacgttcctaagagaatccattctcttattgaaaagcttgatgccgacgtatggattcaggttccttgcaaagatataccatactcgcagcagcctacttcacctacctccgttatgagcaaaatatcacgatgcaacttgattgctgaagatttatattttataaatgggatggagacagttattggtgttgttgaccagttgatttcgatcggcaatgaaagtaaaatgtacaaaggcaatgcctcacagtttttagatcatagaagtttctgtgagggcaaccctgatcctaatgagtgtaccaatctcactatttcgatcaaggatctgatgattctcttgggccagtctaaagctaaaggtctggcactggagaggattgccactgcaaacatggagtttgatgtttctgctgtactagttggtgaaaaaccagagcgcatagactttgacgttgtttctttaacactgcagtcacctggtggttacacactcatctccattgtttcggatgggccactatctcctgtttttttcaagtttacaaagcaccatactggacaagatgagatattactaagtgtacccctttttgagatctggttatatttacaggattggaatacaattatcaatcattcccattcatacataaagacagaagtaaacagtatgcctgtggagcatgcagctgctttgtctcagtttccagaaatggtatcgtcaccacttattgcatcagaatttggttcaccagatgacttcaacttagtggtaacatgtgaaactatttctggtgtactccatatacctatctgggggaaagaagaaaatcacacaagcaatcacatgggtgtgactcctgcttcttttccaatggaagtgggcactcatgagacagatgatattcaatattgtgaaccaaaaggttgcaagtttgtcaccttaacttttgatactaaacattttgtggtgatgtcaggtgatagctgcataaattttagatgtgatttagagagattgaaggtattgctggaaatgattcaagagaataagggtacctctgttccatttgtgcatatatctaaggttaaatcttctggttatgttcgtcaatcagaaaggaatttggaacatctttctgttgatctacaagctgaatacatggatgttagtttttcacaccagatatttaacttctggcataacatggaactcaaatttcctgctgcatcatctgcatcctctttttattctgtggcattcaaggcaggattgaggaaagggtctcttctgctaagcgatggaaggtggagcagtcatggacctgtaatagagacgttattgaagaatctaactgtgcagttcagtcaaatgaaggataggacagaagtgtctgcttttgttgaccttttagtaaattacaataacattgataaggttatgtgggaaccttttgtagaaccctcaagatttcagttaaatatgctaagaaaatgtggtgattgtggattggatatatcacccagtactgatgtgtgtttaagttcaagcaagcagcttaatctgaatatatcagaacccttaattgaggctcttctcagacttaaccagatgattacagattctcttgatccgagtaatggtagtggtatttgggaagatcctggaatcttgagattaaaccatgatgatgttcgtaccagaagatacgcaccatactttctctcgaatgacacatcattgccctttaggttcaaggtgtaccgaggtgctgttaattcagatgatattggcagtttctctgtaatagatgaaaactctgtgccggcggggtatgctgtcccaatttacgtcgaagaaactcctgatgaatttttcttccaacacagagaagcacgatcatcagaccatctcatcgagaaacgaatgagtgctctatcacactacatgatctccattgagtttgatggaacatcaggcccttcaaaaccaatgtcaatggaccttgtgggcatttacttctttgaagtaaatttctcttcaagtaaaaagccaattctcggcgaagaaagtttaggagcattttcgtctaatgcaaaaggcaacgatgggttaattgtgcctgtggtgctcgatgtttccttacagaactacagcaagcgtatacgagtttattcgacggtaatactatacaatgcaacatcaatgcccctcgagttgaggtttgatataccatttggtcttgcatcaaaggtaattgggcccattcctccaaacaaagagattccactgccggttcatttgtctgaagctggccagattaggtggcaccctgtcggcagaacatacttgtggagtgaaacccgctccttgtcaagtttgctttcacgtgaaaacagggttgggttcatgaaatcatctgtttgttatccttctcaccctagtaatgacccatttcgttgttgtgtatctgttgaagaatacaatgtcccttcatctgttagtaccaagaaaaaacagttgtgcagtgaaagattgaacacacaagtttctggaagttctactccaaatacttttaagcaaaatttgacaaggacacattttatacggcatgtcaagcttaataccccgcttctcataaagaactatctgcctgtttacatttccttggcaatagataatggtgggtctgcgcgggtaatttcgctaaaggaggtagggtctgcctctattttgtttgttgatccctccaatgatcttggaattacaattgatattcaagattataggtccttgaacataaagtttccccgggctgaatcattctcaactacagccaagttaaatggcttcaaattctccataactgagtcaattactttctactcaaatttgtctaattttcctcttaatgttatgctggaaaaatcaatggatgctcgttctggcgcaagagagttgtatctttctgttccattcttgttgtacaattgcacagatctattgcttactgtcactgaaagcagctctgagaggagtgggcctactcttgtgattccccctagttttgaattggatggatatgcaagacatatgcttgaaaagggtggtctttctcttgtcaatccttctgtacaatgctttacaggcaaaatgccccagatatatttgatggatggacactgctcttcttcagatataagttgtacacgtaacagtgagtctgtaaagaaagatttggacaacagtgttaaagcttatatgtttgctcctgatgggcacactccagcaactgaactttcagttaagttgaatgcttctccgcctaataatggaactgaaacaactcggcgaaattggtcaaatcccttcctccttgtccctgccagtggttcaacaaatgttactattcctcagtcatctacttctggtgccttcttagttgcagtggcatctatacctgtttcaacagaactttttggcaggacaagggctattgctttcaggccaagatacgtcatatgtaatgcatgcagcaatgatttgttctttcgacaaaaaggaacacggttttctaagcacttaagttctgggcaacactcttttcttcactggtctgatacagccagagatctgctggtatccattcggattgatggcccaggatggcaatggtcaggaagttttttccctgatcacctgggagatgctcaattgaaaatgcggaatagtgcctcaggtttatcatatatggttcgagttgaagtgcaaaatgccgatctagacttaaacagcaatagattttctggaaaaaataatatcaatactggtacagtactgattctgctttctgatgataagactggttttgtaccttacaggatcgacaatttttcaatggagaaactgcggatatatcaacagagatgtgaatctattgaaacaattgtttatccctacacatcctgtcaatatgcttgggatgagccttgctatcctcatcgccttactgttgagattcctggagaacggagtttgggtacattcaatctggacattctcaatgatgatgttcatgtgtcactaccatccacatccgagaaagctgcaagacaattctgcatctcaatacatgcggaaggagcaattaaggtgctaagtgttcttgattcaaattgccacaataaggaaacaaatgaaaaggattttctgggatcaaaggaacctaaagttgttgatcacaaactggagcttgatatgaattttgctgaggttatcaaattacacttaccattcatcgggatatctttaataagttcttgtccacaggaattgttgtttgcttctgccaaggagatgactgttgttgccatgcagagtttagatcagcagagatttacggttcagatacaatctatgcaaatcgataatcagttccctgatagcccacacccggtcatgttgtcatttgagggcagtcataagggaaaatccatgaacttttttaagagtaaagatactaagctgaaatcagcaaatgacattctttccagtaccagtgaacctgtgctgcagtttgctgcagctaaatggagaaccaaagatgtatcatttgtttcctatcaatatataaacataagtctagcacctcttcgccttgaacttgaagaacgacttgtcttgagcatgattgaattttttagatctgtttcctctcgaataaatattggacacttggagaaaagtattgagctaagtataggtggtgctacggacatgttaagagaatatgaaaaaatctcaaagaatatatcagacaagctcctggtgcaagacagtgaattgttgccttctgttgtcccagttggggctccatggcaacagatacaccttttagccagaaaacagaaaaaggtgtacattgaattgtttcagttgactcctgtcaagttgactttcagttttacgagcacaccttggctcaataggaatgaaggtggttcagaccccagcgtaggtttcaacaacgctactgcaatccagagaggtcttatggccctcttggacgttgaaggagtaccagtttaccttggagaaattatagtggaaaatcttatggccagctggcaatctgttcaggacattcttatgaggcattatagtaggcaaatcctccacgaactttataaggttttgggttctgctggcgttataggaaatcctatgggttttgctaggaatgttgggtttggtttaaaggacttcatatctgcttcaagaaaagggaaattgcagagcccagttgaactattaaacggtatagcacaaggttcaaagactcttattggaagtacggtttatgcagtcagcagtgccacttctcacttcagtaaaactgcttataagggccttgttgcctttacatatgatgagcaagctgcttcgaagatggaagaacgggaaagacagctaggtttgcatggggaaggagtactgaatggttttctagagggtctgactgggctccttcaatcaccgattaggggagctgagaaacatggtcttcccggggtcatctcaggtacaaccattgtattaagcatttatattcaatttgttcccatttgaccaacagcacgtctgttcctacaggtttagcaatgggaacagctgggcttgtggcacggcctatggctagcattcttgaagccacaggcagaactgcccagagcattagaaaccgaagcaaccctcacgaatccaactacttgcgagtacgtttccccaggcctgttgccagagatcgccctttgtttccctactcctgggaagaagccatcggtgaatcgttgcttgcccaagctgacagtggcagactaaaggaggagacatttgtcatgtgcaagacactcaagggggctgggaagttccttgtgctaactgagaagctgcttctgctagtctcaagcccatacttggtggatctaggatcgcctcggttcatcggtgttcctcctgacccgcagtggtcgatcgacacggagatgcacctcaagagcgttgttcatctggacaggtctcaggaggtagtgaacattgttgggagcaacggacagacctcacctagggacaaaagaggtggcacgagaaacagggtcatgagctcggccttcgtccccctgtttcacctcagcatagagctgccaaatgaggaggatgcagaagggacggtgcaggtcctacaggcactcatcgagaagggcaaggcacggaggtgggacaagaacatcctacaccggagcaacatcagttgaggttttcacaacagtagtagaggttggtgttttgattgaagtggaagataaactaaattccaccccgtgactcaggtggattaaatatacaaacaaggcctcaaggcagagcagtcaccagcatacataagcttagtgtgaataagaaaacaaagtgttccataggtggtcaccgttggacacgtgcttcggttttgttttaagcttagtgtgaataagaaaacaaagtgttccataggtgatcaccgttggacacgtgcttcggttttttttttttttttgcggtctaggtgtagcttctagaagttttgtcgacggctcttgtaaatgaagtgtgagagggcttatgttatgtgtagcaacaccactgttttatgccacggctatgtttacaaacttcgccgttcatgggccatggatatttctgatt

SEQ ID NO: 201460 - DNA, 10162 bp, Zea Mays
atggcttatactgctagttcattgatgactaggtcaagacaagatgaagtaaataagataattgagatatcaaatgttggaatttactgtcatcagctggaagaagagcaggatctatgccatgttggtgctcttgaaaatgaccactcaagggattatcttgtaaatccattttgtgtgactgtatctgtgcttgctaacaaagctgccaagcttgacggtacccctcagtataacatgactgcagagctaactgcattggccctatctgttgatgaaatccagctccaacaaatcttaaatctttgtgattacttcactatctgtgctttgcgaacaaaatatggtcgttaccgtccttctcaaagctctttatctaagagatgtaaaggttggtacagaatgtggtggcaatatgctcagaattctgtattagcagatgttcgcagaagactgaagaaaacttcatggcgttatttgaagcagcgactgaatcaccaactaagatatgtgaaattgtacagaatgaaattggagcttttacagaaaggacagattgttagtgaagacattctacaagagttggaaaatatggacagagaatgtgatatagatgacatacttaactacagaacgattgcagagcaacaactgcaggaatcattggtgaaatcttccatagatactcatagtccaggaagtcctcgaagcgatgaacagttggcaggggcaagccagggatggttaaactggctttctcttggaatgcttggtgttggtggaacagctgatagtagctcatttgctggtgttatttctgaagacattattaaggatatatatgagggaacagaatttcgtccagtttcttctgctgaaaattgtttgaagaaagaaaactactattctttgtttgttagactatctatttctcagatagtcacaactgtcacctccaggaggtttggcacgaagcttgtagatacaatgttttctgggcttggtatggaatgtaaaatatgggatgatgcagcaactattcttgcttggcttgattctcttcgggttatcaacccactgaataaaacgaaaatcttatgggctgaaaagtgtagcaccggtgatggtcttggggcacctgttgtcagtatccaagtcgactttcccaagtcaaatgaaagatcagaagcttcaacaagggtcgttgtccaggaattcaacgccatctatgaaccagaattctttgttaatgtcctgtacatctacaatgtgttttccgctttccaatttcagcatgataggcgacagcctgtggggaggtggagctccggcggctgtggcatgagaggaggggatatgcgacaattgtggcttggcggagaggtactttcttctctaaatcggttcaataatttgggaacaagacttgtctccaaactgaagtacatgtctgctaatcgtaaaaaacttatttgggatttgaggatttatcatttcgtcattaggataccatcacagaattgtgaaaggaaagaacttgccatggttattgatgctggggatgtattcattcagtctaaagatacaattgacgatatttctcgaacacaagaaagcaattcctttcttgatcacatatcaaaaagtcttcctagttatttttctgatgatctgttactcggtatccagttggatgagctttataaccagtttgagcttggccttactgggtttcaggtgaaggtattgttgcctgacagacataatgtttcctctacactgattaagcttgatgcttccattgcacttcgattgtgtgtattcctagatgaaccagtgctaaaacaattggaggtcggttttattgtgtcatctattgatgcatacctctctcagacaatgtacagtaccattgttaatttgcctagaatgaaagaaactaaccttttcaagaacagcgtatttgataataccaagacacatgtacccaagaaattggccttgaatgtgtctgtgtctctgaagctcgccaagttaggtttacatgttgaccttgatggtaattttgaggaaagttctggtctcattgttggcattgaagacattgatatcaggtatgctatctgtgaattgtcagatctttctcttgccatgaagacggtcaatgttactttcagatattggaaggataaatcagattcacatgtgctatgcttatctgggaacttaacacgatgtcctgaaaattctgttgaaacttgtttggatctgcattatagaactcacaagcatgacgatcaaatacatcatgtataccggctgattttatgtgatgttgatctgcatgttaacccatctgttattggtcagataaggatgtttttaagaaaacttgattcaggaccttcaattggcagtgatgttgaatccacaatgattggtcagagttccatgaaatccggggcagctaatggcatacttcccatgttctttttgtcaaatttatgtggtgcagatggcactgtattcgcaggagtttctgttgaccacttcccatttttagttgcagatcacagttgtggatataattttgggtgcttaggaactcaaaatgttgaagcacaagaaagtttatactcaaagaatgagcactgtcatgacacttcaggtttgaatggttatcatgcatcagatctcaccagcaatacatacggtaaaacccagcgttcagattgttcatctggctcatcaaatgaccccaagaatgccagcagaactgttctggatctatcacttatttctgttagaatacattttcctgaatcatgtggtactttagtaacaataaccattcctgaatcgatatcaacactcacttattttgatgcaagctcatgggacttactattgtctgctaacaatttgactcttgcttcaccatggactccaccaaatgtcaacgagctggtctggggcacagcttcacatcgcaatgctagtgtactcaacgttcgagttaaaaaggacttacctgcactgtcaaccgaagtatgtgttggaattcaaaacgtttgttgtgtattaccatccaagttactggctatgtttgttggattctttttgttggatgattggaatcgtattgcagaacaggaattccttgtggcagataacaaccttgaaggcttgagagaatcacatgactgtgtaacatataaatttgatatcagtgattgtgttgtattttttcctgtggaagagcaaggtttatcgtgtctaaagctggaggttccacattttttctgtgagttcattgcgaacggaagctctgtagaatttgcaaagcgtatccccaaagaattcttcagttcagagtgcatagtttccagaagagttgatgtcatctgcatatatgcaagaaatgcatccatatcacttctaattgtaagcgaccaaacagattttatgctaaagcttgatgagaacgttcctaagagaatccattctcttattgaaaagcttgatgccgacgtatggattcaggttccttgcaaagatataccatactcgcagcagcctacttcacctacctccgttatgagcaaaatatcacgatgcaacttgattgctgaagatttatattttataaatgggatggagacagttattggtgttgttgaccagttgatttcgatcggcaatgaaagtaaaatgtacaaaggcaatgcctcacagtttttagatcatagaagtttctgtgagggcaaccctgatcctaatgagtgtaccaatctcactatttcgatcaaggatctgatgattctcttgggccagtctaaagctaaaggtctggcactggagaggattgccactgcaaacatggagtttgatgtttctgctgtactagttggtgaaaaaccagagcgcatagactttgacgttgtttctttaacactgcagtcacctggtggttacacactcatctccattgtttcggatgggccactatctcctgtttttttcaagtttacaaagcaccatactggacaagatgagatattactaagtgtacccctttttgagatctggttatatttacaggattggaatacaattatcaatcattcccattcatacataaagacagaagtaaacagtatgcctgtggagcatgcagctgctttgtctcagtttccagaaatggtatcgtcaccacttattgcatcagaatttggttcaccagatgacttcaacttagtggtaacatgtgaaactatttctggtgtactccatatacctatctgggggaaagaagaaaatcacacaagcaatcacatgggtgtgactcctgcttcttttccaatggaagtgggcactcatgagacagatgatattcaatattgtgaaccaaaaggttgcaagtttgtcaccttaacttttgatactaaacattttgtggtgatgtcaggtgatagctgcataaattttagatgtgatttagagagattgaaggtattgctggaaatgattcaagagaataagggtacctctgttccatttgtgcatatatctaaggttaaatcttctggttatgttcgtcaatcagaaaggaatttggaacatctttctgttgatctacaagctgaatacatggatgttagtttttcacaccagatatttaacttctggcataacatggaactcaaatttcctgctgcatcatctgcatcctctttttattctgtggcattcaaggcaggattgaggaaagggtctcttctgctaagcgatggaaggtggagcagtcatggacctgtaatagagacgttattgaagaatctaactgtgcagttcagtcaaatgaaggataggacagaagtgtctgcttttgttgaccttttagtaaattacaataacattgataaggttatgtgggaaccttttgtagaaccctcaagatttcagttaaatatgctaagaaaatgtggtgattgtggattggatatatcacccagtactgatgtgtgtttaagttcaagcaagcagcttaatctgaatatatcagaacccttaattgaggctcttctcagacttaaccagatgattacagattctcttgatccgagtaatggtagtggtatttgggaagatcctggaatcttgagattaaaccatgatgatgttcgtaccagaagatacgcaccatactttctctcgaatgacacatcattgccctttaggttcaaggtgtaccgaggtgctgttaattcagatgatattggcagtttctctgtaatagatgaaaactctgtgccggcggggtatgctgtcccaatttacgtcgaagaaactcctgatgaatttttcttccaacacagagaagcacgatcatcagaccatctcatcgagaaacgaatgagtgctctatcacactacatgatctccattgagtttgatggaacatcaggcccttcaaaaccaatgtcaatggaccttgtgggcatttacttctttgaagtaaatttctcttcaagtaaaaagccaattctcggcgaagaaagtttaggagcattttcgtctaatgcaaaaggcaacgatgggttaattgtgcctgtggtgctcgatgtttccttacagaactacagcaagcgtatacgagtttattcgacggtaatactatacaatgcaacatcaatgcccctcgagttgaggtttgatataccatttggtcttgcatcaaaggtaattgggcccattcctccaaacaaagagattccactgccggttcatttgtctgaagctggccagattaggtggcaccctgtcggcagaacatacttgtggagtgaaacccgctccttgtcaagtttgctttcacgtgaaaacagggttgggttcatgaaatcatctgtttgttatccttctcaccctagtaatgacccatttcgttgttgtgtatctgttgaagaatacaatgtcccttcatctgttagtaccaagaaaaaacagttgtgcagtgaaagattgaacacacaagtttctggaagttctactccaaatacttttaagcaaaatttgacaaggacacattttatacggcatgtcaagcttaataccccgcttctcataaagaactatctgcctgtttacatttccttggcaatagataatggtgggtctgcgcgggtaatttcgctaaaggaggtagggtctgcctctattttgtttgttgatccctccaatgatcttggaattacaattgatattcaagattataggtccttgaacataaagtttccccgggctgaatcattctcaactacagccaagttaaatggcttcaaattctccataactgagtcaattactttctactcaaatttgtctaattttcctcttaatgttatgctggaaaaatcaatggatgctcgttctggcgcaagagagttgtatctttctgttccattcttgttgtacaattgcacagatctattgcttactgtcactgaaagcagctctgagaggagtgggcctactcttgtgattccccctagttttgaattggatggatatgcaagacatatgcttgaaaagggtggtctttctcttgtcaatccttctgtacaatgctttacaggcaaaatgccccagatatatttgatggatggacactgctcttcttcagatataagttgtacacgtaacagtgagtctgtaaagaaagatttggacaacagtgttaaagcttatatgtttgctcctgatgggcacactccagcaactgaactttcagttaagttgaatgcttctccgcctaataatggaactgaaacaactcggcgaaattggtcaaatcccttcctccttgtccctgccagtggttcaacaaatgttactattcctcagtcatctacttctggtgccttcttagttgcagtggcatctatacctgtttcaacagaactttttggcaggacaagggctattgctttcaggccaagatacgtcatatgtaatgcatgcagcaatgatttgttctttcgacaaaaaggaacacggttttctaagcacttaagttctgggcaacactcttttcttcactggtctgatacagccagagatctgctggtatccattcggattgatggcccaggatggcaatggtcaggaagttttttccctgatcacctgggagatgctcaattgaaaatgcggaatagtgcctcaggtttatcatatatggttcgagttgaagtgcaaaatgccgatctagacttaaacagcaatagattttctggaaaaaataatatcaatactggtacagtactgattctgctttctgatgataagactggttttgtaccttacaggatcgacaatttttcaatggagaaactgcggatatatcaacagagatgtgaatctattgaaacaattgtttatccctacacatcctgtcaatatgcttgggatgagccttgctatcctcatcgccttactgttgagattcctggagaacggagtttgggtacattcaatctggacattctcaatgatgatgttcatgtgtcactaccatccacatccgagaaagctgcaagacaattctgcatctcaatacatgcggaaggagcaattaaggtgctaagtgttcttgattcaaattgccacaataaggaaacaaatgaaaaggattttctgggatcaaaggaacctaaagttgttgatcacaaactggagcttgatatgaattttgctgaggttatcaaattacacttaccattcatcgggatatctttaataagttcttgtccacaggaattgttgtttgcttctgccaaggagatgactgttgttgccatgcagagtttagatcagcagagatttacggttcagatacaatctatgcaaatcgataatcagttccctgatagcccacacccggtcatgttgtcatttgagggcagtcataagggaaaatccatgaacttttttaagagtaaagatactaagctgaaatcagcaaatgacattctttccagtaccagtgaacctgtgctgcagtttgctgcagctaaatggagaaccaaagatgtatcatttgtttcctatcaatatataaacataagtctagcacctcttcgccttgaacttgaagaacgacttgtcttgagcatgattgaattttttagatctgtttcctctcgaataaatattggacacttggagaaaagtattgagctaagtataggtggtgctacggacatgttaagagaatatgaaaaaatctcaaagaatatatcagacaagctcctggtgcaagacagtgaattgttgccttctgttgtcccagttggggctccatggcaacagatacaccttttagccagaaaacagaaaaaggtgtacattgaattgtttcagttgactcctgtcaagttgactttcagttttacgagcacaccttggctcaataggaatgaaggtggttcagaccccagcgtaggtttcaacaacgctactgcaatccagagaggtcttatggccctcttggacgttgaaggagtaccagtttaccttggagaaattatagtggaaaatcttatggccagctggcaatctgttcaggacattcttatgaggcattatagtaggcaaatcctccacgaactttataaggttttgggttctgctggcgttataggaaatcctatgggttttgctaggaatgttgggtttggtttaaaggacttcatatctgcttcaagaaaagggaaattgcagagcccagttgaactattaaacggtatagcacaaggttcaaagactcttattggaagtacggtttatgcagtcagcagtgccacttctcacttcagtaaaactgcttataagggccttgttgcctttacatatgatgagcaagctgcttcgaagatggaagaacgggaaagacagctaggtttgcatggggaaggagtactgaatggttttctagagggtctgactgggctccttcaatcaccgattaggggagctgagaaacatggtcttcccggggtcatctcaggtttagcaatgggaacagctgggcttgtggcacggcctatggctagcattcttgaagccacaggcagaactgcccagagcattagaaaccgaagcaaccctcacgaatccaactacttgcgagtacgtttccccaggcctgttgccagagatcgccctttgtttccctactcctgggaagaagccatcggtgaatcgttgcttgcccaagctgacagtggcagactaaaggaggagacatttgtcatgtgcaagacactcaagggggctgggaagttccttgtgctaactgagaagctgcttctgctagtctcaagcccatacttggtggatctaggatcgcctcggttcatcggtgttcctcctgacccgcagtggtcgatcgacacggagatgcacctcaagagcgttgttcatctggacaggtctcaggaggtagtgaacattgttgggagcaacggacagacctcacctagggacaaaagaggtggcacgagaaacagggtcatgagctcggccttcgtccccctgtttcacctcagcatagagctgccaaatgaggaggatgcagaagggacggtgcaggtcctacaggcactcatcgagaagggcaaggcacggaggtgggacaagaacatcctacaccggagcaacatcagttgaggttttcacaacagtagtagaggttggtgttttgattgaagtggaagataaactaaattccaccccgtgactcaggtggattaaatatacaaacaaggcctcaaggcagagcagtcaccagcatacataagcttagtgtgaataagaaaacaaagtgttccataggtggtcaccgttggacacgtgcttcggttttgttttaagcttagtgtgaataagaaaacaaagtgttccataggtgatcaccgttggacacgtgcttcggttttttttttttttttgcggtctaggtgtagcttctagaagttttgtcgacggctcttgtaaatgaagtgtgagagggcttatgttatgtgtagcaacaccactgttttatgccacggctatgtttacaaacttcgccgttcatgggccatggatatttctgatt

SEQ ID NO: 201461 - DNA, 10152 bp, Zea Mays
atggcttatactgctagttcattgatgactaggtcaagacaagatgaagtaaataagataattgagatatcaaatgttggaatttactgtcatcagctggaagaagagcaggatctatgccatgttggtgctcttgaaaatgaccactcaagggattatcttgtaaatccattttgtgtgactgtatctgtgcttgctaacaaagctgccaagcttgacggtacccctcagtataacatgactgcagagctaactgcattggccctatctgttgatgaaatccagctccaacaaatcttaaatctttgtgattacttcactatctgtgctttgcgaacaaaatatggtcgttaccgtccttctcaaagctctttatctaagagatgtaaaggttggtacagaatgtggtggcaatatgctcagaattctgtattagcagatgttcgcagaagactgaagaaaacttcatggcgttatttgaagcagcgactgaatcaccaactaagatatgtgaaattgtacagaatgaaattggagcttttacagaaaggacagattgttagtgaagacattctacaagagttggaaaatatggacagagaatgtgatatagatgacatacttaactacagaacgattgcagagcaacaactgcaggaatcattggtgaaatcttccatagatactcatagtccaggaagtcctcgaagcgatgaacagttggcaggggcaagccagggatggttaaactggctttctcttggaatgcttggtgttggtggaacagctgatagtagctcatttgctggtgttatttctgaagacattattaaggatatatatgagggaacagaatttcgtccagtttcttctgctgaaaattgtttgaagaaagaaaactactattctttgtttgttagactatctatttctcagatagtcacaactgtcacctccaggaggtttggcacgaagcttgtagatacaatgttttctgggcttggtatggaatgtaaaatatgggatgatgcagcaactattcttgcttggcttgattctcttcgggttatcaacccactgaataaaacgaaaatcttatgggctgaaaagtgtagcaccggtgatggtcttggggcacctgttgtcagtatccaagtcgactttcccaagtcaaatgaaagatcagaagcttcaacaagggtcgttgtccaggaattcaacgccatctatgaaccagaattctttgttaatgtcctgtacatctacaatgtgttttccgctttccaatttcagcatgatagggtactttcttctctaaatcggttcaataatttgggaacaagacttgtctccaaactgaagtacatgtctgctaatcgtaaaaaacttatttgggatttgaggatttatcatttcgtcattaggataccatcacagaattgtgaaaggaaagaacttgccatggttattgatgctggggatgtattcattcagtctaaagatacaattgacgatatttctcgaacacaagaaagcaattcctttcttgatcacatatcaaaaagtcttcctagttatttttctgatgatctgttactcggtatccagttggatgagctttataaccagtttgagcttggccttactgggtttcaggtgaaggtattgttgcctgacagacataatgtttcctctacactgattaagcttgatgcttccattgcacttcgattgtgtgtattcctagatgaaccagtgctaaaacaattggaggtcggttttattgtgtcatctattgatgcatacctctctcagacaatgtacagtaccattgttaatttgcctagaatgaaagaaactaaccttttcaagaacagcgtatttgataataccaagacacatgtacccaagaaattggccttgaatgtgtctgtgtctctgaagctcgccaagttaggtttacatgttgaccttgatggtaattttgaggaaagttctggtctcattgttggcattgaagacattgatatcaggtatgctatctgtgaattgtcagatctttctcttgccatgaagacggtcaatgttactttcagatattggaaggataaatcagattcacatgtgctatgcttatctgggaacttaacacgatgtcctgaaaattctgttgaaacttgtttggatctgcattatagaactcacaagcatgacgatcaaatacatcatgtataccggctgattttatgtgatgttgatctgcatgttaacccatctgttattggtcagataaggatgtttttaagaaaacttgattcaggaccttcaattggcagtgatgttgaatccacaatgattggtcagagttccatgaaatccggggcagctaatggcatacttcccatgttctttttgtcaaatttatgtggtgcagatggcactgtattcgcaggagtttctgttgaccacttcccatttttagttgcagatcacagttgtggatataattttgggtgcttaggaactcaaaatgttgaagcacaagaaagtttatactcaaagaatgagcactgtcatgacacttcaggtttgaatggttatcatgcatcagatctcaccagcaatacatacggtaaaacccagcgttcagattgttcatctggctcatcaaatgaccccaagaatgccagcagaactgttctggatctatcacttatttctgttagaatacattttcctgaatcatgtggtactttagtaacaataaccattcctgaatcgatatcaacactcacttattttgatgcaagctcatgggacttactattgtctgctaacaatttgactcttgcttcaccatggactccaccaaatgtcaacgagctggtctggggcacagcttcacatcgcaatgctagtgtactcaacgttcgagttaaaaaggacttacctgcactgtcaaccgaagtatgtgttggaattcaaaacgtttgttgtgtattaccatccaagttactggctatgtttgttggattctttttgttggatgattggaatcgtattgcagaacaggaattccttgtggcagataacaaccttgaaggcttgagagaatcacatgactgtgtaacatataaatttgatatcagtgattgtgttgtattttttcctgtggaagagcaaggtttatcgtgtctaaagctggaggttccacattttttctgtgagttcattgcgaacggaagctctgtagaatttgcaaagcgtatccccaaagaattcttcagttcagagtgcatagtttccagaagagttgatgtcatctgcatatatgcaagaaatgcatccatatcacttctaattgtaagcgaccaaacagattttatgctaaagcttgatgagaacgttcctaagagaatccattctcttattgaaaagcttgatgccgacgtatggattcaggttccttgcaaagatataccatactcgcagcagcctacttcacctacctccgttatgagcaaaatatcacgatgcaacttgattgctgaagatttatattttataaatgggatggagacagttattggtgttgttgaccagttgatttcgatcggcaatgaaagtaaaatgtacaaaggcaatgcctcacagtttttagatcatagaagtttctgtgagggcaaccctgatcctaatgagtgtaccaatctcactatttcgatcaaggatctgatgattctcttgggccagtctaaagctaaaggtctggcactggagaggattgccactgcaaacatggagtttgatgtttctgctgtactagttggtgaaaaaccagagcgcatagactttgacgttgtttctttaacactgcagtcacctggtggttacacactcatctccattgtttcggatgggccactatctcctgtttttttcaagtttacaaagcaccatactggacaagatgagatattactaagtgtacccctttttgagatctggttatatttacaggattggaatacaattatcaatcattcccattcatacataaagacagaagtaaacagtatgcctgtggagcatgcagctgctttgtctcagtttccagaaatggtatcgtcaccacttattgcatcagaatttggttcaccagatgacttcaacttagtggtaacatgtgaaactatttctggtgtactccatatacctatctgggggaaagaagaaaatcacacaagcaatcacatgggtgtgactcctgcttcttttccaatggaagtgggcactcatgagacagatgatattcaatattgtgaaccaaaaggttgcaagtttgtcaccttaacttttgatactaaacattttgtggtgatgtcaggtgatagctgcataaattttagatgtgatttagagagattgaaggtattgctggaaatgattcaagagaataagggtacctctgttccatttgtgcatatatctaaggttaaatcttctggttatgttcgtcaatcagaaaggaatttggaacatctttctgttgatctacaagctgaatacatggatgttagtttttcacaccagatatttaacttctggcataacatggaactcaaatttcctgctgcatcatctgcatcctctttttattctgtggcattcaaggcaggattgaggaaagggtctcttctgctaagcgatggaaggtggagcagtcatggacctgtaatagagacgttattgaagaatctaactgtgcagttcagtcaaatgaaggataggacagaagtgtctgcttttgttgaccttttagtaaattacaataacattgataaggttatgtgggaaccttttgtagaaccctcaagatttcagttaaatatgctaagaaaatgtggtgattgtggattggatatatcacccagtactgatgtgtgtttaagttcaagcaagcagcttaatctgaatatatcagaacccttaattgaggctcttctcagacttaaccagatgattacagattctcttgatccgagtaatggtagtggtatttgggaagatcctggaatcttgagattaaaccatgatgatgttcgtaccagaagatacgcaccatactttctctcgaatgacacatcattgccctttaggttcaaggtgtaccgaggtgctgttaattcagatgatattggcagtttctctgtaatagatgaaaactctgtgccggcggggtatgctgtcccaatttacgtcgaagaaactcctgatgaatttttcttccaacacagagaagcacgatcatcagaccatctcatcgagaaacgaatgagtgctctatcacactacatgatctccattgagtttgatggaacatcaggcccttcaaaaccaatgtcaatggaccttgtgggcatttacttctttgaagtaaatttctcttcaagtaaaaagccaattctcggcgaagaaagtttaggagcattttcgtctaatgcaaaaggcaacgatgggttaattgtgcctgtggtgctcgatgtttccttacagaactacagcaagcgtatacgagtttattcgacggtaatactatacaatgcaacatcaatgcccctcgagttgaggtttgatataccatttggtcttgcatcaaaggtaattgggcccattcctccaaacaaagagattccactgccggttcatttgtctgaagctggccagattaggtggcaccctgtcggcagaacatacttgtggagtgaaacccgctccttgtcaagtttgctttcacgtgaaaacagggttgggttcatgaaatcatctgtttgttatccttctcaccctagtaatgacccatttcgttgttgtgtatctgttgaagaatacaatgtcccttcatctgttagtaccaagaaaaaacagttgtgcagtgaaagattgaacacacaagtttctggaagttctactccaaatacttttaagcaaaatttgacaaggacacattttatacggcatgtcaagcttaataccccgcttctcataaagaactatctgcctgtttacatttccttggcaatagataatggtgggtctgcgcgggtaatttcgctaaaggaggtagggtctgcctctattttgtttgttgatccctccaatgatcttggaattacaattgatattcaagattataggtccttgaacataaagtttccccgggctgaatcattctcaactacagccaagttaaatggcttcaaattctccataactgagtcaattactttctactcaaatttgtctaattttcctcttaatgttatgctggaaaaatcaatggatgctcgttctggcgcaagagagttgtatctttctgttccattcttgttgtacaattgcacagatctattgcttactgtcactgaaagcagctctgagaggagtgggcctactcttgtgattccccctagttttgaattggatggatatgcaagacatatgcttgaaaagggtggtctttctcttgtcaatccttctgtacaatgctttacaggcaaaatgccccagatatatttgatggatggacactgctcttcttcagatataagttgtacacgtaacagtgagtctgtaaagaaagatttggacaacagtgttaaagcttatatgtttgctcctgatgggcacactccagcaactgaactttcagttaagttgaatgcttctccgcctaataatggaactgaaacaactcggcgaaattggtcaaatcccttcctccttgtccctgccagtggttcaacaaatgttactattcctcagtcatctacttctggtgccttcttagttgcagtggcatctatacctgtttcaacagaactttttggcaggacaagggctattgctttcaggccaagatacgtcatatgtaatgcatgcagcaatgatttgttctttcgacaaaaaggaacacggttttctaagcacttaagttctgggcaacactcttttcttcactggtctgatacagccagagatctgctggtatccattcggattgatggcccaggatggcaatggtcaggaagttttttccctgatcacctgggagatgctcaattgaaaatgcggaatagtgcctcaggtttatcatatatggttcgagttgaagtgcaaaatgccgatctagacttaaacagcaatagattttctggaaaaaataatatcaatactggtacagtactgattctgctttctgatgataagactggttttgtaccttacaggatcgacaatttttcaatggagaaactgcggatatatcaacagagatgtgaatctattgaaacaattgtttatccctacacatcctgtcaatatgcttgggatgagccttgctatcctcatcgccttactgttgagattcctggagaacggagtttgggtacattcaatctggacattctcaatgatgatgttcatgtgtcactaccatccacatccgagaaagctgcaagacaattctgcatctcaatacatgcggaaggagcaattaaggtgctaagtgttcttgattcaaattgccacaataaggaaacaaatgaaaaggattttctgggatcaaaggaacctaaagttgttgatcacaaactggagcttgatatgaattttgctgaggttatcaaattacacttaccattcatcgggatatctttaataagttcttgtccacaggaattgttgtttgcttctgccaaggagatgactgttgttgccatgcagagtttagatcagcagagatttacggttcagatacaatctatgcaaatcgataatcagttccctgatagcccacacccggtcatgttgtcatttgagggcagtcataagggaaaatccatgaacttttttaagagtaaagatactaagctgaaatcagcaaatgacattctttccagtaccagtgaacctgtgctgcagtttgctgcagctaaatggagaaccaaagatgtatcatttgtttcctatcaatatataaacataagtctagcacctcttcgccttgaacttgaagaacgacttgtcttgagcatgattgaattttttagatctgtttcctctcgaataaatattggacacttggagaaaagtattgagctaagtataggtggtgctacggacatgttaagagaatatgaaaaaatctcaaagaatatatcagacaagctcctggtgcaagacagtgaattgttgccttctgttgtcccagttggggctccatggcaacagatacaccttttagccagaaaacagaaaaaggtgtacattgaattgtttcagttgactcctgtcaagttgactttcagttttacgagcacaccttggctcaataggaatgaaggtggttcagaccccagcgtaggtttcaacaacgctactgcaatccagagaggtcttatggccctcttggacgttgaaggagtaccagtttaccttggagaaattatagtggaaaatcttatggccagctggcaatctgttcaggacattcttatgaggcattatagtaggcaaatcctccacgaactttataaggttttgggttctgctggcgttataggaaatcctatgggttttgctaggaatgttgggtttggtttaaaggacttcatatctgcttcaagaaaagggaaattgcagagcccagttgaactattaaacggtatagcacaaggttcaaagactcttattggaagtacggtttatgcagtcagcagtgccacttctcacttcagtaaaactgcttataagggccttgttgcctttacatatgatgagcaagctgcttcgaagatggaagaacgggaaagacagctaggtttgcatggggaaggagtactgaatggttttctagagggtctgactgggctccttcaatcaccgattaggggagctgagaaacatggtcttcccggggtcatctcaggtacaaccattgtattaagcatttatattcaatttgttcccatttgaccaacagcacgtctgttcctacaggtttagcaatgggaacagctgggcttgtggcacggcctatggctagcattcttgaagccacaggcagaactgcccagagcattagaaaccgaagcaaccctcacgaatccaactacttgcgagtacgtttccccaggcctgttgccagagatcgccctttgtttccctactcctgggaagaagccatcggtgaatcgttgcttgcccaagctgacagtggcagactaaaggaggagacatttgtcatgtgcaagacactcaagggggctgggaagttccttgtgctaactgagaagctgcttctgctagtctcaagcccatacttggtggatctaggatcgcctcggttcatcggtgttcctcctgacccgcagtggtcgatcgacacggagatgcacctcaagagcgttgttcatctggacaggtctcaggaggtagtgaacattgttgggagcaacggacagacctcacctagggacaaaagaggtggcacgagaaacagggtcatgagctcggccttcgtccccctgtttcacctcagcatagagctgccaaatgaggaggatgcagaagggacggtgcaggtcctacaggcactcatcgagaagggcaaggcacggaggtgggacaagaacatcctacaccggagcaacatcagttgaggttttcacaacagtagtagaggttggtgttttgattgaagtggaagataaactaaattccaccccgtgactcaggtggattaaatatacaaacaaggcctcaaggcagagcagtcaccagcatacataagcttagtgtgaataagaaaacaaagtgttccataggtggtcaccgttggacacgtgcttcggttttgttttaagcttagtgtgaataagaaaacaaagtgttccataggtgatcaccgttggacacgtgcttcggttttttttttttttttgcggtctaggtgtagcttctagaagttttgtcgacggctcttgtaaatgaagtgtgagagggcttatgttatgtgtagcaacaccactgttttatgccacggctatgtttacaaacttcgccgttcatgggccatggatatttctgatt

SEQ ID NO: 201462 - DNA, 10928 bp, Zea Mays
gttgcctccgccgtccgcctccttctccaagcaaacggaactgaaaagaaaaggtcccgccccggcggcggcacccgactctccatccaccgctcgcctccccttgcccctcctctcgtctactcgtcaccctacgctcggctccatcctccccgcctccccacgtgtcctcccgctacatgggagcgcgggctccctagggtgcctcgaccaccgccgccgccatgttcgagggggtggtaagccaggtgctctatggcctcctccgccgctacgtcaagggcatccagaaggagcagcttaagatcggcatctggaaggaagaaatactgcttgaaaatgtagagctgattctggaagcctttgactacctgcagctgccattcgcgctgaaaaatggacgaattgggaagctaagcatccggattccttggaaaaagctaggatgggaccctatcattattgtcatagaagatgtctatgtttgcgcatgcccaagggaggactctgagtggagctcagattctctggacaagagggaactagctggaaagttggctaaacttaatgccattgagcttgctaaattttctagaagagttacagataatcaaacgggacaatcatttttgtcctacatatcagcaaagatactggatagtatccaagtttctatgcgaaatgttcatattgtatacatggatacccacaacggtcaagggaactttgtatttggtttggaattcacaagtctctcaatacaaacagatacccagaagcaaagttttacaatttcattgatgactaggtcaagacaagatgaagtaaataagataattgagatatcaaatgttggaatttactgtcatcagctggaagaagagcaggatctatgccatgttggtgctcttgaaaatgaccactcaagggattatcttgtaaatccattttgtgtgactgtatctgtgcttgctaacaaagctgccaagcttgacggtacccctcagtataacatgactgcagagctaactgcattggccctatctgttgatgaaatccagctccaacaaatcttaaatctttgtgattacttcactatctgtgctttgcgaacaaaatatggtcgttaccgtccttctcaaagctctttatctaagagatgtaaaggttggtacagaatgtggtggcaatatgctcagaattctgtattagcagatgttcgcagaagactgaagaaaacttcatggcgttatttgaagcagcgactgaatcaccaactaagatatgtgaaattgtacagaatgaaattggagcttttacagaaaggacagattgttagtgaagacattctacaagagttggaaaatatggacagagaatgtgatatagatgacatacttaactacagaacgattgcagagcaacaactgcaggaatcattggtgaaatcttccatagatactcatagtccaggaagtcctcgaagcgatgaacagttggcaggggcaagccagggatggttaaactggctttctcttggaatgcttggtgttggtggaacagctgatagtagctcatttgctggtgttatttctgaagacattattaaggatatatatgagggaacagaatttcgtccagtttcttctgctgaaaattgtttgaagaaagaaaactactattctttgtttgttagactatctatttctcagatagtcacaactgtcacctccaggaggtttggcacgaagcttgtagatacaatgttttctgggcttggtatggaatgtaaaatatgggatgatgcagcaactattcttgcttggcttgattctcttcgggttatcaacccactgaataaaacgaaaatcttatgggctgaaaagtgtagcaccggtgatggtcttggggcacctgttgtcagtatccaagtcgactttcccaagtcaaatgaaagatcagaagcttcaacaagggtcgttgtccaggaattcaacgccatctatgaaccagaattctttgttaatgtcctgtacatctacaatgtgttttccgctttccaatttcagcatgatagggtactttcttctctaaatcggttcaataatttgggaacaagacttgtctccaaactgaagtacatgtctgctaatcgtaaaaaacttatttgggatttgaggatttatcatttcgtcattaggataccatcacagaattgtgaaaggaaagaacttgccatggttattgatgctggggatgtattcattcagtctaaagatacaattgacgatatttctcgaacacaagaaagcaattcctttcttgatcacatatcaaaaagtcttcctagttatttttctgatgatctgttactcggtatccagttggatgagctttataaccagtttgagcttggccttactgggtttcaggtgaaggtattgttgcctgacagacataatgtttcctctacactgattaagcttgatgcttccattgcacttcgattgtgtgtattcctagatgaaccagtgctaaaacaattggaggtcggttttattgtgtcatctattgatgcatacctctctcagacaatgtacagtaccattgttaatttgcctagaatgaaagaaactaaccttttcaagaacagcgtatttgataataccaagacacatgtacccaagaaattggccttgaatgtgtctgtgtctctgaagctcgccaagttaggtttacatgttgaccttgatggtaattttgaggaaagttctggtctcattgttggcattgaagacattgatatcaggtatgctatctgtgaattgtcagatctttctcttgccatgaagacggtcaatgttactttcagatattggaaggataaatcagattcacatgtgctatgcttatctgggaacttaacacgatgtcctgaaaattctgttgaaacttgtttggatctgcattatagaactcacaagcatgacgatcaaatacatcatgtataccggctgattttatgtgatgttgatctgcatgttaacccatctgttattggtcagataaggatgtttttaagaaaacttgattcaggaccttcaattggcagtgatgttgaatccacaatgattggtcagagttccatgaaatccggggcagctaatggcatacttcccatgttctttttgtcaaatttatgtggtgcagatggcactgtattcgcaggagtttctgttgaccacttcccatttttagttgcagatcacagttgtggatataattttgggtgcttaggaactcaaaatgttgaagcacaagaaagtttatactcaaagaatgagcactgtcatgacacttcaggtttgaatggttatcatgcatcagatctcaccagcaatacatacggtaaaacccagcgttcagattgttcatctggctcatcaaatgaccccaagaatgccagcagaactgttctggatctatcacttatttctgttagaatacattttcctgaatcatgtggtactttagtaacaataaccattcctgaatcgatatcaacactcacttattttgatgcaagctcatgggacttactattgtctgctaacaatttgactcttgcttcaccatggactccaccaaatgtcaacgagctggtctggggcacagcttcacatcgcaatgctagtgtactcaacgttcgagttaaaaaggacttacctgcactgtcaaccgaagtatgtgttggaattcaaaacgtttgttgtgtattaccatccaagttactggctatgtttgttggattctttttgttggatgattggaatcgtattgcagaacaggaattccttgtggcagataacaaccttgaaggcttgagagaatcacatgactgtgtaacatataaatttgatatcagtgattgtgttgtattttttcctgtggaagagcaaggtttatcgtgtctaaagctggaggttccacattttttctgtgagttcattgcgaacggaagctctgtagaatttgcaaagcgtatccccaaagaattcttcagttcagagtgcatagtttccagaagagttgatgtcatctgcatatatgcaagaaatgcatccatatcacttctaattgtaagcgaccaaacagattttatgctaaagcttgatgagaacgttcctaagagaatccattctcttattgaaaagcttgatgccgacgtatggattcaggttccttgcaaagatataccatactcgcagcagcctacttcacctacctccgttatgagcaaaatatcacgatgcaacttgattgctgaagatttatattttataaatgggatggagacagttattggtgttgttgaccagttgatttcgatcggcaatgaaagtaaaatgtacaaaggcaatgcctcacagtttttagatcatagaagtttctgtgagggcaaccctgatcctaatgagtgtaccaatctcactatttcgatcaaggatctgatgattctcttgggccagtctaaagctaaaggtctggcactggagaggattgccactgcaaacatggagtttgatgtttctgctgtactagttggtgaaaaaccagagcgcatagactttgacgttgtttctttaacactgcagtcacctggtggttacacactcatctccattgtttcggatgggccactatctcctgtttttttcaagtttacaaagcaccatactggacaagatgagatattactaagtgtacccctttttgagatctggttatatttacaggattggaatacaattatcaatcattcccattcatacataaagacagaagtaaacagtatgcctgtggagcatgcagctgctttgtctcagtttccagaaatggtatcgtcaccacttattgcatcagaatttggttcaccagatgacttcaacttagtggtaacatgtgaaactatttctggtgtactccatatacctatctgggggaaagaagaaaatcacacaagcaatcacatgggtgtgactcctgcttcttttccaatggaagtgggcactcatgagacagatgatattcaatattgtgaaccaaaaggttgcaagtttgtcaccttaacttttgatactaaacattttgtggtgatgtcaggtgatagctgcataaattttagatgtgatttagagagattgaaggtattgctggaaatgattcaagagaataagggtacctctgttccatttgtgcatatatctaaggttaaatcttctggttatgttcgtcaatcagaaaggaatttggaacatctttctgttgatctacaagctgaatacatggatgttagtttttcacaccagatatttaacttctggcataacatggaactcaaatttcctgctgcatcatctgcatcctctttttattctgtggcattcaaggcaggattgaggaaagggtctcttctgctaagcgatggaaggtggagcagtcatggacctgtaatagagacgttattgaagaatctaactgtgcagttcagtcaaatgaaggataggacagaagtgtctgcttttgttgaccttttagtaaattacaataacattgataaggttatgtgggaaccttttgtagaaccctcaagatttcagttaaatatgctaagaaaatgtggtgattgtggattggatatatcacccagtactgatgtgtgtttaagttcaagcaagcagcttaatctgaatatatcagaacccttaattgaggctcttctcagacttaaccagatgattacagattctcttgatccgagtaatggtagtggtatttgggaagatcctggaatcttgagattaaaccatgatgatgttcgtaccagaagatacgcaccatactttctctcgaatgacacatcattgccctttaggttcaaggtgtaccgaggtgctgttaattcagatgatattggcagtttctctgtaatagatgaaaactctgtgccggcggggtatgctgtcccaatttacgtcgaagaaactcctgatgaatttttcttccaacacagagaagcacgatcatcagaccatctcatcgagaaacgaatgagtgctctatcacactacatgatctccattgagtttgatggaacatcaggcccttcaaaaccaatgtcaatggaccttgtgggcatttacttctttgaagtaaatttctcttcaagtaaaaagccaattctcggcgaagaaagtttaggagcattttcgtctaatgcaaaaggcaacgatgggttaattgtgcctgtggtgctcgatgtttccttacagaactacagcaagcgtatacgagtttattcgacggtaatactatacaatgcaacatcaatgcccctcgagttgaggtttgatataccatttggtcttgcatcaaaggtaattgggcccattcctccaaacaaagagattccactgccggttcatttgtctgaagctggccagattaggtggcaccctgtcggcagaacatacttgtggagtgaaacccgctccttgtcaagtttgctttcacgtgaaaacagggttgggttcatgaaatcatctgtttgttatccttctcaccctagtaatgacccatttcgttgttgtgtatctgttgaagaatacaatgtcccttcatctgttagtaccaagaaaaaacagttgtgcagtgaaagattgaacacacaagtttctggaagttctactccaaatacttttaagcaaaatttgacaaggacacattttatacggcatgtcaagcttaataccccgcttctcataaagaactatctgcctgtttacatttccttggcaatagataatggtgggtctgcgcgggtaatttcgctaaaggaggtagggtctgcctctattttgtttgttgatccctccaatgatcttggaattacaattgatattcaagattataggtccttgaacataaagtttccccgggctgaatcattctcaactacagccaagttaaatggcttcaaattctccataactgagtcaattactttctactcaaatttgtctaattttcctcttaatgttatgctggaaaaatcaatggatgctcgttctggcgcaagagagttgtatctttctgttccattcttgttgtacaattgcacagatctattgcttactgtcactgaaagcagctctgagaggagtgggcctactcttgtgattccccctagttttgaattggatggatatgcaagacatatgcttgaaaagggtggtctttctcttgtcaatccttctgtacaatgctttacaggcaaaatgccccagatatatttgatggatggacactgctcttcttcagatataagttgtacacgtaacagtgagtctgtaaagaaagatttggacaacagtgttaaagcttatatgtttgctcctgatgggcacactccagcaactgaactttcagttaagttgaatgcttctccgcctaataatggaactgaaacaactcggcgaaattggtcaaatcccttcctccttgtccctgccagtggttcaacaaatgttactattcctcagtcatctacttctggtgccttcttagttgcagtggcatctatacctgtttcaacagaactttttggcaggacaagggctattgctttcaggccaagatacgtcatatgtaatgcatgcagcaatgatttgttctttcgacaaaaaggaacacggttttctaagcacttaagttctgggcaacactcttttcttcactggtctgatacagccagagatctgctggtatccattcggattgatggcccaggatggcaatggtcaggaagttttttccctgatcacctgggagatgctcaattgaaaatgcggaatagtgcctcaggtttatcatatatggttcgagttgaagtgcaaaatgccgatctagacttaaacagcaatagattttctggaaaaaataatatcaatactggtacagtactgattctgctttctgatgataagactggttttgtaccttacaggatcgacaatttttcaatggagaaactgcggatatatcaacagagatgtgaatctattgaaacaattgtttatccctacacatcctgtcaatatgcttgggatgagccttgctatcctcatcgccttactgttgagattcctggagaacggagtttgggtacattcaatctggacattctcaatgatgatgttcatgtgtcactaccatccacatccgagaaagctgcaagacaattctgcatctcaatacatgcggaaggagcaattaaggtgctaagtgttcttgattcaaattgccacaataaggaaacaaatgaaaaggattttctgggatcaaaggaacctaaagttgttgatcacaaactggagcttgatatgaattttgctgaggttatcaaattacacttaccattcatcgggatatctttaataagttcttgtccacaggaattgttgtttgcttctgccaaggagatgactgttgttgccatgcagagtttagatcagcagagatttacggttcagatacaatctatgcaaatcgataatcagttccctgatagcccacacccggtcatgttgtcatttgagggcagtcataagggaaaatccatgaacttttttaagagtaaagatactaagctgaaatcagcaaatgacattctttccagtaccagtgaacctgtgctgcagtttgctgcagctaaatggagaaccaaagatgtatcatttgtttcctatcaatatataaacataagtctagcacctcttcgccttgaacttgaagaacgacttgtcttgagcatgattgaattttttagatctgtttcctctcgaataaatattggacacttggagaaaagtattgagctaagtataggtggtgctacggacatgttaagagaatatgaaaaaatctcaaagaatatatcagacaagctcctggtgcaagacagtgaattgttgccttctgttgtcccagttggggctccatggcaacagatacaccttttagccagaaaacagaaaaaggtgtacattgaattgtttcagttgactcctgtcaagttgactttcagttttacgagcacaccttggctcaataggaatgaaggtggttcagaccccagcgtaggtttcaacaacgctactgcaatccagagaggtcttatggccctcttggacgttgaaggagtaccagtttaccttggagaaattatagtggaaaatcttatggccagctggcaatctgttcaggacattcttatgaggcattatagtaggcaaatcctccacgaactttataaggttttgggttctgctggcgttataggaaatcctatgggttttgctaggaatgttgggtttggtttaaaggacttcatatctgcttcaagaaaagggaaattgcagagcccagttgaactattaaacggtatagcacaaggttcaaagactcttattggaagtacggtttatgcagtcagcagtgccacttctcacttcagtaaaactgcttataagggccttgttgcctttacatatgatgagcaagctgcttcgaagatggaagaacgggaaagacagctaggtttgcatggggaaggagtactgaatggttttctagagggtctgactgggctccttcaatcaccgattaggggagctgagaaacatggtcttcccggggtcatctcaggtacaaccattgtattaagcatttatattcaatttgttcccatttgaccaacagcacgtctgttcctacaggtttagcaatgggaacagctgggcttgtggcacggcctatggctagcattcttgaagccacaggcagaactgcccagagcattagaaaccgaagcaaccctcacgaatccaactacttgcgagtacgtttccccaggcctgttgccagagatcgccctttgtttccctactcctgggaagaagccatcggtgaatcgttgcttgcccaagctgacagtggcagactaaaggaggagacatttgtcatgtgcaagacactcaagggggctgggaagttccttgtgctaactgagaagctgcttctgctagtctcaagcccatacttggtggatctaggatcgcctcggttcatcggtgttcctcctgacccgcagtggtcgatcgacacggagatgcacctcaagagcgttgttcatctggacaggtctcaggaggtagtgaacattgttgggagcaacggacagacctcacctagggacaaaagaggtggcacgagaaacagggtcatgagctcggccttcgtccccctgtttcacctcagcatagagctgccaaatgaggaggatgcagaagggacggtgcaggtcctacaggcactcatcgagaagggcaaggcacggaggtgggacaagaacatcctacaccggagcaacatcagttgaggttttcacaacagtagtagaggttggtgttttgattgaagtggaagataaactaaattccaccccgtgactcaggtggattaaatatacaaacaaggcctcaaggcagagcagtcaccagcatacataagcttagtgtgaataagaaaacaaagtgttccataggtggtcaccgttggacacgtgcttcggttttgttttaagcttagtgtgaataagaaaacaaagtgttccataggtgatcaccgttggacacgtgcttcggttttttttttttttttgcggtctaggtgtagcttctagaagttttgtcgacggctcttgtaaatgaagtgtgagagggcttatgttatgtgtagcaacaccactgttttatgccacggctatgtttacaaacttcgccgttcatgggccatggatatttctgatt

SEQ ID NO: 201463 - DNA, 10854 bp, Zea Mays
gccgttgcctccgccgtccgcctccttctccaagcaaacggaactgaaaagaaaaggtcccgccccggcggcggcacccgactctccatccaccgctcgcctccccttgcccctcctctcgtctactcgtcaccctacgctcggctccatcctccccgcctccccacgtgtcctcccgctacatgggagcgcgggctccctagggtgcctcgaccaccgccgccgccatgttcgagggggtggtaagccaggtgctctatggcctcctccgccgctacgtcaagggcatccagaaggagcagcttaagatcggcatctggaaggaagaaatactgcttgaaaatgtagagctgattctggaagcctttgactacctgcagctgccattcgcgctgaaaaatggacgaattgggaagctaagcatccggattccttggaaaaagctaggatgggaccctatcattattgtcatagaagattggagctcagattctctggacaagagggaactagctggaaagttggctaaacttaatgccattgagcttgctaaattttctagaagagttacagataatcaaacgggacaatcatttttgtcctacatatcagcaaagatactggatagtatccaagtttctatgcgaaatgttcatattgtatacatggatacccacaacggtcaagggaactttgtatttggtttggaattcacaagtctctcaatacaaacagatacccagaagcaaagttttacaatttcattgatgactaggtcaagacaagatgaagtaaataagataattgagatatcaaatgttggaatttactgtcatcagctggaagaagagcaggatctatgccatgttggtgctcttgaaaatgaccactcaagggattatcttgtaaatccattttgtgtgactgtatctgtgcttgctaacaaagctgccaagcttgacggtacccctcagtataacatgactgcagagctaactgcattggccctatctgttgatgaaatccagctccaacaaatcttaaatctttgtgattacttcactatctgtgctttgcgaacaaaatatggtcgttaccgtccttctcaaagctctttatctaagagatgtaaaggttggtacagaatgtggtggcaatatgctcagaattctgtattagcagatgttcgcagaagactgaagaaaacttcatggcgttatttgaagcagcgactgaatcaccaactaagatatgtgaaattgtacagaatgaaattggagcttttacagaaaggacagattgttagtgaagacattctacaagagttggaaaatatggacagagaatgtgatatagatgacatacttaactacagaacgattgcagagcaacaactgcaggttgttgatggttctgttagaagaacgttgagggaatcattggtgaaatcttccatagatactcatagtccaggaagtcctcgaagcgatgaacagttggcaggggcaagccagggatggttaaactggctttctcttggaatgcttggtgttggtggaacagctgatagtagctcatttgctggtgttatttctgaagacattattaaggatatatatgagggaacagaatttcgtccagtttcttctgctgaaaattgtttgaagaaagaaaactactattctttgtttgttagactatctatttctcagatagtcacaactgtcacctccaggtttggcacgaagcttgtagatacaatgttttctgggcttggtatggaatgtaaaatatgggatgatgcagcaactattcttgcttggcttgattctcttcgggttatcaacccactgaataaaacgaaaatcttatgggctgaaaagtgtagcaccggtgatggtcttggggcacctgttgtcagtatccaagtcgactttcccaagtcaaatgaaagatcagaagcttcaacaagggtcgttgtccaggaattcaacgccatctatgaaccagaattctttgttaatgtcctgtacatctacaatgtgttttccgctttccaatttcagcatgatagggtactttcttctctaaatcggttcaataatttgggaacaagacttgtctccaaactgaagtacatgtctgctaatcgtaaaaaacttatttgggatttgaggatttatcatttcgtcattaggataccatcacagaattgtgaaaggaaagaacttgccatggttattgatgctggggatgtattcattcagtctaaagatacaattgacgatatttctcgaacacaagaaagcaattcctttcttgatcacatatcaaaaagtcttcctagttatttttctgatgatctgttactcggtatccagttggatgagctttataaccagtttgagcttggccttactgggtttcaggtgaaggtattgttgcctgacagacataatgtttcctctacactgattaagcttgatgcttccattgcacttcgattgtgtgtattcctagatgaaccagtgctaaaacaattggaggtcggttttattgtgtcatctattgatgcatacctctctcagacaatgtacagtaccattgttaatttgcctagaatgaaagaaactaaccttttcaagaacagcgtatttgataataccaagacacatgtacccaagaaattggccttgaatgtgtctgtgtctctgaagctcgccaagttaggtttacatgttgaccttgatggtaattttgaggaaagttctggtctcattgttggcattgaagacattgatatcaggtatgctatctgtgaattgtcagatctttctcttgccatgaagacggtcaatgttactttcagatattggaaggataaatcagattcacatgtgctatgcttatctgggaacttaacacgatgtcctgaaaattctgttgaaacttgtttggatctgcattatagaactcacaagcatgacgatcaaatacatcatgtataccggctgattttatgtgatgttgatctgcatgttaacccatctgttattggtcagataaggatgtttttaagaaaacttgattcaggaccttcaattggcagtgatgttgaatccacaatgattggtcagagttccatgaaatccggggcagctaatggcatacttcccatgttctttttgtcaaatttatgtggtgcagatggcactgtattcgcaggagtttctgttgaccacttcccatttttagttgcagatcacagttgtggatataattttgggtgcttaggaactcaaaatgttgaagcacaagaaagtttatactcaaagaatgagcactgtcatgacacttcaggtttgaatggttatcatgcatcagatctcaccagcaatacatacggtaaaacccagcgttcagattgttcatctggctcatcaaatgaccccaagaatgccagcagaactgttctggatctatcacttatttctgttagaatacattttcctgaatcatgtggtactttagtaacaataaccattcctgaatcgatatcaacactcacttattttgatgcaagctcatgggacttactattgtctgctaacaatttgactcttgcttcaccatggactccaccaaatgtcaacgagctggtctggggcacagcttcacatcgcaatgctagtgtactcaacgttcgagttaaaaaggacttacctgcactgtcaaccgaagtatgtgttggaattcaaaacgtttgttgtgtattaccatccaagttactggctatgtttgttggattctttttgttggatgattggaatcgtattgcagaacaggaattccttgtggcagataacaaccttgaaggcttgagagaatcacatgactgtgtaacatataaatttgatatcagtgattgtgttgtattttttcctgtggaagagcaaggtttatcgtgtctaaagctggaggttccacattttttctgtgagttcattgcgaacggaagctctgtagaatttgcaaagcgtatccccaaagaattcttcagttcagagtgcatagtttccagaagagttgatgtcatctgcatatatgcaagaaatgcatccatatcacttctaattgtaagcgaccaaacagattttatgctaaagcttgatgagaacgttcctaagagaatccattctcttattgaaaagcttgatgccgacgtatggattcaggttccttgcaaagatataccatactcgcagcagcctacttcacctacctccgttatgagcaaaatatcacgatgcaacttgattgctgaagatttatattttataaatgggatggagacagttattggtgttgttgaccagttgatttcgatcggcaatgaaagtaaaatgtacaaaggcaatgcctcacagtttttagatcatagaagtttctgtgagggcaaccctgatcctaatgagtgtaccaatctcactatttcgatcaaggatctgatgattctcttgggccagtctaaagctaaaggtctggcactggagaggattgccactgcaaacatggagtttgatgtttctgctgtactagttggtgaaaaaccagagcgcatagactttgacgttgtttctttaacactgcagtcacctggtggttacacactcatctccattgtttcggatgggccactatctcctgtttttttcaagtttacaaagcaccatactggacaagatgagatattactaagtgtacccctttttgagatctggttatatttacaggattggaatacaattatcaatcattcccattcatacataaagacagaagtaaacagtatgcctgtggagcatgcagctgctttgtctcagtttccagaaatggtatcgtcaccacttattgcatcagaatttggttcaccagatgacttcaacttagtggtaacatgtgaaactatttctggtgtactccatatacctatctgggggaaagaagaaaatcacacaagcaatcacatgggtgtgactcctgcttcttttccaatggaagtgggcactcatgagacagatgatattcaatattgtgaaccaaaaggttgcaagtttgtcaccttaacttttgatactaaacattttgtggtgatgtcaggtgatagctgcataaattttagatgtgatttagagagattgaaggtattgctggaaatgattcaagagaataagggtacctctgttccatttgtgcatatatctaaggttaaatcttctggttatgttcgtcaatcagaaaggaatttggaacatctttctgttgatctacaagctgaatacatggatgttagtttttcacaccagatatttaacttctggcataacatggaactcaaatttcctgctgcatcatctgcatcctctttttattctgtggcattcaaggcaggattgaggaaagggtctcttctgctaagcgatggaaggtggagcagtcatggacctgtaatagagacgttattgaagaatctaactgtgcagttcagtcaaatgaaggataggacagaagtgtctgcttttgttgaccttttagtaaattacaataacattgataaggttatgtgggaaccttttgtagaaccctcaagatttcagttaaatatgctaagaaaatgtggtgattgtggattggatatatcacccagtactgatgtgtgtttaagttcaagcaagcagcttaatctgaatatatcagaacccttaattgaggctcttctcagacttaaccagatgattacagattctcttgatccgagtaatggtagtggtatttgggaagatcctggaatcttgagattaaaccatgatgatgttcgtaccagaagatacgcaccatactttctctcgaatgacacatcattgccctttaggttcaaggtgtaccgaggtgctgttaattcagatgatattggcagtttctctgtaatagatgaaaactctgtgccggcggggtatgctgtcccaatttacgtcgaagaaactcctgatgaatttttcttccaacacagagaagcacgatcatcagaccatctcatcgagaaacgaatgagtgctctatcacactacatgatctccattgagtttgatggaacatcaggcccttcaaaaccaatgtcaatggaccttgtgggcatttacttctttgaagtaaatttctcttcaagtaaaaagccaattctcggcgaagaaagtttaggagcattttcgtctaatgcaaaaggcaacgatgggttaattgtgcctgtggtgctcgatgtttccttacagaactacagcaagcgtatacgagtttattcgacggtaatactatacaatgcaacatcaatgcccctcgagttgaggtttgatataccatttggtcttgcatcaaaggtaattgggcccattcctccaaacaaagagattccactgccggttcatttgtctgaagctggccagattaggtggcaccctgtcggcagaacatacttgtggagtgaaacccgctccttgtcaagtttgctttcacgtgaaaacagggttgggttcatgaaatcatctgtttgttatccttctcaccctagtaatgacccatttcgttgttgtgtatctgttgaagaatacaatgtcccttcatctgttagtaccaagaaaaaacagttgtgcagtgaaagattgaacacacaagtttctggaagttctactccaaatacttttaagcaaaatttgacaaggacacattttatacggcatgtcaagcttaataccccgcttctcataaagaactatctgcctgtttacatttccttggcaatagataatggtgggtctgcgcgggtaatttcgctaaaggaggtagggtctgcctctattttgtttgttgatccctccaatgatcttggaattacaattgatattcaagattataggtccttgaacataaagtttccccgggctgaatcattctcaactacagccaagttaaatggcttcaaattctccataactgagtcaattactttctactcaaatttgtctaattttcctcttaatgttatgctggaaaaatcaatggatgctcgttctggcgcaagagagttgtatctttctgttccattcttgttgtacaattgcacagatctattgcttactgtcactgaaagcagctctgagaggagtgggcctactcttgtgattccccctagttttgaattggatggatatgcaagacatatgcttgaaaagggtggtctttctcttgtcaatccttctgtacaatgctttacaggcaaaatgccccagatatatttgatggatggacactgctcttcttcagatataagttgtacacgtaacagtgagtctgtaaagaaagatttggacaacagtgttaaagcttatatgtttgctcctgatgggcacactccagcaactgaactttcagttaagttgaatgcttctccgcctaataatggaactgaaacaactcggcgaaattggtcaaatcccttcctccttgtccctgccagtggttcaacaaatgttactattcctcagtcatctacttctggtgccttcttagttgcagtggcatctatacctgtttcaacagaactttttggcaggacaagggctattgctttcaggccaagatacgtcatatgtaatgcatgcagcaatgatttgttctttcgacaaaaaggaacacggttttctaagcacttaagttctgggcaacactcttttcttcactggtctgatacagccagagatctgctggtatccattcggattgatggcccaggatggcaatggtcaggaagttttttccctgatcacctgggagatgctcaattgaaaatgcggaatagtgcctcaggtttatcatatatggttcgagttgaagtgcaaaatgccgatctagacttaaacagcaatagattttctggaaaaaataatatcaatactggtacagtactgattctgctttctgatgataagactggttttgtaccttacaggatcgacaatttttcaatggagaaactgcggatatatcaacagagatgtgaatctattgaaacaattgtttatccctacacatcctgtcaatatgcttgggatgagccttgctatcctcatcgccttactgttgagattcctggagaacggagtttgggtacattcaatctggacattctcaatgatgatgttcatgtgtcactaccatccacatccgagaaagctgcaagacaattctgcatctcaatacatgcggaaggagcaattaaggtgctaagtgttcttgattcaaattgccacaataaggaaacaaatgaaaaggattttctgggatcaaaggaacctaaagttgttgatcacaaactggagcttgatatgaattttgctgaggttatcaaattacacttaccattcatcgggatatctttaataagttcttgtccacaggaattgttgtttgcttctgccaaggagatgactgttgttgccatgcagagtttagatcagcagagatttacggttcagatacaatctatgcaaatcgataatcagttccctgatagcccacacccggtcatgttgtcatttgagggcagtcataagggaaaatccatgaacttttttaagagtaaagatactaagctgaaatcagcaaatgacattctttccagtaccagtgaacctgtgctgcagtttgctgcagctaaatggagaaccaaagatgtatcatttgtttcctatcaatatataaacataagtctagcacctcttcgccttgaacttgaagaacgacttgtcttgagcatgattgaattttttagatctgtttcctctcgaataaatattggacacttggagaaaagtattgagctaagtataggtggtgctacggacatgttaagagaatatgaaaaaatctcaaagaatatatcagacaagctcctggtgcaagacagtgaattgttgccttctgttgtcccagttggggctccatggcaacagatacaccttttagccagaaaacagaaaaaggtgtacattgaattgtttcagttgactcctgtcaagttgactttcagttttacgagcacaccttggctcaataggaatgaaggtggttcagaccccagcgtaggtttcaacaacgctactgcaatccagagaggtcttatggccctcttggacgttgaaggagtaccagtttaccttggagaaattatagtggaaaatcttatggccagctggcaatctgttcaggacattcttatgaggcattatagtaggcaaatcctccacgaactttataaggttttgggttctgctggcgttataggaaatcctatgggttttgctaggaatgttgggtttggtttaaaggacttcatatctgcttcaagaaaagggaaattgcagagcccagttgaactattaaacggtatagcacaaggttcaaagactcttattggaagtacggtttatgcagtcagcagtgccacttctcacttcagtaaaactgcttataagggccttgttgcctttacatatgatgagcaagctgcttcgaagatggaagaacgggaaagacagctaggtttgcatggggaaggagtactgaatggttttctagagggtctgactgggctccttcaatcaccgattaggggagctgagaaacatggtcttcccggggtcatctcaggtttagcaatgggaacagctgggcttgtggcacggcctatggctagcattcttgaagccacaggcagaactgcccagagcattagaaaccgaagcaaccctcacgaatccaactacttgcgagtacgtttccccaggcctgttgccagagatcgccctttgtttccctactcctgggaagaagccatcggtgaatcgttgcttgcccaagctgacagtggcagactaaaggaggagacatttgtcatgtgcaagacactcaagggggctgggaagttccttgtgctaactgagaagctgcttctgctagtctcaagcccatacttggtggatctaggatcgcctcggttcatcggtgttcctcctgacccgcagtggtcgatcgacacggagatgcacctcaagagcgttgttcatctggacaggtctcaggaggtagtgaacattgttgggagcaacggacagacctcacctagggacaaaagaggtggcacgagaaacagggtcatgagctcggccttcgtccccctgtttcacctcagcatagagctgccaaatgaggaggatgcagaagggacggtgcaggtcctacaggcactcatcgagaagggcaaggcacggaggtgggacaagaacatcctacaccggagcaacatcagttgaggttttcacaacagtagtagaggttggtgttttgattgaagtggaagataaactaaattccaccccgtgactcaggtggattaaatatacaaacaaggcctcaaggcagagcagtcaccagcatacataagcttagtgtgaataagaaaacaaagtgttccataggtggtcaccgttggacacgtgcttcggttttgttttaagcttagtgtgaataagaaaacaaagtgttccataggtgatcaccgttggacacgtgcttcggttttttttttttttttgcggtctaggtgtagcttctagaagttttgtcgacggctcttgtaaatgaagtgtgagagggcttatgttatgtgtagcaacaccactgttttatgccacggctatgtttacaaacttcgccgttcatgggccatggatatttctgatt

SEQ ID NO: 201464 - DNA, 10905 bp, Zea Mays
gccgttgcctccgccgtccgcctccttctccaagcaaacggaactgaaaagaaaaggtcccgccccggcggcggcacccgactctccatccaccgctcgcctccccttgcccctcctctcgtctactcgtcaccctacgctcggctccatcctccccgcctccccacgtgtcctcccgctacatgggagcgcgggctccctagggtgcctcgaccaccgccgccgccatgttcgagggggtggtaagccaggtgctctatggcctcctccgccgctacgtcaagggcatccagaaggagcagcttaagatcggcatctggaaggaagaaatactgcttgaaaatgtagagctgattctggaagcctttgactacctgcagctgccattcgcgctgaaaaatggacgaattgggaagctaagcatccggattccttggaaaaagctaggatgggaccctatcattattgtcatagaagattggagctcagattctctggacaagagggaactagctggaaagttggctaaacttaatgccattgagcttgctaaattttctagaagagttacagataatcaaacgggacaatcatttttgtcctacatatcagcaaagatactggatagtatccaagtttctatgcgaaatgttcatattgtatacatggatacccacaacggtcaagggaactttgtatttggtttggaattcacaagtctctcaatacaaacagatacccagaagcaaagttttacaatttcattgatgactaggtcaagacaagatgaagtaaataagataattgagatatcaaatgttggaatttactgtcatcagctggaagaagagcaggatctatgccatgttggtgctcttgaaaatgaccactcaagggattatcttgtaaatccattttgtgtgactgtatctgtgcttgctaacaaagctgccaagcttgacggtacccctcagtataacatgactgcagagctaactgcattggccctatctgttgatgaaatccagctccaacaaatcttaaatctttgtgattacttcactatctgtgctttgcgaacaaaatatggtcgttaccgtccttctcaaagctctttatctaagagatgtaaaggttggtacagaatgtggtggcaatatgctcagaattctgtattagcagatgttcgcagaagactgaagaaaacttcatggcgttatttgaagcagcgactgaatcaccaactaagatatgtgaaattgtacagaatgaaattggagcttttacagaaaggacagattgttagtgaagacattctacaagagttggaaaatatggacagagaatgtgatatagatgacatacttaactacagaacgattgcagagcaacaactgcaggaatcattggtgaaatcttccatagatactcatagtccaggaagtcctcgaagcgatgaacagttggcaggggcaagccagggatggttaaactggctttctcttggaatgcttggtgttggtggaacagctgatagtagctcatttgctggtgttatttctgaagacattattaaggatatatatgagggaacagaatttcgtccagtttcttctgctgaaaattgtttgaagaaagaaaactactattctttgtttgttagactatctatttctcagatagtcacaactgtcacctccaggaggtttggcacgaagcttgtagatacaatgttttctgggcttggtatggaatgtaaaatatgggatgatgcagcaactattcttgcttggcttgattctcttcgggttatcaacccactgaataaaacgaaaatcttatgggctgaaaagtgtagcaccggtgatggtcttggggcacctgttgtcagtatccaagtcgactttcccaagtcaaatgaaagatcagaagcttcaacaagggtcgttgtccaggaattcaacgccatctatgaaccagaattctttgttaatgtcctgtacatctacaatgtgttttccgctttccaatttcagcatgataggcgacagcctgtggggaggtggagctccggcggctgtggcatgagaggaggggatatgcgacaattgtggcttggcggagaggtactttcttctctaaatcggttcaataatttgggaacaagacttgtctccaaactgaagtacatgtctgctaatcgtaaaaaacttatttgggatttgaggatttatcatttcgtcattaggataccatcacagaattgtgaaaggaaagaacttgccatggttattgatgctggggatgtattcattcagtctaaagatacaattgacgatatttctcgaacacaagaaagcaattcctttcttgatcacatatcaaaaagtcttcctagttatttttctgatgatctgttactcggtatccagttggatgagctttataaccagtttgagcttggccttactgggtttcaggtgaaggtattgttgcctgacagacataatgtttcctctacactgattaagcttgatgcttccattgcacttcgattgtgtgtattcctagatgaaccagtgctaaaacaattggaggtcggttttattgtgtcatctattgatgcatacctctctcagacaatgtacagtaccattgttaatttgcctagaatgaaagaaactaaccttttcaagaacagcgtatttgataataccaagacacatgtacccaagaaattggccttgaatgtgtctgtgtctctgaagctcgccaagttaggtttacatgttgaccttgatggtaattttgaggaaagttctggtctcattgttggcattgaagacattgatatcaggtatgctatctgtgaattgtcagatctttctcttgccatgaagacggtcaatgttactttcagatattggaaggataaatcagattcacatgtgctatgcttatctgggaacttaacacgatgtcctgaaaattctgttgaaacttgtttggatctgcattatagaactcacaagcatgacgatcaaatacatcatgtataccggctgattttatgtgatgttgatctgcatgttaacccatctgttattggtcagataaggatgtttttaagaaaacttgattcaggaccttcaattggcagtgatgttgaatccacaatgattggtcagagttccatgaaatccggggcagctaatggcatacttcccatgttctttttgtcaaatttatgtggtgcagatggcactgtattcgcaggagtttctgttgaccacttcccatttttagttgcagatcacagttgtggatataattttgggtgcttaggaactcaaaatgttgaagcacaagaaagtttatactcaaagaatgagcactgtcatgacacttcaggtttgaatggttatcatgcatcagatctcaccagcaatacatacggtaaaacccagcgttcagattgttcatctggctcatcaaatgaccccaagaatgccagcagaactgttctggatctatcacttatttctgttagaatacattttcctgaatcatgtggtactttagtaacaataaccattcctgaatcgatatcaacactcacttattttgatgcaagctcatgggacttactattgtctgctaacaatttgactcttgcttcaccatggactccaccaaatgtcaacgagctggtctggggcacagcttcacatcgcaatgctagtgtactcaacgttcgagttaaaaaggacttacctgcactgtcaaccgaagtatgtgttggaattcaaaacgtttgttgtgtattaccatccaagttactggctatgtttgttggattctttttgttggatgattggaatcgtattgcagaacaggaattccttgtggcagataacaaccttgaaggcttgagagaatcacatgactgtgtaacatataaatttgatatcagtgattgtgttgtattttttcctgtggaagagcaaggtttatcgtgtctaaagctggaggttccacattttttctgtgagttcattgcgaacggaagctctgtagaatttgcaaagcgtatccccaaagaattcttcagttcagagtgcatagtttccagaagagttgatgtcatctgcatatatgcaagaaatgcatccatatcacttctaattgtaagcgaccaaacagattttatgctaaagcttgatgagaacgttcctaagagaatccattctcttattgaaaagcttgatgccgacgtatggattcaggttccttgcaaagatataccatactcgcagcagcctacttcacctacctccgttatgagcaaaatatcacgatgcaacttgattgctgaagatttatattttataaatgggatggagacagttattggtgttgttgaccagttgatttcgatcggcaatgaaagtaaaatgtacaaaggcaatgcctcacagtttttagatcatagaagtttctgtgagggcaaccctgatcctaatgagtgtaccaatctcactatttcgatcaaggatctgatgattctcttgggccagtctaaagctaaaggtctggcactggagaggattgccactgcaaacatggagtttgatgtttctgctgtactagttggtgaaaaaccagagcgcatagactttgacgttgtttctttaacactgcagtcacctggtggttacacactcatctccattgtttcggatgggccactatctcctgtttttttcaagtttacaaagcaccatactggacaagatgagatattactaagtgtacccctttttgagatctggttatatttacaggattggaatacaattatcaatcattcccattcatacataaagacagaagtaaacagtatgcctgtggagcatgcagctgctttgtctcagtttccagaaatggtatcgtcaccacttattgcatcagaatttggttcaccagatgacttcaacttagtggtaacatgtgaaactatttctggtgtactccatatacctatctgggggaaagaagaaaatcacacaagcaatcacatgggtgtgactcctgcttcttttccaatggaagtgggcactcatgagacagatgatattcaatattgtgaaccaaaaggttgcaagtttgtcaccttaacttttgatactaaacattttgtggtgatgtcaggtgatagctgcataaattttagatgtgatttagagagattgaaggtattgctggaaatgattcaagagaataagggtacctctgttccatttgtgcatatatctaaggttaaatcttctggttatgttcgtcaatcagaaaggaatttggaacatctttctgttgatctacaagctgaatacatggatgttagtttttcacaccagatatttaacttctggcataacatggaactcaaatttcctgctgcatcatctgcatcctctttttattctgtggcattcaaggcaggattgaggaaagggtctcttctgctaagcgatggaaggtggagcagtcatggacctgtaatagagacgttattgaagaatctaactgtgcagttcagtcaaatgaaggataggacagaagtgtctgcttttgttgaccttttagtaaattacaataacattgataaggttatgtgggaaccttttgtagaaccctcaagatttcagttaaatatgctaagaaaatgtggtgattgtggattggatatatcacccagtactgatgtgtgtttaagttcaagcaagcagcttaatctgaatatatcagaacccttaattgaggctcttctcagacttaaccagatgattacagattctcttgatccgagtaatggtagtggtatttgggaagatcctggaatcttgagattaaaccatgatgatgttcgtaccagaagatacgcaccatactttctctcgaatgacacatcattgccctttaggttcaaggtgtaccgaggtgctgttaattcagatgatattggcagtttctctgtaatagatgaaaactctgtgccggcggggtatgctgtcccaatttacgtcgaagaaactcctgatgaatttttcttccaacacagagaagcacgatcatcagaccatctcatcgagaaacgaatgagtgctctatcacactacatgatctccattgagtttgatggaacatcaggcccttcaaaaccaatgtcaatggaccttgtgggcatttacttctttgaagtaaatttctcttcaagtaaaaagccaattctcggcgaagaaagtttaggagcattttcgtctaatgcaaaaggcaacgatgggttaattgtgcctgtggtgctcgatgtttccttacagaactacagcaagcgtatacgagtttattcgacggtaatactatacaatgcaacatcaatgcccctcgagttgaggtttgatataccatttggtcttgcatcaaaggtaattgggcccattcctccaaacaaagagattccactgccggttcatttgtctgaagctggccagattaggtggcaccctgtcggcagaacatacttgtggagtgaaacccgctccttgtcaagtttgctttcacgtgaaaacagggttgggttcatgaaatcatctgtttgttatccttctcaccctagtaatgacccatttcgttgttgtgtatctgttgaagaatacaatgtcccttcatctgttagtaccaagaaaaaacagttgtgcagtgaaagattgaacacacaagtttctggaagttctactccaaatacttttaagcaaaatttgacaaggacacattttatacggcatgtcaagcttaataccccgcttctcataaagaactatctgcctgtttacatttccttggcaatagataatggtgggtctgcgcgggtaatttcgctaaaggaggtagggtctgcctctattttgtttgttgatccctccaatgatcttggaattacaattgatattcaagattataggtccttgaacataaagtttccccgggctgaatcattctcaactacagccaagttaaatggcttcaaattctccataactgagtcaattactttctactcaaatttgtctaattttcctcttaatgttatgctggaaaaatcaatggatgctcgttctggcgcaagagagttgtatctttctgttccattcttgttgtacaattgcacagatctattgcttactgtcactgaaagcagctctgagaggagtgggcctactcttgtgattccccctagttttgaattggatggatatgcaagacatatgcttgaaaagggtggtctttctcttgtcaatccttctgtacaatgctttacaggcaaaatgccccagatatatttgatggatggacactgctcttcttcagatataagttgtacacgtaacagtgagtctgtaaagaaagatttggacaacagtgttaaagcttatatgtttgctcctgatgggcacactccagcaactgaactttcagttaagttgaatgcttctccgcctaataatggaactgaaacaactcggcgaaattggtcaaatcccttcctccttgtccctgccagtggttcaacaaatgttactattcctcagtcatctacttctggtgccttcttagttgcagtggcatctatacctgtttcaacagaactttttggcaggacaagggctattgctttcaggccaagatacgtcatatgtaatgcatgcagcaatgatttgttctttcgacaaaaaggaacacggttttctaagcacttaagttctgggcaacactcttttcttcactggtctgatacagccagagatctgctggtatccattcggattgatggcccaggatggcaatggtcaggaagttttttccctgatcacctgggagatgctcaattgaaaatgcggaatagtgcctcaggtttatcatatatggttcgagttgaagtgcaaaatgccgatctagacttaaacagcaatagattttctggaaaaaataatatcaatactggtacagtactgattctgctttctgatgataagactggttttgtaccttacaggatcgacaatttttcaatggagaaactgcggatatatcaacagagatgtgaatctattgaaacaattgtttatccctacacatcctgtcaatatgcttgggatgagccttgctatcctcatcgccttactgttgagattcctggagaacggagtttgggtacattcaatctggacattctcaatgatgatgttcatgtgtcactaccatccacatccgagaaagctgcaagacaattctgcatctcaatacatgcggaaggagcaattaaggtgctaagtgttcttgattcaaattgccacaataaggaaacaaatgaaaaggattttctgggatcaaaggaacctaaagttgttgatcacaaactggagcttgatatgaattttgctgaggttatcaaattacacttaccattcatcgggatatctttaataagttcttgtccacaggaattgttgtttgcttctgccaaggagatgactgttgttgccatgcagagtttagatcagcagagatttacggttcagatacaatctatgcaaatcgataatcagttccctgatagcccacacccggtcatgttgtcatttgagggcagtcataagggaaaatccatgaacttttttaagagtaaagatactaagctgaaatcagcaaatgacattctttccagtaccagtgaacctgtgctgcagtttgctgcagctaaatggagaaccaaagatgtatcatttgtttcctatcaatatataaacataagtctagcacctcttcgccttgaacttgaagaacgacttgtcttgagcatgattgaattttttagatctgtttcctctcgaataaatattggacacttggagaaaagtattgagctaagtataggtggtgctacggacatgttaagagaatatgaaaaaatctcaaagaatatatcagacaagctcctggtgcaagacagtgaattgttgccttctgttgtcccagttggggctccatggcaacagatacaccttttagccagaaaacagaaaaaggtgtacattgaattgtttcagttgactcctgtcaagttgactttcagttttacgagcacaccttggctcaataggaatgaaggtggttcagaccccagcgtaggtttcaacaacgctactgcaatccagagaggtcttatggccctcttggacgttgaaggagtaccagtttaccttggagaaattatagtggaaaatcttatggccagctggcaatctgttcaggacattcttatgaggcattatagtaggcaaatcctccacgaactttataaggttttgggttctgctggcgttataggaaatcctatgggttttgctaggaatgttgggtttggtttaaaggacttcatatctgcttcaagaaaagggaaattgcagagcccagttgaactattaaacggtatagcacaaggttcaaagactcttattggaagtacggtttatgcagtcagcagtgccacttctcacttcagtaaaactgcttataagggccttgttgcctttacatatgatgagcaagctgcttcgaagatggaagaacgggaaagacagctaggtttgcatggggaaggagtactgaatggttttctagagggtctgactgggctccttcaatcaccgattaggggagctgagaaacatggtcttcccggggtcatctcaggtttagcaatgggaacagctgggcttgtggcacggcctatggctagcattcttgaagccacaggcagaactgcccagagcattagaaaccgaagcaaccctcacgaatccaactacttgcgagtacgtttccccaggcctgttgccagagatcgccctttgtttccctactcctgggaagaagccatcggtgaatcgttgcttgcccaagctgacagtggcagactaaaggaggagacatttgtcatgtgcaagacactcaagggggctgggaagttccttgtgctaactgagaagctgcttctgctagtctcaagcccatacttggtggatctaggatcgcctcggttcatcggtgttcctcctgacccgcagtggtcgatcgacacggagatgcacctcaagagcgttgttcatctggacaggtctcaggaggtagtgaacattgttgggagcaacggacagacctcacctagggacaaaagaggtggcacgagaaacagggtcatgagctcggccttcgtccccctgtttcacctcagcatagagctgccaaatgaggaggatgcagaagggacggtgcaggtcctacaggcactcatcgagaagggcaaggcacggaggtgggacaagaacatcctacaccggagcaacatcagttgaggttttcacaacagtagtagaggttggtgttttgattgaagtggaagataaactaaattccaccccgtgactcaggtggattaaatatacaaacaaggcctcaaggcagagcagtcaccagcatacataagcttagtgtgaataagaaaacaaagtgttccataggtggtcaccgttggacacgtgcttcggttttgttttaagcttagtgtgaataagaaaacaaagtgttccataggtgatcaccgttggacacgtgcttcggttttttttttttttttgcggtctaggtgtagcttctagaagttttgtcgacggctcttgtaaatgaagtgtgagagggcttatgttatgtgtagcaacaccactgttttatgccacggctatgtttacaaacttcgccgttcatgggccatggatatttctgatt

SEQ ID NO: 201465 - DNA, 1121 bp, Zea Mays
aaggtgaaagtcgatgccagtagtagctacagcagttaatgcgaaaaactgaagcatgccacgcctgaccgacccccttctcgcctaatgtccgtgccccgactgcgtctccgccccgactcacccgcagcctgtctctgctcggcggcggccgtctcgactgcgggagaggggagcgccccttcgccgatctgatcgggagctgcaggccaaacggcgaggcgagcccatcaggaaccaccatggcagcggcagccgccgactccgatcccgccgcagctgtggccgacatgtccacctgcgcccattgatcagttgctctctttgcaaagaaacaatagaacgtgtgaggtgggatcttcataaaggcgaaaagtgcccacaaagaatcgtcgcttgtgaatattgcgagtttgaattgcctgcagttgatctccatgagcatcaggatgtatgtggaaaccgaacagaactttgccaaacatgcaggaagtatattagattgtgtgaatggatagggcacgaaatacagtgccatacaagctcaaatggttctgcagacacatccagagcaattccagagagagagctacgaccgccgccgccggtgcggccggcacgaccagcacgtcctgctcatgcttcaccacacaagcggctcctcttcacaatcgctgtcactggaatagcagttatggttggctccatactgttccaaagggacgagagtttctagctccagtggccatggacttactctgtatgtcatgttgtttcttgaccgggagagtcatgccacaggaggtgtatttatgtataataactcctcgaatcagtgcataaatcgagtttgtttgagagcatagccccaggcgtgggtttgtggaaaatgcaaagtaaccgtggataaatgcgttcgcccttggcagttctggaacttctgtttgttctgacatcggacttgcatttgttcgtctgtaaagtcgagatgagttatacaatcggggtatcatatctggaaagcgacacgatgcagcagttgttaatagtttggtttatactgtatcctgtagtgttctaatgtaccaatttgtgggaaactggactatcttcaaacgctg

SEQ ID NO: 201466 - DNA, 2312 bp, Zea Mays
cgtactccctccctccaaccacgcccggccaaacttgccatggcgctaccgtcgtcctcgacccccaccgcgtcggctccggcctccctcggcgagcggtggccgccgctggagtctacccccgcagttttcaaccagttcgtgtggtcgctaggtgtcccggaggacgacgtggagttccacgacgtgtacgggctcgacgccgacgcgttggatatggttccccagcctgtgctcgccgttgttctctgcttccccgatccaccacaggatgcaagttacccttcagaacaactcttaatttctggagaaaaggaaacacaggaccaggtttactttataaaacagatcgaatcattgggaaatgcttgtggaactattgctctactccatgctgttggaaatgcatcttccaaagtcaatttagtggagaattcatgcttggacttgttcttcaaatcaactgctaccatggacccatatgagcgtgctgtgtttctggagaaggatgatacaatggcaagggctcacttacttgctgccaatgatggtgccaccgagctcagtgatcttatagaagagcactacgtttgttttgtgtatgtcaatggaacactttatgagcttgatggaatgaaggatggacctataaagcacggaccctgttctttctataagtttgctgcaggatgttgttcctgttattaaggccatcatgtgcaatatccccaactcaatcaacttcaatcttatggtgctgtcaaggaaagaaaaataatggtggtgctattccttgagctggtaagcggtggaatgcaaaacgcaagggttcaagggaaggggattaaacggatgcctgtttggactgcagctgcgtcactaataagttagatgacccgcttatgtggggattcaagggttttccaacttcggatgcaaagcttggaaggtgggtgctgacagcagaagatatatgcttcaagaatgtagtcatgtcctacatgtttcgacttggtaacatttcatttgaagatatggattgttgccttttgatagaggactacaaggcattttaaggtgtatccagtgaagcatgcaaaataggaaaacgtctagcacaatcctattaaatccagcaaacacctgtctgttccgtacttatgaaatccagtttcacttcaactgccagcaacctttttagaaattcagtttcatggcactcaattcacccaccaagactagcgaattgcagagggttggcatagcttgtcttcttgccataatatcttcagtccctcatttgcagtattgtgtatcagataagattagctgatgcttgctaatctatgtgctgtggtactagtacaagaagcaaatggtatcaaatgtagcgcctcattatattttgttcaactgatattcagatgtccaggcccttcacattatttggttattcttattttttccatttctaaggtgacaaataactgtgcgcacagggaaatgcataccaatcacgagagggggtgggatttatcaagaacacatgaatgaagcccttgacgtgcttagaaatggaggctgggaaaaatagcccaagaagatcagccgattagaagattgaagtggggaacggccagtcttattgtccgagcacctataactccaatagttttgccaattgttcactctggtttcgaaaaggtcatgccagaaaactcgttctttggacggcgaccaccggtgccactctgcagtaagaagatagacatcattgttggagagccaatagagtttgacttgccaagcttgaagcaagaagcatcaacggtaccccatgactcatcctctgaacggaaggggtggccggccattacaccagatgggctggacgaggccgcccagagatggctttaccagaagatgtcagacaaggtccagtctgtgatggagagactgcggaaaacagttaccaaccttaagcagcgttgatcttcatctatcaggcaataccttgttgaactgctgattaggattctttaaccagcttgagttggtggatacagaaatggacaagtggtcgtcacacaagttcgtcaaagtattggtaataatagaattagagctcagattgtttcattttttagtctttttttagttattgttttgaaaggtttcttcattatttacaatcaactgttcaggttgcctgccagttttactgaggcatgaataaaaaaaggcttttgatattcagttgcaaaatcaccatccatttacctgtcttatgtgtagtggtttattttttttgt

SEQ ID NO: 201467 - DNA, 2417 bp, Zea Mays
ctgaaatagcccagattacagtggcagtacacactcggcccgtttcagattcgtgacgtactccctccctccaaccacgcccggccaaacttgccatggcgctaccgtcgtcctcgacccccaccgcgtcggctccggcctccctcggcgagcggtggccgccgctggagtctacccccgcagttttcaaccagttcgtgtggtcgctaggtgtcccggaggacgacgtggagttccacgacgtgtacgggctcgacgccgacgcgttggatatggttccccagcctgtgctcgccgttgttctctgcttccccgatccaccacaggtcaggcaaaggtggcaccatatgtatcttcaagaagtaagcaggattggtgtggcctagcaagcggttgcaggccttcacatgtgcacacagtgctgttggaatcatggcctgcgctcctagagatgggatgcaagttacccttcagaacaactcttaatttctggagaaaaggaaacacaggaccaggtttactttataaaacagatcgaatcattgggaaatgcttgtggaactattgctctactccatgctgttggaaatgcatcttccaaagtcaatttagtcttttgtagtggagaattcatgcttggacttgttcttcaaatcaactgctaccatggacccatatgagcgtgctgtgtttctggagaaggatgatacaatggcaagggctcacttacttgctgccaatgatggtgccaccgagtgatcttatagaagagcactacgtttgttttgtgtatgtcaatggaacactttatgagcttgatggaatgaaggatggacctataaagcacggaccctgttctttctataagtttgctgcaggatgttgttcctgttattaaggccatcatgtgcaatatccccaactcaatcaacttcaatcttatggtgctgtcaaggaaagaaaaataatggtggtgctattccttgagctggttagatgacccgcttatgtggggattcaagggttttccaacttcggatgcaaagcttggaaggtgggtgctgacagcagaagatatatgcttcaagaatgtagtcatgtcctacatgtttcgacttggtaacatttcatttgaagatatggattgttgccttttgatagaggactacaaggcattttaaggtgtatccagtgaagcatgcaaaataggaaaacgtctagcacaatcctattaaatccagcaaacacctgtctgttccgtacttatgaaatccagtttcacttcaactgccagcaacctttttagaaattcagtttcatggcactcaattcacccaccaagactagcgaattgcagagggttggcatagcttgtcttcttgccataatatcttcagtccctcatttgcagtattgtgtatcagataagattagctgatgcttgctaatctatgtgctgtggtactagtacaagaagcaaatggtatcaaatgtagcgcctcattatattttgttcaactgatattcagatgtccaggcccttcacattatttggttattcttattttttccatttctaaggtgacaaataactgtgcgcacagggaaatgcataccaatcacgagagggggtgggatttatcaagaacacatgaatgaagcccttgacgtgcttagaaatggaggctgggaaaaatagcccaagaagatcagccgattagaagattgaagtggggaacggccagtcttattgtccgagcacctataactccaatagttttgccaattgttcactctggtttcgaaaaggtcatgccagaaaactcgttctttggacggcgaccaccggtgccactctgcagtaagaagatagacatcattgttggagagccaatagagtttgacttgccaagcttgaagcaagaagcatcaacggtaccccatgactcatcctctgaacggaaggggtggccggccattacaccagatgggctggacgaggccgcccagagatggctttaccagaagatgtcagacaaggtccagtctgtgatggagagactgcggaaaacagttaccaaccttaagcagcgttgatcttcatctatcaggcaataccttgttgaactgctgattaggattctttaaccagcttgagttggtggatacagaaatggacaagtggtcgtcacacaagttcgtcaaagtattggtaataatagaattagagctcagattgtttcattttttagtctttttttagttattgttttgaaaggtttcttcattatttacaatcaactgttcaggttgcctgccagttttactgaggcatgaataaaaaaaggcttttgatattcagttgcaaaatcaccatccatttacctgtcttatgtgtagtggtttattttttttgt

SEQ ID NO: 201468 - DNA, 2283 bp, Zea Mays
ctgaaatagcccagattacagtggcagtacacactcggcccgtttcagattcgtgacgtactccctccctccaaccacgcccggccaaacttgccatggcgctaccgtcgtcctcgacccccaccgcgtcggctccggcctccctcggcgagcggtggccgccgctggagtctacccccgcagttttcaaccagttcgtgtggtcgctaggtgtcccggaggacgacgtggagttccacgacgtgtacgggctcgacgccgacgcgttggatatggttccccagcctgtgctcgccgttgttctctgcttccccgatccaccacaggatgcaagttacccttcagaacaactcttaatttctggagaaaaggaaacacaggaccaggtttactttataaaacagatcgaatcattgggaaatgcttgtggaactattgctctactccatgctgttggaaatgcatcttccaaagtcaatttagtggagaattcatgcttggacttgttcttcaaatcaactgctaccatggacccatatgagcgtgctgtgtttctggagaaggatgatacaatggcaagggctcacttacttgctgccaatgatggtgccaccgagctcagtgatcttatagaagagcactacgtttgttttgtgtatgtcaatggaacactttatgagcttgatggaatgaaggatggacctataaagcacggaccctgttctttctataagtttgctgcaggatgttgttcctgttattaaggccatcatgtgcaatatccccaactcaatcaacttcaatcttatggtgctgtcaaggaaagaaaaataatggtggtgctattccttgagctggttagatgacccgcttatgtggggattcaagggttttccaacttcggatgcaaagcttggaaggtgggtgctgacagcagaagatatatgcttcaagaatgtagtcatgtcctacatgtttcgacttggtaacatttcatttgaagatatggattgttgccttttgatagaggactacaaggcattttaaggtgtatccagtgaagcatgcaaaataggaaaacgtctagcacaatcctattaaatccagcaaacacctgtctgttccgtacttatgaaatccagtttcacttcaactgccagcaacctttttagaaattcagtttcatggcactcaattcacccaccaagactagcgaattgcagagggttggcatagcttgtcttcttgccataatatcttcagtccctcatttgcagtattgtgtatcagataagattagctgatgcttgctaatctatgtgctgtggtactagtacaagaagcaaatggtatcaaatgtagcgcctcattatattttgttcaactgatattcagatgtccaggcccttcacattatttggttattcttattttttccatttctaaggtgacaaataactgtgcgcacagggaaatgcataccaatcacgagagggggtgggatttatcaagaacacatgaatgaagcccttgacgtgcttagaaatggaggctgggaaaaatagcccaagaagatcagccgattagaagattgaagtggggaacggccagtcttattgtccgagcacctataactccaatagttttgccaattgttcactctggtttcgaaaaggtcatgccagaaaactcgttctttggacggcgaccaccggtgccactctgcagtaagaagatagacatcattgttggagagccaatagagtttgacttgccaagcttgaagcaagaagcatcaacggtaccccatgactcatcctctgaacggaaggggtggccggccattacaccagatgggctggacgaggccgcccagagatggctttaccagaagatgtcagacaaggtccagtctgtgatggagagactgcggaaaacagttaccaaccttaagcagcgttgatcttcatctatcaggcaataccttgttgaactgctgattaggattctttaaccagcttgagttggtggatacagaaatggacaagtggtcgtcacacaagttcgtcaaagtattggtaataatagaattagagctcagattgtttcattttttagtctttttttagttattgttttgaaaggtttcttcattatttacaatcaactgttcaggttgcctgccagttttactgaggcatgaataaaaaaaggcttttgatattcagttgcaaaatcaccatccatttacctgtcttatgtgtagtggtttattttttttgt

SEQ ID NO: 201469 - DNA, 1618 bp, Zea Mays
cataattccaaaaatctctcggttgcggagattcctctccctccccgtgcgccagcctacagcctaaacgcaccgcaccagacaagaaacaaggggagggagaaccgagagcggcggcgaccggcgagagagagggagggagggacgagatagattcataggtactagcggaggaagcgagtcaagggaaagatgcggactcccgcgatgcgcgttgcctaaaagttccatttcattccttccggcggaggccgggcaatacgctatctctggcgagagagatgccggcgacaggagaaatccacggcctttattagagagaagagatcctattcctacggttctcctcgcatcctgttgcttctgcgtgcggccagacgcgggcacgatatgcaggccgccgccgccgccgccccgtggacgacgaagaccctgccggtgtttgggaaccacctcggcaaccccacgcgcttcacaggcgcctcctcgtccttccacagtacgcccgcctccttcgccaagtggaggaacaaatgggactgccacaagagcgaaaaaggagcacgaaaggcatccaggaattatgagaggtatgtggttcggcaaaaacgagcagaaggaaagaaggccctaaaggattatcttctctatggaaagtcattgcctcatttacaggatggaagcacaggtagctttgctaactcacatgcaattccgaggttcaaaacgtttaggaaaggacctcaaactcactggtcatcgaattcatggcaaggcgtacacaatcacagaaagaataaaaaggacaaggaaaggttctgcaacttcttccatgatgaccatcatgtgcaccctgatgacatctttgaagctgtcttcggggcacattatggttttacttggtctcaaatatcgtgggaagggtttcacttcagggacaaatcgttcagatttagatggagcggccgtgaatcacgcagagagaaaattccatgtgacagcgaagatgaagaaagcgcggatgagagcagagaaacagccagcgttggttcacatgctcacagggtcatccttggattacaaccatgtggtccactaactctagaagatgttaaaactgctttccgggcatctgcgctgcggtggcaccctgacaggcacccggggtcatcacaggccatggctgaggagaagtttaagctgtgcgtgaatgcgtacaattcactctgcagtgtcctcaaggctgcttaggttgtgtttgctgtcactggaggatgttagcttgttatggtatatcagttttgaagggctcaggggctgaacaatttggcggggaaaccactggcgaccatggatgcagtgcagtgggtttgtggagtgtgatgatttggccggggtaaagcgaggctggccggtgtggtcgccatctcgcagctttagtccaaagtacctgtactgatatgtactacaatcgcagcaaatcaaatgaaaacaaatctgctaatgcaacacagtgactgaaagaatgaatgaatgaatgaaaagactgatactcatggtaggctggtagcaggggcaggcaaaagcatcattccgacacaattaggagaggagaatc

SEQ ID NO: 201470 - DNA, 1876 bp, Zea Mays
cagcctacagcctaaacgcaccgcaccagacaagaaacaaggggagggagaaccgagagcggcggcgaccggcgagagagagggagggagggacgagatagattcataggtactagcggaggaagcgagtcaagggaaagatgcggactcccgcgatgcgcgttgcctaaaagttccatttcattccttccggcggaggccgggcaatacgctatctctggcgagagagatgccggcgacaggagaaatccacggcctttattagagagaagagatcctattcctacggttctcctcgcatcctgttgcttctgcgtgcggccagacgcgggcacgatatgcaggccgccgccgccgccgccccgtggacgacgaagaccctgccggtgtttgggaaccacctcggcaaccccacgcgcttcacaggcgcctcctcgtccttccacagtacgcccgcctccttcgccaagtggaggaacaaatgggactgccacaagtcattgtcaggggacaaaatttctcctttttgagggcagttctacgcatataatttacattctgacagatttcctgctgccaaaacattgtgcagagcgaaaaaggagcacgaaaggcatccaggaattatgagaggtatgtggttcggcaaaaacgagcagaaggaaagaaggccctaaaggattatcttctctatggaaagtcattgcctcatttacaggatggaagcacaggtagctttgctaactcacatgcaattccgaggttcaaaacgtttaggaaaggacctcaaactcactggtcatcgaattcatggcaaggcgtacacaatcacagaaagaataaaaaggacaaggaaaggttctgcaacttcttccatgatgaccatcatgtgcaccctgatgacatctttgaagctgtcttcggggcacattatggttttacttggtctcaaatatcgtgggaagggtttcacttcagggacaaatcgttcagatttagatggagcggccgtgaatcacgcagagagaaaattccatgtgacagcgaagatgaagaaagcgcggatgagagcagagaaacagccagcgttggttcacatgctcacagggtcatccttggattacaaccatgtggtccactaactctagaagatgttaaaactgctttccgggcatctgcgctgcggtggcaccctgacaggcacccggggtcatcacaggccatggctgaggagaagtttaagctgtgcgtgaatgcgtacaattcactctgcagtgtcctcaaggctgcttaggttgtgtttgctgtcactggaggatgttagcttgttatggtatatcagttttgaagggctcaggggctgaacaatttggcggggaaaccactggcgaccatggatgcagtgcagtgggttgttttgtttcactttttatttcgattgagatagtaaggggaaacttaaatccccggacccctgcctttaaaggctagtttgggagccacaaaaccagagggggttggagggactaaaatctacttcttattcaaaattgaataagaaagtgattttatcccctccaatcccctccgggttttgaactcccaaactagccctaaaccctttgggatctctgccttttctcggggtgaggaagcagtccatcggggtaccatttgaattagacatttatttccttatgtgaggttttcctccctgtatttggcctcccttgctttcaaactagtcccaaaagggataggagcgccactgtttgttgttgtactaacttgtacactagtgtgaattgtaacatttgattcataaaagtggaacaaataaaaatacaaaggggcatgtgaggcatgagaatccttc

SEQ ID NO: 201471 - DNA, 1914 bp, Zea Mays
cagcctacagcctaaacgcaccgcaccagacaagaaacaaggggagggagaaccgagagcggcggcgaccggcgagagagagggagggagggacgagatagattcataggtactagcggaggaagcgagtcaagggaaagatgcggactcccgcgatgcgcgttgcctaaaagttccatttcattccttccggcggaggccgggcaatacgctatctctggcgagagagatgccggcgacaggagaaatccacggcctttattagagagaagagatcctattcctacggttctcctcgcatcctgttgcttctgcgtgcggccagacgcgggcacgatatgcaggccgccgccgccgccgccccgtggacgacgaagaccctgccggtgtttgggaaccacctcggcaaccccacgcgcttcacaggcgcctcctcgtccttccacagtacgcccgcctccttcgccaagtggaggaacaaatgggactgccacaagagcgaaaaaggagcacgaaaggcatccagggaaaggcagccttgccagccgaggcgagccggattggctctcttggccaagcaagaacaaaccttgaaagcccagaataacgaggcaatcaataaaggaatcaaacactcagaagtttgctcagccaggcaaaaattatgagaggtatgtggttcggcaaaaacgagcagaaggaaagaaggccctaaaggattatcttctctatggaaagtcattgcctcatttacaggatggaagcacaggtagctttgctaactcacatgcaattccgaggttcaaaacgtttaggaaaggacctcaaactcactggtcatcgaattcatggcaaggcgtacacaatcacagaaagaataaaaaggacaaggaaaggttctgcaacttcttccatgatgaccatcatgtgcaccctgatgacatctttgaagctgtcttcggggcacattatggttttacttggtctcaaatatcgtgggaagggtttcacttcagggacaaatcgttcagatttagatggagcggccgtgaatcacgcagagagaaaattccatgtgacagcgaagatgaagaaagcgcggatgagagcagagaaacagccagcgttggttcacatgctcacagggtcatccttggattacaaccatgtggtccactaactctagaagatgttaaaactgctttccgggcatctgcgctgcggtggcaccctgacaggcacccggggtcatcacaggccatggctgaggagaagtttaagctgtgcgtgaatgcgtacaattcactctgcagtgtcctcaaggctgcttaggttgtgtttgctgtcactggaggatgttagcttgttatggtatatcagttttgaagggctcaggggctgaacaatttggcggggaaaccactggcgaccatggatgcagtgcagtgggttgttttgtttcactttttatttcgattgagatagtaaggggaaacttaaatccccggacccctgcctttaaaggctagtttgggagccacaaaaccagagggggttggagggactaaaatctacttcttattcaaaattgaataagaaagtgattttatcccctccaatcccctccgggttttgaactcccaaactagccctaaaccctttgggatctctgccttttctcggggtgaggaagcagtccatcggggtaccatttgaattagacatttatttccttatgtgaggttttcctccctgtatttggcctcccttgctttcaaactagtcccaaaagggataggagcgccactgtttgttgttgtactaacttgtacactagtgtgaattgtaacatttgattcataaaagtggaacaaataaaaatacaaaggggcatgtgaggcatgagaatccttc

SEQ ID NO: 201472 - DNA, 944 bp, Zea Mays
caagaaatttactagcatttacaattatgagaggtatgtggttcggcaaaaacgagcagaaggaaagaaggccctaaaggattatcttctctatggaaagtcattgcctcatttacaggatggaagcacaggtagctttgctaactcacatgcaattccgaggttcaaaacgtttaggaaaggacctcaaactcactggtcatcgaattcatggcaaggcgtacacaatcacagaaagaataaaaaggacaaggaaaggttctgcaacttcttccatgatgaccatcatgtgcaccctgatgacatctttgaagctgtcttcggggcacattatggttttacttggtctcaaatatcgtgggaagggtttcacttcagggacaaatcgttcagatttagatggagcggccgtgaatcacgcagagagaaaattccatgtgacagcgaagatgaagaaagcgcggatgagagcagagaaacagccagcgttggttcacatgctcacagggtcatccttggattacaaccatgtggtccactaactctagaagatgttaaaactgctttccgggcatctgcgctgcggtggcaccctgacaggcacccggggtcatcacaggccatggctgaggagaagtttaagctgtgcgtgaatgcgtacaattcactctgcagtgtcctcaaggctgcttaggtttgtggagtgtgatgatttggccggggtaaagcgaggctggccggtgtggtcgccatctcgcagctttagtccaaagtacctgtactgatatgtactacaatcgcagcaaatcaaatgaaaacaaatctgctaatgcaacacagtgactgaaagaatgaatgaatgaatgaaaagactgatactcatggtaggctggtagcaggggcaggcaaaagcatcattccgacacaattaggagaggagaatc

SEQ ID NO: 201473 - DNA, 1070 bp, Zea Mays
  misc_feature (1)..(1): n is a, c, g, or t
natgagatgccggcagggagcggggccccagcgctggcgcggcagggctcggtctactcgctcacgttcgacgagttccagaccacgctcggcggcgccagcaaggacttcggctccatgaacatggacgagctgctgcgcaacatctggacagccgaggagtctaacgccatggctgcggccgccccggccacggccacggccacggcggccgcatccgtggacgcgcacgcgcagcagcagcagcagcagcagcacggggcgcccatccagcgccagggctccttcacgctgccccgcacactcagccagaagacggtcgacgaggtctggcgcgagatcgtgagcctcaccagcggcgaggacgcgcagcaggttgcggctcccgctcccgctcccgcgcccgagcccgagcccgcgcccgcgcccgcgccgctgccggcgcaggcgcaggcgcagcagacgctggggtccatgactctggaggagttcctggtacgcgccggcgtggttcgtgaggacatgggggggcaccagaccctcctgctgcagccgcacgcgcaggggcttttctcccaggggaatgcggtcgcgccgcagaccctgcagctgggaaacgggatggtggccggggtcgtcgggcagggcctcggaggaggggtgacggtggcggctccgacgacgccggtcgtgttcaacgggttgggaaaggtggaggcgggtgatctgtcgtcgctgtcgccggtgccgtatccgttcgacactgcgctgaggatgcggaagggacccaccgtcgagaaggtggtggagaggaggcagcgccgcatgatcaagaacagggagtcggccgccaggtcgcgtgcgaggaagcaggcgtacataatggagctggaagctgaggtggcaaaactcaaggaccagaatgaggagttgcagaaaaagcaggttgaaatgctaaagaagcaaaaggatgagcggaagacagtagatctttctggctgccgattttgatgcgctgcatattcatcaactgggaaatgacggttcccttcagacaatgtgtttttttt

SEQ ID NO: 201474 - DNA, 1112 bp, Zea Mays
  misc_feature (1)..(1): n is a, c, g, or t
natgagatgccggcagggagcggggccccagcgctggcgcggcagggctcggtctactcgctcacgttcgacgagttccagaccacgctcggcggcgccagcaaggacttcggctccatgaacatggacgagctgctgcgcaacatctggacagccgaggagtctaacgccatggctgcggccgccccggccacggccacggccacggcggccgcatccgtggacgcgcacgcgcagcagcagcagcagcagcagcacggggcgcccatccagcgccagggctccttcacgctgccccgcacactcagccagaagacggtcgacgaggtctggcgcgagatcgtgagcctcaccagcggcgaggacgcgcagcaggttgcggctcccgctcccgctcccgcgcccgagcccgagcccgcgcccgcgcccgcgccgctgccggcgcaggcgcaggcgcagcagacgctggggtccatgactctggaggagttcctggtacgcgccggcgtggttcgtgaggacatgggggggcaccagaccctcctgctgcagccgcacgcgcaggggcttttctcccaggggaatgcggtcgcgccgcagaccctgcagctgggaaacgggatggtggccggggtcgtcgggcagggcctcggaggaggggtgacggtggcggctccgacgacgccggtcgtgttcaacgggttgggaaaggtggaggcgggtgatctgtcgtcgctgtcgccggtgccgtatccgttcgacactgcgctgaggatgcggaagggacccaccgtcgagaaggtggtggagaggaggcagcgccgcatgatcaagaacagggagtcggccgccaggtcgcgtgcgaggaagcagtaaaaacttgtcgcaaatggaactccatggtgactatatttggcgtacataatggagctggaagctgaggtggcaaaactcaaggaccagaatgaggagttgcagaaaaagcaggttgaaatgctaaagaagcaaaaggatgagcggaagacagtagatctttctggctgccgattttgatgcgctgcatattcatcaactgggaaatgacggttcccttcagacaatgtgtttttttt

SEQ ID NO: 201475 - DNA, 392 bp, Zea Mays
ttttttttttgtaaattggtaactgtatagatttgatttcatacatggaagcaggtgacgatggtaaacagaatgccacttgtgaagtaagcctaaaaaccggaacaacagttcatgacttcagacaagagatgagctggtatggccctatatatgccttaacagccatgcccttaccttacctctgtattatatttgtaaatccattggtctcgtgccttataaaccatatggcatcaagcagcaggaaccttccttccatcttcaatgaagaaaatggccgactcaggtacctgataaaggacaaaagcaatgacaattcaataacaaaattcaacctgcctctgatggaagctataacattcttaaccaactccagcacatggtgactg

SEQ ID NO: 201476 - DNA, 1879 bp, Zea Mays
ttttcttatagttttatctgacaaaggtgggtttggagtagcttggttttctgctaaggttattgatataaatggaaataatgtttttgtcaactatgacaaccacaatggatctggtcctcatgaagaatgggtgccattgcgacaagagggggataagccgcctcagatacgtcttgcgcaccctgctaccctctcaaaattcaaaactaggaaacgactcagggaaacagcaggaagttgtttatgggttatcggagatcatgtagacgcttgggtcaacaatagctgttggcgagagggagttatttctcagaattatgagactgatgagacgaaatatgatgtacatttttcagttggaggtggtggtgagtccttagtagttgatgcttggagccttcgtccatcgcgtgtttggaaagatggtcaatgggtagagtggtcccatgcaagagaaaggaaatccaaatctaataagggcgattcacctcctgagaaacgccaaagaatcgacttgcttcaaactggtggcaatctatctgttcttggcgaagtggggggttcttcgaaggacaataatataaacaatgcaaaaaacccggaggaattaaagccattgtctttgtctcagggggaaattgttttcaacattgggaaaagtgtagttgagaataaatctgattctcttgcattcagacgtcctggactacaaaaagaaggatcaaaggtcgtctatggtgttccaaaacatggaaagaagaagaagtttatggaagtaagcaaacattatgatgcaggccaatctgacaagatttctgagggcaattcatctaacagattcgtgaaacatctgatgccacaattgccaaggccacgtgaaaatgcttccaaagttgaccctattagaggaaggagagtaggtgaaacaaggtctagattacctaaacctacgaagtcccacaatgttggagctagcagtgttcctggaaaggattccttgcctatgcaaatgcatgttccaaattctggtgtttctgaaaggagttctagttttgcaggaagttcgacaagcacttccaacaatgagaagcccacttcagaaaataataatccggtgcttggtgtgggccttagaactgaagtttcttctggtcctgaactgcaaactgcatctactgttcctagttccaagccaaatgtatccactactaatcgagctaaaaggaaatatgttcccactgtcagtaacacaaacagaggtatactaaaaacctctgaaaagtcgagttctgattctgctgagccccgaaggactacttctgattctgctgaacctagacgatctaacaggcgaattcaaccaacttcaaggttactagagggcttgcaaagttccctcgtaatctcgaaagttcctggcgagaaggttcataggagcaattacaaaagtgcatcctcaagagggagaactcaagctcatgggtgagtgaaggcaccacatagctcatagctgcttttggtgggatagctctcgtgtacatagctgtagccgtccagtatggaaggaggatagggttggagtaggaagtctttattggagcgcaaggattcagatgtattataaactagcttaagtgcattgtgttaaccttttcttttacttgctcgaattatacttttccgtgttgtagaatacctggaaatatccttttagtatgtgtggatacaccgggaaagaaattgggtgccgtttaaattcatccgataatttaacgtgagtctgaacgtcaatttgactcgctactatcgtttgatcatatcattccttttctaagtcgtctacctgcagttgcagaagctggatggtgctctgctt

SEQ ID NO: 201477 - DNA, 4806 bp, Zea Mays
ttcaataggtgtttcttctgttgattctcctgctttactagctgagaaggatttgaatatgtccacagtgaatactgaggagccattcaaggaaggggttaagtccgctttaggagatcaacacaatggtatttcttctggctctggacaaggaggggaaatgccagctgtcccaatggactcaaagattgccgtgtatagtggtactgtttctgctacagaaagggagaaattcaaggagcagcctaattctttgggttgtttgaccacaggagaaactcaggataaatcagatagtatggatccaaccacagcatctacattgggtggaaaggtggctgtgaagattgtaaaaactccactgaatgcaagtgatgatttgaatgcacatatgcaagatatagtgttaaatcaaggtacagattgtagttctggtactgtgccatctcaaggaaacgaaggctcaagcttattggaacctggtaatggtgatggaatctgcactggggttacatgtgggtccccttcagtgattagttgtgctgaatcctgtccccaagaaggtggacatggcagcactgctttacttcatcacacactatgtgggcaatctgaggatcctgaagatcatggggcctcagttgatggtatccagagctcaaaacaatgcaataccagaaatatagaatctgcacctggttctcaggagactagtgcagcaggaggtgatagaagcttctcatttgaggtgggagctccaccaaatgttgctgagaaagcccatagccctgtttggagccctttccctaaatacattacttctcagagtagcaagaaaatactcaagctggaggttctttgaaggatactagtgatgatagtaagaaaatatctactgtggagtctggtaaagaacagctatcagaaaggaaagtaactgaaagttctgggggtggcctctcagacaactgcaatatagacgacatcattaagggtagaagttcaccgccgcggcagcatccaatccctgagtgttctgatttagtgaattttccattcacagatccacagcatttgcagctacgtgcacagatatttgtttatggagctcttattcaaggaacaccaccaggagaggcttacatggtggcggcttttggagaacctgtaggtggtggcaaacctacatgggaggctgcttggcgagctgcttttgaaagatttcagtataaaaaatcacctcatgtcagtttagagactcccacaagttcacttataggtagttctgtgcctgagaaagctagcaaaggtacagcaattacaactgtgccagctagcaaaaaagttggtaaaactgtggcgccagcacatcctgctgtaaccctacactctccaacttctgattttccttttggtagttctacatttaatctgcaacgaggcactcatctggattttagccaggcagtatcaccatttgcgtataattcacacatgagacatccgtctcctggtgttgccccctggtatacgcagagccctggtccacgccctgcagcctggttaattccaccacaaaacttaatatttgattcatcaatgcaaccggttattcctacaaatgaaactgcgaagggtgcatcatccaaaaacatatccgtttcacatactgtttcatctggtgttcttcccagcctggcaccttctattgtttcttctccaatagcagttgtgagtgatggaaaacagaaggctgcttctagctctaagcgtggcacaacatcacaaaagtcaagaaaaaaaaagaaagcttcagcaagttcagaacagcaacctgtaattgcttctcctcatctcaaaatgaacatgccatcttttactcctgccattaagcacacagcaggattgaccttatgcggtagcaagcctgttcctaacatgggccagattgcctctgaacataactaccagatcactggtggtatggatagtgatcaaagaatcatcttttcagaacagatccgtggtgcagtagaacaatcagctgcacaagctaaaagtgcaagcattgactcagtggaggcagttaagcacaaggagggcatatggagccatctatctacaatctcaaggaataagttacctccaaaagttgaagagaaacttacctcagttgcagctgctgctgaagcagcagtttctgttgcaaaggcagctgcagaagctgccaagatggcgtcagaggctgcattgcaggcaaaaatgatggcagatgaagctcttagctcttctatatctgtaatgtccatgcatcacgaagctgatcaatataatgtcattagcagtccgcctatcttgtcaagttcaacgccagcatcatctctgaaaaccaagaacaagagtcatgccccaggttccatcatttctgtggcacgggaggctgctagaaagagggttgaagaggcatctgcagctgcaaaacgtgctgaaaacttggatgccatattgaaagctgcagagcttgctgcggaagctgtgttcagggcaggaaccattattggaatgggagaaccactaccttttaccctaagagagcttttggaagctgggccgaatggctactggaagtctgcgagtgcgagaaataaatctggaagttgtaatgataatccagtaacagaaacattggaggtagatgcacctgctaactttaacaaatctggcagaaagcgcggtcggaaacctaaatatgatcaagcactaccaaattcggagccatcttcaagctgcaaagaattacagtcatatggaatacactcaggagtaggacatggagttgttgaagatgttcccattactgtgtcacctaatggtaacaatgttacatcaccaataaacattatctggaatggcattgaaaagggatctgcagttgaggttttatctgacaaaggtgggtttggagtagcttggttttctgctaaggttattgatataaatggaaataatgtttttgtcaactatgacaaccacaatggatctggtcctcatgaagaatgggtgccattgcgacaagagggggataagccgcctcagatacgtcttgcgcaccctgctaccctctcaaaattcaaaactaggaaacgactcagggaaacagcaggaagttgtttatgggttatcggagatcatgtagacgcttgggtcaacaatagctgttggcgagagggagttatttctcagaattatgagactgatgagacgaaatatgatgtacatttttcagttggaggtggtggtgagtccttagtagttgatgcttggagccttcgtccatcgcgtgtttggaaagatggtcaatgggtagagtggtcccatgcaagagaaaggaaatccaaatctaataagggcgattcacctcctgagaaacgccaaagaatcgacttgcttcaaactggtggcaatctatctgttcttggcgaagtggggggttcttcgaaggacaataatataaacaatgcaaaaaacccggaggaattaaagccattgtctttgtctcagggggaaattgttttcaacattgggaaaagtgtagttgagaataaatctgattctcttgcattcagacgtcctggactacaaaaagaaggatcaaaggtcgtctatggtgttccaaaacatggaaagaagaagaagtttatggaagtaagcaaacattatgatgcaggccaatctgacaagatttctgagggcaattcatctaacagattcgtgaaacatctgatgccacaattgccaaggccacgtgaaaatgcttccaaagttgaccctattagaggaaggagagtaggtgaaacaaggtctagattacctaaacctacgaagtcccacaatgttggagctagcagtgttcctggaaaggattccttgcctatgcaaatgcatgttccaaattctggtgtttctgaaaggagttctagttttgcaggaagttcgacaagcacttccaacaatgagaagcccacttcagaaaataataatccggtgcttggtgtgggccttagaactgaagtttcttctggtcctgaactgcaaactgcatctactgttcctagttccaagccaaatgtatccactactaatcgagctaaaaggaaatatgttcccactgtcagtaacacaaacagaggtatactaaaaacctctgaaaagtcgagttctgattctgctgagccccgaaggactacttctgattctgctgaacctagacgatctaacaggcgaattcaaccaacttcaaggttactagagggcttgcaaagttccctcgtaatctcgaaagttcctggcgagaaggttcataggagcaattacaaaagtgcatcctcaagagggagaactcaagctcatgggtgagtgaaggcaccacatagctcatagctgcttttggtgggatagctctcgtgtacatagctgtagccgtccagtatggaaggaggatagggttggagtaggaagtctttattggagcgcaaggattcagatgtattataaactagcttaagtgcattgtgttaaccttttcttttacttgctcgaattatacttttccgtgttgtagaatacctggaaatatccttttagtatgtgtggatacaccgggaaagaaattgggtgccgtttaaattcatccgataatttaacgtgagtctgaacgtcaatttgactcgctactatcgtttgatcatatcattccttttctaagtcgtctacctgcagttgcagaagctggatggtgctctgctt

SEQ ID NO: 201478 - DNA, 6735 bp, Zea Mays
cgtcgctgctgcaggagctagggtttccggcgtgggcaaccggggtatgtgcagcagctgccgcactgcaggatctagggttccgacgactccgctcacggatggagggtggtagaagggcgagcgaatccctctcggcatacacccatggatcatgatgatactgattttcagagccaaaactttcaactagctggtgaaggcagtaacaaattctcatcagatacagaagcatttttcagtgtacaagggcacgggaatagttggattgaggttctgtccactggaagcagtgttgttgattttagctctagcgcagctgaatcttgctcaatatctaaaactaataatgtctggtcagaggcaacatccactgaatctgtcgaaatgctattgaaatcggtgggagaaaatgagacaactggtgacatggataataatgcccaccttaagttaagtggtatggacagtcaaattgatcaatcgagtgtccatcctaaatctagtaactccctgccagatagtactgtagtgccaactgaggaagatcagtctttgagtactcattctagaatgacagacgatcttgatcgttctcagatatctcattctataatgactgccgacctttcaaacaccgagagtcagcttgaacattttcggcctttcttaatggacaagaaagctgagcaggcagtggattctgttggtgagaagtgcattgcaggtgagaagttgtcctcttcaaacaacgcaccaggaagctacccagccattgacaactattttggggcaggtcatgatgatcgttctttggacaaacttaatataccctcaactggagtagattcaaagaacttgaataatgaacctttcccagagttggctcccctgcagaacatatatactgattcatatcacttcaaggaagatactacagaatccgaggctggtgttactcctcaagattcaaagtttcgtcatatcaacgaaaataaagttgaaggtggactacaagaactgcaaagtttgtcatgtgctggtcagtccttgggcgctgtaaacttgtctagtcaagcaagcaatgaaactcttttgtcagaaagttctgatggattgctagaggccataacaaatccagttaagatgctgcacaggagtgatgatacttgcaataaagtgaacagcactcctcaaccatctttttcagcagtgcaacatggagctgaaggcctggaaaattcagttcacaggagcaatgagttcgttgttaaggagtttagtatcggttcaaattctcttttatctcaccaacctgaggcagacccaaaattttttaatccacatcctattagttctctgtctccgaaaagtaaaatttccgatgccacttgtgttcctgaagaaacaaagaatgttggatccaatagtataaacacctgctgtacaggtgatgaatcaaaacatgtagtgttggagaaccgacaatattctgttgacaacctaaaaagtggtgacatgggagaaaagatgtctggggaggaaatacccgcagtttcagggaacattgatcaaatgatagagaatgatcatgaagaaaaggctgccaatgctactggtacatccaaagataaggttgacccttctgacagtattgcacttgaaaactttgcagctgacactttcaatgcttcagaggattcagacattccgtcactaaatcataagaggtcatttgaggaacatgaatcttctgctttaggagtggagcctaaaaacacaaatttactccaatctacttctgggcttcaagagaaaatttcagcatcagtgatcagttctagtagtggcatcacacctaccattgttactgacaactttgatatttctgaggataaaaatggctgttcaataggtgtttcttctgttgattctcctgctttactagctgagaaggatttgaatatgtccacagtgaatactgaggagccattcaaggaaggggttaagtccgctttaggagatcaacacaatggtatttcttctggctctggacaaggaggggaaatgccagctgtcccaatggactcaaagattgccgtgtatagtggtactgtttctgctacagaaagggagaaattcaaggagcagcctaattctttgggttgtttgaccacaggagaaactcaggataaatcagatagtatggatccaaccacagcatctacattgggtggaaaggtggctgtgaagattgtaaaaactccactgaatgcaagtgatgatttgaatgcacatatgcaagatatagtgttaaatcaaggtacagattgtagttctggtactgtgccatctcaaggaaacgaaggctcaagcttattggaacctggtaatggtgatggaatctgcactggggttacatgtgggtccccttcagtgattagttgtgctgaatcctgtccccaagaaggtggacatggcagcactgctttacttcatcacacactatgtgggcaatctgaggatcctgaagatcatggggcctcagttgatggtatccagagctcaaaacaatgcaataccagaaatatagaatctgcacctggttctcaggagactagtgcagcaggaggtgatagaagcttctcatttgaggtgggagctccaccaaatgttgctgagaaagcccatagccctgtttggagccctttccctaaatacattacttctcagagtagcaagatggccacagaaaatactcaagctggaggttctttgaaggatactagtgatgatagtaagaaaatatctactgtggagtctggtaaagaacagctatcagaaaggaaagtaactgaaagttctgggggtggcctctcagacaactgcaatatagacgacatcattaagggtagaagttcaccgccgcggcagcatccaatccctgagtgttctgtttcttctgcagatttagtgaattttccattcacagatccacagcatttgcagctacgtgcacagatatttgtttatggagctcttattcaaggaacaccaccaggagaggcttacatggtggcggcttttggagaacctgtaggtggtggcaaacctacatgggaggctgcttggcgagctgcttttgaaagatttcagtataaaaaatcacctcatgtcagtttagagactcccacaagttcacttataggtagttctgtgcctgagaaagctagcaaaggtacagcaattacaactgtgccagctagcaaaaaagttggtaaaactgtggcgccagcacatcctgctgtaaccctacactctccaacttctgattttccttttggtagttctacatttaatctgcaacgaggcactcatctggattttagccaggcagtatcaccatttgcgtataattcacacatgagacatccgtctcctggtgttgccccctggtatacgcagagccctggtccacgccctgcagcctggttaattccaccacaaaacttaatatttgattcatcaatgcaaccggttattcctacaaatgaaactgcgaagggtgcatcatccaaaaacatatccgtttcacatactgtttcatctggtgttcttcccagcctggcaccttctattgtttcttctccaatagcagttgtgagtgatggaaaacagaaggctgcttctagctctaagcgtggcacaacatcacaaaagtcaagaaaaaaaaagaaagcttcagcaagttcagaacagcaacctgtaattgcttctcctcatctcaaaatgaacatgccatcttttactcctgccattaagcacacagcaggattgaccttatgcggtagcaagcctgttcctaacatgggccagattgcctctgaacataactaccagatcactggtggtatggatagtgatcaaagaatcatcttttcagaacagatccgtggtgcagtagaacaatcagctgcacaagctaaaagtgcaagcattgactcagtggaggcagttaagcacaaggagggcatatggagccatctatctacaatctcaaggaataagttacctccaaaagttgaagagaaacttacctcagttgcagctgctgctgaagcagcagtttctgttgcaaaggcagctgcagaagctgccaagatggcgtcagaggctgcattgcaggcaaaaatgatggcagatgaagctcttagctcttctatatctgtaatgtccatgcatcacgaagctgatcaatataatgtcattagcagtccgcctatcttgtcaagttcaacgccagcatcatctctgaaaaccaagaacaagagtcatgccccaggttccatcatttctgtggcacgggaggctgctagaaagagggttgaagaggcatctgcagctgcaaaacgtgctgaaaacttggatgccatattgaaagctgcagagcttgctgcggaagctgtgttcagggcaggaaccattattggaatgggagaaccactaccttttaccctaagagagcttttggaagctgggccgaatggctactggaagtctgcgagtgcgagaaataaatctggaagttgtaatgataatccagtaacagaaacattggaggtagatgcacctgctaactttaacaaatctggcagaaagcgcggtcggaaacctaaatatgatcaagcactaccaaattcggagccatcttcaagctgcaaagaattacagtcatatggaatacactcaggagtaggacatggagttgttgaagatgttcccattactgtgtcacctaatggtaacaatgttacatcaccaataaacattatctggaatggcattgaaaagggatctgcagttgaggttttatctgacaaaggtgggtttggagtagcttggttttctgctaaggttattgatataaatggaaataatgtttttgtcaactatgacaaccacaatggatctggtcctcatgaagaatgggtgccattgcgacaagagggggataagccgcctcagatacgtcttgcgcaccctgctaccctctcaaaattcaaaactaggaaacgactcagggaaacagcaggaagttgtttatgggttatcggagatcatgtagacgcttgggtcaacaatagctgttggcgagagggagttatttctcagaattatgagactgatgagacgaaatatgatgtacatttttcagttggaggtggtggtgagtccttagtagttgatgcttggagccttcgtccatcgcgtgtttggaaagatggtcaatgggtagagtggtcccatgcaagagaaaggaaatccaaatctaataagggcgattcacctcctgagaaacgccaaagaatcgacttgcttcaaactggtggcaatctatctgttcttggcgaagtggggggttcttcgaaggacaataatataaacaatgcaaaaaacccggaggaattaaagccattgtctttgtctcagggggaaattgttttcaacattgggaaaagtgtagttgagaataaatctgattctcttgcattcagacgtcctggactacaaaaagaaggatcaaaggtcgtctatggtgttccaaaacatggaaagaagaagaagtttatggaagtaagcaaacattatgatgcaggccaatctgacaagatttctgagggcaattcatctaacagattcgtgaaacatctgatgccacaattgccaaggccacgtgaaaatgcttccaaagttgaccctattagaggaaggagagtaggtgaaacaaggtctagattacctaaacctacgaagtcccacaatgttggagctagcagtgttcctggaaaggattccttgcctatgcaaatgcatgttccaaattctggtgtttctgaaaggagttctagttttgcaggaagttcgacaagcacttccaacaatgagaagcccacttcagaaaataataatccggtgcttggtgtgggccttagaactgaagtttcttctggtcctgaactgcaaactgcatctactgttcctagttccaagccaaatgtatccactactaatcgagctaaaaggaaatatgttcccactgtcagtaacacaaacagaggtatactaaaaacctctgaaaagtcgagttctgattctgctgagccccgaaggactacttctgattctgctgaacctagacgatctaacaggcgaattcaaccaacttcaaggttactagagggcttgcaaagttccctcgtaatctcgaaagttcctggcgagaaggttcataggagcaattacaaaagtgcatcctcaagagggagaactcaagctcatgggtgagtgaaggcaccacatagctcatagctgcttttggtgggatagctctcgtgtacatagctgtagccgtccagtatggaaggaggatagggttggagtaggaagtctttattggagcgcaaggattcagatgtattataaactagcttaagtgcattgtgttaaccttttcttttacttgctcgaattatacttttccgtgttgtagaatacctggaaatatccttttagtatgtgtggatacaccgggaaagaaattgggtgccgtttaaattcatccgataatttaacgtgagtctgaacgtcaatttgactcgctactatcgtttgatcatatcattccttttctaagtcgtctacctgcagttgcagaagctggatggtgctctgctt

SEQ ID NO: 201479 - DNA, 6723 bp, Zea Mays
cgtcgctgctgcaggagctagggtttccggcgtgggcaaccggggtatgtgcagcagctgccgcactgcaggatctagggttccgacgactccgctcacggatggagggtggtagaagggcgagcgaatccctctcggcatacacccatggatcatgatgatactgattttcagagccaaaactttcaactagctggtgaaggcagtaacaaattctcatcagatacagaagcatttttcagtgtacaagggcacgggaatagttggattgaggttctgtccactggaagcagtgttgttgattttagctctagcgcagctgaatcttgctcaatatctaaaactaataatgtctggtcagaggcaacatccactgaatctgtcgaaatgctattgaaatcggtgggagaaaatgagacaactggtgacatggataataatgcccaccttaagttaagtggtatggacagtcaaattgatcaatcgagtgtccatcctaaatctagtaactccctgccagatagtactgtagtgccaactgaggaagatcagtctttgagtactcattctagaatgacagacgatcttgatcgttctcagatatctcattctataatgactgccgacctttcaaacaccgagagtcagcttgaacattttcggcctttcttaatggacaagaaagctgagcaggcagtggattctgttggtgagaagtgcattgcaggtgagaagttgtcctcttcaaacaacgcaccaggaagctacccagccattgacaactattttggggcaggtcatgatgatcgttctttggacaaacttaatataccctcaactggagtagattcaaagaacttgaataatgaacctttcccagagttggctcccctgcagaacatatatactgattcatatcacttcaaggaagatactacagaatccgaggctggtgttactcctcaagattcaaagtttcgtcatatcaacgaaaataaagttgaaggtggactacaagaactgcaaagtttgtcatgtgctggtcagtccttgggcgctgtaaacttgtctagtcaagcaagcaatgaaactcttttgtcagaaagttctgatggattgctagaggccataacaaatccagttaagatgctgcacaggagtgatgatacttgcaataaagtgaacagcactcctcaaccatctttttcagcagtgcaacatggagctgaaggcctggaaaattcagttcacaggagcaatgagttcgttgttaaggagtttagtatcggttcaaattctcttttatctcaccaacctgaggcagacccaaaattttttaatccacatcctattagttctctgtctccgaaaagtaaaatttccgatgccacttgtgttcctgaagaaacaaagaatgttggatccaatagtataaacacctgctgtacaggtgatgaatcaaaacatgtagtgttggagaaccgacaatattctgttgacaacctaaaaagtggtgacatgggagaaaagatgtctggggaggaaatacccgcagtttcagggaacattgatcaaatgatagagaatgatcatgaagaaaaggctgccaatgctactggtacatccaaagataaggttgacccttctgacagtattgcacttgaaaactttgcagctgacactttcaatgcttcagaggattcagacattccgtcactaaatcataagaggtcatttgaggaacatgaatcttctgctttaggagtggagcctaaaaacacaaatttactccaatctacttctgggcttcaagagaaaatttcagcatcagtgatcagttctagtagtggcatcacacctaccattgttactgacaactttgatatttctgaggataaaaatggctgttcaataggtgtttcttctgttgattctcctgctttactagctgagaaggatttgaatatgtccacagtgaatactgaggagccattcaaggaaggggttaagtccgctttaggagatcaacacaatggtatttcttctggctctggacaaggaggggaaatgccagctgtcccaatggactcaaagattgccgtgtatagtggtactgtttctgctacagaaagggagaaattcaaggagcagcctaattctttgggttgtttgaccacaggagaaactcaggataaatcagatagtatggatccaaccacagcatctacattgggtggaaaggtggctgtgaagattgtaaaaactccactgaatgcaagtgatgatttgaatgcacatatgcaagatatagtgttaaatcaaggtacagattgtagttctggtactgtgccatctcaaggaaacgaaggctcaagcttattggaacctggtaatggtgatggaatctgcactggggttacatgtgggtccccttcagtgattagttgtgctgaatcctgtccccaagaaggtggacatggcagcactgctttacttcatcacacactatgtgggcaatctgaggatcctgaagatcatggggcctcagttgatggtatccagagctcaaaacaatgcaataccagaaatatagaatctgcacctggttctcaggagactagtgcagcaggaggtgatagaagcttctcatttgaggtgggagctccaccaaatgttgctgagaaagcccatagccctgtttggagccctttccctaaatacattacttctcagagtagcaagatggccacagaaaatactcaagctggaggttctttgaaggatactagtgatgatagtaagaaaatatctactgtggagtctggtaaagaacagctatcagaaaggaaagtaactgaaagttctgggggtggcctctcagacaactgcaatatagacgacatcattaagggtagaagttcaccgccgcggcagcatccaatccctgagtgttctgatttagtgaattttccattcacagatccacagcatttgcagctacgtgcacagatatttgtttatggagctcttattcaaggaacaccaccaggagaggcttacatggtggcggcttttggagaacctgtaggtggtggcaaacctacatgggaggctgcttggcgagctgcttttgaaagatttcagtataaaaaatcacctcatgtcagtttagagactcccacaagttcacttataggtagttctgtgcctgagaaagctagcaaaggtacagcaattacaactgtgccagctagcaaaaaagttggtaaaactgtggcgccagcacatcctgctgtaaccctacactctccaacttctgattttccttttggtagttctacatttaatctgcaacgaggcactcatctggattttagccaggcagtatcaccatttgcgtataattcacacatgagacatccgtctcctggtgttgccccctggtatacgcagagccctggtccacgccctgcagcctggttaattccaccacaaaacttaatatttgattcatcaatgcaaccggttattcctacaaatgaaactgcgaagggtgcatcatccaaaaacatatccgtttcacatactgtttcatctggtgttcttcccagcctggcaccttctattgtttcttctccaatagcagttgtgagtgatggaaaacagaaggctgcttctagctctaagcgtggcacaacatcacaaaagtcaagaaaaaaaaagaaagcttcagcaagttcagaacagcaacctgtaattgcttctcctcatctcaaaatgaacatgccatcttttactcctgccattaagcacacagcaggattgaccttatgcggtagcaagcctgttcctaacatgggccagattgcctctgaacataactaccagatcactggtggtatggatagtgatcaaagaatcatcttttcagaacagatccgtggtgcagtagaacaatcagctgcacaagctaaaagtgcaagcattgactcagtggaggcagttaagcacaaggagggcatatggagccatctatctacaatctcaaggaataagttacctccaaaagttgaagagaaacttacctcagttgcagctgctgctgaagcagcagtttctgttgcaaaggcagctgcagaagctgccaagatggcgtcagaggctgcattgcaggcaaaaatgatggcagatgaagctcttagctcttctatatctgtaatgtccatgcatcacgaagctgatcaatataatgtcattagcagtccgcctatcttgtcaagttcaacgccagcatcatctctgaaaaccaagaacaagagtcatgccccaggttccatcatttctgtggcacgggaggctgctagaaagagggttgaagaggcatctgcagctgcaaaacgtgctgaaaacttggatgccatattgaaagctgcagagcttgctgcggaagctgtgttcagggcaggaaccattattggaatgggagaaccactaccttttaccctaagagagcttttggaagctgggccgaatggctactggaagtctgcgagtgcgagaaataaatctggaagttgtaatgataatccagtaacagaaacattggaggtagatgcacctgctaactttaacaaatctggcagaaagcgcggtcggaaacctaaatatgatcaagcactaccaaattcggagccatcttcaagctgcaaagaattacagtcatatggaatacactcaggagtaggacatggagttgttgaagatgttcccattactgtgtcacctaatggtaacaatgttacatcaccaataaacattatctggaatggcattgaaaagggatctgcagttgaggttttatctgacaaaggtgggtttggagtagcttggttttctgctaaggttattgatataaatggaaataatgtttttgtcaactatgacaaccacaatggatctggtcctcatgaagaatgggtgccattgcgacaagagggggataagccgcctcagatacgtcttgcgcaccctgctaccctctcaaaattcaaaactaggaaacgactcagggaaacagcaggaagttgtttatgggttatcggagatcatgtagacgcttgggtcaacaatagctgttggcgagagggagttatttctcagaattatgagactgatgagacgaaatatgatgtacatttttcagttggaggtggtggtgagtccttagtagttgatgcttggagccttcgtccatcgcgtgtttggaaagatggtcaatgggtagagtggtcccatgcaagagaaaggaaatccaaatctaataagggcgattcacctcctgagaaacgccaaagaatcgacttgcttcaaactggtggcaatctatctgttcttggcgaagtggggggttcttcgaaggacaataatataaacaatgcaaaaaacccggaggaattaaagccattgtctttgtctcagggggaaattgttttcaacattgggaaaagtgtagttgagaataaatctgattctcttgcattcagacgtcctggactacaaaaagaaggatcaaaggtcgtctatggtgttccaaaacatggaaagaagaagaagtttatggaagtaagcaaacattatgatgcaggccaatctgacaagatttctgagggcaattcatctaacagattcgtgaaacatctgatgccacaattgccaaggccacgtgaaaatgcttccaaagttgaccctattagaggaaggagagtaggtgaaacaaggtctagattacctaaacctacgaagtcccacaatgttggagctagcagtgttcctggaaaggattccttgcctatgcaaatgcatgttccaaattctggtgtttctgaaaggagttctagttttgcaggaagttcgacaagcacttccaacaatgagaagcccacttcagaaaataataatccggtgcttggtgtgggccttagaactgaagtttcttctggtcctgaactgcaaactgcatctactgttcctagttccaagccaaatgtatccactactaatcgagctaaaaggaaatatgttcccactgtcagtaacacaaacagaggtatactaaaaacctctgaaaagtcgagttctgattctgctgagccccgaaggactacttctgattctgctgaacctagacgatctaacaggcgaattcaaccaacttcaaggttactagagggcttgcaaagttccctcgtaatctcgaaagttcctggcgagaaggttcataggagcaattacaaaagtgcatcctcaagagggagaactcaagctcatgggtgagtgaaggcaccacatagctcatagctgcttttggtgggatagctctcgtgtacatagctgtagccgtccagtatggaaggaggatagggttggagtaggaagtctttattggagcgcaaggattcagatgtattataaactagcttaagtgcattgtgttaaccttttcttttacttgctcgaattatacttttccgtgttgtagaatacctggaaatatccttttagtatgtgtggatacaccgggaaagaaattgggtgccgtttaaattcatccgataatttaacgtgagtctgaacgtcaatttgactcgctactatcgtttgatcatatcattccttttctaagtcgtctacctgcagttgcagaagctggatggtgctctgctt

SEQ ID NO: 201480 - DNA, 6795 bp, Zea Mays
cgtcgctgctgcaggagctagggtttccggcgtgggcaaccggggtatgtgcagcagctgccgcactgcaggatctagggttccgacgactccgctcacggatggagggtggtagaagggcgagcgaatccctctcggcatacacccatggatcatgatgatactgattttcagagccaaaactttcaactagctggtgaaggcagtaacaaattctcatcaggtttgcgaccatttgcactaccaaaacttgatattgaggaccaattacaaggccatcttcgatttgataatttgatagatacagaagcatttttcagtgtacaagggcacgggaatagttggattgaggttctgtccactggaagcagtgttgttgattttagctctagcgcagctgaatcttgctcaatatctaaaactaataatgtctggtcagaggcaacatccactgaatctgtcgaaatgctattgaaatcggtgggagaaaatgagacaactggtgacatggataataatgcccaccttaagttaagtggtatggacagtcaaattgatcaatcgagtgtccatcctaaatctagtaactccctgccagatagtactgtagtgccaactgaggaagatcagtctttgagtactcattctagaatgacagacgatcttgatcgttctcagatatctcattctataatgactgccgacctttcaaacaccgagagtcagcttgaacattttcggcctttcttaatggacaagaaagctgagcaggcagtggattctgttggtgagaagtgcattgcaggtgagaagttgtcctcttcaaacaacgcaccaggaagctacccagccattgacaactattttggggcaggtcatgatgatcgttctttggacaaacttaatataccctcaactggagtagattcaaagaacttgaataatgaacctttcccagagttggctcccctgcagaacatatatactgattcatatcacttcaaggaagatactacagaatccgaggctggtgttactcctcaagattcaaagtttcgtcatatcaacgaaaataaagttgaaggtggactacaagaactgcaaagtttgtcatgtgctggtcagtccttgggcgctgtaaacttgtctagtcaagcaagcaatgaaactcttttgtcagaaagttctgatggattgctagaggccataacaaatccagttaagatgctgcacaggagtgatgatacttgcaataaagtgaacagcactcctcaaccatctttttcagcagtgcaacatggagctgaaggcctggaaaattcagttcacaggagcaatgagttcgttgttaaggagtttagtatcggttcaaattctcttttatctcaccaacctgaggcagacccaaaattttttaatccacatcctattagttctctgtctccgaaaagtaaaatttccgatgccacttgtgttcctgaagaaacaaagaatgttggatccaatagtataaacacctgctgtacaggtgatgaatcaaaacatgtagtgttggagaaccgacaatattctgttgacaacctaaaaagtggtgacatgggagaaaagatgtctggggaggaaatacccgcagtttcagggaacattgatcaaatgatagagaatgatcatgaagaaaaggctgccaatgctactggtacatccaaagataaggttgacccttctgacagtattgcacttgaaaactttgcagctgacactttcaatgcttcagaggattcagacattccgtcactaaatcataagaggtcatttgaggaacatgaatcttctgctttaggagtggagcctaaaaacacaaatttactccaatctacttctgggcttcaagagaaaatttcagcatcagtgatcagttctagtagtggcatcacacctaccattgttactgacaactttgatatttctgaggataaaaatggctgttcaataggtgtttcttctgttgattctcctgctttactagctgagaaggatttgaatatgtccacagtgaatactgaggagccattcaaggaaggggttaagtccgctttaggagatcaacacaatggtatttcttctggctctggacaaggaggggaaatgccagctgtcccaatggactcaaagattgccgtgtatagtggtactgtttctgctacagaaagggagaaattcaaggagcagcctaattctttgggttgtttgaccacaggagaaactcaggataaatcagatagtatggatccaaccacagcatctacattgggtggaaaggtggctgtgaagattgtaaaaactccactgaatgcaagtgatgatttgaatgcacatatgcaagatatagtgttaaatcaaggtacagattgtagttctggtactgtgccatctcaaggaaacgaaggctcaagcttattggaacctggtaatggtgatggaatctgcactggggttacatgtgggtccccttcagtgattagttgtgctgaatcctgtccccaagaaggtggacatggcagcactgctttacttcatcacacactatgtgggcaatctgaggatcctgaagatcatggggcctcagttgatggtatccagagctcaaaacaatgcaataccagaaatatagaatctgcacctggttctcaggagactagtgcagcaggaggtgatagaagcttctcatttgaggtgggagctccaccaaatgttgctgagaaagcccatagccctgtttggagccctttccctaaatacattacttctcagagtagcaagatggccacagaaaatactcaagctggaggttctttgaaggatactagtgatgatagtaagaaaatatctactgtggagtctggtaaagaacagctatcagaaaggaaagtaactgaaagttctgggggtggcctctcagacaactgcaatatagacgacatcattaagggtagaagttcaccgccgcggcagcatccaatccctgagtgttctgatttagtgaattttccattcacagatccacagcatttgcagctacgtgcacagatatttgtttatggagctcttattcaaggaacaccaccaggagaggcttacatggtggcggcttttggagaacctgtaggtggtggcaaacctacatgggaggctgcttggcgagctgcttttgaaagatttcagtataaaaaatcacctcatgtcagtttagagactcccacaagttcacttataggtagttctgtgcctgagaaagctagcaaaggtacagcaattacaactgtgccagctagcaaaaaagttggtaaaactgtggcgccagcacatcctgctgtaaccctacactctccaacttctgattttccttttggtagttctacatttaatctgcaacgaggcactcatctggattttagccaggcagtatcaccatttgcgtataattcacacatgagacatccgtctcctggtgttgccccctggtatacgcagagccctggtccacgccctgcagcctggttaattccaccacaaaacttaatatttgattcatcaatgcaaccggttattcctacaaatgaaactgcgaagggtgcatcatccaaaaacatatccgtttcacatactgtttcatctggtgttcttcccagcctggcaccttctattgtttcttctccaatagcagttgtgagtgatggaaaacagaaggctgcttctagctctaagcgtggcacaacatcacaaaagtcaagaaaaaaaaagaaagcttcagcaagttcagaacagcaacctgtaattgcttctcctcatctcaaaatgaacatgccatcttttactcctgccattaagcacacagcaggattgaccttatgcggtagcaagcctgttcctaacatgggccagattgcctctgaacataactaccagatcactggtggtatggatagtgatcaaagaatcatcttttcagaacagatccgtggtgcagtagaacaatcagctgcacaagctaaaagtgcaagcattgactcagtggaggcagttaagcacaaggagggcatatggagccatctatctacaatctcaaggaataagttacctccaaaagttgaagagaaacttacctcagttgcagctgctgctgaagcagcagtttctgttgcaaaggcagctgcagaagctgccaagatggcgtcagaggctgcattgcaggcaaaaatgatggcagatgaagctcttagctcttctatatctgtaatgtccatgcatcacgaagctgatcaatataatgtcattagcagtccgcctatcttgtcaagttcaacgccagcatcatctctgaaaaccaagaacaagagtcatgccccaggttccatcatttctgtggcacgggaggctgctagaaagagggttgaagaggcatctgcagctgcaaaacgtgctgaaaacttggatgccatattgaaagctgcagagcttgctgcggaagctgtgttcagggcaggaaccattattggaatgggagaaccactaccttttaccctaagagagcttttggaagctgggccgaatggctactggaagtctgcgagtgcgagaaataaatctggaagttgtaatgataatccagtaacagaaacattggaggtagatgcacctgctaactttaacaaatctggcagaaagcgcggtcggaaacctaaatatgatcaagcactaccaaattcggagccatcttcaagctgcaaagaattacagtcatatggaatacactcaggacatggagttgttgaagatgttcccattactgtgtcacctaatggtaacaatgttacatcaccaataaacattatctggaatggcattgaaaagggatctgcagttgaggttttatctgacaaaggtgggtttggagtagcttggttttctgctaaggttattgatataaatggaaataatgtttttgtcaactatgacaaccacaatggatctggtcctcatgaagaatgggtgccattgcgacaagagggggataagccgcctcagatacgtcttgcgcaccctgctaccctctcaaaattcaaaactaggaaacgactcagggaaacagcaggaagttgtttatgggttatcggagatcatgtagacgcttgggtcaacaatagctgttggcgagagggagttatttctcagaattatgagactgatgagacgaaatatgatgtacatttttcagttggaggtggtggtgagtccttagtagttgatgcttggagccttcgtccatcgcgtgtttggaaagatggtcaatgggtagagtggtcccatgcaagagaaaggaaatccaaatctaataagggcgattcacctcctgagaaacgccaaagaatcgacttgcttcaaactggtggcaatctatctgttcttggcgaagtggggggttcttcgaaggacaataatataaacaatgcaaaaaacccggaggaattaaagccattgtctttgtctcagggggaaattgttttcaacattgggaaaagtgtagttgagaataaatctgattctcttgcattcagacgtcctggactacaaaaagaaggatcaaaggtcgtctatggtgttccaaaacatggaaagaagaagaagtttatggaagtaagcaaacattatgatgcaggccaatctgacaagatttctgagggcaattcatctaacagattcgtgaaacatctgatgccacaattgccaaggccacgtgaaaatgcttccaaagttgaccctattagaggaaggagagtaggtgaaacaaggtctagattacctaaacctacgaagtcccacaatgttggagctagcagtgttcctggaaaggattccttgcctatgcaaatgcatgttccaaattctggtgtttctgaaaggagttctagttttgcaggaagttcgacaagcacttccaacaatgagaagcccacttcagaaaataataatccggtgcttggtgtgggccttagaactgaagtttcttctggtcctgaactgcaaactgcatctactgttcctagttccaagccaaatgtatccactactaatcgagctaaaaggaaatatgttcccactgtcagtaacacaaacagaggtatactaaaaacctctgaaaagtcgagttctgattctgctgagccccgaaggactacttctgattctgctgaacctagacgatctaacaggcgaattcaaccaacttcaaggttactagagggcttgcaaagttccctcgtaatctcgaaagttcctggcgagaaggttcataggagcaattacaaaagtgcatcctcaagagggagaactcaagctcatgggtgagtgaaggcaccacatagctcatagctgcttttggtgggatagctctcgtgtacatagctgtagccgtccagtatggaaggaggatagggttggagtaggaagtctttattggagcgcaaggattcagatgtattataaactagcttaagtgcattgtgttaaccttttcttttacttgctcgaattatacttttccgtgttgtagaatacctggaaatatccttttagtatgtgtggatacaccgggaaagaaattgggtgccgtttaaattcatccgataatttaacgtgagtctgaacgtcaatttgactcgctactatcgtttgatcatatcattccttttctaagtcgtctacctgcagttgcagaagctggatggtgctctgctt

SEQ ID NO: 201481 - DNA, 6798 bp, Zea Mays
cgtcgctgctgcaggagctagggtttccggcgtgggcaaccggggtatgtgcagcagctgccgcactgcaggatctagggttccgacgactccgctcacggatggagggtggtagaagggcgagcgaatccctctcggcatacacccatggatcatgatgatactgattttcagagccaaaactttcaactagctggtgaaggcagtaacaaattctcatcaggtttgcgaccatttgcactaccaaaacttgatattgaggaccaattacaaggccatcttcgatttgataatttgatagatacagaagcatttttcagtgtacaagggcacgggaatagttggattgaggttctgtccactggaagcagtgttgttgattttagctctagcgcagctgaatcttgctcaatatctaaaactaataatgtctggtcagaggcaacatccactgaatctgtcgaaatgctattgaaatcggtgggagaaaatgagacaactggtgacatggataataatgcccaccttaagttaagtggtatggacagtcaaattgatcaatcgagtgtccatcctaaatctagtaactccctgccagatagtactgtagtgccaactgaggaagatcagtctttgagtactcattctagaatgacagacgatcttgatcgttctcagatatctcattctataatgactgccgacctttcaaacaccgagagtcagcttgaacattttcggcctttcttaatggacaagaaagctgagcaggcagtggattctgttggtgagaagtgcattgcaggtgagaagttgtcctcttcaaacaacgcaccaggaagctacccagccattgacaactattttggggcaggtcatgatgatcgttctttggacaaacttaatataccctcaactggagtagattcaaagaacttgaataatgaacctttcccagagttggctcccctgcagaacatatatactgattcatatcacttcaaggaagatactacagaatccgaggctggtgttactcctcaagattcaaagtttcgtcatatcaacgaaaataaagttgaaggtggactacaagaactgcaaagtttgtcatgtgctggtcagtccttgggcgctgtaaacttgtctagtcaagcaagcaatgaaactcttttgtcagaaagttctgatggattgctagaggccataacaaatccagttaagatgctgcacaggagtgatgatacttgcaataaagtgaacagcactcctcaaccatctttttcagcagtgcaacatggagctgaaggcctggaaaattcagttcacaggagcaatgagttcgttgttaaggagtttagtatcggttcaaattctcttttatctcaccaacctgaggcagacccaaaattttttaatccacatcctattagttctctgtctccgaaaagtaaaatttccgatgccacttgtgttcctgaagaaacaaagaatgttggatccaatagtataaacacctgctgtacaggtgatgaatcaaaacatgtagtgttggagaaccgacaatattctgttgacaacctaaaaagtggtgacatgggagaaaagatgtctggggaggaaatacccgcagtttcagggaacattgatcaaatgatagagaatgatcatgaagaaaaggctgccaatgctactggtacatccaaagataaggttgacccttctgacagtattgcacttgaaaactttgcagctgacactttcaatgcttcagaggattcagacattccgtcactaaatcataagaggtcatttgaggaacatgaatcttctgctttaggagtggagcctaaaaacacaaatttactccaatctacttctgggcttcaagagaaaatttcagcatcagtgatcagttctagtagtggcatcacacctaccattgttactgacaactttgatatttctgaggataaaaatggctgttcaataggtgtttcttctgttgattctcctgctttactagctgagaaggatttgaatatgtccacagtgaatactgaggagccattcaaggaaggggttaagtccgctttaggagatcaacacaatggtatttcttctggctctggacaaggaggggaaatgccagctgtcccaatggactcaaagattgccgtgtatagtggtactgtttctgctacagaaagggagaaattcaaggagcagcctaattctttgggttgtttgaccacaggagaaactcaggataaatcagatagtatggatccaaccacagcatctacattgggtggaaaggtggctgtgaagattgtaaaaactccactgaatgcaagtgatgatttgaatgcacatatgcaagatatagtgttaaatcaaggtacagattgtagttctggtactgtgccatctcaaggaaacgaaggctcaagcttattggaacctggtaatggtgatggaatctgcactggggttacatgtgggtccccttcagtgattagttgtgctgaatcctgtccccaagaaggtggacatggcagcactgctttacttcatcacacactatgtgggcaatctgaggatcctgaagatcatggggcctcagttgatggtatccagagctcaaaacaatgcaataccagaaatatagaatctgcacctggttctcaggagactagtgcagcaggaggtgatagaagcttctcatttgaggtgggagctccaccaaatgttgctgagaaagcccatagccctgtttggagccctttccctaaatacattacttctcagagtagcaagatggccacagaaaatactcaagctggaggttctttgaaggatactagtgatgatagtaagaaaatatctactgtggagtctggtaaagaacagctatcagaaaggaaagtaactgaaagttctgggggtggcctctcagacaactgcaatatagacgacatcattaagggtagaagttcaccgccgcggcagcatccaatccctgagtgttctgatttagtgaattttccattcacagatccacagcatttgcagctacgtgcacagatatttgtttatggagctcttattcaaggaacaccaccaggagaggcttacatggtggcggcttttggagaacctggtggtggcaaacctacatgggaggctgcttggcgagctgcttttgaaagatttcagtataaaaaatcacctcatgtcagtttagagactcccacaagttcacttataggtagttctgtgcctgagaaagctagcaaaggtacagcaattacaactgtgccagctagcaaaaaagttggtaaaactgtggcgccagcacatcctgctgtaaccctacactctccaacttctgattttccttttggtagttctacatttaatctgcaacgaggcactcatctggattttagccaggcagtatcaccatttgcgtataattcacacatgagacatccgtctcctggtgttgccccctggtatacgcagagccctggtccacgccctgcagcctggttaattccaccacaaaacttaatatttgattcatcaatgcaaccggttattcctacaaatgaaactgcgaagggtgcatcatccaaaaacatatccgtttcacatactgtttcatctggtgttcttcccagcctggcaccttctattgtttcttctccaatagcagttgtgagtgatggaaaacagaaggctgcttctagctctaagcgtggcacaacatcacaaaagtcaagaaaaaaaaagaaagcttcagcaagttcagaacagcaacctgtaattgcttctcctcatctcaaaatgaacatgccatcttttactcctgccattaagcacacagcaggattgaccttatgcggtagcaagcctgttcctaacatgggccagattgcctctgaacataactaccagatcactggtggtatggatagtgatcaaagaatcatcttttcagaacagatccgtggtgcagtagaacaatcagctgcacaagctaaaagtgcaagcattgactcagtggaggcagttaagcacaaggagggcatatggagccatctatctacaatctcaaggaataagttacctccaaaagttgaagagaaacttacctcagttgcagctgctgctgaagcagcagtttctgttgcaaaggcagctgcagaagctgccaagatggcgtcagaggctgcattgcaggcaaaaatgatggcagatgaagctcttagctcttctatatctgtaatgtccatgcatcacgaagctgatcaatataatgtcattagcagtccgcctatcttgtcaagttcaacgccagcatcatctctgaaaaccaagaacaagagtcatgccccaggttccatcatttctgtggcacgggaggctgctagaaagagggttgaagaggcatctgcagctgcaaaacgtgctgaaaacttggatgccatattgaaagctgcagagcttgctgcggaagctgtgttcagggcaggaaccattattggaatgggagaaccactaccttttaccctaagagagcttttggaagctgggccgaatggctactggaagtctgcgagtgcgagaaataaatctggaagttgtaatgataatccagtaacagaaacattggaggtagatgcacctgctaactttaacaaatctggcagaaagcgcggtcggaaacctaaatatgatcaagcactaccaaattcggagccatcttcaagctgcaaagaattacagtcatatggaatacactcaggagtaggacatggagttgttgaagatgttcccattactgtgtcacctaatggtaacaatgttacatcaccaataaacattatctggaatggcattgaaaagggatctgcagttgaggttttatctgacaaaggtgggtttggagtagcttggttttctgctaaggttattgatataaatggaaataatgtttttgtcaactatgacaaccacaatggatctggtcctcatgaagaatgggtgccattgcgacaagagggggataagccgcctcagatacgtcttgcgcaccctgctaccctctcaaaattcaaaactaggaaacgactcagggaaacagcaggaagttgtttatgggttatcggagatcatgtagacgcttgggtcaacaatagctgttggcgagagggagttatttctcagaattatgagactgatgagacgaaatatgatgtacatttttcagttggaggtggtggtgagtccttagtagttgatgcttggagccttcgtccatcgcgtgtttggaaagatggtcaatgggtagagtggtcccatgcaagagaaaggaaatccaaatctaataagggcgattcacctcctgagaaacgccaaagaatcgacttgcttcaaactggtggcaatctatctgttcttggcgaagtggggggttcttcgaaggacaataatataaacaatgcaaaaaacccggaggaattaaagccattgtctttgtctcagggggaaattgttttcaacattgggaaaagtgtagttgagaataaatctgattctcttgcattcagacgtcctggactacaaaaagaaggatcaaaggtcgtctatggtgttccaaaacatggaaagaagaagaagtttatggaagtaagcaaacattatgatgcaggccaatctgacaagatttctgagggcaattcatctaacagattcgtgaaacatctgatgccacaattgccaaggccacgtgaaaatgcttccaaagttgaccctattagaggaaggagagtaggtgaaacaaggtctagattacctaaacctacgaagtcccacaatgttggagctagcagtgttcctggaaaggattccttgcctatgcaaatgcatgttccaaattctggtgtttctgaaaggagttctagttttgcaggaagttcgacaagcacttccaacaatgagaagcccacttcagaaaataataatccggtgcttggtgtgggccttagaactgaagtttcttctggtcctgaactgcaaactgcatctactgttcctagttccaagccaaatgtatccactactaatcgagctaaaaggaaatatgttcccactgtcagtaacacaaacagaggtatactaaaaacctctgaaaagtcgagttctgattctgctgagccccgaaggactacttctgattctgctgaacctagacgatctaacaggcgaattcaaccaacttcaaggttactagagggcttgcaaagttccctcgtaatctcgaaagttcctggcgagaaggttcataggagcaattacaaaagtgcatcctcaagagggagaactcaagctcatgggtgagtgaaggcaccacatagctcatagctgcttttggtgggatagctctcgtgtacatagctgtagccgtccagtatggaaggaggatagggttggagtaggaagtctttattggagcgcaaggattcagatgtattataaactagcttaagtgcattgtgttaaccttttcttttacttgctcgaattatacttttccgtgttgtagaatacctggaaatatccttttagtatgtgtggatacaccgggaaagaaattgggtgccgtttaaattcatccgataatttaacgtgagtctgaacgtcaatttgactcgctactatcgtttgatcatatcattccttttctaagtcgtctacctgcagttgcagaagctggatggtgctctgctt

SEQ ID NO: 201482 - DNA, 715 bp, Zea Mays
aatcttgaaatctcatttgacctagacatggtctggtctgcccttctacccagtacagcacgctttgcgctgcactaaacgtcagtaaaagaagtgtggatagggaccttgatgtttaccgcaacatactctcaaagttggttcaagccaaggaacttctcaaggaatacgtggatagggaaaagaagaagagagaagaaagatcggaagccccgaagccgaacgaagctgtcacaaaatttgatggaaacctttattccacaaggcattagaatcagccctttgcagaggagagtttcccaggataacagaattaacagtaacatctggaccgtgttgagaaaccaccaaatgttcccctttcatcacagacgtctttggctgctcgtcttgtgatgtagcattctgccgtacaaaaggatccagattattcttactactggacagatatttgtattttctcatatgtcttgaaatcaaatgtatacattttctgtgtgtaggggtcaatgttactcaagcagagaaatatagttttctcttttgtatttaaattcaggtaatttgggaggccgtgttcacttatatataatatagtgtggcaaccatgaaaacaattggtgaagttctttatgtgagtttgtatgtaccgggctcagcactgaaaaatatctgaggttgaaaagtcttaacagccggctttaattcgtaacga

SEQ ID NO: 201483 - DNA, 1191 bp, Zea Mays
atattgtcctgtgtgttttgattagaatcctctggatgcctggattcaatatgtcccacccactgtcgcagaaacaaaactgaacttccttaagtcatacaaacgcccaatcccaagcatttacagtgcagtcttacaagaacttttggtgcagcaacacctgatgagatacaaaaaaacctatcagtatgatgctgtgtttgctcttggcttcgtcactgtctatgatcagctcatggaagggtaccccagcaatgaggacagggattccatcttcaaggcatatataacagcattaaatgaagatcctgatcaatacagagctgatgcactaaagatggaagagtgggcacgttcccagaacggtagttccttagttgatttttcttccagagatggagaaatcgaggctattctgaaagatatatcagaaagggccaagggtaagggaaacttcagctacagccgattctttgcagttggcttgttccgtttgcttgagctctcaaatgcaacggagccaacaatactagacaagctttgcgctgcactaaacgtcagtaaaagaagtgtggatagggaccttgatgtttaccgcaacatactctcaaagttggttcaagccaaggaacttctcaaggaatacgtggatagggaaaagaagaagagagaagaaagatcggaagccccgaagccgaacgaagctgtcacaaaatttgatggaaacctttattccacaaggcattagaatcagccctttgcagaggagagtttcccaggataacagaattaacagtaacatctggaccgtgttgagaaaccaccaaatgttcccctttcatcacagacgtctttggctgctcgtcttgtgatgtagcattctgccgtacaaaaggatccagattattcttactactggacagatatttgtattttctcatatgtcttgaaatcaaatgtatacattttctgtgtgtaggggtcaatgttactcaagcagagaaatatagttttctcttttgtatttaaattcaggtaatttgggaggccgtgttcacttatatataatatagtgtggcaaccatgaaaacaattggtgaagttctttatgtgagtttgtatgtaccgggctcagcactgaaaaatatctgaggttgaaaagtcttaacagccggctttaattcgtaacga

SEQ ID NO: 201484 - DNA, 1151 bp, Zea Mays
cataatttgttttgatgcttaggaggcaaactggtgtacaataacagatgtcccacccactgtcgcagaaacaaaactgaacttccttaagtcatacaaacgcccaatcccaagcatttacagtgcagtcttacaagaacttttggtgcagcaacacctgatgagatacaaaaaaacctatcagtatgatgctgtgtttgctcttggcttcgtcactgtctatgatcagctcatggaagggtaccccagcaatgaggacagggattccatcttcaaggcatatataacagcattaaatgaagatcctgatcaatacagagctgatgcactaaagatggaagagtgggcacgttcccagaacggtagttccttagttgatttttcttccagagatggagaaatcgaggctattctgaaagatatatcagaaagggccaagggtaagggaaacttcagctacagccgattctttgcagttggcttgttccgtttgcttgactttgcgctgcactaaacgtcagtaaaagaagtgtggatagggaccttgatgtttaccgcaacatactctcaaagttggttcaagccaaggaacttctcaaggaatacgtggatagggaaaagaagaagagagaagaaagatcggaagccccgaagccgaacgaagctgtcacaaaatttgatggaaacctttattccacaaggcattagaatcagccctttgcagaggagagtttcccaggataacagaattaacagtaacatctggaccgtgttgagaaaccaccaaatgttcccctttcatcacagacgtctttggctgctcgtcttgtgatgtagcattctgccgtacaaaaggatccagattattcttactactggacagatatttgtattttctcatatgtcttgaaatcaaatgtatacattttctgtgtgtaggggtcaatgttactcaagcagagaaatatagttttctcttttgtatttaaattcaggtaatttgggaggccgtgttcacttatatataatatagtgtggcaaccatgaaaacaattggtgaagttctttatgtgagtttgtatgtaccgggctcagcactgaaaaatatctgaggttgaaaagtcttaacagccggctttaattcgtaacga

SEQ ID NO: 201485 - DNA, 1287 bp, Zea Mays
atccatacatttttttggtgaaatctgattcagaatcattagtccctttcttgaataggtttctgggatcaccatcttcgcatataattttttatggaacataatttgttttgatgcttaggaggcaaactggtgtacaataacagatgtcccacccactgtcgcagaaacaaaactgaacttccttaagtcatacaaacgcccaatcccaagcatttacagtgcagtcttacaagaacttttggtgcagcaacacctgatgagatacaaaaaaacctatcagtatgatgctgtgtttgctcttggcttcgtcactgtctatgatcagctcatggaagggtaccccagcaatgaggacagggattccatcttcaaggcatatataacagcattaaatgaagatcctgatcaatacagagctgatgcactaaagatggaagagtgggcacgttcccagaacggtagttccttagttgatttttcttccagagatggagaaatcgaggctattctgaaagatatatcagaaagggccaagggtaagggaaacttcagctacagccgattctttgcagttggcttgttccgtttgcttgagctctcaaatgcaacggagccaacaatactagacaagctttgcgctgcactaaacgtcagtaaaagaagtgtggatagggaccttgatgtttaccgcaacatactctcaaagttggttcaagccaaggaacttctcaaggaatacgtggatagggaaaagaagaagagagaagaaagatcggaagccccgaagccgaacgaagctgtcacaaaatttgatggaaacctttattccacaaggcattagaatcagccctttgcagaggagagtttcccaggataacagaattaacagtaacatctggaccgtgttgagaaaccaccaaatgttcccctttcatcacagacgtctttggctgctcgtcttgtgatgtagcattctgccgtacaaaaggatccagattattcttactactggacagatatttgtattttctcatatgtcttgaaatcaaatgtatacattttctgtgtgtaggggtcaatgttactcaagcagagaaatatagttttctcttttgtatttaaattcaggtaatttgggaggccgtgttcacttatatataatatagtgtggcaaccatgaaaacaattggtgaagttctttatgtgagtttgtatgtaccgggctcagcactgaaaaatatctgaggttgaaaagtcttaacagccggctttaattcgtaacga

SEQ ID NO: 201486 - DNA, 1329 bp, Zea Mays
ctcaaactaagtgaatcggagtcaccatgccaaacctgtgcggttcaccgcaaaagacctcctcctcctcatcctaaattcgccaagcaatgtgcgatgccggcttcgccaactgtgattccttatgccgccgaatcccatcacctcgaaatcctccgtagtagtctttgcggtgacctcttttgttgatgtcccacccactgtcgcagaaacaaaactgaacttccttaagtcatacaaacgcccaatcccaagcatttacagtgcagtcttacaagaacttttggtgcagcaacacctgatgagatacaaaaaaacctatcagtatgatgctgtgtttgctcttggcttcgtcactgtctatgatcagctcatggaagggtaccccagcaatgaggacagggattccatcttcaaggcatatataacagcattaaatgaagatcctgatcaatacagagctgatgcactaaagatggaagagtgggcacgttcccagaacggtagttccttagttgatttttcttccagagatggagaaatcgaggctattctgaaagatatatcagaaagggccaagggtaagggaaacttcagctacagccgattctttgcagttggcttgttccgtttgcttgagctctcaaatgcaacggagccaacaatactagacaagctttgcgctgcactaaacgtcagtaaaagaagtgtggatagggaccttgatgtttaccgcaacatactctcaaagttggttcaagccaaggaacttctcaaggaatacgtggatagggaaaagaagaagagagaagaaagatcggaagccccgaagccgaacgaagctgtcacaaaatttgatggaaacctttattccacaaggcattagaatcagccctttgcagaggagagtttcccaggataacagaattaacagtaacatctggaccgtgttgagaaaccaccaaatgttcccctttcatcacagacgtctttggctgctcgtcttgtgatgtagcattctgccgtacaaaaggatccagattattcttactactggacagatatttgtattttctcatatgtcttgaaatcaaatgtatacattttctgtgtgtaggggtcaatgttactcaagcagagaaatatagttttctcttttgtatttaaattcaggtaatttgggaggccgtgttcacttatatataatatagtgtggcaaccatgaaaacaattggtgaagttctttatgtgagtttgtatgtaccgggctcagcactgaaaaatatctgaggttgaaaagtcttaacagccggctttaattcgtaacga

SEQ ID NO: 201487 - DNA, 2613 bp, Zea Mays
gtttggttcgtggctaacccattcgaactgaagaacttgggtgatgagatgaccagagtattctggcagtctatcaaggacaagcttatctttccatttctggacctggacatcaagtactatgacttggggatactgcaccgtgacgcaactgatgacaaggtcacagtggaggctgcagaggctactctcaagtacaatgtggccattaagtgtgcgaccattactccagatgaaactagggttaaggagttcaatttgaagcacatgtggaagagcccaaatggcacaattaggaacattataaatggtactgtgttcagagaaccaattatatgcaaaaacgttccaaggcttgttccaggatggacgaagcccatctgcattggaaggcatgccttcggtgatcagtaccgagctactgatgcagttctgaaggggcctgggaagctgaagctagtttttgagggaaaagaagaacagattgatctggaggtgttcaacttcactggtgctggaggagttgccttgtctatgtacaacactgatgagcttctatgacaactgcatatgagaagaaatggccgctctaccttagcaccaaaaacacaatcctgaagaaatatgatggcaggtttaaggacattttccaggaggtctatgaagctgactggaaatccaaatttgaggctgctggaatatggtatgagcatcgtcttattgatgacatggttgcatatgcacttaagagtgaaggaggctacgtgtgggcttgcaagaattacgatggagatgtgcagagtgatttcttagcacaaggttttggctctttgggtttgatgacatcagtgttggtgtgccctgatgggaaaaccattgaagctgaagcagcccatggcacggttacccgccatttccgtgttcaccagaaaggaggtgaaaccagtacgaacagcattgcttcaatctttgcatggacaagggggcttgcacatagggcaaagctcgacgacaatgcgaggctcctcgacttcgctctcaaactcgaggccgcttgcgttggagctgtggagtctgggaagatgactaaagatctcgcacttcttgttcatggatcttccaaagtcacgagaagccattacctgaacacagaagagttcatcgatgcagtcgctactgagcttcgatcaagattgggagccaattgagctgacaggaaactctgcgttgcaacttgaatgcttcatcaccgatcggctctagtcatgcttccgtgattaagtgaatgtgcgccgccgcaatttcgagccaagctaattaaagatgatgggatcgcatcgcatgagcgttcaaaataaaggaatatgtagaacaatggtcgcagatgattaaattactcatattatgttcagtcattccctcagtattttctagcttgttttctcctctgaattgcgtgtccattctgtggttcacacaaatcaccgtcgggttgcctgcgctccgttttcgtagacttcggaggcagtagggtagctgaacaactcagacgaccaggtggttcatgacttcatgtcatgtttatcctgaccgaagaacccaaacccaagccagcaacggcgtctcttctgttctgttctctggacagcggacacgagtccgccaccaattccgcgcgaaagatagtcccgcccatgtgtccccgggacgccgctcccgtcgcaccacgtccccaggccacgcggcgcctcacgcgcgggggggtacccacgaggccacgacgcagctcagctgtatatatacacacacgacttgcttcccatctctgcactgcagcgcaagcgaaatcgccgaaggaaaggagaccccgagacgagcaaggcggcgagggagggcaaagaccacgtaccagcgcgcacgcacaatgtcgggagcacagggcgcgcacccggtcggccagacgacgccgacgacgtacgagtcggtgggcggcggggagaaccgcacgcgcacggacctgcggtcgcgggaggaccagggcgccatccagatcgagaaggtgcaggacaaggtcgacgatgccgcggggcgtggggtagaccacagcaccttcggcgccaacaaggagggccgcgacgacaaggccgatgccggggcaaccggcaccggcacaggcgcgtgattttgtgcccttccgcagtgtacctgatcgtgtgtgtacgatagctttgtgtccgctgcttggctgctctgtatccgcgcgcgtggagtgtgtgaaacctttctgtaaaaaatgcacatgttagattgaaataaaacaaggaccgactggtctgaatcccacttggtactcccccaattgggaaaataataagggcttgttcgttttgctctcaatctatgtggattgggtgggattggatgtgtttcaatcccaaacaagtcaaaatctttcacaattttttccaattccatctaatccatatgggataggaataaccgaacaagccctaatatgtctgacgaggagcaatctgttgcgtctcgctgttttcagtttctacagtactttagtgtttatccagttcgaatgactgttggagcatcttcaac

SEQ ID NO: 201488 - DNA, 2629 bp, Zea Mays
cttgggtgcgcgaacgatctatttatggatgaaggtgatgagatgaccagagtattctggcagtctatcaaggacaagcttatctttccatttctggacctggacatcaagtactatgacttggggatactgcaccgtgacgcaactgatgacaaggtcacagtggaggctgcagaggctactctcaagtacaatgtggccattaagtgtgcgaccattactccagatgaaactagggttaaggagttcaatttgaagcacatgtggaagagcccaaatggcacaattaggaacattataaatggtactgtgttcagagaaccaattatatgcaaaaacgttccaaggcttgttccaggatggacgaagcccatctgcattggaaggcatgccttcggtgatcagtaccgagctactgatgcagttctgaaggggcctgggaagctgaagctagtttttgagggaaaagaagaacagattgatctggaggtgttcaacttcactggtgctggaggagttgccttgtctatgtacaacactgatgagtcaattcgagcttttgccgcagcttctatgacaactgcatatgagaagaaatggccgctctaccttagcaccaaaaacacaatcctgaagaaatatgatggcaggtttaaggacattttccaggaggtctatgaagctgactggaaatccaaatttgaggctgctggaatatggtatgagcatcgtcttattgatgacatggttgcatatgcacttaagagtgaaggaggctacgtgtgggcttgcaagaattacgatggagatgtgcagagtgatttcttagcacaaggttttggctctttgggtttgatgacatcagtgttggtgtgccctgatgggaaaaccattgaagctgaagcagcccatggcacggttacccgccatttccgtgttcaccagaaaggaggtgaaaccagtacgaacagcattgcttcaatctttgcatggacaagggggcttgcacatagggcaaagctcgacgacaatgcgaggctcctcgacttcgctctcaaactcgaggccgcttgcgttggagctgtggagtctgggaagatgactaaagatctcgcacttcttgttcatggatcttccaaagtcacgagaagccattacctgaacacagaagagttcatcgatgcagtcgctactgagcttcgatcaagattgggagccaattgagctgacaggaaactctgcgttgcaacttgaatgcttcatcaccgatcggctctagtcatgcttccgtgattaagtgaatgtgcgccgccgcaatttcgagccaagctaattaaagatgatgggatcgcatcgcatgagcgttcaaaataaaggaatatgtagaacaatggtcgcagatgattaaattactcatattatgttcagtcattccctcagtattttctagcttgttttctcctctgaattgcgtgtccattctgtggttcacacaaatcaccgtcgggttgcctgcgctccgttttcgtagacttcggaggcagtagggtagctgaacaactcagacgaccaggtggttcatgacttcatgtcatgtttatcctgaccgaagaacccaaacccaagccagcaacggcgtctcttctgttctgttctctggacagcggacacgagtccgccaccaattccgcgcgaaagatagtcccgcccatgtgtccccgggacgccgctcccgtcgcaccacgtccccaggccacgcggcgcctcacgcgcgggggggtacccacgaggccacgacgcagctcagctgtatatatacacacacgacttgcttcccatctctgcactgcagcgcaagcgaaatcgccgaaggaaaggagaccccgagacgagcaaggcggcgagggagggcaaagaccacgtaccagcgcgcacgcacaatgtcgggagcacagggcgcgcacccggtcggccagacgacgccgacgacgtacgagtcggtgggcggcggggagaaccgcacgcgcacggacctgcggtcgcgggaggaccagggcgccatccagatcgagaaggtgcaggacaaggtcgacgatgccgcggggcgtggggtagaccacagcaccttcggcgccaacaaggagggccgcgacgacaaggccgatgccggggcaaccggcaccggcacaggcgcgtgattttgtgcccttccgcagtgtacctgatcgtgtgtgtacgatagctttgtgtccgctgcttggctgctctgtatccgcgcgcgtggagtgtgtgaaacctttctgtaaaaaatgcacatgttagattgaaataaaacaaggaccgactggtctgaatcccacttggtactcccccaattgggaaaataataagggcttgttcgttttgctctcaatctatgtggattgggtgggattggatgtgtttcaatcccaaacaagtcaaaatctttcacaattttttccaattccatctaatccatatgggataggaataaccgaacaagccctaatatgtctgacgaggagcaatctgttgcgtctcgctgttttcagtttctacagtactttagtgtttatccagttcgaatgactgttggagcatcttcaac

SEQ ID NO: 201489 - DNA, 1712 bp, Zea Mays
gtcataattactttttgttgaatcggtgtgccctgatgggaaaaccattgaagctgaagcagcccatggcacggttacccgccatttccgtgttcaccagaaaggaggtgaaaccagtacgaacagcattgcttcaatctttgcatggacaagggggcttgcacatagggcaaagctcgacgacaatgcgaggctcctcgacttcgctctcaaactcgaggccgcttgcgttggagctgtggagtctgggaagatgactaaagatctcgcacttcttgttcatggatcttccaaagtcacgagaagccattacctgaacacagaagagttcatcgatgcagtcgctactgagcttcgatcaagattgggagccaattgagctgacaggaaactctgcgttgcaacttgaatgcttcatcaccgatcggctctagtcatgcttccgtgattaagtgaatgtgcgccgccgcaatttcgagccaagctaattaaagatgatgggatcgcatcgcatgagcgttcaaaataaaggaatatgtagaacaatggtcgcagatgattaaattactcatattatgttcagtcattccctcagtattttctagcttgttttctcctctgaattgcgtgtccattctgtggttcacacaaatcaccgtcgggttgcctgcgctccgttttcgtagacttcggaggcagtagggtagctgaacaactcagacgaccaggtggttcatgacttcatgtcatgtttatcctgaccgaagaacccaaacccaagccagcaacggcgtctcttctgttctgttctctggacagcggacacgagtccgccaccaattccgcgcgaaagatagtcccgcccatgtgtccccgggacgccgctcccgtcgcaccacgtccccaggccacgcggcgcctcacgcgcgggggggtacccacgaggccacgacgcagctcagctgtatatatacacacacgacttgcttcccatctctgcactgcagcgcaagcgaaatcgccgaaggaaaggagaccccgagacgagcaaggcggcgagggagggcaaagaccacgtaccagcgcgcacgcacaatgtcgggagcacagggcgcgcacccggtcggccagacgacgccgacgacgtacgagtcggtgggcggcggggagaaccgcacgcgcacggacctgcggtcgcgggaggaccagggcgccatccagatcgagaaggtgcaggacaaggccgatgccggggcaaccggcaccggcacaggcgcgtgattttgtgcccttccgcagtgtacctgatcgtgtgtgtacgatagctttgtgtccgctgcttggctgctctgtatccgcgcgcgtggagtgtgtgaaacctttctgtaaaaaatgcacatgttagattgaaataaaacaaggaccgactggtctgaatcccacttggtactcccccaattgggaaaataataagggcttgttcgttttgctctcaatctatgtggattgggtgggattggatgtgtttcaatcccaaacaagtcaaaatctttcacaattttttccaattccatctaatccatatgggataggaataaccgaacaagccctaatatgtctgacgaggagcaatctgttgcgtctcgctgttttcagtttctacagtactttagtgtttatccagttcgaatgactgttggagcatcttcaac

SEQ ID NO: 201490 - DNA, 3268 bp, Zea Mays
agaatggtttcatcgccgtccctagctgcctgccagtgcagtccagtgctggtgagccgcgtgcggcccgcgggttgccttcttctcttgctagttcacccgtcaccaactcgctcctcgcagcagcagcggacgagcccctctgccctcccctctcgtccctccaggcggcaggcgctagctcgacgttcggccccgcgggccggatccgtcgccacagatccgctgcctcctccccgagtcctgcctgatcgggttttttcagttttccccgttccccgtgggccactcgaccggccgacagggcggaaaggctgccccggccgacagggctggtggcagtgagtccgcgcaggcaaattgaattccggcggcgaatcccatcctgtggtcctctctcgagtcctccgcgtctgcgcctcctccatctcgtcgccgttctcgacgcccgcggatccaacggtccaacactgggtttgcccaacagcccaagacgtccaggaatgccattatgattcaacgtcacaggccactgacagcttgcatgttgagcctatatatgagtcgttcctatgcccgcttaccaaacaggttatgcgggatcctgtctctattgacagtggtgttacgtttgaacgcgatgccattttgaagtacttcaatgaatgtcttagcagcagaaggaggcttgtctgccctgtaactaagatggagctcagcaacactgagttaaatccaagcatagctctgaggaacactattgatgaatggatgaaccgcaatgaggtggctaaacttgacgtcgctcggaagtcattgacttctgatagcacggaaagtgatatggtacaagcactccagtatgttgatgagatatgtcagagaagtcgatccagtaggcaggttgtgagaagagatgggttgataatcatgattgctgacttgttgaagaaaagcagtacgaaagtacggcaaatggcactagagactcttcgctccatcgcaaaagatgacaatgacaataaggttgagattgctgctggagacaatattcgcacaattgtaaagttcttaaatcatggtcagactcaggaaaaggaacgagctgtgtctctgttgtttgaactttcagagaacaaggctctttcagaaagaattggcagtgtttctggagctattcttatacttgttggcttgtcaagcagtaaagtagaaaactcgctgattgttgacagagctgagaagacattggaaaacttagagagctgcgaaaagaatgttagacagatggctgaaaatggtagattgcaaccccttctgaggctgcttcttgaaggttcacctgacatacaattatctatggctgcatacctcggagagcttgttttaagcaatgatgttaaggtacttgtggcacaaaaggctggttccacactagtcaatatcatgaaaaaagggaatagagaggccagagaagcagctttgaaggcattgaaccaaatttcatcttatgatgctagtgcaaagatattaattgaagcaggtattcttccgcctctcatcacagacctctttactgttggcagtaatcagcttcctatgagattgaaggaggtctcagcgaccattcttgcaaatgttgtggcatcgggtgcacgttttgagtccattccacttgatcataataggcagaccttagtgtctgaagacattgttcacaatctacttcatcttataagcaacacaggacctgcaattgagtgtaagttgctccaggtgctcgttggtctaactgattcttcgacatctgtacaaaatatagttgatgctatcaaaggttcaggtgctattgtcagtttaattcagtttgttgaagcacctcaaagggaagtacgcatgaattccatcaagctcctgaataacatatcaccatatatgggtcaagaacttgctgatgcttttcgtggaaactttagtcaactccgcagcttggtcaaggtcattgttgataacaatggtatttctgaagagcaagcagctgctgctggccttgtagctgatcttcccatgcgggactctgtcctcaccagacgtcttcttcaagatggggcatttgcaacaatcattccaaaagttttaagaatccgacaaggcgagattcgtggggggcgttttgtgaacccattcctcgaaggtctagttagaatagtctcccggatcacatttgtcttggatgatgatccagatatcattgttgttgcttgtgattacaatcttacttcactcttcactgatctgcttcagatgaatgggcttgacattgtccagatcgtctctgctaatgcgctagagaaactctcacagcagtcaaaacatcttacgaagatactgcctgctcccagcccagggttgtgcttttcaatatttccatgcctcagccagaagactgtagcaactggggtttgtagagttcactgtgggatttgttctgcaagggagagcttctgtctcttggaggggaagtcagtggagaagttggttgcttgcttggataataataatgagaaagtagttgaagctgccctatcagcgttatccactttactggaggatggagtggacattgaccaaggtgtcatggtgctgtgtgatgccgaaggaatcaacccaatacttgacgtattgtgtgagaacagaaatgaggcactgcgccagagagcggtgtgggcagtggagagaatcctgaggatggatgaaatagcatatgaaatatcaggaaaccaaaatgttggtacagccttggttgaggccttcaggcatggtgactataggacaagacaagttgcagagcgagcattgaagcatgtagataagctgcccaatttctctgggatattttctaagatgggagcacaatgacgacgttacatggaagtagtctaattctattttgacacatggattgcagatccacatgaggcacagatgaacacatgtagattggttttgctgacccgcagatggtggtagcgatccgattgatcgaagaagaatcgaaacattgcacgtgttgtatagtgtatatttctacctgtaaacttgtatgtattttttagattggtcagattcatagaataggttgctatccctgttgtgtttagataaatataaataatgcataatccccagctctgggtggggaaaaagaaagaaatgtgaagtatttgcacgtatttaatcatggttttctggttgagtttattgcgat

SEQ ID NO: 201491 - DNA, 3170 bp, Zea Mays
agaatggtttcatcgccgtccctagctgcctgccagtgcagtccagtgctggtgagccgcgtgcggcccgcgggttgccttcttctcttgctagttcacccgtcaccaactcgctcctcgcagcagcagcggacgagcccctctgccctcccctctcgtccctccaggcggcaggcgctagctcgacgttcggccccgcgggccggatccgtcgccacagatccgctgcctcctccccgagtcctgcctgatcgggttttttcagttttccccgttccccgtgggccactcgaccggccgacagggcggaaaggctgccccggccgacagggctggtggcagtgagtccgcgcaggcaaattgaattccggcggcgaatcccatcctgtggtcctctctcgagtcctccgcgtctgcgcctcctccatctcgtcgccgttctcgacgcccgcggatccaacggtccaacactgggtttgcccaacagcccaaggttatgcgggatcctgtctctattgacagtggtgttacgtttgaacgcgatgccattttgaagtacttcaatgaatgtcttagcagcagaaggaggcttgtctgccctgtaactaagatggagctcagcaacactgagttaaatccaagcatagctctgaggaacactattgatgaatggatgaaccgcaatgaggtggctaaacttgacgtcgctcggaagtcattgacttctgatagcacggaaagtgatatggtacaagcactccagtatgttgatgagatatgtcagagaagtcgatccagtaggcaggttgtgagaagagatgggttgataatcatgattgctgacttgttgaagaaaagcagtacgaaagtacggcaaatggcactagagactcttcgctccatcgcaaaagatgacaatgacaataaggttgagattgctgctggagacaatattcgcacaattgtaaagttcttaaatcatggtcagactcaggaaaaggaacgagctgtgtctctgttgtttgaactttcagagaacaaggctctttcagaaagaattggcagtgtttctggagctattcttatacttgttggcttgtcaagcagtaaagtagaaaactcgctgattgttgacagagctgagaagacattggaaaacttagagagctgcgaaaagaatgttagacagatggctgaaaatggtagattgcaaccccttctgaggctgcttcttgaaggttcacctgacatacaattatctatggctgcatacctcggagagcttgttttaagcaatgatgttaaggtacttgtggcacaaaaggctggttccacactagtcaatatcatgaaaaaagggaatagagaggccagagaagcagctttgaaggcattgaaccaaatttcatcttatgatgctagtgcaaagatattaattgaagcaggtattcttccgcctctcatcacagacctctttactgttggcagtaatcagcttcctatgagattgaaggaggtctcagcgaccattcttgcaaatgttgtggcatcgggtgcacgttttgagtccattccacttgatcataataggcagaccttagtgtctgaagacattgttcacaatctacttcatcttataagcaacacaggacctgcaattgagtgtaagttgctccaggtgctcgttggtctaactgattcttcgacatctgtacaaaatatagttgatgctatcaaaggttcaggtgctattgtcagtttaattcagtttgttgaagcacctcaaagggaagtacgcatgaattccatcaagctcctgaataacatatcaccatatatgggtcaagaacttgctgatgcttttcgtggaaactttagtcaactccgcagcttggtcaaggtcattgttgataacaatggtatttctgaagagcaagcagctgctgctggccttgtagctgatcttcccatgcgggactctgtcctcaccagacgtcttcttcaagatggggcatttgcaacaatcattccaaaagttttaagaatccgacaaggcgagattcgtggggggcgttttgtgaacccattcctcgaaggtctagttagaatagtctcccggatcacatttgtcttggatgatgatccagatatcattgttgttgcttgtgattacaatcttacttcactcttcactgatctgcttcagatgaatgggcttgacattgtccagatcgtctctgctaatgcgctagagaaactctcacagcagtcaaaacatcttacgaagatactgcctgctcccagcccagggttgtgcttttcaatatttccatgcctcagccagaagactgtagcaactggggtttgtagagttcactgtgggatttgttctgcaagggagagcttctgtctcttggaggggaagtcagtggagaagttggttgcttgcttggataataataatgagaaagtagttgaagctgccctatcagcgttatccactttactggaggatggagtggacattgaccaaggtgtcatggtgctgtgtgatgccgaaggaatcaacccaatacttgacgtattgtgtgagaacagaaatgaggcactgcgccagagagcggtgtgggcagtggagagaatcctgaggatggatgaaatagcatatgaaatatcaggaaaccaaaatgttggtacagccttggttgaggccttcaggcatggtgactataggacaagacaagttgcagagcgagcattgaagcatgtagataagctgcccaatttctctgggatattttctaagatgggagcacaatgacgacgttacatggaagtagtctaattctattttgacacatggattgcagatccacatgaggcacagatgaacacatgtagattggttttgctgacccgcagatggtggtagcgatccgattgatcgaagaagaatcgaaacattgcacgtgttgtatagtgtatatttctacctgtaaacttgtatgtattttttagattggtcagattcatagaataggttgctatccctgttgtgtttagataaatataaataatgcataatccccagctctgggtggggaaaaagaaagaaatgtgaagtatttgcacgtatttaatcatggttttctggttgagtttattgcgat

SEQ ID NO: 201492 - DNA, 3277 bp, Zea Mays
agaatggtttcatcgccgtccctagctgcctgccagtgcagtccagtgctggtgagccgcgtgcggcccgcgggttgccttcttctcttgctagttcacccgtcaccaactcgctcctcgcagcagcagcggacgagcccctctgccctcccctctcgtccctccaggcggcaggcgctagctcgacgttcggccccgcgggccggatccgtcgccacagatccgctgcctcctccccgagtcctgcctgatcgggttttttcagttttccccgttccccgtgggccactcgaccggccgacagggcggaaaggctgccccggccgacagggctggtggcagtgagtccgcgcaggcaaattgaattccggcggcgaatcccatcctgtggtcctctctcgagtcctccgcgtctgcgcctcctccatctcgtcgccgttctcgacgcccgcggatccaacggtccaacactgggtttgcccaacagcccaagtgatggcagacgtccaggaatgccattatgattcaacgtcacaggccactgacagcttgcatgttgagcctatatatgagtcgttcctatgcccgcttaccaaacaggttatgcgggatcctgtctctattgacagtggtgttacgtttgaacgcgatgccattttgaagtacttcaatgaatgtcttagcagcagaaggaggcttgtctgccctgtaactaagatggagctcagcaacactgagttaaatccaagcatagctctgaggaacactattgatgaatggatgaaccgcaatgaggtggctaaacttgacgtcgctcggaagtcattgacttctgatagcacggaaagtgatatggtacaagcactccagtatgttgatgagatatgtcagagaagtcgatccagtaggcaggttgtgagaagagatgggttgataatcatgattgctgacttgttgaagaaaagcagtacgaaagtacggcaaatggcactagagactcttcgctccatcgcaaaagatgacaatgacaataaggttgagattgctgctggagacaatattcgcacaattgtaaagttcttaaatcatggtcagactcaggaaaaggaacgagctgtgtctctgttgtttgaactttcagagaacaaggctctttcagaaagaattggcagtgtttctggagctattcttatacttgttggcttgtcaagcagtaaagtagaaaactcgctgattgttgacagagctgagaagacattggaaaacttagagagctgcgaaaagaatgttagacagatggctgaaaatggtagattgcaaccccttctgaggctgcttcttgaaggttcacctgacatacaattatctatggctgcatacctcggagagcttgttttaagcaatgatgttaaggtacttgtggcacaaaaggctggttccacactagtcaatatcatgaaaaaagggaatagagaggccagagaagcagctttgaaggcattgaaccaaatttcatcttatgatgctagtgcaaagatattaattgaagcaggtattcttccgcctctcatcacagacctctttactgttggcagtaatcagcttcctatgagattgaaggaggtctcagcgaccattcttgcaaatgttgtggcatcgggtgcacgttttgagtccattccacttgatcataataggcagaccttagtgtctgaagacattgttcacaatctacttcatcttataagcaacacaggacctgcaattgagtgtaagttgctccaggtgctcgttggtctaactgattcttcgacatctgtacaaaatatagttgatgctatcaaaggttcaggtgctattgtcagtttaattcagtttgttgaagcacctcaaagggaagtacgcatgaattccatcaagctcctgaataacatatcaccatatatgggtcaagaacttgctgatgcttttcgtggaaactttagtcaactccgcagcttggtcaaggtcattgttgataacaatggtatttctgaagagcaagcagctgctgctggccttgtagctgatcttcccatgcgggactctgtcctcaccagacgtcttcttcaagatggggcatttgcaacaatcattccaaaagttttaagaatccgacaaggcgagattcgtggggggcgttttgtgaacccattcctcgaaggtctagttagaatagtctcccggatcacatttgtcttggatgatgatccagatatcattgttgttgcttgtgattacaatcttacttcactcttcactgatctgcttcagatgaatgggcttgacattgtccagatcgtctctgctaatgcgctagagaaactctcacagcagtcaaaacatcttacgaagatactgcctgctcccagcccagggttgtgcttttcaatatttccatgcctcagccagaagactgtagcaactggggtttgtagagttcactgtgggatttgttctgcaagggagagcttctgtctcttggaggggaagtcagtggagaagttggttgcttgcttggataataataatgagaaagtagttgaagctgccctatcagcgttatccactttactggaggatggagtggacattgaccaaggtgtcatggtgctgtgtgatgccgaaggaatcaacccaatacttgacgtattgtgtgagaacagaaatgaggcactgcgccagagagcggtgtgggcagtggagagaatcctgaggatggatgaaatagcatatgaaatatcaggaaaccaaaatgttggtacagccttggttgaggccttcaggcatggtgactataggacaagacaagttgcagagcgagcattgaagcatgtagataagctgcccaatttctctgggatattttctaagatgggagcacaatgacgacgttacatggaagtagtctaattctattttgacacatggattgcagatccacatgaggcacagatgaacacatgtagattggttttgctgacccgcagatggtggtagcgatccgattgatcgaagaagaatcgaaacattgcacgtgttgtatagtgtatatttctacctgtaaacttgtatgtattttttagattggtcagattcatagaataggttgctatccctgttgtgtttagataaatataaataatgcataatccccagctctgggtggggaaaaagaaagaaatgtgaagtatttgcacgtatttaatcatggttttctggttgagtttattgcgat

SEQ ID NO: 201493 - DNA, 1759 bp, Zea Mays
cacgttttgagtataggtaaatcataccaaatccatacgcacatgtgacatgaggctgccgggctagatgaagtccagaattctgtagaactcgacaagaactggtgccatcacgtgggttatgctcccgctgtagcaataattgaagaaacgtctagatcgctcgtccggtgtggtctctggacttgcttgccgttcacttctcttcagcggcagcgtggcaaggcaacgagagcaacgaagagtattcaaaccgaaaacaatggatccggtgcggaagagcgtgtgcgtgaccggcgctggcggcttcgtcgcgtcggagctggtgaagctcctcctctcccggggccaatacgcggtccgcggcaccgtgcgcgaccctgatgcggatagagagacgtgggaatgtggaaccgcatttttcttggaagtcgaaagaagctccagattctttataaaaaaaggtgctagcaagaatgcccatctcaaggtgctggaaggagctgaggaaaggttgcagcttctcaaggctgatctgatggactacgacagcattgcatcagcagttgccggctgtgagggtgtcttccatgtagctagccctgtcctttcccatcgaccctccaaccctgaggtggaggtcatagctcccgctgtaataggtacaaccaatgtgctggaaggagctggggaaaggttgcagcttgtcaaggctgatttgttggactacagcagtgttgcttcagcaattgccggctgtgagggtgtcttccatgtagctagccctgtcccttccggtcggtcctccaaccctgaggtggaggtcataggtcctgctgtaacaggtacaaccaatgtgttaaaggcttgctatgaggcaaaagttgggcgagttgtggtggtgtcttcatgtgcagctgtctatgctaatcctaattatcccaagggtaaggtctttgatgaagactgctggtcagatgaagcttactgcaggaagaacgaggattggtattttgtttccaagacactggcggaacgagaggcttttgcttatgcagcaaaaacagggctggatgttgtaactatttgcccgtcattagtatttggacccttgatgcagcctacagtaaattcgagcagcaaaatcatccttaaatatttcacaggagatcgcgagactgttgaaaacatactcagaaatatggtggatgttcgtgatgttgctgatgctcttcttctggcttacgaaaagccagaagcgtctggacgatacatctgcagttcacatgcaataaaagttgctgatatgataaacatactgaagaccttgtatccatcttacccttatcccaaaaatttcgtggaagatgatgacaactctgtatacagctctgagaaactgcagaagctggggtggagcttcaagcctatagaggaatccctccgtgacactgttgaatcctacaaagcatttggcatcctgaattgaacatccagctaggactgttccatctgctgtttttgcctccgaactctttctgaataatgtatgtaggcagtgaaacagcattgccagcaggttaatcctggcatcatgctggagcagcactgtagttctatctttttcttttttttttccatccccaatactatctagtggttcaggaccaaataagtaggcccagtgctgactggtttatggcttgtggcctattgtcgctgctaaaactagaagcgttcgtactatcttgcactcatg

SEQ ID NO: 201494 - DNA, 1574 bp, Zea Mays
ccagaattctgtagaactcgacaagaactggtgccatcacgtgggttatgctcccgctgtagcaataattgaagaaacgtctagatcgctcgtccggtgtggtctctggacttgcttgccgttcacttctcttcagcggcagcgtggcaaggcaacgagagcaacgaagagtattcaaaccgaaaacaatggatccggtgcggaagagcgtgtgcgtgaccggcgctggcggcttcgtcgcgtcggagctggtgaagctcctcctctcccggggccaatacgcggtccgcggcaccgtgcgcgaccctggtgctagcaagaatgcccatctcaaggtgctggaaggagctgaggaaaggttgcagcttctcaaggctgatctgatggactacgacagcattgcatcagcagttgccggctgtgagggtgtcttccatgtccgcggcaccgtgcgcgaccctggtgctagcaagaatgctcatctcaaggtgctggaaggagctggggaaaggttgcagcttgtcaaggctgatttgttggactacagcagtgttgcttcagcaattgccggctgtgagggtgtcttccatgtagctagccctgtcccttccggtcggtcctccaaccctgaggtggaggtcataggtcctgctgtaacaggtacaaccaatgtgttaaaggcttgctatgaggcaaaagttgggcgagttgtggtggtgtcttcatgtgcagctgtctatgctaatcctaattatcccaagggtaaggtctttgatgaagactgctggtcagatgaagcttactgcaggaagaacgaggattggtattttgtttccaagacactggcggaacgagaggcttttgcttatgcagcaaaaacagggctggatgttgtaactatttgcccgtcattagtatttggacccttgatgcagcctacagtaaattcgagcagcaaaatcatccttaaatatttcacaggagatcgcgagactgttgaaaacatactcagaaatatggtggatgttcgtgatgttgctgatgctcttcttctggcttacgaaaagccagaagcgtctggacgatacatctgcagttcacatgcaataaaagttgctgatatgataaacatactgaagaccttgtatccatcttacccttatcccaaaaatttcgtggaagatgatgacaactctgtatacagctctgagaaactgcagaagctggggtggagcttcaagcctatagaggaatccctccgtgacactgttgaatcctacaaagcatttggcatcctgaattgaacatccagctaggactgttccatctgctgtttttgcctccgaactctttctgaataatgtatgtaggcagtgaaacagcattgccagcaggttaatcctggcatcatgctggagcagcactgtagttctatctttttcttttttttttccatccccaatactatctagtggttcaggaccaaataagtaggcccagtgctgactggtttatggcttgtggcctattgtcgctgctaaaactagaagcgttcgtactatcttgcactcatg

SEQ ID NO: 201495 - DNA, 1380 bp, Zea Mays
aagttcgatccagattatagcagctagctcaccgtcaccgacatacagtacaatagcagcttattagcttgtgtcagtccatccatccatccatggagaaactcgtctacttcgcgaccattatatccttatccatggcggcgctgctagtgccactccgcgtacagtgcgaagaagcagctagagctgctgctgccagaagctgccatgccggcaccggagcttctgcttctgcaccagccgcagcagcagcgtggaaaaggagctgcggcggcggcaaggcggggaagcagcagccgcaggtggagggcatgttcgtgttcgggagctcgctggtggacaacggcaacaacaactttctcaacggctccggcgtgcgcgcagactacctcccctacggcgtggacttccccctcggcccctccggccgtttctccaacggccgcaacgtcatcgacgcgctcggcgagctcctcggcctccccgggctcgtcccacccttcgccgacccgcgcacccggcgggcccgcgccgcgctgcgcggcgtcaacttcgcctccggcggctccggcatcctggagcacaccgggcagggcaaggtggtgagcctgcggcagcagatcaccaactttgagtcggtgacccttcctgacctgcgggcccaactgcgtggaccagctgcggccgccaaccactggatcaagggtcaagattccttccacaagtgctacctctccaagtgcctcttcgtcatcggcacaggtggcaatgactacctgctcgactacttcaaccccgggaacggcacccaaggtgggccgcccttgtcagagttcactgcgtctctcatcaccaagctctccggacatcttcagggagacgagcagagcctgctgcgagatgtcgaggagctcgtcgggcgtgctgtgcaagaagcaggggcccatctgcagcgaccggacggagtacgtcttcttcgacgggctgcacccgacggacgccgtgaacgccaggatcgcgcgcaagggctacggctccagctcgcccgaccacgcctaccccatcaacgtcaagaagctagccatgctgtagcccttgtagaagctagccatgcatgcttgtaacctagctttgtactagtagtaataatctagaattaatgcctacctcatcaacgccaacatcgttcgactacttactagtagtactagttctctgtgaaatagtctaataagccatctcccattcgtctttgctaggcgttaagtgtttttagtgaagagtacgcgcgggcatgcagggtggtctagacaatcctaatgtatagtatccgctacttggtcttttatgtatcatgagtgatgcattcgtcttttatag

SEQ ID NO: 201496 - DNA, 1403 bp, Zea Mays
tcgcgctctccccagaatcccgtctgtgcccacgctctccaaggcgagtcctccgcccagatcgctgcagtccctgctctctcctcgccccatccacggcgatgcagcgggagagagaggagcgtggcggagacgaccggagcaacgacgagaaagcatccatggctgcctgtgtgggttccctgtgtgcgcgtccgccggcgccgccatggcggcgtccgccttctccttcgtgggcatggactccattctccatccccatgattcccttcctcgcctgctgttgaagatcattcctgccacaacgccagaggagaacaggaggaggaatccacagcccaggtatgctagaaatcccccagactagctgccgctggatccggtcgatggcccctcgccctccacctccaggctgcatgcgcgtgttcatcgcctgttgtctcaagtgtaaaagtgtgcccttccttcattgtcgcgatccccttccccacacgatccacttccccaatccctgcgccaccatcccgcctccaactgcgcccgagcccccgccacactcccgttgaataatggaagagctaatatagcttgtctctgtaatttttccctagctctttgttgtacgtgcctttgtagccctgtgtactgcaatgaaatgtggggcttgttgtcattgtagacagcgcgcgtaattttctgtgtgtttggattcatctctggtgtcctgcttgatccatgccccatggctgctttatcttctttacagcctgacgaatgatggttgggagtgttggtcatcattttcctgcctggttgggtttcctctgcttgtcattcttgcagtcagcgtgaacgaggttgaggcattgtacaggttgttcaagaagattggcagcaccttcattggcgatgggctgattaacaagataaggctagatgaggtggctatatctcacatggatatcgtgtctccgccagtcgtggttgaacggtcgtgcctggccccctcccccacgagattgccaacctcccgcctcgctcgtcgcagtgctgcccccggcgaggctgccgaaattgtcaccatcctccaccccgctcgctatggcgagtctcacaaggcactgaaatgtgtagatgttttcaaggagttctatcaaacaagaacgaagcacatgaagctgacatggatgggaacctgcaacatcagtgtcaagtttgatgctaagcctattgagctcattgttatgacatatcaggccacattactactactgttcaatggatccgacaggcttagatattctgaaattgcaacacaactaaacctgtcagatgatgtattgatgagaagaaaaaaggtgttgaaaatgttgacaaagacaggaggtcgatctggagcataa

SEQ ID NO: 201497 - DNA, 2268 bp, Zea Mays
ccagtgtatgtgtaacaacaactactattcaggctgcacagctttgcgcagtcgtggccactaggttatctcaagttttaatgttaccgacagagatttagatgatttttttggtggaccagctttccttgcttgggctagaatggggaacttgcatgggtggggtggaccactgtcacaaaactggttggatcaacaattggcattgcagaagaaaattctatcccggatgattgagcttgggatggtccctgttcttccatcgttctcaggaaatgtcccagctattttcgcaaaattatttccgtcagccaacattacgcgacttggtgattggaatacagttgatgctaatcctaagtggtgttgcacttatcttcttgatccttctgattcattgtttatagatgtggggcaggcttttatcaggcaacagataaaagagtacggcgatgtaaccaacatctataactgtgacacattcaatgagaatactccaccaacagatgaaccggcatatatttcatcacttggttctgctatctatgaagcaatgtcccgaggtaacaagaatgcagtatggttaatgcagggttggttattctactcagatgctgcattctggaaggagccacaaatgaaagcactacttcactctgttccaattggtaagatgatagttctcgatttatttgctgatgtcaagcccatttggaaagtgtcctctcagttttacggcgtaccatacatctggtgcatgttacacaactttggtgggaacattgaaatgtatggcatacttgattcaatttcatctggccccattgatgcccgtacaagttacaattcaacaatgattggcgttggcatgtgcatggagggaatagagcacaatccagttgtttatgaacttatgtctgaaatggcatttcataataagaaggttgaggttgaggattggctaaaaacatactcctgtaggagatatggtcaagcaaatgctgacatagagaaagcttggagatatttgtatcatacaatatacaattgcactgatgggattgcggaccataataaagactatatagttgaatttccagacataagtcccagctcagttacttatcaggtttctaaacgaaggggcatgtcaattacgagaaaccataggaggtttttcttaagcgaggtgtctggaatcctaccgcagccgcatctgtggtactctacgaaggaggccgtcaaagcccttgaactatttcttgatgcaggaagcacattttcagaaagtctcacgtataggtatgaccttgtcgacctaactaggcagtgcctatccaaactagcgaatgaagtttaccttgacgcgataagtttgtaccaaaagaaagattcacatggcctgaatgctcacgcgaggaaatttcttgagatcatcgtggatatcgatacgttactagctgctgatgataactttctgctgggcccctggctggaaagtgcaaaaagccttgctataactgaaaaggaacgccagcagtacgagtggaacgccagaacacaggtgacgatgtggtatgacaacacggagaccgagcagagtaaactgcatgactacgccaataagttttggagcgggctgctgaagagctactaccttccaagggcgtcaaagtacttcgcctacttaacgaggagcctgcaagagaaccggagcttccagctggaggagtggaggaaggactggatctcgtattccaacgagtggcagtccggaaaggaggtgtacgccgtgaaggccacgggtgatgctttggcgattgccaggtcactgtacagaaaatacttgaggccttgagctagtgctagtcaatgcacggatgtgaccattagaataagtggattccacatctctctccatcaatttaagtttaattgatacatataatttaatatatggtgtcagtcagatatctttgagttttaaatcttgattagcacaattaaataaaatagatattgctcgttcctatttttatctctgactcctccggagtccggagagcaactccaaaaaagagacctatatttgagtcctaaatattgtttttgacctgatttgatttgttttaggaccctaacatattatctgccaacaatcaggccttaaacatctatttatcaataaccaaacgggctagcacagaaaaatcaagcgccaaacaacgtaagagtgaagtcttatatgaatttactgcaatgttggag

SEQ ID NO: 201498 - DNA, 3925 bp, Zea Mays
ctcgactccatcgtccaggcccccaccgtccgtctctccctccctcccccgtccgccttcgcctcgcctcaccgcgccgctcccaaaattccccgccccacggcttccccccgcaaaacccaccccacgaaacccaaaaaatcccgcgcggacacccgaatccccccgccttcccgctcccctcgcgctgcgccgatccgttcccccatggatccgcagtcggacgcgggcgcggcggtggtgctgggcgccgacccggcggcgctgacggcgctgctggcggacctcacctccccggccaacgaggcgcggtcgcgggcagagcagcagttccacgccttccgcaggtcccatccggacgcgctcgcgctgagcctcgcgcacctgctgctctccccggcgcacccctccgcgcccatcgccgccgtgctgctgcgtcgcctcatcgcgccgtcatcccagtccttcgtctaccctgcgctgtcgcccgccacgcagtcctcgctccgcgcgctgctgctctcggccgcttccgcgcctgcgctccccaggtctgtctctaggaagctctctgacgccgtcgccgagctcgcgtccttcctcctgcccgccaacgcgtggcccgacctactcagtttcctgtacaagtccatagattccacgtcctccccgccgggattgcaggagtcggcgctcaacatcctggcccggctggcctcccacctcgcggccagcttccccaacctccacgggctcctccacgccgctctctcccacccttcttccgccgatgtgcgcgtcgcggggctcaatgcggccatcagcctcatccagtcccttccttctgccgcggcccgcgaccaatttcaggacctcctcccggccatgatgcgcgctctcgccgagtcactcaactgcgggaacgagggctcagcccaggaggctctggagatgatgatcgagctcgctggcgcagagccgcggttcctgcgccgccagctgcctgacgtggtcgcgtccatgctgcagattgccgaggccccaggactagaggatggcacccgccaccttgccgttgagtttgtcgtcacccttgccgaggcacgggagcgtgcacccggaatgatgcggaagctgcctcggtacgttggtcggctatttgcggtgctcatgagtatgctgctcgatgtccaggatgaaccggcatggcatgccgcagtgtcagaggaggaagacgccggagagacgggaagctatgtttttgcacaggagtgtctggaccggctgtcaattgctgttggtggtaatacgattctgtccgtggcagctgagttgctcccatcgtttttctcctctgaagattggaagagacgccacgcggcactagtgaccatagctcagattgcagagggctctgctaagatgatgattaagaatctggagcaggttgttgggatggtgctgaattctttccaggaccctcacccacgggtgaggtgggcagcaattaatgcaatagggcagctttcaacggacctggggccagagttgcaaaatcagttgcaccatgttgtgctaccttcattagcttcagcaatggatgatgtccagaacccacgtgtacaggcacatgctgcatcagctattctgaacttcagtgaaaactgcagacctgatattttgacaccatacttggatgtaatagttgggaaacttctattgttactccagactgggaaccaaatggtgcaagaagctgctttaactgctttagcatcagcagcagattcttctcaggaacacttccaaaaatattatgatgcagtaatgccatacctcaaggctattctcatgaatgcaactgataaatccaacagaatgttgcgtgccaaatccatggaatgcatcagtttagttggtatggcagttgggaaacaaaagtttaaggatgatgctaagcaggtgatggaggtccttatgacactgcaaggatctcagatggaggctgatgaccctataacaagctacatgctgcaagcatgggcaagactgtgtaaatgccttggtcaggatttcttaccatacatgagtgttgttatgccccctctgctccagtctgctcagctcaaaccagatgtgagtgtcacttctgctggaccagaagatgaaaatggtgaatctgatgacgagggtgtcgagactattacactaggtgataagaggatcggcatccgaactagtctactagaggagaaagctacagcatgtaacatgctgtgttgctacgctgatgagctcaaggaaggatttttcccatggattgatcaggtcacgactacgcttgtacctctcattaagttctattttcatgaggaagttaggaaggcagctatttcagcaatgcctgagcttctacgttcagcaaaattggctatagaaaagggccaagctcaaggtcgtgataaatcctatcttaagcaactgtctgattacatagttccagcccttgttgaggccatgcataaagaacctgagccacaaatttgtgcaagcatactggaatcattgaatgaatctatacagctatcaggaacacttcttgatcaaaatcaagtaagatctgcagtggaaggtgtcaaagaagttatagttgcaagcactaacaggaggatagaacgaacagaaagggcaagggctgaggactttgattctgaagaagaggagctactcagagaagaaaacgaacaggaagatgaaatctttgaccaaattggtgattgtctaggcactctcgttaaaaccttcaagacttcttttattccgttcttcgatgaactctccatgtatttgacacctatgttggtattatgatacataccttccttctctattagaagcctgcatgagtgaaaatccagatgtcaggcaggctgcagtgtatggaattggcatttgtgccgaatgtggtggttctgcatttaggcctcacactggggaggccctatccagattatacaatgtaatcaaacatcctaatgccctggatttggataatgcaatggcctatgacaatgctgtttctgctcttggaaaaatatgccgatttcatcgtgatatcattgatgtatctcaggtaattcctgcctggttaagttgccttccgataaaaaatgatttaattgaggccaagcttgtccatgaacagctgtgtgtgatgcttgagcagtctgagagggagcttttgggtcataataatcagtatcttccaaagattgtgtctgtttttgcagagatattatgtgcgggcaaagatctagcaacagaacagactgccagcaggatggttaatctactaaggcaacttcaggcaacattgcctccttcagtattagcctcgacatggtcttctctacaaccacagcaacagctcgctctacagtccgtgttgtcgtcatagctaacctaaaatagcctcaactgtgtaaagcatatgagtcttcacagcttgacctttcgtgttctatttatgcgcttttgagccagagccagggttcctggggtttgctttcgcgttcatgtgcccttaggttttgtacaaggggcactgcttgcatccggtgtgtaatatcggctgcagttgcagaactgcacggatgtgtacgagactgggctctctccacatcgtcgattaagttgtaaagcagtatatcttgctcgcttagtaattttagttgggttgaaagaattgtaaattaaaacaattttggtagttgattttaatgtcgtatttcttataccatcagcatgggaaattttgtgttcaaaaaaagaagagaaaaagcagcttggttatcttgtgtcgtgtgccttttctcgatgtgtacttattcttcgtatgtatggggatagtaacgcatttgcctag

SEQ ID NO: 201499 - DNA, 3487 bp, Zea Mays
tccgccttcgcctcgcctcaccgcgccgctcccaaaattccccgccccacggcttccccccgcaaaacccaccccacgaaacccaaaaaatcccgcgcggacacccgaatccccccgccttcccgctcccctcgcgctgcgccgatccgttcccccatggatccgcagtcggacgcgggcgcggcggtggtgctgggcgccgacccggcggcgctgacggcgctgctggcggacctcacctccccggccaacgaggcgcggtcgcgggcagagcagcagttccacgccttccgcaggtcccatccggacgcgctcgcgctgagcctcgcgcacctgctgctctccccggcgcacccctccgcgcccatcgccgccgtgctgctgcgtcgcctcatcgcgccgtcatcccagtccttcgtctaccctgcgctgtcgcccgccacgcagtcctcgctccgcgcgctgctgctctcggccgcttccgcgcctgcgctccccagattgccgaggccccaggactagaggatggcacccgccaccttgccgttgagtttgtcgtcacccttgccgaggcacgggagcgtgcacccggaatgatgcggaagctgcctcggtacgttggtcggctatttgcggtgctcatgagtatgctgctcgatgtccaggatgaaccggcatggcatgccgcagtgtcagaggaggaagacgccggagagacgggaagctatgtttttgcacaggagtgtctggaccggctgtcaattgctgttggtggtaatacgattctgtccgtggcagctgagttgctcccatcgtttttctcctctgaagattggaagagacgccacgcggcactagtgaccatagctcagattgcagagggctctgctaagatgatgattaagaatctggagcaggttgttgggatggtgctgaattctttccaggaccctcacccacgggtgaggtgggcagcaattaatgcaatagggcagctttcaacggacctggggccagagttgcaaaatcagttgcaccatgttgtgctaccttcattagcttcagcaatggatgatgtccagaacccacgtgtacaggcacatgctgcatcagctattctgaacttcagtgaaaactgcagacctgatattttgacaccatacttggatgtaatagttgggaaacttctattgttactccagactgggaaccaaatggtgcaagaagctgctttaactgctttagcatcagcagcagattcttctcaggaacacttccaaaaatattatgatgcagtaatgccatacctcaaggctattctcatgaatgcaactgataaatccaacagaatgttgcgtgccaaatccatggaatgcatcagtttagttggtatggcagttgggaaacaaaagtttaaggatgatgctaagcaggtgatggaggtccttatgacactgcaaggatctcagatggaggctgatgaccctataacaagctacatgctgcaagcatgggcaagactgtgtaaatgccttggtcaggatttcttaccatacatgagtgttgttatgccccctctgctccagtctgctcagctcaaaccagatgtgagtgtcacttctgctggaccagaagatgaaaatggtgaatctgatgacgagggtgtcgagactattacactaggtgataagaggatcggcatccgaactagtctactagaggagaaagctacagcatgtaacatgctgtgttgctacgctgatgagctcaaggaaggatttttcccatggattgatcaggtcacgactacgcttgtacctctcattaagttctattttcatgaggaagttaggaaggcagctatttcagcaatgcctgagcttctacgttcagcaaaattggctatagaaaagggccaagctcaaggtcgtgataaatcctatcttaagcaactgtctgattacatagttccagcccttgttgaggccatgcataaagaacctgagccacaaatttgtgcaagcatactggaatcattgaatgaatctatacagctatcaggaacacttcttgatcaaaatcaagtaagatctgcagtggaaggtgtcaaagaagttatagttgcaagcactaacaggaggatagaacgaacagaaagggcaagggctgaggactttgattctgaagaagaggagctactcagagaagaaaacgaacaggaagatgaaatctttgaccaaattggtgattgtctaggcactctcgttaaaaccttcaagacttcttttattccgttcttcgatgaactctccatgtatttgacacctatgttgggtaagaataaatcaccagaagaaagaaggattgccatatgcatttttgatgatgttgctgagcattgccgtgaagcagcagttaggtattatgatacataccttccttctctattagaagcctgcatgagtgaaaatccagatgtcaggcaggctgcagtgtatggaattggcatttgtgccgaatgtggtggttctgcatttaggcctcacactgggggtatgaggccctatccagattatacaatgtaatcaaacatcctaatgccctggatttggataatgcaatggcctatgacaatgctgtttctgctcttggaaaaatatgccgatttcatcgtgatatcattgatgtatctcaggtaattcctgcctggttaagttgccttccgataaaaaatgatttaattgaggccaagcttgtccatgaacagctgtgtgtgatgcttgagcagtctgagagggagcttttgggtcataataatcagtatcttccaaagattgtgtctgtttttgcagagatattatgtgcgggcaaagatctagcaacagaacagactgccagcaggatggttaatctactaaggcaacttcaggcaacattgcctccttcagtattagcctcgacatggtcttctctacaaccacagcaacagctcgctctacagtccgtgttgtcgtcatagctaacctaaaatagcctcaactgtgtaaagcatatgagtcttcacagcttgacctttcgtgttctatttatgcgcttttgagccagagccagggttcctggggtttgctttcgcgttcatgtgcccttaggttttgtacaaggggcactgcttgcatccggtgtgtaatatcggctgcagttgcagaactgcacggatgtgtacgagactgggctctctccacatcgtcgattaagttgtaaagcagtatatcttgctcgcttagtaattttagttgggttgaaagaattgtaaattaaaacaattttggtagttgattttaatgtcgtatttcttataccatcagcatgggaaattttgtgttcaaaaaaagaagagaaaaagcagcttggttatcttgtgtcgtgtgccttttctcgatgtgtacttattcttcgtatgtatggggatagtaacgcatttgcctag

SEQ ID NO: 201500 - DNA, 2543 bp, Zea Mays
agaacacacaagagatcaaaaggcacatgctgcatcagctattctgaacttcagtgaaaactgcagacctgatattttgacaccatacttggatgtaatagttgggaaacttctattgttactccagactgggaaccaaatggtgcaagaagctgctttaactgctttagcatcagcagcagattcttctcaggaacacttccaaaaatattatgatgcagtaatgccatacctcaaggctattctcatgaatgcaactgataaatccaacagaatgttgcgtgccaaatccatggaatgcatcagtttagttggtatggcagttgggaaacaaaagtttaaggatgatgctaagcaggtgatggaggtccttatgacactgcaaggatctcagatggaggctgatgaccctataacaagctacatgctgcaagcatgggcaagactgtgtaaatgccttggtcaggatttcttaccatacatgagtgttgttatgccccctctgctccagtctgctcagctcaaaccagatgtgagtgtcacttctgctggaccagaagatgaaaatggtgaatctgatgacgagggtgtcgagactattacactaggtgataagaggatcggcatccgaactagtctactagaggagaaagctacagcatgtaacatgctgtgttgctacgctgatgagctcaaggaaggatttttcccatggattgatcaggtcacgactacgcttgtacctctcattaagttctattttcatgaggaagttaggaaggcagctatttcagcaatgcctgagcttctacgttcagcaaaattggctatagaaaagggccaagctcaaggtcgtgataaatcctatcttaagcaactgtctgattacatagttccagcccttgttgaggccatgcataaagaacctgagccacaaatttgtgcaagcatactggaatcattgaatgaatctatacagctatcaggaacacttcttgatcaaaatcaagtaagatctgcagtggaaggtgtcaaagaagttatagttgcaagcactaacaggaggatagaacgaacagaaagggcaagggctgaggactttgattctgaagaagaggagctactcagagaagaaaacgaacaggaagatgaaatctttgaccaaattggtgattgtctaggcactctcgttaaaaccttcaagacttcttttattccgttcttcgatgaactctccatgtatttgacacctatgttgggtaagaataaatcaccagaagaaagaaggattgccatatgcatttttgatgatgttgctgagcattgccgtgaagcagcagttaggtattatgatacataccttccttctctattagaagcctgcatgagtgaaaatccagatgtcaggcaggctgcagtgtatggaattggcatttgtgccgaatgtggtggttctgcatttaggcctcacactggggaggccctatccagattatacaatgtaatcaaacatcctaatgccctggatttggataatgcaatggcctatgacaatgctgtttctgctcttggaaaaatatgccgatttcatcgtgatatcattgatgtatctcaggtaattcctgcctggttaagttgccttccgataaaaaatgatttaattgaggccaagcttgtccatgaacagctgtgtgtgatgcttgagcagtaagtaattcccacaatttgtttctgcagagttgcttttcctgagattaaccaatactccctatcatctagacttctgttttatttcacgtttctttaacagctattattttttcgtgtaatcaacgttcaacaggtctgagagggagcttttgggtcataataatcagtatcttccaaagattgtgtctgtttttgcagagatattatgtgcgggcaaagatctagcaacagaacagactgccagcaggatggttaatctactaaggcaacttcaggcaacattgcctccttcagtattagcctcgacatggtcttctctacaaccacagcaacagctcgctctacagtccgtgttgtcgtcatagctaacctaaaatagcctcaactgtgtaaagcatatgagtcttcacagcttgacctttcgtgttctatttatgcgcttttgagccagagccagggttcctggggtttgctttcgcgttcatgtgcccttaggttttgtacaaggggcactgcttgcatccggtgtgtaatatcggctgcagttgcagaactgcacggatgtgtacgagactgggctctctccacatcgtcgattaagttgtaaagcagtatatcttgctcgcttagtaattttagttgggttgaaagaattgtaaattaaaacaattttggtagttgattttaatgtcgtatttcttataccatcagcatgggaaattttgtgttcaaaaaaagaagagaaaaagcagcttggttatcttgtgtcgtgtgccttttctcgatgtgtacttattcttcgtatgtatggggatagtaacgcatttgcctag

SEQ ID NO: 201501 - DNA, 938 bp, Zea Mays
tctgggttttcaggtgagcaccattagctttagcctcattttacattacaacgatttaccagatgtgcgtcacatctgatatatattttggccagttcaaggtgagtgatatcattagttattatctataggtgatttcatgttctgtaattgtagtattgttttactttttatggaagtaagggcaggaattgtagtaccattttactatttaatactggtattagactgctggtataaacggatgttttctccaaacatcttaacatatgaatggatgttttttctttgtggggaaaaaactttgagcattctctgaaactaagttttcatgcaaaataataggctgtattgccatggattgcatcgactattgacttgggtgcatttttcctctttacctgttcacagtggggacacggatgctgtagttcctgtaactgcgacaaggtactcaatagatgctctcaagcttccaacactggtaaattggtacccttggtatgaccatgggaaggttggaggttggagccaagtttacaaaggactaacccttataaccatagcaggtgcaggacatgaagtgccactgcaccggcctcgacaagctttgatcatgttcagacacttcttgcagaacaaaccgatgccagcacaatagccagtcgaagcagaaatatagtgtaaactaccacagtcatgtttaatattttttaaattcttttttacttgatttgattgttattgttacaacatattgttcaattatctcgattgaatgtatgtacgcccagtagcaaatagggatacctgaaatttgtactgctggagctaaagagctccgctgtatatgtaatgatgatctttagcattatcgtccttcgccttcagtgtttggatcattggaattgaatttcaatctaataatagtaatttag

SEQ ID NO: 201502 - DNA, 2335 bp, Zea Mays
gcgcaccggacgcggacggacagcctgctctgcctctactgaactacttcgccactgcacctcccactccctgcctgcccctctacaaatctctcctgctccactcttctccacgtccatcccgcgccccgaatttcccgagccaactccgccccgccctgtcgctttcccttccacacgcgccgttcgctttgatcgatcaggcaggcatggccgacgagacgaagcaagaagccgccgcgggcgatgaggcggccgtgatcgatggcactgggtcgttcaaggaggagagtaacctggtgtccgagctccccgaccctgagcgcacagcgctcgcgcagctcaaggagctcgtcgccaccgcgctcgctaacggggagttcaacctgccgccgccgccagccaaggaggaggccaagaaggaggagccggcaaaggaagaagctccggcggacaaggaggacgagcccaaggcagaggaggcggctgcccaagagcccgtcaaggaggaggccaagcctgaggagcccaaaacggaggcgccggcggaagcagcgcccgaggaggttaaggacgagacacccgtgccggaagagaccaagactgaggctcccgcgccggaggagcccaaggccgaggagcctgccaaggaggagctcaaggcagaggcggcgacggaagcggtcgccgaggagaccaaaccagctgagccggtgccggaggaggaggagaagacggtcgttgttgccgaggaggaggccaccaaaacggtggaagccatcgaggagacggtcgccgtcgccgtcgccgccgccgcgtccgaggagcccgaggcgggcgagccgaaggaggagctgatctggggcgtgccgctggcgggcgacgacgagcgcacggacacggtgctgctcaagttcctccgcgcgcgcgagttcaaggtgaaggaggcgatggcgatgctcaagtcggcggtgctgtggcgcaagcggttcggcatcgacgagctcctcctggacgccgacctcggcctgcgggagctggagggcgtggtgttctaccgcggcgccgaccgcgagggccacccggtctgctacaacgtgtacggcgagttccaggacaaggagctgtacgagagggccttcggcgacgaggagaagcgggagcgcttcctcaagtggcgcatccagctcctggagcgcggcatccgggagcagctcgacttctcgcccagcggcatctgctccatggtgcaggtcaccgacctcaagaactcgccgcccatgctcggcaagcaccgcgccgtcacgcgccaggctctcgccctgctacaggacaactacccggagttcgtggccaagaaggtgttcatcaacgtgccgtggtggtacctggcggcaaacaaggtgatgagcccattcctgactcagcgcaccaagagcaagatcgtcttctgcagccccggcaagtcggcggagaccctcttcaggtacatcgccccggagcaagtccccgtccagttcggcggcctgtacaaggaggacgacaccgagttctccacctccgacgccgtcaccgagctcaccgtgaaaccgtcctccaaggagaccgtcgagatcccagccaccgagaactccaccgtggtgtgggagctccgcgtgctggggtgggaggtgagctacggcgccgagttcacccccgacgcggagggcggctacaccgtcatcgtgcagaagacgcggaaggtccccgcccacgaggagcccatcatgaagggcagcttcaaggccacggagcccggcaagctggtgctgggcgtgaacaacccggcgtccaggaagaagaagctgctgtgccggttcaaggtgaggagcgccgccgcctgatgagggtcgttggtctgggtcccagcaggtacagcctgccagctgcttgaccaccagcccgacatgtataattcgatcgatcgccaaccaggtccataccgccaccatttgaatgaacatgctgcattgcattacatgataggagagagagagagagagagagaggacaataaagagtttctgcttcctagctaggcccgttccgtgtcctggtcgttctttgattatttgttggcttgctgttcttttttttccttggggggagggtcgcgtttgtatgtgtttattacttgaatgaaaacaaaagtgagcttgttatatgagatagccatggcttgttgaggtcaccgtggtccgtggtggggtgggggaagaagaacagtaacagttgctgcccggcctgtacatttctttcatccgtggattctgttccgtcgacatgtttgtttgag

SEQ ID NO: 201503 - DNA, 2075 bp, Zea Mays
ctagtctgtcatatgtggacgctatgatgcatggacagtgggcttcttagggcctttatgggccaggaattcgtcgaagcctgaaggaaggaaaaaaaaaacctaaagatggtcgctgccaccaggtagtttccaggcttccacgtttcactccaccgcttgtttccagttaccaccactccacttctaggttccagccgtgccggcgccgccgcttgcgctactctgcgcgccctcgccgctgcttgcttgctcgcaacttagaaggtgacgccgcctgcccagtgcgagcacgcctccacttgcactgcgggctgcggccctgccgaatctggaaggtgtcgagaagaaatagatccttgcactccatgccgctatgatcagcgctggccgcagcaggcggcgggggcgggcaccggcgtccctgcccacgaccacgaccgctgcttcccgccggaccgagcactccatctcctgctgatatatgagagcatggttttctgtaggtgtttatctatctctcattgctttagtcagtatatccttggtcccatatcttcggatgtaatgtggatgaagttaagctttggttatattttcccccctaggagtggattccttagtgcctggttacagaacctactgacttcaggtctcaacatatctattgtagacaccacaatcattataatgtcaacaatcctgtctattgtttttcatgagtttggacatgccattgcagctgcaagtgagggactacagattgaatatgttgctatatttgtcgctgtactttttcctggggcatttgttgctctgaactatgacctactacaaaatatgcctctcttttccatgcttcggatttattgtgcagggatttggaataatgttatgctctgtacagcatgtgtgatgataacattgttacttcctgtgatgttatatcctctctatgtgagtggtgatggcctcatggtcatggaagtccctgaaatatctcctatgtcagaatacttgtccactcatgatgttattctttctgtggatggtctgaaaataaccagaactgatgattggatcaagattctgaaccaaggtactacagcgaaatctagggatcctgaattccttgaaggctctcatagatatgttgccactagttctaccaagggttattgcgtgcccgattcatggatagatgcaagcaaaaatctctggcagataagagacaagctgccttgcccagatgaactgatagccttcgaaaaagttatctgtaacgtctcaaccattttgacagagaagactagcataggtagtgaccagaaggaagttgagggaaaatattgtttgattgcgaaagatgtagtaaagcttagaagatgtggaaacggatggcacatgactgaagatgatgaaagtagctgtgcatgttttgaggatgagcactgtttggtacctgttctgaacccaggcttttcatggattgaggtctcctatgccaggccatactctttgagatgtttacaaaaaggaggaaatttgttatcatcacatactgcaaatagtaactttggacagagtccttgtgaaggatcttttgtttatgtgggtgatctgtcatcagcagcacgttcggttaggttatcccgctaccgacctcgatgggcacttctacttttcattgcagacatcccatatatcttggaaaatggtttaagtagcttgcttcatgcatctgcagcattggctgtaatcaattgcctaccggtgtattttctggatggtgaagcgattctggagactaccttaagctatgtagcttggtttaccccaagactgcaacgcagaattctaaaagtatgcagcgtggtgtggacgggtttattagtcattactttctcaagtatttgttattccacagtgctacattatggcgtatagcaaataacccatgtaattttgtcttgaacaaagagaagatcattttaatggaacatgccaactgtactctgtccattgtaaattataagttgttttgacttttatatatacataacttttgttaggct

SEQ ID NO: 201504 - DNA, 5126 bp, Zea Mays
ctagtctgtcatatgtggacgctatgatgcatggacagtgggcttcttagggcctttatgggccaggaattcgtcgaagcctgaaggaaggaaaaaaaaaacctaaagatggtcgctgccaccaggtagtttccaggcttccacgtttcactccaccgcttgtttccagttaccaccactccacttctaggttccagccgtgccggcgccgccgcttgcgctactctgcgcgccctcgccgctgcttgcttgctcgcaacttagaaggtgacgccgcctgcccagtgcgagcacgcctccacttgcactgcgggctgcggccctgccgaatctggaaggtgtcgagaagaaatagatccttgcactccatgccgctatgatcagcgctggccgcagcaggcggcgggggcgggcaccggcgtccctgcccacgaccacgaccgctgcttcccgccggaccgagcactccatctcctgctgttattgtgactgcaagatatattccttaaacgacgccctcttcaatttggggtggaagtatgctagatatatgagagcatggttttctgtaggtgtttatctatctctcattgctttagtcagtatatccttgatgctattgtgggagtcaattggtgtgttttattttaggagtggattccttagtgcctggttacagaacctactgacttcaggtctcaacatatctattgtagacaccacaatcattataatgtcaacaatcctgtctattgtttttcatgagtttggacatgccattgcagctgcaagtgagggactacagattgaatatgttgctatatttgtcgctgtactttttcctggggcatttgttgctctgaactatgacctactacaaaatatgcctctcttttccatgcttcggatttattgtgcagggatttggaataatgttatggtaagtcatgctgttatgcatttattatttccaaaagatagaaataagttcatttattgattgtgcctctttgtatcttcgtaatgcattgtcatatacttttgatatttgggtacttgatgctacctcatatagaagtagtttaatcattaaaaggaaaatgcataactatttgtttacttgcaataatgaaggcaacgagaagtaagaacaatatactctatgcagtctagcgtaagatgcaattggtctcactaaatatttgttcgaaataatgtgagcaaagttattgtagagaattagggaacacctcacacccaattagggggtggctttcatatatatgtagtcatgtacaacttggaatacaatatgtgttagactatacatacctctaatacctgcccacagtcacaactgtagggaactgaatgagactggacctgaagacattgaactactgtgtaagcagtctcttagtcataatgtacgtgaactgattagttgaggccacatggagtaccctaaagccaccttctcacgaacaaagtggatgtcaattgtcaatgtctatatgcttcgtacgacgatggtgaaccgaattggcagtcatatagactgtggtgacattgtcacaatagacaatggtcgccaaaccgagtgatagtctgaaattgaccatcgactatgttaaagctatcgtgagggaggctacacttgaggcttcgtcgggcaaacgggagcccttgcccccatcggttgcggcaagtccagagcagcaaccttcttcagcgatggaggcggaaaagaacgccgctgaggaactatcttttctaaagcacgcaactttgggaaaatattgtctgattgtggcgaagaagaaagatgaaggctctttggcgcgacctgttgactaggtgtaaattttgtacactaggccatgctgaagattcgttaggttgagttttgcttgaaggccttggaaaatattatgtctgattgtctgccacgcttcaattgtcgaccaatacatcatgcacggtgaagcttatattacagttgattaccatgatattgctgtgtgggtaatatcttagccgaaggtcatcttgagtgaatgttacaggcatatgaaccacttagatctgatataggacccctgaacacctatatgttggaccctcctttgaagttcttgtttttatctcttattgagtggcccgaagcttgatcttctcattattgggaatatgtgctttgctggtggaactaagttgttgacgtctgagctttgggctcttcccttctactgagctggctatgttctcgtatgtggcgtttttgtggaggttgattatataacattggatcatattgtgatgggtctggtagttgggggttgtaagcttcccactgttgtgactgatgttgcacaattgggcttgaggacgaagaatgtgagttctgcccttgatgctggatgtatgacacatcatagttagtcgagcattaagatgatgtatggcacacattcttcggctggccttcctgcttcacggttgccaattccttatgcttttggatggtgatgctacaatattttgttgtatgctctttattctccccgcaaaatacacaatactagtcaatggcgcgcgccagcgcttgcataggatttccctttttttactgggaaggtagagcggcacaacaacagtcgtcgcccacgcgtgcggctagatgtaccaacggccaagatttttcgcgcgacatggatagtgcgaatgtcgaggaagttgcatcggtttaataagaagaaatagctttcttgattgaccgttgttggagtacctgcctccaaaggtgtggccccccttctgtccctttgtgttgagccaccccagaaactactttgctggctttgctaaggtccgttcgaaggttggcttgttgttggagtttgcggaaactacttttctccatcaaactagggtgtagtctgaattgttcgggcttcccttgcatccttgttgaaaaccctcatgatctctctgtgtttctgttgttcttgtcaacgctgtcgaaagtcattgtgtgctctaatatattcatccatcttctgaaacagcttcttcaaggtttgcggaggctttcagacaaaccttcacatataactttgaagggattcatctacttcttgaaaacatggaacaatgcatgtgccatgactaggtttgtttgaaagccttggaaacttgcaatcgattgtttcttaagttgttcccatgtggttatcgatctggacaaagggatgagtactaggtttgagctatgccttttgttgacggagggatgagtaccaggtttgagctatgccttttgcggccataatatgatttggctaacattgttgtgtttctgccgaattatgcaatggttgcttcgtaactcatgaggaattgctttgatttcgactgcccatcattcagaggaagcatggacagtttatatgcagcttgccatggggctacctgcaaatcccttgagaacgaagatgcactatcatagatgaaattacatttttacctttccctatttcatagtcaccctttgcaattaagggagtacaataatgtcattttactgcgtagacgtgtcgcacacatcttctcttcgtagaagcttcttatgtctcctctccttcgaagtcctctttatcgacgacaaagctttgctttcaatgccttcggcttcatgcacctttggctcattcagatctaccgaagctttttcaaggagagcggtgatcttcctttggccttcattagctttctggacctgaaaaaccatctaaatattgatttcatcattttggaccttcgactagagacctccccaacaacaaccaaatagaaacaattgctggtttacaaatgccattaaaccctggttagagaagtgcaaatataattctaatgcagtcttagacatacttcacgcgagtgtgaaatgtaacgttatatacttgtatactgaccttgttacttaatcattgtgatgttttataatttttttgttatgatttcatgtttaatagctctgtacagcatgtgtgatgataacattgttacttcctgtgatgttatatcctctctatgtgagtggtgatggcctcatgaactgatgattggatcaagattctgaaccaaggtactacagcgaaatctagggatcctgaattccttgaaggctctcatagatatgttgccactagttctaccaagggttattgcgtgcccgattcatggatagatgcaagcaaaaatctctggcagataagagacaagctgccttgcccagatgaactgatagccttcgaaaaagttatctgtaacgtctcaaccattttgacagagaagactagcataggtagtgaccagaaggaagttgagggaaaatattgtttgattgcgaaagatgtagtaaagcttagaagatgtggaaacggatggcacatgactgaagatgatgaaagtagctgtgcatgttttgaggatgagcactgtttggtacctgttctgaacccaggcttttcatggattgaggtctcctatgccaggccatactctttgagatgtttacaaaaaggaggaaatttgttatcatcacatactgcaaatagtaactttggacagagtccttgtgaaggatcttttgtttatgtgggtgatctgtcatcagcagcacgttcggttaggttatcccgctaccgacctcgatgggcacttctacttttcattgcagacatcccatatatcttggaaaatggtttaagtagcttgcttcatgcatctgcagcattggctgtaatcaattgcctaccggtgtattttctggatggtgaagcgattctggagactaccttaagctatgtagcttggtttaccccaagactgcaacgcagaattctaaaagtatgcagcgtggtgtggacgggtttattagtcattactttctcaagtatttgttattccacagtgctacattatggcgtatagcaaataacccatgtaattttgtcttgaacaaagagaagatcattttaatggaacatgccaactgtactctgtccattgtaaattataagttgttttgacttttatatatacataacttttgttaggct

SEQ ID NO: 201505 - DNA, 2497 bp, Zea Mays
gtcagtgatggctagacttctcactccctcccagcttcttcggacgcttcgcttgtctaatcgctgcaactgcagcttgctcgctgacttgccgccggcgagccccgctccgagcatctccgctgctgcttctgccgaatcccagagctccttctcccgcttgccccctttccctcctgtcacattgattcgattttcgtcgcccatggagctacaaattaagtgtaggaaccaattaaaagcttgccaaaactagggcggcggcatcagcattcagcaataccctaggcgggctctcctcgcctccacagctccaggaagccgacccagagcagcacagcgccgcccattctgtctctctcggtctcggcagcgtaggcagcgtcaccctccgcttaaaccaccagcaccagctgctggtgcgccgccccgcccggcaccgccgctcctctacctcttcctggtggattgattattgtgagtttatccctgccccaatccatctgtccatggtccgcgtgggcttgtcttccgcgcccggggtcaatctgacagagcaaatcgataatgtttttgaccaactgatcaacaagatagaacatgcggattttgatacgcggcctttcttgaaacaattgaatgtgttaggccgctatgaaccaatcaagcggagtatccttgccaactagacttttgaatcttcactgtaatataggagtattgtttttctcaagataatttatttgcacatttgcctcgtttaattcttactgttcatcatcaaaatatcatattctgacacgtccttgttcaacatattcaaactttctattctatgcctcttttatcagtcaagttagtatttcatccaacatatcctgtaacttgactacattacatagtcctagcctgaagtagaaatcagtgcaggaacgaaactagcaattcaatactgtgactacaacagggatatgtcttaatgttatatcatttttctttttcttattgagagtcgagtcaaattgtttttctagcttctgagttctgagtgaaaaaagagaatcgaaatattactataccttggtgaatttgaatatgtgcctttttatggatatgtccacatttttattgcctttaattctactaagatgtatattgcactaagagacgcattgaagattatggcatttcttgtcactgtaagccttctcctggttcatcagttgtgtgtggcagagactgccattgtggcatgcttttctcttgctgttcatcacaatgtgaatgtgatgacacatgcaccaataaatcattccagcacagacctcttaagaaaaccaaattgattaagacagagaaatgtggtcatggattggttgctgaggatgaaataaagaaaggagaatttgttattgagtatgttggagaagttattgatgacagaacatgtgagaataggctatggacaatgaaaaggctgcttgacactgacttctacctttgtgaggtcagtagtaatatggtcattgatgcaacaaacaagggaaaccggtcccgattcataaaccatagctgtgaaccaaacacagcgatgcagaaatggactgttgatggagagaccagggttggaatttttgcacttcgtgacataaagataggggaggagctgacctatgactataaatttgtccagtttggagcagctcaagtttgtcattgtgggtcttcgaactgcagaaaaatgctaggcacgacgaagtattcaggaagctcacagaatcatcatgccaagaagaaaaagcggaaaacaagttgtgagaattgcatacagcagtttcttcggctgtggcatccacataaaaaaatgtatgttggttgttggataattgacttcgatcaagaaactaaaatgcatactctgaagttcaatgatctccatactgaaaagttcaatttgaaggaagaagaatggcacttcttagaggtcgattttgatgaagattgatcattgaaggtaactgcaagagttggctgccatggtttgtgacagggttgccatggtttgctgcaccgccggcctactagttgggggttcatttgcgatggcagcatagacagacggacggccatttttcttccattttggagtaatagtccaagcctgaactgtgacattcgtgcatgcttatacgtgaaagtgtacctgagagcagattatacgtgaaagtgtatcagcgttgcatatgcatggacggttgggtcccccagcgttttttttggtgctgcggcgatgcttgctgcctcgacaaacaagcatgtttcaagcgcctgcagctcatgtggtggcctacaaccgcaaccccccttccgttaccatcttccttctactacagtacagtactgtttccaacaacacatcaccaaccaatactacactacacaactacggcacagaaaataaaagcggaggaagctagctttagcagctttgcgtcgc

SEQ ID NO: 201506 - DNA, 2386 bp, Zea Mays
tagggaagctgtaattcatacgtattttagatgattggggtccaggaggtatttggtgtgatgttgatgttgttgagttttcgtactacggtgctccagctcaaactccaaaagtgcaaatattcacagagctcgtggataagttgtgtggcagtgatgaatgtattggctccggctctcaggttgcaagtcaggacacttttggaactttgggcgccattgtaaaacggagaactggcaacaagctggtaggtttcgtcaccaaccgacatgttgctgttgacttggactacccaaaccagaagatgtatcacccattgccacccaaccttgggcctggtgtttatcttggagctgtcgaaagggcaacatcttttatcacggatgatgtttggtatggaatctatgctggaacaaacccaggtagaggagttataagttatgtggttaatataggaaattaagtattacctgcagctttagttgcttggataattttctgtatatttaatttctcaggtgacattattgcttgatcttttcatatcatgcaaggtttgacatttgtgaatactatattaaaataatcaaattaacactaacttgcctttcagttcaccacttgcaaataaagcaacatcattttttttgagaaaataaaatataagttaggactttctctaaacaaataaaaggctccctcaggtcatagatactgtcatttaggacaagatctggtgaaacatcaataacatatttatttggattagaaacatgttacttatatgtttagttttttataattttgtttgaaaatgcttgcaaaatctcatgatttgaagaatttttggaatatattctagaagaaattagtggtcaaaggtaaacattgaaaccgtggaaaggcaaatgtggcaaactatttttcaccagagggagtaaatccttagttttgatcactctaaccatgcagtacatatactatctcttcttctgctgatgattccaaatgatttacacaatgttctaattcccaaacatacatgccatgttctaattcccaaacatacgtgctatgttctaatgaatctgcagagacatttgtacgtgctgatggggcattcatcccatttgctcatgactttgacatctccacagtcacaactacagttaggggtgttggtgatattggggatgttaaggttatagatctgcagtgtccacttaatagattaatagggaggcgagtatgcaaaatcggcagaagttctggccacacgactggaactgtgatggcttatgcccttgagtacaacgacgagaaaggaataagctttttcactgacctccttgtcgtcggtgagaaccgccaaacatttgatctagaaggtgacagtggaagcctcattatcctgactggccaggacagcgagaagccgcgtcccatcgggataatatggggtggcacagcaaaccgtgggaggctaaagcttaggtgtgaccatggccctcaaaattggaccagtggagttgatcttggccgccttctggatcgtcttgaacttgatcttatcataaccagcgaatcactcaaagatgccgtgcagcagcaaaggcgcgcgttggcggctgcagctaattctgctgctggggagtcgtcgacagcagcagctcccgtcctagaagagaaagtggaggagatcttcgagcctctggggatcaagattgagcagctgcgtcggcacgacgtttcggcctctgaagcggaggaggcagctgggatcaatgtggaagagcgccagttcatctcaaactttgtgggcaggtcccctgtgcgtgatgaccagggtgctccaaggcaaattgcgaacctgaacaatccgtcagaggaagagctcgccatgttgctgcacctaggcgaccagtagcccaagcggcttcgcagacagaatccgacctcgacgggaaacggcgaagcgctcatttcagtgtctctacatcgaagagtcgcaagtagtccgaagaaggtcacctggagttcagcaaactgaacctgcatcagtagcttagaccagcagcttcctggcacaaacattataatgaactatgctgaaacttgattcagcacttacatgatttgggtggtattcccttcagttttgctgtgctcgtgaagactttaatatgtacaatgctgagtccctgtatcaaaacaatgcaggtagtgataaaatcgtattgatcaccttctcttttctaccattatcggtggagttgtctcaagatgactagatcagcttctggcaggcctgtctagtgcccaatgcaactagggcgatggtacaggcccccaattttttgagttttctgaaatagataatataag

SEQ ID NO: 201507 - DNA, 4637 bp, Zea Mays
cgcaacgctttggtagccccattctcatgtattcgtgtgtgtaagggagtgggtgacatcatgggcgcgatccctgtgttgccgatcgccattgagctatgcattcgacaaccggcgtcaacaattggtaccgaggctcagtgtatattctacgacagtttcgtgagcccacatcggacgtagtgacaagaaggatcctgtcgtcaaggtgatgtccaagggaacgccaagacggaaggcggagctagaacatctggtgctcatgttgtccacaattaatgccatgcacatcgagacgaggtcgctcgacgtcatgacatccagggtgtgcatggctgatcaagttatgcatcttaatgagaagaagatgttccctactgatcacgacaaaggcaacaatgtatgggtccttgacacaggggctagcaatcacatgaaagggtgtctcgaggcgctcgcgccactcaacatatctgtgcgcgacacaatgcgttttggcgatggatcactcgttgagattgagggtattggctttatgatgctctagaccaagacaaagagctataaggtgctcgttgaagtctactttattccaaaattgaagagcaacattgttagtctaggtcaattggaggagggggctgcaagattgtggttgaggatggattctgcaatgtgtttggcatcgagcgctcactgctatggcatgtttgctatgaacacctcaattttcaggcactgagctcggcacaaaagagtaaagcacttcaccacgacgccatacataccacaacaaaatggtgtcatagagcaccataatcatacactaggggtgtaatcggatcggatacgaacggatactactcgttccatatttgtatccatattttctctcgaataaggatattatcgaattgtattgaataagatttaaatggatatcagcatcttaaatacccaactttgagtatatggatatggatataaagcggatactgaatacccacacttaaatacagatcgaatcttagcctttttagatggattgaattcgaatacagatggataacatctgtaccatttacatccctacgtatattggtgtagaagaggaagagtgtgcctagagagttcagggagaagcaatgtatgatggtatatttggtgaaccgtgctccaacaagaagcctccaagaaagaacactctattaagcatgacacaataacaacgcgcaagtttgctgtttctccgctgacctctttgatcccgtcaggccgttaccatcagtcgacaaaatctaaacggatttgtagtgggtttgttagtttttggcacccaaaattcctatagccaccaggcccaccacccccttcctccccaaaagcttcctcaaaccactcgccatctcacctcaattgccaacagcccaccaccaccacggccagtctcgctttctagtcgcttccgcgtcctccactcgccgcgctccccatcccggagcgcggcacaccgtagccccgcgccgcagcggctggccggcatgaagagcatgtggaagcagagcggcggcctggtgtgcgccgacgccggccccctcagccctctcggaggccgctcgcggcgccgcacgaggctgacgctgtacgcggtcgcctttgccttcgccgcgttcaccgcctacgtcgccttcgcctcgcctccctccgcgggcgccggcgcctcgtggttcggcggagtgtacgcgtccacggcgccgtaccgctcgcagatttccagcctcttctcgtccatcttgcccgccgactcgcccgccccctcgccagagccgctgcgcgtcacgttcggcggatcgggcggaggcggtggccaggtgacccgtgatgcgagcactgtgcaagttgggagcgcggcggaaagcatcagctctgccaaggctgggtctagtaagcagctgggaactggaggcggcgctccgatcggcaatgcgggcgctcggagtgtacctccggcagtccatttgccaggcactggaattggcggaggcgcagctccaacgaacagttccgcctcaggtgtcggtgctccgaacgacgcggtggatctgaataaacgaagcgacggaggcgtttctacagaaggcggcagtggatccccggccagtagttcagccgtgcatggaaccgccgcggaggtccgcgagaatagcgttaatgggtctaataagcagtcgggaaatggaagcggagccctgagcaatgctgctaccggacatggcagcactgtcagagctgaggccaaagttgcaagtgatgtttcaaccaatagttctgctgggagtggtagcttggggaaggtagatttgagcaccggatcttctaataatctggcagggagtggaagtgtcgtttcaggcagtggttcggatgctggaaatagaagcactgtaaagcctcatcctggagatgctgttggggcagggagcagggggtcttctggaaacggcacaggtaccatggttgatctgaataaaggttcagatgcccagccaggaaatcgaaatggagatgcaagccatcaatcagatgtaagttctggtttcgagaagagtaaaggtgcaaaggttgtgacgacagatgctcaaccagacagtggaagtggagatgcaagccataaatcacctggaagttctagtccggcaaagagcattgcaggagatggcgaagttgagggtagtaagagaaacgtgagtgttgttccaactgttaatcaaactgggagtccggcatcggtagggcagaaagatgttggttctcccaggaacaacaacacagttggagcatcccccccagtgaagaacccggaacagacctggagccaagttgctcccggcgggagcagtggtacagtgaataatccgaaaggaaatgctgctgctcagggcagtgctggttcatcagagaaccattcggcccaagtaaactcctcaaaatctggaaataacagcaagggtagcaggtcatcaataacacaggatggtggttctggtggaaataagaaaggtgattggtacaaggaaatggctagttgcgatatgtttagtgggaattgggttagggatgactcataccctctctaccctgagggatcgtgtcctcacattgatgagcccttcgactgctacctcaacggtcggcgagatctagcttaccagaagctccgctggcaacccagtggatgcagtatcccaagattgaacccaaccgatatgttggagaggctgagaggaaaaagactggtgttcgttggtgattcgctcaataggaacatgtgggaatcccttgtgtgtattttgagaaattctgtcaaagacaagaggaaggtttttgaggcatctggcaggcgcgagtttaagacggaaggctcatactctttccttttcacggactataactgcagcgtggagttcttccgctccccattcctagtccaggaatgggagatgcaagtgagcagtggaaagaaaaaggaaactctcaggcttgatctggtagagcaatcgtcattgaagtacaaggatgcagactttatcattttcaatacggggcattggtggacacatgagaaaactgctcttgggaaggactactatcaagaaggtaaccatgtgtataatgagctgaatgtcatggatgcctttcataaagctcttctcacctggtccaagtggatcgatgccaatgttaaccccagaaaaactctggtgttattcagaggctactcagcatctcatttcagtggcggacaatggaattcaggcggtggctgtgacaaggagagtaaaccaataaccaacgatcagtacctttcaacctacccaccaaagatgagcatcctggaggacgtgatccacaagatgaaaactccggtcgtttacttgaacataacgagaatggctgactacagaaaggatgcacacccttccatctaccgcaagcagaacctgactgacgaggagaggagatcgcccgaaagatttcaggactgcagccactggtgcctccctggagtaccagattcctggaatgaactggtttatgctcaacttctgatcaagcagcatcaaatgcgccaacaataaaggcaactgcggttttttgctgtgtgcctgtatatgatctgttgttttctaggataaatggataatagtcaacacggtggtcgaagtaaagtcgacatgagaccgaggattttcttaaatcccggcttgttcgctgcggctttaatccggccgtggcttctacagtattttgtctctctatagattgcaactgcggctgccagccagctgatgaattcctcagttagggctacctcccaatacccacataaattcctcagtagaggtttctgggacatcatattgtaaagttcatgtctatcggtaatctgaaataatatgaagaatagtatagatgtgatgatatagatgcccctgtgtcttctgtgattctctacctgctctcatgtatgtttctgataatcaaggttcctatggtatagactttcattacagttaagcaggaaagaaggctgatggattgatgggggtgtttggttgtgtgaattgcataatttg

SEQ ID NO: 201508 - DNA, 3734 bp, Zea Mays
cgatgtcttccagctgcttcgcgtgtgtttgctcagtggggaaaaacatgggaggctgaaggccaagctgggactggacgagagcacgacgaggcaggcaatgcagctcttgaaggagaccaataacattctcaagtccagcatgtcttccttgggcggcggatcgcccgaggagatcgagaggttctggtctgcctgtgttctgtactgtgtgtcaaggctcagtaaagcggggaggtcgaaggaagatggcagtgtctcactttgccagattctgagggcatctaagctgaacattgtggattttttcaaggagatgccacagttctgcataaaggttgcacacattttgactggcctatatggttcagattgggaaaaaaggcttgagttgaaggaactgcaagcgaatgttgtccatttaagcttgctaagcagttactacaaacgtgcataccaggagctattcttgtcaaatgatggcaagagttcagacaattcttcagaatcaaataaccaagaggcttctgattattatcgctttggatggttgctctttttagtcctaagaatccaaacattcagcagattcaaggatcttgtgacatccacgaacgaactggtttctgtgttggctgtacttatcattcatgttcctgtgcgactaaggaatttcgatataaaggattcatcctactttggtaagaagtcagataggggagtcagtcttattgcttctctttgtgaaaaacatcatacctcagaagatgagttgagcaaagcactggagaagacaaatactctcataatggatattctgaaaaagaagccatgcccagctacttcagcatgccaacaggataatttgtctttcatcgatccagaaggcttgacagtttttaaggatttgcttcagggagactcattgaaaccaagtctgataatcctggaaaaggaatatgaaaatgcaattaacacaaaaggtgagctagatgagcgcatgtttgctaatgatgaggacagtttacttggtagtggaagcctttcaggtggagccattaatttaccaggcacaaagagaaagtatgatgttatggcctcacctgcaaaatcaatatcaagcccaaatccaatgtctcctccacgcttttgtctatctcctaaaggaaacggcttttgcaactcaaagatggctcctagcactccagtgagcacagccatgacaactgccaagtggcttcggaatacagtatctccccttccatcaagaccttctggggaactgttgcgcttcttctcggcctgtgacaaggatctaacagatgacattgcacacagagctgggattatacttggagccatattcacgagcagttcttttggtgaacgaatctgtactagtatgcgaagcgcaagtaggatggatgctatctggacagagcaaagaaaaatggaagctcttaagctatattatagggtcctcgaatctatgtgtagggcagagtcacagatcttgagtgggaacaatcttacatcacttttgtctaatgaacgtttccatcggtgtatgattgcatgttctgcggagttagttcttgcaactcacaagactgtcactatgatgttcccagctgtgctggagaagactggcattacagcatttgacttgagtaaagtcatagagggttttgttcggcatgaagatacactcccaagagagttaaagcgccatctgaattctcttgaggaacggcttctggaaagcatggcatgggagaaagggtcatcaatgtacaattccttaatcgttgcgaggccggcactgtctgtagaaataagccggttaggtttactggctgaaccaatgccatcgcttgatgcaattgcagcacatcataacatctcattgggtggcctgccacctcttcccttccagaaacaggagcgtttgcaagacaaagatgaagtcaggtctcccaaaagggcatgcactgagaggagaaacgtgctggtggacagcaattcattgcggtcaccagtgaaggatattattaaaccaaagttaccacctctccaatcagcttttgcaagtccaacaaggccgaatcctgcagcgggaggcgaaacgtgtgcagagacaggaataggcgtgttctttagcaagatatcgaagctcgcagccattagaatcagaagtctctgtgaaagactgcagcttccccagcaagttctggaacgggtgtattcccttgtgcagcaaatccttagccaacagactggccttttcttcaacaggcacattgaccagatcatactatgcagcatatatggagttgccaagatctctcaactggaactttcattcaaggagattattttcggctacaggaaacaacctcagtgcaagccacaagttttccgaagcgtctatgttcattggcccccaagaagccgtaacgggaaaacaggagaagaccacgtcgacatcatcactttctacaacgaagtattcattcctgccgtcaagtccttgttggtggaggtagggcctggcgccagcgccagtccaaagaagaaagaagaggaaaaagtaggtccattcccagaatctccccggctggctcggttcccgaacctccccgacatgtctccaaagaaggtttctgctacccataacgtgtacgtctcaccgctacggtcatcgaagatggacactcttctgtccccgagctccaagagctactacgcgtgcgtcggcgagagcacctacgcgttccagagcccctccaaggacctgaaggctatcaacaaccgcctaaacagtgtgtccggcgggaagaaagtcagcggccggctgaacttcgacgtcgtcagcgatctggtcgtggccagtagcctcggcagtgaccgtgacgccaagcctgcggccgatcctgccaagacgacgccggtgaagtgcgagccatctgactcgtgatcgtcgtcgactctgatgaggcccttgttatagattgttatgtttcagatactcgtgagttagtagatggtaactagacgaggaggcccttgtttctgtttgcgtcttttctttttttgacgtgggaaacatctctgcgagcagctctacgttgtgtaaaatatatataaagaaagctgccccgatggctccccttaacccaactcgcgttgtagggagatgacaagcaccatggccatgtaacttcatagaggttttgagagagctgtgtaaatgcaagatggccatgtatcaacagcggatattttgttcgtggccgttttactgtcaggtggcggcggcctgtcagcagcgcgtccctgactggttcgtaaatggacacctgccattactgttcttgtacatgcccatcgcctcgcggtgcaaggattcaaccagagtgccggccgtgccgatgtcaatgttaaaaaaggcgacgacgaactattccgtccgggagaacacgtctccgttggttttttttgacggccgtgccgatgtcaatgttcaaaaaggcgacgacgaactattccgtccgggagaacacgtctccgttgtttttttttgacgaaggggcgaagcctctatttcatgtaatacccactttgtaagaaaagtctaaaaagagaaattatattactttatagctatatgtgttattcatgtttatcgttttacgtgaacaccacatataacaaaaaaataaatgacaaaagac

SEQ ID NO: 201509 - DNA, 1845 bp, Zea Mays
ttggccatctctagtcgccgttggctgtggctatgctgcactatctttttattgtagataataagtagctgcagtgttgttcagttaaactgtgtccaaaagtttacatatagttactaaaaacactgttttacatcgtggattgtactgttctcagtggattaatagaattggacgctggagatagacccgccggagaagatggcctgcccactgctcacagtagtctagtccctgcccaccaagtacggatctcatctcaccagctgcctgtgcagcagtccaattcctcttgctggagcataccagaagcagaatcgggtgagaggaaatgggatcaacaagaacgtctcatccatctttcccggtcctcctgctcttcctcctcgctaccgccgccgccgccggaagcaacaaggctgaggaggtggacgacctccagtaccttattgacaactccgaagacatcccacccaacgaccctgacgggtggcctgagggcggcggcggcggcgactacgacgacgaccttctcttccaagatcaggaccaggacctcccagactacgagccgcagatcgacgagacccacgtcgtggtcctcaccgccgccaacttctcctccttcctcgccgccacccgccatgtcatggttgagttctacgccccctggtgtggccactgccgcgagctcgcccctgaatacgccgccgccgccgcgcatctcgccgtccaccacaaccagaccgatctcgctcttgccaaggccgacgccaccgaggaaaccgacctagcccagaggtacgacgtccagggcttccccactatcatcctcttcatcgacggcgtccccaaggactacaacggcgcgaggaccaaggacgccatcgtcgactggatcaacaagaagctcggcccggccgtgcaagatgtcaccagcgtccacgaggccgagaggatactcaccggggatgacaaagccgtcattgccttcctcgacactctaaccggtgctcacagtgacgagcttgctgctgcttcaaggctggaagatagcatcaacttttatcaaacttcgattcctgatgttgctaagcttttccatatcgacccagcagcaaagcgtccatccatagtattactgaagaaagaggaggagaagttgaccttctatgatggaaagtttaaagcatcagccattgctgattttgtgtctgctaacaagcttcctttggttaccacactaactcaagaaacttccccttctatttttggcaatgcaatcaagaagcagattttactatttgctgttgcaagtgaatcctcaaaatttctgtccatctttaaggaagcagcaaagccatttaagggaaagctattatttgtctttgtggagcgagacaatgatgaagttggtgaaccagttgccaactactttggtcttactggacaagagaccacagttcttgcttacactggtaatgaagatgctaggaaatttttccttgatggcgaggtgtcacttgaagccattaaggacttcgctgaaggtttcttggaagacaaacttacaccattctacaagtctgaaccagtacctgaatctaatgatggggatgtcaaaattgttgttggaaagagtctggatgtaatagttttggatgaatcaaaagatgtacttctggagatatatgcaccgtggtgtgggcattgtcaatcactggagcctacttacaacaaactagccaagcatctaagtggagttgactcccttgtgatagccaaaatggatggtactaccaatgagcatccacgtgcaaagtgtagtgcacacggattctaaag

SEQ ID NO: 201510 - DNA, 5899 bp, Zea Mays
caggcacagaagctcccctcgcctgcggtcactgcatggtcgaatttgccccttgtgctttcctctccttcctgcaaggagtcgagacgagacatcatcccttctctctccacatctctcgaccccgacctcgctcgccgtctcttccctgcccctgcccctgccccctcagctgcgatctccctccctcccccgaatcgctgaatttttctcactcctcctccttcccatctcggatcgactccaagacgccgagcccactttggtgacccagccccgaaatccccaatcgagctcgaccggaacccgtcgattccgccggattcgacctcccgccggtgaggcggttcgcctgaatcggccgattggacccgaattcgggtgttccggatgcgctcagagcggaggcttgcggatctagggttccggagggcctagggttgctgccggcgatctggtgatggtggtgcggcgcggtgccggagctcggcgaggagggttcggcagcgacgttggagaagatgcagcgagccggatatgcatgggtggcgcggcgctgaggggtgcgacgtcaggaggcggcgtctcgttcggctcatgtggccagcggcacgcgtagaggcagaagctccaccaccaccggcacaaggaccagctacttctccttctggttcatctgctacccatcctcggactacttatcggccggaatcgagtgcgcagaagcaggagtgcatcgatcttccctgcccagtgtcatctgattcctttgtaaaggacgggcgtgagattagagttggcgattgtgctctttttcgggctgtcgatgtccctccattcattggattgatacgttggattgagaagaaggaagaaggctatcccaaattacgtgttagttggctttatagacctaacgacgtgaagcttaacaagggtatacaactcaacgctgcaccaaacgagatcttctactctttccaccaggacgaagcatctgctgtttctctgctgcatccttgcaaagttgcctttttacggaaaggtgttgagctaccagctggaattgcttcatttgtatgttggcgcgtgtacgatattgacaacaagtgcttatggtggcttactgaccgggactatattaatgaagaagtaaatcgccttctatacagaacaaggctagaaatgcgtgccgcattacaatcaggtggacgctctccaaagcgcttaaatagtccttcagcttcccagcaactgaagactgcttcagatggtacacagaatggtggtttgtctagaggaaagaagagagagagaagtgaacagggagttgatccagccaagcgggatcgtgatcgtctacttaaggttgatgacggtgagcctggaagctttaacttggatgatattaagtccgaaatagcaaagataacagaaaaaggtggacttccaaatgcagaagcagttgcaaaacttgtacatcttatgcaacttgatcgaactgagcagaagatagaccatagtggtcgggttatacttgctgatgttattgctgctacagatagtcccgattgcctcggcagatttgtccaatcaaggggccttcccgtgttggacagttggcttcaagaggcccacaaagggaagtctggtgatgggagtagtcctaaagaagcagataagcctattgatgaacttctcttggccctgcttcgtgcactagctaaattgcctattaatctcagtgcattacaaagttgtagcattgggaaatctgtcaatcatctgcgcagccataaaaatctggagattcaaaagaaagctaagtgtcttgttgagaactggaagaagcgtgttgatgctgagatgaagtcaaatgatgtgaagcctttagtttcaggtcaatctgtttcctggtcaggaaaagcaggttttcaagaaatttcaaatgttggaaccaaacgaggtggctcaagtgagaacagtccaaaaaattcagtgcccactctttcatcatcaaaagttttgactgataaacctgggggcacagatgctgcagcgaagttgaatcctggggtatctgcattgtcaaatttacaacatgtgcaatcaacacatgttactaccaacttgaaggagcagccctgcaaatcaactggtgggactggctgtcctgagctgcctactgtaaaagaggagaaaagcagcagttcaagccaatcgccgaacaacagccagtcaatatctagtgagccatcgaaggatgcaagaagttcaactgctgcttctggtggtgctagtaaaacttctggaagctcttcacggagccatcgaagggcaaacaatggtcttgtttcagggaacctgaaggaaccttctgtaggaagatctgtctcccttgatcgatcattgctgcaggataagtcatcccaaactggtacagcttctgaaaaaggaattgatatgccatctgatcatggaaataatcatagattgattgttcgctttccaaatcctggtcgtagtcctgctagaagtgcaagtgctggatcttttgatgacccatctgttactgggggtagagcttcatctcctgtggttgcagataggcatgatcagactgagcgcagggtgaaagtgaagactgaaaattctcggcctcatttagcatctgatgctaatgcagagtcctggcacagcaacgacattaaaggagctactggttcggaggaaggtgataaatcaccatgtgctatattagatgatgacaacagcaggacacctgatcattctgttaaggatgcacatgcatcgcgagctgcgtgctcgtcatatatgaatgaaaaaggtgtcagtgaaactaaggtgggaacctcattcagcccaatgaatgctcttattgaaatcaagtactctgaagctagtcattcactgcaagctggagatgacacagctatgaatcttcttgctagtgtggcaggagaaatatctaaatctgaattggcttcttcaccaagtacttctgtaaagaaattggtctgtgagggtgtcaatactggaaaggttaaagtagaaagtgacatgggcccatcacatccagggcaagcagatgctaagaaagttgccatggggaatgaagtgaaaaatgatgcttgtttggttccgaaggaggaacaacatcaaactgcgccatctcctgagctagcagattcaaaagcagttaaatcttcagcaaagattgaaatccatgaagggcatgcaaacaaatgcaactcccagcatgcttcaattgattccaaaggcgaaaatcgggatggctgtactgcccatgggaaagttgaagatggcagtacaaacaaggatggtgccatggaatctgcattcggcagccagcgtagcttggttgtttccagtaaaaattcaagattggttcttgctggggaatcttcattgtctgctgctgataaacaaacacagggtctgttaaaatcaactaatcataagcatcttctgagtgtatcggacaacccaggagcctttgatagacatgacagtatggctggaaaattagatttgatggctgcagaggtgaaaaaagctgatgtcgtgggcaatagtagtgtattgcagaatgacactgaaaagaaggaacatgtttctccctcttcggctgatgttccaaaactagtaccagcagcgtccccagttggtgtggcaaatgggaataatgagatgaaagaatcaaacggcagttcaagtgaatccaatagccatgtaaaatctgaaggtgtcaattctcagcaaagcgagcaaagtgcaaagcagagttcaaagaaatccagtgatggtgtgtgcggaaaagaagaccatgtcttatcagacgaagaaggttcttctctagccgctcacaccaagtcaaatgctacagccaagcttgattttgacttgaatgaaggaatacctggggatgatgggcatcagtctgagacaactgcctcacctgttgtatgttcctcagcaatccatttaactgggcttttgccattcacttcgcctactacaagtgggttgccgccagctccaataacagtagctgctccagctaaaggaccctttgttcctcctgaaaacctactaagagcaaagccagagatcgggtggaaaggttcagcagctacgagtgcatttcgccctgctgaaccaaggaagattttggagatgcctgctgccacacgtgacattccagtatctcatgctgctgggaagcagtctcgtcccacgcttggtttcgatttgaatgttgcagatgaccaagctctcgaggaagattttccacagagttctgcacagactacctgttcagaatctggaaatacgagaagtcgagatggctcgtcacgaagtgctggtattgaacttgatctgaacagagctgatgaagttgcagacaatggccaatttgtaccaaatgcttcacacagagttgaagtcccattgttttcgacgagatcgttacctagagttttatctaatgctggcgcaaatagctcaagggactttgatcttaatagtggacccgacctttatgatgttggcactgaacctgcaccaaggagcctaccttctaaaaatacaagcagtattcaattcctaccacaagttcctgttaggatgaatagtgatgccatgagtaataatatatcaccatggcttgtctctaccagtccttgtggtccagtagctatacagtcttttttaccatctagagaacagccttacccattggaggcagcacctggagcccagcggattattgcgcctacagctgatggtggccaatttggaggtgatccctgcaggcctccagttatttcaacgtctccagcgatggtttttcatccgcctgcatatcagagttccatattttccaactctttcctcctctcttgttgggccagccggagcgttgccttcccaacattcaaggcagtatgccataaatcttgctgagggtagcagcagtagtgtacgtgacggtaatcggaaatgggaaagtcagggccttgatcttaactcaggccctggaagtatagatttagaaggaaaggatgaacggatgcctttaccagtcagacaaaatttgatcccacccctacatggctttgtggaggatcaaggaagaatttaccaaatgccagttgtaggaacaaagagaaaggaacctgatggcagttgggactcagaaaggtctacatacaagcagttaccatggcaatgagggctctgaaggagatcattttgcaccgactggtctgcgaatgagcatatcacctgcatgtagagcttggccggtgtgttcttcagtcactggactacactcaggggattcagccccatgacgatggcgtgggattgaggaaagcgaaaacttcctgtaattgttgtagattttttcttagctgttaggcttttggttctaatttactcaggagggtatggctgcggtggaggaatctttgtgatcctgagctctgtggccgctgtaattagaccgtccgctctgtttgttggtgataaactgttgagcacatgctggagctttacataagaatttagatgtggccttgttccttgttggggaagcgttacgtcagctgaccatatatatacactggtgcaacgtacagctctagttgctacaccatgtatcttgggttgcagtgcagctgtatgtataagaattctagtagatgagcagctataactttttttctctctttgacaccgaatccatctgcatctggtttactcctgatgctctttttttttggagagatgactagcagatacgaacgagaacagtgaattgtgattttcgtttgatttgtgttggatccgg

SEQ ID NO: 201511 - DNA, 1507 bp, Zea Mays
cacccaccgtcaccgaccgccgcgccacgattttatccattcctcactcgtctctcaaactcaagcgaaagccatcaccccgaccccaatcccacgttcgccacgtgcgcgccacctcccccaccgcgtccgcgtcgccggccatactccatcgcgaacgagatcacgggctggtttcgcgggccgaccatggggacgctcatccggccggggcccgccgcgtcgcctctccccatcgcttccccctcctcctcatccgcccacgtggctgtcgttggcggtggcgcgaggagcttgcggcatcgggtgtcggtgtcggtggcggtgttccggtccccgagtacgcaggttctggcgacgagatggcgccgccggagaggtatggttgtgcggtcggatgtcgtcgccggtggcgcagccgccgcggcagctggggattcgacgcgggcgctcccaggtcagcaattggcttcaagagtcagaggggagagcacagcactacatcgcaaagatttgggctacggtgacaatctccatgttctacaatcttgaggtcgaaggaatggagaatctgcctccaaatagctgtcctggtgtctatgttgctaaccatcagagcttcttggatatttatacccttctaactctagggaggtgcttcaaatttataagcaagaccagcatctttatgttccctattatagggtgggcaatgtatctcttgggtgtgattcctctgcggcgtatggacagcaggagccagttggattgtctcaaacggtgtgtggacttggtaggaaaaggagcttctgtatttttctttccggagggtactcgaagtagagatggcaagttaggtgtatttaagcgtggcgcattcagtgtcgccgcaaagacaggagctcctgtgatagctattactcttatcggaactgggaaattgatgccttctggaatggaaggaattctcaattcaggttcggtaaaggtgattattcaccgacctattcaaggcaatgatgcagaaacattatgttccgaagcaaggaatgtgatagcagacactcttcttctgcatggttatggagcccattaaagcaagtggggtgctttggtctgttttttcttctgaacgagtgctttggtctattctttagtggacttttcagagcacaagacttgagagttgagacaaagctcgttgcagatgtaatcctgtaaaggcaagagggaggaaaatggcgtgaattggcggttgtaacatgtggtcttcaatttgttgtaaaccctacttatttttgttggtttgatagtacaaagaaatgtaaaaggcagaggccatcttcattggatggaaaatgaagctcacgtgatattttgccattttggcctagtttgtgaaccctattttctcaggaaaaaaaactaaattttcatagaaaaatggaaatcgtgtatgataagtatgaaaatgaggttttcaaactaggccttcaatggagtttgc

SEQ ID NO: 201512 - DNA, 3708 bp, Zea Mays
cggtcgattgcggagctcggggcgattcatgtcaagaagatgctgcagcgggcggcgagcaacgcctactcgtggtggtgggcgagccacatccggaccacccagtccaaatggctcgacgcaaacctccaggatatggagaatcgagtcaagatcatgctcaaactcctcggacaggaagccgattcctttggcaagagggccgagatgtactaccacaccaggccagaggtgataagccatgtggagcaagtctacagggcttacagagctctcgtcgaacgctatgaccacatatccaaggagctccataaggccaaccacaccatcgctactgcttgtccagaagaggtgcagtatgcaatgttagaagaggaggaccatgatttccccaaagcaatcacaccaatcaagacacacaagtccttggtccaagagattctcaacgcaaagagacaaggtccgtcagggtcaggatggaacaagccaccctcccatccacgcatgagcgccgaggaggcacaagaagagatcggcagacttcagaaatctatacttgttctgcaaaccgagaaagagtatgttaagagttcctatgagagtggtattgctcggtaccgggagatcgagaagcagattgcagatacacagaatgaaatctgccttattcaggatagatttgatgcacatgcagccatcggcgatgatgaagcccgtgccttgatgacaataacagctcttagatcctgtcagggaaccatagctgagcttgtacgtcattttgaggagttgatcaagcttgcagctgtggagttggaaaaaacaaagtctctacgagcacagctgtatgctatgatggatggcgacactgacacatgttcaagagaggcaagcagcacagacacgtcggtggtggcaagatcttacccagttaccaaggcaatacttgagttgcagcccatatatgagaaacttgacaagtttttttccagtgggtctgaatcctctgcggaggagatcgcagagaatgttgatgaacttgttgataaagtcatcaacttggagctcaagttcccaaaacagacagcacagatcaatcaactcatacaagagaatgaaaacctaaagaataaattggatgagttacaagacgagatggcacttcgtgatgaccaaagtgaattaaatgaacagatcaagcaattagaggatgagtttagcacagtccgagttcttgaaagatcaattcttgaggaagaagcctctgtcagcacaggcttttctgaagtttttagctgcataattaatatctcaaaggcacttggatcttttggccctgaagacctgcataatttgtcagctgcggtagaggatggtgcaatggttccaagagacgtgttcctggagcagtctgcagaagagagcaagggtggggacttcagagacatagaggcaccaactctaaggcatagtttgggccaagatagagaagatgtctcggaagtggttagtgataatggtaatgatggcatccatggctcaaggaatgctaatgaggaaataatccctgggagttgcttaatgcaacaagttaggtacaaattgcgtctacattttgatgaccatattgatccgcttttcagttcagaaaatgaaaacatagttcacgattcaggtgagggcaatgttgatagctcatcaggaaaagtatttcagagttcatcagaaactgagaacggaagtagaaacttccctaatggtgaaattatgagaggtgaatatccattgggaatagtcggacagactcatctcctccactcagtagtgtaatccaggaggaaggacttggagatagtaaatcacaaaataccagtgggcagattagtccaattgcttcctcagacttgtacaggttaaaggaatacgattccgtagaagaatcctcatttccaaaagctacttgtttcagtggtgctgataagaagagcctgcacatggggcatgcagatgaagcaaaatctgttgaagaatcgccacaccaagttgatcaactaaatgggccacaaaatattgaaagttcgaacgaatgcaaccaagttggattgcttaaagaggatgattgcatttcattagttcatgttgataatgtccatgatatgaagaacatatattcctcagaagtgagggatgaaacttctatctgtgcgccagctggagattatgagcaagttccgacgaattcagagaggaagacttcacatggcagagagcttgcaagcgaagcaactacctcgaacaaccatggaggaaggagtcagggtgtaaagtctggtttgatgggggaggactttgtacctagctggcaagaatttcttcctgatgggcttgaaggtaaagaagcaatactactagctgattgtacttcagttctgcggaactacaaagaaacaaagaggaggcttagcgaactggaaaggagaaaccaggagcatcttgaagagacaaaggcagttatacgggagttaaggaatgcaaattccatgaagtatgttgagatacggtcactaagggatctcctggattcctcagaggtgcctccaagtaaagcaggtggtaactcaaacggattcttaagtttgagatcttttagagaaattgacagatcaattgccactttgggtagagatatttctgccgtggaggaaaacagttctagtaacatcgagacacctaacaacacgtcacttcataaaatgacgaggttcagaaacgacattgacgctttggtggaggaaaatttgcagttcctggtaaggtatagcatggcttgctatcgcatgcaggagtttgacagaaggtaccaggaggcacaggacgaaatggaagataataagtctagagaaccagatactccagcagagcccggacctgctgagaagaagttgagagagctccgaactgaactggatgtatggtttgagcagagcgcgcttctcgatcaagaagtgcagcttaaatctgcgtctctttgcagaatgcaagaggagatagcggaagccctgcgtggtagcctggagatggacagagccaggtttacaccatatgaagctgccaagtttcaaggcgaggtcctaaacatgcagcaatctaccagcaagattgagggcgagatgcaggcagcatcagaacacatgagggggcttcaagccaaagttagccatgctctggaggggctacgtgagagttttgagatttcatcccaacgcttgtcgcggccagagaccgaaagaagccacgagaaacaattcaagcattttccaagtcggacaagggtaccgttgcgaaacttcctgtttggaacaaagcgaaagaaaaaatcaatatttgcgtgcatcaatcccacattccagaaacaattcagcgatctgtgaggtgcgtgagcgtgggtaccatgaccatagttttccttattttgaaaaaaatgacaaaatgaacctggggtagttttgttccccagagtacatgcaagcgcaggttttgtttgaatttagcttgtgtttgtttgtaatggtaatttgttcatttgattgaaataaacagggtaaattatttgataccgttgaaatgtactgtgtgttgcccctgttgtattgggccttgacacatctaactctattactaatatcagtcacaactctggttaaagtt

SEQ ID NO: 201513 - DNA, 2036 bp, Zea Mays
ggaatccccgccatcatcgcctctcgcgcaccttccttcgacaaccttccataggaatcatccatcgcgtctgtgctccccctcgcgcaatcctaccgcactcgcctcccgaaatcggccgccacggcgcctcacgccatggctcctgcccagcagctgcagctccctccgcctccggtggtctggcacgccgcctcctcgcccagatccgtccgtggtccgcccctccggcctcgcccagctccaaagctccctcctgctcgcgggcacgcgatctcgccctgggggccatgccctaggccgtcgtctcggctcgcgtccacctcgtccagcgtcacaagtggcgccgccgccggtgtcggctacttcgatctcccgcccgccgtcgactcgtccagcagtacctacgctctgaatccgatcccctcgccggtggcgacggcgtcggctgacccatccccaaactcggcgcgggagcccaagcggaagcgaactggcccgtgcgtcccccgcatcaactcgaaccgaagggacgaccaagcggagtctagactcaagagcaaccgcgacctcccggatctctctcccacccacgcctcgtcaccgtcgtcttctgctgcactgcagcgatggcctcccccgacctgctcttcaatctgcggaacctcttctacctgggcgcctaccaggcagccattaacaacatcgacatcctgggcctcgacgccgccgccgccgctgagcgcgacgccatcgtcttccgctcctacatcgccctcggctcctaccaggtgcgaacacatctggcgtcaggcgcctcagccgctacctcgctgcaggccgtgaagctgctcgctctgtacctcactggagacaagcgtaggtatgtcatgaagaagatcaacatctccaagcagaacgacaagttccagcagaccgcttaccaagaggtaacgcatgtgctcctaacacaggaagacaagaagactcttctagagcggtacaccgtgatccagtacccttccttccaccgcggctgaggagcaactctccctcgctgtccacttcctcttgttgtatccacacgacctttttgttctatgagtttgttttgttgttgatctgccattttgcctgctccgctgctcctcgtgagccttaactgatgatcttactatcttcctcttttgtgaagggtgaaatagggaacgatgatacactatggcggatttctccaaggtgcgttaaggtggcaaagtatcccaggtgcagccatccagagcttgtgatgggtctcagggagcacactgacgctgggggggatcatacttctatttcaagatgaactgatcccaggtctagagtttctgaaagacggtaggtggatggcaatacctccaacacaaggcaacatgatctttgtaaaccttggagatcagattgaagtgataaccaatggaacctacaagagcatatgccaccgggtccttcccaacaagaacgggagccgcctatccattgcaacattctataaccctggtgccgacgccataatctgcctagcttcaaagctcacatatcctagccaatatcgtttccaagactaccttgatttctattctactaccaagtttactgataaggtatttaggttccagactacaaaggcaatattgaagtgaataatcacagcagaagcctggagaaaagaagtgtctgacttgttctacaatactgcatcagtgcatagatgcgcttgtatttactgctagctcctaaggaacaacgaggtgttaaaatatatatttttactttcagttgttttctgtttgaagactaaacaacctgcactacttgtacttaatgtaatatattacatgtgggttccttcagacagtgatatgacatgttaattatgaaggtgtcaatgatactacttgtacttaatgtaatatagatctgaactgttgtagtaatccagacatccaattatgagtgggttccttcagatagtagtaaacttgtctagccttttt

SEQ ID NO: 201514 - DNA, 2976 bp, Zea Mays
ccaccagcaacctcctcctttttgctccacctggcttgccttgcctggtcctgcttgcttgcactttttgcctttttcggaggccacgggtcaccgctaacctccatccatccatttgccgattcacctacacagcaggaacaaacgaggagccctccaaggatatgcgccccgccgcttatacattaaccaaagacttgcctccaatcactcgtgtctacctcttcgagttgcgaggatgcctgcgaatgaccaccatcccaacggcctgctccaggagtcagcccctggactccagcatgatgatatggaaaaccagcagcagcaagtctgctgggagcgcttcctcctaaaggacactctcaacgtcttgctcgtggagagtgatgcttcaaccaggcaggttgtcagtgccctgcttcgttgctgcatgtaccaagttatctctgccaaaaatggccagcaagcatgggcttatcttgaagataagggaaacaacatagatcttgttttgactgaggtttttatgcccggtgtatctgggatttctctgctgagtaggatcatgagacacaatattttcaagaatattccagtgattatgatgtcttcgagtgatgatatgagtacagtctttaaatgtctgtcaaaaggtgctgttgactttttggtcaagcctatacgtaagaatgaacttaagaacctttggcagcatgtatggagacaacggtgtcacagctccagtggtagtggaagtgaaagtggcattcagacccagaagtgtgccaaatcaaaaggtgtcaatgaatccggtaacaacagtggtagcaacgatgacgaagcaggcatgggacttaatgcaagggatgacagtgataatggcagtggcactcaagcacagaactcgtggactaagcttgctgtggagatcgacagtccacaagctacgtctctggatcagttagccgatccacccaatagtacctgtgcgcaagtaatccactcaaagtcagagatatgtagcaacagatggctaccagataagagcaacagaaactgcaagaagccaaaaaacactaatgatgactttaagggaaaggacctggagataggtggccctgaaaatttatatatgggtcaccaatcttccccaaatgggagatccatcaaagcagcagatcatgaaaacaattcaaaggaatcaatgatggaaaatttagaggagccaactgttcgagctgctgacctaattggttcaatggccaaaaacatggataccccacaggcagcaagagctgcagaagatacccctaatttctcttccaaagtgccagaagggaaaggtaagaataaccagaatgataagtatgttttgccatcacttgagctgagtttgaagaggtcgagatcatgtggagatggtgccaacaacaaaaatacagtcaaagacgacgaacaacggaattgtgtattaagacgatcaaatctgtcggcttttacaaggtaccacacatctgcggcttccaatcaaggtgggacaggattggtaggtagctgttcgccgcatgataacagctcggaggctgtgaaaacggattctacctacaacatgaagtcaaattcagatgctgccccgataaaacaaggctccaacggcagtagcaatgacaatgacatgggttccactacaaaggatgttgtgacaaaacccatgttgccctctgctattaaggctaatggatacacatcagcgttccatcctgtgcagcagtggatggttccagctaatgcaacagcagggaaaacgaaggctgatgaaaatacagccagaaatcactgcgtccattttgagaatggtgggtcaggagccctgcaatgtggttcctccaacgtatttgatcccccacttgaaggccaagctacaaataactatggtggtgtgaaagccgggagcaactcaggcagcaacaaggggcagaacaatgggagtacggctgctgcaaatgctggactggcagaaacggagatacaggccatggacaaaagtggagttggaggtggcaatggcaatggcaatgggagtggcagtggcagtggcaatgacacatatgtcagacggcttgctgcgaacatgacaccgcgacaagcacagctaaagaaatatagagagaaaaagaaagaccggaactttgggaagaaggtgcggtaccagagcagaaagaggctagccgaccagcggccacgggttcgtggacagttcgtcaagcaagctgtgcaaaatcaggacggagctagagagagatgaccgacacccccccccccctcccctgtggctgtgctgctctctggcttcagctccctactgactccgactccacctctgctggcatgcatggttgccgctttggactcaaaacacttgacagttagacgtgcggttgatgattcttccttctctcgtggtgtggactgatatggtcaacaacacagcctccttccttttcatcattggtttcttcacatctagaatctactgcctgaccgggaaagaataaacaaggaacttcttcttctatacatgtgtatgtatgtatgcattcctaagcatgtaatgtagaagaataagtgcgtggcttgactctagatggactttaattttagacagagtcttgctcgctctcctacatcatctagtgtaactaaagtgttgtcatgtatggtcttggatcactgtctatcaatatattatatcgtggcgttccttgataagtctgcaggcagaagcatgacaaaaattcagggagggccaagaaaccatatgacaaaatcaaccaacaccgtaaaataactattgtcatatagaattcaagttttatatcaatacatgatacaagttcaaagaagtaaatcatacaaataaaaaagaaacataccgttaagtttttgttgacctcacaattgtctcttagttttgag

SEQ ID NO: 201515 - DNA, 2883 bp, Zea Mays
gctcctcctcctcctcccccctgggacgtctaaagcttgcttgcactttttgcctttttcggaggccacgggtcaccgctaacctccatccatccatttgccgattcacctacacagcaggaacaaacgaggagccctccaaggatatgcgccccgccgcttatacattaaccaaagacttgcctccaatcactcgtgtctacctcttcgagttgcgaggatgcctgcgaatgaccaccatcccaacggcctgctccaggagtcagcccctggactccagcatgatgatatggaaaaccagcagcagcaagtctgctgggagcgcttcctcctaaaggacactctcaacgtcttgctcgtggagagtgatgcttcaaccaggcaggttgtcagtgccctgcttcgttgctgcatgtaccaagttatctctgccaaaaatggccagcaagcatgggcttatcttgaagataagggaaacaacatagatcttgttttgactgaggtttttatgcccggtgtatctgggatttctctgctgagtaggatcatgagacacaatattttcaagaatattccagtgattatgatgtcttcgagtgatgatatgagtacagtctttaaatgtctgtcaaaaggtgctgttgactttttggtcaagcctatacgtaagaatgaacttaagaacctttggcagcatgtatggagacaacggtgtcacagctccagtggtagtggaagtgaaagtggcattcagacccagaagtgtgccaaatcaaaaggtgtcaatgaatccggtaacaacagtggtagcaacgatgacgaagcaggcatgggacttaatgcaagggatgacagtgataatggcagtggcactcaagcacagaactcgtggactaagcttgctgtggagatcgacagtccacaagctacgtctctggatcagttagccgatccacccaatagtacctgtgcgcaagtaatccactcaaagtcagagatatgtagcaacagatggctaccagataagagcaacagaaactgcaagaagccaaaaaacactaatgatgactttaagggaaaggacctggagataggtggccctgaaaatttatatatgggtcaccaatcttccccaaatgggagatccatcaaagcagcagatcatgaaaacaattcaaaggaatcaatgatggaaaatttagaggagccaactgttcgagctgctgacctaattggttcaatggccaaaaacatggataccccacaggcagcaagagctgcagaagatacccctaatttctcttccaaagtgccagaagggaaagatggtgccaacaacaaaaatacagtcaaagacgacgaacaacggaattgtgtattaagacgatcaaatctgtcggcttttacaaggtaccacacatctgcggcttccaatcaaggtgggacaggattggtaggtagctgttcgccgcatgataacagctcggaggctgtgaaaacggattctacctacaacatgaagtcaaattcagatgctgccccgataaaacaaggctccaacggcagtagcaatgacaatgacatgggttccactacaaaggatgttgtgacaaaacccatgttgccctctgctattaaggctaatggatacacatcagcgttccatcctgtgcagcagtggatggttccagctaatgcaacagcagggaaaacgaaggctgatgaaaatacagccagaaatcactgcgtccattttgagaatggtgggtcaggagccctgcaatgtggttcctccaacgtatttgatcccccacttgaaggccaagctacaaataactatggtggtgtgaaagccgggagcaactcaggcagcaacaaggggcagaacaatgggagtacggctgctgcaaatgctggactggcagaaacggagatacaggccatggacaaaagtggagttggaggtggcaatggcaatggcaatgggagtggcagtggcagtggcaatgacacatatgtcagacggcttgctgcgaacatgacaccgcgacaagcacagctaaagaaatatagagagaaaaagaaagaccggaactttgggaagaaggtgcggtaccagagcagaaagaggctagccgaccagcggccacgggttcgtggacagttcgtcaagcaagctgtgcaaaatcaggacggagctagagagagatgaccgacacccccccccccctcccctgtggctgtgctgctctctggcttcagctccctactgactccgactccacctctgctggcatgcatggttgccgctttggactcaaaacacttgacagttagacgtgcggttgatgattcttccttctctcgtggtgtggactgatatggtcaacaacacagcctccttccttttcatcattggtttcttcacatctagaatctactgcctgaccgggaaagaataaacaaggaacttcttcttctatacatgtgtatgtatgtatgcattcctaagcatgtaatgtagaagaataagtgcgtggcttgactctagatggactttaattttagacagagtcttgctcgctctcctacatcatctagtgtaactaaagtgttgtcatgtatggtcttggatcactgtctatcaatatattatatcgtggcgttccttgataagtctgcaggcagaagcatgacaaaaattcagggagggccaagaaaccatatgacaaaatcaaccaacaccgtaaaataactattgtcatatagaattcaagttttatatcaatacatgatacaagttcaaagaagtaaatcatacaaataaaaaagaaacataccgttaagtttttgttgacctcacaattgtctcttagttttgag

SEQ ID NO: 201516 - DNA, 3084 bp, Zea Mays
gctcctcctcctcctcccccctgggacgtctaaagcttgcttgcactttttgcctttttcggaggccacgggtcaccgctaacctccatccatccatttgccgattcacctacacagcaggaacaaacgaggagccctccaaggatatgcgccccgccgcttatacattaaccaaagacttgcctccaatcactcgtgtctacctcttcgagttgcgaggatgcctgcgaatgaccaccatcccaacggcctgctccaggagtcagcccctggactccagcatgatgatatggaaaaccagcagcagcaagtctgctgggagcgcttcctcctaaaggacactctcaacgtcttgctcgtggagagtgatgcttcaaccaggcaggttgtcagtgccctgcttcgttgctgcatgtaccaagttatctctgccaaaaatggccagcaagcatgggcttatcttgaagataagggaaacaacatagatcttgttttgactgaggtttttatgcccggtgtatctgggatttctctgctgagtaggatcatgagacacaatattttcaagaatattccagtgattatgatgtcttcgagtgatgatatgagtacagtctttaaatgtctgtcaaaaggtgctgttgactttttggtcaagcctatacgtaagaatgaacttaagaacctttggcagcatgtatggagacaacggtgtcacagctccagtggtagtggaagtgaaagtggcattcagacccagaagtgtgccaaatcaaaaggtgtcaatgaatccggtaacaacagtggtagcaacgatgacgaagcaggcatgggacttaatgcaagggatgacagtgataatggcagtggcactcaagatttaaacgatctagtggggttgggtggcgttcagagaatggcacagaactcgtggactaagcttgctgtggagatcgacagtccacaagctacgtctctggatcagttagccgatccacccaatagtacctgtgcgcaagtaatccactcaaagtcagagatatgtagcaacagatggctaccagataagagcaacagaaactgcaagaagccaaaaaacactaatgatgactttaagggaaaggacctggagataggtggccctgaaaatttatatatgggtcaccaatcttccccaaatgggagatccatcaaagcagcagatcatgaaaacaattcaaaggaatcaatgatggaaaatttagaggagccaactgttcgagctgctgacctaattggttcaatggccaaaaacatggataccccacaggcagcaagagctgcagaagatacccctaatttctcttccaaagtgccagaagggaaaggtaagaataaccagaatgataagtatgttttgccatcacttgagctgagtttgaagaggtcgagatcatgtggagatggtgccaacaacaaaaatacagtcaaagacgacgaacaacggaattgtgtattaagacgatcaaatctgtcggcttttacaaggtgcaaaacataatatcagtgtcattagtgagttatgagagcaacagtatgttacgtactaacagttaccacttttattgcaaggtaccacacatctgcggcttccaatcaaggtgggacaggattggtaggtagctgttcgccgcatgataacagctcggaggctgtgaaaacggattctacctacaacatgaagtcaaattcagatgctgccccgataaaacaaggctccaacggcagtagcaatgacaatgacatgggttccactacaaaggatgttgtgacaaaacccatgttgccctctgctattaaggctaatggatacacatcagcgttccatcctgtgcagcagtggatggttccagctaatgcaacagcagggaaaacgaaggctgatgaaaatacagccagaaatcactgcgtccattttgagaatggtgggtcaggagccctgcaatgtggttcctccaacgtatttgatcccccacttgaaggccaagctacaaataactatggtggtgtgaaagccgggagcaactcaggcagcaacaaggggcagaacaatgggagtacggctgctgcaaatgctggactggcagaaacggagatacaggccatggacaaaagtggagttggaggtggcaatggcaatggcaatgggagtggcagtggcagtggcaatgacacatatgtcagacggcttgctgcgaacatgacaccgcgacaagcacagctaaagaaatatagagagaaaaagaaagaccggaactttgggaagaaggtgcggtaccagagcagaaagaggctagccgaccagcggccacgggttcgtggacagttcgtcaagcaagctgtgcaaaatcaggacggagctagagagagatgaccgacacccccccccccctcccctgtggctgtgctgctctctggcttcagctccctactgactccgactccacctctgctggcatgcatggttgccgctttggactcaaaacacttgacagttagacgtgcggttgatgattcttccttctctcgtggtgtggactgatatggtcaacaacacagcctccttccttttcatcattggtttcttcacatctagaatctactgcctgaccgggaaagaataaacaaggaacttcttcttctatacatgtgtatgtatgtatgcattcctaagcatgtaatgtagaagaataagtgcgtggcttgactctagatggactttaattttagacagagtcttgctcgctctcctacatcatctagtgtaactaaagtgttgtcatgtatggtcttggatcactgtctatcaatatattatatcgtggcgttccttgataagtctgcaggcagaagcatgacaaaaattcagggagggccaagaaaccatatgacaaaatcaaccaacaccgtaaaataactattgtcatatagaattcaagttttatatcaatacatgatacaagttcaaagaagtaaatcatacaaataaaaaagaaacataccgttaagtttttgttgacctcacaattgtctcttagttttgag

SEQ ID NO: 201517 - DNA, 2105 bp, Zea Mays
ttttatgattgtcaggagcactaggcacagaactcgtggactaagcttgctgtggagatcgacagtccacaagctacgtctctggatcagttagccgatccacccaatagtacctgtgcgcaagtaatccactcaaagtcagagatatgtagcaacagatggctaccagataagagcaacagaaactgcaagaagccaaaaaacactaatgatgactttaagggaaaggacctggagataggtggccctgaaaatttatatatgggtcaccaatcttccccaaatgggagatccatcaaagcagcagatcatgaaaacaattcaaaggaatcaatgatggaaaatttagaggagccaactgttcgagctgctgacctaattggttcaatggccaaaaacatggataccccacaggcagcaagagctgcagaagatacccctaatttctcttccaaagtgccagaagggaaaggtaagaataaccagaatgataagtatgttttgccatcacttgagctgagtttgaagaggtcgagatcatgtggagatggtgccaacaacaaaaatacagtcaaagacgacgaacaacggaattgtgtattaagacgatcaaatctgtcggcttttacaaggtaccacacatctgcggcttccaatcaaggtgggacaggattggtaggtagctgttcgccgcatgataacagctcggaggctgtgaaaacggattctacctacaacatgaagtcaaattcagatgctgccccgataaaacaaggctccaacggcagtagcaatgacaatgacatgggttccactacaaaggatgttgtgacaaaacccatgttgccctctgctattaaggctaatggatacacatcagcgttccatcctgtgcagcagtggatggttccagctaatgcaacagcagggaaaacgaaggctgatgaaaatacagccagaaatcactgcgtccattttgagaatggtgggtcaggagccctgcaatgtggttcctccaacgtatttgatcccccacttgaaggccaagctacaaataactatggtggtgtgaaagccgggagcaactcaggcagcaacaaggggcagaacaatgggagtacggctgctgcaaatgctggactggcagaaacggagatacaggccatggacaaaagtggagttggaggtggcaatggcaatggcaatgggagtggcagtggcagtggcaatgacacatatgtcagacggcttgctgcgaacatgacaccgcgacaagcacagctaaagaaatatagagagaaaaagaaagaccggaactttgggaagaaggtgcggtaccagagcagaaagaggctagccgaccagcggccacgggttcgtggacagttcgtcaagcaagctgtgcaaaatcaggacggagctagagagagatgaccgacacccccccccccctcccctgtggctgtgctgctctctggcttcagctccctactgactccgactccacctctgctggcatgcatggttgccgctttggactcaaaacacttgacagttagacgtgcggttgatgattcttccttctctcgtggtgtggactgatatggtcaacaacacagcctccttccttttcatcattggtttcttcacatctagaatctactgcctgaccgggaaagaataaacaaggaacttcttcttctatacatgtgtatgtatgtatgcattcctaagcatgtaatgtagaagaataagtgcgtggcttgactctagatggactttaattttagacagagtcttgctcgctctcctacatcatctagtgtaactaaagtgttgtcatgtatggtcttggatcactgtctatcaatatattatatcgtggcgttccttgataagtctgcaggcagaagcatgacaaaaattcagggagggccaagaaaccatatgacaaaatcaaccaacaccgtaaaataactattgtcatatagaattcaagttttatatcaatacatgatacaagttcaaagaagtaaatcatacaaataaaaaagaaacataccgttaagtttttgttgacctcacaattgtctcttagttttgag

SEQ ID NO: 201518 - DNA, 2127 bp, Zea Mays
ctcagctggttgggtggtaggttggtcgtgtacccaatcacctaaggcacagaactcgtggactaagcttgctgtggagatcgacagtccacaagctacgtctctggatcagttagccgatccacccaatagtacctgtgcgcaagtaatccactcaaagtcagagatatgtagcaacagatggctaccagataagagcaacagaaactgcaagaagccaaaaaacactaatgatgactttaagggaaaggacctggagataggtggccctgaaaatttatatatgggtcaccaatcttccccaaatgggagatccatcaaagcagcagatcatgaaaacaattcaaaggaatcaatgatggaaaatttagaggagccaactgttcgagctgctgacctaattggttcaatggccaaaaacatggataccccacaggcagcaagagctgcagaagatacccctaatttctcttccaaagtgccagaagggaaaggtaagaataaccagaatgataagtatgttttgccatcacttgagctgagtttgaagaggtcgagatcatgtggagatggtgccaacaacaaaaatacagtcaaagacgacgaacaacggaattgtgtattaagacgatcaaatctgtcggcttttacaaggtaccacacatctgcggcttccaatcaaggtgggacaggattggtaggtagctgttcgccgcatgataacagctcggaggctgtgaaaacggattctacctacaacatgaagtcaaattcagatgctgccccgataaaacaaggctccaacggcagtagcaatgacaatgacatgggttccactacaaaggatgttgtgacaaaacccatgttgccctctgctattaaggctaatggatacacatcagcgttccatcctgtgcagcagtggatggttccagctaatgcaacagcagggaaaacgaaggctgatgaaaatacagccagaaatcactgcgtccattttgagaatggtgggtcaggagccctgcaatgtggttcctccaacgtatttgatcccccacttgaaggccaagctacaaataactatggtggtgtgaaagccgggagcaactcaggcagcaacaaggggcagaacaatgggagtacggctgctgcaaatgctggactggcagaaacggagatacaggccatggacaaaagtggagttggaggtggcaatggcaatggcaatgggagtggcagtggcagtggcaatgacacatatgtcagacggcttgctgcgaacatgacaccgcgacaagcacagctaaagaaatatagagagaaaaagaaagaccggaactttgggaagaaggtgcggtaccagagcagaaagaggctagccgaccagcggccacgggttcgtggacagttcgtcaagcaagctgtgcaaaatcaggacggagctagagagagatgaccgacacccccccccccctcccctgtggctgtgctgctctctggcttcagctccctactgactccgactccacctctgctggcatgcatggttgccgctttggactcaaaacacttgacagttagacgtgcggttgatgattcttccttctctcgtggtgtggactgatatggtcaacaacacagcctccttccttttcatcattggtttcttcacatctagaatctactgcctgaccgggaaagaataaacaaggaacttcttcttctatacatgtgtatgtatgtatgcattcctaagcatgtaatgtagaagaataagtgcgtggcttgactctagatggactttaattttagacagagtcttgctcgctctcctacatcatctagtgtaactaaagtgttgtcatgtatggtcttggatcactgtctatcaatatattatatcgtggcgttccttgataagtctgcaggcagaagcatgacaaaaattcagggagggccaagaaaccatatgacaaaatcaaccaacaccgtaaaataactattgtcatatagaattcaagttttatatcaatacatgatacaagttcaaagaagtaaatcatacaaataaaaaagaaacataccgttaagtttttgttgacctcacaattgtctcttagttttgag

SEQ ID NO: 201519 - DNA, 2271 bp, Zea Mays
gggtaatctactctttctataagattgtttccaacagttcacccatatggtcatccaaaacactgttttgcactgttcgcagagtggagtttaaatatgaggatggaaatggaactcgtggactaagcttgctgtggagatcgacagtccacaagctacgtctctggatcagttagccgatccacccaatagtacctgtgcgcaagtaatccactcaaagtcagagatatgtagcaacagatggctaccagataagagcaacagaaactgcaagaagccaaaaaacactaatgatgactttaagggaaaggacctggagataggtggccctgaaaatttatatatgggtcaccaatcttccccaaatgggagatccatcaaagcagcagatcatgaaaacaattcaaaggaatcaatgatggaaaatttagaggagccaactgttcgagctgctgacctaattggttcaatggccaaaaacatggataccccacaggcagcaagagctgcagaagatacccctaatttctcttccaaagtgccagaagggaaaggtaagaataaccagaatgataagtatgttttgccatcacttgagctgagtttgaagaggtcgagatcatgtggagatggtgccaacaacaaaaatacagtcaaagacgacgaacaacggaattgtgtattaagacgatcaaatctgtcggcttttacaaggtgcaaaacataatatcagtgtcattagtgagttatgagagcaacagtatgttacgtactaacagttaccacttttattgcaaggtaccacacatctgcggcttccaatcaaggtgggacaggattggtaggtagctgttcgccgcatgataacagctcggaggctgtgaaaacggattctacctacaacatgaagtcaaattcagatgctgccccgataaaacaaggctccaacggcagtagcaatgacaatgacatgggttccactacaaaggatgttgtgacaaaacccatgttgccctctgctattaaggctaatggatacacatcagcgttccatcctgtgcagcagtggatggttccagctaatgcaacagcagggaaaacgaaggctgatgaaaatacagccagaaatcactgcgtccattttgagaatggtgggtcaggagccctgcaatgtggttcctccaacgtatttgatcccccacttgaaggccaagctacaaataactatggtggtgtgaaagccgggagcaactcaggcagcaacaaggggcagaacaatgggagtacggctgctgcaaatgctggactggcagaaacggagatacaggccatggacaaaagtggagttggaggtggcaatggcaatggcaatgggagtggcagtggcagtggcaatgacacatatgtcagacggcttgctgcgaacatgacaccgcgacaagcacagctaaagaaatatagagagaaaaagaaagaccggaactttgggaagaaggtgcggtaccagagcagaaagaggctagccgaccagcggccacgggttcgtggacagttcgtcaagcaagctgtgcaaaatcaggacggagctagagagagatgaccgacacccccccccccctcccctgtggctgtgctgctctctggcttcagctccctactgactccgactccacctctgctggcatgcatggttgccgctttggactcaaaacacttgacagttagacgtgcggttgatgattcttccttctctcgtggtgtggactgatatggtcaacaacacagcctccttccttttcatcattggtttcttcacatctagaatctactgcctgaccgggaaagaataaacaaggaacttcttcttctatacatgtgtatgtatgtatgcattcctaagcatgtaatgtagaagaataagtgcgtggcttgactctagatggactttaattttagacagagtcttgctcgctctcctacatcatctagtgtaactaaagtgttgtcatgtatggtcttggatcactgtctatcaatatattatatcgtggcgttccttgataagtctgcaggcagaagcatgacaaaaattcagggagggccaagaaaccatatgacaaaatcaaccaacaccgtaaaataactattgtcatatagaattcaagttttatatcaatacatgatacaagttcaaagaagtaaatcatacaaataaaaaagaaacataccgttaagtttttgttgacctcacaattgtctcttagttttgag

SEQ ID NO: 201520 - DNA, 2105 bp, Zea Mays
gtttaaatatgaggatggaaatgggcacagaactcgtggactaagcttgctgtggagatcgacagtccacaagctacgtctctggatcagttagccgatccacccaatagtacctgtgcgcaagtaatccactcaaagtcagagatatgtagcaacagatggctaccagataagagcaacagaaactgcaagaagccaaaaaacactaatgatgactttaagggaaaggacctggagataggtggccctgaaaatttatatatgggtcaccaatcttccccaaatgggagatccatcaaagcagcagatcatgaaaacaattcaaaggaatcaatgatggaaaatttagaggagccaactgttcgagctgctgacctaattggttcaatggccaaaaacatggataccccacaggcagcaagagctgcagaagatacccctaatttctcttccaaagtgccagaagggaaaggtaagaataaccagaatgataagtatgttttgccatcacttgagctgagtttgaagaggtcgagatcatgtggagatggtgccaacaacaaaaatacagtcaaagacgacgaacaacggaattgtgtattaagacgatcaaatctgtcggcttttacaaggtaccacacatctgcggcttccaatcaaggtgggacaggattggtaggtagctgttcgccgcatgataacagctcggaggctgtgaaaacggattctacctacaacatgaagtcaaattcagatgctgccccgataaaacaaggctccaacggcagtagcaatgacaatgacatgggttccactacaaaggatgttgtgacaaaacccatgttgccctctgctattaaggctaatggatacacatcagcgttccatcctgtgcagcagtggatggttccagctaatgcaacagcagggaaaacgaaggctgatgaaaatacagccagaaatcactgcgtccattttgagaatggtgggtcaggagccctgcaatgtggttcctccaacgtatttgatcccccacttgaaggccaagctacaaataactatggtggtgtgaaagccgggagcaactcaggcagcaacaaggggcagaacaatgggagtacggctgctgcaaatgctggactggcagaaacggagatacaggccatggacaaaagtggagttggaggtggcaatggcaatggcaatgggagtggcagtggcagtggcaatgacacatatgtcagacggcttgctgcgaacatgacaccgcgacaagcacagctaaagaaatatagagagaaaaagaaagaccggaactttgggaagaaggtgcggtaccagagcagaaagaggctagccgaccagcggccacgggttcgtggacagttcgtcaagcaagctgtgcaaaatcaggacggagctagagagagatgaccgacacccccccccccctcccctgtggctgtgctgctctctggcttcagctccctactgactccgactccacctctgctggcatgcatggttgccgctttggactcaaaacacttgacagttagacgtgcggttgatgattcttccttctctcgtggtgtggactgatatggtcaacaacacagcctccttccttttcatcattggtttcttcacatctagaatctactgcctgaccgggaaagaataaacaaggaacttcttcttctatacatgtgtatgtatgtatgcattcctaagcatgtaatgtagaagaataagtgcgtggcttgactctagatggactttaattttagacagagtcttgctcgctctcctacatcatctagtgtaactaaagtgttgtcatgtatggtcttggatcactgtctatcaatatattatatcgtggcgttccttgataagtctgcaggcagaagcatgacaaaaattcagggagggccaagaaaccatatgacaaaatcaaccaacaccgtaaaataactattgtcatatagaattcaagttttatatcaatacatgatacaagttcaaagaagtaaatcatacaaataaaaaagaaacataccgttaagtttttgttgacctcacaattgtctcttagttttgag

SEQ ID NO: 201521 - DNA, 841 bp, Zea Mays
ccacatctaagggtatatccaatatcgccatccctattgttccaacgatacgagtcatcatcacattcacaaagtttgaagaactacagcctctagacgagtttgccaccccaccttcaagcccgacacagtttcaagacgcgaaagccaaagaaccagaaggatcaggctcatggtattcatgggtaaagggtggccgaggtacgcagtccggtgacagtggtgatgggcggaactggaaagacgaggttgatccgttccacataccgtcggactacacctgggtcgatgccaccgagaagaagcggaggatgaaggcaaagaaagccaagagcaggcggaccacagcccgaaaacagtcctcgaagaacacttcttcggaaggaggccaccgccccatgatggatggcttcgaggagtaaaccgcgttctcacaagcatagtaagttgtatttgcattcttaaaatgttagttgttgatggcagctgcacgccagaggcagattgattgatgttgtgcctggagcaccccctcccttggcgtggcaatgaatcggagtcgaatctccttgagaacgtacaggatggcttatacccaccccactaatctgtaattcagccagcgctatttttttttgcccccctccgtgtttcatcttgctggatgtatcatgtatgtttgacagatgatgacgatgatacgaccctgttgttgaaaaaaaaatgtgtttgaggggactgtagtgttccctccccctgttgtaatggaagatttaccaatatgcagcgattttctcgcaaagaggaagctccaatgcacatgcttgtttgttcgcactcc

SEQ ID NO: 201522 - DNA, 7676 bp, Zea Mays
cctgaccgcccacccctgatcggggcccctcgccggagctctccacctgccagcgccggtgctcgagcgtgcgggcgagagagagagatagacggcgctcactcgttctgggggattttcccttcgagacagggccaaagggtaccggttaccaaacgaaaccgctccgtcctgtccgtcgcccctcggtccctctcccttcggttcgaccaaagtcaccaaacgtatcgcaaacaagctcctcgacccgagttcgagctcaactcggcggagatctccactcttcagcaaggcgcgggatgccggcgatggcaccggaggacgatgaagcactgtacgagatccaccggcacgcgtcgggatcccaccaagaagaataccaaggtgctgcgacaagttgtggtagctcagatgctggaggaggaggtgtcctctcctatctctccttgcaaggtgtgagcaaacttaaggaaaagtgggataggtacagggtgctggggaagagtaggcagaggaagaagggggatggcgtcgcactgtttgtctcaccaaatgcagaatatgtgtctgtaactgttgggaatcacatcatcatcttgaggaaagccgatggctatgcatcaccttgtggtgtttacacaaataatgaccgaatagcatttttcacaaatggggcttggctggaggctcaaggcgtttttggtgtggtggatgacctaagcacactttacttgatcaaagaaaatggggagttactagcaaggaggacatgtgatcagttgaagctatcttcttccattattgatctggttttgcaggatggtacaagcttacttaggccaggtttctacatttttacaagtgactgcttggttcatagatttgattacactgaagaacctgaggcatgtttatgcgaagttcccatatcaactaaagatgcaatgtcagctaggactatccagttacctcgaagtttatcgtgcattgattaccatcaacgtcactcgctatttgtcctagttggagattccaatgtttcatttagctccaatagttattctgttggaaggggtattttgtcccctgaaggatcaaagaacctttgtttcatccccgaaaatcaggatctcgcctcagggaaagtatattgctacgttggatttgactggttttgtaaactttttttcacttgatggtgacttgcgcactgttccacttcaaactcttggaaaggctagacacctaattgatgttaaggacatcagttggtggacagataatgttcttatgttggtaagaaaagatggtagcattagcatgtacagcatcactgaagacaagatagtttccaatgatgacccggttttatctacaccaatattggagaaggcaaaggctactgaaggacatgcttttgttttgcaatctaggagatatggaacaaacactccagttaataagcggatggatagtgactcggaaccttgtctgctgagtggttctggggagcaccaacaaacagaaggggatgaaatgtcctggagtctgatatcattctccaaagttacagtagcagaaatgtactctgttctgataagagagaaacgatacaaggacgctttagattttgcttctagatacaatctagataaggatgaagttcttaaagcatgctggttgcactctgatgccaatactcatgagatagactcgtacttagcaaaaattaaagaccaagtatttgtattatcagaatgtgtaaacaaagttgggcctacagaagcagatttaagggctctactttcttttggactttgtataactgattgttacagattttctgagttagataacagcagtaagggctcaacatgggacagtcgcaccattaggcttcgtttattgcggcacatagacatgttagagacattcttgggcattaatatgggaaggtatgcagcaggagaatatagcaaattccgttcaatgccattggtggaaacagccatagcattagccgaaagtggcaaaattggggctttaaatcttatattcaagcgtcatccatatactgtctcttcagatattttacgtgttttgtctgctatcccagaaacccttgctgttcagacttatagtcagttgctgccagggaaatcccttcccagtgttgtcatattaagagctggtgattgggttgaatgtgaacagatggcttcatatataaacaattgccctgccgagttggacaaggtcgaagagatcaaaacggaaatacttgtaaagcactcaaaaggcttttcatggccttcagttgctgaactttgtgagtggtataagaacagagcaagggacattgactgcttaagtggacagctggaaaactctctggccatgatagagcttgcatgtcagaagggcattgtagagttgcagccattctttgatgatattaaatgcctctaccaggttgtatattctaatgaattgaatgagtttacaatgaatcttttgacatgggaagatctgcctgattatgaaaagttcaaaatcattctcaaaggagtcaaagaagatacagttgttcaacggctagaagaaaatgctatccgttttatgaagaaattatatgaacacaaacaagaatcctaccttgttagttggctgaaagaggtagctgctaaaaatgagcttttgatttgcttagctgtcattgaaaatggttgtggggaatcaccaatatatggtctcttcaaggatcttgctgagatgatagaaacctctgttcactgcatttatatgtgcagtgcaactaaccagtggaataccatgtcatcaatattatcaaagtcactctataaaacaaagagggagaaatcgttagtggctagtgaagaagactgcaatctgaaagatgctaagcatgctcttggttcttctatggtttcttatgaggagatgcaatgtgtctgtgctgatatcttatctggtctgggcaatgctccagaagatttttatcactatgattcagtacctgacaaacctaatgatgtcaaatatcttgatatattggagaagaggctaaaagttgctgaaggccatgtagaagtaggacggctctttgcttattatcaggtcccaaaatcaatgcatttcttccttagtgctcacttagatgagaagaatgtaaggcaaattatacggctgcttttatcgaaatttggcagacgtcaacctgttcgatcagacaatgagtgggctaacatgtggcgtgatttaaaactcttccaagaaaaggcatttccttttcttgattcagaatatatgctggccgaatttatcagagggctattgaaagctggtaaattttcgctagccaggaattatcttggaggaaccagtgcagtttctttatccacagagaaggctgaaaatcttgtgatacaagctgcaagggagtatttcttctcggcttcaactttatctgggaatgaaatttggaaagccagggaatgcctaaatttgttacctaatagcaaaaatgttcaagcagaaactgatataattgatgctcttactgttagacttccttatctaggggtgactatccttcctcttcagttcaggcaggtaaaggatcctatggatatcatccgcatggtgataacatgtcaagcaggtgcataccttcattttgaagagatcattgatgtcgctaaacttctgggattaagaagtgaagaggaagtagcggatgtggaggaggctattgccagagaagctgtggtaaatggtgatcttcaacttgcccttgatatctgtttaaatttaacaaaaaagagtcatggtgcagtgtgggatttatgtgctgcaattgctagaggccctccacttgacaatttggatactggtacccgtgaaaagctattgggtttcgctctcagccattgtgatgacgattctgttggggaattgttgaatgcttggaaggagcttcatgctcagggtacttttgagaaattaatgattacaaccgcaacaaatcctcccaatttcttgattgatggatcttcaatcacaccacttcctgtacaaagtgtgcaagacatacttgacctgagagatgacaatggccatgatagacgtagcgaccttgtgggaattgttaaagacatgctgtcaaaagtttgcttggacttttctaatggagacacacataattgggagtctatgttggaagaaaaccggaaattgttgtgctttggagcactggtattaccatggcttttgaaattgttcagtaatgaagcatgtgatggtgaaataatggatcatctcactaggagatgtcgattttcaacaaaagtaaaagcagcaaccagtatcatatattggttagttataaatggtttggcccccaatgataatataatcatgattcttgcaaagtctataatggagcctcccattgatgaagagtttgatgtacttggctgctcggttcttttgaatctcatggaccctttcaatggagtgaaaataatagaggaagagctaaaaagacgagaatcttatcaagaaattagcagcataatgagtgtaggaatgttatatagttccctcaataattctaagaaagagtgctccactcctgaacagaggagaaacctgttgcttcacaaatttcatgagaagttcacctcagccgataccgatgatttagaccaggttgatatggcaaatacaaccttctggagagaatggaaatcaaagttagaagaggataaacaactggctgatcaagcgcggatgctcaagcagatattacctgatatagacacatctcgattcttgtctggtgatgttaattatatcaaaatagtagtttactcctttgttaattctgtaaagatggagaaaaaacacatactcaaggaagcagtgcggatagctgaggcatatgggttgcaacgaactgaggtgcttttacgatttctcgcctgcagtcttgtgtctgaatactgggataacaatgatattctgaacgaaatttctgaattccgggaggatattgtcagctcagctaagggtgtgatcgatatgatatattcagatgtctatctggagatagatgggtataataaacaacgtctttcttacatttacggcattctttcagcatgtcattcatatctgaagaggaccaatgagatagaattgagatacccagtgcatgtgcatacccataagcttgaaccatttcagtactataaggtacttgaggaagagtgcaagaaagtctgcttcattgatggcttgaactttaaaaacattgctggactggataatctgaactttgagcatttcaatgacgaagtatgcaagaatatccatgcctccaccgtcactgctatagccgatatggtacagtctcttgtgagtatgtatgttgatgtactggccaagggactcatatcacaacaaggtgtttacaagcactatgttctggggttgctggcatcacttgaaggccgcagtgaagcacaatcgaacaacacagattatgaaaagttgcaggcttccctatgcgaatttgagttgaactatgatagttgcagggagtacatccaagctcttccagccacagatatttcatatattgtaagaaggtattgcaccctttgctttccatctaacttagcacgaagccatccacaggaaccttcatggaggaaacctcttgccacgctactagaattttggtctaaagttgttgatgacataccgggggattcaattgatgcttgctcatatggaagaacagactacttaaattcaaataggttatctctgtgcatgagagctttcaggcagctattaataattgatgagatagcactgcaccaaggttgggatgccatttccatgtatgtaaaagattgccttagaaatggaaagatgatggaaacaccatgcttttgtcgagctatgattctatcaggctgcagttttgaatctgtagttgaagtatactttggaggacaaggacagttagggagtgagaatgcagatccaagcaattatttggacctcttagaactttataatgctgctacagaaaagtgtttgtcggatttgagtgaggaatcttgcgaatatcgaatattgcttcataatttgctgtcatctttgagccggtcaacgggaaaacatgctggtgctctagaaatggtcagatctggtgtttgggggaagttaatccgctattcggaagacatgcagctagagagccaattacgagtctatgcactacagctgatgcaatgtatcacaggaagaaaccttaaatctcttccaaatgaaatggtgtgtcaggttgagccatgggaatcatggtatgagcatggagcgggtgctgccatagctgatgagagtatcaactcctctagcagcatcacagggactcttgtcgcacttagatctactcagatggtcgctgcagttctgcctgacgctaatatcactccagaaaacctagcaactcttgactctgcagtatcttgttttttaaaattgtcagaacgtgcttctggtgtgagcgttgctgtttttgaagcagtgctagaagagtgggagcaattgttctcccccaaagaagagcatgttgcacctcatgaatcaccaaaagaaacaagtgactggagtgatggatgggatgatggctgggaggcgctaccggaagagttggagagtccaaagaataaacaagagggtgtgttgttatctgtgcatcccctccacagttgctggatggagattatcagaaaacgtgttgaacttggtgagctgcacaaggtacttgaacttctagaccgagcatctttgaaacacagcgtgttcctagaggaagaagaagcacacagcttggttgaacttgtatctgctctggactgcttcatggcccttaaaactgtgttgctactcccatatgaatctctgagactgcagtgcctgcagatggtggaggtgaaaatgagggaaggaatcgtgtccacctcatcaaatgctgatgatcaggagctccttgccttggttctttcctctggaactatgcagaagatcatcacagaagaggcatactctaaatttttctcttacatatgccatcttgtcgggcaccttgcaaggtcattccagactgatctcctcgtacaatggaacgaagcaacatctaagatcaacagatctttactgttcgctagagttctgtttccatgttttgtatctgaactggtcctcggagggcagtatcttctggctgggttcgtcatctcgagatggatgcacacacatccatctctgggcctgatggatatcaccgagaccagtgtgcgatgcttccttcaaggccaggttgcccaacttgatgaggtgggagggagcgatgctgctctcactgacggtgaagtttgtgtaaggcacacaatctccaccctacagccgaaacttgtttctcttctgcagtctgcattagctctttcgaacaaagagttgtaggcaaagtcctgtgtagttaacttttacactcttgctgtactaccggtgtacctgtaacataaaatgtttttttagataatggtaaaagtgaatggtggaagatttcatattgttat

SEQ ID NO: 201523 - DNA, 2254 bp, Zea Mays
ctcttctccccctccttgcctgcggattggggcgacaggggttggcgatgccggaggtcaatgccggcgcgctggcgcaggcggagcagaggaagaaggcggggaggtcggttccagagcgtggaaagcgcgatagagattaagagatacgagttgttagtcctccccagagtccgaagcaagctactaggttttcagtttcagatccccgaaaaatacggttgttgttttgacgccaaccgatatacgcggcaggagtaccacgcgacgctggtattggattcgcgtgacttggaacccaccagacatggagtccttcagcgacgccgacagatacataccccaagagatcatcggcagaggcagctacggggtcgtttgctcagctattgaccggcgcaccggcgagaaggtcgcgatcaagaaaataggaggcgtcttcgatgacctgtccgacgccgccaggaccctccgggagatcaagctgctccggctgttacgacaccctgacattgtcgagatcaagcatgtcatgttgcctccggctaggagggactacaaagacatttatgtcgtgtttgaattgatggaggccgaccttcaccaggttatcaaggctaaccctgacctgacgacagagcaccaccagtactttctctatcagatgctgcgtgcgttgaagtatatgcatgctgctaatgtttatcattgggatttaaagccaaaaaatatattattaaatgctgactgcaaactcaaaatatgtgactttgggctagcaagggtcgcgtttgatgactctccaaccacagttttctgcacggactacattgctactagatggtacagggctcctgagctatgtggatctttcttcagcaagagattttgactggggagcccttattccctggtaaaaatgtgtttcaccagttcactttgatgactaatctcctgggcacaccatcaacagatactatttcacagattcaaaatgagaaagcaaggaagtttctgagctgcatgaggaaacaaccaatacccttttcagagaagttccctggtgcagatccttcggctctcaagctcttacaaaggcttctagcatttgatcctaaggaccgaccaacggctgaagaggcgttggccgatccctattttgaaggcattggggaagtggagagggaaccatcctgtcagccaattccgaaaatggaatttgagtttgaagaaaagtttaccgaagaggacgtcaaggaacttatattcctggagatactgcagtaccatcctcaacttctgaaggattacaagaatagctctgaaaaaacgagctttctatatcccagtgctgttgacaagtttcataggcaattcactagcctagaggaaaatagagggagtaatgtcatgcttgtcaggaagaatgcttctcttccaaggacaacaaccgttcactccactccaattcctgcaaaggaaggtccaacagcaacctcccaggctgctcaaaggattccagcagccagaccaggaagagtggtaggcccagtactaccattcgagagcgcaagcgtcactgatcaacacatcgcgcgacaggtggcaaggaacccagccgttcctccagcaaccaacacctcgtcagcctactgctaccacctgaaaccggacagcgccgacaggcaggagcaacagctagagcttgaggaagaccatatgcagtataggacagggcagcatcccatggatgccaaggggcttgcccaaagcgacctaacagacagggccaacctccataggagcccgctgcacggcgttgctcccttcaaaggcgtcgcagcggtcgctggtgttcttcaccgaaagagcgaaggatgcccgatgactggtatgttggatgagctgcagcagatctgcaacgggatggtgaaactggttcagttaacgctaggcctcgagctcatgtttctgaactcgaaggaatttttggaagcttaacaagaatgcatctcttgctatcgttctatatatagcaaagtgatttcttctccggaatttggaggattagttaggagaaagctaggtgataacagacacatgatcgttaaggtgttcgctttggattaaagtcagccaatttctacgctgttttgtctttatagattacagttgtagcagcctaaacagtctgcatacctgtgtatactgtacacccatttaattgagggtttccaaacttttgtttgatggc

SEQ ID NO: 201524 - DNA, 2449 bp, Zea Mays
ctcttctccccctccttgcctgcggattggggcgacaggggttggcgatgccggaggtcaatgccggcgcgctggcgcaggcggagcagaggaagaaggcggggaggtcggttccagagcgtggaaaggttgcttcttatctcttctctgccgcccggtgttggtgccatcgacaacgctcgtatgggacgactggctggataaggatgcggcctctccggattttggcatcggcaggaaaggatggatttgggttttgatcctgagttgcttgcttgcagcgcgatagagattaagagatacgagttgttagtcctccccagagtccgaagcaagctactaggttttcagtttcagatccccgaaaaatacggttgttgttttgacgccaaccgatatacgcggcaggagtaccacgcgacgctggtattggattcgcgtgacttggaacccaccagacatggagtccttcagcgacgccgacagatacataccccaagagatcatcggcagaggcagctacggggtcgtttgctcagctattgaccggcgcaccggcgagaaggtcgcgatcaagaaaataggaggcgtcttcgatgacctgtccgacgccgccaggaccctccgggagatcaagctgctccggctgttacgacaccctgacattgtcgagatcaagcatgtcatgttgcctccggctaggagggactacaaagacatttatgtcgtgtttgaattgatggaggccgaccttcaccaggttatcaaggctaaccctgacctgacgacagagcaccaccagtactttctctatcagatgctgcgtgcgttgaagtatatgcatgctgctaatgtttatcattgggatttaaagccaaaaaatatattattaaatgctgactgcaaactcaaaatatgtgactttgggctagcaagggtcgcgtttgatgactctccaaccacagttttctgcacggactacattgctactagatggtacagggctcctgagctatgtggatctttcttcagcaagtattcaccggctattgatatgtggagcattggctgcatttttgcagagattttgactggggagcccttattccctggtaaaaatgtgtttcaccagttcactttgatgactaatctcctgggcacaccatcaacagatactatttcacagattcaaaatgagaaagcaaggaagtttctgagctgcatgaggaaacaaccaatacccttttcagagaagttccctggtgcagatccttcggctctcaagctcttacaaaggcttctagcatttgatcctaaggaccgaccaacggctgaagaggcgttggccgatccctattttgaaggcattggggaagtggagagggaaccatcctgtcagccaattccgaaaatggaatttgagtttgaagaaaagtttaccgaagaggacgtcaaggaacttatattcctggagatactgcagtaccatcctcaacttctgaaggattacaagaatagctctgaaaaaacgagctttctatatcccagtgctgttgacaagtttcataggcaattcactagcctagaggaaaatagagggagtaatgtcatgcttgtcaggaagaatgcttctcttccaaggacaacaaccgttcactccactccaattcctgcaaaggaaggtccaacagcaacctcccaggctgctcaaaggattccagcagaccaggaagagtggtaggcccagtactaccattcgagagcgcaagcgtcactgatcaacacatcgcgcgacaggtggcaaggaacccagccgttcctccagcaaccaacacctcgtcagcctactgctaccacctgaaaccggacagcgccgacaggcaggagcaacagctagagcttgaggaagaccatatgcagtataggacagggcagcatcccatggatgccaaggggcttgcccaaagcgacctaacagacagggccaacctccataggagcccgctgcacggcgttgctcccttcaaaggcgtcgcagcggtcgctggtgttcttcaccgaaagagcgaaggatgcccgatgactggtatgttggatgagctgcagcagatctgcaacgggatggtgaaactggttcagttaacgctaggcctcgagctcatgtttctgaactcgaaggaatttttggaagcttaacaagaatgcatctcttgctatcgttctatatatagcaaagtgatttcttctccggaatttggaggattagttaggagaaagctaggtgataacagacacatgatcgttaaggtgttcgctttggattaaagtcagccaatttctacgctgttttgtctttatagattacagttgtagcagcctaaacagtctgcatacctgtgtatactgtacacccatttaattgagggtttccaaacttttgtttgatggc

SEQ ID NO: 201525 - DNA, 2275 bp, Zea Mays
ctcttctccccctccttgcctgcggattggggcgacaggggttggcgatgccggaggtcaatgccggcgcgctggcgcaggcggagcagaggaagaaggcggggaggtcggttccagagcgtggaaagcgcgatagagattaagagatacgagttgttagtcctccccagagtccgaagcaagctactaggttttcagtttcagatccccgaaaaatacggttgttgttttgacgccaaccgatatacgcggcaggagtaccacgcgacgctggtattggattcgcgtgacttggaacccaccagacatggagtccttcagcgacgccgacagatacataccccaagagatcatcggcagaggcagctacggggtcgtttgctcagctattgaccggcgcaccggcgagaaggtcgcgatcaagaaaataggaggcgtcttcgatgacctgtccgacgccgccaggaccctccgggagatcaagctgctccggctgttacgacaccctgacattgtcgagatcaagcatgtcatgttgcctccggctaggagggactacaaagacatttatgtcgtgtttgaattgatggaggccgaccttcaccaggttatcaaggctaaccctgacctgacgacagagcaccaccagtactttctctatcagatgctgcgtgcgttgaagtatatgcatgctgctaatgtttatcattgggatttaaagccaaaaaatatattattaaatgctgactgcaaactcaaaatatgtgactttgggctagcaagggtcgcgtttgatgactctccaaccacagttttctgcacggactacattgctactagatggtacagggctcctgagctatgtggatctttcttcagcaagtattcaccggctattgatatgtggagcattggctgcatttttgcagagattttgactggggagcccttattccctggtaaaaatgtgtttcaccagttcactttgatgactaatctcctgggcacaccatcaacagatactatttcacagattcaaaatgagaaagcaaggaagtttctgagctgcatgaggaaacaaccaatacccttttcagagaagttccctggtgcagatccttcggctctcaagctcttacaaaggcttctagcatttgatcctaaggaccgaccaacggctgaagaggcattggggaagtggagagggaaccatcctgtcagccaattccgaaaatggaatttgagtttgaagaaaagtttaccgaagaggacgtcaaggaacttatattcctggagatactgcagtaccatcctcaacttctgaaggattacaagaatagctctgaaaaaacgagctttctatatcccagtgctgttgacaagtttcataggcaattcactagcctagaggaaaatagagggagtaatgtcatgcttgtcaggaagaatgcttctcttccaaggacaacaaccgttcactccactccaattcctgcaaaggaaggtccaacagcaacctcccaggctgctcaaaggattccagcagccagaccaggaagagtggtaggcccagtactaccattcgagagcgcaagcgtcactgatcaacacatcgcgcgacaggtggcaaggaacccagccgttcctccagcaaccaacacctcgtcagcctactgctaccacctgaaaccggacagcgccgacaggcaggagcaacagctagagcttgaggaagaccatatgcagtataggacagggcagcatcccatggatgccaaggggcttgcccaaagcgacctaacagacagggccaacctccataggagcccgctgcacggcgttgctcccttcaaaggcgtcgcagcggtcgctggtgttcttcaccgaaagagcgaaggatgcccgatgactggtatgttggatgagctgcagcagatctgcaacgggatggtgaaactggttcagttaacgctaggcctcgagctcatgtttctgaactcgaaggaatttttggaagcttaacaagaatgcatctcttgctatcgttctatatatagcaaagtgatttcttctccggaatttggaggattagttaggagaaagctaggtgataacagacacatgatcgttaaggtgttcgctttggattaaagtcagccaatttctacgctgttttgtctttatagattacagttgtagcagcctaaacagtctgcatacctgtgtatactgtacacccatttaattgagggtttccaaacttttgtttgatggc

SEQ ID NO: 201526 - DNA, 844 bp, Zea Mays
ctgagtacctacctagtactcccactgtacagctaccaggaagtgcagagacgacgaaccaaagcatagagtagggaggaggaaagcttctcagaattcttagagcagaaaccaggccttggagtcgtcggccggcgctggcggcttctcctgggcggccggcggctcggtcgcggggatgacggccttctcttcggcggcgttctccttcgccggcgccgccttggtgacctccacttccacctccacctttttggcctcctcctcggtcatgttgctgtctgctaggagaagcttagctgttgctgttgaggggtgggagctagctgtacctgtggggcgtgcgtgcgagcgtggtggcggtggcgcgtttaactgttggccgtgtctggactctgggcgaagctggacgcctgaactggagagcagcccgcaaaggaagggaagagagcggaaggggagtcggcaagggatgaaggaacccatgcgcgcgtacgtgacggcgacccgggccggcgcatcatggcattgggcccgccgtggcccgcgggcgcagcgcattggctcccagcgcaatcgccctgtgctgtgtgctcagacgagacgagctggcccgcaccgctgggcgctcggatcccgtgagcgcggagactctctggtggccgtcgcacgacgcgcgtcgcctttcacgccagcaaggcagcaacgttcgtttcgttcaacgtcgtcgtgcccgggggcccgtcccgtgggcactgttgacagaacgacagaccacggggacgtgcagtgtatatgcagtagcacgcggccgggcaggtcgtcggacggctccgcagcttag

SEQ ID NO: 201527 - DNA, 1842 bp, Zea Mays
gcagcgtttattagccgtcacactcccacactcggcctgccgaggagaaactgaagatggttaggggctagaacgagcgagaggcggccgggaggagggaccgatttgtcgatggcgatcggggcgttcgtggagggcgctccggcggacggcggagaaggttacagcggccgcgtgacgcccttcgtggtgctgtcctgcgtcgtcgccggcagcggcggcgtcctcttcggatacgacctcggcatctccggtggtcttacctcaatggactgcttcctgaagagattcttcccaaaggtgtaccgtcagaagcaggacagcaaacaaccatcacaaggaggtatggccgtcgcacatcaatgctgatcggcggcagtgtcttcatcgcgggctcagtgttcggtggtgcagccaccaatattcccatgctcctaatgaacaggattctactggggattggtctggggttcactaatcagtcaatcccattgtacctgtccgaaatggcgccaccccgataccgcggggcaatcaacaacggcttcgagctctgcatcagccttggcatcctgttcgcgaacgttctcaactatttcgtcataaaaatcacagcaggatggggatggaggatatccctgtccatggccgcactgcccgccgcattcctaaccatcggcgcgatcttcctccccgagacgccaagcttcataatccaacgtgacggcaacaacacggacaaggcaagggtgctgctccagaagctgcgcggaacggcctcggtccagaaagagctcgacgacctggtccgtgctagcgacctctcacgagcaacccggtacccattcaggagcatactcgagaggaagtacaggccgcagcttgtggtggcgctgctggtccctttcttcaaccaggttagcgggatcaacgtggtgaacttctacgcgccggtcatgttcaggacgatcggtctcaaggagagcgcgtccctcctgtcctcggtggtgacacgcctgtgcgcgacgtctgccaacgtcgtggcgatggtggtggtcgacagggttgggcgcaggaagctcttccttgccggcggcgtgcagatgatactttcgcagttcaccgtcggcgcgatcctggctgcgaagttcagggactacgaggagatgggtgatgggtacgcgtacctggtgctgaccacactgtgtgtgttcgttgcaggctttgcgtggtcgtggggccctctcaccttcttggtccctgccgaggtttgcccgctggagatcaggtccgcggggcagagcatcgtggtcgctgtggttttcttgatgacgtttgtgattagccagacgtttcttgaggtcctctgccgcgtcaagtcggcgacgttcttcgtcttcggtggatggatctgcctgatgacgttgttcgtttatctgttcctgcctgagaccaagaagctgcccatggagcagatggagcaggtctggaagacacactggttctggaagaaggttgtgggagaggaagcggataggaaagaagcaggagcagggaatatagctttgtcgggcttgtcttagtcattttctgagtcgggtgtgtgtatgtgtatttgatcaaaactgcaaagaaaaacatagtatacgatcgcgacaagctgatgtaaatgtacatttgtatgtaaatcgagtaaacttatcagtctggcgttgttgccagttcctacaactaaccgttccaaatggtacaagagtacagaagcactaatataacaagaatgttgaaacgcactgctgtttcttctttcatgatcggccgtagaaggaaaatttacctaac

SEQ ID NO: 201528 - DNA, 2995 bp, Zea Mays
caaagacgtcgggccgccggcacctgcccgagtggagtactcgaagcgggcggagtcggcgagtgcacacgtcaacacccacccgaatactagtagtggaatactagtagtggcagcgtttattagccgtcacactcccacactcggcctgccgaggagaaactgaagatggttaggggctagaacgagcgagaggcggccgggaggagggaccgatttgtcgatggcgatcggggcgttcgtggagggcgctccggcggacggcggagaaggttacagcggccgcgtgacgcccttcgtggtgctgtcctgcgtcgtcgccggcagcggcggcgtcctcttcggatacgacctcggcatctccggtggtcttacctcaatggactgcttcctgaagagattcttcccaaaggtgtaccgtcagaagcaggacagcaaacaaccatcacaaggaggtatggccgtcgcacatcaatgctgatcggcggcagtgtcttcatcgcgggctcagtgttcggtggtgcagccaccaatattcccatgctcctaatgaacaggattctactggggattggtctggggttcactaatcaggtaacttatacttgaatcagtactcaacagggcacatatatttagctcaaaacaccataaatcggttgagcagtactccctttgtcacacatataggtcaatttagatttgaaggaaacaaaggcctaggtatggtcaatctagcacattcaagtagagaagatttttgaattgcttataacatgatatatagttcaagaaatcagcacaacagtttcatgctggatgaatgttctaatatctagatattggaaattaaatgtattgtgcagtaagtctagcatgaactcagaaaatcctgtgtggctatgaaatcagtatcagacttgagatcaagtatttcattgagttggacttggtggttaaaaacaaaggcttcttgtggatgtcatttgttcagctcccaagttggctacaatagatcgctaaagttgaacaaaagtacatgtttggcttattatgactttcaagtgtctttgctgctgatgaattatgcgctcttacagagttactgcttactaagcaaccttcaagctttcaacaagtgaagtgattatatatcagaatggagataaaatatagctgaaagtaaaagttgtgatgtaatctgaactttctagtttcagcttgcagtaatattgggtgtttggtttctaaggactaatttttagttcatccattttatttcattttagttcatccataagaaacgtatttggtaatttagggactaaaatggaataaaatggagagactaaaaattagtctctagaaaccaaacaacttctaataattagaatagctagtagaaaaatagtgacagaagttcacattgtgcaagagcaccaactatgaccacaagtcttaacacatcactgtctgcatagtactgtcatataatcacgtttcttatggattagagataattacttttgacgtacagactatactagctgcatgccgttcttaatatctctttctcccagagaacaattagatccatactaacatcatactatgcaagtcacatttgatttgcagtcaatcccattgtacctgtccgaaatggcgccaccccgataccgcggggcaatcaacaacggcttcgagctctgcatcagccttggcatcctgttcgcgaacgttctcaactatttcgtcataaaaatcacagcaggatggggatggaggatatccctgtccatggccgcactgcccgccgcattcctaaccatcggcgcgatcttcctccccgagacgccaagcttcataatccaacgtgacggcaacaacacggacaaggcaagggtgctgctccagaagctgcgcggaacggcctcggtccagaaagagctcgacgacctggtccgtgctagcgacctctcacgagcaacccggtacccattcaggagcatactcgagaggaagtacaggccgcagcttgtggtggcgctgctggtccctttcttcaaccaggttagcgggatcaacgtggtgaacttctacgcgccggtcatgttcaggacgatcggtctcaaggagagcgcgtccctcctgtcctcggtggtgacacgcctgtgcgcgacgtctgccaacgtcgtggcgatggtggtggtcgacagggttgggcgcaggaagctcttccttgccggcggcgtgcagatgatactttcgcagttcaccgtcggcgcgatcctggctgcgaagttcagggactacgaggagatgggtgatgggtacgcgtacctggtgctgaccacactgtgtgtgttcgttgcaggctttgcgtggtcgtggggccctctcaccttcttggtccctgccgaggtttgcccgctggagatcaggtccgcggggcagagcatcgtggtcgctgtggttttcttgatgacgtttgtgattagccagacgtttcttgaggtcctctgccgcgtcaagtcggcgacgttcttcgtcttcggtggatggatctgcctgatgacgttgttcgtttatctgttcctgcctgagaccaagaagctgcccatggagcagatggagcaggtctggaagacacactggttctggaagaaggttgtgggagaggaagcggataggaaagaagcaggagcagggaatatagctttgtcgggcttgtcttagtcattttctgagtcgggtgtgtgtatgtgtatttgatcaaaactgcaaagaaaaacatagtatacgatcgcgacaagctgatgtaaatgtacatttgtatgtaaatcgagtaaacttatcagtctggcgttgttgccagttcctacaactaaccgttccaaatggtacaagagtacagaagcactaatataacaagaatgttgaaacgcactgctgtttcttctttcatgatcggccgtagaaggaaaatttacctaac

SEQ ID NO: 201529 - DNA, 1144 bp, Zea Mays
ttcacatttcaactcatcttgctaggtcagaaaatgtttggtgttgctgggagccctgcatatgtggcacctgaagttctttctggaagctattcggagaaggttgatatatggggtgccggtgtgctactacatgtactactacttggttcacttccatttcaagggggctctctggacgccgttttcgagtccataaagacacttgaacttgatttcagcagcaccccatgggaatcaatatcagttcttggacgggatcttattgggcgaatgctaaatcgagatgtctcttgcagaatgactgctgatgaagttcttagtcacccatgggtcgtattttacacagaatgccccctgaaggtggtagctgctaatttgtgtctccctaacaaggttatagcacccaaaattccatgggacagacacaaatcagaatgtgactcagtgtcagacgcaagccaaaggtcagaggatcaggatgagtgtggcatagttgacgcattggcggcagcaataacacgtgttagaatatcagagccaaagagaagtcggctctgtagccccgcaattaccattcagcaggaatgctcgtcaaacttgaagaataatctttgcacggctttctgacctgacctagtttatagcacctgatcggaatggcgtccattcttctcgctgagaaggtcgttctgatttaggtgttgtagaggcgaggataataactcagcttttccagccagcaacaaacgtctggtatttagtgtttctttcagtgttcctgatgaaccccgcagttgtagctgctgtaaaattctgtaaatagcatggtcctttctcaagctgcgcctgggttgctaatttgtgccaccaaaaccgtttcacgcaatgttcataattcatgatcgagttgtgcaagacctgtcttaattctgatgcttgtcacccgaaactatatttggcacacgtatcatgaatagcttggtaccaccgatacccatgtgctacccgttctaaactgtggtaatggatatcattcaaatgtttcttcacaatttatttgagttcttaattaattttagtttaaaaatataatttgtttgagtttataattaattttaattcaaaaatatatagaaatata

SEQ ID NO: 201530 - DNA, 1771 bp, Zea Mays
acatacatgtattcttgtaggctccctctcatctctgcacacctcccgccgcgccgaccacgcgcctttccccttttcctctcccccagatccacccgccgcgccacccctctcggctcctcccaggcggcgtcggccctttcctcgccctcctccgtttctctccggcgtatatatgggttcgaaatcggtagatgaggtgctcgatgccgccgccggagtccattgctctgctctccgtctggacggtcccaacgtccagttttccgcctcctccgaggaagaaccaacgacgtctggcctggagaatggccatcaggagccctttgttattggcgttgctgggggtgcatcgtcaggcaaaagtaccgtgtgcaagatgatcattgatcagctccgtgaccagcgcgttgtggctgttacacaggagtccttttattatggattgacggatgaagaattagtccatgttcatgattataattttgatcatccagatgcatttcatacagagctacttctctcttgtatgcaaaacttgaaacatggcaaagctgtcgacatccctaattacaacttcaagacatacaagagtgtaccaaatgcaaggaaggttaatccttcagatgttattattttggaaggaattctagtttttcatgattcacgcctcagggatttgatgaacatgaagatcttcgttgatacagatgccgacgtacggttaacaaggaggatccgtcgtgataccattgacaagggtagagatatcaaagctgtgttagatcagtactcaaaatttgttaagcctgcttttgaagacttcatcctcccaacgaagaagtatgctgatattatcatcccacgaggtggagacaatgatgtggcaattgatctaattgttcaacatattcggactaaacttggacagcatgatctttgcaaaatacaccccaatttgtatgtaattcagactacttatcagatacgaggcatgcacacaataataagggatgctgccacagcaacacatgatttcatattttatgctgatcggttgattcgactggttgtggaacatggtcttggtcatcttccttttcaggaaaagcaggtcatcactccgactggatctgtttacactggtgtggagttctccaaaaggttgtgtggtgtctcagtgatcaggagtggcgaaagcatggagaatgcgttacgagcatgctgtaaaggtataaagattgggaagattcttattcatcgggaaggagacaatggacaacagctcatctatcaaaatttaccaaaagatattgcaaataggaaattcagcagttcaggccatctcccttctattgaagaagggtgtacaagaagcaaatattatattccttaatcttatttcagcgccccaaggagtgcatgtggtgagcaagagattccctagagtgaagatcgttacttcggagattgagtttggtctaaatgatgatttccgtgttgtgcctgggatgggcgaatttggagacagatactttggaacagatgattatcagtcatcgacgccattcttttgtgacgataaaaatcgtgtcaggctcttgtgacatgaagccatggctgcggcgtattctccaatttttgagaaacttatatcagcattccaaactctagaatgccatcataatgttttcattaccagacactgtaccatggaacatccagacagaaatcacctcttaatataattggatttgttccatttttattt

SEQ ID NO: 201531 - DNA, 3458 bp, Zea Mays
ttggccatctctagtcgccgttggctgtggctatgctgcactatctttttattgtagataataagtagctgcagtgttgttcagttaaactgtgtccaaaagtttacatatagttactaaaaacactgttttacatcgtggattgtactgttctcagtggattaatagaattggacgctggagatagacccgccggagaagatggcctgcccactgctcacagtagtctagtccctgcccaccaagtacggatctcatctcaccagctgcctgtgcagcagtccaattcctcttgctggagcataccagaagcagaatcgggtgagaggaaatgggatcaacaagaacgtctcatccatctttcccggtcctcctgctcttcctcctcgctaccgccgccgccgccggaagcaacaaggctgaggaggtggacgacctccagtaccttattgacaactccgaagacatcccacccaacgaccctgacgggtggcctgagggcggcggcggcggcgactacgacgacgaccttctcttccaagatcaggaccaggacctcccagactacgagccgcagatcgacgagacccacgtcgtggtcctcaccgccgccaacttctcctccttcctcgccgccacccgccatgtcatggttgagttctacgccccctggtgtggccactgccgcgagctcgcccctgaatacgccgccgccgccgcgcatctcgccgtccaccacaaccagaccgatctcgctcttgccaaggccgacgccaccgaggaaaccgacctagcccagaggtacgacgtccagggcttccccactatcatcctcttcatcgacggcgtccccaaggactacaacggcgcgaggaccaaggacgccatcgtcgactggatcaacaagaagctcggcccggccgtgcaagatgtcaccagcgtccacgaggccgagaggatactcaccggggatgacaaagccgtcattgccttcctcgacactctaaccggtgctcacagtgacgagcttgctgctgcttcaaggctggaagatagcatcaacttttatcaaacttcgattcctgatgttgctaagcttttccatatcgacccagcagcaaagcgtccatccatagtattactgaagaaagaggaggagaagttgaccttctatgatggaaagtttaaagcatcagccattgctgattttgtgtctgctaacaagcttcctttggttaccacactaactcaagaaacttccccttctatttttggcaatgcaatcaagaagcagattttactatttgctgttgcaagtgaatcctcaaaatttctgtccatctttaaggaagcagcaaagccatttaagggaaagctattatttgtctttgtggagcgagacaatgatgaagttggtgaaccagttgccaactactttggtcttactggacaagagaccacagttcttgcttacactggtaatgaagatgctaggaaatttttccttgatggcgaggtgtcacttgaagccattaaggacttcgctgaaggtttcttggaagacaaacttacaccattctacaagtctgaaccagtacctgaatctaatgatggggatgtcaaaattgttgttggaaagagtctggatgtaatagttttggatgaatcaaaagatgtacttctggagatatatgcaccgtggtgtgggcattgtcaatcactggagcctacttacaacaaactagccaagcatctaagtggagttgactcccttgtgatagccaaaatggatggtactaccaatgagcatccacgtgcaaagtctgacggatacccaacaattctcttctatccagctgggaagaaaagctttgagcctgtcacgtttgagggggagcggacagtggtagatatgtacaggttcatcaagaaacatgctagcatccctttcaagttgaagcgccaggagtcaagaagggagagcatccagacggatggtgtcaaggacgaactgtagggcaggcgttgctgggggtgcatcgtcaggcaaaagtaccgtgtgcaagatgatcattgatcagctccgtgaccagcgcgttgtggctgttacacaggagtccttttattatggattgacggatgaagaattagtccatgttcatgattataattttgatcatccagatgcatttcatacagagctacttctctcttgtatgcaaaacttgaaacatggcaaagctgtcgacatccctaattacaacttcaagacatacaagagtgtaccaaatgcaaggaaggttaatccttcagatgttattattttggaaggaattctagtttttcatgattcacgcctcagggatttgatgaacatgaagatcttcgttgatacagatgccgacgtacggttaacaaggaggatccgtcgtgataccattgacaagggtagagatatcaaagctgtgttagatcagtactcaaaatttgttaagcctgcttttgaagacttcatcctcccaacgaagaagtatgctgatattatcatcccacgaggtggagacaatgatgtggcaattgatctaattgttcaacatattcggactaaacttggacagcatgatctttgcaaaatacaccccaatttgtatgtaattcagactacttatcagatacgaggcatgcacacaataataagggatgctgccacagcaacacatgatttcatattttatgctgatcggttgattcgactggttgtggaacatggtcttggtcatcttccttttcaggaaaagcaggtcatcactccgactggatctgtttacactggtgtggagttctccaaaaggttgtgtggtgtctcagtgatcaggagtggcgaaagcatggagaatgcgttacgagcatgctgtaaaggtataaagattgggaagattcttattcatcgggaaggagacaatggacaacagctcatctatcaaaatttaccaaaagatattgcaaataggaaattcagcagttcaggccatctcccttctattgaagaagggtgtacaagaagcaaatattatattccttaatcttatttcagcgccccaaggagtgcatgtggtgagcaagagattccctagagtgaagatcgttacttcggagattgagtttggtctaaatgatgatttccgtgttgtgcctgggatgggcgaatttggagacagatactttggaacagatgattatcagtcatcgacgccattcttttgtgacgataaaaatcgtgtcaggctcttgtgacatgaagccatggctgcggcgtattctccaatttttgagaaacttatatcagcattccaaactctagaatgccatcataatgttttcattaccagacactgtaccatggaacatccagacagaaatcacctcttaatataattggatttgttccatttttattt

SEQ ID NO: 201532 - DNA, 2181 bp, Zea Mays
gcttgatgctcagatgtttgctgcgcgaaaatcttcctctcctttcaagctctcaggttgattcagaacgggaattttttagtcgtggtataaaaagagtttgtacaaagtatgttctaactttatcaactaaatcactcactttgccaagtaaagcttgggacttcctgatcaatagtaaataccattcctaatactgcaaaagggcactatcgccttccaattcttttttgcatgtgacatataatacatgcaaaactgtttttaatccatttctctatgatggcagttaaaatgtgtataatattcgattcatgagagaaacattggagatattccggtgtgcttttatatggaatgacccgacctgcagcacaactgtctaatagtctcatagttcatttctgctatatttacatttttagtatttcttatttcatttgtagttcagtttgtttgtccataaaactagatcctagactgctttgcactcagctcagaccaaagccccactctacatggaccagtgtgtaatctttctgtatgcatcatctctctctcatgtaatttatctctatcacacatgtaggttgtagttacgcaacccatatggttagtgcattatcctggagttgcagaatttatgcagtagtttcatgagatgttaatcagatcaaaagaattaaagagtttgtttatcctgattcccgagttcattactaattacactagcaattccttgtccaatatccaattaactacttttccccctgcctcctctactagagaaggagaacttttgttgatgaacttaatatacggagcatctttgaagaaaatgatgttatctgtgtcagtgtgatacttgctctatttatttcaagcagttattttgtcttagtgctggagtcaacatttggggtatagtgacttcaaatctgtttttacttagggtgttgagctgacactttttgcttctatatgactgtatctataatgccagcacatcacaaacaaatgcacgatcaatgtggcagtgcccaatttttgtcattattatatgtcaaggaataatcttatttgcttgtgcttccctgtttgcaaatgccggggtcctggagcaagtcttccacccccgaaccctcacgccaccgccgcagctgtcttcggtctcccgtgcttcccttcgagagatcaaggctaaagtaacctgtctctgtttggtcattatgctctaggatccttcaacttgacatcacagcaatcgttgaggagagcctagacttttcaacggaggttatggatttggcagcagaggaactcttggagattgtgcctcttggaaaaggcttctttcttgccaactatcctatttcaaatttggattgaccattatcgttcgttcctttgttctccatcttttacctcttgtagttacacaagaacaacttgattgtgctaaagaggcaatcaaatctacagttctgatgaacttggaatcaagggctaaaataacctgtctctgtttggtcattatgctctaggatccttcaacttgacatcacagcaaacgttgaggagtgtaaccagcaacctcagctctgaaagaaccctagagtaaacactcacatcaagacactccattgttcactcttgggctgctcctaccaatgaagcaagagcatctccacctcgcaatggtccactcgttgtattcatcactaagttagcttgattccaccaatgggtgttcatgcttggcttgaacccctacaagtgcacctggcattggttaccaatctgcagattcataacatctcatgaaaaggatgcgtgttggacaaccagataaggtattacagagaatatgaataatctggaggttctgctgatgcatgtaaattatggaattatggtttcaattctagattatttgagaatggcacctctatatgctcattgggcaatgatcagaaagttggagatcatagaaatactgagaacgctgtatcttgtttacatttatgggcacttttgaaaagaaattattttgtatggtagtattgttgaaaagatcaataatttagaggatttgatgatcactgtggatcgctgtgcatgggataagcggagctactcatagcttctactatcacggaagaatatatattgctaacccca

SEQ ID NO: 201533 - DNA, 1490 bp, Zea Mays
gaccgtcctccctcgtcgcgagagccacctccccgcacaagccgcgcaatgcgtcctacccgacactgtcgttccgcaaacaacctccgcgcagtcgtcgtccacacttgcccgcctggataaggatacgaagtccaaatcctcatccgaccggttccctacttccctcaaaccacgtcctctgcaacgagcgcgccctacgcgacggcgttccctcggctacctctacctcctggacatgccaccctcctcccggcctccttcgcctcaaccctaaccccgcaccttcgaacccattgctgctcccctctctccccggctctaatccgctcctaacttccgccttgtttgctgcaaggaggcgtgcgcgacctccagttccaatctgagcgactttggtggcatggacttcctgttcaccatcgccggcttcctcaccatcatcagctttggtggcggacatgagaggagagaagaatccttcgaggtggatcttgatttaactcttaatgagcttggagatggggaggacactcaagaacaccaggcgatccatgcacaaattatcaggaagggtggtgggaagtgttccacttgccaccaattctcatctctcacctctctatcacatgaaccaacatatttctacaatgtggacattcctctcgagtcatcaaaggatctgaagaaaaggagaaagaactccatgctctgaagtgcctcgcggttgagtcagaacaaggcacagatgggtgcgacagagctgtgggatctcttggcctccggctcagagcaattcgtggagatgtacagggtgtatcaacacctcaggctgaagaactggtttgtaaggtcaggactgcagtacaggcagactttgttgctcactgtcatcgtccgacactagtgcactcgtagttcgtggaggttgtggctccaaaagggaaagcattcggcaccaggtgtgcccgcatgaaggtttggtctgaactattatgtgcgctttgggactcttcaagtgtggccaagatgttacttcttaccattagcaccaagagctacgagctagaatccttggattgtttggagcagatgattgttcatgagaggacgatcacaagatggataccacaaccgtgtcgtgagcaacaagacaaaccatgcagagaagaaaccaaaagggacatgcaaagacaaaaatcctgcagagaagtattaagcaacgaacagagcatacaagtgtgggggtggtgtagtgtttatctattggacgtagtgcagagctttacagttatttctagcttacttatctacaaactgaaatcttaactaaagagcttcctatttctgtatagtcatgttgatgaacgtgaataatgcaattctatggtaccaatttgttgtgattctcattgacttttctacatatctttgataacatcatcttatgtaatgcctacttgaaagggaaatggacttaattatttcat

SEQ ID NO: 201534 - DNA, 1270 bp, Zea Mays
ctccccgcacaagccgcgcaatgcgtcctacccgacactgtcgttccgcaaacaacctccgcgcagtcgtcgtccacacttgcccgcctggataaggatacgaagtccaaatcctcatccgaccggttccctacttccctcaaaccacgtcctctgcaacgagcgcgccctacgcgacggcgttccctcggctacctctacctcctggacatgccaccctcctcccggcctccttcgcctcaaccctaaccccgcaccttcgaacccattgctgctcccctctctccccggctctaatccgctcctaacttccgccttgtttgctgcaaggaggcgtgcgcgacctccagttccaatctgagcgactttggtggcatggacttcctgttcaccatcgccggcttcctcaccatcatcagctttggtggcggacatgagaggagagaagaatccttcgaggatctgaagaaaaggagaaagaactccatgctctgaagtgcctcgcggttgagtcagaacaaggcacagatgggtgcgacagagctgtgggatctcttggcctccggctcagagcaattcgtggagatgtacagggtgtatcaacacctcaggctgaagaactggtttgtaaggtcaggactgcagtacaggcagactttgttgctcactgtcatcgtccgacactagtgcactcgtagttcgtggaggttgtggctccaaaagggaaagcattcggcaccaggtgtgcccgcatgaaggtttggtctgaactattatgtgcgctttgggactcttcaagtgtggccaagatgttacttcttaccattagcaccaagagctacgagctagaatccttggattgtttggagcagatgattgttcatgagaggacgatcacaagatggataccacaaccgtgtcgtgagcaacaagacaaaccatgcagagaagaaaccaaaagggacatgcaaagacaaaaatcctgcagagaagtattaagcaacgaacagagcatacaagtgtgggggtggtgtagtgtttatctattggacgtagtgcagagctttacagttatttctagcttacttatctacaaactgaaatcttaactaaagagcttcctatttctgtatagtcatgttgatgaacgtgaataatgcaattctatggtaccaatttgttgtgattctcattgacttttctacatatctttgataacatcatcttatgtaatgcctacttgaaagggaaatggacttaattatttcat

SEQ ID NO: 201535 - DNA, 1540 bp, Zea Mays
cgacactgtcgttccgcaaacaacctccgcgcagtcgtcgtccacacttgcccgcctggataaggatacgaagtccaaatcctcatccgaccggttccctacttccctcaaaccacgtcctctgcaacgagcgcgccctacgcgacggcgttccctcggctacctctacctcctggacatgccaccctcctcccggcctccttcgcctcaaccctaaccccgcaccttcgaacccattgctgctcccctctctccccggctctaatccgctcctaacttccgccttgtttgctgcaaggaggcgtgcgcgacctccagttccaatctgagcgactttggtggcatggacttcctgttcaccatcgccggcttcctcaccatcatcagctttggtggcggacatgagaggagagaagaatccttcgaggcttgcagagaagacaaacactggtagtcgtagaacccaatgaaattaacttcactagaataaagaagaaaaggaagaaaacgaagaaggtggatcttgatttaactcttaatgagcttggagatggggaggacactcaaggtgcatttcatttgtctgaataacaccaggcgatccatgcacaaattatcaggaagggtggtgggaagtgttccacttgccaccaattctcatctctcacctctctatcacatgaaccaacatatttctacaatgtggacattcctctcgagtcatcaaaggatctgaagaaaaggagaaagaactccatgctctgaagtgcctcgcggttgagtcagaacaaggcacagatgggtgcgacagagctgtgggatctcttggcctccggctcagagcaattcgtggagatgtacagggtgtatcaacacctcaggctgaagaactggtttgtaaggtcaggactgcagtacaggcagactttgttgctcactgtcatcgtccgacactagtgcactcgtagttcgtggaggttgtggctccaaaagggaaagcattcggcaccaggtgtgcccgcatgaaggtttggtctgaactattatgtgcgctttgggactcttcaagtgtggccaagatgttacttcttaccattagcaccaagagctacgagctagaatccttggattgtttggagcagatgattgttcatgagaggacgatcacaagatggataccacaaccgtgtcgtgagcaacaagacaaaccatgcagagaagaaaccaaaagggacatgcaaagacaaaaatcctgcagagaagtattaagcaacgaacagagcatacaagtgtgggggtggtgtagtgtttatctattggacgtagtgcagagctttacagttatttctagcttacttatctacaaactgaaatcttaactaaagagcttcctatttctgtatagtcatgttgatgaacgtgaataatgcaattctatggtaccaatttgttgtgattctcattgacttttctacatatctttgataacatcatcttatgtaatgcctacttgaaagggaaatggacttaattatttcat

SEQ ID NO: 201536 - DNA, 1783 bp, Zea Mays
gttgaaatgagagtttgggttggagcgtgatgaaaagtgctgaaatctggatgagaggctacggcccaaatttgatgcttcggttgtggagttgcaaggctgaaggcgcaatctcaccacaatccctcccggcgccgcccgccggtcgctcccgacgctatgttccgccttcgaaattgcattcttccacatctactcttctcgtcccgccgctcctcttcctgcatcacccccctccatcgcctcctctccggttccgccgccaccaccgcgagcaaccctttcacggtcgccgactacctcgtcgccagatgcggtctctccagggagcaggtcctcaaggcatccaaaatcaaaaggatcctcgacctcaggtctccctcgaagcccgacgtcgtcctcgccttcctggcgggcctcgacatctccggcaccgacctcacaaccgtcatcgccaatgatcccagactcctttgcaccgacgtggggaagaccctgtctctccgcgtcgccgagctccgcagcctcggcctgtcaagccaccaggtcggccaggtagtcatcgccgcccagatccggttccgcagcccctcgttcctccgcaattttgaattctggcttgggctcttcggctccttcgacgagctcttgcggttcgtcaagatgaacggcaacctcctcagcgtcaacctcgagaaggttgccatgcccaacctggccctccttcagcgatgcgggatggagatttccgatattcccaacactttcctgtcccggatacttgtcaggagcactgagcacctccaggaaactctggcacgcgtttcagagtttggaatccagcagggatcgtgggttttccctttcgcgttcatgaggtttgcgatcttgaaccgtgagaagctcgacagtaatatacagctgtttgagaagcttgggtggtcgagggatgatatagcatcagcagtgaggaaggcgccgaatatcctgagcttaactccggaaagggttcataaaaagttggattttctaatgggtgttgttgggttgcagatggcagtcattgtgtatcggccagtgctgctattgcatagtgtggagcgtcggttgttgccgcggtattacttgatgaaatttctcaagaacaggggattgatgagttctagtttaagcttcctaactattgcatcgatgggcaatgataatcttctggataaacttgtgcaccctcacgagatgagtgtcccaggtcttgctgctgcttatgcttctagctgcgctggaaaacaccagtgggagctccttgacgacatgacaaagggaaagagaaagagaaagtgctaagacatgttctggtaactagtgctgtgaaggatctcttctaaggagacctatactgtcaatcaccaaaaagagcattgggtttgatctgaagggcagtgctacgtctatgtgactttgagcaatttctggtacttagggcttcgctttcaccaggttctcggggcattgtgtttttggaataccttctaggactgctgtctgacggccttgctggctaaggaaaaagaaacgctgtgacgctgctttgttttagtggggattgcggtctctaagttctgtctccaacaacaccctgtaaagggtcctgtcctctaaatatagaggactgtcaggtcccctatggctccagcaaggcactctattccgtcctctaaattttagaggatgtggcagacactctaaatgtggagggctccgggagtgcgctatccgcgctctt

SEQ ID NO: 201537 - DNA, 494 bp, Zea Mays
ccagagactccatagccgccaggagacctatactgtcaatcaccaaaaagagcattgggtttgatctgaagggcagtgctacgtctatgtgactttgagcaatttctggtacttagggcttcgctttcaccaggttctcggggcattgtgtttttggaataccttctaggactgctgtctgacggccttgctggctaaggaaaaaggttctaaattctgtcctttgtatccttcggtggaaagcttggatgcgcgtgtggatttattttttatttttgcagaaacgctgtgacgctgctttgttttagtggggattgcggtctctaagttctgtctccaacaacaccctgtaaagggtcctgtcctctaaatatagaggactgtcaggtcccctatggctccagcaaggcactctattccgtcctctaaattttagaggatgtggcagacactctaaatgtggagggctccgggagtgcgctatccgcgctctt

SEQ ID NO: 201538 - DNA, 303 bp, Zea Mays
cccagcagcaggggctttctctggcgtcctggtcgaaacaaccccaccacctccggcacaagcacacgaagccttcgcattcctgtccggcggaaccgctgaaggaagggagccgaacgagcaagcaagccaccaacgaaggttgctagggccggagtggatggggttcatgctgcgggtgaggctcgcctccttcttcgtcggcgcggctgccgccgccgcgggcgggggctacttcctctacaaggactacaagctcgccaacgactctctggccctcaagtttcttactcaaccgttcag

SEQ ID NO: 201539 - DNA, 2574 bp, Zea Mays
cgccgagcccagtcgagggagcaagacgccggaagcgacgcgccccgtactctgcatctctgccgccgccgctgctgctgcttgcttctacagtcccctggccccctgttgctgccctgctacgatggcgatgcaacacggccaccagtagcccctgctcgctcctgccgcagcacgcgacgggaaaggcccaaagggaggggaggcgagaaagaaaaacaaaagatgggatcttgaggaggaggtgctgggggtggggaggcggcataatggcggccgcggtgtgctagcgggctaaagggggtgcactactgattgctgatgggttaaaggaggtgcaggtggtggtggagatggagtggacgcgttcatgcccgcgcctagctagctagctagcttacctgtccacgcctctgtgctgtgtcctcttggctttctctttcccgctctcctcctcgcttgccccccgccagctctccagggagtggactagtgcagggagggagggagggaagaaaggagtggtgcagctgtgagtgaagccacctctcgtttccttgattgattggagccgagccggaatgtgatgcgagagagattagaaccgttcacagcacacaactgagcaatcctctgaaggccaaacacccccatccagttagccatctctgaaggaacatacaggctttttcataagatagtcatggcagagttcaagatcggtaggctggatggccagccaccaagggtcagaaatgtgcccattgccgtcaccccggaaggattctggtgctgcccatcacaggccgcgcttcagaagacagcgaagagcccaaaccagcagggcaggcctagagggggagcatcccctgcaccatcgaaggcatcctcggttcagagggtgccaaccatttcttcagagaagagagcacagtccactcctactaggtccagaacccattcagatgagcaagtgtgccctccagcaaatgctgttgctgcccctgatccgccaaaggtagtacctgcaccggcacctgagaaacggccaaagcagcataagatctcggtcgggtttgggcagctcggcacaagtgatctgaaggttgtgctgcatggcatggaaggggtagctgtgaagatgattgttcacaagagcattcttgctgaaaatagtaccttttttgccgatagaatctcgaggcagtctccggtgtcatgcattgaggtgccagattgtgaggatgtggagatttatgtcgagactgttgggttgatgtactgcaaggatgtcaagcagaggcttatcaagcaaaatgttccacgagttctgcgaatcttgaaggtcgcagaatcactaggcttccgtgcatgcatcacatcatgtttagactacctggaagcggttccttgggtcggcgacgaggaggagaacgtggtgtcgtccatacggcagctgcacggcgaggatcacagggctaaccccttgctaaggagagtgacatctgacaccctcacaaatccgccgaacgacacccttgcgcacatcattgagctggtgctgaagagcagcgaggacagaggccggcgcgagatgaagtctctggtcctgaagctgttcaaggaaagcagcaacggcagcagcgccaatggttcttcagcagactcgtcctgtatcacgaccttgtacgggtgtttccagaactgcctggattccctgctggcgctgtctcgccaagctgccggtgcagacgagctcgcgggcgaagaagaatcgtcgtctgcaggcagcaaagagcaggcgttcagaaagatcggtctggaggcggacaaccttctctggctagcggagatcctgtcggagcggcacgcggccgacgagctgacggccatctgggcgagccagacggagctggccgcggagctgcaccccaggataccggtgatgcaccggcacctggtgagctgcgtgaccgcgaggctgctggtggcggtcgggaagggtgaggcgctgccgtccagggagacgcggcggcggctgctggacgtgtggctgccgccgctgatggacgactacaggtggctgcagcacgggtgccgctggttcgaccgcgccgcggtggaggacggcatcgggcaggccgtcctgacgctgccgctggaggagcagcaggccgtgctgctggcgtggctgggcaggttcctcagggccggaggcgacgggtgccccaacctgcagcgggcgttcgaggtgtggtggaggaggaccttcgtcaggccgtacgccgagcagcctgggagtgggagctcctcgtggtcgtcgtcgtcgcggcggcactgaccgtcgtccagcggtcgttgtctggaaatgacaagagtccacgcgatgcagtttctttcaagtttcagtagtagtagtaggagactttgagttaggagacgctggagtttgttcctctctgttgttgtaatgcttttgggatcgatgtgatgtgacaacccgttctgatttcttggcgcagaaatcaaccttcctgcgtgatttttactgttggggcagctatttcttggcaa

SEQ ID NO: 201540 - DNA, 2168 bp, Zea Mays
cgcgccacggcctttaaatgccacaccatctcccccgctccaaacacccacacccacaccacacctcacgtctcctcactacccgcgctctcaggcagcgcacctcgctcctcctcccccacagcgctttccattttcgtctatctcccgagaaccctcctgcgcctcccaaagctctcttctatcgcggccgcgcgcctgatcgacgtacgaccggtctggtacgtacgtgtgctcgcccgccatggctcgcggcgacggcgagctggagctgtccgtgggggtccgcggcaccggcggcgcggcggcggcggcggcggaccacgtggcgccgatcagcctcggcaggctcatcctcgccggcatggtcgccggcggcgtgcagtacggctgggcgctgcagctctccctcctcacgccctacgtgcagactctggggctctcacatgccctcacttcattcatgtggctatgcggtcctattgctggcttagtggtccaaccgctggttggcctgtacagcgataggtgcacagcaagatggggaagacgcaggccatttatcctgataggatgcatgctcatctgccttgccgtcattgttgttggcttctcgtccgacatcggagctgctctaggggacacaaaggaacactgcagcctctaccacggccctcgttggcatgctgcgatcgtgtacgttctggggttttggctccttgacttctccaacaatactgtgcaacgcgtgctatgatggctgatctgtgcggtcatcatgggcctagtgcagccaactcaatcttctgttcttggatggcgctgggaaacatcctaggctattcctctggctccacaaacaactggcacaagtggtttccgttccttatgacaaacgcgtgctgtgaagcctgcgcaaacctgaaaggcgcgtttctggtggctgtggtgttcctagtcatgtgcttgactataaccctgttcttcgccaaggaagtgccctacagaggaaaccagaacctccccacaaaggcaaacggcgaggtcgagactgaaccttccggcccactcgctgtgctcaagggcttcaagaacttgcccacggggatgccgtccgtgctcctcgtaactggactcacctggctctcttggttcccgttcatcctctacgacaccgactggatgggccgtgagatctaccacggcgaccccaagggtagcaacgctcagatctcggcgttcgacgaaggcgtcagagttggctcgttcgggctgctgctcaactcgatcgttctaggattcagctcgttcctgatcgagcccatgtgccggaaggacgccatcaccgccagcacgagcatcaaggccgtctgcctcgtcctcttcgcgttcctgggtgtccctctcgccatcctgtacagcgtcccgttcgcggtgacggcgcagctggcggccacgaagggcggcgggcaggggctgtgcaccggcgtgctcaacatctccatcgtcatccctcaggtgatcatcgcgctgggcgcgggcccgtgggacgcgctgttcggcaagggcaacatcccggcgttcggcgtggcgtcggggttcgccctcatcggcggcgtcgtgggcgtgttcctgctgcccaagatctccaagcgccagttccgcgccgtcagcgcgggcggccactgatcgcggccgccgcgccggagcacggcacggcggcacagcccagccgtgctagagctgtatgttttgaaagttgaaacagaataagaagcgggcgaaacgagaaaaccatgcatgtcatgtgtgtgcttttgttgtgtgtggggtggggcaagcgaggcgaggtgtgtggaggtgaagtgaaggtgagcatatccagcaccagctggtaccaaggtcgggtctctgtgctagtgctattagctagtgtaaggagcgagtaggtcagttaaggctggtgcgtcgtgagggctgtcttgtgtgtagctacagcagacggttcatcagaaggattattcgtgcagtatatacagtacaactagacaatgatgttgatgattggtctagagctagaggcctatagccctatactactgtgtattgtccgccgttttagttttttggtcccatcccatcaatgcaaccgccttgttttgctccaa

SEQ ID NO: 201541 - DNA, 3373 bp, Zea Mays
cgtttgaaatccgttgcagcgttttcatatttcgtttcagcgaaaactcgtcaaatagaaaaattggcatcaaaattttcgaaatctcacaattgggccttctccgataaggcgataaccgaaccgattccgtgaaccgcccccgaactttccatcgaccttttctcccctaaaaaaaaccgagcgattccaaatcagactgccttccggttccccatctcccctccctcagcgcagactcagccatggcttccgccgaaaccctagcccgctccccctcgcgcgagccttcctccgacccgccccgcgcaggctcttccgagccccaccacaacggcgccggtgactcgtctcgccgccgccgccgcagccgctgggagcagtctaacgacgactccgccaacaactccggcggcgagggcggggccgtgggccggaagcgcaaaacgcggtgggccgaggaggagccgcgcccagccatcgcgctgccggacttcatgaaggacttcgcggccgagatggaccccgaggtgcacgctctcaacgcgcgcctcctcgacatctcgcgcctgctgcagtcgggcctcccgctcgacgaccggcccgagggcgcgcgctctccgtcccccgagcccgtctacgacaacttcggcatccgcataaacacccgcgaataccgcgccagggagcgcctcaaccgcgagaggcaggatattatctcgcagctcatccgccgcaaccccgccttcaagcccccctccgactaccgcccacccaagctccagaagaaactctacatccccatgaaggaataccccggctacaactttatcggcctcatcattggccctcgtggcaacacgcagaagcgtatggagaaggagactggtgccaagattgtcattagggggaagggtagtgtcaaggaagggaagtttctgcagaagagggacctcaagccggatcccagtgagaacgaagatctccacgtgcttgttgaggcagagacgcaggaggcactcgatgcggctgctggtatggtggagaagctgctcaccccggtggatgaggtgctcaatgagcacaagcggcagcagctccgggagcttgccgctcttaatggaacaattagggacgacgagttttgtagaacatgtggtgaggctggtcacaggcagtatgcttgccctaacaagatgaacacgtttaagagtgatgtgcagtgcaagatctgtggggatggtgggcacccgactattgattgtccagtcaagggcacttctggtaagaagatggatgatgaataccagaacttcctggctgagcttggtggcggcagtgcacctgagtccatgaacaaatctggtggtccaatgttggctcttacaggaagtggtggtagcggtggtgcttctgctggaacggggagtaacccgccttggtcagccggtggtggtgctgctgtcattgggctcaatggtatcaagaaagactatgacgagacaaatctgtatatcggctacctgccacctacaatggatgatgatggattagtcagtctgttttcgcaatttggggatattgtcatggctaaggtgatcaaggatcgaaacaccggacagagcaaaggatatggatttgtcaagtattcagacgtgtcagaggccaatgcagcgattgctgcaatgaacggtcaccatcttgaaggtagagttattgcggttagagttgctggaaagccaccacagccggcaccagcagtgtcagcacccccatcgtatcctcctacggatcctacttcaggtggatattcctcccaatcctacatgggggtaccaccaccacctcctccagggagttacgctccagttccttggggacagccaccaccgtatgcttcatatcctccgccaccaccaggctctagcatctacaatcctgcaccccctgcacctggccatgctgccccacctccatatggggtgcagtatccaccacccccagcagctcccatccctccaccaggcactacatcaagtgatggagctcagaactacccccccggtgtaacaccaccaagttctggtacacccactcaccctgttgcaacatcagtatatgcatcatctggcgcaccaaatgcaccattgatgtaccctccaccaccttatagttattccccatactatcctcctccaccatttcagccaccacctccaccaccactggctagtgttgatccctctcagagtattgcaactgcaccttgggctacccacagtgcagtgcctccaccaccaccaccacctttgtcctccacaaccgaccagcctactgctccctatggtgccgatgcagaatatgacaagtttatggcagatatgaagtgatataagcgaagttgggtgattcttccaatgaagggcaaaaggcttgatctttcttggagcttataccaacctgatttatttcttgttggaagtttgggactcacatcttaaccttgctgtgtgctgttgtaaaccattgcagaggttgcatgcttaagaaggcatcaagtgttactggctcagctggcatcgaaatatttgcttatgtccttgaactattttaaagaaccttttactaatgcttttgttttgatatctattcttgttattatttgagattatcctgttatgtcactttaatgctctgttcttcgtgacagtgtgttaaccctcactattattcatattttgttcttcatcttgatttggtagtgctagcagtccttttgatctggaacagaaaagcttgctgcaccatgctgttgttgtgacagcttggcacaggcaatagcacttgatgaatatcaggacatgctggcatgcagatctagtctggagtcctgtgcgcaagacacttgtcacaatgatatttgtgagatggtctgaaggtttggaggttggcttcgattatgtttttctaagtaggatatcaccataagcttattctagtcaaagaatgcgatagtcagtccacaaccagcattaggaaccttcatcatgttgcagatataccagcttcctagggttgtctcatagatttctaggtgttaactgtcctactttttgtctattttttgaagttactttcttatccagtgtgctgtgtagatgggaaaaaatatgtgatgtaatgattaagggtacaagtctttttcccttgtcatttgtttcctttctcccttgctttcttcctttctcccttaatgtaagcctagttagttttgcgatggatgttttttcatgattgtggtgtctaagtgggacgcagcctcactgttgttggcccaatagtattgtagacataggttgcttatattcagttt

SEQ ID NO: 201542 - DNA, 3472 bp, Zea Mays
cgtttgaaatccgttgcagcgttttcatatttcgtttcagcgaaaactcgtcaaatagaaaaattggcatcaaaattttcgaaatctcacaattgggccttctccgataaggcgataaccgaaccgattccgtgaaccgcccccgaactttccatcgaccttttctcccctaaaaaaaaccgagcgattccaaatcagactgccttccggttccccatctcccctccctcagcgcagactcagccatggcttccgccgaaaccctagcccgctccccctcgcgcgagccttcctccgacccgccccgcgcaggctcttccgagccccaccacaacggcgccggtgactcgtctcgccgccgccgccgcagccgctgggagcagtctaacgacgactccgccaacaactccggcggcgagggcggggccgtgggccggaagcgcaaaacgcggtgggccgaggaggagccgcgcccagccatcgcgctgccggacttcatgaaggacttcgcggccgagatggaccccgaggtgcacgctctcaacgcgcgcctcctcgacatctcgcgcctgctgcagtcgggcctcccgctcgacgaccggcccgagggcgcgcgctctccgtcccccgagcccgtctacgacaacttcggcatccgcataaacacccgcgaataccgcgccagggagcgcctcaaccgcgagaggcaggatattatctcgcagctcatccgccgcaaccccgccttcaagcccccctccgactaccgcccacccaagctccagaagaaactctacatccccatgaaggaataccccggctacaactttatcggcctcatcattggccctcgtggcaacacgcagaagcgtatggagaaggagactggtgccaagattgtcattagggggaagggtagtgtcaaggaagggaagtttctgcagaagagggacctcaagccggatcccagtgagaacgaagatctccacgtgcttgttgaggcagagacgcaggaggcactcgatgcggctgctggtatggtggagaagctgctcaccccggtggatgaggtgctcaatgagcacaagcggcagcagctccgggagcttgccgctcttaatggaacaattagggacgacgagttttgtagaacatgtggtgaggctggtcacaggcagtatgcttgccctaacaagatgaacacgtttaagagtgatgtgcagtgcaagatctgtggggatggtgggcacccgactattgattgtccagtcaagggcacttctggtaagaagatggatgatgaataccagaacttcctggctgagcttggtggcggcagtgcacctgagtccatgaacaaatctggtggtccaatgttggctcttacaggaagtggtggtagcggtggtgcttctgctggaacggggagtaacccgccttggtcagccggtggtggtgctgctgtcattgggctcaatggtatcaagaaagactatgacgagacaaatctgtatatcggctacctgccacctacaatggatgatgatggattagtcagtctgttttcgcaatttggggatattgtcatggctaaggtgatcaaggatcgaaacaccggacagagcaaaggatatggatttgtcaagtattcagacgtgtcagaggccaatgcagcgattgctgcaatgaacggtcaccatcttgaaggtagagttattgcggttagagttgctggaaagccaccacagccggcaccagcagtgtcagcacccccatcgtatcctcctacggatcctacttcaggtggatattcctcccaatcctacatgggggtaccaccaccacctcctccagggagttacgctccagttccttggggacagccaccaccgtatgcttcatatcctccgccaccaccaggctctagcatctacaatcctgcaccccctgcacctggccatgctgccccacctccatatggggtgcagtatccaccacccccagcagctcccatccctccaccaggcactacatcaagtgatggagctcagaactacccccccggtgtaacaccaccaagttctggtacacccactcaccctgttgcaacatcagtatatgcatcatctggcgcaccaaatgcaccattgatgtaccctccaccaccttatagttattccccatactatcctcctccaccatttcagccaccacctccaccaccactggctagtgttgatccctctcagagtattgcaactgcaccttgggctacccacagtgcagtgcctccaccaccaccaccacctttgtcctccacaaccgaccagcctactgctccctatggtgccgatgcagaatatgacaagtttatggcagatatgaagtgatataagcgaagttgggtgattcttccaatgaagggcaaaaggcttgatctttcttggagcttataccaacctgatttatttcttgttggaagtttgggactcacatcttaaccttgctgtgtgctgttgtaaaccattgcagaggttgcatgcttaagaaggcatcaagtgttactggctcagctggcatcgaaatatttgcttatgtccttgaactattttaaagaaccttttactaatgcttttgttttgatatctattcttgttattatttgagattatcctgttatgtcactttaatgctctgttcttcgtgacagtgtgttaaccctcactattattcatattttgttcttcatcttgatttggtagtgctagcagtccttttgatctggaacagaaaagcttgctgcaccatgctggttggtataacaccaaaattaaaatgcatgtttggtatcttctgatgaatctgtcatgcttttctatcttatgacttcacctaagttgtttggcagttgttgtgacagcttggcacaggcaatagcacttgatgaatatcagtaggacatgctggcatgcagatctagtctggagtcctgtgcgcaagacacttgtcacaatgatatttgtgagatggtctgaaggtttggaggttggcttcgattatgtttttctaagtaggatatcaccataagcttattctagtcaaagaatgcgatagtcagtccacaaccagcattaggaaccttcatcatgttgcagatataccagcttcctagggttgtctcatagatttctaggtgttaactgtcctactttttgtctattttttgaagttactttcttatccagtgtgctgtgtagatgggaaaaaatatgtgatgtaatgattaagggtacaagtctttttcccttgtcatttgtttcctttctcccttgctttcttcctttctcccttaatgtaagcctagttagttttgcgatggatgttttttcatgattgtggtgtctaagtgggacgcagcctcactgttgttggcccaatagtattgtagacataggttgcttatattcagttt

SEQ ID NO: 201543 - DNA, 4291 bp, Zea Mays
ctgtgtactcacggttgtttgattggcttgtgaataaaatcaacaactctattggccaagaccccaactcgaaatgcttaattggagtgctggatatatatgggtttgaaagcttcaagacaaacagttttgagcagttttgtatcaacctgacaaacgaaaagctccagcaacacttcaatcagcatgtgtttaagatggaacaagaagagtacaccaaagaagaaattaattggagttacattgagttcattgataaccaggatgttcttgatctcattgagaagaaacctggtggaattattgcccttctggatgaagcttgtatgttgccgagatcgacacatgaaacatttgctcagaaattgtatcaaacttacaaaaatcacaagcgctttgctaagccaaaattatctcggtcagacttcaccatatgccattacgctggagatgtcacctatcaaacggaattatttctggacaagaacaaagattatgttgttgctgagcatcaggctttgttgagtgcttcaaaatgtgcatttgtttcaggccttttcccttttctatctgaggattcctcaaaatcttcaaagttttcatccattggttctaggttcaagcaacaattgcaatctctgttggaaactctgagtgcaactgagccacactacatccgctgtgtaaaacccaataatttgttgaagcctgcaatttttgagaaccagaacgttcttcagcaactcagatgtggaggagttatggaggcgattaggatcagttgtgctggatatccgaccagaagaacattctatgaatttatagaccgttttggtattcttgcgcctgatgttttgagtggaagttctgatgaggtcagtgctgtaaggaggttgttggacaagatagatcttcaaggttaccagattggcaagacaaaagtattccttcgtgctggtcagatggctgaacttgatgctcgtagaaatgaagtgctagggcgttcagctagcatgattcagaggaaagtgcgttcattcttggcacagaagaatttcattgcattgcgaagatcagctttacaaatccagacagtttgtcgcggtgaacttgcaagaagagtttatcacaacctccagagagaagctgcttcactcaagatccagactttgtaccgtatgtatactgccagaaaagcgtacaacgaactttctgcttcagcagttaccattcaatcaggattgcgcggcatgtgcgcgcgtaaagagctccacttcagaagacaaacaagagctgcaatcatcatccagagtcgctgccgtcaattcttggcgagattgcattattcaagaacaaagaaagctgcaattactacacagtgtgcgtggagagggaaggctgctagaaaggagctccgcaagctcaaaatggctgcccgggaaactggtgcattgcaagctgccaaaaataaacttgagaaacaagttgaggagctcacgtggcggctacagttggagaagcgcatgcgagctgatctcgaggaaactaaatcacaagaaaatgcaaagttgcaagctgcattgcaggaggtgcaacaacagtacaaagaaacaaaagaaatactagtacaggagagggaagcagccaaaaaggctgcagagatagctccagttattaaagaggtccctgttatagatacagagctaatgaataagcttagagatgaaaatgacaaactgaagactatggtcagttcgcttgaaaagaagatcgatgatactgaaaagaaatatcaagaaacaagcaaaatcagtgaggataggctcaaacaggcaatggatgctgagactaaaatcgttgacttgaacatggcaatgctaaggcttcaagagaaaatatccaccatggaatctgaggagaaagtgcaaagacaagcgcttctaagcacgccagtcaagagcatgtctgaacatttgtcaattccaattgctccaaaggcacatcatttggagaacggctttcatgaggttgaaggacttaaggaaccccaaagtgcacctcctgctattaaggaatatgggaacggtgatcctaagatgaaaaaatctattgttgacagacaacttgaaaacgtggatgcactcattgagtgtgtagggacaaaccttggatactgtgcagggaagccagttgctgctattaccatatacaaatgtcttcttcattggaaatcattcgaggcagataagactagtgtttttgaccgtctcattcagttaataggatctgctatcgaggtaatctggcactggagattttagtcatgacactgaaacttgaaagtaccaaaattgaccattaagaaaataaacaagccatccttttgccctttccgcctttgttgatgaagataagatttactctccgcatggaacaatgcagatgtgtgaaaaatgggcatattataatgtagagatatttttttcccacaccggtaaaaaactaattttcgttacggtagtaacgaatttacagagttcaaaacataacattcagaccaaatgaagcaaagctgatcaccctgatactgaacacccagggaacagtcatcaggggataaattatactgtagatatttaaatcacctatattgtttctccaacctaacacattcatgttactgaagagataagccatgacacgcttaaactgttggtaagcatgtttgtttttaaatttaggctgctgctatttttttatgattttggaagccagtcacagtgcttttgagttttacaagtggcaagtttatttttctgttctttctgcgacactcactttgtccagtgtttgatgcagaacgaggatgacaatgacaaccttgcttactggctctccaatacatctagcttattgttcctactgcagagaagtctcaaggctgctggtgctcctggtagcgtttcacgaaagaaacctcctcaaccaacatcattatttggaagaatggcccaaggcttgcgttctgcatcttttgccaacatgcatgttgaagcgacagatgttgtgcgccaagttgaggccaaatatcctgccttgcttttcaagcagcagctaactgcttatgtggagaagatatatggaatcgtccgagacaatattaaaaaggaattatcatctttgatttcgctatgtatccaggctccaagaacaatgaaagctagcatgctgcgagtttctggacgattatccagtcaatctcagagtcagagcaaccactggcagaaaatcattgagagcttggataagctcttgaagatactgcaagataaccatgtgcctccggttttagctcagaaaatatttacccagatattttcatacattaatgtccagctattcaacagtctattgcttcgtcgtgagtgttgctccttcagcaacggagagtatgttaaggctggtctagctgagttggagctgtggtgtgcaaaggcaacaactgagtatgcagcatcttcatgggatgagctcaagcatatcaggcaggctgttggatttttggttatattccagaagttcagaatatcttatgatgagatagtcaatgacctatgtccgatcttgagtgttcaacaactgtacagaatatgtacacaatactgggatgacaagtataatacccaaagtgtttcatcagactaacatgcgggtgctaatgacagaggattctaacagtgatgaaagcggttcgttcttgttagatgataattcgagcatcccgttctccgtggatgatatcaccaactcaatgcaggagaaggacttcacggatatcaaaccggctgatgagctactcgagaaccctgccttccagtttttacaggattagcgctagtgaagtcctcgagcattttatgctgctagatatcttgtcagatcatttattgatttgttgtatattttttggatcctttctaccacatgtgcctttttttagttatcttatccttttgagctagcttttgtaaaaattcatataggtatttgttagggttgggatgggattccgcccttacagttagaaaaggccttatcttttaaagcggggcaaatgattctttgtagggcaacatgaaatcaatctttttacccaagggtgtggtgagaaggggtagatgcaatgtttgtagcctcccagttatagattgtgtaaattatatactgtaaatcaacagtgcaatggaaaagaaaggaaagctatatagcaagtgcagttatgttgtcatct

SEQ ID NO: 201544 - DNA, 2916 bp, Zea Mays
ttttttgatttctatattttttctttagaattccttcaatccaaacggatctaaacatattttcactcgtccgatcaggcgattcagaggacgacatcgctagcacgtggtgtctgttccggctaaaatgaaaggtagtggcaaaattgtggaaagcaccagggaagattttccgcggtggggaaatatcaagaatacccctggcatccgcagccctaacaaatcaaccccgcttcgtcttcccctcctccttcccttcttcccctcccttcccggccgccgcggtgcgcgcccgcctccttccgtccggaggcaactactcgcttctctctactctcggggaagcctgagctgattcctcctcgtgctctctcgtgggaagcatggcggatgggggtattgtggtagccatttgccaatatggtggagaattcacttctggccccaatggtaatttgacatacaaaggaggcgaggcgcatgctgttgatgttactcgtgacatgccactggagaacttcaaggatgaggtgtccaaggtgttccatgttgacgtcactgacatgtcattgaagtacttccttccgaataattacagaacgctaatcacaatatcatgtgatcgagatttacaaaggatggttgattttactaccagtgccacacaagtggaagttttcttgattagtagagtagaaaacaggagtattgttacttactctggagcttctgcaagtaagcctggatctaatgctcctggtgataaaaggaaaaggccaccttccaaaaacaaggtatccaaaagtaacaagaagactccaactcccagtgctcctggcacttcagtccaacctagtgctaataatgtgaaacagccaagaccaatagctattgaaaccaacgacaacagggtattccaactggaatttggaagtgatgttgcctttgccaccccagctggaggtgcttctactgcgccagacattctggatcagcaaaaccttgctcttgttgacactgcacatcgggaaccaattggccatttcgatgattcaggtgactcgtatgttggttctgagatcactgtagatcctcagcatggactcgacaatcctgttatgttttgggatgacattattaaaggtgttggtcaagaatttgataatgtgaaggatttccgtgctcaattgtgcaaatatgccattgggaaaggatttgcgtaccggttcattaaaaatgaaactactcgtgtcacggtaaaatgtgttgcagagggctgcacatggcgaatgcatgcatccgagtcatctcgtaacaagaaatttgtgatcaagaaaatgacagatgagcatacatgtggaggaggaaatggagaaggtcagcgtcgagcgacaagacaatggctgaccactgttattaaggagaagctgcatgataatccgatgttgaagccaaaggaccttgtcaaggaaatatatgaacaatatggagttacactgacttattcacaggtctggcgaggtaaagaagtagcacagaaggaactgtatcatgctatcagggagacttacagccatttgccctggtattgtgagaggcttacagagtccaacccagggagtattgctttgttatctccaatggtggatacaaagttccgtcgcttttttgttgcatttcatgcttctttgcatggttttgcaaatgggtgcaggcccctattgtttcttgacaaggttccactgaaagcaacaaatgagtacaagttgctggtggccgctgcagtcgatgctgacgatgctgtctttccagtggcatttagcgtcgtcgaggatgaaaactatgaaagttgggtttggttcttaatgcagctgaaattccctgtccaaaatcacagctacgcttacaatgccatgacattcttgtccagtggacagaagggtctggatgctgccgtttctcaagtttttgaagatagccatcatgccttctgtttgcatcatatcatggaggaattcaaaggagagctgagaaagggaccatggtcacaacaaataagagaggggatgattgaggattttactcgcgccgctcaagcatgtagtattgaggattttaacacgtcaatcgagagcattaggaacatatccactgaagctgctgagtggatcatagcaagcaagcctgagcattggtccgacgccattttcagaggctgtcgatacgaccatttctcctcaaacattgttgatgccttcaataactggataccaaccaagaaggagggttcaattgtgctgatggttgactcactgagaacaaaaataatggagataatagaaacaaggcgtgaggcttgcaaggcgtggtcaggacctttgacgccttccatggaattcaaagcacaggaggaggtgacgaaggctggtaaaatgactgttctgtgctcttccgaaaccgtgtttgaagtgcgaggcaatgcgatctttgtcgttaatctcgcaaattgggaatgcacctgccggaggtggcagctttctggcctcccgtgcctgcatgctgtcgctgtgttcaaccggatcgggcgatctttctacgactactgctccaagtttttcagaatagagagctaccatatgacttactcaggaacgatcttcccaatacctgatatggacactgttgattttagtgccggtgcaaatctaatcccgcctcccaagccacggacgtcggataaaccaagaaggaagcggtttaaccccaacaagatccccacggtaatacggctctgcagcaggtgcaagcaagcaggccacaacaaggcaacctgtgaagctattttgtagacaaaaaagtagctgctgcatctggggtttgtattttatagcaggacataacagctttgccttcacc

SEQ ID NO: 201545 - DNA, 1739 bp, Zea Mays
ctcgatgccgccaatcagaatccaagcatccaaccaggcagaggcacacagagtctcagacacaggcacagcagacagcagagcgccccccaacaaaaacccaactcgttttcagctcgcgcaacgggcggcctcgtagcggagtcccagtcctctcgctttctccctgcgattcgcctcagcttccatccgatccgattcgggagtcgggactcgggagatagaggcagacggagagagagaagaaaggcaaggcaatcgccgcgcgcgtgcttcctgccttctcggtcggctccagctcgccgttcattcccgcaatcccgttccgctcgcggtatcgggccgtggtagtgatgccgctggctgagccgccccagtggcgccgcaaagccacggatttcttctccacatctagtgtcaagctgaagcaggcagggcaatcggccggggataatatagctgatgttgctgggaaggttgggtccgcggtgaagagtcggtgggtcgtcttccaggaggctaggcagcagcagcagcagcaacggccaccgcatgagacagtgcaagagcgtatcatcaccgctgctgccaccactggtttgcttttcaggaaaggcatttcagagacaaaggagaaggttgcagtgggaaaggttaaagttgaagaggctgctaaaaaaactgcagataaaagcaagagtatcttgaacaatattgaacgctggcagaagggagtcgcaagcactgatgtgtttggtgttcctattgaagccactgtacaacgagagcaatctggtaaagctgtgcccttggtgctagtgagatgtgcagactacctggttatatcagactctggcgcatctttacctgaaggtgtgaatcctattgatgtaggtgcactggtgaagtgctaccttgccagtatccctgagccgcttactacattttcgctttatgatgagcttcgagctgcgagggttagcattcctgatcttagggatatattgaagaagcttccaaatgtgaactacatgacaatagagtttgttacagcattgcttcttcgagtcagccataaatcatcacttaacaagatggactcccgcagccttgctgtggaatttgcgcctttgatcatgtggcggcaaggtgatgctggcacagatttgcgtaaccacctcaagttaaccctgaaaccgcctccaaaaattgtggatacaacatcaaatactgccacgtgggacctgtttgatgaggatggcgaggatgcttcatcccagatccccttggacgatgcttcacccccagactacaactccattgaggtcatccagtgtctgatcgagcatcataatgccatcttcactgatgcaaatgaaaccgtgtggagatgatcaaggtctcttctagatctctctggtgttagctcgtgctacgtattagttccaggtaggaaggtggattaccgtccgttattgttaggtataagcattttggctggaacatttttggagtaggtttgtatatatgccgctagtgttaattctccccgggactaagatctggtcatgttatagcaatataagtcttgggtggatgtaaaccagatggacacaggacacgattgtgctgcatttgctgaattcggcttatacactgatgttaatctagggaactgttgccctgtacgttcacggttagctggtagcgtttgtcgtcaaaacaaatcagtgtagata

SEQ ID NO: 201546 - DNA, 1751 bp, Zea Mays
gccagggtgacgaagtagctgtccactaaggattaacttcttcgatgattctctagtacaaacttttggctggctttatagatcatgagccaccaaacctttcctattatttagcctagatatttggaaatagaaatatcagatctaaacttcctaacaactcagctcttgattggaggaactgatttaacttcctaacaactcatcccttgattggaggaactgatttattcaatcaaaaccttccttctaacctcttatttctttcctgtgttggctccttcctttcctgcgcctgctgctggccttgggcgcctttgatactggcggcccacaaactggtccacaacatccgtacaggtggacaccagaagaaatcaaagctgccactgggaaggatgaatgcactttcatgaaacacagtttgaaattaaggagtgtatatactgacgtcgaggattttgaaggaacaaaagacgccagcaaggaaccactggtgacaagctacaacagaaaattcatgggaacagtagactacatatgggcctcggagggtctgcatactgttaaagtcttggacacatttcccatagagattttgaaaaaaacaactgggttcccgaccaagaaatggggaagcgatcacattgcccttgcctgtgaattggcttttacaaaatgacgccttttatcaggcggagagggcgcctgcatagttgctagtgaccaaacacacctcaagagaaagaatactgtctacaggacgattaactgaaccaaacctcgctcttttagagctcgttaatttatttcatttttttttcgacacacctttttgaattgtgcgtgagtatggagaaccggagtacatcatttgggtccaattttagagcattgttcctgtttgattggctatggagagtgtattttggtgtgctgccactctacctgcggccctgccatctactggttcaatgacttgtttgagtcagtatgccctgcacggcactgtttggtgatttaaaccctgcacgacaattatagagtacaacataattgccctgatacaccgaccggcgtctattgccatcaggatatagatggccaaatggaagtgccggaacctagtcacaatactaacacctcttagccgtgccgtgttggcacgatagaacaggacagcccatagtggcaggaccagctagagcactacaatagtacacaattacatagtacacagttaaaacattgaaaaatcaaataagatgcttaagcataaggtatgtggagctccatcggttcttcacagcttgcttaaaatagacaaacacaaaaatgagtagatgacaaatgaatcaagattagggccttaggggataagagcacaatccaccacaactagatctagagatgataagagcaccacaagtccacaacaaacatcttattgccttaccacaagtgtcaacctcgttagatgtcggctagaggaagaagacgtaacaccatagcagcttatcatctcttaccaaagccccaagccaccaaggtgaggagaagccagaagggggaacgtgaggtggaggaccctaccggaggtcggagcctagaggtgaggcggtggtagagtggaacagtcggtggcaatgcagatttggaggaatggggaatcgcccccaaatcgccaggcgccagagagcggagagtccgagagggttcaaaagagagcgtgagaacgggcgactaacgag

SEQ ID NO: 201547 - DNA, 2028 bp, Zea Mays
cgcccagacaccacacagcagcaggactgcatgagcagcagagggcagagcacgggcacggccgtccgcaacgcaagggcttgcaggacgagaggatggtgcagacgttcgtggccgcctacgcgcagccgccgccgcatcaggacggcttctacccaaaggaagccgtgatggcggccgtggaggagtgcatgcggaagcaggccgacgcgctgctgcactcgctcgacggcatcgggggcaggctttcgcagctcgagctctactgctacaagctcgagaggtccatcggggaactgcgcagcgacgtcatggactaccacagcgagagcaccaccaacttcagatgcatcgacaagaacctcggacaggtccacaaatccttgcaggttcttcaggataggcaggacttggctgaaactccaaaagaactcagcaaacttcaaatagcacatgaggcaccctctcatcagaagggtgaggccaccggttttcccatgcttgcgccaagggaaaatgaccacatcacacaagctccaaaacatgaggttgcccttttgcgacttcaccaagttaatgggatgcagtcccctgccgtgcaggtccaaaccagcggtggctttgttctgcagcacctggtgcctgtctctttgagcacgcagcatgatcagcagcaattgaaccaggctcctgtgtactatgtgcaaagccaggatcatgctaaatccacagagagcaaggcgttggaacctttggttcaaggtgtgcagccacttgtccacaaccctgaagtcatggctcaagttgagctacctcagaaacctaatcaagcaactgaattgtaccctcaacctcagaatcacagactacagatgcctacccagcaggttgattcgcatacatggcatccccaacagcccatggtgcaacagcaccaatacattatccaacaagtttcacgacacatggctcaacagcagtcctcgtctcctcattctcagagtgctcaagccacacccttgtttcctccattcagctccccgaagcctgctagttctaacactgatccaattacaagaagtatggctgggcaacctccatactcttcatcgcagcagcagcatgaagtcgcccattcattttatggccaaggcaatacaatattggttcctgtagctgatcataatgctcagcatcagcaatcgcaatcagtgcagctacacagccagggcacctgtctacctcaaccaagcaagcccagtcactgcagtgttgcatcctatgctgttcaaggaaatggtcagacctacagctccacatacaagaacccttctaactgccctgcaactgtcgtagctcttctgcctcagcctccagctactgcttctatggcgtatcatcccttgggaccacaggtcgtgcacaatcatccatttggaaatatggttgaaacggctagtgtggtagggtattcacgggaccaaggtgagatactcccagtggtgactgcagtacaacccgtgatggttgataagcttaatgctggcagcaacgtaacatcccctcgtgaatggtcagcatagtggacgatgtgccatcgtacacttcactgcttccacaacttactactgcacatattgcagttggaagctcatcaggtctattttatctggctcctttttttccatcagccagcagattagaatagatccttctacctttttcagctgaaggtcagtatgaaataagaaaagtaggttagctgagtgatcactgttggcatatgtcctcacttttaatgggcatatcttcttgtaaccggttgcgaacttatatgccttatatgaatacatgatgggtttacatcagcttgccagatgtttgctaggtaacattagttttaagcggtagctgctgctttctcacagaatctgtcacgcatgatctagttggttatgttactgtgtatgtcatgaagacattagctatacttgaaaattttgttgatggatttcatctcatctactt

SEQ ID NO: 201548 - DNA, 1964 bp, Zea Mays
tccaccactacaccccaccatgtcgaattgtgtccttaacaaaatatatcaaataactagagacgttggatataaaataagtaatgttaatttaatatatacaccatgtacactaaacttccatgtacactagatatccagatatgttcttaataaataaatgcctacccagctacccgcagacagagccgaccgacaacatcatggcgaggattccccaggttctggcgccgctcctcctcctgctgctccccgccggtctccgggagctgatgatcgaccgccggcccctgccggaaggcgctgccggcggcgaggtcctcctccacccgctggtgctggtgcccgggctgacgtgcagcgagctggacgcgcggctcacggacgcctaccgcccctccgcgccgcggtgcggcgccatgaaggggaagggctggttcggcctctgggccaactgctccgacctgcccgcgcaccactacgtgcggtgcttcatggagcagatggccctcgtctacgaccccgtcgcgaacgactaccggaacctgcccggcgtcgagacgcgcgtgcgcaatttcggctcctcccaaggattccagaagaacccagagcacacgacctggtcctggtgcttcgaggtcctcagaaacgagctggcaagggccgggtaccgcgacggcgacaccctgttcggggccccgtacgacctccgctacgccccgccggtgcccggccagccatcggaggtcttctccggctacttccgtcggctggcgagcctcgtcgaggacgcgagccgcaagaaccggggcaggaaggtgatcctcttcgggcacagcttcgggggcatggtggcgctggagttcgtccggagcactcccatggcgtggcgagacagtcagctcgctcgagctggcctttaggccgatgtggcggaccttcgagtcctccctcgtcaacttcccctccccggcggtgttcgggcgcaggccgctcgtggtcaccgcgcggaggaactactccgcctacgacctggaggacctcctcgtcgccgtcggctacggcgccggcgtggagcccttcaggagacgggcggtccccaagatgagctacttccaggcccccatggtgccgaccacgtgcatgaacggggtgggcaacgacacgccggagcagctcgtctactgggacggcgatttcgacgcgaccccggagattgtgtacggcgacggggacgattccatcaatttggtcagcatgctggcgttcgacgagaagatgcgccggcagccggaacagaacaaggtgtacaagtcgatcaagattcgtggggcccagcacggtactattgtgacagacgacacggcgctcaagcgggtcatgcacgaaattcttgaagcgaatcgtagttaataatacctttaagggctacttaaaggttagtttgggaactagggatttttattttcccagcaaaattagttcatttttttatagaaaaataaaaatctcttaatgttcccaaactagccctaaataacatttattaaattgaaaaaaatcctatcaagagttatggtatcttagttagcattgttacggtaaaatctatgtattaaattagtactattagatataagaggtgtttgaatgaactagagataatagttagttggctaaaaaatcattagcggaattatctagctaacaaatatctagttaaatattagctaatttgctaaaaatagataatagttaaattattatctagcctatttgaacgtattcaactaatattagcagctaactattatctctagtatattcaaacattatatactatatttattttgttttatagatattgttactcgatcttataaagttactaaaaaattaaatagtttaatttgtacatattgtaaaattgatttatttagacatggaaggagtatattaattat

SEQ ID NO: 201549 - DNA, 4060 bp, Zea Mays
ccacactgctggcgctgcccgcctcccccctccagtccactctccactcccacactccgttaccaagctgcccgccacgcccccctcccctactcctccgccgccgcctcacagccgcagcagctagggttagggttcgttccgccgcggctgccgtcttccccagggcaggctactcccgccgggcccctcccctcccattgcattccccagttcccctgcaacccccccattaccctttctcccacccattccttccttccgcccctctccaggccgcccggactggtcgcgttgcaaggtttgtttgaaggaatctggacgggtttatgtcgatactaggtgctgctgctgctgctgcagagatcaggtgaaagggacaagtgttgtggctgcgcaattagtacccagagtgtgcacagccataccacctcgctgatagctactacccgcctgtgcgcacgctgcctccaatctcctccaagaaatgcgtcctcgtccttgaatcctactaaccatcaaactcccagctcccctcccagaccagtccgtggaggaaagtgagcgatggggcttcgcgcgggtttcctcctcctgccgccgccgccgctcctcctcctcctcctcctcctcctgctgctcatttcccctgcgcgtgggcagctgccctcgcaggacatcctggcgctgctggccttcaagaagggcatcacgcacgacccggcgggctacgtcaccgactcctggaacgaggagtccatcgacttcaacgggtgcccggcgtcctggaacggcgtcgtgtgcaacggcgccagcgtggccggggtcgtgctggacggccacggcatctcgggcgtcgccgacctctccgtgttcgccaacctcaccatgctcgtcaagctctctctggccggcaacaacctctcgggcggcctccccggcaacgtggccagcctcaagagcctcaagttcatggacgtctcccgcaaccgcttctcggggccggtgccggacggcatcggcaacctccggagcctgcagaacctgtcgctcgccgggaacaacttctcgggcccgctgccggagtccgtcggcgggctcatgtcgctccagtcgctcgacgtgagcggcaattctctgtctggcccgctgcctgcagggctgaaggggatgaagagcttggtcgcgctgaacgcgtcctacaatgccttcacgaagggcatcccttctgggcttgggctcctcgtgaacctgcagtccttggatctgagctggaaccagttggatggtggtgttgattggaagttcttgatcgagtccgctgtcgctcatgttgacttcagcgggaacctgctcaccagtaccacgcccaaagagctcaagtttctggccgacatttcagagacggttctgtatctcaacctgagcaacaataagctgactgggtcattgatagacggtgtcgagctctctactttcgggaggctcaaggtgcttgatctcagcaataatcagctatctggtgacctcccagggttcaattatgtttacgatcttgaagttttgcgactcgcaaacaatgcattcactggatttgtgcctagtgggcttctcaagggtgattctctggtcctaagcgagctggacctaagcgctaataacctgacagggcatatcaatatgatcacatcaactactttgcaagtccttaacctgtcctcgaatgccctttttggggatcttccattgcttgctgggagctgcactgtgttagatctttcaaacaacaagttcagaggaaatctatcagttattgccaaatgggccagcgatttggaatatgttgaccttagtcagaacaacctaaccggtccagttcctgatgcgagctcacagttccttcgcctaaactacctaaacctttcccgcaactctctatccgagaccatccctgaagctattgctcagtaccccaaacttaccgtgcttgatctgagctccaatcagttacgtggtcctatgcctgctaatttgctaacttcgtccatgctgcaagaactctacatccgagataacatgctttttggtggcctatcctttcctggttcctcatccaaaaatttgagtctccaggtgcttgatatctctgggaatcgcttcaatggaagcctccctgatgatattgcctccttatctggcctccgagttctcgacatctcaacaaacaatttctctggcccactacctgctgctgtgagtaagcttggagctctcactgatattgatatatcaacgaatcagttcacggggccattgcctgaggatcttccggataacctccaatccttcaatgcatcctataacgacctttccggtgtcgtgccagagaacctgaggaagtttccagaatcttctttccatcctgggaactcaaagttagaatatcctgctagctcgtctggatctggcagttccccatctgggtcagcaggtggaaaatcactcagtacaggtgctaaagcagcaatcgtagcagctagcattgttcttcttgtcatcctcatacttattgccattgtatgccactacaagaggatctcacggcagttttctagctctgaaaaggtttcagacaagagcctccacaggaccactaaagacagtgctgtcatgcaaggaaaggacaacaaaggtggtttggtgtcagcagatgagcttgccactcctcgaaaagggtctacatctgaagcactcagccaggaagagaagtcagccgcggggggcttctcgccgtccaagggcagccggttctcgtggtcaccggactctggagaggcatatgggcaggaagggctggcgcggctggacgtgaggtcgcctgacaggctagcgggggagctgcatttcctggacgagacgatcacgctgacgccagaggagctttcgagggcgccggctgaagtcctaggcaggagcagccacgggacttcgtaccgggcgacactggagaatggcgtgttcctgaccgtgaagtggctgagggaaggcgtcgcgaggcccaagaaggagttcgcgaaggaggccaagaagttcgcaaacatccggcatccgaacgtggttggcttgcgtgggtactactggggcccgaccccgcatgagaagctcatcttgtcggattacgtcgctccggggagtcttgcaagcttcttatacgatcgaccaggaagaagaggtcctccactgacctgggcgcagcggctgaagatcgcggtggacgtggcgcgcggcctcaactacctccacttcgaccgcgcgatgccccacgggaacctcaaggccaccaacgtcctgctggacgggctggacctgaacgcccgcgtggccgactactgcctgcaccgcctgatgacgcagtcgggcgtggcggagcagatcctggacctaggcgtgctgggctaccgcgccccggagctggccgcgtccaagaagccggcgccctcgttcaaggccgacgtgtacgccttcggcgtcgcgctgctggagctcctgacgggccggtgcgccggggacgtcgtctcggggcccgagggcgccgcaggcgtcgacctcaccgactgggtccggctgcgcgtggcggaagggcgggggtccgactgcttcgacgccgccatggcctcggactctgagagcaacccgcaggctgtgaagggcatgaaggaggccctgggcattgcgctgcggtgcatcaggccggtctccgagaggccggggatcaaatctgtgtacgaggatctttcgtcgatctagctagtcggtagcgctagcctcgtcgcgtaggcgtagcttttagattaacactgcgtgttaaaattgtgtgcgtgttcgtcttgaactcgtagaactgcgtagcgaatccaagtgttattatggcctcaccttgatgccagcaatttgaaatgaagaatgtgttgcattgttctttttgtttttttggtaattaaggccggcatccacaagtgaacgagagtataacacactcaatagcgtatgatgatgatcc

SEQ ID NO: 201550 - DNA, 1518 bp, Zea Mays
cgccggcccacagtgaagttggttcacgcgaggcggcaccgtcgccgacaaggaccacggggagccgagccggagccgcctagacgagggactagcgaatggagaactctagccaaccacgtcaccgtccacgtcacgcccacctataaactggagcgagcccgagccaccacccaacctgacccttcgtcccgcatcgtttcctcctcctttttccccgttcgtcccctggattggcgtctacccggcgcgacccggaccgaatcctaagtccgcctgccgccgccgccgccggctcccgttggaaacggagctcccgcgtttcctctcacgagagccgccgggctcgtgcctccccatacttgtcagcgtctcatggacagagcagttcttcacgccggtcacaagagtctcctgcggccgcggcagcgaagcaagctgcagagtgggaggatgttcggtgctcggtctgcatggaccacccgcacaacgctgtcctgctggtctgctcgtcgcacgagaagggctgccgccccttcatgtgcgacaccagctcgcggcactccaattgctatgaccagtaccggaaggcctccaaggactcctccaaggattcagggacagagtgcagcgagtgccagcagcaggtccagctctcgtgcccgctgtgccgtgggccagtcagcgactgcatcaaggactacgacgcacggaggtacatgaacaccaaggtccggtcctgcaccatggagtcgtgcgagttcaggggtgcctaccaggagctgaggaagcatgctagggtggagcacccagcggcgaggccgatggaggtagaccctgaacggcagcgggattggcgccggatggagcagcagcgggaccttggagacttgatgagcatgctgcgttcagggttcaacgccaacgttgaggacaacagcggcgaacttggagccaccgaagaaggggaagaggaagccgcaaggactccggcctccataacaatggtcttcatcatgccgtctagaggctcaatcatgcagtacttaacagaacgtagcagggcgatcattctggtcagccggaggcgagcaagcagtggcagtggtgatgctgaggccacagcaccagacagcgaggaaggtgatgaccctatgttgccatcggcagaggcgtctgctggttcgcagcgttcttccgaagaagaggctgacggtgaccacgcccaatgacagaagtcagctagcaggaggtgtgccatggcccatggcatcttcttggcctgaagatcccgacctgcttggtatgtgatgctgtatgctgggaagaaaacatggatgcaggtgccatcaagcaatggaaaggaaaaaaaaacaattgagtggttgcatctatcttgtctgaatggatttctttttccatgcgttgtaattctctctcatatattatcatatgaaatagattcggccgtatttgcactgcataatataatctttatatggcggctaggagtgaccg

SEQ ID NO: 201551 - DNA, 1376 bp, Zea Mays
gacccttcgtcccgcatcgtttcctcctcctttttccccgttcgtcccctggattggcgtctacccggcgcgacccggaccgaatcctaagtccgcctgccgccgccgccgccggctcccgttggaaacgagtttggagtaaagaaaccaaccttgcatctgtgttctgagctcccgcgtttcctctcacgagagccgccgggctcgtgcctccccatacttgtcagcgtctcatggacagagcagttcttcacgccggtcacaagagtctcctgcggccgcggcagcgaagcaagctgcagagtgggaggatgttcggtgctcggtctgcatggaccacccgcacaacgctgtcctgctggtctgctcgtcgcacgagaagggctgccgccccttcatgtgcgacaccagctcgcggcactccaattgctatgaccagtaccggaaggcctccaaggactcctccaaggattcagggacagagtgcagcgagtgccagcagcaggtccagctctcgtgcccgctgtgccgtgggccagtcagcgactgcatcaaggactacgacgcacggaggtacatgaacaccaaggtccggtcctgcaccatggagtcgtgcgagttcaggggtgcctaccaggagctgaggaagcatgctagggtggagcacccagcggcgaggccgatggaggtagaccctgaacggcagcgggattggcgccggatggagcagcagcgggaccttggagacttgatgagcatgctgcgttcagggttcaacgccaacgttgaggacaacagcggcgaacttggagccaccgaagaaggggaagaggaagccgcaaggactccggcctccataacaatggtcttcatcatgccgtctagaggctcaatcatgcagtacttaacagaacgtagcagggcgatcattctggtcagccggaggcgagcaagcagtggcagtggtgatgctgaggccacagcaccagacagcgaggaaggtgatgaccctatgttgccatcggcagaggcgtctgctggttcgcagcgttcttccgaagaagaggctgacggtgaccacgcccaatgacagaagtcagctagcaggaggtgtgccatggcccatggcatcttcttggcctgaagatcccgacctgcttggtatgtgatgctgtatgctgggaagaaaacatggatgcaggtgccatcaagcaatggaaaggaaaaaaaaacaattgagtggttgcatctatcttgtctgaatggatttctttttccatgcgttgtaattctctctcatatattatcatatgaaatagattcggccgtatttgcactgcataatataatctttatatggcggctaggagtgaccg

SEQ ID NO: 201552 - DNA, 1175 bp, Zea Mays
cagcgttgcgtctccaatgaacgtgtgtgtcaccggggagaggcgagggcaggcggtggtggcgatgccgattgcgtccatcgacgtgcgcttggtggggattgcctcctccatttgcacaaactttcaaagcattttgacccaccttccttcaatcaagcgatcccttccctgccgatcacttcctggccagtaccatggcattgggtcgagctcagcttcctccatgccaacctacaacagcagcagcaggcgccgggtcttaagacctgaaaaggaggcggcgcggatctgcagtcagtagtatcttgtgcgacaccactgcttgtggccggcggggcaacgacaaacaccaagccgaagtggtccgctctcgaagaaagattgaagattatgcatcagcgacaagtaacgaccgcccggaaagagagccggaaaaaaggcaggaaatcgccaccgctcgcccctatttgagcagccgcttgttccttccgcgtcctcgctgctcctcaattcaattggctccgtgccgacctccaggttgagaaggaaagcatcgcgagttcgccatacggatgggttctaaagcgcctttctgtctcacgctcctcttgctgctcgccgcagcctgtggacctgctgcacatgccacaatgctggcatgcaacatcgaggttactttgtttgttggatgaattcagtacggtaagggcattctaactgaagatggcattggtctgcttggagacaatgtgaggacgaaccagaagggcgagttctgggtggcgatccactgtcggagaactctacgcgttgatcatcagggacagcccgatggccagatgcttcacatcatggaggacggcaagggagaggtggtgagagttatcatcgaagtggagggtccgtctgatgccattcatcgttgtctttgacctcgtgaaggcgtcttagccacttcaatttgattggaaatattgttgttttaagatacgggtccatggttaatgttgtacgcttctctgcttctctgagaagacctgtcattttaataatttggttctggagcaacctggagctgtatattgatctagcttcttttagtaacaaatgtaagttgctcacattttctttagatcgtctatagaactttgaacgaccagctcgtcccttct

SEQ ID NO: 201553 - DNA, 1704 bp, Zea Mays
ctcgcatcagcgttgcgtctccaatgaacgtgtgtgtcaccggggagaggcgagggcaggcggtggtggcgatgccgattgcgtccatcgacgtgcgcttggtggggattgcctcctccatttgcacaaactttcaaagcattttgacccaccttccttcaatcaagcgatcccttccctgccgatcacttcctggccagtaccatggcattgggtcgagctcagcttcctccatgccaacctacaacagcagcagcaggcgccgggtcttaagacctgaaaaggaggcggcgcggatctgcagtcagtagtatcttgtgcgacaccactgcttgtggccggcggggcaacgacaaacaccaagccgaagtggtccgctctcgaagaaagattgaagattatgcatcagcgacaagtaacgaccgcccggaaagagagccggaaaaaaggcaggaaatcgccaccgctcgcccctatttgagcagccgcttgttccttccgcgtcctcgctgctcctcaattcaattggctccgtgccgacctccaggttgagaaggaaagcatcgcgagttcgccatacggatgggttctaaagcgcctttctgtctcacgctcctcttgctgctcgccgcagcctgtggacctgctgcacatgccacaatgctggtaacagattgtgttatgttctcatcagtcatcactctggatttgcaccgttgagttgatttacccacttaggctgtcgatttgcactgtagattacaccgtttgcattgtgagaaataggggatagatatgatagctactgcagagtggagacagccttgctgaaaaaccataatcaccatcggtcgtattagatatttatagggcaattatcaacacgagtaccacctctcctctgaaactctgggactccggtcatatcagcaccattgagttgatttacccacttaggctgggatttgcactgataagggataagaaaggatagctgctgcagagtagagacaactttgctgcgaaaccataatcactatcggtcgtattagatatttatagggtacttatcaacacgagtaccaaacaagctgaaaatgagcatgtttattttcagctctaggttttatgctcaatttgtttttcaggcatgcaacatcgaggttactttgtttgttggatgaattcagtacggtaagggcattctaactgaagatggcattggtctgcttggaggtacttccagtcattttgcaaactatgatccccccatatgacaatgtgaggacgaaccagaagggcgagttctgggtggcgatccactgtcggagaactctacgcgttgatcatcagggacagcccgatggccagatgcttcacatcatggaggacggcaagggagaggtggtgagagttatcatcgaagtggagggtccgtctgatgccattcatcgttgtctttgacctcgtgaaggcgtcttagccacttcaatttgattggaaatattgttgttttaagatacgggtccatggttaatgttgtacgcttctctgcttctctgagaagacctgtcattttaataatttggttctggagcaacctggagctgtatattgatctagcttcttttagtaacaaatgtaagttgctcacattttctttagatcgtctatagaactttgaacgaccagctcgtcccttct

SEQ ID NO: 201554 - DNA, 2144 bp, Zea Mays
gtcagcggcatcacagttatgtggaagtggaacagtcatgtgcgattttctttctcaaaaacagtgaagatgctcaggctgtctgtgactctgggtgactcttgtcttccacatcgccacgccactgattggctcgcgattatgtgatccgtgaaccttcttgccatggggatgtctgcagcgtctcatctctgtgctccttcatccctgcgagctttaaccgtgttgtttgtgttggcagcttttgtttcagatgtagaggggcgacatcatcgtcatgtctgtccacatttctcctgcggtggtcttagcaatatatcttatccatttcgtcggcaaggtgatccatctgggtgcggtgtccaatcgtatgagctggtttgcacggatacagatgctacaattcgcatcggcagtggaacatacaaggcatgccggtgcccatgaatacaagctatccagatgttgttaagttcatgaggaatggatttgcccttcggtttcctctttcgattgaatattaccccaacatcagagaatgtctcgcagagaatatgcgtgctttccatgaagaaccaagaaatagtacaggcatcagggaacagatcttggacattcttacgttcgagacattatggttttgtgttattgaacaacttggatcaagtaataatggtgtcaaatctgttctcatcaacatcatcgtcagaataataccatatgttctgtggggtctaaaatctgcacatgttatttgcaggtttgtattgatgccgttagcagtatttgtcttcctagcctataaatactggaaaacacggataacaatagatgcagttgagaagttcctgcgaatgcaacatatgctcgttccgatgagatatgcatacacaaacatcattgctatcaccgcccatttcagagacaagctcggacaaggaggctacggtactgtatacaagggggtgctacagccaggtgaagttcatgttgctgtcaagatgctgggcaactcaaactgtaacggagaagagttcatcagtgaggtggccaccattggaaagatccaccatgtcaatgttgtgcgcctcattgggttttgctccgaggaaaatatcagggcacttatctatgagttcatgccccgtggatctctcgataagtacatcttctcgtcggagaagacattctcatgggacaaactcaacgagatcgctctgggcattgctagaggtcttaactacctgcatcacgggtgtgatatgcagattgtacactttgacatcaagccacacaacatccttcttgatagcaactttgttccaaaagttgctgattttgggctagccaaactgttcccaagagatgacagtttcgtgccactaagcgctatgcggggaacgataggatatatagctccagagatggtatctcgaagctttggtgtcatctctagcaaatccgatgtgtacagctttgggatgctactgttggagatgacgggcggtcgaaggaacgcagatcctcatgcaggaagctccagtcaagcatactacccatccttggtgtacagccagctgagccaaggagatgcgaacgagatcagtgaaggtgttgatatgcacgagttagagaagaagctatgtatcattgggctttggtgcatccagatgaagccgcaagatcggccgacgatgagtgaggtcatagagatgcttgaagctggcatcgatagcatgcaaatgcctccaaggccattcttttgtgatgacgagggtgatagttcatactctacaatctctgaactgaatacaatagaagagtagtagtagaaaaatacacttgtgtctatgcgctcttaatgtatgagactagtaagattgcaaggttgtcataagctaaggtactggttatatacttttattgagagtgtgataacttgatgccatataaaatactacttaggaacattttttttaccaaaaacttgtcaggaactttttgtttggctacaaacacaaaatcacggacctagccgttgtaccattaaaaaaggctacatttcttgtatgacatcggtctgaaggctattgcacaattttctaagttatgcataacaaattaagtgaaaactagcataatac

SEQ ID NO: 201555 - DNA, 1422 bp, Zea Mays
attcgagtttcatttattaatgaacatggtgaggaagaggttggaattgatggtggtggaattttcaaggatttcatggaaaatattactcgagcggcttttgatgtgcagtacggtctcttcaaggatcaggattggttcatgaactacatctgcaatatttccattttcttggaagtctacttgggaaggcaatgtatgaaggcatacttgttgacttgccgtttgcaacgttcttcttgagcaagttgaaacaaaagtacaattttttaaatgatcttccttcattggatccagaattgtatcggcatcttctatttttaaagcattataatggtgatatctcagagttggaactatattttgttattgtaaataatgaatatggtgaacaatgtgaagaagaacttctccctggtgggaggcacatgcgtgtaacaaatgataatgttattacttttatccatcttgtcgccaatcatcggttaaactaccagatccgtgcacaaagtacacacttcttgagaggttttcagcagcttataccaaaagattggattgatatgttcaatgaacatgaaattcaggttcttatatctggatctttagaaagcttggatattgatgacctgcggtcgaacaccaactattctgcaggatatcatccggaccatgagcttattgagatgttttgggaggtcttgaagagcttaagttcggacaaccagaaaaagtttctcaatatctcgaaccaaaattctgcattcagagagctggtgttccagggctggaggagcatgcagaccgcttgcctacatcagctacctgcatgaaccttctgaagcttccaccctataaaagcaaggagcagatgcaaaccaaactattgtatgcgataaactcagaagctggttttgatctaagttgatcatgttcgggattcagtatttgtgcagtgtagatagttgttagagaacagcttaaaggcacccagagccaaaccaccaaccctcggcctcattcgaagccccatgaggccacgaaggaaaaaagaaaagaaagaaaaggaagaagaaaagacacttgtttctcaaaatagttggatgtgtggagggagtctgcaatatactccctccgctttttttatttgtcatggtttagtttaaaaatgaactgccagtaaagaaaactagggcttcccaacataaataggtggacgctgtttaatcaatcatggacatgtacgtatgtattctatacagaaatttctatttctatatttaaccagtgctggttttgcacgaccaattggtggtttcaatcttgcagagaaactgatgccctcattgggccatggcccatggctgcgtagataattctccgctataagatcttctcagcacgataaaaaagataaaaaaa

SEQ ID NO: 201556 - DNA, 1759 bp, Zea Mays
gctgggcgtgcgagcgaataaacaacgccgccacgagaagagaggagagcagagggcagtggggagctcggagaccgagggaggcgaggaaagcggcgggtgccgggccgcccgcgccggtgccgaggtcctcgagtcgaccccttacgtctgtcccccgcttgccgccacccgctcgtggtccttccatttccgtttcctcccccgcatccctttttaatgctcgtcgtcctccattctgtcgccgctgtgttcgtgtctctcctcgctccccgatcgctgcccctgggcgccgcgttcgccgccggatctgggggcgggacggtgccccagacgaaccgatggcgcgggcggcgcttcgattgggcgtgcgcgcgctcgcgctcctcgtcttcgtatcagtggctctgcttccacttgtcagttccgacgatgggtacagacactgcgagggtgtcgtcaggggctgggcggatgcctcgtctgggcgcgtgaaggacggggacaaactgagcctcaaggatttgctcttcttcctccacattcctaggactggaggccgcacctactttcactgcttcctcaaaaagctgtatacgaacgcgcaggaatgcccgcgttcttacgacaaactacggttcgatccaagccatcctgattgcaagctggttgttagtcatgatgactatagcttaacttccaagctgccaagggagagaacttctgttgtaacgatactaagaaacccagttgatcgtgtatttagcacatatgagttctcagttgaagttgcagctagattccttgtgcatccaaacttaacttctgcaaagttaatgactacccgtgtgttaacaaagtctcgtgctgtcagtactttggacatctggccttggaagtacttggttccatggatgagggaagatctgtttgcaaggagagatgccaggggtgtttacaaagttcatagtagtaagaaggttaatgcatatgatgtggacgatatggttatgccattacatcggtacatcaatgatccagttgcccatgaaatcattcataatggggctacctttcagattactgggttaacgaacaactcatattttgatggagcacatgaggttcgacattgtgtcaggaagcatccagatcttggtcgtattgtgcttgaagttgctaagaataggctggaccagatgctatatgtaggacttacggaggatcatgaagaatcagcgaggttgtttgctcatatggtaggagcacaggtgctttcacaatctgggacattgactttagatctcaaggaagatctgcccattgagactgattctcacccatccatggagcctgaggacgaagaaacaaacggacatctgaatagcacacatggttggcagaataatgaagcgatgaactctaccaacgacgaacatggaaaaggaaatatgactgttggtaaactgatggaagcttatgaaacttgcattgccaaactgtggaaatctcaatctggccgacgtaaaatatccctaaagaaagttcaggaagcgaacttttcaaaagaggcacggaagctggtatctgaggcaattctgaaccaaatcatctcattgaacagacttgatatggaactttatgaccatgctaagaaaatttttactcaggaacatctgatgctaaaagctcagcaatccatggtggggcagcacagacagtttggagaacaaaagaacgtgcagatggatttggcgca

SEQ ID NO: 201557 - DNA, 3089 bp, Zea Mays
aaaaaataaactaaaataaagggagagaaaaactgtcttttgctacagctgagctagaaaaggaacctttttccgcgcgttattcttcttcttgtattcgaaagcccaagcccaactgataaaaggcccatgctcaagcgataagacgagaataaacaaccaccgatcccccagggcccaggcccacgcgcacacattctgattccgaaggcaagggcgtgtacatggcggtgagacgaggagccaaaacccaacggcgacgagaaatccacggcggctagttcaccccatccggcgcgagcgactccctccgcctgcaccaaaaacgagggcgttttcgtgtcccctcctccaaactccggagcccacatcctccagtccccactcacctgcgccactccccaccacgctcctcaaaaccctaggtccttcgatctaatgccgtgagctctcgaattctcaattcccccagcctctccatggaagaccccgtggcggtaccctcctcgtccttgaccgaccctgccgctgccgccgcagctagggttccgggtgcggtggcagcagcccctggcgtcacctctgcgccgtccgctctcgctccgacgcagccgcctgccaccgcggccgcggtctctgaagccgcgacgccgtgccagaggcagctgttcacagtggagctgcggccaggggagaccacaatcgtgtcgtggaagaagcttctcaaggaggccgggcacaccgccgcggcaccgccagtggcggtggagccagcgttcgccgcacatgcgggcccatctggtccggcacatcctgcagaaaatgacccaaaggatccaacacagccaaatcggttcaatgcagtgattgaaaaaatagagcgcctttacatgggaaaacatagcagcgatgaagaggatcttaatgatgtaccagatgatgatcagtatgacactgaggattctttcattgatgatgccgaattggatgaatatttcgaagttgataatttgaaaactaagcatgatggctattttgtgaacaagggaaaattggaacagattgaacctggtacagcggcaaatgttgctccaaagaaaaggagaagaaaggatgcatcaagttcttatctggagagtaatcaccttggtccaattgattattttgatattggcgatgtacctgaaaaatcctctgcaagaggtactgtgcagacgggaaaacagttagttagtagcaacgtaagttcttatggtcaataccatgaggacaatagagtggtgaagaataaaatcagtggtcctggaggagcccctaaaagaaaatcttctgaattctcgggtgacgctgcagcacgagctaagattattaaggatgtctcgcatgctcctttggagctaagagacatggaaaagcataaagctgcagcactacctgttgactatgcacataagtcaaaaatcagcgaaacatttgattatgcatatccagcttatagggataaaggcacttcagggcaacttgatttccaacaaagaaagataagcagggaaaatcaaggtccatcaaatagaacctatcgcaaagagaaacatggaacaaatgaatatcctggcatcgctatggctactgcggtctattctacacaaacaatgcacccagttgttggtagggagggttcaggaactaaacccaaaggcaccaggcttgagcgagctattcgcgatctccagaagatcgttgcagaatacagaccaccaacaattgatattaatgaggtagatccaaatggccaggtagcagttaaaagacggttgcctcctgaaataaagcaaaagcttgcgaaggcaaataacggaaagatccaagaacatgagctaatgaatcgcctcatgggcatagttggacaccttgttcagcgcaggacactgaagagaaacatgaaagaaatggtagaatctggtatatctgctaaactggagaaggctgacaggtttcagcgtgtaaaattggagatcaatgagatgattaaagagcgtatggctacaaagtccaaggtcaatgaacaggatggttcagctgatgattttcaggttgctaatgatgaaagaagagctttaaaaacaaagtatacaatggatactgcattggaggacaagatgtgtgatctgtatgatatgtatgttgagggtatggatgaagacaagggccctcaaagcaggaagttatatgtagagcttgccgagttatggcctcatggttgcatggacaatgtcgggatcaaagatgccatttatagatcaaaggagcgaagaagattattgtacagccagcaaaaggttcgcagtgaagagagaatgaagaggaagaggctggctgcaacagcaaagctgccagatggcctcgcagttgcaatgcaaagtggagttgccccacaagttgcacagccacccataacaaatcccatcacataccatacggctgattatggacagaacccggggttaaaatattttgatagggctcgtgaaacgagctccagtgcaatccctgatgacggcaacagaattgctggtgaggtcaagaagaagaaaagaaaacctgaatatgaccctgtagatacacaagctaacctaccaagggctcccatgccgcacgggagcgagaagcaaaagccttctaagcctgctgacgaggccagtgctggtagcctgccctccatggcgacaactcaaactgtgcttggcctaccgtcggtgcttggtcataaccaacaacctagctgattctttcggcgtagtgttggacatttggttctccttataggcctttttcagctgctgtaacaaattatggcctttccatgtgttcagcatcgattgttgagactaacatgttcccgagtagagaggatatttgatcactctttacttttccagcattgcatggttggtacccttgcccagattatctgtgcagcgctgatagatatgatctgcaaccccttcaaataccagttgtaattatgaatattttctcgagacatgtactgctcatattgtgcgaagcgatgtgcagattttctttta

SEQ ID NO: 201558 - DNA, 3195 bp, Zea Mays
aaaaaataaactaaaataaagggagagaaaaactgtcttttgctacagctgagctagaaaaggaacctttttccgcgcgttattcttcttcttgtattcgaaagcccaagcccaactgataaaaggcccatgctcaagcgataagacgagaataaacaaccaccgatcccccagggcccaggcccacgcgcacacattctgattccgaaggcaagggcgtgtacatggcggtgagacgaggagccaaaacccaacggcgacgagaaatccacggcggctagttcaccccatccggcgcgagcgactccctccgcctgcaccaaaaacgagggcgttttcgtgtcccctcctccaaactccggagcccacatcctccagtccccactcacctgcgccactccccaccacgctcctcaaaaccctaggtccttcgatctaatgccgtgagctctcgaattctcaattcccccagcctctccatggaagaccccgtggcggtaccctcctcgtccttgaccgaccctgccgctgccgccgcagctagggttccgggtgcggtggcagcagcccctggcgtcacctctgcgccgtccgctctcgctccgacgcagccgcctgccaccgcggccgcggtctctgaagccgcgacgccgtgccagaggcagctgttcacagtggagctgcggccaggggagaccacaatcgtgtcgtggaagaagcttctcaaggaggccgggcacaccgccgcggcaccgccagtggcggtggagccagcgttcgccgcacatgcgggcccatctggtccggcacatcctgcagaaaatgacccaaaggatccaacacagccaaatcggttcaatgcagtgattgaaaaaatagagcgcctttacatgggaaaacatagcagcgatgaagaggatcttaatgatgtaccagatgatgatcagtatgacactgaggattctttcattgatgatgccgaattggatgaatatttcgaagttgataatttgaaaactaagcatgatggctattttgtgaacaagggaaaattggaacagattgaacctggtacagcggcaaatgttgctccaaagaaaaggagaagaaaggatgcatcaagttcttatctggagagtaatcaccttggtccaattgattattttgatattggcgatgtacctgaaaaatcctctgcaagaggtactgtgcagacgggaaaacagttagttagtagcaacgtaagttcttatggtcaataccatgaggacaatagagtggtgaagaataaaatcagtggtcctggaggagcccctaaaagaaaatcttctgaattctcgggtgacgctgcagcacgagctaagattattaaggatgtctcgcatgctcctttggagctaagagacatggaaaagcataaagctgcagcactacctgttgactatgcacataagtcaaaaatcagcgaaacatttgattatgcatatccagcttatagggataaaggcacttcagggcaacttgatttccaacaaagaaagataagcagggaaaatcaaggtccatcaaatagaacctatcgcaaagagaaacatggaacaaatgaatatcctggcatcgctatggctactgcggtctattctacacaaacaatgcacccagttgttggtagggagggttcaggaactaaacccaaaggcaccaggcttgagcgagctattcgcgatctccagaagatcgttgcagaatacagaccaccaacaattgatattaatgaggtagatccaaatggccaggtagcagttaaaagacggttgcctcctgaaataaagcaaaagcttgcgaaggttgcaaaggttatcggcaaataacggaaagatccaagaacatgagctaatgaatcgcctcatgggcatagttggacaccttgttcagcgcaggacactgaagggatggcagcgggtcaggtattatccgcacatgagtatacctgtgatcctaatttttacccgtgcccgcgagcatacctgcgggctgcggagaaacatgaaagaaatggtagaatctggtatatctgctaaactggagaaggctgacaggtttcagcgtgtaaaattggagatcaatgagatgattaaagagcgtatggctacaaagtccaaggtcaatgaacaggatggttcagctgatgattttcaggttgctaatgatgaaagaagagctttaaaaacaaagtatacaatggatactgcattggaggacaagatgtgtgatctgtatgatatgtatgttgagggtatggatgaagacaagggccctcaaagcaggaagttatatgtagagcttgccgagttatggcctcatggttgcatggacaatgtcgggatcaaagatgccatttatagatcaaaggagcgaagaagattattgtacagccagcaaaaggttcgcagtgaagagagaatgaagaggaagaggctggctgcaacagcaaagctgccagatggcctcgcagttgcaatgcaaagtggagttgccccacaagttgcacagccacccataacaaatcccatcacataccatacggctgattatggacagaacccggggttaaaatattttgatagggctcgtgaaacgagctccagtgcaatccctgatgacggcaacagaattgctggtgaggtcaagaagaagaaaagaaaacctgaatatgaccctgtagatacacaagctaacctaccaagggctcccatgccgcacgggagcgagaagcaaaagccttctaagcctgctgacgaggccagtgctggtagcctgccctccatggcgacaactcaaactgtgcttggcctaccgtcggtgcttggtcataaccaacaacctagctgattctttcggcgtagtgttggacatttggttctccttataggcctttttcagctgctgtaacaaattatggcctttccatgtgttcagcatcgattgttgagactaacatgttcccgagtagagaggatatttgatcactctttacttttccagcattgcatggttggtacccttgcccagattatctgtgcagcgctgatagatatgatctgcaaccccttcaaataccagttgtaattatgaatattttctcgagacatgtactgctcatattgtgcgaagcgatgtgcagattttctttta

SEQ ID NO: 201559 - DNA, 1680 bp, Zea Mays
tctgcacaccgccactcgcccacacgttgaaggcacctagcagccgccactcgccgaactgaggaacacgccgggcgacgggatacagcagcagcgcgcccctctctatcctcgacgcgacggcgccctgcagctgcagataaacctgttccaatggccaaacaaaaagagggtgtggacaaaagaactgctaggaagatgatccgatctacggaaggctgtgcaaagagcattactttcgagaggaacaacaaatcagacgctgtgcagcttcacgatctgccgaatgacatcctaggtagcatactatcacggttgacattcagagcatcctcacagatgggccttgtttctcatacctggcggcggctgtggagaagctgttgccggaaactggtcttcaccggtgccaccatgttccaacccggaaataggagcatcaaacatacaaggaccaactttgccatgagagtcaacagtttcttgcgtcagctacgcactcatcctactcttaataagtttgttattaagtttgggctgcgcaggaagcacactcgccatgtcaacagatggattcgcttctgctccgtgtcgcgagcaaggcacatcactattaatttcactcctggagtgaaagattttgtcatgggtccagccaacagcaagtacatcttccccctgaacgttttcagtggtccagaaggctcctctacacatgtcagaactcttcatctgggctatgtctgtctggacacaacctcgtctgatttcatgatctttgcaaatcttaagaagctcactctgcacaaaatttcctttttgggagacctccagtgcctgatgctgccagaatgcaattctcttgagtgtctgagcatcagcttctgttccttgcctggtttaagcacatgccacccactgcaacgtctgcgatgtgttcgtttgcactactgctatctaaaaaagattgagctggaagctccaaatctaacatcgtttgacttgaccaaccaaccaattccatttgtgcttggtggacctctgaagttaatggaagccaacattaaactgttagctaaggactcaccttatggtgataatctggactacatctacactgagcttcctgctgcgctgtctcatgtgcataaactctcgataacctcggatctcttcatttatgatcagctgcaagggttttccaaaacctcagccagatttatcaatctgaggcatctgaccatgtatttgcctctttatggggaacctaagtcaattagtgggattcttcgcttggcctacctactggaattggccccagctctagaagaattggaattgcatgtgagtggcttactaactctataatctgttatagattttctcaaggtgaatggcggtggcgtggatgttgggtgggcactcagacggaatatgttaccgtactcacacaataggctcaagagggtccttatttcaggagccactgtatgggaggggctaatggagctggcatactacattcttcggagtgccaatagactcgaaagtatggtcttagatccaaagataaggattgggggtcctcagctggatggttggatgattgatattggtagggagacgatcaaaaatatttttgagggagaggagtttcagagcattattactattctgtaa

SEQ ID NO: 201560 - DNA, 722 bp, Zea Mays
gtgtttgcaaaccaggcccaatccaagcaaaaaccaccaatcccggcctggaatcgatccacgaaacaatagttgtggaactcctccacgcgtgggtgtggaagcgacggcgccgacgctattcacaacggcaacgcgtcccttccaacgccggccgccgccatcttcatcagccaccttttctcatgttcttctggctgctcttaccccaccagtgcaagaacaaggaagtggtgttgcaaagaaactgtgtttgatttttgctgtaacttgactgaagaaacatctctgtttatcatctcccaaacatatagctatatgctcagtactgctcatttttttttgcaatggcaatgagatgtgttagtgcttaaaagtgttagctttgatctattgtgatgtaaacttcattatgtttcctgcatttgctttgatctactgtgatgtaaacacgatttatgttggttctgctatcttttggatgtaatcaaactattattttgctttgttgttgttctgattcaaactattcatgcttgttctgcttttgttctacttgctatagaaagtacctggactattaagacagacttagaccataatgttcaaaaatactaaactttgacacaaggctgcttgtgtgtttaacgagttgtgtttatatacaataatacaagtggtgtaaccaaacagtgtacaatgagcaatgtattgaatctcac

SEQ ID NO: 201561 - DNA, 2257 bp, Zea Mays
catatttataataatattatggcgcattttgtccaacaaattttgcatataatagtattgtttgtcgtaccatatatattttatactacaactgatatgattatttaacttgcagtattctagaatttgctaccctacaactcatatgattatttgactatgcacatgtctccaagaatattgtagggaaactacaacagatttgtgccatgttttactctgattttggagttttctgcttaactgaggcgaagcgcaaccaccaggttggctgttttagatctgtctcctagactgccctttgctcaagggaaatccctccttttcatttaacgcaaaagaaacttattctatttatttgtatctacgaaatctggcgtcaaatgttcagttgaactcagatgtgtgagactcaactgaagatcccaaatcatcacattatttccccgtcgaaatcatttgtgtttcttagagagaaaaaatgttttatgcttctgtctcctagactgacctttgctcaagggcaatccctccttttcatttaacgcaaaagaaatttattctgttgaacagtattttcatctttatacttatttggtactgcaacagcaatgagaggagcaatatccttgacaccttaattttgtattgccttacaaaggattttttagctgtcgcttgccaagtataggtcgtattgtgggtagtcacaccaaaactaaaactaatggcaattggtttgcaataggcagtgctctttctgttagctctggatgtcagggcaatgaacaaacacgttgagtatgatagtgatgctaaaattactgcaatgggttgaagccctaccatgtggcaaccattgatccatgcccaaaatgtgcctgccactggtgttcctgtcccaacactcgatcaacatgcaagtaaaaaatgaagcatagagccaaacgatgcgagagaagtatggtctacacatgagccagttcacataaacccttcagacccaagcaggtaccagcagaatggcacgccagctaaagaaaggagtcaatgcactgtaatgcgaagaattcttcatgacatcctatgagataatggttttcttgaatgggctagctcaagttgtgcggtttggtgtcatggtgttgttcaaacttcgcagtggtgtgtgaaatagaagaatcccaattcccaagcatattatttgtcacgcttgtttgccggcaggtacaggggaaatacgacagcatcatcgtggaggtgaagagctactacatgtcgatgagcaggtacagggatgataaaaaaagaaaggtatatcttcacgtcgatgagcgggtacagggatgacaaaaaaagaaagggtgagattatgaaggtttatgccaatgatcaaataaaaacatgtgttgagtttccagagtgttttgtataggattgctggtcaaacatgagctgttagtgagagaagaattgtgccctcttccctctggttctccctgattctcacagatgaacaatcttctacatgcaaatttctgttatgcgcgcttgtggtcattggcaggaagactcatgtggtcggaagagggctgatgagcacgatcaccatggatgtggacaccacggcaagggtggacgagttcttggttaccacctttgtaggcccattggtggaggaagacttgacgagaggtgtgtggtgatcaccatctgaatgtgggcgtccaagcttctttgatgccgggtgtattgtcctaattgtgactatcgtcgctggtcgaacatttggctagcatcgatgatgtatactgcaatgtgaatccaataattggcttggctctccatacaaccaataactaggagatcaggtgattgctaattggacaataggggtgctcgtgttgtaatggtgtaataggttcaatgccgtcgtttttacagtcacagtagtcgtgtgttaagtgtccaaggtgatttacctctgccctgtttccggtgtcttagcctgattggatagcttctggggtgcgggatgtgatggagcaaagggattaaaacatgctgatttatgttgcccaaggaattcgccagttgcttaacattttgtttttggcatacttcgtagtcaattactgtccacggattcttgcatatgtgaaactgaggaacatttacttcaaatatcattattggcttggctctgattattcctgttttctggttctcgttaggaccaatgaatactctcttttaa

SEQ ID NO: 201562 - DNA, 1797 bp, Zea Mays
gtttgtttcagctatttacgtggcaacaaactcactagacatataacccaggactagggaacatgagtaaacttagctacttgtagctggatgactagatgggcaattagcaggagcagaaggatcccacatcgctaatcatcaattgctgatgctagaggctaagctatttttgggtgctttttcctcctatgatcggcatagagacatgcagatggatattgataatatgtcttatgaggcccagaacatctgcaatttagtttttgataagtcctccaagatttggcagtgctctttctgttagctctggatgtcagggcaatgaacaaacacgttgagtatgatagtgatgctaaaattactgcaatgggttgaagccctaccatgtggcaaccattgatccatgcccaaaatgtgcctgccactggtgttcctgtcccaacactcgatcaacatgcaagtaaaaaatgaagcatagagccaaacgatgcgagagaagtatggtctacacatgagccagttcacataaacccttcagacccaagcaggtaccagcagaatggcacgccagctaaagaaaggagtcaatgcactgtaatgcgaagaattcttcatgacatcctatgagataatggttttcttgaatgggctagctcaagttgtgcggtttggtgtcatggtgttgttcaaacttcgcagtggtgtgtgaaatagaagaatcccaattcccaagcatattatttgtcacgcttgtttgccggcaggtacaggggaaatacgacagcatcatcgtggaggtgaagagctactacatgtcgatgagcaggtacagggatgataaaaaaagaaaggtatatcttcacgtcgatgagcgggtacagggatgacaaaaaaagaaagggtgagattatgaaggtttatgccaatgatcaaataaaaacatgtgttgagtttccagagtgttttgtataggattgctggtcaaacatgagctgttagtgagagaagaattgtgccctcttccctctggttctccctgattctcacagatgaacaatcttctacatgcaaatttctgttatgcgcgcttgtggtcattggcaggaagactcatgtggtcggaagagggctgatgagcacgatcaccatggatgtggacaccacggcaagggtggacgagttcttggttaccacctttgtaggcccattggtggaggaagacttgacgagaggtgtgtggtgatcaccatctgaatgtgggcgtccaagcttctttgatgccgggtgtattgtcctaattgtgactatcgtcgctggtcgaacatttggctagcatcgatgatgtatactgcaatgtgaatccaataattggcttggctctccatacaaccaataactaggagatcaggtgattgctaattggacaataggggtgctcgtgttgtaatggtgtaataggttcaatgccgtcgtttttacagtcacagtagtcgtgtgttaagtgtccaaggtgatttacctctgccctgtttccggtgtcttagcctgattggatagcttctggggtgcgggatgtgatggagcaaagggattaaaacatgctgatttatgttgcccaaggaattcgccagttgcttaacattttgtttttggcatacttcgtagtcaattactgtccacggattcttgcatatgtgaaactgaggaacatttacttcaaatatcattattggcttggctctgattattcctgttttctggttctcgttaggaccaatgaatactctcttttaa

SEQ ID NO: 201563 - DNA, 1671 bp, Zea Mays
ctgtatttggacttgttcacatttaacttccgtctgctagatttttgctatttacgtggcaacaaactcactagacatataacccaggactagggaacatgagtaaacttagctacttgtagctggatgactagatgggcaattagcaggagcagaaggatcccacatcgctaatcatcaattgctgatgctagaggctaagctatttttgggtgctttttcctcctatgatcggcatagagacatgcagatggatattgataatatgtcttatgaggcccagaacatctgcaatttagtttttgataagtcctccaagatttggcagtgctctttctgttagctctggatgtcagggcaatgaacaaacacgttgagtatgatagtgatgctaaaattactgcaatgggttgaagccctaccatgtggcaaccattgatccatgcccaaaatgtgcctgccactggtgttcctgtcccaacactcgatcaacatgcaagtaaaaaatgaagcatagagccaaacgatgcgagagaagtatggtctacacatgagccagttcacataaacccttcagacccaagcagtggtgtgtgaaatagaagaatcccaattcccaagcatattatttgtcacgcttggtacaggggaaatacgacagcatcatcgtggaggtgaagagctactacatgtcgatgagcaggtacagggatgataaaaaaagaaaggtatatcttcacgtcgatgagcgggtacagggatgacaaaaaaagaaagggtgagattatgaaggtttatgccaatgatcaaataaaaacatgtgttgagtttccagagtgttttgtataggattgctggtcaaacatgagctgttagtgagagaagaattgtgccctcttccctctggttctccctgattctcacagatgaacaatcttctacatgcaaatttctgttatgcgcgcttgtggtcattggcaggaagactcatgtggtcggaagagggctgatgagcacgatcaccatggatgtggacaccacggcaagggtggacgagttcttggttaccacctttgtaggcccattggtggaggaagacttgacgagaggtgtgtggtgatcaccatctgaatgtgggcgtccaagcttctttgatgccgggtgtattgtcctaattgtgactatcgtcgctggtcgaacatttggctagcatcgatgatgtatactgcaatgtgaatccaataattggcttggctctccatacaaccaataactaggagatcaggtgattgctaattggacaataggggtgctcgtgttgtaatggtgtaataggttcaatgccgtcgtttttacagtcacagtagtcgtgtgttaagtgtccaaggtgatttacctctgccctgtttccggtgtcttagcctgattggatagcttctggggtgcgggatgtgatggagcaaagggattaaaacatgctgatttatgttgcccaaggaattcgccagttgcttaacattttgtttttggcatacttcgtagtcaattactgtccacggattcttgcatatgtgaaactgaggaacatttacttcaaatatcattattggcttggctctgattattcctgttttctggttctcgttaggaccaatgaatactctcttttaa

SEQ ID NO: 201564 - DNA, 2624 bp, Zea Mays
cgagtcccaagcgggtatccgcgccccctctccctgacgccgcgatggccgcgcccctctccctccccgcggcgtgatgcccgcagcccccctcccctggtgccctcgcccccgcgccccctctccgtgacgctgcgatggccgcgccccctctccctcccccggcgtgaagcccgcagccccctcccccggtgccatggtgccctcgcctctgcccccgagattgtcgccgagcgcccacccctcattcccgtaccctcgcccaagatcgcggatctacgcccgatgtgggcgtggggctgcgtccgagatcgtgaagccccatcgtgccctcgctcgagatctccccctcgccggtcctgctcgcgaagccctgccgtgatagtcgcgcccacttcacccgtcgtgacagccgcctccacgtccacacccatggggagcggatgcgggccacagatctccttccaaactgccaaactcggaggcgacagcccgacaagggccgaccttccatggtaggcgggccccttccatggtaggcgagatctgcggccatggtcaaagggccgttggggctggatttcgcagtcgcaacactgaactactgggtgcacaagggcattgccttcatctgcgagattaggaatcggatcctgtttaatatataagctactggccaatgattatggatcttgctggtagaacgatatgatccgcgcgtctgtattccgtaaagttcttacgatgatttttattttgtgtatctgatgccacattatgggtaaatccggagatctattttgtaaaaagtagtaatatggtctggtgctgctgggtaaatctggagatctattttgtaaaaagtagtaatctgaacacctttttggactgtcttataagtggcttctatatttcactgcacatttcaactaatggaaccagggaaacagataaaggtcatgaaaggattctagaaacgatcaacacagttggacatgatggtaataacattgacactgctgatttttgtttatgttacttgaaagtttaaagatctcctgtgtcatataatttatgctatagacatgaattattggctgccttttccccctgcccctgccttttcaaatcctttttgttgagccacttccctagcttgacaatctattgttacctccggcaaaaggtgagttcttggctgccttttccccccgcccctgccttttcaacctatgttcttttcatgggtagcttgattcagtcggtgaattgagcttccggcttcgacaggagactcagagcacactcacggctgctttgttgtttaatcacaccgctaatcgtgttatgaagagaacacatggaaagcataccaactcaattcttgagacttctattgtaaatgcttctttttgaagatctcagctatttacgtggcaacaaactcactagacatataacccaggactagggaacatgagtaaacttagctacttgtagctggatgactagatgggcaattagcaggagcagaaggatcccacatcgctaatcatcaattgctgatgctagaggctaagctatttttgggtgctttttcctcctatgatcggcatagagacatgcagatggatattgataatatgtcttatgaggcccagaacatctgcaatttagtttttgataagtcctccaagatttgggaaactacaacagatttgtgccatgttttactctgattttggagttttctgcttaactgaggcgaagcgcaaccaccaggcagtgctctttctgttagctctggatgtcagggcaatgaacaaacacgttgagtatgatagtgatgctaaaattactgcaatgggttgaagccctaccatgtggcaaccattgatccatgcccaaaatgtgcctgccactggtgttcctgtcccaacactcgatcaacatgcaagtaaaaaatgaagcatagagccaaacgatgcgagagaagtatggtctacacatgagccagttcacataaacccttcagacccaagcaggtaccagcagaatggcacgccagctaaagaaaggagtcaatgcactgtaatgcgaagaattcttcatgacatcctatgagataatggttttcttgaatgggctagctcaagttgtgcggtttggtgtcatggtgttgttcaaacttcgcagtggtgtgtgaaatagaagaatcccaattcccaagcatattatttgtcacgcttgtttgccggcaggtacaggggaaatacgacagcatcatcgtggaggtgaagagctactacatgtcgatgagcaggtacagggatgataaaaaaagaaagggtgagattatgaaggtttatgccaatgatcaaataaaaacatgtgttgagtttccagagtgttttgtatatgaacaatcttctacatgcaaatttctgttatgcgcgcttgtggtcattggcaggaagactcatgtggtcggaagagggctgatgagcacgatcaccatggatgtggacaccacggcaagggtggacgagttcttggttaccacctttgtaggcccattggtggaggaagacttgacgagaggaccaatgaatactctcttttaa

SEQ ID NO: 201565 - DNA, 3026 bp, Zea Mays
cgagtcccaagcgggtatccgcgccccctctccctgacgccgcgatggccgcgcccctctccctccccgcggcgtgatgcccgcagcccccctcccctggtgccctcgcccccgcgccccctctccgtgacgctgcgatggccgcgccccctctccctcccccggcgtgaagcccgcagccccctcccccggtgccatggtgccctcgcctctgcccccgagattgtcgccgagcgcccacccctcattcccgtaccctcgcccaagatcgcggatctacgcccgatgtgggcgtggggctgcgtccgagatcgtgaagccccatcgtgccctcgctcgagatctccccctcgccggtcctgctcgcgaagccctgccgtgatagtcgcgcccacttcacccgtcgtgacagccgcctccacgtccacacccatggggagcggatgcgggccacagatctccttccaaactgccaaactcggaggcgacagcccgacaagggccgaccttccatggtaggcgggccccttccatggtaggcgagatctgcggccatggtaggcagcccccttccatatttgactgacatggcacgcactgcagccccttccccgcccccattccaaaatcagccctcaaccacgcatgcacccacatcaatggattgttattgtctgcattagcagcgctattgttctggttggctggaacatggggaggtgtgcagaggtggtggtggtgagttcgttgttcatttttctgtaggtcaaagggccgttggggctggatttcgcagtcgcaacactgaactactgggtgcacaagggcattgccttcatctgcgagattaggaatcggatcctgtttaatatataagctactggccaatgattatggatcttgctggtagaacgatatgatccgcgcgtctgtattccgtaaagttcttacgatgatttttattttgtgtatctgatgccacattatgggtaaatccggagatctattttgtaaaaagtagtaatatggtctggtgctgctgggtaaatctggagatctattttgtaaaaagtagtaatctgaacacctttttggactgtcttataagtggcttctatatttcactgcacatttcaactaatggaaccagggaaacagataaaggtcatgaaaggattctagaaacgatcaacacagttggacatgatggtaataacattgacactgctgatttttgtttatgttacttgaaagtttaaagatctcctgtgtcatataatttatgctatagacatgaattattggctgccttttccccctgcccctgccttttcaaatcctttttgttgagccacttccctagcttgacaatctattgttacctccggcaaaaggtgagttcttggctgccttttccccccgcccctgccttttcaacctatgttcttttcatgggtagcttgattcagtcggtgaattgagcttccggcttcgacaggagactcagagcacactcacggctgctttgttgtttaatcacaccgctaatcgtgttatgaagagaacacatggaaagcataccaactcaattcttgagacttctattgtaaatgcttctttttgaagatctcaggtgagctgtgtacatgtaatttgtttttgtttttaagtgttttcaatcttaagcgaagtacttatcaatttgttattatcttgtttaatcacaccgccaatcgtgttctgaagggaactagaccatcagagcatccactgtatttggacttgttcacatttaacttccgtctgctagatttttgctatttacgtggcaacaaactcactagacatataacccaggactagggaacatgagtaaacttagctacttgtagctggatgactagatgggcaattagcaggagcagaaggatcccacatcgctaatcatcaattgctgatgctagaggctaagctatttttgggtgctttttcctcctatgatcggcatagagacatgcagatggatattgataatatgtcttatgaggcccagaacatctgcaatttagtttttgataagtcctccaagatttgaatattgtagggaaactacaacagatttgtgccatgttttactctgattttggagttttctgcttaactgaggcgaagcgcaaccaccaggcagtgctctttctgttagctctggatgtcagggcaatgaacaaacacgttgagtatgatagtgatgctaaaattactgcaatgggttgaagccctaccatgtggcaaccattgatccatgcccaaaatgtgcctgccactggtgttcctgtcccaacactcgatcaacatgcaagtaaaaaatgaagcatagagccaaacgatgcgagagaagtatggtctacacatgagccagttcacataaacccttcagacccaagcaggtaccagcagaatggcacgccagctaaagaaaggagtcaatgcactgtaatgcgaagaattcttcatgacatcctatgagataatggttttcttgaatgggctagctcaagttgtgcggtttggtgtcatggtgttgttcaaacttcgcagtggtgtgtgaaatagaagaatcccaattcccaagcatattatttgtcacgcttgtttgccggcaggtacaggggaaatacgacagcatcatcgtggaggtgaagagctactacatgtcgatgagcaggtacagggatgataaaaaaagaaagggtgagattatgaaggtttatgccaatgatcaaataaaaacatgtgttgagtttccagagtgttttgtatatgaacaatcttctacatgcaaatttctgttatgcgcgcttgtggtcattggcaggaagactcatgtggtcggaagagggctgatgagcacgatcaccatggatgtggacaccacggcaagggtggacgagttcttggttaccacctttgtaggcccattggtggaggaagacttgacgagaggaccaatgaatactctcttttaa

SEQ ID NO: 201566 - DNA, 2718 bp, Zea Mays
cacggttctgccgtcgcgctccctccgcgctccctcccgagtcccaagcgggtatccgcgccccctctccctgacgccgcgatggccgcgcccctctccctccccgcggcgtgatgcccgcagcccccctcccctggtgccctcgcccccgcgccccctctccgtgacgctgcgatggccgcgccccctctccctcccccggcgtgaagcccgcagccccctcccccggtgccatggtgccctcgcctctgcccccgagattgtcgccgagcgcccacccctcattcccgtaccctcgcccaagatcgcggatctacgcccgatgtgggcgtggggctgcgtccgagatcgtgaagccccatcgtgccctcgctcgagatctccccctcgccggtcctgctcgcgaagccctgccgtgatagtcgcgcccacttcacccgtcgtgacagccgcctccacgtccacacccatggggagcggatgcgggccacagatctccttccaaactgccaaactcggaggcgacagcccgacaagggccgaccttccatggtaggcgggccccttccatggtaggcgagatctgcggccatggtaggcagcccccttccatatttgactgacatggcacgcactgcagccccttccccgcccccattccaaaatcagccctcaaccacgcatgcacccacatcaatggattgttattgtctgcattagcagcgctattgttctggttggctggaacatggggaggtgtgcagaggtggtggtggtgagttcgttgttcatttttctgtaggtcaaagggccgttggggctggatttcgcagtcgcaacactgaactactgggtgcacaagggcattgccttcatctgcgagattaggaatcggatcctgtttaatatataagctactggccaatgattatggatcttgctggtagaacgatatgatccgcgcgtctgtattccgtaaagttcttacgatgatttttattttgtgtatctgatgccacattatgggtaaatccggagatctattttgtaaaaagtagtaatatggtctggtgctgctgggtaaatctggagatctattttgtaaaaagtagtaatctgaacacctttttggactgtcttataagtggcttctatatttcactgcacatttcaactaatggaaccagggaaacagataaaggtcatgaaaggattctagaaacgatcaacacagttggacatgatggtaataacattgacactgctgatttttgtttatgttacttgaaagtttaaagatctcctgtgtcatataatttatgctatagacatgaattattggctgccttttccccctgcccctgccttttcaaatcctttttgttgagccacttccctagcttgacaatctattgttacctccggcaaaaggtgagttcttggctgccttttccccccgcccctgccttttcaacctatgttcttttcatgggtagcttgattcagtcggtgaattgagcttccggcttcgacaggagactcagagcacactcacggctgctttgttgtttaatcacaccgctaatcgtgttatgaagagaacacatggaaagcataccaactcaattcttgagacttctattgtaaatgcttctttttgaagatctcaggtagctggatgactagatgggcaattagcaggagcagaaggatcccacatcgctaatcatcaattgctgatgctagaggctaagctatttttgggtgctttttcctcctatgatcggcatagagacatgcagatggatattgataatatgtcttatgaggcccagaacatctgcaatttagtttttgataagtcctccaagatttggcagtgctctttctgttagctctggatgtcagggcaatgaacaaacacgttgagtatgatagtgatgctaaaattactgcaatgggttgaagccctaccatgtggcaaccattgatccatgcccaaaatgtgcctgccactggtgttcctgtcccaacactcgatcaacatgcaagtaaaaaatgaagcatagagccaaacgatgcgagagaagtatggtctacacatgagccagttcacataaacccttcagacccaagcaggtaccagcagaatggcacgccagctaaagaaaggagtcaatgcactgtaatgcgaagaattcttcatgacatcctatgagataatggttttcttgaatgggctagctcaagttgtgcggtttggtgtcatggtgttgttcaaacttcgcagtggtgtgtgaaatagaagaatcccaattcccaagcatattatttgtcacgcttgtttgccggcaggtacaggggaaatacgacagcatcatcgtggaggtgaagagctactacatgtcgatgagcaggtacagggatgataaaaaaagaaagggtgagattatgaaggtttatgccaatgatcaaataaaaacatgtgttgagtttccagagtgttttgtatatgaacaatcttctacatgcaaatttctgttatgcgcgcttgtggtcattggcaggaagactcatgtggtcggaagagggctgatgagcacgatcaccatggatgtggacaccacggcaagggtggacgagttcttggttaccacctttgtaggcccattggtggaggaagacttgacgagaggaccaatgaatactctcttttaa

SEQ ID NO: 201567 - DNA, 1385 bp, Zea Mays
cagcctttcctttgcctcatgtggtcatgctcttcatccccatatgcatcctctctctctccccacaccatgtgtgtgcccagattcccctaaataggtgtctcgcctctggcatcagtcccctcttccccttccttctcctcggtccctatccgctgctgcgaacagcagaagctgcggcacggaggtgcgctcttcccggcggtggagttgcagctgcagggggaagaagcgagctagagctgcagggatgataagcgccaagtccaacgccgccgtgtacccgtgcccggagtatgcggaggtcgaccccaccggccgttcagcgacgttcttggcaagggcgcgtccaagattgtgtacaaggcgttcgacgagtaccaggggatggaagtggcgtggaaccaggtgaagctgcacgacttcctgcagagccccgaggacctggagcggctctactgcgagatccacctcctcaagacgctcaagcaccgcaacatcatgaagttctacacctcctgggtcgacgtctcccgccgcaacatcaacttcatcactgagatgttcacctccggcaccctccgccagtacaggcagaaacaccggagggtgaacatgtgggcggtgaagcactggtgccggcaaatcctcagcggcctgctgtacctccacagccacaatccgcccatcatccaccgggacctcaagtgtgacaacatcttcgtgaacggcaaccagggcgaggtcaagattggcgacctcggcctcgccgccatcctccgcaagtcccacgctgtccactgcgtgggtacaccggagttcatggcaccggaggtgtatgaagaggagtacaacgagctggtggacatctactcgtttggaatgtgcgtgctcgagatggtcacctttgagtacccgtacagcgagtgtacgcacccggtccagatctacaagaaagtgatctctggtactaagccagaagctctgtacaaggtgaaagatccaatgctgaggcgctttgtcgagaagtgcctagtatcgtcatctcagagactgtcagcaagagaactgcttgaggatcccttcctacagggcgatgacgtggctgtttctttggatggtggagattatcatgtaccgaccaagtacgtacggcagccttcatatctagggcatacctatagcaatggctccatggtgagtaatggattctcagaaagcatggatgaggacgctctgagtgaagactgcgaggatgatgacatgaaaggccaagatggcattgacctgttcaacgagaatgaggatgaacctcttggcaatgtggacataacaatcaaagggagaaagagtgaggatggaggcatacgaatctctagattccg

SEQ ID NO: 201568 - DNA, 1085 bp, Zea Mays
aagccaagctagctgcacatgaggtccagaaaaagcaagagaaggaagaggaagaggagaagctaattctgcagaaggctaaggagttggatgcctttgaccagcagaatcatggacctgttccccagtaccatgatcgcagtggttcgcaagacaagaatgggtttcatggagcaaataatgtgaaggtcacttcttttgaagacgaagcccttcgcaatatgaaggcattctggctcccttcagctactcctgaagctacggtcaaggtagacgtgccctccatccacactgtttgcccggaggggcaggagaagctcaagttgaaatcgctcttccctatctcgttcacggaagaaactgctgatcagaagagcagtaaggcagtggaaaaaaagagctacatgtgccctagttgcaagtccactatcacaaataccatgtcccttgtggcggtcagcacctgtggccatgtcttctgcaagaaatgttatgacaagtttctagtgaaggataaagcttgcttggagtgcagcaaaccattcagggagaggaatctggttccattggagaaaggaggaaccgggtttgctgcacatgatgaacgcctagaggcaagatatttcaagcatttgggtagtggctctgggttaggactagtgaagcctgcaccaaaaacttactaaccttgaataattatagccgttgttgtattgtttaccttggtgtcatgaaattatataacctagaaatgagaactccatcaagttcccaattgccgctgtaacttctatatacatgtatgcagatgttgattttaggtatctttaagaccttaacgacaccactacattaaacggttgccatgtatttgtttatgttgacctatcaacagtcttgttggttaacaaagaatattgaaaactaaagcctacaaaaagaatatgattaaagattttaatactcttctcgttttaaattaatagacgttttgaatattctaaatatattatttttattatatatctagatatagtttatttttaagtttatagaaaaatctatgcattagaaaagataaaata

SEQ ID NO: 201569 - DNA, 4752 bp, Zea Mays
cgcatttcatctttccaatcaagcgagaagcgtctcctcctcccttccacactcctctccactcacgattctcttcccttgattccgctagctgatcagcgtctcgccggagtaatacacagcagcagtaagaggccatggagatggtgcggcggaacctgaagcggcaggcgtcgcgctcgctttccgccttcgctggcgccgcatccccgcacgccgtcgaccaggagaacctccaccccaacctcgcctccacgccgccggcgtcgcccgccaagggcacctcctcgccgcgccccaagcacccagcggctgcggctgcggctgcggctcaaccggcggccaccgccgaggaggatcactccacagcccctacgaccgcgccagcggacgacgagcgcttcgtcaaggtggtggtgagggtgcggccgacggtgagccggccggtgaacggcaaggatctgtggttcgtccgcaagaccgccccagactcagtcgctgtcggcgaccggtccttcccagtggatggcgtcctcgacgacagggcctctcaggccgatgcgtttgatctggtgggattgcccatgatcgagaatgctatggccggattcaacacctccctcgtctgctatggccagagtggcaccgggaagacatacaccatgtggggccctctcggcgccatggttgacagtggctctgaccatgctgaccgcggcgttgttcctcgggttttccagaacctgttctctcggatccaaagaatgggagagagttctcctgagaagcagacgagctaccagtgccgttgctcgttcctcgaggtacataacgagcagatcaatgatctgttggaaccatctcagcgtgacctacagataagagagaacgctagcaatggtatccatgttgagaacttgactgatgaatacgtgtcaacagcagatgatatcagtcagatcttgatgaagggactgtcaaacagaaaagttggtaccaccagtatgaacttaaaaagttcccgctctcatgtgatattcacctgcgttattgaagcatggagcaagggttcatcaaatgggtttagcagctcaagaactagcagaatcacctttgttgacctcgctggtcctgacactgatgaacttggtgcagcaaagcattccacaaaggaagaaagacatcttaagaagtctctttcaaggcttgggaaactagttaacgttctttcagaaactccagagtcacataaagttgatttaccatatgagcaatcccgtttgacacatgtgctgaaggatacactaggtggcaactccagggttatatttttgtgttcgatttcttcagagcacagatgcagatctggaactttaagtacactaagatttggtgagcgagcaaagctaatgccaaacaaacctgtgataaatgagatatcagaagatgatgttaatggtttgagcgatcagatacgtcagttaaaggatgaactcataagaacaaagtctggagacaccacaacttgcaaggctaggtacttcagtgcacaaagtgcccgtgaaagtttgcatactttgcgagtgagcctcaaccgctctcttatctttcctcacatagaagttgattcagaggaagaaatggatgttgatgaagaagatgtgcaagaactgcgtgatcaaattagcaagattcactcttcatctgaagatacattggatgactttatggatgcagaaagtggagacgaaagcactccttgttctgtgggaagaagtgaagatgatcaagtaatcatagatgattttgaaggtccacaacaggaagagcaaaaagaagtatctaacaatacaaatgctaatgaagacctcggttctgacagaaaatctaatctatcaattattgcctccacacggttatcacctattcaggatccaacattgtgctcttctccaaagatccacaacaaggcaagaatgagcatcacttcactggggctatcaccaagcaagattagaatatcagacagcccaggtgatagaaatgttgaaatgtgtacaaatagtgcatttcgttcctctctacaatcaagcaagcttagccccactgactcactggctgcaagtcttcaacgtggcttgcacattatagagtaccatcaacagaatccagccccaagaaaatcatttattggtctttcatttgaccatttcgctcgtcagtcagtagcaaaaatcagttcagctgttcaggctctaccagaggaccaaggaaacaacctttgttcattctgcaagaagccaatgaacacaaatgataatcagacagaaaacgtaaatttagacaaacagattaaggatggcaacataactaaggaaattgcttccaagagagaaactgagcttgaagctttatgcgaagaacaaagagcaaagatccaggagctgagcagtttgattgaccaatataagaacaggtcagaagaactaactagtgaaggcaaggtttctgtctcactcagtgtgaatgagagggaggtacttcttgctgaaatccagagtctgagggagcaactcaaaaaccagactactgtatcaactactggtagccttcttgaccagttaaggaacggcagcacagaccaggagtatgaacttgacaaagaaaggcagaaatggatggagtctgagagcaagtggatttcacttaccgaagagttgagggtcgatctagaatcaaacaggatgcacgcagagaagaccgagatggagctctgcaacgagaagaagtgcacagcagagctagatgacgctcttcaacgagcgatgtacggccacgccaggatggttgagcattatgttgagctgcaggagctgtataatgatcttctcgagaagcaccgccgagtgatggaggcgatctctgaggtgaagagggcggctgccagagcaggcaggaagggctgtgggacggccttcgctgctgccctcgccgccgagctctccacggtgagaatcgaccgagaaaaggagagggctcagctgaaagaacaaaacagaaggctccgcattcagctgcgagacactgccgaagctgttcatgctgctggagaactgctcgtcagattgagagaaaccgaggaagcatctacactagaaaaggagaggactgccgcgttgttgcaagagaacgagaagctgaagaagcagctggagaagctgaggaagaagcacgagatggagctggagacgatgaaggtgcaccttgcggagagccggctgccggagtcggctttgggtgccttctaccaccacgagaacgagaggacgccggacgacgatctgtcctggcgggccgccttcgcttctgcgtacagtgactgaagttacctgactggggattgcttgggagttgagtctcgtcaactgagacaggttgacaattggggcatgagcatttctacgaccttgtttgattttaagtacatgactcgattggggcatggggcaaagtttttatgtatactgcttgtatgggaactgaatttgaacgagttttatgtagtctttcgagtatttttttggtcgatcccccagttcctgtttaaacgtaaatcgtctgcattcatcatctctgtcaatcagtcaacagaaagtgtacaacatgcgactggtctggaaattgttgtctgttctaaatgttgcttctgttgctaatatgccttgagagcatctccacatggaaaactcaacagctcaacaattatttgtcctcctgcacaggagtaaaaagaagcaagaaaactcttgcaaatattttgtcctcagctcgtggcatatgaaactctttggttcttcaactgtggtgttatttaatattctctctcgttatggggaacaccgtagaactctgccaggtactccaaagcttcatgattcccatcacaaaccttccaaagtgatgcaacttcgcccggagcaaccgtgccccactcctggcagtcattcagaaattccaaaagcttggagtaataagaatcgtagttgagaagcaagaccgggaccgggagcgctgacccgatcctctctagttgaatcagcgccaagatctcaaacagctcgtccagcgtcccaacccctcctggcagcgcaaccacagcggttctgtcagtagagctgctccgcaccgcagcatccaccaggccatgcttcctcgcagagaagaacctgaaattcagcttagcgcatagcgatcaccatgtctcataagctgtggtgaatcttattttgcatcctcagaaaattcaggtacctgcatgtgaggtaggtctccggtggcaggtaaggatggaagcctgagcttgtccattcacccgcttcctttgcaatcttcaagccaccgacaggcttgtctgcctcaaaggcgccttggatggcagcatccatgagcccagggccggctcccgtccatgtggtgcagccgagcagccgagctatctgtcgatgcaaagacaggtggctgagtaagggggtgtttggtatctagggactaatttttagtctctccattttattttattttagtccctaaattgctaaatacggaaactaaaactctatttagattccgtatttagtaatttaaggactaaaatggaataaaataaaaggattaaaaattagtctctagaaaccaaacaacccataaatgcagaaagatatggtgcacaatgccaatgactcatgtctacag

SEQ ID NO: 201570 - DNA, 2191 bp, Zea Mays
agcaatcccgtttgacacatgtgctgaaggatacactaggtggcaactccagggttatatttttgtgttcgatttcttcagagcacagatctggaactttaagtacactaagatttggtgagcgagcaaagctaatgccaaacaaacctgtgataaatgagatatcagaagatgatgttaatggtttgagcgatcagatacgtcagttaaaggatgaactcataagaacaaagtctggagacaccacaacttgcaaggctaggtacttcagtgcacaaagtgcccgtgaaagtttgcatactttgcgagtgagcctcaaccgctctcttatctttcctcacatagaagttgattcagaggaagaaatggatgttgatgaagaagatgtgcaagaactgcgtgatcaaattagcaagattcactcttcatctgaagatacattggatgactttatggatgcagaaagtggagacgaaagcactccttgttctgtgggaagaagtgaagatgatcaagtaatcatagatgattttgaaggtccacaacaggaagagcaaaaagaagtatctaacaatacaaatgctaatgaagacctcggttctgacagaaaatctaatctatcaattattgcctccacacggttatcacctattcaggatccaacattgtgctcttctccaaagatccacaacaaggcaagaatgagcatcacttcactggggctatcaccaagcaagattagaatatcagacagcccaggtgatagaaatgttgaaatgtgtacaaatagtgcatttcgttcctctctacaatcaagcaagcttagccccactgactcactggctgcaagtcttcaacgtggcttgcacattatagagtaccatcaacagaatccagccccaagaaaatcatttattggtctttcatttgaccatttcgctcgtcagtcagtagcaaaaatcagttcagctgttcaggctctaccagaggaccaaggaaacaacctttgttcattctgcaagaagccaatgaacacaaatgataatcagacagaaaacgatggcaacataactaaggaaattgcttccaagagagaaactgagcttgaagctttatgcgaagaacaaagagcaaagatccaggagctgagcagtttgattgaccaatataagaacaggtcagaagaactaactagtgaaggcaaggtttctgtctcactcagtgtgaatgagagggaggtacttcttgctgaaatccagagtctgagggagcaactcaaaaaccagactactgtatcaactactggtagccttcttgaccagttaaggaacggcagcacagaccaggagtatgaacttgacaaagaaaggcagaaatggatggagtctgagagcaagtggatttcacttaccgaagagttgagggtcgatctagaatcaaacaggatgcacgcagagaagaccgagatggagctctgcaacgagaagaagtgcacagcagagctagatgacgctcttcaacgagcgatgtacggccacgccaggatggttgagcattatgttgagctgcaggagctgtataatgatcttctcgagaagcaccgccgagtgatggaggcgatctctgaggtgaagagggcggctgccagagcaggcaggaagggctgtgggacggccttcgctgctgccctcgccgccgagctctccacggtgagaatcgaccgagaaaaggagagggctcagctgaaagaacaaaacagaaggctccgcattcagctgcgagacactgccgaagctgttcatgctgctggagaactgctcgtcagattgagagaaaccgaggaagcatctacactagaaaaggagaggactgccgcgttgttgcaagagaacgagaagctgaagaagcagctggagaagctgaggaagaagcacgagatggagctggagacgatgaaggtgcaccttgcggagagccggctgccggagtcggctttgggtgccttctaccaccacgagaacgagaggacgccggacgacgatctgtcctggcgggccgccttcgcttctgcgtacagtgactgaagttacctgactggggattgcttgggagttgagtctcgtcaactgagacaggttgacaattggggcatgagcatttctacgaccttgtttgattttaagtacatgac

SEQ ID NO: 201571 - DNA, 1791 bp, Zea Mays
gagtgagttgcgctaagacaaagctgacaatggtgtttttactgaaggggagattcatatttggtcctgatgcaagatccttgtttgtcaccatgttccttattgttgcgccagtatcaatcttctgtccattagttgcgaaggaattgatggataaattctcttatggtctgggattaccggttatgattgcagcagttctattcacagcatatgatctgagtcttctgcttctaacttctgggagagatccggggatcatacctcgcaatgcacatcctccagaacctgaagggtttgatgacaatgcagaggttggggctaaccagactccacctgtgcgtttgccccgagtgaaagatgttgttgtcaatggaattactgtgaagataaaatactgtgacacttgcatgttgtacaggcctcctcgttgctcccattgctctatctgcaacaactgcgtggagcgttttgaccatcactgcccatgggttggacaatgcatagggcttaggaattacaggttcttctacatgtttgtattctcaacaactctgctctgcctgtacgtctttgggttctgctgggtgttcgttgttaagatcagaaatgcagaacagataacaatttggaaggcaatgacaaagacccctgcatctgttgctttaatcatctacacattcattgcggtttggtttgttggtggcctctctgtgttccatttgtatctcatgagcacaaatcagacaacatatgagaacttcaggtatcgctatgatcaacgagccaacccatacaacaggggaatcatggtaaacatcaaacagatcttatttaccacgatccctccttccaagaacaacttctgtggtagggtccaacaggagcatggtctaaggcctcgtccaacaaatggtttcatgagtccaaacatggggagagctgttggtgacatcgagatgggtagaaaaccagtggcttgggatgagcctaggatggcagctgagattggtgatttaggagcaggtctgagcaacctgctggaggacaaggatggcaggtttcgtagcgcatctccagatctcagccgcgacgcccttgcagttggaggaggcttagaagaggaaggctcctcggcgatgaacgctgggcgttcaagctggggagttgaagcaggtcgatgatggcattgaccgtgtaagcggctgtagtgagacgctctgggttgttagtgccagttcgctgctaatctgttgttttgtttgagatttgaggtcactaatgttattagactcatgacctgtatggcggttgtttctggactttcttttcttctttctcttaatttgagatgtctttcgtgtctattatttgaaccagttggtttgtgacgtctcccggtttggcaagttatgttttgtctgtatataatcggacagtaagcctaaaataggatccagctgcttggatttggatggtaatggttgtgaataatgccctaccttttgcattgcagtaactgaacattgctcggtcttggtgcccatgtcaagattaatttattgctttttcggaagtgctgattcatcgctaagttatcttgagttgatacgctgtaatcttgagtagaagcagggtgccacactgacacttctgcaatatctttcacagcaacgagaacaggcattttccctgacaagaaaggagcaaggatgattcgccaaatgctaccacagacggtgttgttctgtactgctaacacactttattccttgattcgcctaatgctgc

SEQ ID NO: 201572 - DNA, 1611 bp, Zea Mays
ccaaagaagttgggtgctaatgcagtaatgctcgtcccttcctctcctctcctctcctcgtctcctcccctccattcgcctgagcctcctccccatctccggatgggtggctccaccaccaccgtcgtcgtcatgctgatcgtcgttcttcactactacatgctactagtagacggcgccagttgggacgaagtttcctcggaggctgacgggccggcgccggcagagggtccagacgacgagctgtggctgcccagggccggaccgccaccgagggtcgtcaacgtcgacgactacggagccgcggatgccggcgtcgacgccgccgaggctttcctcgcggcgtggagcgaggcctgcaactcctccgccgggcggtccgtgttcctcgtgcccgagggcaaggcgtacctcctgatgcccgtgagcttccgcgggccctgcagagctgcctcggtcgctgcaatgataaaggggacgctggaggcgccgtcggaccggtcggtgtggctggagcgcggcctgcaggagtggatcacgttcgagggcgtcgaccgtctccgcgtcctcggcggcgggacgctcgacggcaacgggatgcagtggtggatcaactcgtgcaagctcaacagatcagcgcgctgcgtcaccggcccgacggcgctgtacttgaggaggtgcacccggctggtggtggaggagctgcaggtgagggacagcatgcagatgcacgtggcgatcgcctactcgcgggacgtggccgtgtcgaggctgtccatcacggcgccggcgtggagccccaacacggacggcatccacgtgtccaacagcagggaggtgtccataagcaggtgcaccatcgccacaggtgatgactgcgtatccatcgtgactggctcaacgttcgtacgggtgaccagcatattctgcggaccgggccatggaataagctctacgactgtgcctgtgcctgtgcctgtgccgcagcattggtagtctaggagcaaacaactcatgggcccacgtctccgacgtcctcgtggagaaggccacgctgctgggcacgaccaacggcgtcaggatcaagacctggcagggagggtatggctacgccgagagaattagcttccgagacatatcgatgcgcaacgtcactaacccgataattatagaccagaactactgcgactccgccaggacgacgacaccgtcttcttgtcacgaccagggatcggcggtggccgtgcgtaatataagctacagaaacatacatggaaccagcgcttccagagtcgccatcagtctcgtctgcagcgccgctctgcgttgcgacggtatacggatgcaggatgtctacctggtcggagaaggaagatacgctacgtgctcttacaggaacgccaccgtcgtacagtctgggtataccttccccttttgcagtgcggaaatgtagtactagtagcacctacacatgaacttagggctcatttggtttagcttttgaacctgtttttgtttttgtttttacaaaaagccaaccaatataatgagatgaaaaatcatagttgtgtgcgcagtacaaacacatgtgtcccacgaatgataatgcag

SEQ ID NO: 201573 - DNA, 913 bp, Zea Mays
gttgtgcccgtggttgtgcggggacggcggatgcgcccgcctgtctctttcctcctctcccgtgccggaatattctgcttatggcacagttcagccaccatcacaatttggtggtggaagaaatttctgaaaggtgtagtgtcattgacatgtgaatatctgaagctcatatcagttctactgattgttgtatgtgaatgacttgttcatttaggcagtagacacccaacctagcaacagaagaaacaggttgctctcttccattttgtgaatgtactgattgtaaatctgttgtccacttaactgtatggaatatggaagcatcatgttgtaggaaactaaataagaatttgtttttgaagtctgtaccatttatatgctagctaaacaaaccagtgagcactataatagacttcaccacgtgacactgattgccaaattcaaccataaagttctttaccttggaaggttattcactgaagcatggtcttaagggactcccaacatttttggtacagtcagctcttgttcagtaaattatgtaactgtttatgggtggcatacttatttaagagtttgagttgagaagcaaaactgggtcatgaaaaaaaatgttctgtacatacttcagttttaggagcatataaatccattggaatagctgttgaagcaattggctaaacttccgggcctcctttggatcaaaggatgatttcctgaatcctgtgtttttcttgtgtttttgaactaattcttatgaaattcttgcgtttcaaagtttcaaaggaggtcttaagtttgaatcactgatagagttgaaggcttgagtcatatatccactatccaggaaccaagcctggtgcatgaaggccatgcaaatatgagggtaagcgtttcgacttttcgtgtccct

SEQ ID NO: 201574 - DNA, 1106 bp, Zea Mays
gtccggcctccagacatcaggcagctctcccgagcatgacgctgtctctgttcacaactcttccgagcacgccgccgtcagtcctttgtcatcatcatcagctcagatctagcagcttcgccttctcaggaaatgttaaacaagcggttttgccccagacagctgacccggtttttgttgatccaccaaatcaagatcaatattttgctgcagaagatattgcatcaaaccaatctgttggtagacctttcttctaccagggatatcccatgactgttgtttcaacaagccagattcaggggcatactaatatgcattctgagcctcagtgtgcatctcaggaatattctgcttatggcacagttcagccaccatcacaatttggtggtggaagaaatttctgaaaggcagtagacacccaacctagcaacagaagaaacaggttgctctcttccattttgtgaatgtactgattgtaaatctgttgtccacttaactgtatggaatatggaagcatcatgttgtaggaaactaaataagaatttgtttttgaagtctgtaccatttatatgctagctaaacaaaccagtgagcactataatagacttcaccacgtgacactgattgccaaattcaaccataaagttctttaccttggaaggttattcactgaagcatggtcttaagggactcccaacatttttggtacagtcagctcttgttcagtaaattatgtaactgtttatgggtggcatacttatttaagagtttgagttgagaagcaaaactgggtcatgaaaaaaaatgttctgtacatacttcagttttaggagcatataaatccattggaatagctgttgaagcaattggctaaacttccgggcctcctttggatcaaaggatgatttcctgaatcctgtgtttttcttgtgtttttgaactaattcttatgaaattcttgcgtttcaaagtttcaaaggaggtcttaagtttgaatcactgatagagttgaaggcttgagtcatatatccactatccaggaaccaagcctggtgcatgaaggccatgcaaatatgagggtaagcgtttcgacttttcgtgtccct

SEQ ID NO: 201575 - DNA, 2275 bp, Zea Mays
tctctcttcttccttgacgaacaccctttccttcctcggcttcgtttcgtgctttcctcaacctccccacttccgtggcgcgcagtttgtccgctgcttcacggaaattcctacgggacctgtatatattcgctgcgcaggcggccccgcctccggccgttgttgtctccgctcaccccgccagtatcccggcgtcccaattccaggaactttcgtcgcgtcaggtgatgcttttagcaactacaagcatagaacaatgttgatgcactatgatgtggatagaagtgaggaccggcaaagtgaggaggttcagtcagcatacagaagggacagtgacattggtgaggaaatgataataagtagcgaagagcaaaatgatgaaaatgaatggagctgggtgaatcaagatagagatggtggtcctcttgctgaatcggtttcttcacttcatatgacacagcaagtccttgaaaatggtaaacatcttatatttcttcatgtttcttatgcacttctttttaagttgcttttgtgccttctcacactttaaacttcaaccatcttagattttttttgtggcttgtttaatactgtgacttaattaagtaacacagtacaggcactgtatttttccggtacttcgaaagttggaatttcatggtgttccaggtttgcttgctgaagtaaatttctacacagcactctctttttaaatctgttgctttttccaaacatatctgtgctgactttgctcgtgcaccacgtttatttactaaataggttgttttcttcatttatatgttatggtagttttctacacctcctcctgaataatgtacgagtaattgtgtcttgttcagtgccgcattatgcagcacttggcaaagtatgcctaaggtcatggctatcacttcctgccttcccttttctattttttttttcaatccgtagacccatacaatgatcaattctgatagtatgcagtatgctttccacatcagtaacagatttgctctcacttcattttggaaagaaaagtaatggtttgtttattcacaatatagtataagggacaagtgtgcacttctggagtatttggacactttggctagttctagttgtaatggatcacataactctagtggttcttggttataacaaagctgtgctatcctatttattattgagttattctttccatagataccacttgattaccgttatttttttttaaaattatttagtctttaagctctagtttatgtttgtattaaccacctctgggttttttgtgctgctcagagatacaaaaattatcagaacttggcaaagaacttgaggcggaggaatccacttctggtaacaaagaccaagatgtgatcgttttgccgtatgcagaggtcgatatgttgaaattgaatgagaagatggagcatcttgaacaaaaagtgaaagaagtgtcaaacaccatcagagagaaagacttaaggctttccaagcttcaaatactgatcggtactgcagatagggcaacggtggaggaggcagcagctagcatcgaccagctagagacagagttcgagcaccatctccaggagatactggaagctgaaatccagtatctggtgatgatgaaagcgaggcagaactggcaggtccgggcagaagaccagatggccttggaggagcacagggcgtctgctgccggggacaacaccaggatgctgctcaagctacgagagacggagagcaagatcgtgatgttgaaagagcaggtggacaagctggaggtccgggagaaggatctctaccggacgaccgaggtcctgaagatgcagagcaggaccttcaaagtgtccctctttggcctcgtccagctgataatgatgtgcctgtccctgaagatgttcttcgcgcaggtctcggcgccgtttgacgaggttgtgccgacatgatgatgccctgcctcgtttggatgcattcgtatccacatggattgacgtgctcagttggtgttctcttccgtctgtaacttcgttcgccgggtttgtgatgtcttaacgtgtatcttactgtagctgtaggcctgtagccagcacccagtaggtagtatagtttcttagtcgtacatgcacttgtgatgatatacgtcagaagctacgcgtgttctgtaaaaactaataatgtaggtctgtgcataaattgggttcgattgacaactaggctagctgacggtctgcagctaccaaatcatggattaattaggcaaactaaa

SEQ ID NO: 201576 - DNA, 3076 bp, Zea Mays
atttctgcacgacttgccacctccttgctcctggcatgccgttgcagagagtaagaagaacttgaacctcagcggtaaagaagaatatggcagacacggtcacgggcagttcaaggaggtcacaagatgacactgcaacattaatcccacacagtggcaatttgggaggatcaagccggaagggcgtgaaggccgccaggttcaaagatgatgatgaggttgtggagatcaccatcgtacagcgcgattccatggcaatcgaagatgtcagggtagtcgatgatggcggctcagggcatggtggtgggtttgacggcctgtcacttgtgtcaccttcctcgtcaaggagcggcaagctagcatcaaagtttaggcaggtgaaaaatgggctaaagatgaataactcaagcaataaggcgccacagacacagttgggaaagaacgtgaggaagagattggacagaagcaagagcggtgctgctgttgcgctcaagggcttgcagtttgtgactgcgaaagttggtcatgatggctgggctgcagtggagaaacggttcaaccagctacaagttgatggcgtgctgctacgttcgagattcgggaaatgcattgggatggatggatctgatgagtttgcaatgcaagtcttcgattcattagcaaggaagagagggataacgaagcaggtgctgactaaggatgagctgaaagatttctgggaccaactaagtgatcagggttttgacaaccgtctgcggacattctttgatatggttgacaagaatgctgatggaaggatcacagcagaggaggttaaggagatcattagcctcagtgcatcagcaaacaagctttccaaactcaaggaacgagctgatgagtacacagcactcattatggaagaacttgaccgtgacaacctgggatacattgagcttgaggatctggaggcacttttgctgcaatcaccatctcaagctgctgcaagatcaacaacacatagttcgaaacttagcaaagctcttagcatgaagcttgcatcaaacaagggcacaggtccattttaccactactggcaagagttcatgtacttccttgaggagaactggaagcgcatttgggttatgactctctggctctcaatctgcatttgcctctttatatggaagttcatccaataccgtaatcgagctgtatttcacatcatgggttattgtgtgaccactgcaaaaggtgctgcagagactctcaaattcaatatggccttggttctatttcctgtttgccgaaatacaatcacttggattcgatcgaagacaaagatcggagctgttgtgcccttcaatgacaacataaacttccataaggtaatagcagcaggtgttgcagttggtgttgctttgcatgcaggtgctcacctgacatgtgattttcctcggctgctccatgcaagtgatgctgcctatgaaccaatgaagcctttctttggagacaaaaggccaccaaattactggtggtttgtaaagggaactgaagggtggacaggtgtggtcatggttgtacttatgactatagccttcgtattggcccagccatggtttcggcgtaataggctcaaggattctaatcccctcaagaaaatgactggcttcaatgccttttggtttacgcaccacttatttgttattgtgtatgcactgctcgttgtccatgggatctgcttatatctaagcaggaaatggtacaagaaaacgacctggatgtaccttgctgtccctgtgctcttgtatgtaagtgagcgcattcttcggctatttaggagccatgacgctgttaggattcagaaggttgcagtgtatccggggaatgttttggctctctatatgtctaagccacctggattcaggtaccggagtgggcagtatatcttcataaactgccgtgctgtctctccatacgaatggcatccattttccattacatcagcaccaggagatgattatcttagtgtccacattcgcacaaggggtgattggacttcacgtcttaggactatcttctctgagccgtgccgccctccaactgatggagaaagtggactcctaagagctgacctttccaaggggatcacagagagcagcgccaggttccctaaactcttgattgatggaccatatggtgctccggcgcaagactatcgggaatacgatgtgctcctgctcattggactgggcattggagccactccattgattagcattgtgaaggatgtgcttaaccacacccagcatggaggatctgtttcaggcacggagcctgagggcagtggcaaggccaagaagaggccattcatgacgaagagggcctacttctactgggtgaccagagaagagggatctttcgaatggttccgaggggtcatgaacgaggtggctgagaaggacaaggatggagtcattgaactccacaaccactgctctagtgtgtacgaggaaggggatgcacgttctgcactcattgtcatgctccaagagctccagcatgcgaagaaaggggtcgacatcttgtctggaactagtgtcaagacgcacttcgcgcgtcccaattggcgaagcgtcttcaaacatgttgcagtgaaccatgagaaccaacgcgttggagttttctactgcggtgagcctgtccttgtgccacagctacggcagtggtcagcagacttcacccacaagacgaacacaaagtttgagttccacaaggagaacttctaatggcataactggagaagctctggacgtggtcctctaatgatttcagaatgtgaattaccagggttgtaatatatatacgagtagaataaaatgatgggagttattttgttatagatgtcaaaagtcaaccatgttctttttgcaatgtgctctgtccatccctgtttactcctctatgccgtctaggcgaagtagataatgtatcttttgcatacaagcaacattagaaggtgtaacacatgattttttttttgataaaggaagattttattaataacttcaagcacattacatcgaggagatacacg

SEQ ID NO: 201577 - DNA, 3215 bp, Zea Mays
cccggaagtctgctgctgctcctgctttctagtacctgcccacctgcgcttgcatctgttgcttccctgctgctggcctgcgaatccacctgcatttgctgaggctcatcgccgcgtgtactcctgctctgtgggaggattcaggaaatgctcggagttgcattcggtggctgaaacttctagaagggtttgagaagaacttgaacctcagcggtaaagaagaatatggcagacacggtcacgggcagttcaaggaggtcacaagatgacactgcaacattaatcccacacagtggcaatttgggaggatcaagccggaagggcgtgaaggccgccaggttcaaagatgatgatgaggttgtggagatcaccatcgtacagcgcgattccatggcaatcgaagatgtcagggtagtcgatgatggcggctcagggcatggtggtgggtttgacggcctgtcacttgtgtcaccttcctcgtcaaggagcggcaagctagcatcaaagtttaggcaggtgaaaaatgggctaaagatgaataactcaagcaataaggcgccacagacacagttgggaaagaacgtgaggaagagattggacagaagcaagagcggtgctgctgttgcgctcaagggcttgcagtttgtgactgcgaaagttggtcatgatggctgggctgcagtggagaaacggttcaaccagctacaagttgatggcgtgctgctacgttcgagattcgggaaatgcattgggatggatggatctgatgagtttgcaatgcaagtcttcgattcattagcaaggaagagagggataacgaagcaggtgctgactaaggatgagctgaaagatttctgggaccaactaagtgatcagggttttgacaaccgtctgcggacattctttgatatggttgacaagaatgctgatggaaggatcacagcagaggaggttaaggagatcattagcctcagtgcatcagcaaacaagctttccaaactcaaggaacgagctgatgagtacacagcactcattatggaagaacttgaccgtgacaacctgggatacattgagcttgaggatctggaggcacttttgctgcaatcaccatctcaagctgctgcaagatcaacaacacatagttcgaaacttagcaaagctcttagcatgaagcttgcatcaaacaagggcacaggtccattttaccactactggcaagagttcatgtacttccttgaggagaactggaagcgcatttgggttatgactctctggctctcaatctgcatttgcctctttatatggaagttcatccaataccgtaatcgagctgtatttcacatcatgggttattgtgtgaccactgcaaaaggtgctgcagagactctcaaattcaatatggccttggttctatttcctgtttgccgaaatacaatcacttggattcgatcgaagacaaagatcggagctgttgtgcccttcaatgacaacataaacttccataaggtaatagcagcaggtgttgcagttggtgttgctttgcatgcaggtgctcacctgacatgtgattttcctcggctgctccatgcaagtgatgctgcctatgaaccaatgaagcctttctttggagacaaaaggccaccaaattactggtggtttgtaaagggaactgaagggtggacaggtgtggtcatggttgtacttatgactatagccttcgtattggcccagccatggtttcggcgtaataggctcaaggattctaatcccctcaagaaaatgactggcttcaatgccttttggtttacgcaccacttatttgttattgtgtatgcactgctcgttgtccatgggatctgcttatatctaagcaggaaatggtacaagaaaacgacctggatgtaccttgctgtccctgtgctcttgtatgtaagtgagcgcattcttcggctatttaggagccatgacgctgttaggattcagaaggttgcagtgtatccggggaatgttttggctctctatatgtctaagccacctggattcaggtaccggagtgggcagtatatcttcataaactgccgtgctgtctctccatacgaatggcatccattttccattacatcagcaccaggagatgattatcttagtgtccacattcgcacaaggggtgattggacttcacgtcttaggactatcttctctgagccgtgccgccctccaactgatggagaaagtggactcctaagagctgacctttccaaggggatcacagagagcagcgccaggttccctaaactcttgattgatggaccatatggtgctccggcgcaagactatcgggaatacgatgtgctcctgctcattggactgggcattggagccactccattgattagcattgtgaaggatgtgcttaaccacacccagcatggaggatctgtttcaggcacggagcctgagggcagtggcaaggccaagaagaggccattcatgacgaagagggcctacttctactgggtgaccagagaagagggatctttcgaatggttccgaggggtcatgaacgaggtggctgagaaggacaaggatggagtcattgaactccacaaccactgctctagtgtgtacgaggaaggggatgcacgttctgcactcattgtcatgctccaagagctccagcatgcgaagaaaggggtcgacatcttgtctggaactagtgtcaagacgcacttcgcgcgtcccaattggcgaagcgtcttcaaacatgttgcagtgaaccatgagaaccaacgcgttggagttttctactgcggtgagcctgtccttgtgccacagctacggcagtggtcagcagacttcacccacaagacgaacacaaagtttgagttccacaaggagaacttctaatggcataactggagaagctctggacgtggtcctctaatgatttcagaatgtgaattaccagggttgtaatatatatacgagtagaataaaatgatgggagttattttgttatagatgtcaaaagtcaaccatgttctttttgcaatgtgctctgtccatccctgtttactcctctatgccgtctaggcgaagtagataatgtatcttttgcatacaagcaacattagaaggtgtaacacatgattttttttttgataaaggaagattttattaataacttcaagcacattacatcgaggagatacacg

SEQ ID NO: 201578 - DNA, 2205 bp, Zea Mays
ctctgctccaaataactccttccctcgacctccccgaacccgaactcctctcaggtcgagcctagggttagggtttcgtccctccggccccgattcgaaccaatccgcctcggcctccgccgcgccatggccgccggctccatcgtggtggacttcccttccatgggcgccgccctctgcttccccagcctcgattcactcctccgcgactccgcctcgggcttcctcgctgccgtctccaacgccccagcccccggcgcagccgacctcaccaactttcaccgcgtcttctcgcgcgtcctcagcgcctacccggacccaccgctcgaggctgtctggttcttctccgcgctctccttccacgaccgtcccgacgacctccgctccctgctccagctcctctccgccttcaccgcctcctcgcccggcaccgccaagccgcttgcccttctcgcccctgtcgtttccgagctcttccacgccgacaagccgcgcagggagaccgagaccctcgttgaggccgtcctcagctacatcagcatctgcagcaaccgctctgccccctcttcgaccgtgggcgccaccgcagacgctgtgagcctgctgccggcctttggggagctcgtcaaagtgtggagcgtgcgctactcgagggagaggtgcccgttccaagtgctgttcccgctcgctggggacgaggccaggcgggagctcatgaaggaaggctgcagcgttgactacctcgccggggtggtgctggctgaggcgttccttctcaggctctgcctcaaggtgcagaatgcaacaggggtgcctcgctctgagctgcagaaggagctcaagatctgggcagtcagctccatcccggtcttccagaaccaccgattcttcggaggaaaggtgatcaagggagagcagtgtcatttatcaatgctttctcaacctcaaatgttcccaattttctcatcaagtgggctacttttcaagctggctctggtgcactcagcaaaccaattgccaatacaccgcaatctattattaagtggcttgtcgaccttgaagtcaaggggctcaaagtgtttggagactacagttcttgtattatggagaggtttgcttatgatggggtcaagaatggccatgggaacatgattcattcagatgcggaccttttcttttttgataagcagagtggtagggagtttatggacaccaaaggcagcgaggatgaagctgtggatgagatggagactgcaggtaataatgcttttatggctgctgcccagtcaatgaagggggtgactgacggcatgaggaagaggaagagctgcggatacgaagatgcaacagctgtgaagtttgtgaagtacaaggttgaagacagctcgctgaaggactacctatcagcagctaatggcataagcagtggcagtgaggtagagaacccgcagtctgatgatgagatggaagaatcaaactgatgcatagaaacgagatcacccgctaatgcttactttggacagttgcttttgagagttccttggacagccgcctttttttggagccaggaccagtcttgtttcagctgccgcttgttaatgatgccgtgcagaatccgcaagacggccccatctccagctaggcattcggatgtagtagtaaccgttagctgaccatacttgacatggagcatatgatgtttgctatgggccatatcgtgctctctgttgttatgacgcagctatagtagagtagagacctaaaaatgtagtcttgcttcaagttacttttgtaatagctgggtacttcgttatcccacggaaccagttggaagtaatgaaatcttaaccttctcctgtgtatagtgtctttttttgtgctgacgacatgcggtcaaacagtacgttttctttttttcttttgtgaatgatgagtgaatatggtgaaatattaccaacatgtttggtttgatgaatgaggtagtctatcatcttcttacttactttcttgtttggttttggtttgtggaatagacttataatacatcccctcatttaggatggattgttttttccaaccaaacacactatacatctccttttctttttggtcaatggtgattgagaacgtgatgaaatcatgaaactatcagatgtaagcaactggaaagccttccggagttacgaggaagaggaaggcattgtt

SEQ ID NO: 201579 - DNA, 2635 bp, Zea Mays
ccttccctcgacctccccgaacccgaactcctctcaggtcgagcctagggttagggtttcgtccctccggccccgattcgaaccaatccgcctcggcctccgccgcgccatggccgccggctccatcgtggtggacttcccttccatgggcgccgccctctgcttccccagcctcgattcactcctccgcgactccgcctcgggcttcctcgctgccgtctccaacgccccagcccccggcgcagccgacctcaccaactttcaccgcgtcttctcgcgcgtcctcagcgcctacccggacccaccgctcgaggctgtctggttcttctccgcgctctccttccacgaccgtcccgacgacctccgctccctgctccagctcctctccgccttcaccgcctcctcgcccggcaccgccaagccgcttgcccttctcgcccctgtcgtttccgagctcttccacgccgacaagccgcgcagggagaccgagaccctcgttgaggccgtcctcagctacatcagcatctgcagcaaccgctctgccccctcttcgaccgtgggcgccaccgcagacgctgtgagcctgctgccggcctttggggagctcgtcaaagtgtggagcgtgcgctactcgagggagaggtgcccgttccaagtgctgttcccgctcgctggggacgaggccaggcgggagctcatgaaggaaggctgcagcgttgactacctcgccggggtggtgctggctgaggcgttccttctcaggctctgcctcaaggtgcagaatgcaacaggggtgcctcgctctgagctgcagaaggagctcaagatctgggcagtcagctccatcccggtcttccagaaccaccgattcttcggggtcttgctgaacatgctcttgaactctccactgcctgtttactctctagtggtatgtgtttcctgactaatgagcaattagagaacatgacttagcaagctagtattattgtgaatccactagttattatctaagttataagagtattaattaagcattcacaaggcatgtggtacttgtatggaccattgttattgtagcattttgctgtcatcatatgcaaggagcatgacttaagttggagttaatgactcatctttgtgacatgcaaacaggttgaagcctgatctgtgagcgctgatgatgaaatcttgttgagagatgtcctttatgattctcttatcctggtggactattctttcattaacaatggtgttggagttgatcttttgcctatatacgtgttgagattggttatcactcttgatgctgtcaatgatgccaggaggaaaggtgatcaagggagagcagtgtcatttatcaatgctttctcaacctcaaatgttcccaattttctcatcaagtgggctacttttcaagctggctctggtgcactcagcaaaccaattgccaatacaccgcaatctattattaagtggcttgtcgaccttgaagtcaaggggctcaaagtgtttggagactacagttcttgtattatggagaggtttgcttatgatggggtcaagaatggccatgggaacatgattcattcagatgcggaccttttcttttttgataagcagagtggtagggagtttatggacaccaaaggcagcgaggatgaagctgtggatgagatggagactgcaggtaataatgcttttatggctgctgcccagtcaatgaagggggtgactgacggcatgaggaagaggaagagctgcggatacgaagatgcaacagctgtgaagtttgtgaagtacaaggttgaagacagctcgctgaaggactacctatcagcagctaatggcataagcagtggcagtgaggtagagaacccgcagtctgatgatgagatggaagaatcaaactgatgcatagaaacgagatcacccgctaatgcttactttggacagttgcttttgagagttccttggacagccgcctttttttggagccaggaccagtcttgtttcagctgccgcttgttaatgatgccgtgcagaatccgcaagacggccccatctccagctaggcattcggatgtagtagtaaccgttagctgaccatacttgacatggagcatatgatgtttgctatgggccatatcgtgctctctgttgttatgacgcagctatagtagagtagagacctaaaaatgtagtcttgcttcaagttacttttgtaatagctgggtacttcgttatcccacggaaccagttggaagtaatgaaatcttaaccttctcctgtgtatagtgtctttttttgtgctgacgacatgcggtcaaacagtacgttttctttttttcttttgtgaatgatgagtgaatatggtgaaatattaccaacatgtttggtttgatgaatgaggtagtctatcatcttcttacttactttcttgtttggttttggtttgtggaatagacttataatacatcccctcatttaggatggattgttttttccaaccaaacacactatacatctccttttctttttggtcaatggtgattgagaacgtgatgaaatcatgaaactatcagatgtaagcaactggaaagccttccggagttacgaggaagaggaaggcattgtt

SEQ ID NO: 201580 - DNA, 2306 bp, Zea Mays
ctcgacctccccgaacccgaactcctctcaggtcgagcctagggttagggtttcgtccctccggccccgattcgaaccaatccgcctcggcctccgccgcgccatggccgccggctccatcgtggtggacttcccttccatgggcgccgccctctgcttccccagcctcgattcactcctccgcgactccgcctcgggcttcctcgctgccgtctccaacgccccagcccccggcgcagccgacctcaccaactttcaccgcgtcttctcgcgcgtcctcagcgcctacccggacccaccgctcgaggctgtctggttcttctccgcgctctccttccacgaccgtcccgacgacctccgctccctgctccagctcctctccgccttcaccgcctcctcgcccggcaccgccaagccgcttgcccttctcgcccctgtcgtttccgagctcttccacgccgacaagccgcgcagggagaccgagaccctcgttgaggccgtcctcagctacatcagcatctgcagcaaccgctctgccccctcttcgaccgtgggcgccaccgcagacgctgtgagcctgctgccggcctttggggagctcgtcaaagtgtggagcgtgcgctactcgagggagaggtgcccgttccaagtgctgttcccgctcgctggggacgaggccaggcgggagctcatgaaggaaggctgcagcgttgactacctcgccggggtggtgctggctgaggcgttccttctcaggctctgcctcaaggtgcagaatgcaacaggggtgcctcgctctgagctgcagaaggagctcaagatctgggcagtcagctccatcccggtcttccagaaccaccgattcttcggggtcttgctgaacatgctcttgaactctccactgcctgtttactctctagtggtgatgaggagttattgtaatcaaaacttagctggggtggaaatatcttctcatttcatttcttctgacaggaggaaaggtgatcaagggagagcagtgtcatttatcaatgctttctcaacctcaaatgttcccaattttctcatcaagtgggctacttttcaagctggctctggtgcactcagcaaaccaattgccaatacaccgcaatctattattaagtggcttgtcgaccttgaagtcaaggggctcaaagtgtttggagactacagttcttgtattatggagaggtttgcttatgatggggtcaagaatggccatgggaacatgattcattcagatgcggaccttttcttttttgataagcagagtggtagggagtttatggacaccaaaggcagcgaggatgaagctgtggatgagatggagactgcaggtaataatgcttttatggctgctgcccagtcaatgaagggggtgactgacggcatgaggaagaggaagagctgcggatacgaagatgcaacagctgtgaagtttgtgaagtacaaggttgaagacagctcgctgaaggactacctatcagcagctaatggcataagcagtggcagtgaggtagagaacccgcagtctgatgatgagatggaagaatcaaactgatgcatagaaacgagatcacccgctaatgcttactttggacagttgcttttgagagttccttggacagccgcctttttttggagccaggaccagtcttgtttcagctgccgcttgttaatgatgccgtgcagaatccgcaagacggccccatctccagctaggcattcggatgtagtagtaaccgttagctgaccatacttgacatggagcatatgatgtttgctatgggccatatcgtgctctctgttgttatgacgcagctatagtagagtagagacctaaaaatgtagtcttgcttcaagttacttttgtaatagctgggtacttcgttatcccacggaaccagttggaagtaatgaaatcttaaccttctcctgtgtatagtgtctttttttgtgctgacgacatgcggtcaaacagtacgttttctttttttcttttgtgaatgatgagtgaatatggtgaaatattaccaacatgtttggtttgatgaatgaggtagtctatcatcttcttacttactttcttgtttggttttggtttgtggaatagacttataatacatcccctcatttaggatggattgttttttccaaccaaacacactatacatctccttttctttttggtcaatggtgattgagaacgtgatgaaatcatgaaactatcagatgtaagcaactggaaagccttccggagttacgaggaagaggaaggcattgtt

SEQ ID NO: 201581 - DNA, 1732 bp, Zea Mays
ctcgaacaagcatcaccggggctcatttcttctgtatgggtggcctataggctacaacgcccatcttctcgaccggaaaaaacaacaccgctccactgcggggctgcccatcttcttctgacctctttcttctccgcatccactgccgcgacgggacctcgccgcggtgcgacctcaccgctccactgacgcaacctcgtcggctgtgccatgggagctctggccccctcgcatcagctgctggcgggcccgcgagctagggtttccggtcaccgcggatctcgacggcctccttcgctgagctcctcacagccccgcgatgcaatatcgtcagccgtgccgcctgaggctatttgaggagatgtcgtcatcgtcatcatcatccttactctctggctccaatactgtgagtgttgagcttcatctaatcccttgcaagctctgcaatggggtggtgattgagcgggtctccaaacaaccagaaagcacatcgaggaagttctaccggtgcagagccaagaaaatggatgggtctcaatgtgattttttccattggcaagcgagctatgctgttttgttaatcaaggatggggttgtcagtggtgaccattgccttgagttgttaatggtcgcacttaatgatcatggcaaagctgttgaatctctaaccaattccatcagagagatgaagaaaaagttgtccgacctggagttagtgatggaagagctggataacgtgaaaaagtcaatgaaggcagccatggttggaattgaggaaaacaataaaacgatagctgcattgaaactgatggagaatgagatgcaaatgctgaaagggtcaactaaagtgaaacctaggaatatggcactgtgttttctgcttttggcgttgattgggtggtttgtgatgggacagatgtattggggggaggattaggaagcatccggccgatttatgctgagaggctaatgaactttggatggacttttgtatagctagatataatcagaactggttaggcctagagatggcaatggggacccgatccccgattccccgcggggaattcatccattaggggatggggatggggaagaaacttcccccgcggggatataaacggggaaagtttatcccccgacgggtaaatggggatggggacggggaagcattccccatccccgttccccgtggggacccgttaacttgcatgtgactatgtttttgtgtaccggttaacaacaaaaataaataattaccttgtcaagagaccactaattgtacaaatgtgttcattttgatgtatgcataatgatttcttacatctgacaatgtgtataagtgataatgtttaacattaataacaaagaacatatgtattaattataattttaacggggatggggatccccgttggggatttatccccgcggggaacggggatggggaagaaatgttccccgcaagcgttcgtggggatccccgcggggaaattttttcgtcgcggggacgggtatggggagctattccccggcggggaattccccgttgccatcccttaggccccctgggagtggaagctagatgtaagaagttgattgtgctgcgatttgatgctctagaggatgatgatgagctctgatcgaagcaaagttgtgccactaatgtttttttcttattgaacttagtagttttctgtatgaacttctgtttatcggatacccagttgca

SEQ ID NO: 201582 - DNA, 2101 bp, Zea Mays
cccatcttctcgaccggaaaaaacaacaccgctccactgcggggctgcccatcttcttctgacctctttcttctccgcatccactgccgcgacgggacctcgccgcggtgcgacctcaccgctccactgacgcaacctcgtcggctgtgccatgggagctctggccccctcgcatcagctgctggcgggcccgcgagctagggtttccggtcaccgcggatctcgacggcctccttcgctgagctcctcacagccccgcgatgcaatatcgtcagccgtgccgcctgagactccggattatcaaaagttgatgcgatctcaccaccagtgacaagagctagccgttcaatgccctcaaaatcagcatgctcaattgcgaggatgccaacatcaacaaagagttcttcagggaagttatagattaactgcctgttgacaaaatagttgatcccatgcgctataatcttctgcaccttctttctcattttctgcttttcagcagcttcaatatctgcaaccttaaacattgaatccacccagacacatgccccatagtcttaaatctgtgtccatagcactgtttgcaaccaaaattttggcattctcaattctcttaggttgcccaatgccaattttcttgtcaagaatgaacccttcatccaaaaaggagtccttaagagatcctccaggtttcttcagaatttgaatggcttccaggctatttgaggagatgtcgtcatcgtcatcatcatccttactctctggctccaatactgtgagtgttgagcttcatctaatcccttgcaagctctgcaatggggtggtgattgagcgggtctccaaacaaccagaaagcacatcgaggaagttctaccggtgcagagccaagaaaatggatgggtctcaatgtgattttttccattggcaagcgagctatgctgttttgttaatcaaggatggggttgtcagtggtgaccattgccttgagttgttaatggtcgcacttaatgatcatggcaaagctgttgaatctctaaccaattccatcagagagatgaagaaaaagttgtccgacctggagttagtgatggaagagctggataacgtgaaaaagtcaatgaaggcagccatggttggaattgaggaaaacaataaaacgatagctgcattgaaactgatggagaatgagatgcaaatgctgaaagggtcaactaaagtgaaacctaggaatatggcactgtgttttctgcttttggcgttgattgggtggtttgtgatgggacagatgtattggggggaggattaggaagcatccggccgatttatgctgagaggctaatgaactttggatggacttttgtatagctagatataatcagaactggttaggcctagagatggcaatggggacccgatccccgattccccgcggggaattcatccattaggggatggggatggggaagaaacttcccccgcggggatataaacggggaaagtttatcccccgacgggtaaatggggatggggacggggaagcattccccatccccgttccccgtggggacccgttaacttgcatgtgactatgtttttgtgtaccggttaacaacaaaaataaataattaccttgtcaagagaccactaattgtacaaatgtgttcattttgatgtatgcataatgatttcttacatctgacaatgtgtataagtgataatgtttaacattaataacaaagaacatatgtattaattataattttaacggggatggggatccccgttggggatttatccccgcggggaacggggatggggaagaaatgttccccgcaagcgttcgtggggatccccgcggggaaattttttcgtcgcggggacgggtatggggagctattccccggcggggaattccccgttgccatcccttaggccccctgggagtggaagctagatgtaagaagttgattgtgctgcgatttgatgctctagaggatgatgatgagctctgatcgaagcaaagttgtgccactaatgtttttttcttattgaacttagtagttttctgtatgaacttctgtttatcggatacccagttgca

SEQ ID NO: 201583 - DNA, 593 bp, Zea Mays
ttctcgaccggaaaaaacaacaccgctccactgcggggctgcccatcttcttctgacctctttcttctccgcatccactgccgcgacgggacctcgccgcggtgcgacctcaccgctccactgacgcaacctcgtcggctgtgccatgggagctctggccccctcgcatcagctgctggcgggcccgcgagctagggtttccggtcaccgcggatctcgacggcctccttcgctgagctcctcacagccccgcgatgcaatatcgtcagccgtgccgcctgaggctatttgaggagatgtcgtcatcgtcatcatcatccttactctctggctccaatactgtgagtgttgagcttcatctaatcccttgcaagctctgcaatggggtggtgattgagcgggtctccaaacaaccagaaagcacatcgaggaagttctaccggtgcagagccaagaaaatgggcgccagaaaaaggaagggacacccagtggattttggagaagctcacgaaatatcacaaagttcctcactaggatatgatgagttcggagatagacgagaagccaggcgattcagattcagatggcaaaag

SEQ ID NO: 201584 - DNA, 1467 bp, Zea Mays
ggcgcatccggccgtccgtccttccggagccccacgcgataggcggcaggagcggccgagcgggacacgcgttgcagttcaacaccgcagtggcattctcgctactgagactgagaggcagcctccctccctcgtgggcgttctaccgcgacgggggtcgctctataaagagcggacgcgcccccgctgctctgctcatcgtcctccgctccagcagctgccacagagacatcagagagcggtcctccttgtgagtctgagctgaagaggaggaggaggaggaggagaagcagcagcgcagccggaggagggagagcgaagatgcgccgcgtcgcgctgttgctcgtcgccgccgtgtgcgcgctggcggcgccggctgccgcggtcgtcactgacggtcttctcccgaacggcaacatcgaggacgaccactcgccgctccccgcctggatgatcgtctcgtccaaggccgtcaagtacgtggacgccgcgcacttcgccgtgccccagggcgcgcgcgccgtcgagctggtgggcggccgggagagcgcgctcgtgcaggaggtccgcaccgtgcctgggtggacctaccgcctcgccttcgccgtgggagactcgggcgacggctgcgcgggctccatggccgccgaggcctacgcggcgcgcgccacggtcaaggtgccctaccagtccaggggcaccggaggatacaagcgcgccgtgctggacttcacggccatcgccaaccgcacccgcgtcgtcttccagagcaccttctaccacatgaagcccgacggcacgctctgcggcccgctcgtcgacgacgcctcgctcgtcggcctgcgcaagaagaagcccgcgcgccgcctcatgcagctcctgtaagcgctgcttccacgtgcactacgcccggacggaccgcgcaagcgatggtgtaatacggctggtatgtgttttttggtttggtgtgtgcgtgcgtggtatacgcgtgccgtgcgcgccctgtggctgtggctgcagtggcgtcgcgttgggtgttttcttgttgtgacgaagaaaaaagggtatgggttggggtggtccgctggccggcgcaccggggttttaatcaacttatattaacctgatgaaggtgaaggtgaaggtgacacgggattaatggcaaaaatgctcctagtactatttttgtaataaaaaaaaaagattttgaaaaatgtaaactggctaacacgctatggctgaagcgcatgtgttgttttaaattgttcgccgtacgtgctccatttcacttctcaacagcactcttctcttatttgtcccatgagccttgcctacgggatctgaatcctccgtcgtgcggccgtctcctcctttctccatcgtaacactgcttcgtggtcgtggcattatcctgacaccggcaaccgccatgcggccctctcccttctccagcaggacgccatcttc

SEQ ID NO: 201585 - DNA, 2790 bp, Zea Mays
cccacgacgacccacgacgcctgcgtcggccctgcccgaactggcgtgcagagcagtgctccacgacgccgccaccacctgccccagcagcggcacgctccgacaacggcgaccatggcggtgcgggcgcggcggctggggagtctgttccctgctagatccagtagatggctgactcatcgaggccctccgtgaacatcatctgcgccggtcgtctgctcggctgcagtggattaggaggcttggtgtggaggcgctcagcagcgggtggaagttcccgtcaaggagtctgtcccgtcaaggagaccgtcgtgccctggacggagtcagagcaagagtcgatcaacattttcctcacgatgattgagcgacacaggcacaattcaccatgatcccatcccccactcaaacctgcaaaatcctgtagccgaacatctcgatggtctcacgtgccattcctttctacaggaataggcctataactgatttcaataagtttatgctgcatttcattcagtgtgtttggatgcatatagagaacacgaagtttaatgtgtttggtgcataatgagaattgaggaaatgggacattctagcatgctatgtgaattgtgaaaggctatagattaatgtgtacagcattttttatgttggaactgcctacatttatgttggtgccgctcccacgagcgcaccaggacgccggcttggaggtacttgcacacaagggtcgagctcggacgtcgtagcggtgcggagggcctcggccgtagcatgccccgccccgccgcgcatgcctgcgcggtcggtgtcccgcagcacccacaccgagtggcctgtcttcaaagtcgtcctcatcctctcctcctggctcaacgagaccatcaacgtctggatgttcatagacctgctcgggttcatgctgttcttcgacctcaccctggtgcacctcggccagtacttcaccaaggtgtctggtatgattgggcacctctcctgctccggcgaccgagctccaaccagggacgtctagcgctagcgcccaggacgcacgaccccctgctcctctatcctcagcgccgagcccctccgtcctgtttctggcagcgaaagcccagcccctgcggcaagctacctactcgatggaatgcccagccgcttgtcggatctacgcagcccctgcgcgacgtcacaaactccggcagtcaggcgggataacaagcagaggtttagtctgttggaggaagatggcgagctgttgatccgggcgaaccagggacacacactaaaaaaatatagtctggaggtgacctcaatgtaattcaattagtgatggaacatttgggagtctactcattatgtatttcttctatctggaaaaacactcaagggatctttgtttagaggatggagacctaaatctgaccgaccttcattggtggataaatatgcagaaaaaggttcctccaagagaatccagagtatgttgcacagggtgtaactttagctcagttttcgttccagatacctatacctctgcggcaggactatgtcaaaaagaaaccgaagttgataaatgcaagtgatgaagcaagtacaattacctctaagtcttctgaaccagacgaagtgaaccctatagcctgggcagttcctacaaaacatgagggcgatgccagtgaagaagcttctctcgccgatgagacacttgcatcagaagtagtgctaacccggaagaggaaaataggaagctctttgtcagtagagccaaaccatctctctgatgaacttgaaccaaagttggaggatgcttagaacggggagacgtctaactgaaaagtaaaagtgggcagcgtcgtgatgccaacttacccccctgccatggttttattggtcctctgcttgtttctcgttttccttgggagttagcttctctgttttatgtggtcgcacacggccttatttgtagtattacaccacaaaagctggctgacccccactgagggagggtgattgatgcaagcattgtgtatgatccttggacaagggaatcacggatgtttggttttgtcaccatggctgctactaaggaggcagatcactgcatcaaatatctggactgttctgtgttgcaaggtcaggtcataattgtttagaagaacattttattgttttgtcttcaccaccgagaatccaagagcgcctcccatagcctccacatccacaaggtcctgcttgactgcgacgacgtccaggctgatgccctcatcgtggatcgactcgcctcgctctagaaggagtggcccctctggagttgaatatgcagttataaccaatttttaccccttttatcctagaagagttgccaagacacggtataagaccatgataatagactaagagaggatttgtctctaattattatatgttttatttatgcagtcccatgagaactttgagtatttgcagattgatttattaatatattaaagttaaagattgtatgtgttgagtatgtatccattcttgttggaagtgtcttgcaattccaatccaaggatgtataaaagactgcatgggctaagtatgtgttttttcatgtatttggagtatatatactttttgttgcttgagaacatgtatgtacatacatagaagcttgtcaattgtgtgaacttgagttgatccctgtctaacctgagtatatatatatattttgttgcttgagaacgagtatgtacaatagaggcttgacaattgtgtgaacttgagttgaacatgaattttgat

SEQ ID NO: 201586 - DNA, 3752 bp, Zea Mays
cccacgacgacccacgacgcctgcgtcggccctgcccgaactggcgtgcagagcagtgctccacgacgccgccaccacctgccccagcagcggcacgctccgacaacggcgaccatggcggtgcgggcgcggcggctggggagtctgttccctgctagatccagtagatggctgactcatcgaggccctccgtgaacatcatctgcgccggtcgtctgctcggctgcagtggattaggaggcttggtgtggaggcgctcagcagcgggtggaagttcccgtcaaggagtctgtcccgtcaaggagaccgtcgtgccctggacggagtcagagcaagagtcgatcaacattttcctcacgatgattgagcgacacaggcacaattcaccatgatcccatcccccactcaaacctgcaaaatcctgtagccgaacatctcgatggtctcacgtgccattcctttctacaggaataggcctataactgatttcaataagtttatgctgcatttcattcagtgtgtttggatgcatatagagaacacgaagtttaatgtgtttggtgcataatgagaattgaggaaatgggacattctagcatgctatgtgaattgtgaaaggctatagattaatgtgtacaggtgggaattcattatcggtttactaattatatagctgtttttccctattatctctctcaatttactgtgtataatgtactactaatctggaaattgatgtatgatagcattttttatgttggaactgcctacatttatgttggtgccgctcccacgagcgcaccaggacgccggcttggaggtacttgcacacaagggtcgagctcggacgtcgtagcggtgcggagggcctcggccgtagcatgccccgccccgccgcgcatgcctgcgcggtcggtgtcccgcagcacccacaccgagtggcctgtcttcaaagtcgtcctcatcctctcctcctggctcaacgagaccatcaacgtctggatgttcatagacctgctcgggttcatgctgttcttcgacctcaccctggtgcacctcggccagtacttcaccaaggtgtctggtatgattgggcacctctcctggcagtcaggcgggataacaagcagaggtttagtctgttggaggaagatggcgagctgttgatccgggcgaaccagggacacacactaaaaaaatatagtctggaggtgacctcaatgtaattcaattagtgatggaacatttgggagtctactcattatgtatttcttctatctggaaaaacactcaagggatctttgtttagaggatggagacctaaatctgaccgaccttcattggtggataaatatgcagaaaaagaggagaccttcacctaaaaaacaaagatatatgttgaaatggttctttttaaaagattgcaacgtgatccgggtgtcagagattcagaaggtcttggacatcgccgacgagcgtagcctcattgacaccatcttcttctgctacctcgggtgcaatgcaagctaaggtggtcgacaatggtgttcgcggcggcgaactcgcagcgcagccaggtgatgaagccatcgcgctcgtcgacgagccaggcgacgggctcggccacggcggtgccgggggccggcgaggcgatgacggcggcggtggaggccatcgccgtgcgtccctcaccactgcgggccgcagcatagcccagccagcaatgccgaggtccatcaccactgggaaccgtcgtccggaccctctcccatcccgcacccattcctgtcctctgtctctgcgatgcgcttagcgccctcaccacttccacctccccagcctggctagcagcggcggagggaagaagtaccccactctggctagcagcggcggtggcagctcagattagtacggcgctgccccttcttcccccacctgtctttggatctacaaccgcccacccgtcttcggagctgttgtattcctccccacttgcttatctattcctctcaaaatagtgatggatttcggtcctcggatttttaccaatcggacaaatccagtgaattatgttgagaaattgttatactgaatttagtggtaggttggtattacgacctgcaaaacttaggtttggttatatgtttctttactggcctgtaggtacgacgttcttacatactttaagtaccttgacacattgagagtattagaaggtgtctgatcaatttggatacttgctgatccaagccataggtatttgagcttgcaaagaggtgcgtttaccaggcagtgagaacaaatggtgttaatgttaacacaaatattaagggcacactgacaaagaagaggaaagtggcacataatgctacgaagaaaggaaaagaaatcggtagtggctcttggccccttcattttgcaggttcctccaagagaatccagagtatgttgcacagggtgtaactttagctcagttttcgttccagatacctatacctctgcggcaggactatgtcaaaaagaaaccgaagttgataaatgcaagtgatgaagcaagtacaattacctctaagtcttctgaaccagacgaagtgaaccctatagcctgggcagttcctacaaaacatgagggcgatgccagtgaagaagcttctctcgccgatgagacacttgcatcagaagtagtgctaacccggaagaggaaaataggaagctctttgtcagtagagccaaaccatctctctgatgaacttgaaccaaagttggaggatgcttagaacggggagacgtctaactgaaaagtaaaagtgggcagcgtcgtgatgccaacttacccccctgccatggttttattggtcctctgcttgtttctcgttttccttgggagttagcttctctgttttatgtggtcgcacacggccttatttgtagtattacaccacaaaagctggctgacccccactgagggagggtgattgatgcaagcattgtgtatgatccttggacaagggaatcacggatgtttggttttgtcaccatggctgctactaaggaggcagatcactgcatcaaatatctggactgttctgtgttgcaaggtcaggtcataattgtttagaagaacattttattgttttgtcttcaccaccgagaatccaagagcgcctcccatagcctccacatccacaaggtcctgcttgactgcgacgacgtccaggctgatgccctcatcgtggatcgactcgcctcgctctagaaggagtggcccctctggagttgaatatgcagttataaccaatttttaccccttttatcctagaagagttgccaagacacggtataagaccatgataatagactaagagaggatttgtctctaattattatatgttttatttatgcagtcccatgagaactttgagtatttgcagattgatttattaatatattaaagttaaagattgtatgtgttgagtatgtatccattcttgttggaagtgtcttgcaattccaatccaaggatgtataaaagactgcatgggctaagtatgtgttttttcatgtatttggagtatatatactttttgttgcttgagaacatgtatgtacatacatagaagcttgtcaattgtgtgaacttgagttgatccctgtctaacctgagtatatatatatattttgttgcttgagaacgagtatgtacaatagaggcttgacaattgtgtgaacttgagttgaacatgaattttgat

SEQ ID NO: 201587 - DNA, 4008 bp, Zea Mays
cccacgacgacccacgacgcctgcgtcggccctgcccgaactggcgtgcagagcagtgctccacgacgccgccaccacctgccccagcagcggcacgctccgacaacggcgaccatggcggtgcgggcgcggcggctggggagtctgttccctgctagatccagtagatggctgactcatcgaggccctccgtgaacatcatctgcgccggtcgtctgctcggctgcagtggattaggaggcttggtgtggaggcgctcagcagcgggtggaagttcccgtcaaggagtctgtcccgtcaaggagaccgtcgtgccctggacggagtcagagcaagagtcgatcaacattttcctcacgatgattgagcgacacaggcacaattcaccatgatcccatcccccactcaaacctgcaaaatcctgtagccgaacatctcgatggtctcacgtgccattcctttctacaggaataggcctataactgatttcaataagtttatgctgcatttcattcagtgtgtttggatgcatatagagaacacgaagtttaatgtgtttggtgcataatgagaattgaggaaatgggacattctagcatgctatgtgaattgtgaaaggctatagattaatgtgtacaggtgggaattcattatcggtttactaattatatagctgtttttccctattatctctctcaatttactgtgtataatgtactactaatctggaaattgatgtatgatagcattttttatgttggaactgcctacatttatgttggtgccgctcccacgagcgcaccaggacgccggcttggaggtacttgcacacaagggtcgagctcggacgtcgtagcggtgcggagggcctcggccgtagcatgccccgccccgccgcgcatgcctgcgcggtcggtgtcccgcagcacccacaccgagtggcctgtcttcaaagtcgtcctcatcctctcctcctggctcaacgagaccatcaacgtctggatgttcatagacctgctcgggttcatgctgttcttcgacctcaccctggtgcacctcggccagtacttcaccaaggtgtctggtatgattgggcacctctcctgccattgctcccttcgtccccagctccggcgaccgagctccaaccagggacgtctagcgctagcgcccaggacgcacgaccccctgctcctctatcctcagcgccgagcccctccgtcctgtttctggcagcgaaagcccagcccctgcggcaagctacctactcgatggaatgcccagccgcttgtcggatctacgcagcccctgcgcgacgtcacaaactccgaacggttatacgcgcctcacacaagcatgcgctgaatttctcgctttcccaaccctatcgttttttgggtgtgtatggttttcccaggcagtcaggcgggataacaagcagaggtttagtctgttggaggaagatggcgagctgttgatccgggcgaaccagggacacacactaaaaaaatatagtctggaggtgacctcaatgtaattcaattagtgatggaacatttgggagtctactcattatgtatttcttctatctggaaaaacactcaagggatctttgtttagaggatggagacctaaatctgaccgaccttcattggtggataaatatgcagaaaaagattgcaacgtgatccgggtgtcagagattcagaaggtcttggacatcgccgacgagcgtagcctcattgacaccatcttcttctgctacctcgggtgcaatgcaagctaaggtggtcgacaatggtgttcgcggcggcgaactcgcagcgcagccaggtgatgaagccatcgcgctcgtcgacgagccaggcgacgggctcggccacggcggtgccgggggccggcgaggcgatgacggcggcggtggaggccatcgccgtgcgtccctcaccactgcgggccgcagcatagcccagccagcaatgccgaggtccatcaccactgggaaccgtcgtccggaccctctcccatcccgcacccattcctgtcctctgtctctgcgatgcgcttagcgccctcaccacttccacctccccagcctggctagcagcggcggagggaagaagtaccccactctggctagcagcggcggtggcagctcagattagtacggcgctgccccttcttcccccacctgtctttggatctacaaccgcccacccgtcttcggagctgttgtattcctccccacttgcttatctattcctctcaaaatagtgatggatttcggtcctcggatttttaccaatcggacaaatccagtgaattatgttgagaaattgttatactgaatttagtggtaggttggtattacgacctgcaaaacttaggtttggttatatgtttctttactggcctgtaggtacgacgttcttacatactttaagtaccttgacacattgagagtattagaaggtgtctgatcaatttggatacttgctgatccaagccataggtatttgagcttgcaaagaggtgcgtttaccaggcagtgagaacaaatggtgttaatgttaacacaaatattaagggcacactgacaaagaagaggaaagtggcacataatgctacgaagaaaggaaaagaaatcggtagtggctcttggccccttcattttgcaggttcctccaagagaatccagagtatgttgcacagggtgtaactttagctcagttttcgttccagatacctatacctctgcggcaggactatgtcaaaaagaaaccgaagttgataaatgcaagtgatgaagcaagtacaattacctctaagtcttctgaaccagacgaagtgaaccctatagcctgggcagttcctacaaaacatgagggcgatgccagtgaagaagcttctctcgccgatgagacacttgcatcagaagtagtgctaacccggaagaggaaaataggaagctctttgtcagtagagccaaaccatctctctgatgaacttgaaccaaagttggaggatgcttagaacggggagacgtctaactgaaaagtaaaagtgggcagcgtcgtgatgccaacttacccccctgccatggttttattggtcctctgcttgtttctcgttttccttgggagttagcttctctgttttatgtggtcgcacacggccttatttgtagtattacaccacaaaagctggctgacccccactgagggagggtgattgatgcaagcattgtgtatgatccttggacaagggaatcacggatgtttggttttgtcaccatggctgctactaaggaggcagatcactgcatcaaatatctggactgttctgtgttgcaaggtcaggtcataattgtttagaagaacattttattgttttgtcttcaccaccgagaatccaagagcgcctcccatagcctccacatccacaaggtcctgcttgactgcgacgacgtccaggctgatgccctcatcgtggatcgactcgcctcgctctagaaggagtggcccctctggagttgaatatgcagttataaccaatttttaccccttttatcctagaagagttgccaagacacggtataagaccatgataatagactaagagaggatttgtctctaattattatatgttttatttatgcagtcccatgagaactttgagtatttgcagattgatttattaatatattaaagttaaagattgtatgtgttgagtatgtatccattcttgttggaagtgtcttgcaattccaatccaaggatgtataaaagactgcatgggctaagtatgtgttttttcatgtatttggagtatatatactttttgttgcttgagaacatgtatgtacatacatagaagcttgtcaattgtgtgaacttgagttgatccctgtctaacctgagtatatatatatattttgttgcttgagaacgagtatgtacaatagaggcttgacaattgtgtgaacttgagttgaacatgaattttgat

SEQ ID NO: 201588 - DNA, 3934 bp, Zea Mays
cccacgacgacccacgacgcctgcgtcggccctgcccgaactggcgtgcagagcagtgctccacgacgccgccaccacctgccccagcagcggcacgctccgacaacggcgaccatggcggtgcgggcgcggcggctggggagtctgttccctgctagatccagtagatggctgactcatcgaggccctccgtgaacatcatctgcgccggtcgtctgctcggctgcagtggattaggaggcttggtgtggaggcgctcagcagcgggtggaagttcccgtcaaggagtctgtcccgtcaaggagaccgtcgtgccctggacggagtcagagcaagagtcgatcaacattttcctcacgatgattgagcgacacaggcacaattcaccatgatcccatcccccactcaaacctgcaaaatcctgtagccgaacatctcgatggtctcacgtgccattcctttctacaggaataggcctataactgatttcaataagtttatgctgcatttcattcagtgtgtttggatgcatatagagaacacgaagtttaatgtgtttggtgcataatgagaattgaggaaatgggacattctagcatgctatgtgaattgtgaaaggctatagattaatgtgtacagcattttttatgttggaactgcctacatttatgttggtgccgctcccacgagcgcaccaggacgccggcttggaggtacttgcacacaagggtcgagctcggacgtcgtagcggtgcggagggcctcggccgtagcatgccccgccccgccgcgcatgcctgcgcggtcggtgtcccgcagcacccacaccgagtggcctgtcttcaaagtcgtcctcatcctctcctcctggctcaacgagaccatcaacgtctggatgttcatagacctgctcgggttcatgctgttcttcgacctcaccctggtgcacctcggccagtacttcaccaaggtgtctggtatgattgggcacctctcctgctccggcgaccgagctccaaccagggacgtctagcgctagcgcccaggacgcacgaccccctgctcctctatcctcagcgccgagcccctccgtcctgtttctggcagcgaaagcccagcccctgcggcaagctacctactcgatggaatgcccagccgcttgtcggatctacgcagcccctgcgcgacgtcacaaactccgaacggttatacgcgcctcacacaagcatgcgctgaatttctcgctttcccaaccctatcgttttttgggtgtgtatggttttcccaggcagtcaggcgggataacaagcagaggtttagtctgttggaggaagatggcgagctgttgatccgggcgaaccagggacacacactaaaaaaatatagtctggaggtgacctcaatgtaattcaattagtgatggaacatttgggagtctactcattatgtatttcttctatctggaaaaacactcaagggatctttgtttagaggatggagacctaaatctgaccgaccttcattggtggataaatatgcagaaaaagaggagaccttcacctaaaaaacaaagatatatgttgaaatggttctttttaaaagattgcaacgtgatccgggtgtcagagattcagaaggtcttggacatcgccgacgagcgtagcctcattgacaccatcttcttctgctacctcgggtgcaatgcaagctaaggtggtcgacaatggtgttcgcggcggcgaactcgcagcgcagccaggtgatgaagccatcgcgctcgtcgacgagccaggcgacgggctcggccacggcggtgccgggggccggcgaggcgatgacggcggcggtggaggccatcgccgtgcgtccctcaccactgcgggccgcagcatagcccagccagcaatgccgaggtccatcaccactgggaaccgtcgtccggaccctctcccatcccgcacccattcctgtcctctgtctctgcgatgcgcttagcgccctcaccacttccacctccccagcctggctagcagcggcggagggaagaagtaccccactctggctagcagcggcggtggcagctcagattagtacggcgctgccccttcttcccccacctgtctttggatctacaaccgcccacccgtcttcggagctgttgtattcctccccacttgcttatctattcctctcaaaatagtgatggatttcggtcctcggatttttaccaatcggacaaatccagtgaattatgttgagaaattgttatactgaatttagtggtaggttggtattacgacctgcaaaacttaggtttggttatatgtttctttactggcctgtaggtacgacgttcttacatactttaagtaccttgacacattgagagtattagaaggtgtctgatcaatttggatacttgctgatccaagccataggtatttgagcttgcaaagaggtgcgtttaccaggcagtgagaacaaatggtgttaatgttaacacaaatattaagggcacactgacaaagaagaggaaagtggcacataatgctacgaagaaaggaaaagaaatcggtagtggctcttggccccttcattttgcaggttcctccaagagaatccagagtatgttgcacagggtgtaactttagctcagttttcgttccagatacctatacctctgcggcaggactatgtcaaaaagaaaccgaagttgataaatgcaagtgatgaagcaagtacaattacctctaagtcttctgaaccagacgaagtgaaccctatagcctgggcagttcctacaaaacatgagggcgatgccagtgaagaagcttctctcgccgatgagacacttgcatcagaagtagtgctaacccggaagaggaaaataggaagctctttgtcagtagagccaaaccatctctctgatgaacttgaaccaaagttggaggatgcttagaacggggagacgtctaactgaaaagtaaaagtgggcagcgtcgtgatgccaacttacccccctgccatggttttattggtcctctgcttgtttctcgttttccttgggagttagcttctctgttttatgtggtcgcacacggccttatttgtagtattacaccacaaaagctggctgacccccactgagggagggtgattgatgcaagcattgtgtatgatccttggacaagggaatcacggatgtttggttttgtcaccatggctgctactaaggaggcagatcactgcatcaaatatctggactgttctgtgttgcaaggtcaggtcataattgtttagaagaacattttattgttttgtcttcaccaccgagaatccaagagcgcctcccatagcctccacatccacaaggtcctgcttgactgcgacgacgtccaggctgatgccctcatcgtggatcgactcgcctcgctctagaaggagtggcccctctggagttgaatatgcagttataaccaatttttaccccttttatcctagaagagttgccaagacacggtataagaccatgataatagactaagagaggatttgtctctaattattatatgttttatttatgcagtcccatgagaactttgagtatttgcagattgatttattaatatattaaagttaaagattgtatgtgttgagtatgtatccattcttgttggaagtgtcttgcaattccaatccaaggatgtataaaagactgcatgggctaagtatgtgttttttcatgtatttggagtatatatactttttgttgcttgagaacatgtatgtacatacatagaagcttgtcaattgtgtgaacttgagttgatccctgtctaacctgagtatatatatatattttgttgcttgagaacgagtatgtacaatagaggcttgacaattgtgtgaacttgagttgaacatgaattttgat

SEQ ID NO: 201589 - DNA, 3590 bp, Zea Mays
cccacgacgacccacgacgcctgcgtcggccctgcccgaactggcgtgcagagcagtgctccacgacgccgccaccacctgccccagcagcggcacgctccgacaacggcgaccatggcggtgcgggcgcggcggctggggagtctgttccctgctagatccagtagatggctgactcatcgaggccctccgtgaacatcatctgcgccggtcgtctgctcggctgcagtggattaggaggcttggtgtggaggcgctcagcagcgggtggaagttcccgtcaaggagtctgtcccgtcaaggagaccgtcgtgccctggacggagtcagagcaagagtcgatcaacattttcctcacgatgattgagcgacacaggcacaattcaccatgatcccatcccccactcaaacctgcaaaatcctgtagccgaacatctcgatggtctcacgtgccattcctttctacaggaataggcctataactgatttcaataagtttatgctgcatttcattcagtgtgtttggatgcatatagagaacacgaagtttaatgtgtttggtgcataatgagaattgaggaaatgggacattctagcatgctatgtgaattgtgaaaggctatagattaatgtgtacagcattttttatgttggaactgcctacatttatgttggtgccgctcccacgagcgcaccaggacgccggcttggaggtacttgcacacaagggtcgagctcggacgtcgtagcggtgcggagggcctcggccgtagcatgccccgccccgccgcgcatgcctgcgcggtcggtgtcccgcagcacccacaccgagtggcctgtcttcaaagtcgtcctcatcctctcctcctggctcaacgagaccatcaacgtctggatgttcatagacctgctcgggttcatgctgttcttcgacctcaccctggtgcacctcggccagtacttcaccaaggtgtctggtatgattgggcacctctcctggcagtcaggcgggataacaagcagaggtttagtctgttggaggaagatggcgagctgttgatccgggcgaaccagggacacacactaaaaaaatatagtctggaggtgacctcaatgtaattcaattagtgatggaacatttgggagtctactcattatgtatttcttctatctggaaaaacactcaagggatctttgtttagaggatggagacctaaatctgaccgaccttcattggtggataaatatgcagaaaaagattgcaacgtgatccgggtgtcagagattcagaaggtcttggacatcgccgacgagcgtagcctcattgacaccatcttcttctgctacctcgggtgcaatgcaagctaaggtggtcgacaatggtgttcgcggcggcgaactcgcagcgcagccaggtgatgaagccatcgcgctcgtcgacgagccaggcgacgggctcggccacggcggtgccgggggccggcgaggcgatgacggcggcggtggaggccatcgccgtgcgtccctcaccactgcgggccgcagcatagcccagccagcaatgccgaggtccatcaccactgggaaccgtcgtccggaccctctcccatcccgcacccattcctgtcctctgtctctgcgatgcgcttagcgccctcaccacttccacctccccagcctggctagcagcggcggagggaagaagtaccccactctggctagcagcggcggtggcagctcagattagtacggcgctgccccttcttcccccacctgtctttggatctacaaccgcccacccgtcttcggagctgttgtattcctccccacttgcttatctattcctctcaaaatagtgatggatttcggtcctcggatttttaccaatcggacaaatccagtgaattatgttgagaaattgttatactgaatttagtggtaggttggtattacgacctgcaaaacttaggtttggttatatgtttctttactggcctgtaggtacgacgttcttacatactttaagtaccttgacacattgagagtattagaaggtgtctgatcaatttggatacttgctgatccaagccataggtatttgagcttgcaaagaggtgcgtttaccaggcagtgagaacaaatggtgttaatgttaacacaaatattaagggcacactgacaaagaagaggaaagtggcacataatgctacgaagaaaggaaaagaaatcggtagtggctcttggccccttcattttgcaggttcctccaagagaatccagagtatgttgcacagggtgtaactttagctcagttttcgttccagatacctatacctctgcggcaggactatgtcaaaaagaaaccgaagttgataaatgcaagtgatgaagcaagtacaattacctctaagtcttctgaaccagacgaagtgaaccctatagcctgggcagttcctacaaaacatgagggcgatgccagtgaagaagcttctctcgccgatgagacacttgcatcagaagtagtgctaacccggaagaggaaaataggaagctctttgtcagtagagccaaaccatctctctgatgaacttgaaccaaagttggaggatgcttagaacggggagacgtctaactgaaaagtaaaagtgggcagcgtcgtgatgccaacttacccccctgccatggttttattggtcctctgcttgtttctcgttttccttgggagttagcttctctgttttatgtggtcgcacacggccttatttgtagtattacaccacaaaagctggctgacccccactgagggagggtgattgatgcaagcattgtgtatgatccttggacaagggaatcacggatgtttggttttgtcaccatggctgctactaaggaggcagatcactgcatcaaatatctggactgttctgtgttgcaaggtcaggtcataattgtttagaagaacattttattgttttgtcttcaccaccgagaatccaagagcgcctcccatagcctccacatccacaaggtcctgcttgactgcgacgacgtccaggctgatgccctcatcgtggatcgactcgcctcgctctagaaggagtggcccctctggagttgaatatgcagttataaccaatttttaccccttttatcctagaagagttgccaagacacggtataagaccatgataatagactaagagaggatttgtctctaattattatatgttttatttatgcagtcccatgagaactttgagtatttgcagattgatttattaatatattaaagttaaagattgtatgtgttgagtatgtatccattcttgttggaagtgtcttgcaattccaatccaaggatgtataaaagactgcatgggctaagtatgtgttttttcatgtatttggagtatatatactttttgttgcttgagaacatgtatgtacatacatagaagcttgtcaattgtgtgaacttgagttgatccctgtctaacctgagtatatatatatattttgttgcttgagaacgagtatgtacaatagaggcttgacaattgtgtgaacttgagttgaacatgaattttgat

SEQ ID NO: 201590 - DNA, 3804 bp, Zea Mays
cccacgacgacccacgacgcctgcgtcggccctgcccgaactggcgtgcagagcagtgctccacgacgccgccaccacctgccccagcagcggcacgctccgacaacggcgaccatggcggtgcgggcgcggcggctggggagtctgttccctgctagatccagtagatggctgactcatcgaggccctccgtgaacatcatctgcgccggtcgtctgctcggctgcagtggattaggaggcttggtgtggaggcgctcagcagcgggtggaagttcccgtcaaggagtctgtcccgtcaaggagaccgtcgtgccctggacggagtcagagcaagagtcgatcaacattttcctcacgatgattgagcgacacaggcacaattcaccatgatcccatcccccactcaaacctgcaaaatcctgtagccgaacatctcgatggtctcacgtgccattcctttctacaggaataggcctataactgatttcaataagtttatgctgcatttcattcagtgtgtttggatgcatatagagaacacgaagtttaatgtgtttggtgcataatgagaattgaggaaatgggacattctagcatgctatgtgaattgtgaaaggctatagattaatgtgtacagcattttttatgttggaactgcctacatttatgttggtgccgctcccacgagcgcaccaggacgccggcttggaggtacttgcacacaagggtcgagctcggacgtcgtagcggtgcggagggcctcggccgtagcatgccccgccccgccgcgcatgcctgcgcggtcggtgtcccgcagcacccacaccgagtggcctgtcttcaaagtcgtcctcatcctctcctcctggctcaacgagaccatcaacgtctggatgttcatagacctgctcgggttcatgctgttcttcgacctcaccctggtgcacctcggccagtacttcaccaaggtgtctggtatgattgggcacctctcctgctccggcgaccgagctccaaccagggacgtctagcgctagcgcccaggacgcacgaccccctgctcctctatcctcagcgccgagcccctccgtcctgtttctggcagcgaaagcccagcccctgcggcaagctacctactcgatggaatgcccagccgcttgtcggatctacgcagcccctgcgcgacgtcacaaactccggcagtcaggcgggataacaagcagaggtttagtctgttggaggaagatggcgagctgttgatccgggcgaaccagggacacacactaaaaaaatatagtctggaggtgacctcaatgtaattcaattagtgatggaacatttgggagtctactcattatgtatttcttctatctggaaaaacactcaagggatctttgtttagaggatggagacctaaatctgaccgaccttcattggtggataaatatgcagaaaaagattgcaacgtgatccgggtgtcagagattcagaaggtcttggacatcgccgacgagcgtagcctcattgacaccatcttcttctgctacctcgggtgcaatgcaagctaaggtggtcgacaatggtgttcgcggcggcgaactcgcagcgcagccaggtgatgaagccatcgcgctcgtcgacgagccaggcgacgggctcggccacggcggtgccgggggccggcgaggcgatgacggcggcggtggaggccatcgccgtgcgtccctcaccactgcgggccgcagcatagcccagccagcaatgccgaggtccatcaccactgggaaccgtcgtccggaccctctcccatcccgcacccattcctgtcctctgtctctgcgatgcgcttagcgccctcaccacttccacctccccagcctggctagcagcggcggagggaagaagtaccccactctggctagcagcggcggtggcagctcagattagtacggcgctgccccttcttcccccacctgtctttggatctacaaccgcccacccgtcttcggagctgttgtattcctccccacttgcttatctattcctctcaaaatagtgatggatttcggtcctcggatttttaccaatcggacaaatccagtgaattatgttgagaaattgttatactgaatttagtggtaggttggtattacgacctgcaaaacttaggtttggttatatgtttctttactggcctgtaggtacgacgttcttacatactttaagtaccttgacacattgagagtattagaaggtgtctgatcaatttggatacttgctgatccaagccataggtatttgagcttgcaaagaggtgcgtttaccaggcagtgagaacaaatggtgttaatgttaacacaaatattaagggcacactgacaaagaagaggaaagtggcacataatgctacgaagaaaggaaaagaaatcggtagtggctcttggccccttcattttgcaggttcctccaagagaatccagagtatgttgcacagggtgtaactttagctcagttttcgttccagatacctatacctctgcggcaggactatgtcaaaaagaaaccgaagttgataaatgcaagtgatgaagcaagtacaattacctctaagtcttctgaaccagacgaagtgaaccctatagcctgggcagttcctacaaaacatgagggcgatgccagtgaagaagcttctctcgccgatgagacacttgcatcagaagtagtgctaacccggaagaggaaaataggaagctctttgtcagtagagccaaaccatctctctgatgaacttgaaccaaagttggaggatgcttagaacggggagacgtctaactgaaaagtaaaagtgggcagcgtcgtgatgccaacttacccccctgccatggttttattggtcctctgcttgtttctcgttttccttgggagttagcttctctgttttatgtggtcgcacacggccttatttgtagtattacaccacaaaagctggctgacccccactgagggagggtgattgatgcaagcattgtgtatgatccttggacaagggaatcacggatgtttggttttgtcaccatggctgctactaaggaggcagatcactgcatcaaatatctggactgttctgtgttgcaaggtcaggtcataattgtttagaagtactctacacagaacattttattgttttgtcttcaccaccgagaatccaagagcgcctcccatagcctccacatccacaaggtcctgcttgactgcgacgacgtccaggctgatgccctcatcgtggatcgactcgcctcgctctagaaggagtggcccctctggagttgaatatgcagttataaccaatttttaccccttttatcctagaagagttgccaagacacggtataagaccatgataatagactaagagaggatttgtctctaattattatatgttttatttatgcagtcccatgagaactttgagtatttgcagattgatttattaatatattaaagttaaagattgtatgtgttgagtatgtatccattcttgttggaagtgtcttgcaattccaatccaaggatgtataaaagactgcatgggctaagtatgtgttttttcatgtatttggagtatatatactttttgttgcttgagaacatgtatgtacatacatagaagcttgtcaattgtgtgaacttgagttgatccctgtctaacctgagtatatatatatattttgttgcttgagaacgagtatgtacaatagaggcttgacaattgtgtgaacttgagttgaacatgaattttgat

SEQ ID NO: 201591 - DNA, 3832 bp, Zea Mays
cccacgacgacccacgacgcctgcgtcggccctgcccgaactggcgtgcagagcagtgctccacgacgccgccaccacctgccccagcagcggcacgctccgacaacggcgaccatggcggtgcgggcgcggcggctggggagtctgttccctgctagatccagtagatggctgactcatcgaggccctccgtgaacatcatctgcgccggtcgtctgctcggctgcagtggattaggaggcttggtgtggaggcgctcagcagcgggtggaagttcccgtcaaggagtctgtcccgtcaaggagaccgtcgtgccctggacggagtcagagcaagagtcgatcaacattttcctcacgatgattgagcgacacaggcacaattcaccatgatcccatcccccactcaaacctgcaaaatcctgtagccgaacatctcgatggtctcacgtgccattcctttctacaggaataggcctataactgatttcaataagtttatgctgcatttcattcagtgtgtttggatgcatatagagaacacgaagtttaatgtgtttggtgcataatgagaattgaggaaatgggacattctagcatgctatgtgaattgtgaaaggctatagattaatgtgtacaggacgccggcttggaggtacttgcacacaagggtcgagctcggacgtcgtagcggtgcggagggcctcggccgtagcatgccccgccccgccgcgcatgcctgcgcggtcggtgtcccgcagcacccacaccgagtggcctgtcttcaaagtcgtcctcatcctctcctcctggctcaacgagaccatcaacgtctggatgttcatagacctgctcgggttcatgctgttcttcgacctcaccctggtgcacctcggccagtacttcaccaaggtgtctggtatgattgggcacctctcctgctccggcgaccgagctccaaccagggacgtctagcgctagcgcccaggacgcacgaccccctgctcctctatcctcagcgccgagcccctccgtcctgtttctggcagcgaaagcccagcccctgcggcaagctacctactcgatggaatgcccagccgcttgtcggatctacgcagcccctgcgcgacgtcacaaactccgaacggttatacgcgcctcacacaagcatgcgctgaatttctcgctttcccaaccctatcgttttttgggtgtgtatggttttcccaggcagtcaggcgggataacaagcagaggtttagtctgttggaggaagatggcgagctgttgatccgggcgaaccagggacacacactaaaaaaatatagtctggaggtgacctcaatgtaattcaattagtgatggaacatttgggagtctactcattatgtatttcttctatctggaaaaacactcaagggatctttgtttagaggatggagacctaaatctgaccgaccttcattggtggataaatatgcagaaaaagattgcaacgtgatccgggtgtcagagattcagaaggtcttggacatcgccgacgagcgtagcctcattgacaccatcttcttctgctacctcgggtgcaatgcaagctaaggtggtcgacaatggtgttcgcggcggcgaactcgcagcgcagccaggtgatgaagccatcgcgctcgtcgacgagccaggcgacgggctcggccacggcggtgccgggggccggcgaggcgatgacggcggcggtggaggccatcgccgtgcgtccctcaccactgcgggccgcagcatagcccagccagcaatgccgaggtccatcaccactgggaaccgtcgtccggaccctctcccatcccgcacccattcctgtcctctgtctctgcgatgcgcttagcgccctcaccacttccacctccccagcctggctagcagcggcggagggaagaagtaccccactctggctagcagcggcggtggcagctcagattagtacggcgctgccccttcttcccccacctgtctttggatctacaaccgcccacccgtcttcggagctgttgtattcctccccacttgcttatctattcctctcaaaatagtgatggatttcggtcctcggatttttaccaatcggacaaatccagtgaattatgttgagaaattgttatactgaatttagtggtaggttggtattacgacctgcaaaacttaggtttggttatatgtttctttactggcctgtaggtacgacgttcttacatactttaagtaccttgacacattgagagtattagaaggtgtctgatcaatttggatacttgctgatccaagccataggtatttgagcttgcaaagaggtgcgtttaccaggcagtgagaacaaatggtgttaatgttaacacaaatattaagggcacactgacaaagaagaggaaagtggcacataatgctacgaagaaaggaaaagaaatcggtagtggctcttggccccttcattttgcaggttcctccaagagaatccagagtatgttgcacagggtgtaactttagctcagttttcgttccagatacctatacctctgcggcaggactatgtcaaaaagaaaccgaagttgataaatgcaagtgatgaagcaagtacaattacctctaagtcttctgaaccagacgaagtgaaccctatagcctgggcagttcctacaaaacatgagggcgatgccagtgaagaagcttctctcgccgatgagacacttgcatcagaagtagtgctaacccggaagaggaaaataggaagctctttgtcagtagagccaaaccatctctctgatgaacttgaaccaaagttggaggatgcttagaacggggagacgtctaactgaaaagtaaaagtgggcagcgtcgtgatgccaacttacccccctgccatggttttattggtcctctgcttgtttctcgttttccttgggagttagcttctctgttttatgtggtcgcacacggccttatttgtagtattacaccacaaaagctggctgacccccactgagggagggtgattgatgcaagcattgtgtatgatccttggacaagggaatcacggatgtttggttttgtcaccatggctgctactaaggaggcagatcactgcatcaaatatctggactgttctgtgttgcaaggtcaggtcataattgtttagaagtactctacacagaacattttattgttttgtcttcaccaccgagaatccaagagcgcctcccatagcctccacatccacaaggtcctgcttgactgcgacgacgtccaggctgatgccctcatcgtggatcgactcgcctcgctctagaaggagtggcccctctggagttgaatatgcagttataaccaatttttaccccttttatcctagaagagttgccaagacacggtataagaccatgataatagactaagagaggatttgtctctaattattatatgttttatttatgcagtcccatgagaactttgagtatttgcagattgatttattaatatattaaagttaaagattgtatgtgttgagtatgtatccattcttgttggaagtgtcttgcaattccaatccaaggatgtataaaagactgcatgggctaagtatgtgttttttcatgtatttggagtatatatactttttgttgcttgagaacatgtatgtacatacatagaagcttgtcaattgtgtgaacttgagttgatccctgtctaacctgagtatatatatatattttgttgcttgagaacgagtatgtacaatagaggcttgacaattgtgtgaacttgagttgaacatgaattttgat

SEQ ID NO: 201592 - DNA, 3480 bp, Zea Mays
cccacgacgacccacgacgcctgcgtcggccctgcccgaactggcgtgcagagcagtgctccacgacgccgccaccacctgccccagcagcggcacgctccgacaacggcgaccatggcggtgcgggcgcggcggctggggagtctgttccctgctagatccagtagatggctgactcatcgaggccctccgtgaacatcatctgcgccggtcgtctgctcggctgcagtggattaggaggcttggtgtggaggcgctcagcagcgggtggaagttcccgtcaaggagtctgtcccgtcaaggagaccgtcgtgccctggacggagtcagagcaagagtcgatcaacattttcctcacgatgattgagcgacacaggcacaattcaccatgatcccatcccccactcaaacctgcaaaatcctgtagccgaacatctcgatggtctcacgtgccattcctttctacaggaataggcctataactgatttcaataagtttatgctgcatttcattcagtgtgtttggatgcatatagagaacacgaagtttaatgtgtttggtgcataatgagaattgaggaaatgggacattctagcatgctatgtgaattgtgaaaggctatagattaatgtgtacagcattttttatgttggaactgcctacatttatgttggtgccgctcccacgagcgcaccaggacgccggcttggaggtacttgcacacaagggtcgagctcggacgtcgtagcggtgcggagggcctcggccgtagcatgccccgccccgccgcgcatgcctgcgcggtcggtgtcccgcagcacccacaccgagtggcctgtcttcaaagtcgtcctcatcctctcctcctggctcaacgagaccatcaacgtctggatgttcatagacctgctcgggttcatgctgttcttcgacctcaccctggtgcacctcggccagtacttcaccaaggtgtctggtatgattgggcacctctcctgctccggcgaccgagctccaaccagggacgtctagcgctagcgcccaggacgcacgaccccctgctcctctatcctcagcgccgagcccctccgtcctgtttctggcagcgaaagcccagcccctgcggcaagctacctactcgatggaatgcccagccgcttgtcggatctacgcagcccctgcgcgacgtcacaaactccggcagtcaggcgggataacaagcagaggtttagtctgttggaggaagatggcgagctgttgatccgggcgaaccagggacacacactaaaaaaatatagtctggaggtgacctcaatgtaattcaattagtgatggaacatttgggagtctactcattatgtatttcttctatctggaaaaacactcaagggatctttgtttagaggatggagacctaaatctgaccgaccttcattggtggataaatatgcagaaaaagaggagaccttcacctaaaaaacaaagatatatgttgaaatggttctttttaaaagattgcaacgtgatccgggtgtcagagattcagaaggtcttggacatcgccgacgagcgtagcctcattgacaccatcttcttctgctacctcgggtgcaatgcaagctaaggtggtcgacaatggtgttcgcggcggcgaactcgcagcgcagccaggtgatgaagccatcgcgctcgtcgacgagccaggcgacgggctcggccacggcggtgccgggggccggcgaggcgatgacggcggcggtggaggccatcgccgtgcgtccctcaccactgcgggccgcagcatagcccagccagcaatgccgaggtccatcaccactgggaaccgtcgtccggaccctctcccatcccgcacccattcctgtcctctgtctctgcgatgcgcttagcgccctcaccacttccacctccccagcctggctagcagcggcggagggaagaagtaccccactctggctagcagcggcggtggcagctcagattagtacggcgctgccccttcttcccccacctgtctttggatctacaaccgcccacccgtcttcggagctgttgtattcctccccacttgcttatctattcctctcaaaatagtgatggatttcggtcctcggatttttaccaatcggacaaatccagtgaattatgttgagaaattgttatactgaatttagtggtaggttggtattacgacctgcaaaacttaggtttggttatatgtttctttactggcctgtaggtacgacgttcttacatactttaagtaccttgacacattgagagtattagaaggtgtctgatcaatttggatacttgctgatccaagccataggtatttgagcttgcaaagaggtgcgtttaccaggcagtgagaacaaatggtgttaatgttaacacaaatattaagggcacactgacaaagaagaggaaagtggcacataatgctacgaagaaaggaaaagaaatcggtagtggctcttggccccttcattttgcaggttcctccaagagaatccagagtatgttgcacagggtgtaactttagctcagttttcgttccagatacctatacctctgcggcaggactatgtcaaaaagaaaccgaagttgataaatgcaagtgatgaagcaagtacaattacctctaagtcttctgaaccagacgaaggtgattgatgcaagcattgtgtatgatccttggacaagggaatcacggatgtttggttttgtcaccatggctgctactaaggaggcagatcactgcatcaaatatctggactgttctgtgttgcaaggtcaggtcataattgtttagaagtactctacacagaacattttattgttttgtcttcaccaccgagaatccaagagcgcctcccatagcctccacatccacaaggtcctgcttgactgcgacgacgtccaggctgatgccctcatcgtggatcgactcgcctcgctctagaaggagtggcccctctggagttgaatatgcagttataaccaatttttaccccttttatcctagaagagttgccaagacacggtataagaccatgataatagactaagagaggatttgtctctaattattatatgttttatttatgcagtcccatgagaactttgagtatttgcagattgatttattaatatattaaagttaaagattgtatgtgttgagtatgtatccattcttgttggaagtgtcttgcaattccaatccaaggatgtataaaagactgcatgggctaagtatgtgttttttcatgtatttggagtatatatactttttgttgcttgagaacatgtatgtacatacatagaagcttgtcaattgtgtgaacttgagttgatccctgtctaacctgagtatatatatatattttgttgcttgagaacgagtatgtacaatagaggcttgacaattgtgtgaacttgagttgaacatgaattttgat

SEQ ID NO: 201593 - DNA, 1382 bp, Zea Mays
agtggctcttggccccttcattttgcaggttcctccaagagaatccagagtatgttgcacagggtgtaactttagctcagttttcgttccagatacctatacctctgcggcaggactatgtcaaaaagaaaccgaagttgataaatgcaagtgatgaagcaagtacaattacctctaagtcttctgaaccagacgaaggtctctaattcgtgaaccctatagcctgggcagttcctacaaaacatgagggcgatgccagtgaagaagcttctctcgccgatgagacacttgcatcagaagtagtgctaacccggaagaggaaaataggaagctctttgtcagtagagccaaaccatctctctgatgaacttgaaccaaagttggaggatgcttagaacggggagacgtctaactgaaaagtaaaagtgggcagcgtcgtgatgccaacttacccccctgccatggttttattggtcctctgcttgtttctcgttttccttgggagttagcttctctgttttatgtggtcgcacacggccttatttgtagtattacaccacaaaagctggctgacccccactgagggagggtgattgatgcaagcattgtgtatgatccttggacaagggaatcacggatgtttggttttgtcaccatggctgctactaaggaggcagatcactgcatcaaatatctggactgttctgtgttgcaaggtcaggtcataattgtttagaagtactctacacagaacattttattgttttgtcttcaccaccgagaatccaagagcgcctcccatagcctccacatccacaaggtcctgcttgactgcgacgacgtccaggctgatgccctcatcgtggatcgactcgcctcgctctagaaggagtggcccctctggagttgaatatgcagttataaccaatttttaccccttttatcctagaagagttgccaagacacggtataagaccatgataatagactaagagaggatttgtctctaattattatatgttttatttatgcagtcccatgagaactttgagtatttgcagattgatttattaatatattaaagttaaagattgtatgtgttgagtatgtatccattcttgttggaagtgtcttgcaattccaatccaaggatgtataaaagactgcatgggctaagtatgtgttttttcatgtatttggagtatatatactttttgttgcttgagaacatgtatgtacatacatagaagcttgtcaattgtgtgaacttgagttgatccctgtctaacctgagtatatatatatattttgttgcttgagaacgagtatgtacaatagaggcttgacaattgtgtgaacttgagttgaacatgaattttgat

SEQ ID NO: 201594 - DNA, 1141 bp, Zea Mays
ttcgtgaaccctatagcctgggcagttcctacaaaacatgagggcgatgccagtgaagaagcttctctcgccgatgagacacttgcatcagaagtagtgctaacccggaagaggaaaataggaagctctttgtcagtagagccaaaccatctctctgatgaacttgaaccaaagttggaggatgcttagaacggggagacgtctaactgaaaagtaaaagtgggcagcgtcgtgatgccaacttacccccctgccatggttttattggtcctctgcttgtttctcgttttccttgggagttagcttctctgttttatgtggtcgcacacggccttatttgtagtattacaccacaaaagctggctgacccccactgagggagggtgattgatgcaagcattgtgtatgatccttggacaagggaatcacggatgtttggttttgtcaccatggctgctactaaggaggcagatcactgcatcaaatatctggactgttctgtgttgcaagaacattttattgttttgtcttcaccaccgagaatccaagagcgcctcccatagcctccacatccacaaggtcctgcttgactgcgacgacgtccaggctgatgccctcatcgtggatcgactcgcctcgctctagaaggagtggcccctctggagttgaatatgcagttataaccaatttttaccccttttatcctagaagagttgccaagacacggtataagaccatgataatagactaagagaggatttgtctctaattattatatgttttatttatgcagtcccatgagaactttgagtatttgcagattgatttattaatatattaaagttaaagattgtatgtgttgagtatgtatccattcttgttggaagtgtcttgcaattccaatccaaggatgtataaaagactgcatgggctaagtatgtgttttttcatgtatttggagtatatatactttttgttgcttgagaacatgtatgtacatacatagaagcttgtcaattgtgtgaacttgagttgatccctgtctaacctgagtatatatatatattttgttgcttgagaacgagtatgtacaatagaggcttgacaattgtgtgaacttgagttgaacatgaattttgat

SEQ ID NO: 201595 - DNA, 522 bp, Zea Mays
agccggtcagccggtcagccggtgccgcctgcgccccgcctgcgccctacctgcgaccctgcgtgactccatctccgccgctgcaatccgggtccacccctgcatctggtggttgttgatctggtgacctgcccacggcgactccaccagaagactaagatggctccagggaagaggtccgcatggacctcacagaaacccgaagaacctatgccaactgattacgagaaaataagggctatgaatatgatgaagaacaatcaattgtttcaacggctaggccttggacaactgaaatcactgatgactgctacagctgcaaacaacaaagacgactctcctcagcaatcagagagtttatatgatggtgaaaacactgacaattctaatgaagagttttgggttcgcaatgaatttgatatgcatatccttattgtattctacatattcaggaatcccaatgtcgtaacaatggtcgtgccaacttatccaatgatggtgatcagatctcaacaaaagtaa

SEQ ID NO: 201596 - DNA, 1533 bp, Zea Mays
gggtggatcagtggcgaagttggagctgctttcgttgtggggaaattgacccttgcaagagtattagtgatgaagatattcgcacgaccatccagaattctgggggtccaaaaggggctatgtttctgcccgaggtaccatttgagattcttgtgcggaagcagataggtcgcctacttgacccaagtcttcagtgtgcccagtttatctatgatgaattaatcaaagtatgtccacagtgcttaatcagcgaacttcagaaatttccagctcttaaaaagcggttgagtgaagtcgtttgcagtttcttgagagatggtcttcgacctgcagaaacaatgataacccatatcatcgaaatggagatggattatataaatacttcgcacccaagctttgttggaggcaccaaggttgttgaacttgcaaagcatgaagttctacctcccaaaacatcagcttcactatcaggtcgtaaggatggtactattgttggttctgagatacaattagcagccgaaagaagccaaaagtcacgtgctgttttcgcaagagatgcaatcagaagagtaacatctgaacaggcttctgtggaagcagaaacaagtctgactggtggtaatcagataggtaattcacaggttggtgagagttcaagcaaattaccctcaatcattcctctaaaagagccacccattaccttgaagccatcagaaactgagcaggatgcaacagaggtagccgttgtaaaactattgatcaaatcctactatgacattgtaagaaaaaacattgaggatgcaatcccaaaagctgtaatgcactttctggtgaaccatacaaagcgggatctgcacaacttcctaattcgcaaactatatagagagaacctgctcaatgaattgatgagggaaactgatgaagtacttatgagaaggcagcgtatccaagaaatgcttgaaattcttgaacaggcacataggacacttgaggaattcccctttgaagttgataagcttgagaagggctacaaccttactgaacatgcaactggcctgtcaaaaatccatggagtcagcggggacagcacaaatgtcatttacacatcctcccctaattgctactctccacatcgagcgtctcatatggtcctatagagcagcatgtaccagtcaccaatggagcttacctttccgcaacagtggtatgtacctgttgccaatggagcttgcctttccacaccagtgttacgcgttaccgatggagcttgcctttccgcagcagtgtatggtagtcaccaaatgacctttgatcccaattcttgaggtttttaagcaatgagcttgagagttacctgtaaattctagttttgctagggagcaaactgctttctagtagaaagctatttgctggtagagaactttaattgtgtattcttgaaattgtcacagccgacatcaatgcggtagtgaatatgggcaacaaggtagttgtatagggctatatccaacataccaatttgccctagttatc

SEQ ID NO: 201597 - DNA, 1532 bp, Zea Mays
gggtggatcagtggcgaagttggagctgctttcgttgtggggaaattgacccttgcaagagtattagtgatgaagatattcgcacgaccatccagaattctgggggtccaaaaggggctatgtttctgcccgaggtaccatttgagattcttgtgcggaagcagataggtcgcctacttgacccaagtcttcagtgtgcccagtttatctatgatgaattaatcaaaattagccacagtgcttaatcagcgaacttcagaaatttccagctcttaaaaagcggttgagtgaagtcgtttgcagtttcttgagagatggtcttcgacctgcagaaacaatgataacccatatcatcgaaatggagatggattatataaatacttcgcacccaagctttgttggaggcaccaaggttgttgaacttgcaaagcatgaagttctacctcccaaaacatcagcttcactatcaggtcgtaaggatggtactattgttggttctgagatacaattagcagccgaaagaagccaaaagtcacgtgctgttttcgcaagagatgcaatcagaagagtaacatctgaacaggcttctgtggaagcagaaacaagtctgactggtggtaatcagataggtaattcacaggttggtgagagttcaagcaaattaccctcaatcattcctctaaaagagccacccattaccttgaagccatcagaaactgagcaggatgcaacagaggtagccgttgtaaaactattgatcaaatcctactatgacattgtaagaaaaaacattgaggatgcaatcccaaaagctgtaatgcactttctggtgaaccatacaaagcgggatctgcacaacttcctaattcgcaaactatatagagagaacctgctcaatgaattgatgagggaaactgatgaagtacttatgagaaggcagcgtatccaagaaatgcttgaaattcttgaacaggcacataggacacttgaggaattcccctttgaagttgataagcttgagaagggctacaaccttactgaacatgcaactggcctgtcaaaaatccatggagtcagcggggacagcacaaatgtcatttacacatcctcccctaattgctactctccacatcgagcgtctcatatggtcctatagagcagcatgtaccagtcaccaatggagcttacctttccgcaacagtggtatgtacctgttgccaatggagcttgcctttccacaccagtgttacgcgttaccgatggagcttgcctttccgcagcagtgtatggtagtcaccaaatgacctttgatcccaattcttgaggtttttaagcaatgagcttgagagttacctgtaaattctagttttgctagggagcaaactgctttctagtagaaagctatttgctggtagagaactttaattgtgtattcttgaaattgtcacagccgacatcaatgcggtagtgaatatgggcaacaaggtagttgtatagggctatatccaacataccaatttgccctagttatc

SEQ ID NO: 201598 - DNA, 1485 bp, Zea Mays
aggaaattgacccttgcaagagtattagtgatgaagatattcgcacgaccatccagaattctgggggtccaaaaggggctatgtttctgcccgaggtaccatttgagattcttgtgcggaagcagataggtcgcctacttgacccaagtcttcagtgtgcccagtttatctatgatgaattaatcaaaattagccacagtgcttaatcagcgaacttcagaaatttccagctcttaaaaagcggttgagtgaagtcgtttgcagtttcttgagagatggtcttcgacctgcagaaacaatgataacccatatcatcgaaatggagatggattatataaatacttcgcacccaagctttgttggaggcaccaaggttgttgaacttgcaaagcatgaagttctacctcccaaaacatcagcttcactatcaggatggtactattgttggttctgagatacaattagcagccgaaagaagccaaaagtcacgtgctgttttcgcaagagatgcaatcagaagagtaacatctgaacaggcttctgtggaagcagaaacaagtctgactggtggtaatcagataggtaattcacaggttggtgagagttcaagcaaattaccctcaatcattcctctaaaagagccacccattaccttgaagccatcagaaactgagcaggatgcaacagaggtagccgttgtaaaactattgatcaaatcctactatgacattgtaagaaaaaacattgaggatgcaatcccaaaagctgtaatgcactttctggtgaaccatacaaagcgggatctgcacaacttcctaattcgcaaactatatagagagaacctgctcaatgaattgatgagggaaactgatgaagtacttatgagaaggcagcgtatccaagaaatgcttgaaattcttgaacaggcacataggacacttgaggaattcccctttgaagttgataagcttgagaagggctacaaccttactgaacatgcaactggcctgtcaaaaatccatggagtcagcggggacagcacaaatgtcatttacacatcctcccctaattgctactctccacatcgagcgtctcatatggtcctatagagcagcatgtaccagtcaccaatggagcttacctttccgcaacagtggtatgtacctgttgccaatggagcttgcctttccacaccagtgttacgcgttaccgatggagcttgcctttccgcagcagtgtatggtagtcaccaaatgacctttgatcccaattcttgaggtttttaagcaatgagcttgagagttacctgtaaattctagttttgctagggagcaaactgctttctagtagaaagctatttgctggtagagaactttaattgtgtattcttgaaattgtcacagccgacatcaatgcggtagtgaatatgggcaacaaggtagttgtatagggctatatccaacataccaatttgccctagttatc

SEQ ID NO: 201599 - DNA, 4423 bp, Zea Mays
gtgccctccagaataccaaattccccgaccttcgccgagcttctccaacgctccagcggttgatgtccgtcccaccgcggctctccgtcgatttctacgatgacgacctaatgtagaagtccgagagtaccagaagtatatggttgaaaaggctctgtttaccaatacgttaatagctttgccaactggacttggcaaaacttttattgctgcggtagtgatgtacaactactttcgatggtttcccgaaggaaaaataatatttacctgcccttcacgtcctcttgttactcagcaaattgaggcatgtcacaatacagtgggaataccacaggagtggataatagatatgaaaggagatcaatgcccttctattcgatcagttcactggaagtcaaagagagtgttctttgtcactccacaagttcttcagaatgatatacaatctggtatatgcatggtacaacaaatagtttgcttagtgatagatgaggctcatcgagcgtcaggaaattatgcatactgcatggttatccgagagttgttggcagctcgtgtgcctttaaggattttagctctaactgctacaccagggtccaagcattcagatatccaaagtgttatagacaatttaaacatttcggagctgatttattgtgatgaagaagattctagagtgaaccaatatgttaacacacgcaaagttgaacttgtgcaggtcccttttggcagtgatgctactcaagtcgctgatatgcttttggatattatacgcccacatattaatcggttgcgtgatgctggtgtgattgaccatcgggactattcaaattggacccaatttgaactgctgaaatttaaggataaattcaaggaagtacccccaccaaacatccatgaaatcgagagaggggaaattgaaagatcttttgtaattcttggcccactttgtcacacaaggaagttgcttttgagccatggaacccaatttgcacatgggtatcttgacaaacgattgaagggagggtcattgaatttgatgcacaagaacgaattcttttggcgattaaaagaaaagatgaagctttcctcatctcacagtattactccaaaagtacaggaattgaaaaggctgatggttgagcactttaatactgattccaatttgaaggactcaaggattattatattttcccattaccgagaaagtgtcaatgaaatatattgctcactacaggatattgatgataaacttgtcagacctgttgaattcattggtcaaagctcagcaggtaaccaactgaaggggcaaagccaaaaaactcaacaagctattttgaagaaattccgatctggggtatataatgttttggtggcaacatcaattggcgaggaaggacttgatattattgaggttgatctcgtgatctgtttcgatgccaatgtctcaccattaaggatgattcaacggatgggaagaaccgggagaaagaatgaaggtcgagttgtggttttggcttatgaaggtcaggaattgcaggggtacagaaagaaacaaggagattgtcgaaccatgaggaagctattgcataacagtgagagatttgaataccatgctagtcctaggatggttccacatgtctataaaccagaagttaagtatgttaagttgacaatagacaagtatattcctcacgcaaagaaaatgagggttgccgcaaaagaagcctcgccaattccatggaagatgtcggaggcagacggtcaaatgattactaggtactttagtgtgtgcaaagaagaagtttggaggccgtcccttgtggcatttcctagatttcagctttatccaagtgtcgttcacaaagttccacattcatttcggacaacagatatgctaactgatgctatgaagcaacttcaagacccatctcttttcaggacaaagtgtgaaatccctttgcaagaacctgctaatgtttctgctgtggaggagggtctggaacatgaaggtctctatgctgctaatggaaatgaggaaatgcctcaggaatgtgacggtttagaagcttcatcgagtgtagtgtggaatgaaaatgtttctgtgccaggttctccagttaagaagtatccggttcacactttcttcagtggtgattatgtaactgtggatagaagaggcagcgttttgattacttatgtacctgtcctgcctcaaaaaattgcattcagtaaggacataaaaagtgcagtttggaataacaaagatcagaacaaagccaaaccttacagatcagcagcaggcgtctgtaggacaacagttgaatttgtccttggtaccaatacagacaaacatttgtttgtggataatttatcaactgtagccatgcattcccctgagtgctcttggcatggtgacaatgttgatgacaatcatgtgcttactactgtaccatccaaaacactgacaagcccaagggagaaaatggacacaccctgcaatgttaaactgccagagtccacctattcatatcaggaagacatggagcttaattcaaggctaacagtatatatggaagaaggaattgttcctgagtctccagtggttgaagttagccacctacgtctagagatggatgaagctgcagactttggagctgtgccaaagcgtggttctccaaagtcacgtgatgagagggctcatgccaatgtagctggaagtcacaaaggacctttgaactttgagaaaaacgatcaattgctttgtggggaaaacgagtttgatggatcatcaaggttgtatatgctagatcagactcgagccaaaacagaagagccaatgcatccttcaaatgtgaagatggctactactacaagacatactcctgggaatatgctgtgtgatagtttctcaggtgattatcagcttaggtcagggggggatgcatcgggatcagtccagcaagcacctaagtacagaagactatgcaaatatggtgacaagatcaaaagagtctcttccatatctttggatggctgtgatgataggtttgaagaatgcaatattgctaataaagataggccaaaccaaataaaacatgctatggggacaaaaaggaagaccaagaggcgtctagatgcctatattgacgaggaagtcggggtgtctgaagatgcatatgtttcagaggatgaggatgataatcagagtgaagataaatacgaagatagcttcattgatgatcaggcaactccaactgaatttacacaaactgaacaaggtgatcgacacaatggtgacatgatgggtttctacaggcaatcgttgtttactcagtccccagtagttctaccctcaaggtaccttgatgtttcttacaattctgcttctcggaccggaaattcaagctattcttcagaggctaggcacaattacactgagactcccaaagagattcaaacacaacatcataccataaacccaagcccatcgtacagttttgtacaggatcgatgtgaaagagggatcgccaattgtgaatcatcgactaagctggattgcagaaagagaaggctaagcttccagcaacctctggcgatccctgttataaaccttgaaccagaaccagcaccagaaccatctccacacgtcgccagcagagtcgctgatcacctatattttgatgatggtttctttgagaaccttgatcttgatgcaattgaagctcaagcaaccgaacagtggagacagaagaccacacaatcgacgcagaaaccagtggaaattaagaatgcatcagacatgagttttgcacctccgtcattcgatttaggtctctgatagtggtggtaaagttagcatccattcatgatgtcatctagctgcagtacctagccatctcagagcatgctgagaactgcacaagcaatgaggttttctgcagaaggcccgaacctgcatcacatgacaatgccgcaggatctggcatgtctgccgctgtgatatttatcggcgccctggagctggaagatgcgctggcggcagattttgtagagtatttatctcagtacaggctcaatacaccatgtatattctcctgtaaatactgttcgatgtataagggtcttattgtatgcagacatttcagagacttgatgtgttaaacccagtggcaaaggtgacgtcagtgtcggtttttgttgcgcaggattatcctcgctctcgatgctgaaccgactggttttgcatagacgaggcatccgtgcagcatgatggcaacgtggagtttggtcaataggacgagtggttggtacatgatgcctggttgctttccgaaaacaggcaatgttttgtgcagtcttgtcgatttctgtacatctcaattaacgtacgcgttttcgtacattggcgcgacaatgtgag

SEQ ID NO: 201600 - DNA, 5045 bp, Zea Mays
gtgccctccagaataccaaattccccgaccttcgccgagcttctccaacgctccagcggttgatgtccgtcccaccgcggctctccgtcgatttctacgatgacgacggcttcgactgggaggccgccgtgcaggagatcgacagagcctgcgccttcgcgtcggcctccgcccccgctcccgctcccgcccccgcccccactccggcgccggtgcatcatccgctgccgccgcggccccccgagccatcggcatcggcgccgcttcacaggccaccggcggcgggcggcggcacggcgcggcagtcgacgctcgaccgcttcgtcgactcatttaccaagaggcgactagagaaagagaggcccgctccagcgcccgtgcaggcggcgtcgtggggcgtgggggtggagccagtcggcggcggcctagggcggccgggtgtccgcgcgggcgagggatgttcgggacaggcgaacgagagagctgtggaggaccggttcatcgaatccttcaccaggaggcagcaggagaaggagagggctgcgtcggaggtggcaccggcactggctggtggtcaggggcgccctgcagctcgtgctggcaagggatgctcgggtcggggcaatcgtgctggcaagggatgctctcgtcggcccagtatggagattgagtatggtctctgcgctgtctccctggaccacgaggctgtcaagacatggatctatccaactaatgtagaagtccgagagtaccagaagtatatggttgaaaaggctctgtttaccaatacgttaatagctttgccaactggacttggcaaaacttttattgctgcggtagtgatgtacaactactttcgatggtttcccgaaggaaaaataatatttacctgcccttcacgtcctcttgttactcagcaaattgaggcatgtcacaatacagtgggaataccacaggagtggataatagatatgaaaggagatcaatgcccttctattcgatcagttcactggaagtcaaagagagtgttctttgtcactccacaagttcttcagaatgatatacaatctggtatatgcatggtacaacaaatagtttgcttagtgatagatgaggctcatcgagcgtcaggaaattatgcatactgcatggttatccgagagttgttggcagctcgtgtgcctttaaggattttagctctaactgctacaccagggtccaagcattcagatatccaaagtgttatagacaatttaaacatttcggagctgatttattgtgatgaagaagattctagagtgaaccaatatgttaacacacgcaaagttgaacttgtgcaggtcccttttggcagtgatgctactcaagtcgctgatatgcttttggatattatacgcccacatattaatcggttgcgtgatgctggtgtgattgaccatcgggactattcaaattggacccaatttgaactgctgaaatttaaggataaattcaaggaagtacccccaccaaacatccatgaaatcgagagaggggaaattgaaagatcttttgtaattcttggcccactttgtcacacaaggaagttgcttttgagccatggaacccaatttgcacatgggtatcttgacaaacgattgaagggagggtcattgaatttgatgcacaagaacgaattcttttggcgattaaaagaaaagatgaagctttcctcatctcacagtattactccaaaagtacaggaattgaaaaggctgatggttgagcactttaatactgattccaatttgaaggactcaaggattattatattttcccattaccgagaaagtgtcaatgaaatatattgctcactacaggatattgatgataaacttgtcagacctgttgaattcattggtcaaagctcagcaggtaaccaactgaaggggcaaagccaaaaaactcaacaagctattttgaagaaattccgatctggggtatataatgttttggtggcaacatcaattggcgaggaaggacttgatattattgaggttgatctcgtgatctgtttcgatgccaatgtctcaccattaaggatgattcaacggatgggaagaaccgggagaaagaatgaaggtcgagttgtggttttggcttatgaaggtcaggaattgcaggggtacagaaagaaacaaggagattgtcgaaccatgaggaagctattgcataacagtgagagatttgaataccatgctagtcctaggatggttccacatgtctataaaccagaagttaagtatgttaagttgacaatagacaagtatattcctcacgcaaagaaaatgagggttgccgcaaaagaagcctcgccaattccatggaagatgtcggaggcagacggtcaaatgattactaggtactttagtgtgtgcaaagaagaagtttggaggccgtcccttgtggcatttcctagatttcagctttatccaagtgtcgttcacaaagttccacattcatttcggacaacagatatgctaactgatgctatgaagcaacttcaagacccatctcttttcaggacaaagtgtgaaatccctttgcaagaacctgctaatgtttctgctgtggaggagggtctggaacatgaaggtctctatgctgctaatggaaatgaggaaatgcctcaggaatgtgacggtttagaagcttcatcgagtgtagtgtggaatgaaaatgtttctgtgccaggttctccagttaagaagtatccggttcacactttcttcagtggtgattatgtaactgtggatagaagaggcagcgttttgattacttatgtacctgtcctgcctcaaaaaattgcattcagtaaggacataaaaagtgcagtttggaataacaaagatcagaacaaagccaaaccttacagatcagcagcaggcgtctgtaggacaacagttgaatttgtccttggtaccaatacagacaaacatttgtttgtggataatttatcaactgtagccatgcattcccctgagtgctcttggcatggtgacaatgttgatgacaatcatgtgcttactactgtaccatccaaaacactgacaagcccaagggagaaaatggacacaccctgcaatgttaaactgccagagtccacctattcatatcaggaagacatggagcttaattcaaggctaacagtatatatggaagaaggaattgttcctgagtctccagtggttgaagttagccacctacgtctagagatggatgaagctgcagactttggagctgtgccaaagcgtggttctccaaagtcacgtgatgagagggctcatgccaatgtagctggaagtcacaaaggacctttgaactttgagaaaaacgatcaattgctttgtggggaaaacgagtttgatggatcatcaaggttgtatatgctagatcagactcgagccaaaacagaagagccaatgcatccttcaaatgtgaagatggctactactacaagacatactcctgggaatatgctgtgtgatagtttctcaggtgattatcagcttaggtcagggggggatgcatcgggatcagtccagcaagcacctaagtacagaagactatgcaaatatggtgacaagatcaaaagagtctcttccatatctttggatggctgtgatgataggtttgaagaatgcaatattgctaataaagataggccaaaccaaataaaacatgctatggggacaaaaaggaagaccaagaggcgtctagatgcctatattgacgaggaagtcggggtgtctgaagatgcatatgtttcagaggatgaggatgataatcagagtgaagataaatacgaagatagcttcattgatgatcaggcaactccaactgaatttacacaaactgaacaaggtgatcgacacaatggtgacatgatgggtttctacaggcaatcgttgtttactcagtccccagtagttctaccctcaaggtaccttgatgtttcttacaattctgcttctcggaccggaaattcaagctattcttcagaggctaggcacaattacactgagactcccaaagagattcaaacacaacatcataccataaacccaagcccatcgtacagttttgtacaggatcgatgtgaaagagggatcgccaattgtgaatcatcgactaagctggattgcagaaagagaaggctaagcttccagcaacctctggcgatccctgttataaaccttgaaccagaaccagcaccagaaccatctccacacgtcgccagcagagtcgctgatcacctatattttgatgatggtttctttgagaaccttgatcttgatgcaattgaagctcaagcaaccgaacagtggagacagaagaccacacaatcgacgcagaaaccagtggaaattaagaatgcatcagacatgagttttgcacctccgtcattcgatttaggtctctgatagtggtggtaaagttagcatccattcatgatgtcatctagctgcagtacctagccatctcagagcatgctgagaactgcacaagcaatgaggttttctgcagaaggcccgaacctgcatcacatgacaatgccgcaggatctggcatgtctgccgctgtgatatttatcggcgccctggagctggaagatgcgctggcggcagattttgtagagtatttatctcagtacaggctcaatacaccatgtatattctcctgtaaatactgttcgatgtataagggtcttattgtatgcagacatttcagagacttgatgtgttaaacccagtggcaaaggtgacgtcagtgtcggtttttgttgcgcaggattatcctcgctctcgatgctgaaccgactggttttgcatagacgaggcatccgtgcagcatgatggcaacgtggagtttggtcaataggacgagtggttggtacatgatgcctggttgctttccgaaaacaggcaatgttttgtgcagtcttgtcgatttctgtacatctcaattaacgtacgcgttttcgtacattggcgcgacaatgtgag

SEQ ID NO: 201601 - DNA, 3202 bp, Zea Mays
agcagatgctgtccttgtgcagtcaaaactgcagcaaggctgctgtccttggctgccaaaggactgctgtcatacacaaagatgctcaagatttatttcatcatcagatatgcagacagcaagagagctgcacataattgcaataaagataagagtataagaacataagaacactacttgcacacggacacttaacttatattacattaacacttggtgtggacatttctacttttttccagtcagctaattgaacccctttcttacagtacaactgatcttgctctgcctaggttgacatctgtacctttttccagtcagctagaatactgtcatgcaaaaaaaaggaaatttgacatcataattcatcatgcacccatatttcatcttccccatctccgatttgttccgcttccatacaatgatcaatgccctaaactagtctagatgggaaagtgcctagacaaggcacttaggtgccaagtgagctggactcaaggattattatattttcccattaccgagaaagtgtcaatgaaatatattgctcactacaggatattgatgataaacttgtcagacctgttgaattcattggtcaaagctcagcaggtaaccaactgaaggggcaaagccaaaaaactcaacaagctattttgaagaaattccgatctggggtatataatgttttggtggcaacatcaattggcgaggaaggacttgatattattgaggttgatctcgtgatctgtttcgatgccaatgtctcaccattaaggatgattcaacggatgggaagaaccgggagaaagaatgaaggtcgagttgtggttttggcttatgaaggtcaggaattgcaggggtacagaaagaaacaaggagattgtcgaaccatgaggaagctattgcataacagtgagagatttgaataccatgctagtcctaggatggttccacatgtctataaaccagaagttaagtatgttaagttgacaatagacaagtatattcctcacgcaaagaaaatgagggttgccgcaaaagaagcctcgccaattccatggaagatgtcggaggcagacggtcaaatgattactagcaacttcaagacccatctcttttcaggacaaagtgtgaaatccctttgcaagaacctgctaatgtttctgctgtggaggagggtctggaacatgaaggtctctatgctgctaatggaaatgaggaaatgcctcaggaatgtgacggtttagaagcttcatcgagtgtagtgtggaatgaaaatgtttctgtgccaggttctccagttaagaagtatccggttcacactttcttcagtggtgattatgtaactgtggatagaagaggcagcgttttgattacttatgtacctgtcctgcctcaaaaaattgcattcagtaaggacataaaaagtgcagtttggaataacaaagatcagaacaaagccaaaccttacagatcagcagcaggcgtctgtaggacaacagttgaatttgtccttggtaccaatacagacaaacatttgtttgtggataatttatcaactgtagccatgcattcccctgagtgctcttggcatggtgacaatgttgatgacaatcatgtgcttactactgtaccatccaaaacactgacaagcccaagggagaaaatggacacaccctgcaatgttaaactgccagagtccacctattcatatcaggaagacatggagcttaattcaaggctaacagtatatatggaagaaggaattgttcctgagtctccagtggttgaagttagccacctacgtctagagatggatgaagctgcagactttggagctgtgccaaagcgtggttctccaaagtcacgtgatgagagggctcatgccaatgtagctggaagtcacaaaggacctttgaactttgagaaaaacgatcaattgctttgtggggaaaacgagtttgatggatcatcaaggttggtgtctgaagatgcatatgtttcagaggatgaggatgataatcagagtgaagataaatacgaagatagcttcattgatgatcaggcaactccaactgaatttacacaaactgaacaaggtgatcgacacaatggtgacatgatgggtttctacaggtaccttgatgtttcttacaattctgcttctcggaccggaaattcaagctattcttcagaggctaggcacaattacactgagactcccaaagagattcaaacacaacatcataccataaacccaagcccatcgtacagttttgtacaggatcgatgtgaaagagggatcgccaattgtgaatcatcgactaagctggattgcagaaagagaaggctaagcttccagcaacctctggcgatccctgttataaaccttgaaccagaaccagcaccagaaccatctccacacgtcgccagcagagtcgctgatcacctatattttgatgatggtttctttgagaaccttgatcttgatgcaattgaagctcaagcaaccgaacagtggagacagaagaccacacaatcgacgcagaaaccagtggaaattaagaatgcatcagacatgagttttgcacctccgtcattcgatttaggtctctgatagtggtggtaaagttagcatccattcatgatgtcatctagctgcagtacctagccatctcagagcatgctgagaactgcacaagcaatgaggttttctgcagaaggcccgaacctgcatcacatgacaatgccgcaggatctggcatgtctgccgctgtgatatttatcggcgccctggagctggaagatgcgctggcggcagattttgtagagtatttatctcagtacaggctcaatacaccatgtatattctcctgtaaatactgttcgatgtataagggtcttattgtatgcagacatttcagagacttgatgtgttaaacccagtggcaaaggtgacgtcagtgtcggtttttgttgcgcaggattatcctcgctctcgatgctgaaccgactggttttgcatagacgaggcatccgtgcagcatgatggcaacgtggagtttggtcaataggacgagtggttggtacatgatgcctggttgctttccgaaaacaggcaatgttttgtgcagtcttgtcgatttctgtacatctcaattaacgtacgcgttttcgtacattggcgcgacaatgtgag

SEQ ID NO: 201602 - DNA, 3296 bp, Zea Mays
atgggaaagtgcctagacaaggcacttaggtgccaagtgagctggactcaaggattattatattttcccattaccgagaaagtgtcaatgaaatatattgctcactacaggatattgatgataaacttgtcagacctgttgaattcattggtcaaagctcagcaggtaaccaactgaaggggcaaagccaaaaaactcaacaagctattttgaagaaattccgatctggggtatataatgttttggtggcaacatcaattggcgaggaaggacttgatattattgaggttgatctcgtgatctgtttcgatgccaatgtctcaccattaaggatgattcaacggatgggaagaaccgggagaaagaatgaaggtcgagttgtggttttggcttatgaaggtcaggaattgcaggggtacagaaagaaacaaggagattgtcgaaccatgaggaagctattgcataacagtgagagatttgaataccatgctagtcctaggatggttccacatgtctataaaccagaagttaagtatgttaagttgacaatagacaagtatattcctcacgcaaagaaaatgagggttgccgcaaaagaagcctcgccaattccatggaagatgtcggaggcagacggtcaaatgattactaggtactttagtgtgtgcaaagaagaagtttggaggccgtcccttgtggcatttcctagatttcagctttatccaagtgtcgttcacaaagttccacattcatttcggacaacagatatgctaactgatgctatgaagcaacttcaagacccatctcttttcaggacaaagtgtgaaatccctttgcaagaacctgctaatgtttctgctgtggaggagggtctggaacatgaaggtctctatgctgctaatggaaatgaggaaatgcctcaggaatgtgacggtttagaagcttcatcgagtgtagtgtggaatgaaaatgtttctgtgccaggttctccagttaagaagtatccggttcacactttcttcagtggtgattatgtaactgtggatagaagaggcagcgttttgattacttatgtacctgtcctgcctcaaaaaattgcattcagtaaggacataaaaagtgcagtttggaataacaaagatcagaacaaagccaaaccttacagatcagcagcaggcgtctgtaggacaacagttgaatttgtccttggtaccaatacagacaaacatttgtttgtggataatttatcaactgtagccatgcattcccctgagtgctcttggcatggtgacaatgttgatgacaatcatgtgcttactactgtaccatccaaaacactgacaagcccaagggagaaaatggacacaccctgcaatgttaaactgccagagtccacctattcatatcaggaagacatggagcttaattcaaggctaacagtatatatggaagaaggaattgttcctgagtctccagtggttgaagttagccacctacgtctagagatggatgaagctgcagactttggagctgtgccaaagcgtggttctccaaagtcacgtgatgagagggctcatgccaatgtagctggaagtcacaaaggacctttgaactttgagaaaaacgatcaattgctttgtggggaaaacgagtttgatggatcatcaaggttgtatatgctagatcagactcgagccaaaacagaagagccaatgcatccttcaaatgtgaagatggctactactacaagacatactcctgggaatatgctgtgtgatagtttctcaggtgattatcagcttaggtcagggggggatgcatcgggatcagtccagcaagcacctaagtacagaagactatgcaaatatggtgacaagatcaaaagagtctcttccatatctttggatggctgtgatgataggtttgaagaatgcaatattgctaataaagataggccaaaccaaataaaacatgctatggggacaaaaaggaagaccaagaggcgtctagatgcctatattgacgaggaagtcggggtgtctgaagatgcatatgtttcagaggatgaggatgataatcagagtgaagataaatacgaagatagcttcattgatgatcaggcaactccaactgaatttacacaaactgaacaaggtgatcgacacaatggtgacatgatgggtttctacaggcaatcgttgtttactcagtccccagtagttctaccctcaaggtaccttgatgtttcttacaattctgcttctcggaccggaaattcaagctattcttcagaggctaggcacaattacactgagactcccaaagagattcaaacacaacatcataccataaacccaagcccatcgtacagttttgtacaggatcgatgtgaaagagggatcgccaattgtgaatcatcgactaagctggattgcagaaagagaaggctaagcttccagcaacctctggcgatccctgttataaaccttgaaccagaaccagcaccagaaccatctccacacgtcgccagcagagtcgctgatcacctatattttgatgatggtttctttgagaaccttgatcttgatgcaattgaagctcaagcaaccgaacagtggagacagaagaccacacaatcgacgcagaaaccagtggaaattaagaatgcatcagacatgagttttgcacctccgtcattcgatttaggtctctgatagtggtggtaaagttagcatccattcatgatgtcatctagctgcagtacctagccatctcagagcatgctgagaactgcacaagcaatgaggttttctgcagaaggcccgaacctgcatcacatgacaatgccgcaggatctggcatgtctgccgctgtgatatttatcggcgccctggagctggaagatgcgctggcggcagattttgtagagtatttatctcagtacaggctcaatacaccatgtatattctcctgtaaatactgttcgatgtataagggtcttattgtatgcagacatttcagagacttgatgtgttaaacccagtggcaaaggtgacgtcagtgtcggtttttgttgcgcaggattatcctcgctctcgatgctgaaccgactggttttgcatagacgaggcatccgtgcagcatgatggcaacgtggagtttggtcaataggacgagtggttggtacatgatgcctggttgctttccgaaaacaggcaatgttttgtgcagtcttgtcgatttctgtacatctcaattaacgtacgcgttttcgtacattggcgcgacaatgtgag

SEQ ID NO: 201603 - DNA, 3269 bp, Zea Mays
atgggaaagtgcctagacaaggcacttaggtgccaagtgagctggactcaaggattattatattttcccattaccgagaaagtgtcaatgaaatatattgctcactacaggatattgatgataaacttgtcagacctgttgaattcattggtcaaagctcagcaggtaaccaactgaaggggcaaagccaaaaaactcaacaagctattttgaagaaattccgatctggggtatataatgttttggtggcaacatcaattggcgaggaaggacttgatattattgaggttgatctcgtgatctgtttcgatgccaatgtctcaccattaaggatgattcaacggatgggaagaaccgggagaaagaatgaaggtcaggaattgcaggggtacagaaagaaacaaggagattgtcgaaccatgaggaagctattgcataacagtgagagatttgaataccatgctagtcctaggatggttccacatgtctataaaccagaagttaagtatgttaagttgacaatagacaagtatattcctcacgcaaagaaaatgagggttgccgcaaaagaagcctcgccaattccatggaagatgtcggaggcagacggtcaaatgattactaggtactttagtgtgtgcaaagaagaagtttggaggccgtcccttgtggcatttcctagatttcagctttatccaagtgtcgttcacaaagttccacattcatttcggacaacagatatgctaactgatgctatgaagcaacttcaagacccatctcttttcaggacaaagtgtgaaatccctttgcaagaacctgctaatgtttctgctgtggaggagggtctggaacatgaaggtctctatgctgctaatggaaatgaggaaatgcctcaggaatgtgacggtttagaagcttcatcgagtgtagtgtggaatgaaaatgtttctgtgccaggttctccagttaagaagtatccggttcacactttcttcagtggtgattatgtaactgtggatagaagaggcagcgttttgattacttatgtacctgtcctgcctcaaaaaattgcattcagtaaggacataaaaagtgcagtttggaataacaaagatcagaacaaagccaaaccttacagatcagcagcaggcgtctgtaggacaacagttgaatttgtccttggtaccaatacagacaaacatttgtttgtggataatttatcaactgtagccatgcattcccctgagtgctcttggcatggtgacaatgttgatgacaatcatgtgcttactactgtaccatccaaaacactgacaagcccaagggagaaaatggacacaccctgcaatgttaaactgccagagtccacctattcatatcaggaagacatggagcttaattcaaggctaacagtatatatggaagaaggaattgttcctgagtctccagtggttgaagttagccacctacgtctagagatggatgaagctgcagactttggagctgtgccaaagcgtggttctccaaagtcacgtgatgagagggctcatgccaatgtagctggaagtcacaaaggacctttgaactttgagaaaaacgatcaattgctttgtggggaaaacgagtttgatggatcatcaaggttgtatatgctagatcagactcgagccaaaacagaagagccaatgcatccttcaaatgtgaagatggctactactacaagacatactcctgggaatatgctgtgtgatagtttctcaggtgattatcagcttaggtcagggggggatgcatcgggatcagtccagcaagcacctaagtacagaagactatgcaaatatggtgacaagatcaaaagagtctcttccatatctttggatggctgtgatgataggtttgaagaatgcaatattgctaataaagataggccaaaccaaataaaacatgctatggggacaaaaaggaagaccaagaggcgtctagatgcctatattgacgaggaagtcggggtgtctgaagatgcatatgtttcagaggatgaggatgataatcagagtgaagataaatacgaagatagcttcattgatgatcaggcaactccaactgaatttacacaaactgaacaaggtgatcgacacaatggtgacatgatgggtttctacaggcaatcgttgtttactcagtccccagtagttctaccctcaaggtaccttgatgtttcttacaattctgcttctcggaccggaaattcaagctattcttcagaggctaggcacaattacactgagactcccaaagagattcaaacacaacatcataccataaacccaagcccatcgtacagttttgtacaggatcgatgtgaaagagggatcgccaattgtgaatcatcgactaagctggattgcagaaagagaaggctaagcttccagcaacctctggcgatccctgttataaaccttgaaccagaaccagcaccagaaccatctccacacgtcgccagcagagtcgctgatcacctatattttgatgatggtttctttgagaaccttgatcttgatgcaattgaagctcaagcaaccgaacagtggagacagaagaccacacaatcgacgcagaaaccagtggaaattaagaatgcatcagacatgagttttgcacctccgtcattcgatttaggtctctgatagtggtggtaaagttagcatccattcatgatgtcatctagctgcagtacctagccatctcagagcatgctgagaactgcacaagcaatgaggttttctgcagaaggcccgaacctgcatcacatgacaatgccgcaggatctggcatgtctgccgctgtgatatttatcggcgccctggagctggaagatgcgctggcggcagattttgtagagtatttatctcagtacaggctcaatacaccatgtatattctcctgtaaatactgttcgatgtataagggtcttattgtatgcagacatttcagagacttgatgtgttaaacccagtggcaaaggtgacgtcagtgtcggtttttgttgcgcaggattatcctcgctctcgatgctgaaccgactggttttgcatagacgaggcatccgtgcagcatgatggcaacgtggagtttggtcaataggacgagtggttggtacatgatgcctggttgctttccgaaaacaggcaatgttttgtgcagtcttgtcgatttctgtacatctcaattaacgtacgcgttttcgtacattggcgcgacaatgtgag

SEQ ID NO: 201604 - DNA, 1564 bp, Zea Mays
atggccctcgtgaagtccgacgctgaggaggagtggtccgactctgacttcgatgatgcctccgactccgaggtcgccgaagctctggactggctcgacgccgtggagggccctgacggctcagctcgcccccacgtcgccttctcggcctccggaggcggggctgcggcgcggaggcctaacgcacacggcggcgtgctgtctcgcccgctccagccgctgtctaaccggacccagaagctggcctcgcacattagtgccactcccttggaggagtgggaaggtaggatgaacgtggcgatgtcaaattccgtcacaactgcaatcagggatagcataagggacacagctattgggaaaataaggaacactgagaaggctgatcgtgctacagtggaacagaagtttcttcctttatttaaatgtcttagtagccttgtcttaaaaataggctattgacccaagaacacgcatggttttattcaagatgttaaaccgtggtgtctttaataacataaatggctgcatttctacagggaaagaggcaaatgtctatcatgcaacaaagacggatggccaggagcttgcaattaaagtctacaaaacctctgttcttgtttttaaggatagagaccgatatgtccaaggagattaccgttttagacatggttactgcaagcataatcctcggaaaatggttaagacctgggctgagaaggaaatgagaaatcttctacgagtgagggcagctggaatccgatgccctgcaccattactcctaaggcttcatgtactggtgatggaattcatagggaaaggaggctgggctgctcctcgtctcaaggacgctgttttgtcagatgacaagttgcatgaaagttactttgagggtcacttgtatattattgatgtttcacaatccgtcgatcttgatcacccttcagctttggactttctgaaggaagattgcttgcatgtttctgacttctttaaaaaacgtggtgttcctgtcatgacagtaaccgatttgtttaattttgttattgatcaaagcatttctgatgaaggtgttgatgattatctggaaaaggctcagcaaaagattttggaaaacggtggtgcggttccaaatgatgatgaaattactccaacagtcatggtgcagacgttggactacgtgaagcaatgtgaggcagatattgtcaacatgtcaataatgcaacgttcatcctctggctatgagccaaccgcagataagctttatgaccagccattgttaggatttgtgcggactaaaaacacacacactgaaaaggagcaaggacaaccggcacgaaacttagttgaggttgaagaagacgagagcgaatcttgctcgagttctgatgaagatgattcgtggcacgaggatgatcctaaggtgggacccgaggaaaggaaggctgctcggaaggaaaacaagaagaaagtgaaggaagagaagagggaggcccgcaagaccaagatcccaaaagctgagaagaagaagaggaagaaaatggcaaaggcaaaatgcaagcggtag

SEQ ID NO: 201605 - DNA, 1557 bp, Zea Mays
ctggcataagatgattaaatagcaaaatctgaagagtagtagtggctcaccaggagaggtgcccaatcataccagacaccttggtgaaggaggaaaagggtccggtgtggcgacgatggagaggggcggcggcggcggagacgagatgatgatgacctcgggcgcgacgggccggatcgtgccggtgttccgctccgtgctgtcgcggcgcgctctgctccgcgtcgccgtggcgctgcactcgctcttcctctggctgctgctcctcgcccgcggcctccgccggcaccgggcggggaccggcgccgacgcgtcggcgtcggaggcgggggctggggccgggacctggagcgcgcggcggtggcggctgcggctgcaggccgcggaggaggaggacgtgcgccgccgcagggcgctcgcggaggaggtgcccatggaggaggaccggggcactaggtgggccaccttcctcgtcaccggggccaggaggaacgcgcttttctgccgcctctgggcgccggccgtcgacgagatgaggggcattttggtcatcatacatggcttgaatgagcacagtggaaggtacgtgcactttgctgagcagctgacagcatgtggtttcggagtatacgcaatggattggatagggcatggtggaagcgatggcctgcacggctatgtgccttcactagattacgtcatcgaagacatcgaagtgcttgttgacagaattctgatggagaatccaggggtcccttgtttcctcctcggccactccaccggtggggctgtcgtcctgaaggcatctctgtaccctcacatcagggagaaactggaaggcatcgttctgacatcgcccgcgctgcgtgtgaagcctgcgcatcctattgttggggctgtggcgccgatcttctctctggtggcgcccaggttccagttcaagggcgccaacaagaggggcatcccggtgtcccgcgaccccgcggcgctgctggccaagtactcggacccgctggtgtacacggggccgatcagggtgcggacggggcacgagatcctgcgcatctcctcccacctgctgcaccgcctggagaaggtcaccgtcccgttcctggtgctgcacggcaccgccgaccgggtcacggacccgctggcgtcgcgcgagctctacggcgcggcggcgtccgcgcacaaggacctgcgcctgtacgacgggttcctgcacgacctgctcttcgagcccgagcgcgacgaggtcggcgccgagatcgtcgcctggatggacgggatgctccggctccggcggcaggctggatgaagggatggccgtgctgcttctctccttctaggtggtgttcctctccaaagtataataatagatttgtgtgccaagataagatggatgcatttgtgctgtggaactacgttacgtatctatttatatttataacagcggggtaaaagggtcgttttgttttggtgtaaacgaaccaaaacatatggatcaaaatcagacgtaaaaatcagaaacattattacatagagtataaaaataaa

SEQ ID NO: 201606 - DNA, 929 bp, Zea Mays
ggcagccggtgctgggcctcggcactcggcagccatggttcgccttgcgaagttctatctcgtctgctacaactccctccaatcgctcggatggtttcctacagacatgtgcgatccttgaaacggtccacgctgccatcggattggtgccgaccgcgccacttcttgctttcttgcaatggggagggaggatccacttcatcctggctgttgtccggcaaattcccgaggttcagagcagtccatctgtgttcataacatttatagcttggagcatatctgaggtcatccgttactctcactatgctctgactaccttaaaagtttgtccagcatggctgacttatctcaggtacactgcttttatcccgctgtatccaatcggggttggcccaggagaaatgtggacaatgtaccaagccctcccgtttgtgaagaagagggacctttactcaggtttcttcgagaagttctccatgagctaccgttcctttctagtgggtgtgctggtgctctacccgttcctgtggctgaagctgtaccagcacgtgttcaagcagcgcaagtccaagctggggaaggggagcaggaagaaacgggcctgagaaaatctggctctgctcagctcagctgccacttgttgctgtcatgtgaaacgctaacgggtcattgtggatttttgttttggaagaaaatctttgtgagttgttgtctgatgcgacgggggcagttattggattacgctttgggttctctgtttgtttcaattgctctgcgttttatgtctgtattaacatacatcaagcatatataatagtcatgttgctgctgcgagtctaatcaatcttgcgatcctggttttctcgctcaattgcctacactgaatgaggctgatcacgctgctctgtgcctacagcaggcgattgtca

SEQ ID NO: 201607 - DNA, 1021 bp, Zea Mays
accacagccacacaggcagccggtgctgggcctcggcactcggcagccatggttcgccttgcgaagttctatctcgtctgctacaactccctccaatcgctcggatggtacggtagccaccagcaaccatagaccaccggccggcggaccgttgcttccactactaatgcttcttttttttatctcctgaattcagacatgtgcgatccttgaaacggtccacgctgccatcggattggtgccgaccgcgccacttcttgctttcttgcaatggggagggaggatccacttcatcctggctgttgtccggcaaattcccgaggttcagagcagtccatctgtgttcataacatttatagcttggagcatatctgaggtcatccgttactctcactatgctctgactaccttaaaagtttgtccagcatggctgacttatctcaggtacactgcttttatcccgctgtatccaatcggggttggcccaggagaaatgtggacaatgtaccaagccctcccgtttgtgaagaagagggacctttactcaggtttcttcgagaagttctccatgagctaccgttcctttctagtgggtgtgctggtgctctacccgttcctgtggctgaagctgtaccagcacgtgttcaagcagcgcaagtccaagctggggaaggggagcaggaagaaacgggcctgagaaaatctggctctgctcagctcagctgccacttgttgctgtcatgtgaaacgctaacgggtcattgtggatttttgttttggaagaaaatctttgtgagttgttgtctgatgcgacgggggcagttattggattacgctttgggttctctgtttgtttcaattgctctgcgttttatgtctgtattaacatacatcaagcatatataatagtcatgttgctgctgcgagtctaatcaatcttgcgatcctggttttctcgctcaattgcctacactgaatgaggctgatcacgctgctctgtgcctacagcaggcgattgtca

SEQ ID NO: 201608 - DNA, 1053 bp, Zea Mays
cacgtctgcctcgccggtgtcgaaaccacagccacacaggcagccggtgctgggcctcggcactcggcagccatggttcgccttgcgaagttctatctcgtctgctacaactccctccaatcgctcggatggttcgtctccctcctccgcctcctgccctgcctcgtccctcccttccctgtccactccgcgtacgtggtcgccggcgacctcatctgtttcctacagacatgtgcgatccttgaaacggtccacgctgccatcggattggtgccgaccgcgccacttcttgctttcttgcaatggggagggaggatccacttcatcctggctgttgtccggcaaattcccgaggttcagagcagtccatctgtgttcataacatttatagcttggagcatatctgaggtcatccgttactctcactatgctctgactaccttaaaagtttgtccagcatggctgacttatctcaggtacactgcttttatcccgctgtatccaatcggggttggcccaggagaaatgtggacaatgtaccaagccctcccgtttgtgaagaagagggacctttactcaggtttcttcgagaagttctccatgagctaccgttcctttctagtgggtgtgctggtgctctacccgttcctgtggctgaagctgtaccagcacgtgttcaagcagcgcaagtccaagctggggaaggggagcaggaagaaacgggcctgagaaaatctggctctgctcagctcagctgccacttgttgctgtcatgtgaaacgctaacgggtcattgtggatttttgttttggaagaaaatctttgtgagttgttgtctgatgcgacgggggcagttattggattacgctttgggttctctgtttgtttcaattgctctgcgttttatgtctgtattaacatacatcaagcatatataatagtcatgttgctgctgcgagtctaatcaatcttgcgatcctggttttctcgctcaattgcctacactgaatgaggctgatcacgctgctctgtgcctacagcaggcgattgtca

SEQ ID NO: 201609 - DNA, 725 bp, Zea Mays
ctgcctcgccggtgtcgaaaccacagccacacaggcagccggtgctgggcctcggcactcggcagccatggttcgccttgcgaagttctatctcgtctgctacaactccctccaatcgctcggatggttcgtctccctcctccgcctcctgccctgcctcgtccctcccttccctgtccactccgcgtacgtggtcgccggcgacctcatctgtttcctacagacatgtgcgatccttgaaacggtccacgctgccatcggattggtgccgaccgcgccacttcttgctttcttgcaatggggagggaggatccacttcatcctggctgttgtccggcaaattcccgaggttcagagcagtccatctgtgttcataacatttatagcttggagcatatctgaggtcatccgttactctcactatgctctgactaccttaaaagtttgtccagcatggctgacttatctcaggtacactgcttttatcccgctgtatccaatcggggttggcccaggagaaagtaagctcaaaatgtcttctcacaagagcgttattactcttgactaaagcttagaccgaggctggttcttgctgtcctttcagtgtggacaatgtaccaagccctcccgtttgtgaagaagagggacctttactcaggtttcttcgagaagttctccatgagctaccgttcctttctagtgaagttcaactatctggtatgcgc

SEQ ID NO: 201610 - DNA, 1150 bp, Zea Mays
ctcttcctcttcgagatccatgctacagatgatccagagaagacaccaaaaacaatagtcgatgtcggatgtggcattggtggtagctcaaggtacttggcgaagaaatacggagcgcagtgcactgggatcacgttgagccctgttcaagccgagagaggaaatgctctcgctgcagcgcaggggttgtcggatcaggttactctgcaagttgctgatgctctggagcaaccgtttcctgacgggcagttcgatctggtgtggtccatggagagtggcgagcacatgccggacaagagaaaggaacctggatccatccgaaacctcgctaaagcccgatgaactgagcctcctgaggaggatatgcgacgcgtactacctcccggactggtgctcaccttcagactatgtgaacattgccaagtcactgtctctcgaggatatcaagacagctgactggtcggagaacgtggccccgttttggcccgccgtgataaaatcagcgctaacatggaagggcttcacctctctgctgacgaccggatggaagacgatcagaggcgcgatggtgatgccgctaatgatccagggctacaagaaggggctcatcaaattcaccatcatcacctgtcgcaagcctggagccgcgtaggaggaggccaaggagcacaagttactagcacaggcacaggagtgccaagtgcaataatgtagatccgtggcaccatcgccgtctactcatctatactgcaccaaaatcaacattctcctaggacatgttaaataattttctgccactcgtcgagatatttcaaattcactgttccacacgcttccgttactgtcgatctacacgtcgcggcctcccctacctttcctttccatcccagagtcgctttcttcacacaagcatttgtacgtccttgtgtgctgggtctatgagtacttgggccgaagtctgggcacgtgcccaacaggcatccatatatgggctccgccacttcaccccacccgtttgtagatccttgtttcgagtttcagggtagagtattatttcacaccttgtttggccgacacgtcataagtggataagcttctatactttttctgctgttcctggatcatcgtctctaatctagctccagtgaac

SEQ ID NO: 201611 - DNA, 1218 bp, Zea Mays
ctcttcctcttcgagatccatgctacagatgatccagagaagacaccaaaaacaatagtcgatgtcggatgtggcattggtggtagctcaaggtacttggcgaagaaatacggagcgcagtgcactgggatcacgttgagccctgttcaagccgagagaggaaatgctctcgctgcagcgcaggggttgtcggatcaggttactctgcaagttgctgatgctctggagcaaccgtttcctgacgggcagttcgatctggtgtggtccatggagagtggcgagcacatgccggacaagagaaagtttgttagtgagctagcacgcgtggcggctcctggagggacaataatcatcgtgacatggtgccataggaacctggatccatccgaaacctcgctaaagcccgatgaactgagcctcctgaggaggatatgcgacgcgtactacctcccggactggtgctcaccttcagactatgtgaacattgccaagtcactgtctctcgaggatatcaagacagctgactggtcggagaacgtggccccgttttggcccgccgtgataaaatcagcgctaacatggaagggcttcacctctctgctgacgaccggatggaagacgatcagaggcgcgatggtgatgccgctaatgatccagggctacaagaaggggctcatcaaattcaccatcatcacctgtcgcaagcctggagccgcgtaggaggaggccaaggagcacaagttactagcacaggcacaggagtgccaagtgcaataatgtagatccgtggcaccatcgccgtctactcatctatactgcaccaaaatcaacattctcctaggacatgttaaataattttctgccactcgtcgagatatttcaaattcactgttccacacgcttccgttactgtcgatctacacgtcgcggcctcccctacctttcctttccatcccagagtcgctttcttcacacaagcatttgtacgtccttgtgtgctgggtctatgagtacttgggccgaagtctgggcacgtgcccaacaggcatccatatatgggctccgccacttcaccccacccgtttgtagatccttgtttcgagtttcagggtagagtattatttcacaccttgtttggccgacacgtcataagtggataagcttctatactttttctgctgttcctggatcatcgtctctaatctagctccagtgaac

SEQ ID NO: 201612 - DNA, 960 bp, Zea Mays
aacaaatgcaacgattgcactccaatgctgcaattacaatgcaatgaccggggtgagctagcacgcgtggcggctcctggagggacaataatcatcgtgacatggtgccataggaacctggatccatccgaaacctcgctaaagcccgatgaactgagcctcctgaggaggatatgcgacgcgtactacctcccggactggtgctcaccttcagactatgtgaacattgccaagtcactgtctctcgaggatatcaagacagctgactggtcggagaacgtggccccgttttggcccgccgtgataaaatcagcgctaacatggaagggcttcacctctctgctgacgaccggatggaagacgatcagaggcgcgatggtgatgccgctaatgatccagggctacaagaaggggctcatcaaattcaccatcatcacctgtcgcaagcctggagccgcgtaggaggaggccaaggagcacaagttactagcacaggcacaggagtgccaagtgcaataatgtagatccgtggcaccatcgccgtctactcatctatactgcaccaaaatcaacattctcctaggacatgttaaataattttctgccactcgtcgagatatttcaaattcactgttccacacgcttccgttactgtcgatctacacgtcgcggcctcccctacctttcctttccatcccagagtcgctttcttcacacaagcatttgtacgtccttgtgtgctgggtctatgagtacttgggccgaagtctgggcacgtgcccaacaggcatccatatatgggctccgccacttcaccccacccgtttgtagatccttgtttcgagtttcagggtagagtattatttcacaccttgtttggccgacacgtcataagtggataagcttctatactttttctgctgttcctggatcatcgtctctaatctagctccagtgaac

SEQ ID NO: 201613 - DNA, 867 bp, Zea Mays
aggctctcatatctagcattctagcaccagcagctaccaggagtagtggtttctcttgcgtccgcctcagggcttgcgtccccccgatctgtgtcgcggaggcggcgagcggcttggccggccgggagagagtgagatcgagctgcgagggcgacactcggacggaggtcggtcgagaagaggccaacgatcgacgagaggagaaggagatcacgcagccgcctgcaagaaattcagcagcaggagaggatcgatcgaggaagatgtgcatggacggcgccgtgccggtgaagagggtctggctcggcatcgccgcgcgcctcggcctccgccgaaagaccgttactcctaaaaagatcgttgacgatcgagaggaggcacacagcacacaggtgtatcatgacatgcatatacctagagtacagctggaaccactggagtcgtcagcgtgtgaagacgaggaaagcacgtagtcacgctggtcttcccgcaaccgcaagaaaaaaaacaaaaagacatgtggaacggagctggtgttgatcatcactaccagtctaccacccttctgttctacaactgacgcactcaagcagtcaagactcgggctcaaccagccgcataacatcctggcgtttcttgcttgcaagcgatggccaactacttgagctttatggacgctgttttgcggcaaatccgcgtagcccaagactgtctggatccaacggagagcgaggtggtgcggcgttgtgcacagcgcatgcagtagcagatatgaaaggaagatttgtgccaacattttacaattatccaggagaaaaagaaagaaaggagagatacaactcccctaagcctgttcatttggcttta

SEQ ID NO: 201614 - DNA, 1664 bp, Zea Mays
ctcctgttgcggtaagccgccactccgattttccaccgttacaacccaatccattcacagcatctgtaacggcttttcctgcctagctaccatggccacacaccgccactggctgctgctgctcttcctcccttgggccctcctctcccgccgcggcgcgcagcctcccgacgccctgtaccctgtcgtgctgctcccgggcaacacctgcagccagctcgaggcgcgcctcacggacgcgtacgagccgccgccggagtcgccgcaatgcggcgcgggcagcaacgagcgcggccgctggttccgcctgtggaggaacgccacggccatggacgaccccgccgtcgcgccgtgcctcgccgaccagctccgcgtcgtctacgaccccgccgcccgcgacttccgcaatgagccgggcgtggagacccgcgtcctcggctttggctccaccgccgacttcctcgccgacaccgaagccaacaaacctctgcatggggaggctcgtcgaggcgctgcagcaggccgggtaccgcgacggagagacgctgttcggcgcgccgtacgacttccgccaggctcccgcggcgcgggggcagccgtgccgtgccttcgcgcggttcacccggcggctcagggcgctcgtggagcgcgccagcagggagaacggcggcaggcccgtcgtcatcgtgtcgcacagccagggcggctacttcgcgctggagttcctgaaccggagcccgctgccctggcgccggaggtacgtcaagcactacgtcatggcgtccacgggcgccggcgggttcctgctccccctgcggaacctcgcgtccgtgccccgcgacgcgctggaggcccccgacgcgctcgtggcgctgccgtcgccggcggtgttcggtcccggcacgccgccgctggtcgtcacgcgcgccaggaactacacggcgcgggacatcccggagttcctggcggcgatcggagtgcccccgctcggggtcacgctgtacgagacgcgggcgctccccctgcagctcggcttccgggcgccggtggtgcccacgacctgcatcaacggcgtcggccagcccacgatggagcagctcgtgtactgggacggcaacttcagcgagacgccgcaggtggtgtacggcgacggcgatggattcttacccgtggcgagcatagtggccctcgacaccgtcatcggtggtgacccgaggcaggagtactacaagtctatcaagcttgccggcacgtctcacgctggcgttgtctcagatgctgcggctttgaagcgtgtcgtcgatgagattctttggagccctccaatatgagcaagtctgtcagagaccaactctatcgcctgtttttttttttcttttggcagccaatcgatttggaagtattgcctatgtccgaaaacacaataccactaaatcaaattccctacgccccgttccaaaattatactttttatatttttactagatagtttacttttattagatatatagagagagtgcgcgcgagagactgatagcatagtaaaatcatatatctagagaggccaagatgtattgtaatttggaatggaaggagtaaccgagtaagagctaataccctgttgtatactctagcttacatgtacaacgtcatttaatataagg

SEQ ID NO: 201615 - DNA, 1681 bp, Zea Mays
acttgtcacccaactcccgcagtcccacccacaccgatcgcggggccgatcgagtctgctgaagcctcgcctcgcctcgcagaagaagcagcgtgagtaaaaaacccgcagggtgcagacgaaaacctcccatggcgctggcggggacgggggtgttcgcggagatcctggacagcgaggtgtacaggtactacgccgacggggagtggcgcagctccgcctccggcaagtccgtcgccatcgtcaaccccaccacccgcaagacgcagtacagggtgcaagataccccttggagtagttttggcaatcccgccgttcaactatcctgtcaacttagcagtttctaagattggcccagcactaattgcaggcaatgctcttgtgctaaagcctccaactcagggcgctgtggctgcacttcatatggtacactgcttccacctggctggtttcccgaaaggtttgatcagttgtgtgactgggaagggttctgaaataggagattttcttacaatgcatcctggagtcaactgcataagttttactggtggcgatactggtatagccatttcaaagaaggctggaatggtccctcttcagatggagcttgggggaaaagatgcttgcattgtgctagaggatgcagatctggatttggtttccgcaaatatagtaaagggtggcttctcatacagtggccagaggtgcactgctgtcaaagtagtgctgatcatggaatcgattgctgatgctgtggtacagaaggttaatgccaagttggcgaaactgaaagttggcccacctgaggacgactctgatatcaccccggttgtaacagaatcctcagccaacttcatcgagggtctggtgatggatgcaaaggagaaaggagcaactttctgccaggagtacaggagagaaggcaaccttatctggccgttgctgctggatcatgtccgccctgacatgaggatcgcatgggaggagccttttgggcctgtcttgcctgtgattaggattaactcagttgaggaaggcatccaccattgcaatgccagtaatttcggcctacagggatgcatttttacaagagacatcaacaaggcaatcctgatcagtgatgcaatggagactggaactgtgcagatcaactctgcaccggctcgtgggcctgatcatttccccttccagggactgaaagacagtggcattgggtcccaggggataacaaacagcattaacatgatgaccaaggtgaagagcactgtcataaacctgccgtcaccatcctacaccatgggctgagatattcttgttaagtgttctatagctccatgagcaatgtagagagttaaatgtttcatagccacgtgagatttggacgctatttacacctcagttcttcctgcagaagatcttttgcagtttaaagaataaagtgcgttgaaagtatggagtcgatgcttttatatccttattactgttggcggtcaaatcctactaggttatatattatgttatgtctagatacatagtgaaagcgatacatctaaacaatcaaaatgtcttataatttaactttgaacaggagtacttagatgttagataccatcgctggacttgtgcagtgtatgcctaatatttcacctagaaagagttttgcttcgatatgctgcaaaat

SEQ ID NO: 201616 - DNA, 1397 bp, Zea Mays
agcaaaaaaatgccccacactcccacggtcccacccggcgtggcggctggcgtacccgtccccactcgtcgcccatcttccgtgacgtcaccccattctccatcggttcccttcctcgcctcggttcgcgggtacccgagtcgcagacgcacctcaatcgcaaccttttggactcgaaggggggcaatagacagcagggaaagaactgagcgaggagattcccaaggatctcgtcggacgctagaggaagggacgggggacaggcgatggcgggggacgccggcagcggggtggactgggagagcctggcggaggccacctccggggcaatcggctcgctcgtcagcaccaccgtgctctacccgctcgacatctgcaagaccaagttccaggccgagcttcagacgcaccagggcgcgcagaaatatagctattttaaaagactctacctggagaagagtggagcaaagtctattggaacaacagccaatttgttagttgcagctgctgctggtgcttgcaatgcaatcgtgacacagccattagatacagcaacttctagaatgcagacgagtgcctttggaaagtctaaagggctgagggaaactcttgcagaagtacactgcatttgatcagctcaagaaaaggataattcagaggcagcgacgcaaaaatgcagcatcggcagaggataattccatagtgtctctttctgctttctcagcttttctgcttggtgccgtctcaaaaagtattgctacagtattgacttatccattaatcaggtgcaaggtgatgattcaggctgcagaccctgatgaggatgatgacgttgattctgaaaggccaagcaagtcaagaacaccaaaaacaatgctaggtgccttgcatgctatctggagcaaggaaggcattccaggcttcttcaaaggcctgaatgctcagatccttaaagcagttctgagctccgccttgctgctgatgataaaggagaagatctcgaagttcacatgggtctcgttgcttgccctgcggcggtatcttttcgtttctcagaagaggatcaagagtgtaactgtataaatactagctccaaacatagcgacatcgtgcttctgtagatgttatgccaaggaattaatctgaggaataatgagcagaaatactgaagcaagagagtgtgtaaagtgtgtatgtgtgatcgatagcatcagagggctcttcaataagtttgttcattcttttttcccctctgaatctctgatagctagtgacacaggtgttgcacggatctgaaactggactgtacttttggctttggttgtctgtaatgtgtaaaatgaattgattggcacataccaagaggggttgtaagtcttgtgatatcacaccaacta

SEQ ID NO: 201617 - DNA, 1298 bp, Zea Mays
agcaaaccttcagccttgcctgctagtgctaactggatgattcgtgtcctgtaggagttacgctataaggagcaaactggtgagggcgatgcctccgatccttgctagcttccagcctgcatctcctcggtacccaagctttcaagacgcaaatggcaaaagacgaaatgttccttgttatcagagacaacaaaccccgcaggtagaagccaggtcgatggaggaggtatatgacactttggctgaacaccttctttcggtcttgaagaatattgaacatcttgattcaaaatacattgttggtctagctggcccacctggtgctggcaagtccacagttgcctctgaagttgttcgacgtgttaatacattttggtcccagaagcacacaaagggtagtggagcaccgcttcctaccaaggaaattgctgcaatgcttccaatggatggtttccacctttatcgtgcccagcttgatgcaatggaggatccaaaagaagcacatgcaagaagaggagcaccctggacattcaatccatcactgtttctgaaatgtctacatacactaagaacagagggttcagtttatgctccatcatttgatcatggtgttggcgacccagttgagaatgacatatttgtaaagccacagcacaaaatagtgatagttgaagggaactatctgttactggaagaagatgtttggaccgaaattagagacttgtttgatgagaaatggttcattgacattgacattgatatctccatgcaaagagtgctcaagagacatattgcaaccggaaaagagccagatgtagcagcatggaggatctcctacaacgaccgaccgaatgcagagcttatcctggaatcaaggaagaatgctgaccttgtgatcagatcagtagacttctcaagctagtgttcaattctttcaataggaaatagcattgtggttctagagttggaggttgttgtgggctgtttccgtggagattcctgtacatataataagctgaatgcctgtttcaaattttcatggtgattgtgttgcatgtaataagatattccttcactatgtaccgtggaggattgttaagtaatttattgacattttttaatagaaacacccttcagatttgtgtccaatgtcatatttttgttcctgtagaagatattaggagctttattgttgtatcgaaggagcaaaatgtctaggatcacaggccagagcagctccaagaggcgaccaaaacatatcccaaaactcgttttaggcttcaaaacataaaaatata

SEQ ID NO: 201618 - DNA, 1102 bp, Zea Mays
caagtttacaagaaaaggtcgatggaggaggtatatgacactttggctgaacaccttctttcggtcttgaagaatattgaacatcttgattcaaaatacattgttggtctagctggcccacctggtgctggcaagtccacagttgcctctgaagttgttcgacgtgttaatacattttggtcccagaagcacacaaagggtagtggagcaccgcttcctaccaaggaaattgctgcaatgcttccaatggatggtttccacctttatcgtgcccagcttgatgcaatggaggatccaaaagaagcacatgcaagaagaggagcaccctggacattcaatccatcactgtttctgaaatgtctacatacactaagaacagagggttcagtttatgctccatcatttgatcatggtgttggcgacccagttgagaatgacatatttgtaaagccacagcacaaaatagtgatagttgaagggaactatctgttactggaagaagatgtttggaccgaaattagagacttgtttgatgagaaatggttcattgacattgacattgatatctccatgcaaagagtgctcaagagacatattgcaaccggaaaagagccagatgtagcagcatggaggatctcctacaacgaccgaccgaatgcagagcttatcctggaatcaaggaagaatgctgaccttgtgatcagatcagtagacttctcaagctagtgttcaattctttcaataggaaatagcattgtggttctagagttggaggttgttgtgggctgtttccgtggagattcctgtacatataataagctgaatgcctgtttcaaattttcatggtgattgtgttgcatgtaataagatattccttcactatgtaccgtggaggattgttaagtaatttattgacattttttaatagaaacacccttcagatttgtgtccaatgtcatatttttgttcctgtagaagatattaggagctttattgttgtatcgaaggagcaaaatgtctaggatcacaggccagagcagctccaagaggcgaccaaaacatatcccaaaactcgttttaggcttcaaaacataaaaatata

SEQ ID NO: 201619 - DNA, 531 bp, Zea Mays
caaatccaatctcctagggtgtctgtaatcatgcttttcacttccactgcatcagcaggtggcttaagactcgccaagtgtgcccattagataacagtgagtgggagttccagaaatatggccactagttcctgggcaccgtcatgtgatgttggggctttgctgccactcaagtgtttttgtctgccaaacagctccatctcttactgctttcgatgcttgcatctatcacccgtcaattataactagctagcagtacgtacacctgggactgtatttggacgatccattgagaggatagtaggcccattttatcaatggtatgtggatcttcataagtgagcttgtattgtgctgtggtaccattttctgaagtcatgtttttttatacgtgcctgtcttgatgttatgaagtgggtttgcctttcggccgcatgtatataggttactgaatgttgcggacaatgccctgaaattatgttgggcactatatcctgtcttgcaagtgataacctggtctcattatgttcc

SEQ ID NO: 201620 - DNA, 3417 bp, Zea Mays
agagtggattcttatagtatctccttgcaattccagagaaataatgggcagtcttggtggctgacttgtgtctatggacctcaaagtaattctgaaaagatcctttttcttcaagagttaaggcatttcagaagcatctgctctgagccttgggtaatagtgggagactttaatctcatctacaaggttgaagacaagaataatgataatattaatagatctatgatgggtcgcttcagaaaatttatcaatgatgttggtctgattgatactcccctaattggtcgcaaatatacctggtccaatcatcaatcttcaccaacactggtccgactggatagagttctctgcactactgattgggaagcgttgttccctaaccatctccttcaaagtgctgcttcagaggactcagatcattgcccactgattcttggacttaacagtatgtgttctggcaagcgtcgatttcatttcgaatccttttggccaaaattggaagggttccaagaggtagttctggaagcctggaattcggttaatgaaagaagttgccctttcctgacattcgaactgaaattgaaatcaactgccaaggctctgcagagatggagtgctaagaaggtaggccatgtgtcctcccagttggcacttgctagagaaattcttcatcagctggagattgcccaagactctcggctcctgtctcctttggaggtttggctcttgagagggcttaaaaaacactccttagcccttgcctccctcaaacgcactattgcccgcctacggtccagaatcagttggataaaggagggcgatgccaactctaagcttttccatatgcatgctaggcacaggcaaaggaagaactttgttgccaagattgtgtcagggatgaacactttcactgatcacggcgagaaggctagagcagtagatgagttttatttcaaacttttgggctgcaaggcggacagatccttgactgttgatttggattacctgggtctaccttctcatgacctgactgatttagatgcgcagattgatgaaaatgaggttctggaatccataatgcaactaccttctgataaggctccggggcctgatggttacacaggcagattttataaagtttgttggccaattatcaagacggatgtgatggctgttattgctgcaatttggtgcagaaaattccagcagtttggaagacttaacactgcatttgttactcttatccctaagaaggagggggctgaggaagtaaaagactttcgacctatcagtctggtacacagcattgctaaacttgtcaccaagttgatggccaacagattgtcccaacgactgcatgatcttgtttctcttaggcagagcgccttcatcaagggccgtttcatccaagacaacttcatgctggttcagcagactgccagattgcttcaccagcaaggccaaccgagggttcttttgaagcttgacatcactaaagccttcgattctgtttcttggccttttttgcttgaagtacttcagagattgggtttcgggcagatttggagggatatcttaagtggccttttagcaacttcctccacacaggttttactcaatggagttccggggaacaccatcccccacaagagagggctgcggcaaggggatcccctctcccctatgctttttattttagtgatggacatccttggttgcattgtggccaaagctgatgaggaggggcagcttgagcctctctcttccaaaccactgcaccacagaatttcgctatatgctgatgacgcggttctttttttccacccaagggagagtgaaattcatactgtcctaggtattctgaatttgtttggagaagcttcaggattaaaaactaatattcagaaaagcagtgtgtatccaatccgttgtgggcaggatgagctggacatcctcaatgattggcttccttgtgaactttcgtctttcccatgcaaatatcttggtctacctttgtccttaaaaaagctgtccaataatcagctgcagcccattattgacaaagtggctgatcaactttctgggtggaaagcggacctcatgacacgggcaggtagaagagtgcaggttcagtacgtgatgactggcatgcttatatatctagtcatggcagttgacattcccacaggctcgctcaaagctatcgacaagatcagaaaaggatttctctggcgtgggaggaaagaggtcagaggaggacattgtttagtggcttggggaagagtttgtagacctcttgaaattggtggacttgggatttctagtcttaaagaactaggatgggccttaagaatgagatggttgtggctgcgcaaaacggatccggataagccttggtcctcattgcccatgcagatatccaacaaaataaaggcctttttttgcaccgccctgctcactgaaattggaaatgggtcctcaaccttattttggctggatcgttgggtccacggaaagaatattgaagatattgctcctcgactgcttgcagcggtaccaaagagaattaggaacagcagaactgtgcttgaggccttgacagacaggagatggctaactgatattaaaggggccttgacagtaggtgtctttgccgatctcctagatctctgggatgaacttcaaagtgtccagcttcattcagacagggaggacaaacatattttcaggttcgctaatgatggaatttattcagcgaaagcagcttacaaaggtgctggacagcagatcgtttgcagaagagaggtcttagccatcctgacaaatgtgtcctgtgtgaccaagagcaagaaaccatagatcacattttggtggggtgtgtttttgctaggagtttttggtttcagctgctgggacaggtcaacttatctgcctttactcctgtgatgggagaaactaaaatgatggagtggtggagcagaagcagtgagcagttacaggggattgctaaaaagggattcaattctttgattacccttgggctttggactctctggaaccacagaaatggatgtgtttttgatagagctacacctagcatggagggtgctatcagaagagctgaagaagaaattattatttggaattttgcgggggccaaacatcttgcccttattacagctcccattccaggtgtcatgtagggatctaggagtaagttcagtagttaacctcactagggaagggtgttggttggttaagtttagattgtgggggtaggttggtctagtttgctttctttcttctcctttttctttttctttttctttatatttctttttctgttgtgtttgtaattggtctaatttttagacccttcttcttaatacaatgatacgcagctctcctgcgtgttcg

SEQ ID NO: 201621 - DNA, 2062 bp, Zea Mays
atcatgaccaaactatggtgggctatgctgatgctggatatcaatcagatccctataatggtatatctcagactggctttgtattcgtgtgtggtggcactgttgtatcctagagatcgcgcaaacaggcattagtaacgacgtctactaaccactcagagattatctcgctatatgaagccgcacgagaatgtgtttgactacggcggatgactaaccacatccagaagtcatgtggttccaacaccacaaataactccaccattatctatgaagataatgttgtatgtgttgcacaaatggaaacagactatatatattaagagcaataagactaagcatatttctcctaagtatttttatcctcatgaactccagattgagggtgaggtgaaaatcctgcaagtcaagtcttgtgataatctggctgatttattcactaaatccttacctgtagtcacattcagaaaatgtgtacgaggtatagggatgagacatttgagagacctgcaggttcagggggaaatcacctctgaacttcagcccttactattcgacctgaagatcgtatattatagaccttgaaggttgcagttgccctgaagacacccgttgtactcttttccattgtgagttttcctgaagtttctcacagatggtttttaacgaggcaacaagtgcaatacatcgagtggcactatgctctcttttctccattttttcccgctgggttttttcggagttttgatgagacataagtcgtcacggtattcgcccaagggggagtgttaagaaaccttaaaaggggttttatggactaataccgaaactgcccttgagagagttcgagacttatatatatgtatctatacccatcataataaagatatacaaaaagaggtttcattcactgtgtctcttgttcttctgtgtgttggattactgggaaggaagcggggttctacaacttctcgcgcccctactgttgtcgggagggttcgaagtctgaatcggggatctgggacgactacgttatttaaccagttacatcccttaccacgagcacatgattagtaagaccgcgtaatagcatgcgcacgtgtatatcccactggtgttagtagaagcacttgtggtcagcccactagtattctgctcggccttaaatgtactgggcccgcttgtctccgagccatccggcccatgtggtgagaatcgaagctaagcgttcgtgaactcatccaatccatcttctctcaaacgagtccacatccacatcggcgtgctcccgagccctgaacgctgtccctgacccgttcacccgtcgcaggcgagcagcagacagccagaggagacgtcgcgcctgtgcctaccatggacgagaaggagttctggcgcatgctcgacctcttccccgtcgtccgctcccgtgactattgcgctgatcctggaacatctatcagaggaaccagacagcgatcacgagttcagcgaagggcaatgacaaggactcatccgacgcacaagatttatttatgcagaagttgaagatggctgcagagaaaaagattggaacaacaaaagcagagttcttctgcaaggcatttgaagaaactcatgagaagcttgtttacaaagagctgaatttggatgctgctaagaagtttctgagcgcatatgagagctgatgatgaacagtaggtagatgctgctcaaggataggcaggtgtcaatgatcctagaaagttgttgatgctgtcgagattttgatcattgacaaacttgtgttgtgtgcagacagtagacatccctttttggtcagctacacttcttttttcagagaaacttttgaagttgtccaattgtacgctgatatacgtttttctcggtttgctcgtcccccttttttcgctctagaagctctgaaactaaccaatccaggtaacccgtctactaacccatctgtagggtgacaatccgtacgaccgtacccatcttaggacttgttcggttattcctgttacctatggattggatgagattgaaaaaatttgagaagaaa

SEQ ID NO: 201622 - DNA, 3685 bp, Zea Mays
gtttgcgactgcgaacacgcgcgcaaaaaatattgacgaaaactggaggggtaaaggggaaaaggcgacggccgcctgggccctggaggagcgagaaggcggaagaaggggagcggcagtcgcaggccgcagctcgttgatggtggttagggtttcgccgcccgcacgctcgacctgctgaagaatcgcccccctgttgaagaggtctgcgcctcgccctataaggctccggggaagaggagatagacatcagtggaccccggcgcgcggctgatggcggagcaggagcggagggacgcggaggctgggggcgatgccgcgggcgcagcggtggcgtctcacaccagcagcatgcagcgtgtcaaagtataccgtttggctgatggtgggaagtgggacgatcaaggaacaggtcatgtttctattgattacattgagggttcgaaagaactcggtttgactgttttagatgaagatgacaatgagacgctacttatgcacaacatcacatctgatgatatttacagaaaacaagaagaaacaatcatttcatggagagatcgtgaagcagcgacagacttagcactaagctttcaggaagctgcaggatgctcctacatatgggaacatatatgtgaaattcagagaaaccttcagttcagtaaccttggtgctccggaagttggtcgtcgtcaatcatcagaatctctagaagcctctagaataatgcattcaaatgatgattcattccgctctgctaacggtgaattcagggaacttcctcctgttgagctgtctaatcttccttttattttgaagactgtattggagggtggcattacagatcagatccacatggcagagttgataacacaagatcgggactttttcccaaagctagtggacattttcagaatgtgcgaggatttagagaacatagatgatcttcacatgattttcaaattggtcaagggaataatattgttgaacagtccgtcaatctttgacaagattttctctgatgagtttatccttgacataataggtgcccttgaatatgatccagaggttccaagagtgcaaaagcaccgtgcttttctaaaagatcatgtagttttcaaagaggccatacatattgaaaatgtttctgttatttcgaagattcatcaaacatacagaataggctatcttaaggatgttattctgccacgaatattggatgatgccactctaggaagttttaacacaatgatacattcaaataatgcttctgttctgttcttgcatgaattttgcacacttagcaagagtctaccagttgttcagcaactgcgactgtttcgggatctttcaggtgaaggcgttttcgaaataatttctgatgtgttgcagagtcaagatagaaaaatcgtttcagctgggacagatatgctgatactttttcttaatcaggaccctaacctattgaggtcatatattgttcagcaagaaggaaattctcttctaggacttctggcatggtaactgacttcggtgaggaaatgcactgccagtttctagaaatcttgcgcatattgatggattctttcactatgtctggagcacatagagacgtaattattgagattttctacgaaaggcatcttgactatttggttgatgtaatagcatcctcttgtcccccgaggagcttgtctcgaccaagatctaactctgtacgtgttggtggaaacgctgaaggacatcatatcaagcctgagattttgttaaatgtttgtgaactactgtgcttttgtgtagttcatcatccctacagaattaagtgcaattttcttatgaataatgctatcgagaaaatccttacattgactcaacggagggagaagtttttggttgtagcagctgttaggtttatgcgtactattatatccagaaatgatgagcatctcattcgccatgttgtgaagttcaacttgttgaaaccaataattgatatctttgttgacaatggggagaggtacaacatgctacattcaggagtacttgaattgttggaatacatacgaaaggaaaatataaaagctctcactatctatgttattgagtctttctggtatgaacttgtcaagtttgaacacttcgggagtattcaggccttcaaactcaagtatcaacagtacgtggagagtgctgaaccaatgttaaatgcgagtgtgcctaacatgagaaagaaggcagaacaaagaggtctagagaaggaagaggaagactacttcaataaggatagtgatgaagaagattcaggctccggccggcgggataaacatgcacagaaccagcatagcaagcctaagcccaaggtccctaatggaagtgaagctgatgacactgatggcgcctctagacctaaatctgctggacttgtggactatgacgatgatgacgatgaagacttcaatccaccaccaatggagccttctacgcctgcagaggatgatgtgcccttaaacatatccccggtgaagcggaagccagtggatgtgaaacatgcagatggggagggtcgcaggaggcaaaaaatagaaaccagaattagttgtgctaaaattgctgctgttactagtaccattattaagcacacagatctacaaaacaagcatgcttgctacttgcctacatcagccgcgccaagtactgaacccaatggtgtttttagggagcgtggcactaactctgaggagcatcaacattctgtagagaacacagaaacttcacgacaagctggtggtgattgtataaaagacgggggcagtatgtctcccgagaaggctgtaaatacgacaacgacaagtgattcggagccttattcagtaagatgactgactactacacagctggtttgtccctgtacccaacctgttctcttgccaacaggaaggaatcggaatgtgtttggctccaaaaattcattgatatcaagctggaagcatgattggaggtgacatagattgcagctacctttacatctcaagtaaaattccagttacccctttttgagcctgtaaagttaattttccacaaggaaagatctgacgaacatcagaattgggatggctgtagattggaacattgaatgggccttgctcctgctgctatgctcgctattgtatctcttttatgagctaatggagtagcagtgaatgtgtgccttcaacttcactgttttctctccagtcattgactctgatgttactgctgtaaaacaagtaggactaaggcatagtttcagttgaatagcgtttttgccggattctgctgactcacttatacgactgtaatttgatggttcatagttttggctggacatgctgtcttggataattattcaagccttgtggtagaatagttctttaggccaaagatgtgctaggtagaatttcgaaagtgaataatgttggatgtattgggttaaggatggcaggtgtacatgatatcctactccagaacaggttcgctaaatactgtggtacaatcaaaaaacattcttgctcttgttaggattgtaatatctttcactaaattacacatgtctgcaaaacagattcatgagatgtgaaaacaatacacaggtcatggctactcaatctacgatgcagaatcatttgttcaaccagtgcgcctttac

SEQ ID NO: 201623 - DNA, 3769 bp, Zea Mays
gtttgcgactgcgaacacgcgcgcaaaaaatattgacgaaaactggaggggtaaaggggaaaaggcgacggccgcctgggccctggaggagcgagaaggcggaagaaggggagcggcagtcgcaggccgcagctcgttgatggtggttagggtttcgccgcccgcacgctcgacctgctgaagaatcgcccccctgttgaagaggtctgcgcctcgccctataaggctccggggaagaggagatagacatcagtggaccccggcgcgcggctgatggcggagcaggagcggagggacgcggaggctgggggcgatgccgcgggcgcagcggtggcgtctcacaccagcagcatgcagcgtgtcaaagtataccgtttggctgatggtgggaagtgggacgatcaaggaacaggtcatgtttctattgattacattgagggttcgaaagaactcggtttgactgttttagatgaagatgacaatgagacgctacttatgcacaacatcacatctgatgatatttacagaaaacaagaagaaacaatcatttcatggagagatcgtgaagcagcgacagacttagcactaagctttcaggaagctgcaggatgctcctacatatgggaacatatatgtgaaattcagagaaaccttcagttcagtaaccttggtgctccggaagttggtcgtcgtcaatcatcagaatctctagaagcctctagaataatgcattcaaatgatgattcattccgctctgctaacggtgaattcagggaacttcctcctgttgagctgtctaatcttccttttattttgaagactgtattggagggtggcattacagatcagatccacatggcagagttgataacacaagatcgggactttttcccaaagctagtggacattttcagaatgtgcgaggatttagagaacatagatgatcttcacatgattttcaaattggtcaagggaataatattgttgaacagtccgtcaatctttgacaagattttctctgatgagtttatccttgacataatagatgatccagaggttccaagagtgcaaaagcaccgtgcttttctaaaagatcatgtagttttcaaagaggccatacatattgaaaatgtttctgttatttcgaagattcatcaaacatacagaataggctatcttaaggatgttattctgccacgaatattggatgatgccactctaggaagttttaacacaatgatacattcaaataatgcttctgttatttccatgctaaaggatgacacaccctttataagacaactatttgctaggatgaggtcatcagatatttctatggaatcaaaacgagaattggttctgttcttgcatgaattttgcacacttagcaagagtctaccagttgttcagcaactgcgactgtttcgggatctttcaggtgaaggcgttttcgaaataatttctgatgtgttgcagagtcaagatagaaaaatcgtttcagctgggacagatatgctgatactttttcttaatcaggaccctaacctattgaggtcatatattgttcagcaagaaggaaattctcttctaggacttctggcatggtaactgacttcggtgaggaaatgcactgccagtttctagaaatcttgcgcatattgatggattctttcactatgtctggagcacatagagacgtaattattgagattttctacgaaaggcatcttgactatttggttgatgtaatagcatcctcttgtcccccgaggagcttgtctcgaccaagatctaactctgtacgtgttggtggaaacgctgaaggacatcatatcaagcctgagattttgttaaatgtttgtgaactactgtgcttttgtgtagttcatcatccctacagaattaagtgcaattttcttatgaataatgctatcgagaaaatccttacattgactcaacggagggagaagtttttggttgtagcagctgttaggtttatgcgtactattatatccagaaatgatgagcatctcattcgccatgttgtgaagttcaacttgttgaaaccaataattgatatctttgttgacaatggggagaggtacaacatgctacattcaggagtacttgaattgttggaatacatacgaaaggaaaatataaaagctctcactatctatgttattgagtctttctggtatgaacttgtcaagtttgaacacttcgggagtattcaggccttcaaactcaagtatcaacagtacgtggagagtgctgaaccaatgttaaatgcgagtgtgcctaacatgagaaagaaggcagaacaaagaggtctagagaaggaagaggaagactacttcaataaggatagtgatgaagaagattcaggctccggccggcgggataaacatgcacagaaccagcatagcaagcctaagcccaaggtccctaatggaagtgaagctgatgacactgatggcgcctctagacctaaatctgctggacttgtggactatgacgatgatgacgatgaagacttcaatccaccaccaatggagccttctacgcctgcagaggatgatgtgcccttaaacatatccccggtgaagcggaagccagtggatgtgaaacatgcagatggggagggtcgcaggaggcaaaaaatagaaaccagaattagttgtgctaaaattgctgctgttactagtaccattattaagcacacagatctacaaaacaagcatgcttgctacttgcctacatcagccgcgccaagtactgaacccaatggtgtttttagggagcgtggcactaactctgaggagcatcaacattctgtagagaacacagaaacttcacgacaagctggtggtgattgtataaaagacgggggcagtatgtctcccgagaaggctgtaaatacgacaacgacaagtgattcggagccttattcagtaagatgactgactactacacagctggtttgtccctgtacccaacctgttctcttgccaacaggaaggaatcggaatgtgtttggctccaaaaattcattgatatcaagctggaagcatgattggaggtgacatagattgcagctacctttacatctcaagtaaaattccagttacccctttttgagcctgtaaagttaattttccacaaggaaagatctgacgaacatcagaattgggatggctgtagattggaacattgaatgggccttgctcctgctgctatgctcgctattgtatctcttttatgagctaatggagtagcagtgaatgtgtgccttcaacttcactgttttctctccagtcattgactctgatgttactgctgtaaaacaagtaggactaaggcatagtttcagttgaatagcgtttttgccggattctgctgactcacttatacgactgtaatttgatggttcatagttttggctggacatgctgtcttggataattattcaagccttgtggtagaatagttctttaggccaaagatgtgctaggtagaatttcgaaagtgaataatgttggatgtattgggttaaggatggcaggtgtacatgatatcctactccagaacaggttcgctaaatactgtggtacaatcaaaaaacattcttgctcttgttaggattgtaatatctttcactaaattacacatgtctgcaaaacagattcatgagatgtgaaaacaatacacaggtcatggctactcaatctacgatgcagaatcatttgttcaaccagtgcgcctttac

SEQ ID NO: 201624 - DNA, 3578 bp, Zea Mays
gtttgcgactgcgaacacgcgcgcaaaaaatattgacgaaaactggaggggtaaaggggaaaaggcgacggccgcctgggccctggaggagcgagaaggcggaagaaggggagcggcagtcgcaggccgcagctcgttgatggtggttagggtttcgccgcccgcacgctcgacctgctgaagaatcgcccccctgttgaagaggtctgcgcctcgccctataaggctccggggaagaggagatagacatcagtggaccccggcgcgcggctgatggcggagcaggagcggagggacgcggaggctgggggcgatgccgcgggcgcagcggtggcgtctcacaccagcagcatgcagcgtgtcaaagtataccgtttggctgatggtgggaagtgggacgatcaaggaacaggtcatgtttctattgattacattgagggttcgaaagaactcggtttgactgttttagatgaagatgacaatgagacgctacttatgcacaacatcacatctgatgatatttacagaaaacaagaagaaacaatcatttcatggagagatcgtgaagcagcgacagacttagcactaagctttcaggaagctgcaggatgctcctacatatgggaacatatatgtgaaattcagagaaaccttcagttcagtaaccttggtgctccggaagttggtcgtcgtcaatcatcagaatctctagaagcctctagaataatgcattcaaatgatgattcattccgctctgctaacggtgaattcagggaacttcctcctgttgagctgtctaatcttccttttattttgaagactgtattggagggtggcattacagatcagatccacatggcagagttgataacacaagatcgggactttttcccaaagctagtggacattttcagaatgtgcgaggatttagagaacatagatgatcttcacatgattttcaaattggtcaagggaataatattgttgaacagtccgtcaatctttgacaagattttctctgatgagtttatccttgacataataggtgcccttgaatatgatccagaggttccaagagtgcaaaagcaccgtgcttttctaaaagatcatgtagttttcaaagaggccatacatattgaaaatgtttctgttatttcgaagattcatcaaacatacagaataggctatcttaaggttctgttcttgcatgaattttgcacacttagcaagagtctaccagttgttcagcaactgcgactgtttcgggatctttcaggtgaaggcgttttcgaaataatttctgatgtgttgcagagtcaagatagaaaaatcgtttcagaccctaacctattgaggtcatatattgttcagcaagaaggaaattctcttctaggacttctggttaaaggcatggtaactgacttcggtgaggaaatgcactgccagtttctagaaatcttgcgcatattgatggattctttcactatgtctggagcacatagagacgtaattattgagattttctacgaaaggcatcttgactatttggttgatgtaatagcatcctcttgtcccccgaggagcttgtctcgaccaagatctaactctgtacgtgttggtggaaacgctgaaggacatcatatcaagcctgagattttgttaaatgtttgtgaactactgtgcttttgtgtagttcatcatccctacagaattaagtgcaattttcttatgaataatgctatcgagaaaatccttacattgactcaacggagggagaagtttttggttgtagcagctgttaggtttatgcgtactattatatccagaaatgatgagcatctcattcgccatgttgtgaagttcaacttgttgaaaccaataattgatatctttgttgacaatggggagaggtacaacatgctacattcaggagtacttgaattgttggaatacatacgaaaggaaaatataaaagctctcactatctatgttattgagtctttctggtatgaacttgtcaagtttgaacacttcgggagtattcaggccttcaaactcaagtatcaacagtacgtggagagtgctgaaccaatgttaaatgcgagtgtgcctaacatgagaaagaaggcagaacaaagaggtctagagaaggaagaggaagactacttcaataaggatagtgatgaagaagattcaggctccggccggcgggataaacatgcacagaaccagcatagcaagcctaagcccaaggtccctaatggaagtgaagctgatgacactgatggcgcctctagacctaaatctgctggacttgtggactatgacgatgatgacgatgaagacttcaatccaccaccaatggagccttctacgcctgcagaggatgatgtgcccttaaacatatccccggtgaagcggaagccagtggatgtgaaacatgcagatggggagggtcgcaggaggcaaaaaatagaaaccagaattagttgtgctaaaattgctgctgttactagtaccattattaagcacacagatctacaaaacaagcatgcttgctacttgcctacatcagccgcgccaagtactgaacccaatggtgtttttagggagcgtggcactaactctgaggagcatcaacattctgtagagaacacagaaacttcacgacaagctggtggtgattgtataaaagacgggggcagtatgtctcccgagaaggctgtaaatacgacaacgacaagtgattcggagccttattcagtaagatgactgactactacacagctggtttgtccctgtacccaacctgttctcttgccaacaggaaggaatcggaatgtgtttggctccaaaaattcattgatatcaagctggaagcatgattggaggtgacatagattgcagctacctttacatctcaagtaaaattccagttacccctttttgagcctgtaaagttaattttccacaaggaaagatctgacgaacatcagaattgggatggctgtagattggaacattgaatgggccttgctcctgctgctatgctcgctattgtatctcttttatgagctaatggagtagcagtgaatgtgtgccttcaacttcactgttttctctccagtcattgactctgatgttactgctgtaaaacaagtaggactaaggcatagtttcagttgaatagcgtttttgccggattctgctgactcacttatacgactgtaatttgatggttcatagttttggctggacatgctgtcttggataattattcaagccttgtggtagaatagttctttaggccaaagatgtgctaggtagaatttcgaaagtgaataatgttggatgtattgggttaaggatggcaggtgtacatgatatcctactccagaacaggttcgctaaatactgtggtacaatcaaaaaacattcttgctcttgttaggattgtaatatctttcactaaattacacatgtctgcaaaacagattcatgagatgtgaaaacaatacacaggtcatggctactcaatctacgatgcagaatcatttgttcaaccagtgcgcctttac

SEQ ID NO: 201625 - DNA, 3687 bp, Zea Mays
gtttgcgactgcgaacacgcgcgcaaaaaatattgacgaaaactggaggggtaaaggggaaaaggcgacggccgcctgggccctggaggagcgagaaggcggaagaaggggagcggcagtcgcaggccgcagctcgttgatggtggttagggtttcgccgcccgcacgctcgacctgctgaagaatcgcccccctgttgaagaggtctgcgcctcgccctataaggctccggggaagaggagatagacatcagtggaccccggcgcgcggctgatggcggagcaggagcggagggacgcggaggctgggggcgatgccgcgggcgcagcggtggcgtctcacaccagcagcatgcagcgtgtcaaagtataccgtttggctgatggtgggaagtgggacgatcaaggaacaggtcatgtttctattgattacattgagggttcgaaagaactcggtttgactgttttagatgaagatgacaatgagacgctacttatgcacaacatcacatctgatgatatttacagaaaacaagaagaaacaatcatttcatggagagatcgtgaagcagcgacagacttagcactaagctttcaggaagctgcaggatgctcctacatatgggaacatatatgtgaaattcagagaaaccttcagttcagtaaccttggtgctccggaagttggtcgtcgtcaatcatcagaatctctagaagcctctagaataatgcattcaaatgatgattcattccgctctgctaacggtgaattcagggaacttcctcctgttgagctgtctaatcttccttttattttgaagactgtattggagggtggcattacagatcagatccacatggcagagttgataacacaagatcgggactttttcccaaagctagtggacattttcagaatgtgcgaggatttagagaacatagatgatcttcacatgattttcaaattggtcaagggaataatattgttgaacagtccgtcaatctttgacaagattttctctgatgagtttatccttgacataataggtgcccttgaatatgatccagaggttccaagagtgcaaaagcaccgtgcttttctaaaagatcatgtagttttcaaagaggccatacatattgaaaatgtttctgttatttcgaagattcatcaaacatacagaataggctatcttaaggatgttattctgccacgaatattggatgatgccactctaggaagttttaacacaatgatacattcaaataatgcttctgttctgttcttgcatgaattttgcacacttagcaagagtctaccagttgttcagcaactgcgactgtttcgggatctttcaggtgaaggcgttttcgaaataatttctgatgtgttgcagagtcaagatagaaaaatcgtttcagacagatatgctgatactttttcttaatcaggaccctaacctattgaggtcatatattgttcagcaagaaggaaattctcttctaggacttctggttaaaggcatggtaactgacttcggtgaggaaatgcactgccagtttctagaaatcttgcgcatattgatggattctttcactatgtctggagcacatagagacgtaattattgagattttctacgaaaggcatcttgactatttggttgatgtaatagcatcctcttgtcccccgaggagcttgtctcgaccaagatctaactctgtacgtgttggtggaaacgctgaaggacatcatatcaagcctgagattttgttaaatgtttgtgaactactgtgcttttgtgtagttcatcatccctacagaattaagtgcaattttcttatgaataatgctatcgagaaaatccttacattgactcaacggagggagaagtttttggttgtagcagctgttaggtttatgcgtactattatatccagaaatgatgagcatctcattcgccatgttgtgaagttcaacttgttgaaaccaataattgatatctttgttgacaatggggagaggtacaacatgctacattcaggagtacttgaattgttggaatacatacgaaaggaaaatataaaagctctcactatctatgttattgagtctttctggtatgaacttgtcaagtttgaacacttcgggagtattcaggccttcaaactcaagtatcaacagtacgtggagagtgctgaaccaatgttaaatgcgagtgtgcctaacatgagaaagaaggcagaacaaagaggtctagagaaggaagaggaagactacttcaataaggatagtgatgaagaagattcaggctccggccggcgggataaacatgcacagaaccagcatagcaagcctaagcccaaggtccctaatggaagtgaagctgatgacactgatggcgcctctagacctaaatctgctggacttgtggactatgacgatgatgacgatgaagacttcaatccaccaccaatggagccttctacgcctgcagaggatgatgtgcccttaaacatatccccggtgaagcggaagccagtggatgtgaaacatgcagatggggagggtcgcaggaggcaaaaaatagaaaccagaattagttgtgctaaaattgctgctgttactagtaccattattaagcacacagatctacaaaacaagcatgcttgctacttgcctacatcagccgcgccaagtactgaacccaatggtgtttttagggagcgtggcactaactctgaggagcatcaacattctgtagagaacacagaaacttcacgacaagctggtggtgattgtataaaagacgggggcagtatgtctcccgagaaggctgtaaatacgacaacgacaagtgattcggagccttattcagtaagatgactgactactacacagctggtttgtccctgtacccaacctgttctcttgccaacaggaaggaatcggaatgtgtttggctccaaaaattcattgatatcaagctggaagcatgattggaggtgacatagattgcagctacctttacatctcaagtaaaattccagttacccctttttgagcctgtaaagttaattttccacaaggaaagatctgacgaacatcagaattgggatggctgtagattggaacattgaatgggccttgctcctgctgctatgctcgctattgtatctcttttatgagctaatggagtagcagtgaatgtgtgccttcaacttcactgttttctctccagtcattgactctgatgttactgctgtaaaacaagtaggactaaggcatagtttcagttgaatagcgtttttgccggattctgctgactcacttatacgactgtaatttgatggttcatagttttggctggacatgctgtcttggataattattcaagccttgtggtagaatagttctttaggccaaagatgtgctaggtagaatttcgaaagtgaataatgttggatgtattgggttaaggatggcaggtgtacatgatatcctactccagaacaggttcgctaaatactgtggtacaatcaaaaaacattcttgctcttgttaggattgtaatatctttcactaaattacacatgtctgcaaaacagattcatgagatgtgaaaacaatacacaggtcatggctactcaatctacgatgcagaatcatttgttcaaccagtgcgcctttac

SEQ ID NO: 201626 - DNA, 3770 bp, Zea Mays
gtttgcgactgcgaacacgcgcgcaaaaaatattgacgaaaactggaggggtaaaggggaaaaggcgacggccgcctgggccctggaggagcgagaaggcggaagaaggggagcggcagtcgcaggccgcagctcgttgatggtggttagggtttcgccgcccgcacgctcgacctgctgaagaatcgcccccctgttgaagaggtctgcgcctcgccctataaggctccggggaagaggagatagacatcagtggaccccggcgcgcggctgatggcggagcaggagcggagggacgcggaggctgggggcgatgccgcgggcgcagcggtggcgtctcacaccagcagcatgcagcgtgtcaaagtataccgtttggctgatggtgggaagtgggacgatcaaggaacaggtcatgtttctattgattacattgagggttcgaaagaactcggtttgactgttttagatgaagatgacaatgagacgctacttatgcacaacatcacatctgatgatatttacagaaaacaagaagaaacaatcatttcatggagagatcgtgaagcagcgacagacttagcactaagctttcaggaagctgcaggatgctcctacatatgggaacatatatgtgaaattcagagaaaccttcagttcagtaaccttggtgctccggaagttggtcgtcgtcaatcatcagaatctctagaagcctctagaataatgcattcaaatgatgattcattccgctctgctaacggtgaattcagggaacttcctcctgttgagctgtctaatcttccttttattttgaagactgtattggagggtggcattacagatcagatccacatggcagagttgataacacaagatcgggactttttcccaaagctagtggacattttcagaatgtgcgaggatttagagaacatagatgatcttcacatgattttcaaattggtcaagggaataatattgttgaacagtccgtcaatctttgacaagattttctctgatgagtttatccttgacataataggtgcccttgaatatgatccagaggttccaagagtgcaaaagcaccgtgcttttctaaaagatcatgtagttttcaaagaggccatacatattgaaaatgtttctgttatttcgaagattcatcaaacatacagaataggctatcttaaggatgttattctgccacgaatattggatgatgccactctaggaagttttaacacaatgatacattcaaataatgcttctgatgacacaccctttataagacaactatttgctaggatgaggtcatcagatatttctatggaatcaaaacgagaattggttctgttcttgcatgaattttgcacacttagcaagagtctaccagttgttcagcaactgcgactgtttcgggatctttcaggtgaaggcgttttcgaaataatttctgatgtgttgcagagtcaagatagaaaaatcgtttcagctgggacagatatgctgatactttttcttaatcaggaccctaacctattgaggtcatatattgttcagcaagaaggaaattctcttctaggacttctggttaaaggcatggtaactgacttcggtgaggaaatgcactgccagtttctagaaatcttgcgcatattgatggattctttcactatgtctggagcacatagagacgtaattattgagattttctacgaaaggcatcttgactatttggttgatgtaatagcatcctcttgtcccccgaggagcttgtctcgaccaagatctaactctgtacgtgttggtggaaacgctgaaggacatcatatcaagcctgagattttgttaaatgtttgtgaactactgtgcttttgtgtagttcatcatccctacagaattaagtgcaattttcttatgaataatgctatcgagaaaatccttacattgactcaacggagggagaagtttttggttgtagcagctgttaggtttatgcgtactattatatccagaaatgatgagcatctcattcgccatgttgtgaagttcaacttgttgaaaccaataattgatatctttgttgacaatggggagaggtacaacatgctacattcaggagtacttgaattgttggaatacatacgaaaggaaaatataaaagctctcactatctatgttattgagtctttctggtatgaacttgtcaagtttgaacacttcgggagtattcaggccttcaaactcaagtatcaacagtacgtggagagtgctgaaccaatgttaaatgcgagtgtgcctaacatgagaaagaaggcagaacaaagaggtctagagaaggaagaggaagactacttcaataaggatagtgatgaagaagattcaggctccggccggcgggataaacatgcacagaaccagcatagcaagcctaagcccaaggtccctaatggaagtgaagctgatgacactgatggcgcctctagacctaaatctgctggacttgtggactatgacgatgatgacgatgaagacttcaatccaccaccaatggagccttctacgcctgcagaggatgatgtgcccttaaacatatccccggtgaagcggaagccagtggatgtgaaacatgcagatggggagggtcgcaggaggcaaaaaatagaaaccagaattagttgtgctaaaattgctgctgttactagtaccattattaagcacacagatctacaaaacaagcatgcttgctacttgcctacatcagccgcgccaagtactgaacccaatggtgtttttagggagcgtggcactaactctgaggagcatcaacattctgtagagaacacagaaacttcacgacaagctggtggtgattgtataaaagacgggggcagtatgtctcccgagaaggctgtaaatacgacaacgacaagtgattcggagccttattcagtaagatgactgactactacacagctggtttgtccctgtacccaacctgttctcttgccaacaggaaggaatcggaatgtgtttggctccaaaaattcattgatatcaagctggaagcatgattggaggtgacatagattgcagctacctttacatctcaagtaaaattccagttacccctttttgagcctgtaaagttaattttccacaaggaaagatctgacgaacatcagaattgggatggctgtagattggaacattgaatgggccttgctcctgctgctatgctcgctattgtatctcttttatgagctaatggagtagcagtgaatgtgtgccttcaacttcactgttttctctccagtcattgactctgatgttactgctgtaaaacaagtaggactaaggcatagtttcagttgaatagcgtttttgccggattctgctgactcacttatacgactgtaatttgatggttcatagttttggctggacatgctgtcttggataattattcaagccttgtggtagaatagttctttaggccaaagatgtgctaggtagaatttcgaaagtgaataatgttggatgtattgggttaaggatggcaggtgtacatgatatcctactccagaacaggttcgctaaatactgtggtacaatcaaaaaacattcttgctcttgttaggattgtaatatctttcactaaattacacatgtctgcaaaacagattcatgagatgtgaaaacaatacacaggtcatggctactcaatctacgatgcagaatcatttgttcaaccagtgcgcctttac

SEQ ID NO: 201627 - DNA, 3789 bp, Zea Mays
gtttgcgactgcgaacacgcgcgcaaaaaatattgacgaaaactggaggggtaaaggggaaaaggcgacggccgcctgggccctggaggagcgagaaggcggaagaaggggagcggcagtcgcaggccgcagctcgttgatggtggttagggtttcgccgcccgcacgctcgacctgctgaagaatcgcccccctgttgaagaggtctgcgcctcgccctataaggctccggggaagaggagatagacatcagtggaccccggcgcgcggctgatggcggagcaggagcggagggacgcggaggctgggggcgatgccgcgggcgcagcggtggcgtctcacaccagcagcatgcagcgtgtcaaagtataccgtttggctgatggtgggaagtgggacgatcaaggaacaggtcatgtttctattgattacattgagggttcgaaagaactcggtttgactgttttagatgaagatgacaatgagacgctacttatgcacaacatcacatctgatgatatttacagaaaacaagaagaaacaatcatttcatggagagatcgtgaagcagcgacagacttagcactaagctttcaggaagctgcaggatgctcctacatatgggaacatatatgtgaaattcagagaaaccttcagttcagtaaccttggtgctccggaagttggtcgtcgtcaatcatcagaatctctagaagcctctagaataatgcattcaaatgatgattcattccgctctgctaacggtgaattcagggaacttcctcctgttgagctgtctaatcttccttttattttgaagactgtattggagggtggcattacagatcagatccacatggcagagttgataacacaagatcgggactttttcccaaagctagtggacattttcagaatgtgcgaggatttagagaacatagatgatcttcacatgattttcaaattggtcaagggaataatattgttgaacagtccgtcaatctttgacaagattttctctgatgagtttatccttgacataataggtgcccttgaatatgatccagaggttccaagagtgcaaaagcaccgtgcttttctaaaagatcatgtagttttcaaagaggccatacatattgaaaatgtttctgttatttcgaagattcatcaaacatacagaataggctatcttaaggatgttattctgccacgaatattggatgatgccactctaggaagttttaacacaatgatacattcaaataatgcttctgttatttccatgctaaaggatgacacaccctttataagacaactatttgctaggatgaggtcatcagatatttctatggaatcaaaacgagaattggttctgttcttgcatgaattttgcacacttagcaagagtctaccagttgttcagcaactgcgactgtttcggggatctttcaggtgaaggcgttttcgaaataatttctgatgtgttgcagagtcaagatagaaaaatcgtttcagctgggacagatatgctgatactttttcttaatcaggaccctaacctattgaggtcatatattgttcagcaagaaggaaattctcttctaggacttctggttaaaggcatggtaactgacttcggtgaggaaatgcactgccagtttctagaaatcttgcgcatattgatggattctttcactatgtctggagcacatagagacgtaattattgagattttctacgaaaggcatcttgactatttggttgatgtaatagcatcctcttgtcccccgaggagcttgtctcgaccaagatctaactctgtacgtgttggtggaaacgctgaaggacatcatatcaagcctgagattttgttaaatgtttgtgaactactgtgcttttgtgtagttcatcatccctacagaattaagtgcaattttcttatgaataatgctatcgagaaaatccttacattgactcaacggagggagaagtttttggttgtagcagctgttaggtttatgcgtactattatatccagaaatgatgagcatctcattcgccatgttgtgaagttcaacttgttgaaaccaataattgatatctttgttgacaatggggagaggtacaacatgctacattcaggagtacttgaattgttggaatacatacgaaaggaaaatataaaagctctcactatctatgttattgagtctttctggtatgaacttgtcaagtttgaacacttcgggagtattcaggccttcaaactcaagtatcaacagtacgtggagagtgctgaaccaatgttaaatgcgagtgtgcctaacatgagaaagaaggcagaacaaagaggtctagagaaggaagaggaagactacttcaataaggatagtgatgaagaagattcaggctccggccggcgggataaacatgcacagaaccagcatagcaagcctaagcccaaggtccctaatggaagtgaagctgatgacactgatggcgcctctagacctaaatctgctggacttgtggactatgacgatgatgacgatgaagacttcaatccaccaccaatggagccttctacgcctgcagaggatgatgtgcccttaaacatatccccggtgaagcggaagccagtggatgtgaaacatgcagatggggagggtcgcaggaggcaaaaaatagaaaccagaattagttgtgctaaaattgctgctgttactagtaccattattaagcacacagatctacaaaacaagcatgcttgctacttgcctacatcagccgcgccaagtactgaacccaatggtgtttttagggagcgtggcactaactctgaggagcatcaacattctgtagagaacacagaaacttcacgacaagctggtggtgattgtataaaagacgggggcagtatgtctcccgagaaggctgtaaatacgacaacgacaagtgattcggagccttattcagtaagatgactgactactacacagctggtttgtccctgtacccaacctgttctcttgccaacaggaaggaatcggaatgtgtttggctccaaaaattcattgatatcaagctggaagcatgattggaggtgacatagattgcagctacctttacatctcaagtaaaattccagttacccctttttgagcctgtaaagttaattttccacaaggaaagatctgacgaacatcagaattgggatggctgtagattggaacattgaatgggccttgctcctgctgctatgctcgctattgtatctcttttatgagctaatggagtagcagtgaatgtgtgccttcaacttcactgttttctctccagtcattgactctgatgttactgctgtaaaacaagtaggactaaggcatagtttcagttgaatagcgtttttgccggattctgctgactcacttatacgactgtaatttgatggttcatagttttggctggacatgctgtcttggataattattcaagccttgtggtagaatagttctttaggccaaagatgtgctaggtagaatttcgaaagtgaataatgttggatgtattgggttaaggatggcaggtgtacatgatatcctactccagaacaggttcgctaaatactgtggtacaatcaaaaaacattcttgctcttgttaggattgtaatatctttcactaaattacacatgtctgcaaaacagattcatgagatgtgaaaacaatacacaggtcatggctactcaatctacgatgcagaatcatttgttcaaccagtgcgcctttac

SEQ ID NO: 201628 - DNA, 2189 bp, Zea Mays
gttagatgaaaggttaaaggcatggtaactgacttcggtgaggaaatgcactgccagtttctagaaatcttgcgcatattgatggattctttcactatgtctggagcacatagagacgtaattattgagattttctacgaaaggcatcttgactatttggttgatgtaatagcatcctcttgtcccccgaggagcttgtctcgaccaagatctaactctgtacgtgttggtggaaacgctgaaggacatcatatcaagcctgagattttgttaaatgtttgtgaactactgtgcttttgtgtagttcatcatccctacagaattaagtgcaattttcttatgaataatgctatcgagaaaatccttacattgactcaacggagggagaagtttttggttgtagcagctgttaggtttatgcgtactattatatccagaaatgatgagcatctcattcgccatgttgtgaagttcaacttgttgaaaccaataattgatatctttgttgacaatggggagaggtacaacatgctacattcaggagtacttgaattgttggaatacatacgaaaggaaaatataaaagctctcactatctatgttattgagtctttctggtatgaacttgtcaagtttgaacacttcgggagtattcaggccttcaaactcaagtatcaacagtacgtggagagtgctgaaccaatgttaaatgcgagtgtgcctaacatgagaaagaaggcagaacaaagaggtctagagaaggaagaggaagactacttcaataaggatagtgatgaagaagattcaggctccggccggcgggataaacatgcacagaaccagcatagcaagcctaagcccaaggtccctaatggaagtgaagctgatgacactgatggcgcctctagacctaaatctgctggacttgtggactatgacgatgatgacgatgaagacttcaatccaccaccaatggagccttctacgcctgcagaggatgatgtgcccttaaacatatccccggtgaagcggaagccagtggatgtgaaacatgcagatggggagggtcgcaggaggcaaaaaatagaaaccagaattagttgtgctaaaattgctgctgttactagtaccattattaagcacacagatctacaaaacaagcatgcttgctacttgcctacatcagccgcgccaagtactgaacccaatggtgtttttagggagcgtggcactaactctgaggagcatcaacattctgtagagaacacagaaacttcacgacaagctggtggtgattgtataaaagacgggggcagtatgtctcccgagaaggctgtaaatacgacaacgacaagtgattcggagccttattcagtaagatgactgactactacacagctggtttgtccctgtacccaacctgttctcttgccaacaggaaggaatcggaatgtgtttggctccaaaaattcattgatatcaagctggaagcatgattggaggtgacatagattgcagctacctttacatctcaagtaaaattccagttacccctttttgagcctgtaaagttaattttccacaaggaaagatctgacgaacatcagaattgggatggctgtagattggaacattgaatgggccttgctcctgctgctatgctcgctattgtatctcttttatgagctaatggagtagcagtgaatgtgtgccttcaacttcactgttttctctccagtcattgactctgatgttactgctgtaaaacaagtaggactaaggcatagtttcagttgaatagcgtttttgccggattctgctgactcacttatacgactgtaatttgatggttcatagttttggctggacatgctgtcttggataattattcaagccttgtggtagaatagttctttaggccaaagatgtgctaggtagaatttcgaaagtgaataatgttggatgtattgggttaaggatggcaggtgtacatgatatcctactccagaacaggttcgctaaatactgtggtacaatcaaaaaacattcttgctcttgttaggattgtaatatctttcactaaattacacatgtctgcaaaacagattcatgagatgtgaaaacaatacacaggtcatggctactcaatctacgatgcagaatcatttgttcaaccagtgcgcctttac

SEQ ID NO: 201629 - DNA, 1217 bp, Zea Mays
cccaagtttccaccacataatcgcgtacgagtggacgttcacgcgaccacaaactgtcgtattactatcggagaactcgagcagcggtcgcggccggccgtgcagcacatcagcacatcagcgggcgggagcagctcagaccgcagcgatgcaggggagcggcgcactgccgggccttaccggcaccgggcgcggcggcggcttcctcccgtgcggcagcctcggcaagcgaactcccgctggccgacgcggcgccaccagcgttcgcgccgtcgacggggcttccgttgcggccgccgcctccgcggccgccgattccccgctcccgcccgtgcaggtcacctggcagattgccgtcggtgctctagctggagtgacgcctttcgtcgttgcaggagtcgagttcggcaaaagaatcatcgcacagaagaaatgccaagtctgcggaggctctggtcttgtaacgaagaacgactattacgttcgatgccaaaagtggttttcttccgtggcagtcttggcgaagattcttcacggggtgaacgtggtctctgatcagtggtcttcagtactcaactagcgctgtaactaaggccccgtttggtttgggctaactaaagtttagtgactaaagtttagtcacttttagccactaaagaagcaaacatattgactaaagtggagtgactaaactttagttctttagtcaccaaatgagtgactaaaagggactaaagtagtatttttaccatatttgccctctacactttctttttatagcaaacatccattaattaataggggtaaaacagtcattattcacagcaattaatactctttagtccggtttagtcactggaaccaaacgggttactttagcgcctaaactttagtcactaaaatttagtttagtgactaaaggaaccaaacagggcctaaagatacaatagatggacatcaccgtgctttaaatgcctcctcactagaccataaatgaagcaatatgccgtagtccgtagacatgtagaattactcatgcatgttgtattttacaaaaggcatcttacataaactatattttgccccttatgtatcatccagtgatacaggagatgtgtctgaagtttggtataatgcggttaatgaaaccaggcagacttatagttgctacacaaatacagcaaactgaacttttgctgcaaaagctgaatgagaat

SEQ ID NO: 201630 - DNA, 853 bp, Zea Mays
gcgtacgagtggacgttcacgcgaccacaaactgtcgtattactatcggagaactcgagcagcggtcgcggccggccgtgcagcacatcagcacatcagcgggcgggagcagctcagaccgcagcgatgcaggggagcggcgcactgccgggccttaccggcaccgggcgcggcggcggcttcctcccgtgcggcagcctcggcaagcgaactcccgctggccgacgcggcgccaccagcgttcgcgccgtcgacggggcttccgttgcggccgccgcctccgcggccgccgattccccgctcccgcccgtgcaggtcacctggcagattgccgtcggtgctctagctggagtgacgcctttcgtcgttgcaggagtcgagttcggcaaaagaatcatcgcacagaagaaatgccaagtctgcggaggctctggtcttgtaacgaagaacgactattacgttcgatgccaaaagtgtggtggttttcttccgtggcagtcttggcgaagattcttcacggggtgaacgtggtctctgatcagtggtcttcagtactcaactagcgctgtaactaaagatacaatagatggacatcaccgtgctttaaatgcctcctcactagaccataaatgaagcaatatgccgtagtccgtagacatgtagaattactcatgcatgttgtattttacaaaaggcatcttacataaactatattttgccccttatgtatcatccagtgatacaggagatgtgtctgaagtttggtataatgcggttaatgaaaccaggcagacttatagttgctacacaaatacagcaaactgaacttttgctgcaaaagctgaatgagaat

SEQ ID NO: 201631 - DNA, 1256 bp, Zea Mays
gcgtacgagtggacgttcacgcgaccacaaactgtcgtattactatcggagaactcgagcagcggtcgcggccggccgtgcagcacatcagcacatcagcgggcgggagcagctcagaccgcagcgatgcaggggagcggcgcactgccgggccttaccggcaccgggcgcggcggcggcttcctcccgtgcggcagcctcggcaagcgaactcccgctggccgacgcggcgccaccagcgttcgcgccgtcgacggggcttccgttgcggccgccgcctccgcggccgccgattccccgctcccgcccgtgcaggtcacctggcagattgccgtcggtgctctagctggagtgacgcctttcgtcgttgcaggagtcgagttcggcaaaagaatcaagaaatgccaagtctgcggaggctctggtcttgtaacgaagaacgactattacgttcgatgccaaaagtgtggtaagaagagccccacgatggcatacttgtggagaatcaaacgtgacaatggttttcttccgcaggtggttttcttccgtggcagtcttggcgaagattcttcacggggtgaacgtggtctctgatcagtggtcttcagtactcaactagcgctgtaactaaggccccgtttggtttgggctaactaaagtttagtgactaaagtttagtcacttttagccactaaagaagcaaacatattgactaaagtggagtgactaaactttagttctttagtcaccaaatgagtgactaaaagggactaaagtagtatttttaccatatttgccctctacactttctttttatagcaaacatccattaattaataggggtaaaacagtcattattcacagcaattaatactctttagtccggtttagtcactggaaccaaacgggttactttagcgcctaaactttagtcactaaaatttagtttagtgactaaaggaaccaaacagggcctaaagatacaatagatggacatcaccgtgctttaaatgcctcctcactagaccataaatgaagcaatatgccgtagtccgtagacatgtagaattactcatgcatgttgtattttacaaaaggcatcttacataaactatattttgccccttatgtatcatccagtgatacaggagatgtgtctgaagtttggtataatgcggttaatgaaaccaggcagacttatagttgctacacaaatacagcaaactgaacttttgctgcaaaagctgaatgagaat

SEQ ID NO: 201632 - DNA, 3968 bp, Zea Mays
ccaacagttgcagccgcagcagcagaagcggcggcgagcatgctcttggcacccctccccggcgccgggcggatctgccggagggcggcggccggggcgcttggagcgcggcgctaaccgcgttcgaaggacctcgggatctgacgccgcgcctcccctaatcgatcgactccatcggtggcggcggcggccgaggcggcagcagccgggtctctcggctccgggacaagataagcttttgctctgcgcattcgcgctgctcaaacatcgtagccagccacaccaagcaactgacttgtgctcctctgattgtacaagggaaagattgcgcttgcgcttgcttgggcgccggccgcgccggtggcggtaatcttcgagagccgcggtcgcggcgcgcggtgaagagaaaaaaaggtgtgtgtgtgtgagagagagaggaggctccctgccctctcgcggtgacttggcgaggagggggagggactgggaaagcgaatggttttcgggaaggcgctgtgatttggcctggaaaggaggaacctttccttcctcttcccgtcctttgccggctcttgtaccgccctcagatcggcgacccggttgtttcttcggcaacgggcggaaatgaggctctcgtcgtcgtccggcagcgtcctgccggctcagccgggctcgccggaagctgtggaggagcacaagtgcctgaactcggagttgtggcatgcttgtgccggcccgcttgtttccttgcccgcggtgggtagccgagttgtgtacttccctcagggccacagcgagcaggtagcagcatcaacaaacaaggaaatagagtctcagatccccaactatcctaatctgccgccacagcttatatgccaacttcataatgtgacgatgcatgctgatgcagagacagatgaggtatatgcacagatgacactacaaccactcaacccgcaagaactgaaggacccatatttacctgcagaattaggttcggccaataaacagccaacaaactatttctgcaaaacattaacagcaagtgataccagtacccatggtgggttctccgttccccgtcgagcagctgagaaagtgtttcctccactggatttcacccagcaacccccatgccaggagttgatggcaaaagatcttcatggcaatgagtggaaattccgtcacatctttcgtggccagccaaagcggcatcttctaactacaggttggagtgtctttgtaagtgcaaagagactcgttgctggcgactctgtcctttttatctggaatgacaataaccagcttctgctgggaattcgtcgtgcaaatcggccacaaactgtcatgccatcttcagtcttatcaagcgatagcatgcatatcggtcttcttgctgcagctgctcatgctgcttcgacaaatagccgatttacaattttttacaacccaagggcaagcccttcagagtttgtcataccactcgtaaagtatgttaaggctgtgtatcatacccgcatatctgtggggatgcgattcaggatgctttttgagacagaagagtctagcgttaggagatacatggggacaattaccggaatctgtgatcttgattctgttcggtggccaaattcacactggcgttctgttaaggttggctgggatgagtcaactgctggtgagcgacaaccaagggtgtcactatgggagattgaacccctgacaactttcccaatgtatccatctccttttccgctcaggctcaagcgtccatggccaacaggcttgccttctctgcatggtgggaaggatgatgacctggctaactctctcatgtggcttcgagataccgcaaatcctggttttcagtcgttaaattttggtggacttggtatgagcccttggatgcagccaaggctggatgctaccttacttggtctgcaacctgacatgtatcaggcgatggccacagctgcttttcaggatgcaacaaagcaggcatcgcccacaatgctgcagttccagcagccccagaacatagctggccgggcttccccgcttctttcaagtcagattttgcagcaagcacatcatcaatttcagcagcaaccgtaccttcaaaacatctctgagagcacaatccaagcacagggtcagtctgagttcctcaagcagcagatccaacgcagccagtcattcaatgagcagaagccccagatgcaacaccagcaagaatcacagcagcagcagcaaccacagtgtctgccagtcccccaacatcagcaaatgcaacaacagaatatgaccaactaccagtctatatctaatgcattatcaccgttttctcagctgtcgccagtttctcagtcttcacctatggcgctgcagactatattaccgttctcgcaggcacagagcttcacagacacgaatgtaggttcattgtctccatccaatggtaacaccatgcaaaacacactgaggccgttctcatcagaagcagtttctcacctcagtatgccgaggcccactgcgatacctgtcgcagacccatggtcgtcgaagcgtgtcgcggtggagtctctgcttccttctcggcctcaggtttcatcccagatggaacaattggaccctgcaccagctagtatacctcatagctctgcgttggcaccacttcccggaagagggtgcttggttgaccaagatgtgaactctgatcctcaaaatcatctcttgttcggtgttagtatagactcgcagtcactgctaatgcaagggggcattcctggtctccaaaacgggaatgattcagctgctataccttattccacttccaatttcctcagcccttctcagaatgactttcctctggaccatacactaaattcttcaggctgcttagatgattctgggtacgtcccgccatgttcagataattctgacaaagtgaaccgaccaccagcgaccttcgtgaaggtttacaaatctggaacctacgggaggtcgcttgatatcactaggtttagcagctatcacgagctccgtagggaactggggcgcctatttggccttgagggccagttggaagacccattgagatcaggctggcagcttgtattcgtcgaccgtgaggaggacgtccttctcgtgggcgacgacccttggcaggaattcgtgagcacggtgtcctgcataaagatcctctccccgcaggaggtgcagcagatggggaagcagggcctggagctcctgagctcggcccccgcgcggaggctcggtagcagctgtgacgactacgtcagcaggcaggagtcgagaagcctgagcaccgggatcgcgtccgtcggttcggtcgagttgggatgagcagcaagatagcgcgcacgcagcagcagcagcagcaggttacgcatcctcagcctcagggtaggtaggggactgaagggttggtctgcgacttgatgacccacgagctcctcgttgcgcgcttcgttcgcctccatgcgatggatagaagttcagcgcagaccaagccttagctctgcgagctatgtaccatctaataattctgtccgtgtcgtaccatgtcaactcctaagtagaagaattgaagaaactaccagcagccgctgtctggtatacacgctgaaacattttttttcttgtatggagaaatactaatcatctggatgtagccaggcctatgctctctaatggttgatcgggtaatacagcccctcgcacacagcaaactcacaagagaaacttccagttgctacattaagtttgggcagtaataaaaggtccgtcaaaaattaacttttttttttctcggcagcaacaagaagtccatacaaaattaacttattttttagtggctaaacggaggaggctgaaaatattttttttgttttggcggtatgtactaagacgttgtatttagtcattgaaaatagattgattttcgg

SEQ ID NO: 201633 - DNA, 4158 bp, Zea Mays
cataggcatagcaagagcaaagctgaaaaagaggagcaccactcgtggggggttaaaaccccgagaacaaacttgggagtagcagcggccagccggaagcgagcggagaccgaggggagagggggtgaagaagcaacgagacgcagcgagcaagcgaaagcataccagagcaccaagcatagggacgcgcgcgcttctccagttctccctccctgccctgcaaggcggctgcaactgttccagctagcccctctcccagcctctgcgtcgtagacgtggtagtagcagccgcagcagcagaagcggcggcgagcatgctcttggcacccctccccggcgccgggcggatctgccggagggcggcggccggggcgcttggagcgcggcgctaaccgcgttcgaaggacctcgggatctgacgccgcgcctcccctaatcgatcgactccatcggtggcggcggcggccgaggcggcagcagccgggtctctcggctccgggacaagaagggaaagattgcgcttgcgcttgcttgggcgccggccgcgccggtggcggtaatcttcgagagccgcggtcgcggcgcgcggtgaagagaaaaaaaggtgtgtgtgtgtgagagagagaggaggctccctgccctctcgcggtgacttggcgaggagggggagggactgggaaagcgaatggttttcgggaaggcgctgtgatttggcctggaaaggaggaacctttccttcctcttcccgtcctttgccggctcttgtaccgccctcagatcggcgacccggttgtttcttcggcaacgggcggaaatgaggctctcgtcgtcgtccggcagcgtcctgccggctcagccgggctcgccggaagctgtggaggagcacaagtgcctgaactcggagttgtggcatgcttgtgccggcccgcttgtttccttgcccgcggtgggtagccgagttgtgtacttccctcagggccacagcgagcaggtagcagcatcaacaaacaaggaaatagagtctcagatccccaactatcctaatctgccgccacagcttatatgccaacttcataatgtgacgatgcatgctgatgcagagacagatgaggtatatgcacagatgacactacaaccactcaacccgcaagaactgaaggacccatatttacctgcagaattaggttcggccaataaacagccaacaaactatttctgcaaaacattaacagcaagtgataccagtacccatggtgggttctccgttccccgtcgagcagctgagaaagtgtttcctccactggatttcacccagcaacccccatgccaggagttgatggcaaaagatcttcatggcaatgagtggaaattccgtcacatctttcgtggccagccaaagcggcatcttctaactacaggttggagtgtctttgtaagtgcaaagagactcgttgctggcgactctgtcctttttatctggaatgacaataaccagcttctgctgggaattcgtcgtgcaaatcggccacaaactgtcatgccatcttcagtcttatcaagcgatagcatgcatatcggtcttcttgctgcagctgctcatgctgcttcgacaaatagccgatttacaattttttacaacccaagggcaagcccttcagagtttgtcataccactcgtaaagtatgttaaggctgtgtatcatacccgcatatctgtggggatgcgattcaggatgctttttgagacagaagagtctagcgttaggagatacatggggacaattaccggaatctgtgatcttgattctgttcggtggccaaattcacactggcgttctgttaaggttggctgggatgagtcaactgctggtgagcgacaaccaagggtgtcactatgggagattgaacccctgacaactttcccaatgtatccatctccttttccgctcaggctcaagcgtccatggccaacaggcttgccttctctgcatggtgggaaggatgatgacctggctaactctctcatgtggcttcgagataccgcaaatcctggttttcagtcgttaaattttggtggacttggtatgagcccttggatgcagccaaggctggatgctaccttacttggtctgcaacctgacatgtatcaggcgatggccacagctgcttttcaggatgcaacaaagcaggcatcgcccacaatgctgcagttccagcagccccagaacatagctggccgggcttccccgcttctttcaagtcagattttgcagcaagcacatcatcaatttcagcagcaaccgtaccttcaaaacatctctgagagcacaatccaagcacagggtcagtctgagttcctcaagcagcagatccaacgcagccagtcattcaatgagcagaagccccagatgcaacaccagcaagaatcacagcagcagcagcaaccacagtgtctgccagtcccccaacatcagcaaatgcaacaacagaatatgaccaactaccagtctatatctaatgcattatcaccgttttctcagctgtcgccagtttctcagtcttcacctatggcgctgcagactatattaccgttctcgcaggcacagagcttcacagacacgaatgtaggttcattgtctccatccaatggtaacaccatgcaaaacacactgaggccgttctcatcagaagcagtttctcacctcagtatgccgaggcccactgcgatacctgtcgcagacccatggtcgtcgaagcgtgtcgcggtggagtctctgcttccttctcggcctcaggtttcatcccagatggaacaattggaccctgcaccagctagtatacctcatagctctgcgttggcaccacttcccggaagagggtgcttggttgaccaagatgtgaactctgatcctcaaaatcatctcttgttcggtgttagtatagactcgcagtcactgctaatgcaagggggcattcctggtctccaaaacgggaatgattcagctgctataccttattccacttccaatttcctcagcccttctcagaatgactttcctctggaccatacactaaattcttcaggctgcttagatgattctgggtacgtcccgccatgttcagataattctgacaaagtgaaccgaccaccagcgaccttcgtgaaggtttacaaatctggaacctacgggaggtcgcttgatatcactaggtttagcagctatcacgagctccgtagggaactggggcgcctatttggccttgagggccagttggaagacccattgagatcaggctggcagcttgtattcgtcgaccgtgaggaggacgtccttctcgtgggcgacgacccttggcaggaattcgtgagcacggtgtcctgcataaagatcctctccccgcaggaggtgcagcagatggggaagcagggcctggagctcctgagctcggcccccgcgcggaggctcggtagcagctgtgacgactacgtcagcaggcaggagtcgagaagcctgagcaccgggatcgcgtccgtcggttcggtcgagttgggatgagcagcaagatagcgcgcacgcagcagcagcagcagcaggttacgcatcctcagcctcagggtaggtaggggactgaagggttggtctgcgacttgatgacccacgagctcctcgttgcgcgcttcgttcgcctccatgcgatggatagaagttcagcgcagaccaagccttagctctgcgagctatgtaccatctaataattctgtccgtgtcgtaccatgtcaactcctaagtagaagaattgaagaaactaccagcagccgctgtctggtatacacgctgaaacattttttttcttgtatggagaaatactaatcatctggatgtagccaggcctatgctctctaatggttgatcgggtaatacagcccctcgcacacagcaaactcacaagagaaacttccagttgctacattaagtttgggcagtaataaaaggtccgtcaaaaattaacttttttttttctcggcagcaacaagaagtccatacaaaattaacttattttttagtggctaaacggaggaggctgaaaatattttttttgttttggcggtatgtactaagacgttgtatttagtcattgaaaatagattgattttcgg

SEQ ID NO: 201634 - DNA, 4160 bp, Zea Mays
cataggcatagcaagagcaaagctgaaaaagaggagcaccactcgtggggggttaaaaccccgagaacaaacttgggagtagcagcggccagccggaagcgagcggagaccgaggggagagggggtgaagaagcaacgagacgcagcgagcaagcgaaagcataccagagcaccaagcatagggacgcgcgcgcttctccagttctccctccctgccctgcaaggcggctgcaactgttccagctagcccctctcccagcctctgcgtcgtagacgtggtagtagcagccgcagcagcagaagcggcggcgagcatgctcttggcacccctccccggcgccgggcggatctgccggagggcggcggccggggcgcttggagcgcggcgctaaccgcgttcgaaggacctcgggatctgacgccgcgcctcccctaatcgatcgactccatcggtggcggcggcggccgaggcggcagcagccgggtctctcggctccgggacaagacaagggaaagattgcgcttgcgcttgcttgggcgccggccgcgccggtggcggtaatcttcgagagccgcggtcgcggcgcgcggtgaagagaaaaaaaggtgtgtgtgtgtgagagagagaggaggctccctgccctctcgcggtgacttggcgaggagggggagggactgggaaagcgaatggttttcgggaaggcgctgtgatttggcctggaaaggaggaacctttccttcctcttcccgtcctttgccggctcttgtaccgccctcagatcggcgacccggttgtttcttcggcaacgggcggaaatgaggctctcgtcgtcgtccggcagcgtcctgccggctcagccgggctcgccggaagctgtggaggagcacaagtgcctgaactcggagttgtggcatgcttgtgccggcccgcttgtttccttgcccgcggtgggtagccgagttgtgtacttccctcagggccacagcgagcaggtagcagcatcaacaaacaaggaaatagagtctcagatccccaactatcctaatctgccgccacagcttatatgccaacttcataatgtgacgatgcatgctgatgcagagacagatgaggtatatgcacagatgacactacaaccactcaacccgcaagaactgaaggacccatatttacctgcagaattaggttcggccaataaacagccaacaaactatttctgcaaaacattaacagcaagtgataccagtacccatggtgggttctccgttccccgtcgagcagctgagaaagtgtttcctccactggatttcacccagcaacccccatgccaggagttgatggcaaaagatcttcatggcaatgagtggaaattccgtcacatctttcgtggccagccaaagcggcatcttctaactacaggttggagtgtctttgtaagtgcaaagagactcgttgctggcgactctgtcctttttatctggaatgacaataaccagcttctgctgggaattcgtcgtgcaaatcggccacaaactgtcatgccatcttcagtcttatcaagcgatagcatgcatatcggtcttcttgctgcagctgctcatgctgcttcgacaaatagccgatttacaattttttacaacccaagggcaagcccttcagagtttgtcataccactcgtaaagtatgttaaggctgtgtatcatacccgcatatctgtggggatgcgattcaggatgctttttgagacagaagagtctagcgttaggagatacatggggacaattaccggaatctgtgatcttgattctgttcggtggccaaattcacactggcgttctgttaaggttggctgggatgagtcaactgctggtgagcgacaaccaagggtgtcactatgggagattgaacccctgacaactttcccaatgtatccatctccttttccgctcaggctcaagcgtccatggccaacaggcttgccttctctgcatggtgggaaggatgatgacctggctaactctctcatgtggcttcgagataccgcaaatcctggttttcagtcgttaaattttggtggacttggtatgagcccttggatgcagccaaggctggatgctaccttacttggtctgcaacctgacatgtatcaggcgatggccacagctgcttttcaggatgcaacaaagcaggcatcgcccacaatgctgcagttccagcagccccagaacatagctggccgggcttccccgcttctttcaagtcagattttgcagcaagcacatcatcaatttcagcagcaaccgtaccttcaaaacatctctgagagcacaatccaagcacagggtcagtctgagttcctcaagcagcagatccaacgcagccagtcattcaatgagcagaagccccagatgcaacaccagcaagaatcacagcagcagcagcaaccacagtgtctgccagtcccccaacatcagcaaatgcaacaacagaatatgaccaactaccagtctatatctaatgcattatcaccgttttctcagctgtcgccagtttctcagtcttcacctatggcgctgcagactatattaccgttctcgcaggcacagagcttcacagacacgaatgtaggttcattgtctccatccaatggtaacaccatgcaaaacacactgaggccgttctcatcagaagcagtttctcacctcagtatgccgaggcccactgcgatacctgtcgcagacccatggtcgtcgaagcgtgtcgcggtggagtctctgcttccttctcggcctcaggtttcatcccagatggaacaattggaccctgcaccagctagtatacctcatagctctgcgttggcaccacttcccggaagagggtgcttggttgaccaagatgtgaactctgatcctcaaaatcatctcttgttcggtgttagtatagactcgcagtcactgctaatgcaagggggcattcctggtctccaaaacgggaatgattcagctgctataccttattccacttccaatttcctcagcccttctcagaatgactttcctctggaccatacactaaattcttcaggctgcttagatgattctgggtacgtcccgccatgttcagataattctgacaaagtgaaccgaccaccagcgaccttcgtgaaggtttacaaatctggaacctacgggaggtcgcttgatatcactaggtttagcagctatcacgagctccgtagggaactggggcgcctatttggccttgagggccagttggaagacccattgagatcaggctggcagcttgtattcgtcgaccgtgaggaggacgtccttctcgtgggcgacgacccttggcaggaattcgtgagcacggtgtcctgcataaagatcctctccccgcaggaggtgcagcagatggggaagcagggcctggagctcctgagctcggcccccgcgcggaggctcggtagcagctgtgacgactacgtcagcaggcaggagtcgagaagcctgagcaccgggatcgcgtccgtcggttcggtcgagttgggatgagcagcaagatagcgcgcacgcagcagcagcagcagcaggttacgcatcctcagcctcagggtaggtaggggactgaagggttggtctgcgacttgatgacccacgagctcctcgttgcgcgcttcgttcgcctccatgcgatggatagaagttcagcgcagaccaagccttagctctgcgagctatgtaccatctaataattctgtccgtgtcgtaccatgtcaactcctaagtagaagaattgaagaaactaccagcagccgctgtctggtatacacgctgaaacattttttttcttgtatggagaaatactaatcatctggatgtagccaggcctatgctctctaatggttgatcgggtaatacagcccctcgcacacagcaaactcacaagagaaacttccagttgctacattaagtttgggcagtaataaaaggtccgtcaaaaattaacttttttttttctcggcagcaacaagaagtccatacaaaattaacttattttttagtggctaaacggaggaggctgaaaatattttttttgttttggcggtatgtactaagacgttgtatttagtcattgaaaatagattgattttcgg

SEQ ID NO: 201635 - DNA, 4250 bp, Zea Mays
cataggcatagcaagagcaaagctgaaaaagaggagcaccactcgtggggggttaaaaccccgagaacaaacttgggagtagcagcggccagccggaagcgagcggagaccgaggggagagggggtgaagaagcaacgagacgcagcgagcaagcgaaagcataccagagcaccaagcatagggacgcgcgcgcttctccagttctccctccctgccctgcaaggcggctgcaactgttccagctagcccctctcccagcctctgcgtcgtagacgtggtagtagcagccgcagcagcagaagcggcggcgagcatgctcttggcacccctccccggcgccgggcggatctgccggagggcggcggccggggcgcttggagcgcggcgctaaccgcgttcgaaggacctcgggatctgacgccgcgcctcccctaatcgatcgactccatcggtggcggcggcggccgaggcggcagcagccgggtctctcggctccgggacaagataagcttttgctctgcgcattcgcgctgctcaaacatcgtagccagccacaccaagcaactgacttgtgctcctctgattgtacaagggaaagattgcgcttgcgcttgcttgggcgccggccgcgccggtggcggtaatcttcgagagccgcggtcgcggcgcgcggtgaagagaaaaaaaggtgtgtgtgtgtgagagagagaggaggctccctgccctctcgcggtgacttggcgaggagggggagggactgggaaagcgaatggttttcgggaaggcgctgtgatttggcctggaaaggaggaacctttccttcctcttcccgtcctttgccggctcttgtaccgccctcagatcggcgacccggttgtttcttcggcaacgggcggaaatgaggctctcgtcgtcgtccggcagcgtcctgccggctcagccgggctcgccggaagctgtggaggagcacaagtgcctgaactcggagttgtggcatgcttgtgccggcccgcttgtttccttgcccgcggtgggtagccgagttgtgtacttccctcagggccacagcgagcaggtagcagcatcaacaaacaaggaaatagagtctcagatccccaactatcctaatctgccgccacagcttatatgccaacttcataatgtgacgatgcatgctgatgcagagacagatgaggtatatgcacagatgacactacaaccactcaacccgcaagaactgaaggacccatatttacctgcagaattaggttcggccaataaacagccaacaaactatttctgcaaaacattaacagcaagtgataccagtacccatggtgggttctccgttccccgtcgagcagctgagaaagtgtttcctccactggatttcacccagcaacccccatgccaggagttgatggcaaaagatcttcatggcaatgagtggaaattccgtcacatctttcgtggccagccaaagcggcatcttctaactacaggttggagtgtctttgtaagtgcaaagagactcgttgctggcgactctgtcctttttatctggaatgacaataaccagcttctgctgggaattcgtcgtgcaaatcggccacaaactgtcatgccatcttcagtcttatcaagcgatagcatgcatatcggtcttcttgctgcagctgctcatgctgcttcgacaaatagccgatttacaattttttacaacccaagggcaagcccttcagagtttgtcataccactcgtaaagtatgttaaggctgtgtatcatacccgcatatctgtggggatgcgattcaggatgctttttgagacagaagagtctagcgttaggagatacatggggacaattaccggaatctgtgatcttgattctgttcggtggccaaattcacactggcgttctgttaaggttggctgggatgagtcaactgctggtgagcgacaaccaagggtgtcactatgggagattgaacccctgacaactttcccaatgtatccatctccttttccgctcaggctcaagcgtccatggccaacaggcttgccttctctgcatggtatgaggtgggaaggatgatgacctggctaactctctcatgtggcttcgagataccgcaaatcctggttttcagtcgttaaattttggtggacttggtatgagcccttggatgcagccaaggctggatgctaccttacttggtctgcaacctgacatgtatcaggcgatggccacagctgcttttcaggatgcaacaaagcaggcatcgcccacaatgctgcagttccagcagccccagaacatagctggccgggcttccccgcttctttcaagtcagattttgcagcaagcacatcatcaatttcagcagcaaccgtaccttcaaaacatctctgagagcacaatccaagcacagggtcagtctgagttcctcaagcagcagatccaacgcagccagtcattcaatgagcagaagccccagatgcaacaccagcaagaatcacagcagcagcagcaaccacagtgtctgccagtcccccaacatcagcaaatgcaacaacagaatatgaccaactaccagtctatatctaatgcattatcaccgttttctcagctgtcgccagtttctcagtcttcacctatggcgctgcagactatattaccgttctcgcaggcacagagcttcacagacacgaatgtaggttcattgtctccatccaatggtaacaccatgcaaaacacactgaggccgttctcatcagaagcagtttctcacctcagtatgccgaggcccactgcgatacctgtcgcagacccatggtcgtcgaagcgtgtcgcggtggagtctctgcttccttctcggcctcaggtttcatcccagatggaacaattggaccctgcaccagctagtatacctcatagctctgcgttggcaccacttcccggaagagggtgcttggttgaccaagatgtgaactctgatcctcaaaatcatctcttgttcggtgttagtatagactcgcagtcactgctaatgcaagggggcattcctggtctccaaaacgggaatgattcagctgctataccttattccacttccaatttcctcagcccttctcagaatgactttcctctggaccatacactaaattcttcaggctgcttagatgattctgggtacgtcccgccatgttcagataattctgacaaagtgaaccgaccaccagcgaccttcgtgaaggtttacaaatctggaacctacgggaggtcgcttgatatcactaggtttagcagctatcacgagctccgtagggaactggggcgcctatttggccttgagggccagttggaagacccattgagatcaggctggcagcttgtattcgtcgaccgtgaggaggacgtccttctcgtgggcgacgacccttggcaggaattcgtgagcacggtgtcctgcataaagatcctctccccgcaggaggtgcagcagatggggaagcagggcctggagctcctgagctcggcccccgcgcggaggctcggtagcagctgtgacgactacgtcagcaggcaggagtcgagaagcctgagcaccgggatcgcgtccgtcggttcggtcgagttgggatgagcagcaagatagcgcgcacgcagcagcagcagcagcaggttacgcatcctcagcctcagggtaggtaggggactgaagggttggtctgcgacttgatgacccacgagctcctcgttgcgcgcttcgttcgcctccatgcgatggatagaagttcagcgcagaccaagccttagctctgcgagctatgtaccatctaataattctgtccgtgtcgtaccatgtcaactcctaagtagaagaattgaagaaactaccagcagccgctgtctggtatacacgctgaaacattttttttcttgtatggagaaatactaatcatctggatgtagccaggcctatgctctctaatggttgatcgggtaatacagcccctcgcacacagcaaactcacaagagaaacttccagttgctacattaagtttgggcagtaataaaaggtccgtcaaaaattaacttttttttttctcggcagcaacaagaagtccatacaaaattaacttattttttagtggctaaacggaggaggctgaaaatattttttttgttttggcggtatgtactaagacgttgtatttagtcattgaaaatagattgattttcgg

SEQ ID NO: 201636 - DNA, 3165 bp, Zea Mays
tacagcatcaacaaacaaggaaatagagtctcagatccccaactatcctaatctgccgccacagcttatatgccaacttcataatgtgacgatgcatgctgatgcagagacagatgaggtatatgcacagatgacactacaaccactcaacccgcaagaactgaaggacccatatttacctgcagaattaggttcggccaataaacagccaacaaactatttctgcaaaacattaacagcaagtgataccagtacccatggtgggttctccgttccccgtcgagcagctgagaaagtgtttcctccactggatttcacccagcaacccccatgccaggagttgatggcaaaagatcttcatggcaatgagtggaaattccgtcacatctttcgtggccagccaaagcggcatcttctaactacaggttggagtgtctttgtaagtgcaaagagactcgttgctggcgactctgtcctttttatctggaatgacaataaccagcttctgctgggaattcgtcgtgcaaatcggccacaaactgtcatgccatcttcagtcttatcaagcgatagcatgcatatcggtcttcttgctgcagctgctcatgctgcttcgacaaatagccgatttacaattttttacaacccaagggcaagcccttcagagtttgtcataccactcgtaaagtatgttaaggctgtgtatcatacccgcatatctgtggggatgcgattcaggatgctttttgagacagaagagtctagcgttaggagatacatggggacaattaccggaatctgtgatcttgattctgttcggtggccaaattcacactggcgttctgttaaggttggctgggatgagtcaactgctggtgagcgacaaccaagggtgtcactatgggagattgaacccctgacaactttcccaatgtatccatctccttttccgctcaggctcaagcgtccatggccaacaggcttgccttctctgcatggtgggaaggatgatgacctggctaactctctcatgtggcttcgagataccgcaaatcctggttttcagtcgttaaattttggtggacttggtatgagcccttggatgcagccaaggctggatgctaccttacttggtctgcaacctgacatgtatcaggcgatggccacagctgcttttcaggatgcaacaaagcaggcatcgcccacaatgctgcagttccagcagccccagaacatagctggccgggcttccccgcttctttcaagtcagattttgcagcaagcacatcatcaatttcagcagcaaccgtaccttcaaaacatctctgagagcacaatccaagcacagggtcagtctgagttcctcaagcagcagatccaacgcagccagtcattcaatgagcagaagccccagatgcaacaccagcaagaatcacagcagcagcagcaaccacagtgtctgccagtcccccaacatcagcaaatgcaacaacagaatatgaccaactaccagtctatatctaatgcattatcaccgttttctcagctgtcgccagtttctcagtcttcacctatggcgctgcagactatattaccgttctcgcaggcacagagcttcacagacacgaatgtaggttcattgtctccatccaatggtaacaccatgcaaaacacactgaggccgttctcatcagaagcagtttctcacctcagtatgccgaggcccactgcgatacctgtcgcagacccatggtcgtcgaagcgtgtcgcggtggagtctctgcttccttctcggcctcaggtttcatcccagatggaacaattggaccctgcaccagctagtatacctcatagctctgcgttggcaccacttcccggaagagggtgcttggttgaccaagatgtgaactctgatcctcaaaatcatctcttgttcggtgttagtatagactcgcagtcactgctaatgcaagggggcattcctggtctccaaaacgggaatgattcagctgctataccttattccacttccaatttcctcagcccttctcagaatgactttcctctggaccatacactaaattcttcaggctgcttagatgattctgggtacgtcccgccatgttcagataattctgacaaagtgaaccgaccaccagcgaccttcgtgaaggtttacaaatctggaacctacgggaggtcgcttgatatcactaggtttagcagctatcacgagctccgtagggaactggggcgcctatttggccttgagggccagttggaagacccattgagatcaggctggcagcttgtattcgtcgaccgtgaggaggacgtccttctcgtgggcgacgacccttggcaggaattcgtgagcacggtgtcctgcataaagatcctctccccgcaggaggtgcagcagatggggaagcagggcctggagctcctgagctcggcccccgcgcggaggctcggtagcagctgtgacgactacgtcagcaggcaggagtcgagaagcctgagcaccgggatcgcgtccgtcggttcggtcgagttgggatgagcagcaagatagcgcgcacgcagcagcagcagcagcaggttacgcatcctcagcctcagggtaggtaggggactgaagggttggtctgcgacttgatgacccacgagctcctcgttgcgcgcttcgttcgcctccatgcgatggatagaagttcagcgcagaccaagccttagctctgcgagctatgtaccatctaataattctgtccgtgtcgtaccatgtcaactcctaagtagaagaattgaagaaactaccagcagccgctgtctggtatacacgctgaaacattttttttcttgtatggagaaatactaatcatctggatgtagccaggcctatgctctctaatggttgatcgggtaatacagcccctcgcacacagcaaactcacaagagaaacttccagttgctacattaagtttgggcagtaataaaaggtccgtcaaaaattaacttttttttttctcggcagcaacaagaagtccatacaaaattaacttattttttagtggctaaacggaggaggctgaaaatattttttttgttttggcggtatgtactaagacgttgtatttagtcattgaaaatagattgattttcgg

SEQ ID NO: 201637 - DNA, 4153 bp, Zea Mays
tggcactgtagcccaatgtagcactttgcagagtcgaccgttgtcgctggatagtcgttgcccgctggctcaccggacagtctggtgaattatagcggagtgcgccctgagatttccgagaatgactggttgacatctgtatggtcctggtgcaccggacattgtctggtggcacacgagacagtccgttgcgccaattcttagccacttaagttctttgctccgtttcaaattgagtccgtaatttgattttttttgttgatttgtgttgaaccttatagacctgtaatacatgaattttagaacaaactagttagtcaatgtgtttatgttgattatcaaccaccaaaattagctataggaaatggttaacccaatttctgtttcagatgcctatagtattttgtctctatacgttagagtaccagcagtctgaatagcagcagctgcggctgcgatttggaattattcccaattttcttacgagttttccacacacggggacatctcggtctcggtcccttactggagctaatgaaggcgaccagtagctcctcaaggaaaacattatataatctgtagttagaaaactggaaagaatggagacaactttatattgacaagcagtcaaattgaggccaaaattctgaaatttctcgccatgtatagcccaggcgcagtgcacgtgtccgcttggtttcccagatctgtgcgcgtcacgcacgcggctgttttccccatccttccactccacctccgcaagaacggcgagagagcgcacccaaaccagagacacctacggcgggtcggcggccgaccccggggccgcgcccatcccgacgttttcccgattctccggctacctcctcccttatctccttgcgcgtgacgcgcccacgactcctcgtcgtcctcttgtgatctggtccccatctcgctgccgcctcctcccgacttaccaaactccaacacgccatgcgaccatgcgctcatgcatagcatagatatagctgtagccaagctgcccaagcacgagcaccactcgtcttctccgaccttccagctctagctctgatccgagccgaaacagccatccaagacgcccgcggccgccgtgagcgggtgaccctctgcgctgcgctgcgtcaccacccaaatggatgacatcgccagcgaggcgcccgtgggggcgttcgccatcggcccatccacggcgctgggcggcgccgtcgcgctccgggtgctgctctgcggctccgcggcgcgcctgcgtcatcgtctagccgcggcactgcgcgccgcgctgcccgtcgcggcggcgtggctgcacccgcgcgacaacacgcgcgggatcctgctcgccgtctgcgccgtcgcgctcctgctgcggggccgacgcggcagggcggggctgcgggcgagggtgcagtccgcctaccgctgcaagttctggcggaacatgatgcgcgccgcgctcacctacgaggagtgggcgcacgcggcgcggatgctggagctcgaggccgcgccgcgccgcgccagcgacgccgacctctacgacgaggagctcgtccgcaataagctccgcgagctcaggcaccggcgccaggagggatcgctcagggacatcgtcttctgcatgcgtgctgacctgctcaggaacctcggcaatatgtgcaaccctgaactgcacaaggggaggctgcaggtgcctagactcataaaggaatacattgaggaagtatctactcaactgaaaatggtctgtgattctgattcagatgagttgcctctcgaagagaaactcgcatttatgcatgagacaagacatgcctttggtagaacagccttgctgctaagtggaggtgcttcgttaggatcctttcatgtgggtgttgttaaaaccttggtagaacataaacttctgccaaggatagtttcaggatcaagtgtaggctcaataatgtgttctatagtagcaacaagatcatggcctgagctggagagcttttttgaagagtggcattccctgaaattttttgaccagatgggtggaatctttcctgtggttaaaagaattttgacgcatggcgctcttcatgatataaggcacttgcaggtgcttttgagaaaccttaccagcaatctgacatttcaagaagcttatgacattactggtcggattcttgttgtcactgtgtgttctccaaggaagcatgagccgcctcgatgcctaaactatttaacatcacctcatgttcttatctggagtgcagtaacagcttcctgcgcttttcctggactttttgaggcccaagaattgatggcaaaagatagatttggtcaaaccattcctttccatgctccattcttattaggcatggaggaacgaactgttgctccaacccgccgctggagagatgggagcttagaaagcgatttacccatgaagcaattgaaggaactattcaatgtgaatcatttcatagtaagtcaagccaatcctcacatagctccactattgagactaaaggaaatcatcagggcttatggaggcagctttgctgccaagcttgctgaacttgccgagatggaagttaaacataggtgtaatcaagttctggaacttggattccctttaggaggattagctaaactatttgctcaagattgggaaggtgatgttacagttgttatgccagccactcttgcacagtattccaagatgatacaaaacccgtcttatgctgagcttcagaaggctgcgaatcaaggctaaagaggagtgcagaaagagcatccgcatcgcaaggatatggtccagtaatcaggttctgcccatctaggaggattccatcctggaatctcatagcgagagaaaattcaactggttctcttgatgaagaaatgctcgcatctcctcatacaaatcatcaaggacctggaggagttgctggaacatctaccagaaatcagtatcttcagagaaatgcacacgagagcagtgacagtgaatctgagagtattgatttacactcttggacaagaaatggtggccctcttatgaggacagcctcagccaataaattcatcagctttgttcagaatcttgagatcgacacagaattcagaacaattccatcgagggaaaacctaactgatcttgtgacaccaaatgctggtaccttggcagctcatgcagtgagtagagaagcaaccgataggagcttggacatttcagctttagatatccatgataccgctacccctagatcgacatttggccgttcaacaagcatcgttgtttctgaaggtgacttgttgcagcctgaaaagattgaaaatggtattttgtttaatgttgtaaggagggatactctgctggagtctagtagcggagttgagtctcaaggatctcctcgggaaccagatgttgaaacagtgcagacagagtgccttgatggcatttcagcttccgatgacgacgacaaggaactaaatgtcattgttgatgaagcaaccgatcccatgagcagcaataatctacaagatcaggggtcctcactggaagaaaattcatatagtcattttcccttaaattctgcagacgagacaagcacaaacaaaccagaaactgcatctatttttgatatatgtacagagatgcatccggcgtccattagcctaccgcaaggatcttcagaaaaggcagaactctgaaacagcaaagatccctgacgacgattcagctgctatgagtgatgaagttgcctcatgtgctggtaactaaagagttgtcctcctccctctagctttgaggcatcagatgtaagtgatgtactataatctaagcatcatgaattggatggtgaagctttatgttgttcaagtttcagaagaaggagatccaatggctttggttcttcgaatgtactgtagttgttttggggaaataaagcgcttcttagaaaaacccgggagaagttttgcgcttgggagctctcgagcttcttttttttttggccgagaaattgcccaaagccgtagtctctactctctcgtcagtcgtcacgacttcgtgaaagggaaatgtgcccttgggccatttctaagtattttggtgattgggtgtcaacacaagtgcttaaatgtg

SEQ ID NO: 201638 - DNA, 1835 bp, Zea Mays
caaattctctactttcgaaaatgcgctctttcaatttatctttcagaatccttgctttgtttttcactttttcttgcttgctcaagctcttctcatcttcttctctgctctccctgctttgtttttgttgtattttgtacaaaacattttgatccgtcattatcttgctcaaattctgtaactttcatcccaaagttcgccagaattcgtttcttttttattttgttaccagtagagcatctcctgatctacctcttcgtcgtgtttggtaaagactattgagctcaggtgtgttgcgttgtgcagagcacaggtggtgggatggccaccagtctgcaactaccgcaagaacacgatgactaccacccagctggagggcagcaaggaggatggtgatgccaagcagggtcaggggttcctgtacgtcaaggtcagcatggatggcgcgccgtacctcaggaagatcgacctcaagacttacaagaactacaaggacctgtcgaccgcgcttgagaagatgttcagtggcttcagtactggcaaggacggctcatctgagtaccgcaaggatggtgaatatgttctgacttacgaggacaaggatggagattggatgcttgtcggcgacgtaccatgggagtgagttacacccatctgtcttaattaaaacaatggaattggaactaaattaatcaccgattagggcatgtacagtgggtgtcttgagttatgtcttcgagtgtgtttaggggggtgaatgtaaaaaaactcaagatatgtatcttgacgaagacacagtgtcttagctctatgttcgagacatgagactagctgattggtcactttaatttattgaatgctctgattggtacaattaatatggtaagacacatgttttagacacgtccactgtattatgttgtgttttaggtgtgtcttatacttggagtaccgtgcaacagtgtctaggttgtacatgcccttaggtttcgtggctcattttttttctcaactaaatacatgtttagctgccacatcgtctttcgctccaattgtaggatgttcgccggctcctgccgcaggctcaggatcatgaaaggctcagatgcgattggactcgctccaagggcagccgataagtccaagaaccgcaactagaacggtggcttcctatccttacacagtccggtacgagggaggagatgcagtgacttgtagggatctgtacgaaaaccgaaaaagtctactaacagctatgacttgtgagaagaattctggcttatggtctgcactagaatggcttggtacatcgtctatggacaaaacacgctattcgattaattgttgttaattaagccttggggggggtacgagtgctattcatgtaaatggtttggtgcatcgtgtgctgctgctgcctgctgctgttactacgattgagctcccctataatactatgatttgaagagagatggcgatgtcatatgatcccttggaatcgggctttactgcctactcctttcgtggtggtggtgcctgttagttggtggtgtgcatgtggtggagaagacgcttgagatgctggttctgttcttgaacttccttgcctcgtttctgccggtgctgtgctgtttgtgctctggggagaggatattccaatgacaagtcccagcgtgtgaaacagaacagacgaagctgatattctgccgggaggcaattaaaagaatgggtctcactagctgataacctacctgtttgtgcatgctttcgtcctaggacaggacagcatgctccttgttcagacttcagacccatatcatatttttttttttgtc

SEQ ID NO: 201639 - DNA, 2379 bp, Zea Mays
agggaagcttcacctgatcacccttcaaacaaatcactcttcgctccggctccgactcgcactctttccccttcccttcccttcccactcccaggctcccactctcaccccttccgcctacccacgcaaacggcacacgaactaacagccacctctcacgtcccccaccctctggttcatgtcctgctgctccccatgtcgcctccactcgagctcgactacataggcctctcgccgccggcggcagccgccgccgctgaaaacgacgaactgaagggtactgagctccgcctcgggctgccagggtccgggtcgccggaccgccgtgtcgtggctgccaccgcgaccaccctggacctgctcccggccaagggcgccaagcgcgggttttctgacgaggcgcccccgccatcgcctgttgccactgccggaaagggaaagaaggtggcagaagaggagtacgacgagaagaaggtggcagcgaccccgcagccggccgccaagtaggtcgaatgtggaagtggatcttggggttttgccgcctcaaacgaaaaaaggggaaggcttggggctttgcgctgccagcgcgttcatctgccgttcttgggactgcggccactagtggtttgcaaattgtttgtgattgttgcccctttgttggggggtctttgggtgcaagttctctgctatttgggaaatcttgctgggccttttgagtttatgacatttgcaggttctataacagaaaattatctttggaaattctgtgcttttcagggaaacaaaagagtaggaggagttgaaaaggggactgaattgcatgtcagagggatctctgttggcgtgatattttcgatttgtgtactcttctttgggtgggaatttcagtttatcttggggcctagaggagggaaactaaagttgcagctttgtggtgttctttttaaattcccacttttcctccaaattctctactttcgaaaatgcgctctttcaatttatctttcagaatccttgctttgtttttcactttttcttgcttgctcaagctcttctcatcttcttctctgctctccctgctttgtttttgttgtattttgtacaaaacattttgatccgtcattatcttgctcaaattctgtaactttcatcccaaagttcgccagaattcgtttcttttttattttgttaccagtagagcatctcctgatctacctcttcgtcgtgtttggtaaagactattgagctcaggtgtgttgcgttgtgcagagcacaggtggtgggatggccaccagtctgcaactaccgcaagaacacgatgactaccacccagctggagggcagcaaggaggatggtgatgccaagcagggtcaggggttcctgtacgtcaaggtcagcatggatggcgcgccgtacctcaggaagatcgacctcaagacttacaagaactacaaggacctgtcgaccgcgcttgagaagatgttcagtggcttcagtactggcaaggacggctcatctgagtaccgcaaggatggtgaatatgttctgacttacgaggacaaggatggagattggatgcttgtcggcgacgtaccatgggagatgttcgccggctcctgccgcaggctcaggatcatgaaaggctcagatgcgattggactcgctccaagggcagccgataagtccaagaaccgcaactagaacggtggcttcctatccttacacagtccggtacgagggaggagatgcagtgacttgtagggatctgtacgaaaaccgaaaaagtctactaacagctatgacttgtgagaagaattctggcttatggtctgcactagaatggcttggtacatcgtctatggacaaaacacgctattcgattaattgttgttaattaagccttggggggggtacgagtgctattcatgtaaatggtttggtgcatcgtgtgctgctgctgcctgctgctgttactacgattgagctcccctataatactatgatttgaagagagatggcgatgtcatatgatcccttggaatcgggctttactgcctactcctttcgtggtggtggtgcctgttagttggtggtgtgcatgtggtggagaagacgcttgagatgctggttctgttcttgaacttccttgcctcgtttctgccggtgctgtgctgtttgtgctctggggagaggatattccaatgacaagtcccagcgtgtgaaacagaacagacgaagctgatattctgccgggaggcaattaaaagaatgggtctcactagctgataacctacctgtttgtgcatgctttcgtcctaggacaggacagcatgctccttgttcagacttcagacccatatcatatttttttttttgtc

SEQ ID NO: 201640 - DNA, 2262 bp, Zea Mays
agggaagcttcacctgatcacccttcaaacaaatcactcttcgctccggctccgactcgcactctttccccttcccttcccttcccactcccaggctcccactctcaccccttccgcctacccacgcaaacggcacacgaactaacagccacctctcacgtcccccaccctctggttcatgtcctgctgctccccatgtcgcctccactcgagctcgactacataggcctctcgccgccggcggcagccgccgccgctgaaaacgacgaactgaagggtactgagctccgcctcgggctgccagggtccgggtcgccggaccgccgtgtcgtggctgccaccgcgaccaccctggacctgctcccggccaagggcgccaagcgcgggttttctgacgaggcgcccccgccatcgcctgttgccactgccggaaagggaaagaaggtggcagaagaggagtacgacgagaagaaggtggcagcgaccccgcagccggccgccaagtaggtcgaatgtggaagtggatcttggggttttgccgcctcaaacgaaaaaaggggaaggcttggggctttgcgctgccagcgcgttcatctgccgttcttgggactgcggccactagtggtttgcaaattgtttgtgattgttgcccctttgttggggggtctttgggtgcaagttctctgctatttgggaaatcttgctgggccttttgagtttatgacatttgcaggttctataacagaaaattatctttggaaattctgtgcttttcagggaaacaaaagagtaggaggagttgaaaaggggactgaattgcatgtcagagggatctctgttggcgtgatattttcgatttgtgtactcttctttgggtgggaatttcagtttatcttggggcctagaggagggaaactaaagttgcagctttgtggtgttctttttaaattcccacttttcctccaaattctctactttcgaaaatgcgctctttcaatttatctttcagaatccttgctttgtttttcactttttcttgcttgctcaagctcttctcatcttcttctctgctctccctgctttgtttttgttgtattttgtacaaaacattttgatccgtcattatcttgctcaaattctgtaactttcatcccaaagttcgccagaattcgtttcttttttattttgttaccagtagagcatctcctgatctacctcttcgtcgtgtttggtaaagactattgagctcaggtgtgttgcgttgtgcagagcacaggtggtgggatggccaccagtctgcaactaccgcaagaacacgatgactaccacccagctggagggcagcaaggaggatggtgatgccaagcagggtcaggggttcctgtacgtcaaggtcagcatggatggcgcgccgtacctcaggaagatcgacctcaagacttacaagaactacaaggacctgtcgaccgcgcttgagaagatgttcagtggcttcagtactggcaaggacggctcatctgagtaccgcaaggatggtgaatatgttctgacttacgaggacaaggatggagattggatgcttgtcggcgacgtaccatgggactccaagggcagccgataagtccaagaaccgcaactagaacggtggcttcctatccttacacagtccggtacgagggaggagatgcagtgacttgtagggatctgtacgaaaaccgaaaaagtctactaacagctatgacttgtgagaagaattctggcttatggtctgcactagaatggcttggtacatcgtctatggacaaaacacgctattcgattaattgttgttaattaagccttggggggggtacgagtgctattcatgtaaatggtttggtgcatcgtgtgctgctgctgcctgctgctgttactacgattgagctcccctataatactatgatttgaagagagatggcgatgtcatatgatcccttggaatcgggctttactgcctactcctttcgtggtggtggtgcctgttagttggtggtgtgcatgtggtggagaagacgcttgagatgctggttctgttcttgaacttccttgcctcgtttcagcgtgtgaaacagaacagacgaagctgatattctgccgggaggcaattaaaagaatgggtctcactagctgataacctacctgtttgtgcatgctttcgtcctaggacaggacagcatgctccttgttcagacttcagacccatatcatatttttttttttgtc

SEQ ID NO: 201641 - DNA, 3832 bp, Zea Mays
cttagaccaggacattccatcccaggggccaggatatcacatccgagagtagacggtgtgttacagtatctgccacaaaaaatgaaaccatttcgatacaagtatttcatcagaattgtttaggttggatattttgtagaaattgaatgattcagaacacagtgttggttctttgtaataatctcaatgtaagcaagtatactatatttcaaccaatcaaacagcagagggcaccttggtttgctcaagaaaagtataggcaggttccttcccaatctacaatctacagaagtcaaatggaccaaaaaaagaaatagttgagattgcccctattggtgttggggaatcctttttgcatggccactggaagatgatttttttttttgcagagttaaactagacatgattctatgagtttttctttattcgtagttgtaagcaatgaactcataagggaccagaatactaacagggggaaatattccttgctgcctttgtagccttgctctatttacatcttttttcctcgttcacttctctttgacaatatgtggtctgagaaggtattttgcatatgtgcgctgctagaaagtgggattcccttctaaagttgattcttcctgtcccatcacttcgtttttcaactctaagtccaaaagagtgagtccactccttgcatgaccaccaaccggaaagaaagaaacaaagaaagattgaaatgcaccaatacaatggttatatgatgcccacacggatttaagccaagagatggcctattcaaagacagcatagcagatgttatgaattttgacataaccagaaagaaaaatgtcaccaggagactatatccctttcctaaaacattttatttttcaggtttccttttcctgaagagggactattgtcaacagtcaatggcagttttctgaaaatagttgttctatgctcatagctcaagtttggaatcttccttttctgcaggaaagttccagatgaaagggcaggttgcttgacagccacaccacaagaacaaaatggaatgtgtgcacatcattggaaggttaatcaattaattctttcaaagatatatacaagaaggaagcaacatttaagttcattgaagtggaaatgacaagatgtcaactgtcgttgcttcaatacagtgaatggcactgaccagatgctatcaataagccacctctgagtagtgggtatcaagatgttgacttagcaatttgttgcaacatcattgtgattagctttacttaaaccaattgaaaacaggagtgaaaaagaattcatgaatcctaattaaattccacagctttttatcaacaaaatagagcctgaatttaatagaataacaagccaaaccacacagaaactaggaaacaacaaaagtctcttagcctcatccagctctcaggccttgcgggattatcaaatggtttttttatttaaatgtgcttttacagtttacagcactcctgttaaaaggcagtcagaagaagaaacggatgcaagtgcaacccctttgtttggactacaggccacagaacagaaggaaagcacatcaaagtaaagatgcctgggaatcttggcagaaaacaattgagtaaacaagaagcttatgaggatgtagcaaaataaagtgaaaagatcaagatgcacacagtacacttaatcaatggtgccatggatgaggcatcctcaatctgatttgcttaccttttccttttctttcccatagagtgatataattgaaccagagatggctattgcatctttctaggaattctgctgactttgttaggtcgcagtccccaaaaggaactaaaaattttaaatgaatggcattgccattacaaattagatgccaattgaaatggaatattaagagctttaagtccaacttgcatggaaaaagtcaaagaatcatgttatggtttccttggaggactcttcaactttactgaaaacagaatgtcccctctataaataaagattcaccaatggcaacctagcccaagacaccaaacacccatgcacacgcaacctatcaagatgaaaagaggcctcctggtactttggtccttgttctacttcagtgttgcaaacgctgacactagaaaccaggccaagcagcctcttgagttcaatcaattgagagtatcaaggaaatatgttcaaggaaaacaagattcaactcccaagaacggaaccagtccatcagtgcatagaggctcaacaagcaatcaacgggagcaggataagatcgtatgtatgcctgggcaaacaggggtagcagagtttgaccaatatgcaggatatgtgactgtggatgccaaggctggaagggctttgttctactattttgttgaggctcctcaagatccttcaaacaaacctcttgtcctatggctgaatggagggcctggctgttcatcctttggatctggggccatggttgaacttggacctttctctgttcatagtgacaacaagacactgtacaagaaaaggcatgcatggaacagaatggccaacatgttgttcattgagatcccagctggtgttggatactcatattcaaacactacatcagattactataacactggtcactatataccagaacttgcaaatctgattctctctaagaatagagccaccaatgtaactagtatcaagcttaaaggtgttgcgattggaaatgcagacttggatgataatttgactctaagagcatcatatgactactattggatgcatgctatgatttcgggaaaagcttataaagccgtcaaggataagtgcggctttaatgggacatacactgaagactgccaaaatgccatggacttagccacccaagaaaaaggaaatattgatgactatgacatctatgcaccaatatgccaagatgcctcaaacccttctaaatcaagtgactcgttagtgtttggtgatccatgcacaaaccactacgtctcctcttacctaaatcgtcctgaggtccaaagggcactccatgcaaacacaacagggttaggctacccatggatggactgtagtcagcagatatttgataattggaaagattcaccagagacaatgctgccatcaatcaagaaactcatttcaagtggcacgagaatatggctgtacagtggtgatatggatgcagtgtgctcattcatttcaacacaatatgtgctggacaatcttgggcttcctatagaagcagcttggcgtccatggcgcgtcgacaatgaggttgctggctacgtcattgggtataaagggctggtcttcgtgacggtcagaggagctgggcacatggtgccatactaccagcctcgcagggcattggcattattctcgtcattcctcgaaggggagctccctccacgctgatcgattaagctagcagggctggagttttggtagagtcaatgcgaagacagttcttgagaggaggaggcatgtatgcagaagatcgaccacatccacacttggtagccaaatgctgttgcacaaaagtgaacctcccttttgggaacttcaaaaacatggcatgcaagtcggttgtctgcttccattccattcacatttaacttagaaatgatactttagcagacactgttgttagttctacgtttttttttcttcttcaatttggtcgaaaaaaagttgtgcctgaacttcgtcgatcctctatatgcttgtgactagtcccttcaatctgaatagatgctggaaaacaaagggctctgagccccgcagcgatcatgggttttttttctctgaggaagaggaagctgtccttgat

SEQ ID NO: 201642 - DNA, 1906 bp, Zea Mays
cgaccaaattgaagaagaaaaaaaaacgtagaactaacaacagtgtctgctaaagtatcatttctaagttaaatgtgaatggaatggaagcagacaaccgacttgcatgccatgtttttgaagttcccaaaagggaggttcacttttgtgcaacagcatttggctaccaagtgtggatgtggtcgatcttctgcatacatgcctcctcctctcaagaactgtcttcgcattgactctaccaaaactccagcctacaagaatatattaacaagcagcggatgaaaaattcagtaaatggtcggtgcagatagttcaggttagaataatgagacgatatcgctttgtcgagcaatgtaaaaatgagacaacgtgctctttagtttaggcagtaccgggcagttctccacattttactcagcagagccccagacaccgatcaacagtcgagacggggtcggcgtcggcgacgcgccgttccacggtcgccatccctcgtcgtccgtcgcgggctcgtgccgtgccgctatccattctccgagtgggctatgtacctcattgtcgacgcgccatggacgccaagctgcttctataggaagcccaagattgtccagcacatattgtgttgaaatgaatgagcacactgcatccatatcaccactggtacacaaaggcatagtttaagtcatgttatgatgtagcgcaccgagcaaggtattttgacacacataaatctgaacatatgtacctgtacagccatattctcgtgccacttgaaatgagtttcttgattgatggcagcattgtctctggtgaatctttccaattatcaaatatctgctgactgcttgaaggaaacatataaattaatcatatacatgttgtactgttgacttccccctagtgccaattgctaatctagtaagagatttacttgaggctgaacgaattctcaacagttaaacttgtttatacatgactgagtatgcagcatgtgatagccatattgacactctatagaaacaatcaaggatgagtcgggatacatgcatcttggtgcatactcaatcttatagatatgcagcatgtgacctaagcccctaggggcacctttggttaaatatcttatggtttcaaatagttgactgctggacaggcagaatataggtttgagaatacaggatttgtggctttgtgttgtaagggttattggcctcttttctttttaatacaaactacaaagatacacagccgtctaccctccagtgtgtttgagaaaacaaaagaatattagcttgagtggcattgcgccttttttagtgttgacttaaatatacctttttgcatacagcatgttgtgctaatggaataattcttggcaatcgtggttcacatactctttgatggttaactggaagaggttgttgctacctttttagaattaatgttattgagaagtgagtgatgaaaagatatataagtattctgttccttcagattatataagtaattgtttgtacataaagcacctaccttttcatatggctttaggaaaccaacagattgctaatagggtcacacaagagatatggtctgacgttgcacataaatttgagggaaatatgatattcagatattcaatatacatacctacagtccatccatgggtagcctaaccctgttgtgtttgcatggagtgccctttggacctcaggacgatttaggtaagaggagacgtagtggtttgtgcatggatcaccaaacactaactgaaatagtaaacaaaaagttccagtataccaaaatttcatatagaaatggaagttaaaacatctgtcaatctgtgaaatttatgtacgatgttgtataccgagtcacttgatttagaagggtttgaggcatcttggca

SEQ ID NO: 201643 - DNA, 1238 bp, Zea Mays
aatcaacggtgcgtgcctacggcgcgtggcatcgtgtgacttgggcaactgacactcctccccgcgacgccgcgccgcctgcccggctgccatccgaatcccatgtcgtcgctgctcctcctccaggccctggctccagccatgaccgtcccccgccaccatttcctcatctcccctctccgcctcgcctctgcagccacagttccgttcgctcgacgcttctccaacgccgcttccagcaacaagccggagccactcctctcggaaccggatctggagtcaggtctgtatcttgtgtcaacgccaattgggaaccttgaagatatcaccttaagggcactgcgtgtcctaaaatgtgctaatgtgatactatctgaagacacaaggcattcaggaaagctacttcagcattacaacatcaagacacctcttcttagcttccataagttcaacgaacgggagagagagcccactatcttaaggaggcttcatgaaggtgaagcagttgcactgataagtgatgctgggacgccaggtattagtgaccctggcatggaactggctagactatgtgcaactgagaaaatccctgtcattcccattcctgggccatctgctgcaattgctgctctttctgcatcgggtttgccatcaaatgaattcacatttgttgggtttttaccaaagcatgctcggtcaagaagagataggcttgagatatctgctcgtgaagctgctacacaaatattctatgttcctccccatggcattcagcagtttcttgttgatgctgcttcatcttttggcgattccaggcattgtgtggtcgcaagggagataacaaaaatacatgaagagttttggcgtggaactttaggtgaagcaaatgaagcttttgcaactcgacaaccaaagggagaaataacagtgctcatagaggggaagttaatttcagatgacgaaattccatcagaggatttccttgagcatgaactaagagaattgacggcaaagggatatactctttctgcggcggtgaaattggtcactgaagccacatcagcaaagaagaaagatgtttatgcactcgcattgaggttgtttggaaaataagtaaaatggaatttttggtcgcatctgaaacgaggacacgaggaatctgaagcacaactttggggaagatcacaagtaaaaggacacgtggaccctgaactgtccctggaggaacctcgtgaact

SEQ ID NO: 201644 - DNA, 1196 bp, Zea Mays
ggtgcgtgcctacggcgcgtggcatcgtgtgacttgggcaactgacactcctccccgcgacgccgcgccgcctgcccggctgccatccgaatcccatgtcgtcgctgctcctcctccaggccctggctccagccatgaccgtcccccgccaccatttcctcatctcccctctccgcctcgcctctgcagccacagttccgttcgctcgacgcttctccaacgccgcttccagcaacaagccggagccactcctctcggaaccggatctggagtcaggtctgtatcttgtgtcaacgccaattgggaaccttgaagatatcaccttaagggcactgcgtgtcctaaaatgtgctaatgtgatactatctgaagacacaaggcattcaggaaagctacttcagcattacaacatcaagacacctcttcttagcttccataagttcaacgaacgggagagagagcccactatcttaaggaggcttcatgaaggtgaagcagttgcactgataagtgatgctgggacgccaggtattagtgaccctggcatggaactggctagactatgtgcaactgagaaaatccctgtcattcccattcctgggccatctgctgcaattgctgctctttctgcatcgggtttgccatcaaatgaattcacatttggtaaataatgctgatactgtactcattttatttttcagttgtaaggaactattggggtcagttcatattttcaattttagttgggtttttaccaaagcatgctcggtcaagaagagataggcttgagatatctgctcgtgaagctgctacacaaatattctatgttcctccccatggcattcagcagtttcttgttgatgctgcttcatcttttggcgattccaggcattgtgtggtcgcaagggagataacaaaaatacatgaagagttttggcgtggaactttaggtgaagcaaatgaagcttttgcaactcgacaaccaaagggagaaataacagtgctcatagaggggaagttaatttcagatgacgaaattccatcagaggatttccttgagcatgaactaagagaattgacggcaaagggatatactctttctgcggcggtgaaattggtcactgaagccacatcagcaaagaagaaagatgtttatgcactcgcattgagcgatgccctcttcgacgggatcctcc

SEQ ID NO: 201645 - DNA, 1700 bp, Zea Mays
ggtgcgtgcctacggcgcgtggcatcgtgtgacttgggcaactgacactcctccccgcgacgccgcgccgcctgcccggctgccatccgaatcccatgtcgtcgctgctcctcctccaggccctggctccagccatgaccgtcccccgccaccatttcctcatctcccctctccgcctcgcctctgcagccacagttccgttcgctcgacgcttctccaacgccgcttccagcaacaagccggagccactcctctcggaaccggatctggagtcaggtctgtatcttgtgtcaacgccaattgggaaccttgaagatatcaccttaagggcactgcgtgtcctaaaatgtgctaatgtgatactatctgaagacacaaggcattcaggaaagctacttcagcattacaacatcaagacacctcttcttagcttccataagttcaacgaacgggagagagagcccactatcttaaggaggcttcatgaaggtgaagcagttgcactgataagtgatgctgggacgccaggtattagtgaccctggcatggaactggctagactatgtgcaactgagaaaatccctgtcattcccattcctgggccatctgctgcaattgctgctctttctgcatcgggtttgccatcaaatgaattcacatttgcatgctcggtcaagaagagataggcttgagatatctgctcgtgaagctgctacacaaatattctatgttcctccccatggcattcagcagtttcttgttgatgctgcttcatcttttggcgattccaggcattgtgtggtcgcaagggagataacaaaaatacatgaagagttttggcgtggaactttaggtgaagcaaatgaagcttttgcaactcgacaaccaaagggagaaataacagtgctcatagaggggaagttaatttcagatgacgaaattccatcagaggatttccttgagcatgaactaagagaattgacggcaaagggatatactctttctgcggcggtgaaattggtcactgaagccacatcagcaaagaagaaagatgtttatgcactcgcattgaggttgtttggaaaataagtaaaatggaatttttggtcgcatctgaaacgaggacacgaggaatctgaagcacaactttggggaagatcacaagtaaaaggcaagttgtgtccttgatcacattctttgacctaataatgttcatgattctgttaatcaccgtggcatcgttaggttagcttgatgggacataatcagttacctagttttgtttatcttacaccttgcatacaaataaattattagttagttttgttgttgctctacctggtttttggttaatgatgcttataaattatggtcatgtttcatgatgatatattgctggattatctatatggcgcatgataagtttacaatgtttaattggaacatggagcgctaacacaagacaatagtgctaccaaagggtggaatggaacatccttggccaattaattaggaaagttagtatgagttaatgcttttccgaaaggggcaagcgggtgtgagaagctgctgatatagggaggttctcggatgatcatgctgcgatgactttttagaaaggggatcttgatagtagctagtgagatctttttttccttctcaccaccgcatttagagctagtttgaaaactgaaattcct

SEQ ID NO: 201646 - DNA, 1717 bp, Zea Mays
ggtgcgtgcctacggcgcgtggcatcgtgtgacttgggcaactgacactcctccccgcgacgccgcgccgcctgcccggctgccatccgaatcccatgtcgtcgctgctcctcctccaggccctggctccagccatgaccgtcccccgccaccatttcctcatctcccctctccgcctcgcctctgcagccacagttccgttcgctcgacgcttctccaacgccgcttccagcaacaagccggagccactcctctcggaaccggatctggagtcaggtctgtatcttgtgtcaacgccaattgggaaccttgaagatatcaccttaagggcactgcgtgtcctaaaatgtgctaatgtgatactatctgaagacacaaggcattcaggaaagctacttcagcattacaacatcaagacacctcttcttagcttccataagttcaacgaacgggagagagagcccactatcttaaggaggcttcatgaaggtgaagcagttgcactgataagtgatgctgggacgccaggtattagtgaccctggcatggaactggctagactatgtgcaactgagaaaatccctgtcattcccattcctgggccatctgctgcaattgctgctctttctgcatcgggtttgccatcaaatgaattcacatttgttgggtttttaccaaagcatgctcggtcaagaagagataggcttgagatatctgctcgtgaagctgctacacaaatattctatgttcctccccatggcattcagcagtttcttgttgatgctgcttcatcttttggcgattccaggcattgtgtggtcgcaagggagataacaaaaatacatgaagagttttggcgtggaactttaggtgaagcaaatgaagcttttgcaactcgacaaccaaagggagaaataacagtgctcatagaggggaagttaatttcagatgacgaaattccatcagaggatttccttgagcatgaactaagagaattgacggcaaagggatatactctttctgcggcggtgaaattggtcactgaagccacatcagcaaagaagaaagatgtttatgcactcgcattgaggttgtttggaaaataagtaaaatggaatttttggtcgcatctgaaacgaggacacgaggaatctgaagcacaactttggggaagatcacaagtaaaaggcaagttgtgtccttgatcacattctttgacctaataatgttcatgattctgttaatcaccgtggcatcgttaggttagcttgatgggacataatcagttacctagttttgtttatcttacaccttgcatacaaataaattattagttagttttgttgttgctctacctggtttttggttaatgatgcttataaattatggtcatgtttcatgatgatatattgctggattatctatatggcgcatgataagtttacaatgtttaattggaacatggagcgctaacacaagacaatagtgctaccaaagggtggaatggaacatccttggccaattaattaggaaagttagtatgagttaatgcttttccgaaaggggcaagcgggtgtgagaagctgctgatatagggaggttctcggatgatcatgctgcgatgactttttagaaaggggatcttgatagtagctagtgagatctttttttccttctcaccaccgcatttagagctagtttgaaaactgaaattcct

SEQ ID NO: 201647 - DNA, 1201 bp, Zea Mays
ggtgcgtgcctacggcgcgtggcatcgtgtgacttgggcaactgacactcctccccgcgacgccgcgccgcctgcccggctgccatccgaatcccatgtcgtcgctgctcctcctccaggccctggctccagccatgaccgtcccccgccaccatttcctcatctcccctctccgcctcgcctctgcagccacagttccgttcgctcgacgcttctccaacgccgcttccagcaacaagccggagccactcctctcggaaccggatctggagtcaggtctgtatcttgtgtcaacgccaattgggaaccttgaagatatcaccttaagggcactgcgtgtcctaaaatgtgctaatgtgatactatctgaagacacaaggcattcaggaaagctacttcagcattacaacatcaagacacctcttcttagcttccataagttcaacgaacgggagagagagcccactatcttaaggaggcttcatgaaggtgaagcagttgcactgataagtgatgctgggacgccaggtattagtgaccctggcatggaactggctagactatgtgcaactgagaaaatccctgtcattcccattcctgggccatctgctgcaattgctgctctttctgcatcgggtttgccatcaaatgaattcacatttgagataggcttgagatatctgctcgtgaagctgctacacaaatattctatgttcctccccatggcattcagcagtttcttgttgatgctgcttcatcttttggcgattccaggcattgtgtggtcgcaagggagataacaaaaatacatgaagagttttggcgtggaactttaggtgaagcaaatgaagcttttgcaactcgacaaccaaagggagaaataacagtgctcatagaggggaagttaatttcagatgacgaaattccatcagaggatttccttgagcatgaactaagagaattgacggcaaagggatatactctttctgcggcggtgaaattggtcactgaagccacatcagcaaagaagaaagatgtttatgcactcgcattgaggttgtttggaaaataagtaaaatggaatttttggtcgcatctgaaacgaggacacgaggaatctgaagcacaactttggggaagatcacaagtaaaagactttagacggagattttgacaatcttttggagacgctaaatcattt

SEQ ID NO: 201648 - DNA, 1164 bp, Zea Mays
ggtgcgtgcctacggcgcgtggcatcgtgtgacttgggcaactgacactcctccccgcgacgccgcgccgcctgcccggctgccatccgaatcccatgtcgtcgctgctcctcctccaggccctggctccagccatgaccgtcccccgccaccatttcctcatctcccctctccgcctcgcctctgcagccacagttccgttcgctcgacgcttctccaacgccgcttccagcaacaagccggagccactcctctcggaaccggatctggagtcaggtctgtatcttgtgtcaacgccaattgggaaccttgaagatatcaccttaagggcactgcgtgtcctaaaatgtgctaatgtgatactatctgaagacacaaggcattcaggaaagctacttcagcattacaacatcaagacacctcttcttagcttccataagttcaacgaacgggagagagagcccactatcttaaggaggcttcatgaaggtgaagcagttgcactgataagtgatgctgggacgccaggtattagtgaccctggcatggaactgttgtaaggaactattggggtcagttcatattttcaattttagttgggtttttaccaaagcatgctcggtcaagaagagataggcttgagatatctgctcgtgaagctgctacacaaatattctatgttcctccccatggcattcagcagtttcttgttgatgctgcttcatcttttggcgattccaggcattgtgtggtcgcaagggagataacaaaaatacatgaagagttttggcgtggaactttaggtgaagcaaatgaagcttttgcaactcgacaaccaaagggagaaataacagtgctcatagaggggaagttaatttcagatgacgaaattccatcagaggatttccttgagcatgaactaagagaattgacggcaaagggatatactctttctgcggcggtgaaattggtcactgaagccacatcagcaaagaagaaagatgtttatgcactcgcattgaggttgtttggaaaataagtaaaatggaatttttggtcgcatctgaaacgaggacacgaggaatctgaagcacaactttggggaagatcacaagtaaaaggacacgtggaccctgaactgtccctggaggaacctcgtgaact

SEQ ID NO: 201649 - DNA, 2063 bp, Zea Mays
ggtgcgtgcctacggcgcgtggcatcgtgtgacttgggcaactgacactcctccccgcgacgccgcgccgcctgcccggctgccatccgaatcccatgtcgtcgctgctcctcctccaggccctggctccagccatgaccgtcccccgccaccatttcctcatctcccctctccgcctcgcctctgcagccacagttccgttcgctcgacgcttctccaacgccgcttccagcaacaagccggagccactcctctcggaaccggatctggagtcaggtctgtatcttgtgtcaacgccaattgggaaccttgaagatatcaccttaagggcactgcgtgtcctaaaatgtgctaatgtgatactatctgaagacacaaggcattcaggaaagctacttcagcattacaacatcaagacacctcttcttagcttccataagttcaacgaacgggagagagagcccactatcttaaggaggcttcatgaaggtgaagcagttgcactgataagtgatgctgggacgccaggtattagtgaccctggcatggaactggctagactatgtgcaactgagaaaatccctgtcattcccattcctgggccatctgctgcaattgctgctctttctgcatcgggtttgccatcaaatgaattcacatttgttgggtttttaccaaagcatgctcggtcaagaagagataggcttgagatatctgctcgtgaagctgctacacaaatattctatgttcctccccatggcattcagcagtttcttgttgatgctgcttcatcttttggcgattccaggcattgtgtggtcgcaagggagataacaaaaatacatgaagagttttggcgtggaactttaggtgaagcaaatgaagcttttgcaactcgacaaccaaagggagaaataacagtgctcatagaggggaagttaatttcagatgacgaaattccatcagaggatttccttgagcatgaactaagagaattgacggcaaagggatatactctttctgcggcggtgaaattggtcactgaagccacatcagcaaagaagaaagatgtttatgcactcgcattgaggttgtttggaaaataagtaaaatggaatttttggtcgcatctgaaacgaggacacgaggaatctgaagcacaactttggggaagatcacaagtaaaagctcttctggttagatagatggaggtgccaatgaactctacgcaatctggtcctcacttccctgtgcagcatcagtccctctcattagacatcaagggaaataaaacagatattgttatcagtaaatatgaagatacctttctgctgattgtggcacaaatcggctgcatgggaaccatactagctgccaagaaagacgaaagtgttttctcggacccaacctacaatgtgtctgttctttttgggaagagaaatgagccactcctacaagcttgcgcacgtcaacttattgagcacataagtggcagtggctcagctcggtcattggttatttctctgggtctgaaagatcattctcagggaacactgaaggatatcattgtagctgtgatcgagaatcgcctttggtgatgattgaataactgagctgggcatgggattgacatattcagcccatcgataaagatattgcttagcattgcgcaagaggagccatcgtttataccatgcactaaattctggtagttttgtagttagaccttctatctacttggattaacaaaaggtggctttaagctgctgtcaaaatttgagtgtcagctctcacgctaaacaaaaggcactgtatgctggtaaaacacttctgaggtgaatcatgcttttcgaggctatttgacaatttcggctatagcttccccaggcttgctaccaacccagtccaactccaaggtttggaaaattctgtaaaaaaaatcaaaacaaactcgacatgagggaaactactcgaccaattgggtgcttgtagatgatataagtacatgttaagactaataagtagtgtataactaagatgttgtttggtccacgaaatataac

SEQ ID NO: 201650 - DNA, 2351 bp, Zea Mays
acagcgcctccataccatacccgtccccgccgcccggtgagatgccgaggcgcgagcgcgacctgccgcagcaggcctgacctcgcgtatctctcaggagtcaggactcctgaagatcagtttcgtgccttacctcgagagcgcctcctgaagagcccatgaacagattggcgtcgacgagattcacggccgcccttactcgaagcgtccttccccagtgccgccgcccaatcggccgcgccctgtgctccggcgcgccgcagaacggcgagatggaggccgcggtgcgagaggtcgtgtgcttcggttccggaagcctcgacgaggtggggagcaggctggaccgcctgggcgtggccgtctcgccgcacctgattgggcgcgtgatcgactcgtgcggcgagacgggcggaggctccggcaggaggctgctgcgctttttggcgtggtgccggtccaagcactccggggtgttaggggaggaggcgctcgacagggcgattggggtgcttgcacgggctggggaccttaccgcgatgagaatcgccattgctgatgctgagaaggacgggcggaggatggctcccgagacattttccaccgtgatcgacgcacttgtcaaggcaggcagggaggatgaggctgttcggctgtttagaggcttggagaggcagagattgctgcctgagtgcggcagcagggtaggaggccatggcgtatggtcgagcagccttgccatggtccatgcattgtgtaagagaggccatgctcgcgaggcacagggtgttgtgtggcaccataagagcgagctctcggcagaacccatggttagcatcgttgagcgtagcctcctccatggttggtgcgttcacgggaatgctaaggaggctcggaaagtcctcaatgaaatgaagtcttcaggcgttccgttgggcttgccatcattcaatgaatttctccattgcgtgtgccacagaaaccttaacttcaatccctctgcccttgtcccagaggctatggatatattaacagagatgaggacctgtggtgttcccccagctgcttctagtttcaacatattactttcatgtttaggccgagcaagaagagtgaaagaagcttatagaatcttgtacttgatgagagaaggaaaagcagggtgctcccctgattgggttagctactatcttgtggttagagtcctctatttaacaaggagaattcttagagggaagaggcttgtagatgctatgcttgaaagtggagttcttcctactgctaagtttttccatggtcttataggcatcctttgtggaacagaggaagttgaccatgctcttgatatgttcaaacttatgaagaggtgtgagttagtggatgctcgtatatatgacctgcttatagaaaagctttgtaggattggtagatttgaaattggaagagagctgtgggatgaagctacaaatagtggtcttgtattaggatgctcacaagatctgctcgatcccttgaagacagaggtattcagaccaatctgtccagcacaaagattaagccctcagaactataaacgcttggcctggaaaaagaaggttactgctgttggagtcaaaaaggacattgctatctcagcctcaaggaagaagtcgggagtgtaggaagctcgtgcatcacaaaagcaagaaggcttggtgttcctactcctgtactttatgctgtggatccacttctgcatactttgacagtatgtggatggcttgtctgtcaaggatatacttcttggttttggttcagatggggttaacgaggaacgcctggatgatattagtatcacacagataggaaacgtcgtcggcaaactacatgatggaggccttgttcatggtgatttagaactgtaacaattaattggtggttcttattgatttcggtctgagttttatataaataattcccgagggcgaggacaaagcggtggacctatatgtgctagagagagctttgatctccatgcattcgtcccgtggggatgtggtgaggagactgcataaattggcatccaagttgtcttttgctgattatatgcatacattgattcctttattcggtgactttattttggggaggccaatgacgtatacgggttacggttacataagcagccaacaatattggattcatcagtaattgaaatgtctggtcaatatttgggtttgcttgagcttggctgttattccgcacttgggtccgactaatctgtgccaatgttttctggctatatacaacacaaaactagtccatccgcatcgtggatttgttatttttttcctttcgtccgtggcatcttgttt

SEQ ID NO: 201651 - DNA, 1309 bp, Zea Mays
acagcgcctccataccatacccgtccccgccgcccggtgagatgccgaggcgcgagcgcgacctgccgcagcaggcctgacctcgcgtatctctcaggagtcaggactcctgaagatcagtttcgtgccttacctcgagagcgcctcctgaaggcatcctttgtggaacagaggaagttgaccatgctcttgatatgttcaaacttatgaagaggtgtgagttagtggatgctcgtatatatgacctgcttatagaaaagctttgtaggattggtagatttgaaattggaagagagctgtgggatgaagctacaaatagtggtcttgtattaggatgctcacaagatctgctcgatcccttgaagacagaggtattcagaccaatctgtccagcacaaagattaagccctcagaactataaacgcttggcctggaaaaagaaggttactgctgttggagtcaaaaaggacattgctatctcagcctcaaggaagaagtcgggagtgtaggaagctcgtgcatcacaaaagcaagaaggcttggtgttcctactcctgtactttatgctgtggatccacttctgcatactttgacagtatgtggatggcttgtctgtcaaggatatacttcttggttttggttcagatggggttaacgaggaacgcctggatgatattagtatcacacagataggaaacgtcgtcggcaaactacatgatggaggccttgttcatggtgatttagaactgtaacaattaattggtggtgggtacaatatcctttttgtcaacgccttctatttaatgtgtccactttattgtgctatgaagtcaagtttatgatttgtaacttatatatgttagtcttgacaggttcttattgatttcggtctgagttttatataaataattcccgagggcgaggacaaagcggtggacctatatgtgctagagagagctttgatctccatgcattcgtcccgtggggatgtggtgaggagactgcataaattggcatccaagttgtcttttgctgattatatgcatacattgattcctttattcggtgactttattttggggaggccaatgacgtatacgggttacggttacataagcagccaacaatattggattcatcagtaattgaaatgtctggtcaatatttgggtttgcttgagcttggctgttattccgcacttgggtccgactaatctgtgccaatgttttctggctatatacaacacaaaactagtccatccgcatcgtggatttgttatttttttcctttcgtccgtggcatcttgttt

SEQ ID NO: 201652 - DNA, 1022 bp, Zea Mays
acagcgcctccataccatacccgtccccgccgcccggtgagatgccgaggcgcgagcgcgacctgccgcagcaggcctgacctcgcgtatctctcaggagtcaggactcctgaagatcagtttcgtgccttacctcgagagcgcctcctgaaggatgctcacaagatctgctcgatcccttgaagacagaggtattcagaccaatctgtccagcacaaagattaagccctcagaactataaacgcttggcctggaaaaagaaggttactgctgttggagtcaaaaaggacattgctatctcagcctcaaggaagaagtcgggagtgtaggaagctcgtgcatcacaaaagcaagaaggcttggtgttcctactcctgtactttatgctgtggatccacttctgcatactttgacagtatgtggatggcttgtctgtcaaggatatacttcttggttttggttcagatggggttaacgaggaacgcctggatgatattagtatcacacagataggaaacgtcgtcggcaaactacatgatggaggccttgttcatggtgatttagaactgtaacaattaattggtggttcttattgatttcggtctgagttttatataaataattcccgagggcgaggacaaagcggtggacctatatgtgctagagagagctttgatctccatgcattcgtcccgtggggatgtggtgaggagactgcataaattggcatccaagttgtcttttgctgattatatgcatacattgattcctttattcggtgactttattttggggaggccaatgacgtatacgggttacggttacataagcagccaacaatattggattcatcagtaattgaaatgtctggtcaatatttgggtttgcttgagcttggctgttattccgcacttgggtccgactaatctgtgccaatgttttctggctatatacaacacaaaactagtccatccgcatcgtggatttgttatttttttcctttcgtccgtggcatcttgttt

SEQ ID NO: 201653 - DNA, 1078 bp, Zea Mays
acagcgcctccataccatacccgtccccgccgcccggtgagatgccgaggcgcgagcgcgacctgccgcagcaggcctgacctcgcgtatctctcaggagtcaggactcctgaagatcagtttcgtgccttacctcgagagcgcctcctgaagatttgaaattggaagagagctgtgggatgaagctacaaatagtggtcttgtattaggatgctcacaagatctgctcgatcccttgaagacagaggtattcagaccaatctgtccagcacaaagattaagccctcagaactataaacgcttggcctggaaaaagaaggttactgctgttggagtcaaaaaggacattgctatctcagcctcaaggaagaagtcgggagtgtaggaagctcgtgcatcacaaaagcaagaaggcttggtgttcctactcctgtactttatgctgtggatccacttctgcatactttgacagtatgtggatggcttgtctgtcaaggatatacttcttggttttggttcagatggggttaacgaggaacgcctggatgatattagtatcacacagataggaaacgtcgtcggcaaactacatgatggaggccttgttcatggtgatttagaactgtaacaattaattggtggttcttattgatttcggtctgagttttatataaataattcccgagggcgaggacaaagcggtggacctatatgtgctagagagagctttgatctccatgcattcgtcccgtggggatgtggtgaggagactgcataaattggcatccaagttgtcttttgctgattatatgcatacattgattcctttattcggtgactttattttggggaggccaatgacgtatacgggttacggttacataagcagccaacaatattggattcatcagtaattgaaatgtctggtcaatatttgggtttgcttgagcttggctgttattccgcacttgggtccgactaatctgtgccaatgttttctggctatatacaacacaaaactagtccatccgcatcgtggatttgttatttttttcctttcgtccgtggcatcttgttt

SEQ ID NO: 201654 - DNA, 1100 bp, Zea Mays
acagcgcctccataccatacccgtccccgccgcccggtgagatgccgaggcgcgagcgcgacctgccgcagcaggcctgacctcgcgtatctctcaggagtcaggactcctgaagatcagtttcgtgccttacctcgagagcgcctcctgaagaaaagctttgtaggattggtagatttgaaattggaagagagctgtgggatgaagctacaaatagtggtcttgtattaggatgctcacaagatctgctcgatcccttgaagacagaggtattcagaccaatctgtccagcacaaagattaagccctcagaactataaacgcttggcctggaaaaagaaggttactgctgttggagtcaaaaaggacattgctatctcagcctcaaggaagaagtcgggagtgtaggaagctcgtgcatcacaaaagcaagaaggcttggtgttcctactcctgtactttatgctgtggatccacttctgcatactttgacagtatgtggatggcttgtctgtcaaggatatacttcttggttttggttcagatggggttaacgaggaacgcctggatgatattagtatcacacagataggaaacgtcgtcggcaaactacatgatggaggccttgttcatggtgatttagaactgtaacaattaattggtggttcttattgatttcggtctgagttttatataaataattcccgagggcgaggacaaagcggtggacctatatgtgctagagagagctttgatctccatgcattcgtcccgtggggatgtggtgaggagactgcataaattggcatccaagttgtcttttgctgattatatgcatacattgattcctttattcggtgactttattttggggaggccaatgacgtatacgggttacggttacataagcagccaacaatattggattcatcagtaattgaaatgtctggtcaatatttgggtttgcttgagcttggctgttattccgcacttgggtccgactaatctgtgccaatgttttctggctatatacaacacaaaactagtccatccgcatcgtggatttgttatttttttcctttcgtccgtggcatcttgttt

SEQ ID NO: 201655 - DNA, 1598 bp, Zea Mays
acagcgcctccataccatacccgtccccgccgcccggtgagatgccgaggcgcgagcgcgacctgccgcagcaggcctgacctcgcgtatctctcaggagtcaggactcctgaagatcagtttcgtgccttacctcgagagcgcctcctgaaggctatggatatattaacagagatgaggacctgtggtgttcccccagctgcttctagtttcaacatattactttcatgtttaggccgagcaagaagagtgaaagaagcttatagaatcttgtacttgatgagagaaggaaaagcagggtgctcccctgattgggttagctactatcttgtggttagagtcctctatttaacaaggagaattcttagagggaagaggcttgtagatgctatgcttgaaagtggagttcttcctactgctaagtttttccatggtcttataggcatcctttgtggaacagaggaagttgaccatgctcttgatatgttcaaacttatgaagaggtgtgagttagtggatgctcgtatatatgacctgcttatagaaaagctttgtaggattggtagatttgaaattggaagagagctgtgggatgaagctacaaatagtggtcttgtattaggatgctcacaagatctgctcgatcccttgaagacagaggtattcagaccaatctgtccagcacaaagattaagccctcagaactataaacgcttggcctggaaaaagaaggttactgctgttggagtcaaaaaggacattgctatctcagcctcaaggaagaagtcgggagtgtaggaagctcgtgcatcacaaaagcaagaaggcttggtgttcctactcctgtactttatgctgtggatccacttctgcatactttgacagtatgtggatggcttgtctgtcaaggatatacttcttggttttggttcagatggggttaacgaggaacgcctggatgatattagtatcacacagataggaaacgtcgtcggcaaactacatgatggaggccttgttcatggtgatttagaactgtaacaattaattggtggtgggtacaatatcctttttgtcaacgccttctatttaatgtgtccactttattgtgctatgaagtcaagtttatgatttgtaacttatatatgttagtcttgacaggttcttattgatttcggtctgagttttatataaataattcccgagggcgaggacaaagcggtggacctatatgtgctagagagagctttgatctccatgcattcgtcccgtggggatgtggtgaggagactgcataaattggcatccaagttgtcttttgctgattatatgcatacattgattcctttattcggtgactttattttggggaggccaatgacgtatacgggttacggttacataagcagccaacaatattggattcatcagtaattgaaatgtctggtcaatatttgggtttgcttgagcttggctgttattccgcacttgggtccgactaatctgtgccaatgttttctggctatatacaacacaaaactagtccatccgcatcgtggatttgttatttttttcctttcgtccgtggcatcttgttt

SEQ ID NO: 201656 - DNA, 1493 bp, Zea Mays
acagcgcctccataccatacccgtccccgccgcccggtgagatgccgaggcgcgagcgcgacctgccgcagcaggcctgacctcgcgtatctctcaggagtcaggactcctgaagatcagtttcgtgccttacctcgagagcgcctcctgaagaggctatggatatattaacagagatgaggacctgtggtgttcccccagctgcttctagtttcaacatattactttcatgtttaggccgagcaagaagagtgaaagaagcttatagaatcttgtacttgatgagagaaggaaaagcagggtgctcccctgattgggttagctactatcttgtggttagagtcctctatttaacaaggagaattcttagagggaagaggcttgtagatgctatgcttgaaagtggagttcttcctactgctaagtttttccatggtcttataggcatcctttgtggaacagaggaagttgaccatgctcttgatatgttcaaacttatgaagaggtgtgagttagtggatgctcgtatatatgacctgcttatagaaaagctttgtaggattggtagatttgaaattggaagagagctgtgggatgaagctacaaatagtggtcttgtattaggatgctcacaagatctgctcgatcccttgaagacagaggtattcagaccaatctgtccagcacaaagattaagccctcagaactataaacgcttggcctggaaaaagaaggttactgctgttggagtcaaaaaggacattgctatctcagcctcaaggaagaagtcgggagtgtaggaagctcgtgcatcacaaaagcaagaaggcttggtgttcctactcctgtactttatgctgtggatccacttctgcatactttgacagtatgtggatggcttgtctgtcaaggatatacttcttggttttggttcagatggggttaacgaggaacgcctggatgatattagtatcacacagataggaaacgtcgtcggcaaactacatgatggaggccttgttcatggtgatttagaactgtaacaattaattggtggttcttattgatttcggtctgagttttatataaataattcccgagggcgaggacaaagcggtggacctatatgtgctagagagagctttgatctccatgcattcgtcccgtggggatgtggtgaggagactgcataaattggcatccaagttgtcttttgctgattatatgcatacattgattcctttattcggtgactttattttggggaggccaatgacgtatacgggttacggttacataagcagccaacaatattggattcatcagtaattgaaatgtctggtcaatatttgggtttgcttgagcttggctgttattccgcacttgggtccgactaatctgtgccaatgttttctggctatatacaacacaaaactagtccatccgcatcgtggatttgttatttttttcctttcgtccgtggcatcttgttt

SEQ ID NO: 201657 - DNA, 1911 bp, Zea Mays
ggggccggggccggggctcggtgcggcagtgaaacccagccatccgtccaatcgaaccaccaccaagtcccgagcccaagcagccagcagtgggcggcgggcgaccccgggaaaccagggcgcaggcagcatccggggctgggggctgagttcaaaacagaaacaggcgggctatttgtctcggcgcccgcagggaatcccgatgcgcggaggctgaaagctgaagcgcatgcatgccagcccgcgcctcccacccggcgcttgccacctcgcgcgcgcgcggttggccgcgcctgcgcgccctcggcatcgcccccgacggggggcgttggcgttgcctcccccactttgcacccatttcagagcccgcccgacacttgtcaccgcgcgcccccgcctccgcgtctccgcccgcccgcccccatccggctataaaagcctcgccctctccaaccctagccgccgctgccgctgccgccgccgccgctacctcctcccttccttccttctccgctcgtcgtcgttctaccggcatggccggcattaccaagcgccgcacctccccggcctccacctcctcttcgtccggcgacgtcttgccgcagcgggtcacccggaagcgtcggtccgcccgccgcgggccccggagcaccgcccgtaggccgtcggcgcctccacctatgaatgaactggacttgaatacagctgctcttgatccggatcattatgctacaggattgagagttcttcttcagaaggagctccgaaatagcgatgtaagccagcttgggagaattgttctcccaaagaaggaggcggagtcttacctccctattctgatggcaaaggatggaaagagtttatgcatgcatgacttgctaaattcacaactgtggaccttcaagtatagatattggttcaacaacaaaagcaggatgtatgtgcttgaaaataccggagattatgtaaaagctcatgaccttcagcaaggagacttcatcgtgatctacaaggacgacgagaacaaccgctttgagcaaagaaggcaggagatgagcagaccgccactgtacctcaagtccatgaacacatgcacatctctgccgcactgccagctccacaagcgttccatgactatgcaggccccgtcgcagcagaagctggtatgctcgcgatcgtgccacagggtgacgagatattcgacggcatactgaactccctgccggagataccagtggcgaacgtgaggtactccgacttcttcgacccgttcggtgactccatggacatggcgaatccgctgagctcctccaataacccctcggtcaacctggctacgcatttccatgacgagaggatcgggagctgctcgtttccctacccaaaatccgggcctcagatgtgagatccgggcagaaaaactgccgcggtcaaaaccatcatcccctgcgtggaactcagagatcccctggttgacgccattgctgtacatccaaataaatggcgtcctcattttgtatgtttagtagtatatgattgggtacgcgtgttgtttatgtgtaaaagggtaactctgcaaaactgaactgagcgttacatcagatgcaacgctgtgacgactgacgaggaggcaggctctggtgtttcctgtcctgcaccctgtgaatgtgtgtgcaggtacataaacgaaagacatcctgtgcattagcattacctagttggtatgggagtaaaaaacttccacgtggttgggcacgctcgtctttatctgggcgagataatgccgatgccgactcggtttcagcaactcatctccacgaccacgacacctctgggactgctattaattcttctgctttataaataatactccgatggaatactatatagtgttttatacgaccatatata

SEQ ID NO: 201658 - DNA, 676 bp, Zea Mays
aaaaaaactatgataggcatctaggggtgggatgtccatggtgttcctggactggttaatttgtttggaatagaatcccctggtttgacctcaagcttggcaattgctgaacacattgtttcaaagtatttgtgatgggagtctcctatacaaagcttcattgccagatgctccatgcactgcagaatgatgaacctgacgtgtcaggaccagggttcaccaaagaaaatcgtacagtaaaaacaacattttgagctgttttttttcttgatcatttggatacttattgcatgtgactgttagaagatgaaattctatgaaagtttcagcgaaacattaatatgatggagattgaacgggtatatgacactttacgggcatggtacctggtctggactctgaatgtggactagagaattataccaagttgcttgatagatggcgcaactccacttctagttgcacaacggaaattgtaataagcccaacactgtgatacatgttggtgctagacctagacatttgtgtcggtcgggcatcacttgctgctatcgaaacatatcacgaaacagacgaattcaaaagaatgaagaactatgaattgggatatgatgcataggattggtcatattgaatcacattgagatcgactttcgttttatctatgaacgtgtgg

SEQ ID NO: 201659 - DNA, 1715 bp, Zea Mays
agaagatgatagaaagacgctgatcctagccttagccaaacaaagctccgacgaggcagcggccacggccagctggcatgctcctgctgcggcgccttgtccgggccggccggtcgtggggcaccgaggcgagaggcctcgcctcgggggccccgcgggaggcggcggacgccgtggtggtgggagcgggcgtcgtcgggctcgcggcggcgcgcgcgctggcgatggccgggcgcgaggtagtcgtggtcgaggcggcccccagtttcggcaccggcaccagttcccgcaacagcgaggtcatccacgccggtatctactaccctccgcgaagtcttaaggctaggctttgtgtaaggggaaaggaaatgctctacaagtactgtgaagaacgaggtgttgcccacaaacgaatcagcaaactcatcgttgccactggtgctgcagaggttccaaagttggacatgcttctcagaaatgccaaagaaaacggggtggatgatcttcagttgatggagggttctgaagctatggagatggaacctgagcttcgatgtcttaaagctttactatcacctagtactgggataattgactctcattcactcatgctctcccttttggctgatgctgaaaacttgggaacaactatatcatataacacatcagttatcagtgggcatgttggatccaatggccttgaactccatgtttgtgaaagcaaagagctgcagaattatcatgtagggtctcatgtgaacgcacaacttgttttgcttccgaagcttgtgataaactctgcaggtctgagtgcagttctacttgccaaacaatttcatggccttgaccaggaatttgtgcccactcctcactatgcgcgtgggtgttacttcaccctctctcaaaccaagagtcctttcagtcggttaatatatcctctaccagaggatggtggcataggagtccatgtcactttagatttgaatggccttgttagatttggtccagatgttgaatggatatctgatggtggaaaggaccatgtgtcatgttttctgaacaagggtgggatgtccatggtgttcctggactggttaatttgtttggaatagaatcccctggtttgacctcaagcttggcaattgctgaacacattgtttcaaagtatttgtgatgggagtctcctatacaaagcttcattgccagatgctccatgcactgcagaatgatgaacctgacgtgtcaggaccagggttcaccaaagaaaatcgtacagtaaaaacaacattttgagctgttttttttcttgatcatttggatacttattgcatgtgactgttagaagatgaaattctatgaaagtttcagcgaaacattaatatgatggagattgaacgggtatatgacactttacgggcatggtacctggtctggactctgaatgtggactagagaattataccaagttgcttgatagatggcgcaactccacttctagttgcacaacggaaattgtaataagcccaacactgtgatacatgttggtgctagacctagacatttgtgtcggtcgggcatcacttgctgctatcgaaacatatcacgaaacagacgaattcaaaagaatgaagaactatgaattgggatatgatgcataggattggtcatattgaatcacattgagatcgactttcgttttatctatgaacgtgtgg

SEQ ID NO: 201660 - DNA, 1915 bp, Zea Mays
agaagatgatagaaagacgctgatcctagccttagccaaacaaagctccgacgaggcagcggccacggccagctggcatgctcctgctgcggcgccttgtccgggccggccggtcgtggggcaccgaggcgagaggcctcgcctcgggggccccgcgggaggcggcggacgccgtggtggtgggagcgggcgtcgtcgggctcgcggcggcgcgcgcgctggcgatggccgggcgcgaggtagtcgtggtcgaggcggcccccagtttcggcaccggcaccagttcccgcaacagcgaggtcatccacgccggcactacaatactgcatggagcccttaattaatgtatcacagattctacctgcggattgccttttgtaggctaggctttgtgtaaggggaaaggaaatgctctacaagtactgtgaagaacgaggtgttgcccacaaacgaatcagcaaactcatcgttgccactggtgctgcagaggttccaaagttggacatgcttctcagaaatgccaaagaaaacggggtggatgatcttcagttgatggagggttctgaagctatggagatggaacctgagcttcgatgtcttaaagctttactatcacctagtactgggataattgactctcattcactcatgctctcccttttggctgatgctgaaaacttgggaacaactatatcatataacacatcagttatcagtgggcatgttggatccaatggccttgaactccatgtttgtgaaagcaaagagctgcagaattatcatgtagggtctcatgtgaacgcacaacttgttttgcttccgaagcttgtgataaactctgcaggtctgagtgcagttctacttgccaaacaatttcatggccttgaccaggaatttgtgcccactcctcactatgcgcgtgggtgttacttcaccctctctcaaaccaagagtcctttcagtcggttaatatatcctctaccagaggatggtggcataggagtccatgtcactttagatttgaatggccttgttagatttggtccagatgttgaatggatatctgatggtggaaaggaccatgtgtcatgttttctgaacaagtttgattactcagtaaatcccaatcgctgttctgtattttaccctgtggtaaggaagtattttccaaatctcaaggatgggtctttggaacctggttattctgggatccgaccaaagctttctggtcctggacaacctccttcagattttgttattcaggggtgggatgtccatggtgttcctggactggttaatttgtttggaatagaatcccctggtttgacctcaagcttggcaattgctgaacacattgtttcaaagtatttgtgatgggagtctcctatacaaagcttcattgccagatgctccatgcactgcagaatgatgaacctgacgtgtcaggaccagggttcaccaaagaaaatcgtacagtaaaaacaacattttgagctgttttttttcttgatcatttggatacttattgcatgtgactgttagaagatgaaattctatgaaagtttcagcgaaacattaatatgatggagattgaacgggtatatgacactttacgggcatggtacctggtctggactctgaatgtggactagagaattataccaagttgcttgatagatggcgcaactccacttctagttgcacaacggaaattgtaataagcccaacactgtgatacatgttggtgctagacctagacatttgtgtcggtcgggcatcacttgctgctatcgaaacatatcacgaaacagacgaattcaaaagaatgaagaactatgaattgggatatgatgcataggattggtcatattgaatcacattgagatcgactttcgttttatctatgaacgtgtgg

SEQ ID NO: 201661 - DNA, 1769 bp, Zea Mays
agaagatgatagaaagacgctgatcctagccttagccaaacaaagctccgacgaggcagcggccacggccagctggcatgctcctgctgcggcgccttgtccgggccggccggtcgtggggcaccgaggcgagaggcctcgcctcgggggccccgcgggaggcggcggacgccgtggtggtgggagcgggcgtcgtcgggctcgcggcggcgcgcgcgctggcgatggccgggcgcgaggtagtcgtggtcgaggcggcccccagtttcggcaccggcaccagttcccgcaacagcgaggtcatccacgccggtatctactaccctccgcgaagtcttaagaggttccaaagttggacatgcttctcagaaatgccaaagaaaacggggtggatgatcttcagttgatggagggttctgaagctatggagatggaacctgagcttcgatgtcttaaagctttactatcacctagtactgggataattgactctcattcactcatgctctcccttttggctgatgctgaaaacttgggaacaactatatcatataacacatcagttatcagtgggcatgttggatccaatggccttgaactccatgtttgtgaaagcaaagagctgcagaattatcatgtagggtctcatgtgaacgcacaacttgttttgcttccgaagcttgtgataaactctgcaggtctgagtgcagttctacttgccaaacaatttcatggccttgaccaggaatttgtgcccactcctcactatgcgcgtgggtgttacttcaccctctctcaaaccaagagtcctttcagtcggttaatatatcctctaccagaggatggtggcataggagtccatgtcactttagatttgaatggccttgttagatttggtccagatgttgaatggatatctgatggtggaaaggaccatgtgtcatgttttctgaacaagtttgattactcagtaaatcccaatcgctgttctgtattttaccctgtggtaaggaagtattttccaaatctcaaggatgggtctttggaacctggttattctgggatccgaccaaagctttctggtcctggacaacctccttcagattttgttattcaggggtgggatgtccatggtgttcctggactggttaatttgtttggaatagaatcccctggtttgacctcaagcttggcaattgctgaacacattgtttcaaagtatttgtgatgggagtctcctatacaaagcttcattgccagatgctccatgcactgcagaatgatgaacctgacgtgtcaggaccagggttcaccaaagaaaatcgtacagtaaaaacaacattttgagctgttttttttcttgatcatttggatacttattgcatgtgactgttagaagatgaaattctatgaaagtttcagcgaaacattaatatgatggagattgaacgggtatatgacactttacgggcatggtacctggtctggactctgaatgtggactagagaattataccaagttgcttgatagatggcgcaactccacttctagttgcacaacggaaattgtaataagcccaacactgtgatacatgttggtgctagacctagacatttgtgtcggtcgggcatcacttgctgctatcgaaacatatcacgaaacagacgaattcaaaagaatgaagaactatgaattgggatatgatgcataggattggtcatattgaatcacattgagatcgactttcgttttatctatgaacgtgtgg

SEQ ID NO: 201662 - DNA, 1593 bp, Zea Mays
agaagatgatagaaagacgctgatcctagccttagccaaacaaagctccgacgaggcagcggccacggccagctggcatgctcctgctgcggcgccttgtccgggccggccggtcgtggggcaccgaggcgagaggcctcgcctcgggggccccgcgggaggcggcggacgccgtggtggtgggagcgggcgtcgtcgggctcgcggcggcgcgcgcgctggcgatggccgggcgcgaggtagtcgtggtcgaggcggcccccagtttcggcaccggcaccagttcccgcaacagcgaggtcatccacgccggtatctactaccctccgcgaagtcttaaggctgatgctgaaaacttgggaacaactatatcatataacacatcagttatcagtgggcatgttggatccaatggccttgaactccatgtttgtgaaagcaaagagctgcagaattatcatgtagggtctcatgtgaacgcacaacttgttttgcttccgaagcttgtgataaactctgcaggtctgagtgcagttctacttgccaaacaatttcatggccttgaccaggaatttgtgcccactcctcactatgcgcgtgggtgttacttcaccctctctcaaaccaagagtcctttcagtcggttaatatatcctctaccagaggatggtggcataggagtccatgtcactttagatttgaatggccttgttagatttggtccagatgttgaatggatatctgatggtggaaaggaccatgtgtcatgttttctgaacaagtttgattactcagtaaatcccaatcgctgttctgtattttaccctgtggtaaggaagtattttccaaatctcaaggatgggtctttggaacctggttattctgggatccgaccaaagctttctggtcctggacaacctccttcagattttgttattcaggggtgggatgtccatggtgttcctggactggttaatttgtttggaatagaatcccctggtttgacctcaagcttggcaattgctgaacacattgtttcaaagtatttgtgatgggagtctcctatacaaagcttcattgccagatgctccatgcactgcagaatgatgaacctgacgtgtcaggaccagggttcaccaaagaaaatcgtacagtaaaaacaacattttgagctgttttttttcttgatcatttggatacttattgcatgtgactgttagaagatgaaattctatgaaagtttcagcgaaacattaatatgatggagattgaacgggtatatgacactttacgggcatggtacctggtctggactctgaatgtggactagagaattataccaagttgcttgatagatggcgcaactccacttctagttgcacaacggaaattgtaataagcccaacactgtgatacatgttggtgctagacctagacatttgtgtcggtcgggcatcacttgctgctatcgaaacatatcacgaaacagacgaattcaaaagaatgaagaactatgaattgggatatgatgcataggattggtcatattgaatcacattgagatcgactttcgttttatctatgaacgtgtgg

SEQ ID NO: 201663 - DNA, 1846 bp, Zea Mays
agaagatgatagaaagacgctgatcctagccttagccaaacaaagctccgacgaggcagcggccacggccagctggcatgctcctgctgcggcgccttgtccgggccggccggtcgtggggcaccgaggcgagaggcctcgcctcgggggccccgcgggaggcggcggacgccgtggtggtgggagcgggcgtcgtcgggctcgcggcggcgcgcgcgctggcgatggccgggcgcgaggtagtcgtggtcgaggcggcccccagtttcggcaccggcaccagttcccgcaacagcgaggtcatccacgccggctaggctttgtgtaaggggaaaggaaatgctctacaagtactgtgaagaacgaggtgttgcccacaaacgaatcagcaaactcatcgttgccactggtgctgcagaggttccaaagttggacatgcttctcagaaatgccaaagaaaacggggtggatgatcttcagttgatggagggttctgaagctatggagatggaacctgagcttcgatgtcttaaagctttactatcacctagtactgggataattgactctcattcactcatgctctcccttttggctgatgctgaaaacttgggaacaactatatcatataacacatcagttatcagtgggcatgttggatccaatggccttgaactccatgtttgtgaaagcaaagagctgcagaattatcatgtagggtctcatgtgaacgcacaacttgttttgcttccgaagcttgtgataaactctgcaggtctgagtgcagttctacttgccaaacaatttcatggccttgaccaggaatttgtgcccactcctcactatgcgcgtgggtgttacttcaccctctctcaaaccaagagtcctttcagtcggttaatatatcctctaccagaggatggtggcataggagtccatgtcactttagatttgaatggccttgttagatttggtccagatgttgaatggatatctgatggtggaaaggaccatgtgtcatgttttctgaacaagtttgattactcagtaaatcccaatcgctgttctgtattttaccctgtggtaaggaagtattttccaaatctcaaggatgggtctttggaacctggttattctgggatccgaccaaagctttctggtcctggacaacctccttcagattttgttattcaggggtgggatgtccatggtgttcctggactggttaatttgtttggaatagaatcccctggtttgacctcaagcttggcaattgctgaacacattgtttcaaagtatttgtgatgggagtctcctatacaaagcttcattgccagatgctccatgcactgcagaatgatgaacctgacgtgtcaggaccagggttcaccaaagaaaatcgtacagtaaaaacaacattttgagctgttttttttcttgatcatttggatacttattgcatgtgactgttagaagatgaaattctatgaaagtttcagcgaaacattaatatgatggagattgaacgggtatatgacactttacgggcatggtacctggtctggactctgaatgtggactagagaattataccaagttgcttgatagatggcgcaactccacttctagttgcacaacggaaattgtaataagcccaacactgtgatacatgttggtgctagacctagacatttgtgtcggtcgggcatcacttgctgctatcgaaacatatcacgaaacagacgaattcaaaagaatgaagaactatgaattgggatatgatgcataggattggtcatattgaatcacattgagatcgactttcgttttatctatgaacgtgtgg

SEQ ID NO: 201664 - DNA, 1867 bp, Zea Mays
atattactattattctactatccaccccgctgtctcggcctcacccaccgttcccatccaaacgccggtgccacgtcgtcgccccgcgccttccgccccaccaactcaccggcgaggtttaggacacagcgcatctcgccgcagcggatgccgtatatatccgcgcgccgagcttgagggacgccacaccccaccctcccctcccatcgcgattcgcgaatcaccaaactacccctcgttgtgaaaggaaggagacgaacgaggcagcggaaaggggagaggatttttcagattttccggcagcgacctacctagcccagcccagcgagagagaccgagcgacagcagctaccttctcccgacatgacgccgcatctgcccgccgtctcctcctcctccacgacgaccacatcccgcgccgccgccgccgctgccgcgcctccgtcctcgccgcatcagtaccggaggcggaggcggcgccgggtgccgggctgcctccgcccgcgcgccgcgtccgtccgctgctgcgccgcggcggcgcccgcgccgcaggcagcggtgcccgcggccgcgcgggccgaggcaaccacgcgggtcttcgtcgtgtccgacctgcacacggactacccggagaacatggagtgggtgcgccgcctgcccgccgaggtcggggcgggcaagggggaaggcgtcgacgcgctcgtcgtcgcgggcgacgtggccgagacaagggacaacttcgcgcgcaccatggagatgctcagggatggattcgccgccgtcttctacgtgccggggaaccacgacctctggctgcgccgcgagggcggccgctactgagctgggtgtggatacaggcccaagaacgataggtgacttgggaatcataccattgttctcatggtatcacaagagctttgacaaggagaaggatgttagcagtgtgcgtgttccgtcgctagaaatggcttgtaaagactttcatgcttgccaatggccttcagacctgacaaatgatgatgaggctcttgctctttactttgacaagttgaatgacaagaatcatgatgctactgaagaagtgaaaagtagcagcaaacagatattaacattttcacacttcgtaccaaggcaagagttgtgtccagagaaacgtatgctttattacccataccttcctaaggtaattggatctgattttttggaaaggaggctgagagatatacacagcaacagaaaagacggaggagcttgccatgtttttgggcacactcatttctgttgggattccgtggttgatgagatcaggtatgtgcaagcccctctggcatacccccgagaaagaaaacgtcggatgaacggcgaaggttggctgccattttgtgtataccgtgacggtttcaacccagaaatatatccggcattgtggtcagactactacaacaagaacaaaagggaacccgagaacactcagctcgcgccttgggttgccagccatttcgcgaggtaccacaagttccactgaccctttctaagttccctggctttttgccgaagtggatgcagttcgtctgttcaggatggtgttgaaacctgcatttacctgggaaaaggagatattgacgttttacctgtacacgatctttttcttgtttccactcttaccataacttttgggcaaagtaagcgctagcatctgttttgtactagtatgttgcacagatctgaataatgtgcataagattcttcaaagccttgctgcagtgcagaaatagtgaaattcttcatcccttttaaattatttagaagtcatttcaattttcttagagagtcaaatcatcttaagtttgactaaaattatggagag

SEQ ID NO: 201665 - DNA, 1094 bp, Zea Mays
aaaacatcatctttggatgactggagggagcaagtttctagggtggactacaccactgtcttcatcttccgcctcctaatgtttgttgataatggtctcgctgcaggaatgggattaggaaggacaaaagtggggcttcttgatatggctgcttttcagttactgtgggctcgcctgtattgcttgtgtagctattgggaagtggttacaccgaagacacgcacttcaacagagagcacaacaaggaattccagtctctgaacatggggttttagttgatatgatccgtgttcctgactgggcatttgaggctgttggcctggaaatgagagtgggtcaagatactgcatatcatcctggtctttatttaactgatgctcagagagaagcagttgaggcactgattcaagagcttccaaaattcaggctgaaagctgttccaacggactgcagtgaatgccccatctgccttgaagaatttcatgttggcaatgaggtccgtgggctcccatgcgcgcacaatttccatgtggagtgcatcgaccagtggcttcggctgaatgtcaagtgcccacggtgccggtgctccgtcttccccaacctggacctgagtgcgttgaacaatcttcggtcgaccagcgagccggaccatccatccgccagcgccagcaatgtaacgacggcaactgcagcgacgagatacgtgaggtcgcagccggcaggtcaaagctatttggtgcggttgcaggggctgctgctccgccctgtccggcacgatagcgtggagagtgacggtgagccggcggtgggcaacagtcgcttggttggcaccgaagagctgcctagcatacttgtagacgatggccatcagctgccagatcgctgactgatttgatgacctgatggatccagcatacttgtcagcataatttaggatacttgtcagcttttcttttacagttttcttttgcaaatgaaatgcgagttttgttgaaagaattttttttaactgaacactgaaataagcaaataaaattatttagctcaaaggaaataaaattacattacttaaagaaatcacacaatacatacaa

SEQ ID NO: 201666 - DNA, 2436 bp, Zea Mays
aaacgaaacaggccttactctaactgctgcaagcctcagtgcagttactggcggcagccgttcccgtgtttgtccatgtccatccaatccaactcatgcacttcatcactcctagaggagtgcagaagctgggaattgtacttccactactaaaaaattgctgtagcctccttcgtcttgagcgagcatggagatgtcagccatggaggaagccctccccaaggcgatggagaggaggaagggaggcctcagaaccattccgttcatcatcttaaacgagatattcgagaaggtggccacgttcgggctgtcggccaacatgatcctgtacctcaccgagcggtatctcatgaccaacgcctttgccaccgtcgtcctctacttctggcatgccttctccaacttcctgcccatcttaggcgccgtgctcgccgacgcccgcctcggccggttccgggtcatcaccctcggctcctgcgttagcctcttcgggatgtgcctgctgtggctgacggcgatccttccggtgtacaagaacaccccggagtgcgcgccggggcggccggtagggtgcgcggtgctgccgtggcagctgccgctcctcttcacgtcgttcgcgttcatgtccctcgggtcgggcggcatccggccctgcacgctggcgttcggggccgaccagctggacaagcgggacaacagcgccaataacgtgaggacgctgcagaccttcttcaactggtactacacggtgctgggcctctccatcgtgttcgcgtccaccgtcatcgtgtacatccagcaggccaggggctggggtcgtcggcttcgccgtgcccgtcgtgctcatggtcaccgcgctcacgctgttcctcctgggctcgcccttctacatcaaggcggcggccaacagcagcgtcgtcatcggcttcgtgcaggtgctcgtcgccagctacaataaccgccacgagcccttgccgccggagactgccgactcctcgagcttctacaacaaagcaggctgcaaacctaggactcccacgaacaagctaatgtacttgaaccgggcttgcgtgctcaggaacccgagcaaggagatcagccccgacggggcggcgtgcgatccgtggaggctgtgcacggtgcagcaggtggaggacaccaaggccgtcatccgcgtgcttccgatatggtcgacggggatcatgccgggcgtggtcgtcgggcagcagatgttcccgacgctgcaggcgaagacgatggagcggagggtgggcaagctggagatcccccctgcctccttcggcgtcttcgccatcctgacgctcaccgtctgggttgccgtgtacgaccgcgtgctggtgcggcccctgtcccggctcaccggccacgcgcgcgggctcagcctgcggcagcggatgggcgccggcctggtgctcttcgccgtggccatggccgtggccgcgcacaccgagagcgtccgccgagccgccgcgctcgccgaggggctccgcgactccaacccgctgacgggggagcgcccggtgcgcatgtcggccatgaatctggtgccgcagcactgcctcacggggctcgccgagggcctgaacctgatcgggcagatcgagttctactactccgagttccccaagaccatgtccagcataggggtgtccctgctcgcgctcggcctcgggtttggcgccgtgctgggcagcgccatcgtcggggtcatcgacgcggggacccggagcggcggcagccacgacggctggctgccgagcaacctgaacagggggcactacgactactactacttggtactggcggtgctatgcgccgccaacgtgctgtacttcgcagtgtgtggctgggcatacggcgacgaggggcaaaaccgggtggtggccgccgacgccgcggtggacgacgtcgacgacaaggaggaggagcaaaaggcggtaatcatctaggcttaggccacggtggactttgagcagagcactaggaacagtatagcgttgatctgggatgatctcttgctctagtgtgtacctcgtacatatgctaatcaatatggtgacatttcaagagtagataatcttgaaatgttaatatggacagtaagtactgtcgtgtagcgtgtcaaaaatgccgcatgcattctctcttccgaattaggaggtagagagaacttcagtgatccagtattccagtggtcgcccactcgcccatacgttaacccactttgactttctcattcccctcatccgtctccttcccctcaagttcaatgccactgctagtgctaggtgtcagctgccccagcctattatgaactcatggaatcaggggttaagattattcacaatgattctctttctctctatatcatacatttaaatcttacttttttaccaccctcggagtcaaattgag

SEQ ID NO: 201667 - DNA, 1324 bp, Zea Mays
gttggacgggtgacccaccggctcgggaacggcaacccaggacggcaggcgcggcgacacatggtcggggtacagggattgatgagcatgttcagagggagattatgaaccaccggtccctgaagcacccaaacataattagattcaaggagttatggaatatgctgctgggggtgagctatttgaaaggatctgcagtgcggggagatttagtgaggatgaggcaaggttcttcttccagcaactgatttcgggagtgagctattgccattccatgcaagtatgccatagagatctgaaactagaaaacactctcctagatggtagtgtcgcaccccggctcaagatctgtgatttcggttactccaagtcttctgtgctgcactctcaaccgaaatcaactgttggcacacctgcatacattgctccagaggtcctctctagaaaagagtacgatggaaaggttgctgatgtctggtcttgtggagtaacactatatgtgatgctcgtcggcgcgtatcctttcgaagaccctgatgacccgaagaacttccgcaagacgatcacgagaatactcagtgtacagtactcaattccagactacgttcgcgttacaatggagtgcggacatctgctgtctcggatatttgttggaaatcctgagcagagaataaccattcctgagatcaagaagcacccgtggttcctcaagaatctgcccatcgagatgaccgacgagtaccagcagagcatgcagttggcagacatgaacaccccggggcaaagcctggaggaggtgatggcgatcatccaggaggcgcggaagccaggggacgccatgaaccttgccgggcagctgccctgcctggggagcgtggaccttgacgacattgattttgacgatattgacgacatcgacactgagaacagcggcgacttcgtttgtgcagtgtgactgtgtgaggctcagcagggcaggagctagcttcctttggtcgttggtgtctgtagatccttgttgtgctatgcttccattcgttcctggatcagatatgttgttgtgtaaccgagaaaattggcgttgctgtggacaatagaaacagacccataaacttatgcggaaatctaccccccaaaaaagaaaaaaaatcctctgtgatctgttgaattagaacatcttggcaatggtacagcttgtattgctttagcgatctaacagtccatttaaaaaaagaatcatttgaaggatgaattttgttgtcgacactgtgatcctagagtcatgatcatatgaaattaagatccacgaatcggtctggtacgg

SEQ ID NO: 201668 - DNA, 1909 bp, Zea Mays
gttggacgggtgacccaccggctcgggaacggcaacccaggacggcaggcgcggcgacacatggtcggggtacagggcctggccgtggccgcctcctgctcttcgatctcacgctgcgatggagcggtacgaggtgatcagggacatcggctcgggcaacttcggggtgacaaagctcgtccgggacgtcaggaccaaggagctcttcgccgtcaagttcatcgagagagggcaaaagattgatgagcatgttcagagggagattatgaaccaccggtccctgaagcacccaaacataattagattcaaggaggtaatttctcagacatcttggaaaggaaatgttctggtacgaatttgaagttggatgattggtagctacacacgtaagtgtcttcaaactgttacttttgatgcttttaaagaagaaaaatacagactttttatattctttgcctgttgaacgagatgtttgagccacacttgtgaacattgtgctggtgactgcacgttcttagaaccccattcatttaccactaatacgtatctctcattttttttaataaaggagttgtctttgtcttgtacttatctctatgacattctttccattcatcattggacacctgctttagactgattgtcaaggtctaatcatcacaaaccatttctaggttgaaaattaaagtagtacttagtttttcaggtcgtgctaactcccacgcatttggcaatagttatggaatatgctgctgggggtgagctatttgaaaggatctgcagtgcggggagatttagtgaggatgaggcaaggttcttcttccagcaactgatttcgggagtgagctattgccattccatgcaagtatgccatagagatctgaaactagaaaacactctcctagatggtagtgtcgcaccccggctcaagatctgtgatttcggttactccaagtcttctgtgctgcactctcaaccgaaatcaactgttggcacacctgcatacattgctccagaggtcctctctagaaaagagtacgatggaaaggttgctgatgtctggtcttgtggagtaacactatatgtgatgctcgtcggcgcgtatcctttcgaagaccctgatgacccgaagaacttccgcaagacgatcacgagaatactcagtgtacagtactcaattccagactacgttcgcgttacaatggagtgcggacatctgctgtctcggatatttgttggaaatcctgagcagagaataaccattcctgagatcaagaagcacccgtggttcctcaagaatctgcccatcgagatgaccgacgagtaccagcagagcatgcagttggcagacatgaacaccccggggcaaagcctggaggaggtgatggcgatcatccaggaggcgcggaagccaggggacgccatgaaccttgccgggcagctgccctgcctggggagcgtggaccttgacgacattgattttgacgatattgacgacatcgacactgagaacagcggcgacttcgtttgtgcagtgtgactgtgtgaggctcagcagggcaggagctagcttcctttggtcgttggtgtctgtagatccttgttgtgctatgcttccattcgttcctggatcagatatgttgttgtgtaaccgagaaaattggcgttgctgtggacaatagaaacagacccataaacttatgcggaaatctaccccccaaaaaagaaaaaaaatcctctgtgatctgttgaattagaacatcttggcaatggtacagcttgtattgctttagcgatctaacagtccatttaaaaaaagaatcatttgaaggatgaattttgttgtcgacactgtgatcctagagtcatgatcatatgaaattaagatccacgaatcggtctggtacgg

SEQ ID NO: 201669 - DNA, 1632 bp, Zea Mays
ggggaggagcggcaggcacaatctccttctggtagcccgtacgcttcttctacaggcccttgcctgcccccctgtcccactgcctccacacaccattgtcatggactcatggtcaccaccaccacaccaccacacttcactcgactccacagcctccagtttatccgtttgctcgacaccattgctattatctcctcgctcgcgtaatccatcgttttccgccgcgatcagttgttcctgatcaatcctgtcgaactactactctactactctgcgtagatcgatcgggtcgatcaggctcgctcggctgaagttcatcggatcagaggctcgggctccggtttctcgcccgcaatgctgaagaaagcgtcagcaggaagagctgcggccgcgacggggcgcggcgatcccgcagcgcccgcctcgcgtcccagtcccacagccaaggtcgccgagggcggcgcctgcagcgccaggccggcctctcggctcctctccacgaggtcagtcccgagcctcttcgcggagtccccgatgacgacgagccccgccgcctccgcgcccgagctgctgtccagggccccgctccgctccggcggtagcccgggcgcggcgggcctggcgggcgtgctggtggcggaggaggccgacgagcgggggtccttgttgaggaacgggcgcagggtgctccgcgggacgcggctccgggtgcagctgccgccgccgccgccgatcgagttcggcgtgaagaacagggaggcccagctggcgctgctctcccccgtgcagcggtcgccggcgcggctggcaaggcggaggagcgaggtggaggaggagctggccggcgaggactacacctgcgtcatcgcccgcgggcccaaccccaggatgacgcacatattcgaggaccgcgtcgtcgagagctcgacctcgacctcgagctcgacctcttgcgatgggtgcaacaaggatgctgctctcttgctggtgctggaaagaggcgacagcgagttctgcatcgaccaacggaaggcgctgtttggcggcgaacgggctggcggcgagcgggcggtgacaaactgaactctccgtcctgaatcttggcacacccgcgctatatgtgaagcgacgaaccattccgttcttcatctcgtttgaagaaattttgatccgtgctgggaccaatgctatcgggttcagggtgatttgtccctgtgtcttttttggtgattcatctctctaagttttagagctaaggctccaaacaaatgatttacatgttacctttaaacattaagcccaccttaaattaaagttttagagcttttaaagcgagctaaagtgcactaaagcttttagaactctaaaacttagtcctgaggctctaaatttgtcgttaggacatgtataaccttatttaatatgaagtcttttgagcagtctctaaatgactaagtgtaaaaaaatataagagacaaactcttcacgaagaacctgtctcttcacgactttctatacacgttgtcttttaggtgcatttatgatccagagtctcagtgttgtaccacatagtctcttatccgtatcttgtacttaaaaaaacgaactggattctcagggttgtacatgccc

SEQ ID NO: 201670 - DNA, 1035 bp, Zea Mays
cggggaggagcggcaggcacaatctccttctggtagcccgtacgcttcttctacaggcccttgcctgcccccctgtcccactgcctccacacaccattgtcatggactcatggtcaccaccaccacaccaccacacttcactcgactccacagcctccagtttatccgtttgctcgacaccattgctattatctcctcgctcgcgtaatccatcgttttccgccgcgatcagttgttcctgatcaatcctgtcgaactactactctactactctgcgtagatcgatcgggtcgatcaggctcgctcggctgaagttcatcggatcagaggctcgggctccggtttctcgcccgcaatgctgaagaaagcgtcagcaggaagagctgcggccgcgacggggcgcggcgatcccgcagcgcccgcctcgcgtcccagtcccacagccaaggtcgccgagggcggcgcctgcagcgccaggccggcctctcggctcctctccacgaggtcagtcccgagcctcttcgcggagtccccgatgacgacgagccccgccgcctccgcgcccgagctgctgtccagggccccgctccgctccggcggtagcccgggcgcggcgggcctggcgggcgtgctggtggcggaggaggccgacgagcgggggtccttgttgaggaacgggcgcagggtgctccgcgggacgcggctccgggtgcagctgccgccgccgccgccgatcgagttcggcgtgaagaacagggaggcccagctggcgctgctctcccccgtgcagcggtcgccggcgcggctggcaaggcggaggagcgaggtggaggaggagctggccggcgaggactacacctgcgtcatcgcccgcgggcccaaccccaggatgacgcacatattcgaggaccgcgtcgtcgagagctcgacctcgacctcgagctcgacctcttgcgatgggtgcaacaaggatgctgctctcttgctggtgctggaaagctctacatggtgctgtctctgtctcctggatggatt

SEQ ID NO: 201671 - DNA, 2362 bp, Zea Mays
cccacgcttgctggacggggcaaccggcaaccccactctttacaaagtagggtaccctacaaagtatcaccaaatcccacaccattgccagtttggcaccctcctcaccccactacctcttcttcctccgcacagcgcacaagccgcggaagcagcgcagacccggcaaaatagtgatggctcagaagacgaaggaggcggagatcaccgagcaggattcgctgcttctaacaaggaatttgctccggattgccatatacaacatcagctacatcagaggcctattccatgagaagtacttcagtgataagtcggttccagcactagagatgaagattaagaagctgatgccaatggatgctgagtcaaggagactaattgattggatggagaaaggtgtctatgatgctttgcaaaagaaatatctcaagaccctcctcttctgtatctgcgagaaggaggagggcccaatgattgaggagtatgccttctcatttagctaccccaacaccagtaccgaggaagttgcgatgaacatgagccgtacggggagcaaaaagggcagtactacattcacttcaaatgcttcagaagtaactcctgatcagatgagaagctctgcttgtaagatgatcagaacgctggtttcacttatgagaaccttggacccaatgcctgaggagcgaaccattctaatgaagcttctatactatgatgatgtcacacccgaggattatgagcctcctttcttcaagtgttgtgctgataatgaggccataagtatatggaacaagaaccccttgaagatggaagtgggcaatgtcaatagcaagcaccttgtgttagctttgaaggtcaagagtgtccttgatccatgcgatgatgacaatgttaacagcgaaggtgatggcatgactgtggataatgagtctgatcatgatgatgacttttctgacactgaggttcatccaccaaaggcggatcattacatcatagctcctaatgaaggaaaagacaaagatcaggacactggtactatttcagaagatgatactcaagatactgctcatgaggaagagctaacttcccaagtgaaggagtggatatgctcaagggacagcggaacaattaatgtttcagatgtcctttctaacttccctgacatatcaatggaattggttgaagatataatggacaggctacttaaagatggtatactatccagggcaagcaaagatggttatacggttaaccagaaggctgatccaaaaacaccacatataaagaaggaggccatcatgccagatgtatcaccaactaatgtaaccaaacacaacaatggggatctgctatatatgaaggcattatatcatgcacttcccatggattatgtgacaatagccaaacttcaaggaaagctggatggggaagccagccaaaatacagtccgaaagttgattgacaagatggtgcaagatggatatgtgaagaattcagccaaccgaagactgggcaaagctgtcattcattctgaatctaccaacaaaaggctccttgagataaaaaagatactggaagtcaatgaaggcgaaaagatggccattgacaccaatacagagcatcctgagcctgagcacaaagaccttctgagagtctatgaagtgggagatggctccactatgggttgcctccactcaattggatctgatcttactcgtactcgggagctgccagagctgcaacagaatgtgtccatgcagagcgggcaagaagcttccacagtgggtaaggattccagcaggactccaacaagtgtgcgtgagctggctgtacctgtttgttccctggaaagtggagtgcttggaaagagaatcaaaaggtctctaactggtggaaatgagatgcagtctacccaggacaagcgatccaggaaggctagcatggtgaaggaagcaatactccaacatgtcaagtgccaaaaccctcaggctcagtgaggtggggtgacaggagtagctaaccatagttcaggtccttgtgcaggcagacaaataaacaagtacaacagtcaccgcagaagtagcttccactccctatgttttgcaaggtagagagttccacaatgtagattgcagtcccaatgttttgcaaggtagtaaaagttatacgcatctgttagcctatcgatctggtgatgaacattttcttctacaaagtcaaaagatgttttattgacacggaaattggacatataaagcttctgttgaatgcatgatagttcaatagattatggataatatattccacttattttctactttcatattgctactgttatctacaaaacctacgcaggtttatg

SEQ ID NO: 201672 - DNA, 2554 bp, Zea Mays
cacgcttgctggacggggcaaccggcaaccccactctttacaaagtagggtaccctacaaagtatcaccaaatcccacaccattgccagtttggcaccctcctcaccccactacctcttcttcctccgcacagcgcacaagccgcggaagcagcgcagacccggcaaaatagtgatggctcagaagacgaaggaggcggagatcaccgagcaggattcgctgcttctaacaaggaatttgctccggattgccatatacaacatcagctacatcagaggcctattccatgagaagtacttcagtgataagtcggttccagcactagagatgaagattaagaagctgatgccaatggatgctgagtcaaggagactaattgattggatggagaaaggtgtctatgatgctttgcaaaagaaatatctcaagaccctcctcttctgtatctgcgagaaggaggagggcccaatgattgaggagtatgccttctcatttagctaccccaacaccagtaccgaggaagttgcgatgaacatgagccgtacggggagcaaaaagggcagtactacattcacttcaaatgcttcagaagtaactcctgatcagatgagaatgttcggaccaggagtgaaagcagattgaaacgggccaatgatttcctttgacacatttggcatcctatttaaggagatcacctttatgaaaataagcgaacagagccatgagatcgggttttaacgaggaccaaaaggtatgacaattttaatatgtgatgatcatatcctgacatatagttttcttttagaagctctgcttgtaagatgatcagaacgctggtttcacttatgagaaccttggacccaatgcctgaggagcgaaccattctaatgaagcttctatactatgatgatgtcacacccgaggattatgagcctcctttcttcaagtgttgtgctgataatgaggccataagtatatggaacaagaaccccttgaagatggaagtgggcaatgtcaatagcaagcaccttgtgttagctttgaaggtcaagagtgtccttgatccatgcgatgatgacaatgttaacagcgaaggtgatggcatgactgtggataatgagtctgatcatgatgatgacttttctgacactgaggttcatccaccaaaggcggatcattacatcatagctcctaatgaaggaaaagacaaagatcaggacactggtactatttcagaagatgatactcaagatactgctcatgaggaagagctaacttcccaagtgaaggagtggatatgctcaagggacagcggaacaattaatgtttcagatgtcctttctaacttccctgacatatcaatggaattggttgaagatataatggacaggctacttaaagatggtatactatccagggcaagcaaagatggttatacggttaaccagaaggctgatccaaaaacaccacatataaagaaggaggccatcatgccagatgtatcaccaactaatgtaaccaaacacaacaatggggatctgctatatatgaaggcattatatcatgcacttcccatggattatgtgacaatagccaaacttcaaggaaagctggatggggaagccagccaaaatacagtccgaaagttgattgacaagatggtgcaagatggatatgtgaagaattcagccaaccgaagactgggcaaagctgtcattcattctgaatctaccaacaaaaggctccttgagataaaaaagatactggaagtcaatgaaggcgaaaagatggccattgacaccaatacagagcatcctgagcctgagcacaaagaccttctgagagtctatgaagtgggagatggctccactatgggttgcctccactcaattggatctgatcttactcgtactcgggagctgccagagctgcaacagaatgtgtccatgcagagcgggcaagaagcttccacagtgggtaaggattccagcaggactccaacaagtgtgcgtgagctggctgtacctgtttgttccctggaaagtggagtgcttggaaagagaatcaaaaggtctctaactggtggaaatgagatgcagtctacccaggacaagcgatccaggaaggctagcatggtgaaggaagcaatactccaacatgtcaagtgccaaaaccctcaggctcagtgaggtggggtgacaggagtagctaaccatagttcaggtccttgtgcaggcagacaaataaacaagtacaacagtcaccgcagaagtagcttccactccctatgttttgcaaggtagagagttccacaatgtagattgcagtcccaatgttttgcaaggtagtaaaagttatacgcatctgttagcctatcgatctggtgatgaacattttcttctacaaagtcaaaagatgttttattgacacggaaattggacatataaagcttctgttgaatgcatgatagttcaatagattatggataatatattccacttattttctactttcatattgctactgttatctacaaaacctacgcaggtttatg

SEQ ID NO: 201673 - DNA, 1080 bp, Zea Mays
gctggacggggcaaccggcaaccccactctttacaaagtagggtaccctacaaagtatcaccaaatcccacaccattgccagtttggcaccctcctcaccccactacctcttcttcctccgcacagcgcacaagccgcggaagcagcgcagacccggcaaaatagtgatggctcagaagacgaaggaggcggagatcaccgagcaggattcgctgcttctaacaaggaatttgctccggattgccatatacaacatcagctacatcagaggcctattccatgagaagtacttcagtgataagtcggttccagcactagagatgaagattaagaagctgatgccaatggatgctgagtcaaggagactaattgattggatggagaaaggtgtctatgatgctttgcaaaagaaatatctcaagaccctcctcttctgtatctgcgagaaggaggagggcccaatgattgaggagtatgccttctcatttagctaccccaacaccagtaccgaggaagttgcgatgaacatgagccgtacggggagcaaaaagggcagtactacattcacttcaaatgcttcagaagtaactcctgatcagatgagaagctctgcttgtaagatgatcagaacgctggtttcacttatgagaaccttggacccaatgcctgaggagcgaaccattctaatgaagcttctatactatgatgatgtcacacccgaggattatgagcctcctttcttcaagtgttgtgctgataatgaggccataagtatatggaacaagaaccccttgaagatggaagtgggcaatgtcaatagcaagcaccttgtgttagctttgaaggtcaagagtgtccttgatccatgcgatgatgacaatgttaacagcgaaggtgatggcatgactgtggataatgagtctgatcatgatgatgacttttctgacactgaggttcatccaccaaaggcggatcattacatcatagctcctaatgaaggaaaagacaaagatcaggacactggtactatttcagaagttgtctgtgcacatctgctcctctgactttctatgtttgaag

SEQ ID NO: 201674 - DNA, 2156 bp, Zea Mays
tagaacatgaactgatagaagaagacaaggaatttgctccggattgccatatacaacatcagctacatcagaggcctattccatgagaagtacttcagtgataagtcggttccagcactagagatgaagattaagaagctgatgccaatggatgctgagtcaaggagactaattgattggatggagaaaggtgtctatgatgctttgcaaaagaaatatctcaagaccctcctcttctgtatctgcgagaaggaggagggcccaatgattgaggagtatgccttctcatttagctaccccaacaccagtaccgaggaagttgcgatgaacatgagccgtacggggagcaaaaagggcagtactacattcacttcaaatgcttcagaagtaactcctgatcagatgagaagctctgcttgtaagatgatcagaacgctggtttcacttatgagaaccttggacccaatgcctgaggagcgaaccattctaatgaagcttctatactatgatgatgtcacacccgaggattatgagcctcctttcttcaagtgttgtgctgataatgaggccataagtatatggaacaagaaccccttgaagatggaagtgggcaatgtcaatagcaagcaccttgtgttagctttgaaggtcaagagtgtccttgatccatgcgatgatgacaatgttaacagcgaaggtgatggcatgactgtggataatgagtctgatcatgatgatgacttttctgacactgaggttcatccaccaaaggcggatcattacatcatagctcctaatgaaggaaaagacaaagatcaggacactggtactatttcagaagatgatactcaagatactgctcatgaggaagagctaacttcccaagtgaaggagtggatatgctcaagggacagcggaacaattaatgtttcagatgtcctttctaacttccctgacatatcaatggaattggttgaagatataatggacaggctacttaaagatggtatactatccagggcaagcaaagatggttatacggttaaccagaaggctgatccaaaaacaccacatataaagaaggaggccatcatgccagatgtatcaccaactaatgtaaccaaacacaacaatggggatctgctatatatgaaggcattatatcatgcacttcccatggattatgtgacaatagccaaacttcaaggaaagctggatggggaagccagccaaaatacagtccgaaagttgattgacaagatggtgcaagatggatatgtgaagaattcagccaaccgaagactgggcaaagctgtcattcattctgaatctaccaacaaaaggctccttgagataaaaaagatactggaagtcaatgaaggcgaaaagatggccattgacaccaatacagagcatcctgagcctgagcacaaagaccttctgagagtctatgaagtgggagatggctccactatgggttgcctccactcaattggatctgatcttactcgtactcgggagctgccagagctgcaacagaatgtgtccatgcagagcgggcaagaagcttccacagtgggtaaggattccagcaggactccaacaagtgtgcgtgagctggctgtacctgtttgttccctggaaagtggagtgcttggaaagagaatcaaaaggtctctaactggtggaaatgagatgcagtctacccaggacaagcgatccaggaaggctagcatggtgaaggaagcaatactccaacatgtcaagtgccaaaaccctcaggctcagtgaggtggggtgacaggagtagctaaccatagttcaggtccttgtgcaggcagacaaataaacaagtacaacagtcaccgcagaagtagcttccactccctatgttttgcaaggtagagagttccacaatgtagattgcagtcccaatgttttgcaaggtagtaaaagttatacgcatctgttagcctatcgatctggtgatgaacattttcttctacaaagtcaaaagatgttttattgacacggaaattggacatataaagcttctgttgaatgcatgatagttcaatagattatggataatatattccacttattttctactttcatattgctactgttatctacaaaacctacgcaggtttatg

SEQ ID NO: 201675 - DNA, 952 bp, Zea Mays
cgcccagagcttctgttcgatgccccctccttcaccacccgcctcgcaagtgcgcacgtgcgatgctggcgccgcgcagtcgcccacgcgcgggacggtgagtgagatggcgcgatacttccgcagcagcaacctcgcctctagggtcttcgagcgtcagctcatctccccgcgccctggcgctaccgttaacactattagacagttctatgaaaatttggtcccaagctatactatatatgacatagattgcccagattattcgtttcgcaagttcactgatgatgggaaatattttgtggcctttagccgaaaccatcaagatttgattgtataccgtccaatctggttgacatattcatgcaatgaagaatgtgatcctcatgagcttccgccaaaggcaaagaagtttgacagcttctttaagcagctttattcaattcctcttgcatctggcaatgagtatatttgcaaggactttttcctgtacatggaatgccatcgatttggtttatttgcaacatctactgcacaaagtaacgaatcaactgccactgagggtgcaatacatggggtgccattaattgagaaaataactttccatcttgtgaggctagaagatggtgtgatacttgatgaaaaggctttctgcaatgattttatcaatctggcacatagtattggtgcttacatgtatgaggaccttctttgtattgtttctttgcgataccaaacaatacatatcctacagatacgagattcaggcaaccttgttgaggtacgcagcattggtgcattctgccgggaagatgatgagctatttcttcactcacatgttcagactggttatgcgggttcctttcttcctggcataaagcaacggttgttgtcgtatattttttgcaagacgtggaatgaggttccagatcagactttgtgaatttgtttgcag

SEQ ID NO: 201676 - DNA, 2650 bp, Zea Mays
cgcttgttggcctccgtcagcccgcgcctccttcctccgtcctccggctcggcggtccgccgccctccttcatcctccggctggaggccctcctccacccccgcctcgcggccctacactctcgttgggtcggcacccgtgcctcccattctctcctcttctctcgctcgagcgccgcggcctctgctcgctcggtcgaggctgaaggacgggacaaagcgcagattgaccaccgggcgtcggaaccgccgccgctgccgccgaaggggttataagatcagatggggacttcggtgcaggtgacgcctctcagcggggcgtacggggagggccccctgtgctacctactcgccgtcgatggtttccgcttcctcctcgactgcggatggaccgacctctgcgatacctcgcaacttcaacccctcgcaaaggttgcaccaactgtagatgctgttcttttgtcacatcctgacatgatgcatctaggagctttgccttacgctatgaaacaccttgggctgtctgcaccagtttatgcaacagaacccgtgtttaggcttggccttttgaccatgtatgaccatttcctgtctcgatggcaagtttcagactttgacttgtttactctagatgatgttgatgctgcattccaaaatgttgtgagactgaagtactcacaaaattaccttctgaatgataaaggtgaaggagttgttattgctccacatgtggctgggcatcttttgggggggacagtttggaagattacaaaagatggggaggatgttgtgtatgctgttgacttcaaccatcggaaagagaggcatttgaatggcaccgttcttggatctttcgtgcggccagctgttctgataactgatgcttacaatgctttgaacaaccaaggctatagaaaaaagcaggatcaagatttcattgaatcattaattaaagttctggcaactggtggaagtgtgctacttcctgttgacacggctggtagagtgttggaacttcttttgttattggatatgtactgggatgaaaggcgattgcagtaccctatctacttcctgacaaatgtgtcgacaagtaccgttgattatgtcaagagttttcttgaatggatgggtgatcaaattgcaaaatcttttgaaagcagtagagccaatgccttcttgttaaaaaaggtcacgctgataattaacaaagaagagcttgagaaattgggagatgctccaaaggtggttctggcatccatggcaagtttggaggttggcttttctcatgacatatttgtggagatggcaaatgaagcaagaaatctagtgctctttactgagaagggacagtttgggacactggctcgaatgctccaagtggacccaccccctaaagctttaaaggtcactatgagcaagaggattcctttggtgggtaatgaactaaaggcttatgaagaagagcaagaacggataaaaaaagagaaatcgctaaaggctagccttgtcaaagaagaggagctaaaggcttctcatggatcaaacacaaaggcttctgagccaatggtcattgatgcaagctcatctcgaaaatctgtgaatgcttcacattttggtgggaacaatgatattctcatagatggatttgtccctcctttaaccagtgttgctccaatgtttcccttctttgaaaacactgctgaatgggacgactttggtgaggtcatcaaccctgatgattatatgatgaaacaagaagaaatggataatactctgatgcttggccctggagatggattagatggtaggatcgatgatggctcagcacgcctgcttcttgattcaacgccctcaaaagtcatttccaacgagatgactgttcaagtgaaatgctcattggtttatatggactttgaaggtcgctctgatgggcgttctgtaaaatcaattattgctcacgtggctccactgaaacttatcctggtgcatggatcagctgaagcaactgaacatttgaaaatgcactgcgcaaagaatttagatttgcatgtttatgctccacagattgaggaaactattgatgtaacatcagacttatgtgcttataaggtacaactttcggagaagttaatgagtaacatcatttctaagaagttgggtgagcatgaaattgcttgggtggatgcagaagttggaaaagaagatgagaagcttattttgcttcccccatcgtcaacaccaccaccccataagcctgttcttgtgggtgatctaaagttgtctgattttaaacaatttttggaaaacaaaggcttgtgttgtccgaaatttggcgtgggatgaccgtgacaaagttttggcatcagtttccggatgaccgtgctgactaccaagtggtccaagaacgatgacaatgcatccatccaaagaagaacaaaaacaacgacgacaaagcgtccacctattttccacctaggggtgcaatcaatcagatcggagatgggtaatgcttgtatcatattttctctttagatttagattagatatattttctttttagatttagatcagatacgaatattattggtctatgaccgtaagatttgaatggatatcaatatatcttaaatacctatactctatgcggc

SEQ ID NO: 201677 - DNA, 1016 bp, Zea Mays
cgcttgttggcctccgtcagcccgcgcctccttcctccgtcctccggctcggcggtccgccgccctccttcatcctccggctggaggccctcctccacccccgcctcgcggccctacactctcgttgggtcggcacccgtgcctcccattctctcctcttctctcgctcgagcgccgcggcctctgctcgctcggtcgaggctgaaggacgggacaaagcgcagattgaccaccgggcgtcggaaccgccgccgctgccgccgaaggggttataagatcagatggggacttcggtgcagaagttggaaaagaagatgagaagcttattttgcttcccccatcgtcaacaccaccaccccataagcctgttcttgtgggtgatctaaagttgtctgattttaaacaatttttggaaaacaaaggctggcaggatttttcagttgaacgtgagaggatcaaatatgttgagattcagtcgctaaggaaagagctgttgcaggttgaatttgccggaggtgctttacggtgtggcgaatacatcatggtgcgcaaagttggtgattctatcctaaagggcagcacagggtcccagcagatcgtcatcgagggccccctctgcgaggactattacaagatcagggagcttctgtactcgcagttctacttgctgtgaggcaacgcttgtgttgtccgaaatttggcgtgggatgaccgtgacaaagttttggcatcagtttccggatgaccgtgctgactaccaagtggtccaagaacgatgacaatgcatccatccaaagaagaacaaaaacaacgacgacaaagcgtccacctattttccacctaggggtgcaatcaatcagatcggagatgggtaatgcttgtatcatattttctctttagatttagattagatatattttctttttagatttagatcagatacgaatattattggtctatgaccgtaagatttgaatggatatcaatatatcttaaatacctatactctatgcggc

SEQ ID NO: 201678 - DNA, 996 bp, Zea Mays
attacttccacaaagtacctgcatgattattattctctctctctcaatctaacattatttctcatacaaaatttaactgatttacgaaaaattcatgttgcatcacaaccaaggagctcggaaccgtgatgcggtctctcgggcagaaccccaccgaggcggagctgcaggacatgatcgccgaggtggacagcaacggcagcggcaccatcgacgagcaggagttcctgggcctgatggcgcgcaagatgagggacgcggagtcggaggaggagctcagggaggcgttccgcgtgttcgacaaggaccagaacggggtgatctccgcggccgagctccggcacttgatgaccaacctcggggagaagctgagcgagcaggaggtggccgagatggtccgtgaggccgacgtggaccgcgacggccacatcaactacgacgagttcgtcaaggtcatgacggccaagcgaaggagcaagaggacggaggagaaggcgacgcgcggcaagaagaaaccggcggcggcgccgtccgacgccggcaagcgtggccagaaatgcgtgatcctgtgagccggagcttcggttgtccagtacatgctggtgcagtggtgctgcgtgcgtgtcacccgctcgacctctgcttccggcacaccagctgcgggaagctccacttgttctgcaggtgaatgtagctgtttgtaaacttatcagagcgtgtttgggagcatgattgaatgggaaaatccacttgagtaagggattttagtcatctagatctcctctaatctccttgctcccaaacaagccattaaataagaaaaacggaggaagtaactgtttgtcaatcttgtacatgtgctcgtgtagcctgtctggtcttgtagtttcgggctcataggtcagtggtaaaagcaatgtcacaacagaatttgtgatgaatatttaactatcacaataagaaacgatctgatttttacgaccatgttaactttac

SEQ ID NO: 201679 - DNA, 975 bp, Zea Mays
ggactgatcagtaataatatttgttcaaggatatatgctatcaacacttcaaagatgccacattacttccacaaagttgcatcacaaccaaggagctcggaaccgtgatgcggtctctcgggcagaaccccaccgaggcggagctgcaggacatgatcgccgaggtggacagcaacggcagcggcaccatcgacgagcaggagttcctgggcctgatggcgcgcaagatgagggacgcggagtcggaggaggagctcagggaggcgttccgcgtgttcgacaaggaccagaacggggtgatctccgcggccgagctccggcacttgatgaccaacctcggggagaagctgagcgagcaggaggtggccgagatggtccgtgaggccgacgtggaccgcgacggccacatcaactacgacgagttcgtcaaggtcatgacggccaagcgaaggagcaagaggacggaggagaaggcgacgcgcggcaagaagaaaccggcggcggcgccgtccgacgccggcaagcgtggccagaaatgcgtgatcctgtgagccggagcttcggttgtccagtacatgctggtgcagtggtgctgcgtgcgtgtcacccgctcgacctctgcttccggcacaccagctgcgggaagctccacttgttctgcaggtgaatgtagctgtttgtaaacttatcagagcgtgtttgggagcatgattgaatgggaaaatccacttgagtaagggattttagtcatctagatctcctctaatctccttgctcccaaacaagccattaaataagaaaaacggaggaagtaactgtttgtcaatcttgtacatgtgctcgtgtagcctgtctggtcttgtagtttcgggctcataggtcagtggtaaaagcaatgtcacaacagaatttgtgatgaatatttaactatcacaataagaaacgatctgatttttacgaccatgttaactttac

SEQ ID NO: 201680 - DNA, 1734 bp, Zea Mays
aagaattttgcttcagaagtggatttctaggcatgcagtggggaagcaaggcccaattgtgcttgatctgaaatcgtctgctttcgacccaaaggaaaaggtatggacgaagtttcctcctcaaggctcaaaatacactcctccccacaattcttgtgacttcagatggaaggattactgcccacaggtcttccggacgctgcgcaagctgttcaaggtggatgctggtgactatatgttatcgctatgtggaaatgaggctctcagagagctttcatctcctggtaagagtggaagctttttctacctgacaaacgatgatcggtacatgataaagacgatgaagaaatctgaagtgaagatgcttctgaagatgctcccagcttattacaatcatgtccgggcatttgagaatactctagtaaccaagttttttggtctacactgtgtcaagttagctggagcaaatcagaagaaggttcgttttgtcataatgggaaatctattctgctcggaatatccaattcataggcgttttgatctcaaaggttcatcacttgggcgcacaactgataagccacatacagagatcgatcagtatacaactttgaaggatcttgacctgaacttcatctttagattgaagaagcaatggttccatgagttccaaaggcaagtggacagggattgtgagttccttgagcaggagaaaatcatggattacagtcttcttgttggcgtacatttcagagataacacagagaagcttctgactgaaggttccattgactttgatatcatcaacaacgtaccgacacctcgcctttcaaaaggaaatacagatcggtttcttgctggtccaaacaggtctcctaaaatcaaacttggggccaacatgccttcgagagcagaactcactgcccgtaagagcgactgcgaaccgcggatgatcggagagcccaccggagagtgctacgacgtcatactgtattttgggatcatagacatacttcaggattacgatatcagcaagaggcttgagcacgcgtacaagtctttccagcacgacccaacctctatgtccgcggtggacccgaggcagtattccaggcggtttaaagaattcgtgtacagagtgtttcaagaagacgggtgcgcagctgcagacgcgttgagactttggagatgccgcagcctccatgtgtaggtgggtgaactctcaaaggaagcccatctgggtggactagagttgccagaagccagcctccatgttgagactttggagggtggcgtgggtgagcgtcagtcagtggaagcccatctgggtggactagagttgccagaagccagccgtcatctttgtcttccagaattatagttttagccatacacatacgtacatagctcatcactaatgttttgtagggtagggaggtgtttagcttacagatccagctcacagatagaaagattgtaagacaagagcgcaagccagtcgggagatgtagattcttcatcacccgtcccgaggtgtttagcttacagattcagctcacagatacaaagctactgtcttgatcgcaacctcttattttaacttatcgataggaaaccccttgtagacgacgagtgagatcgctgtaatgtacagggtttgtgggtggcctacaagtgatggctcagttttgttccttctttgttttctggaaatgaatgatcttgctaacttccaat

SEQ ID NO: 201681 - DNA, 2229 bp, Zea Mays
tgccgccatccatcctttttcccttcctcccctcaccccctcgtcggaatcggaacggctgtcgtctgccccttcgcccccctcttcgatccctcaccccacccagtgctagctagctagctagcttctagtggctagtagctcccctcccctgtgggctgcaacctggtttgggttcgcggatcgatcgcgagatcaatcaatccatggcgcggaccaactgggtggccgataagatgctcgacgtctacatctatgactacctggtgaagcgcaacctgcaggccaccgccaaggccttcatcgccgagggcaaggtcgccaccgaccccgtcgccatcgacgcccccggcggcttcctcttcgagtggtggtccatcttctgggacatcttccattcgtccaccgccaaagcctcatccacatccactgccgccgccttcatcgaccacaccgccaagcaacagcagccaatcggcgccgggaccggggcgcctcctcctcatccccttcacgatgactaaatcaaggtggtgttgggagtgtgccacttaaaggttggcctttaacggtcccaggtattgaccaactccggtccaatttaggtgtgcagaagcaattggtgccatcttcaaaccagttccaacttttatcgccacaacaacagttgcttgctcaggcacaaacacagaatgaccttaccagaatgggttctccagcaccatctgcttcgccgaatgttcgaccagatgacccggattatttgatgaagttgaagatggcccagatgcagcagtcctcaggccacaggcctatggaattgcaacagccgcatcagcagaacactagaaagcggaagccaacttcttccggagcagctaatagttctggcacaggaaatactgtcgggccttctcctccgtcaactccatccactcatacccctggtggtggagtaccagtggctagcaatgttaatattttacagaagagttcaatgatttgtggtgtggatgcaactggtggacttgcctcatcctcaaaccagatggatgctttggatagttttgttgattttgatgaaaacgtcgactcttttttgtcgaatgatgatgtagacggaagaggcatgtttgcagcacttgaaaaagggtcttcagagcacaatacagagtccttaaagggtctctctttgagtgaagttggtaacaaccgtacaagtaacaacaaagttgtttgctgtcacttctcttcagatgggaagttactcgctagtgccggccatgagaagaaggtcttcctctggaatatggacaattttaagatggataccaaaatagaagaccatacaaactttatcacagacataagattcagaactaattcaactcagttggctacatcatcttctgacggaactgttcgactttggaatgctgctgatgaaagtggcgctttacaaacttttcatgggcataggtctcatgtaacatcagtagattttcacccaagattgacagaggttctttgctcttgcgacgacaatggagaaattctcttctggacagttggtcagactacatctactcatgttttgcgggtgaagcagggtggaactggaagagtcaggtttgaacctcgaagtgggcagctcctcgctgtggcagctggaagcatggtgaacatttttgatgttgaaaagcaatccagcttaccctgccctccaaagggtcacaatagtgaggtaaactttgtgtcctgggatgaaaatggtgaatatctggcatctgtaagtcaggacactgtgaaagtgtggtcggtatcgtctggtgtgtgcattcatgagttacgatccaatggaaaccaatatcagtcatgcacattccatcctagatacccgaaagtgttgattgttggtggttatcagactctggagctgtggagcttatcagataaccagagaatcccaatccaggcgcacgaagggttgatagctgcactggcgcactccccgttcactggaatgattgcctctgccagtcatgacagatgtgtaaagctctggaagtagctatatatagaggcggagacgtgagatggatatacttttcaagggtgattggaccctgtgaggtggatggatgtagggtcggttgtacatgatatattgttgagctgatgattgggctgtatctgcgcctataccattatataacccaccggtttaaa

SEQ ID NO: 201682 - DNA, 2700 bp, Zea Mays
tgccgccatccatcctttttcccttcctcccctcaccccctcgtcggaatcggaacggctgtcgtctgccccttcgcccccctcttcgatccctcaccccacccagtgctagctagctagctagcttctagtggctagtagctcccctcccctgtgggctgcaacctggtttgggttcgcggatcgatcgcgagatcaatcaatccatggcgcggaccaactgggtggccgataagatgctcgacgtctacatctatgactacctggtgaagcgcaacctgcaggccaccgccaaggccttcatcgccgagggcaaggtcgccaccgaccccgtcgccatcgacgcccccggcggcttcctcttcgagtggtggtccatcttctgggacatcttccattcgtccaccgccaaagcctcatccacatccactgccgccgccttcatcgaccacaccgccaagcaacagcagccaatcggcgccgggaccggggcgcctcctcctcatccccttcacgattccagagagcaccagatgaggctccagcagctgctgcaccaacacaacccccacctccacactacaagagatgcttctcctcccgcctctatcaatgccctcaactccgatgtctccgctgtcctcgcgtccaaaatgatgcaagaccgagtcaggaaccccaaccctattgactccgacgcctcacagcatctcctagacgcaaacaggatcgcgcttctaaagtcaccaccacctagccacactgggcctatgcctatgcagcagcagcttcatccaaggaaccagcaacttgacatcaagcccgatgttggtatgccacagagaacgatgcctgcagacccttcttccatgtatgcatcagggatgatgcacccaaaacctgcattacttgccactggactaaatcaaggtggtgttgggagtgtgccacttaaaggttggcctttaacggtattgaccaactccggtccaatttaggtgtgcagaagcaattggtgccatcttcaaaccagttccaacttttatcgccacaacaacagttgcttgctcaggcacaaacacagaatgaccttaccagaatgggttctccagcaccatctgcttcgccgaatgttcgaccagatgacccggattatttgatgaagttgaagatggcccagatgcagcagtcctcaggccacaggcctatggaattgcaacagccgcatcagcagaacactagaaagcggaagccaacttcttccggagcagctaatagttctggcacaggaaatactgtcgggccttctcctccgtcaactccatccactcatacccctggtggtggagtaccagtggctagcaatgttaatattttacagaagagttcaatgatttgtggtgtggatgcaactggtggacttgcctcatcctcaaaccagatggatgctttggatagttttgttgattttgatgaaaacgtcgactcttttttgtcgaatgatgatgtagacggaagaggcatgtttgcagcacttgaaaaagggtcttcagagcacaatacagagtccttaaagggtctctctttgagtgaagttggtaacaaccgtacaagtaacaacaaagttgtttgctgtcacttctcttcagatgggaagttactcgctagtgccggccatgagaagaaggtcttcctctggaatatggacaattttaagatggataccaaaatagaagaccatacaaactttatcacagacataagattcagaactaattcaactcagttggctacatcatcttctgacggaactgttcgactttggaatgctgctgatgaaagtggcgctttacaaacttttcatgggcataggtctcatgtaacatcagtagattttcacccaagattgacagaggttctttgctcttgcgacgacaatggagaaattctcttctggacagttggtcagactacatctactcatgttttgcgggtgaagcagggtggaactggaagagtcaggtttgaacctcgaagtgggcagctcctcgctgtggcagctggaagcatggtgaacatttttgatgttgaaaagcaatccagcttaccctgccctccaaaggtaatcgatatgcatgagacgttatgcagactccggaatgtgaaagttgtaaactgtttttgttgttgtttgatttagggtcacaatagtgaggtaaactttgtgtcctgggatgaaaatggtgaatatctggcatctgtaagtcaggacactgtgaaagtgtggtcggtatcgtctggtgtgtgcattcatgagttacgatccaatggaaaccaatatcagtcatgcacattccatcctagatacccgaaagtgttgattgttggtggttatcagactctggagctgtggagcttatcagataaccagagaatcccaatccaggcgcacgaagggttgatagctgcactggcgcactccccgttcactggaatgattgcctctgccagtcatgacagatgtgtaaagctctggaagtagctatatatagaggcggagacgtgagatggatatacttttcaagggtgattggaccctgtgaggtggatggatgtagggtcggttgtacatgatatattgttgagctgatgattgggctgtatctgcgcctataccattatataacccaccggtttaaa

SEQ ID NO: 201683 - DNA, 711 bp, Zea Mays
atctcgtcttcttatctccacttccccacacggcctcgcctcctcttccgtcctctgtttatataataataataataacttgccaggcgcgcgccatctcgctccgtccatccctgtcgccaccaatccatcgcttccgcttcggcctcaacgacggccgccaccaccgctcccatccctctcctcctcctcgcccagcggccattaccacagcctcccccatcaagccgggatggctgcacagcctgcactcaaggcgtcgttcagaggggagctcaacgccgtctccttcctcgactccagcaggggacctttcggccaacacaaaggaccatgcttcgtcgccgaaggtcctgcggaaagaaaacagcttcgactgaagctgcttgaacgtaatgccgaaggtaccattcatgaagcttcggtattacagcatgtccgaagatgagggatcgaaccgacttaaagatagaatgaccttttagttcataagggtctgagtcaatgttgtaaacttttatgagggacatgattgtaatttctcacaggctgtgtcctgtgcctataaatagtgaacagtattcctttactgttcacgcattcctgtaattgcaaacgcttcactcgggaattattgtttgtcaagacaaatgtataaatgtatctaaacattatgtttaagcatcttagattcatataataagatatgtg

SEQ ID NO: 201684 - DNA, 941 bp, Zea Mays
ctttatattcttacagcagaagattatctgtgttcagccaaatggacataattagtgctgttttgcaaaagcattttggattttccagtctcaaagcattccaaaaggaagtcttggatgcttggtttgctcacggggattgtgttctcctagcagccacaaggttttctataatgctcctctttatcttctgtaatttattacaactgctgatgtgactttgctttttatatgggctgtaagtttcagtaatattttttcataacttctatcattattgaatacttatattttgtatccttttttcgctgaaccttcttgccttatgtttgaacatgcaacattttgattggggtagaaggtaccaaaggaaatgagcaaaacatatcatacagtctcagatgctgcaggatcacatgaaaattattgaagacgacggtccaggtgcagccttctatgccagtgctaaggccttgactaatggaaatcacactttctatgtgagcaaactgatacagaggttggctagattaagtaaatatgatacaatgtatcacctgcacagggacctgtcaagcaacaacctcaatggataaggtatattaaatacatcatgggagaaaatcttactgtcagggttcagaggatgttgtacgtaacttttaatgaagagctttgctggtgttgcgacaaagatacatgccaagagcagtatggtcggaggtgaagcagtgagtaacatctgcgctatagtggcattcaacgttcaaagcaagaaatgtatttggtttaattattgcaagcagtgatctgaaatatgtaaattatctttatatggtctttgcaagggaacacattttctggctctataccatcagtgattagcctatacaaattttattgaaagaaaaactaaaggaatgttttttattgctcttgca

SEQ ID NO: 201685 - DNA, 950 bp, Zea Mays
tacatagggatcttaaataggaaaaaaacaattacacatggtttcttaggcatgtcatcaagttataaacttttccccaaaaaatgtttgtgtacattactttgcaattgctaacctgttgtgcatttgattttgcaatcgtaaccatcgcgctgtccaaatatacctccaatcaacaggttagcaaatctcatttgtttcttactgttttcgcatggtcacttactaacaagctgatttgcacaacatataacttctatctggaacacgtatgctttctccggtaagcaaaatataacatgcctattccatattcacaacaaaaatacacaggttcatttttttccatcgtgtcccctaactgggaaaaaataagaaaagatatgtgaacaccaaaaggggacgcaactgcgaactgtgagaaattttccacatactacactcacattgtctgggacaatgggatagcatactcatacagtaatactgctgcctgtcgatcttaacaaatttcattcaagaactagggcatgctaatgttcaaaagagttgtcagcgattcatgacacctggtagcactataaccagcaatgtatggatgaattgaaggaagtaaagaagacacacaatcttacagaaactttacagaaactctgcatcttgaaactgccatgattgacaaagaagctggatgcatcatgtgcattggtgtcttcttatcaccatgcattaaagtgaagcaagttcatttgttgactaagaatggatgaacacaaatcagtggagttcgttgcactagagatggaggttggagaggtgtggtaggtgtcaatatggctttgatacaattttgcccgtacaatctttgtacggaaaagaaaaatgacattgtacgtggatactatattgtaattcaataatttttttctaaataataaatatatttgttt

SEQ ID NO: 201686 - DNA, 3158 bp, Zea Mays
cttctccacccagatttccaggctcccatcctcacctctgacactacgccccgtacctcgtgcccactgccaccaactttgctctcggtgctccgtggcttcgccttggcacgcgccggtcgtgcccgcggcctcgctcctccactagcataggcacaggtgaacccgcacagcgacataggcggcgcttcgcgcctggctttgcctcggcacacgccgagtcgtgccttagcccccaacccccctcttgcacaggattagtcgtcttgtgtcttcaacattacgaagtgatgatggccttctttttcctgaaaggatgatgactatcttgctcctatccaagctgatcgagaaaaagagttgaagtttgtgcagtaggttgaactccacagggtagaggaagctgcagcaagagaggctgctcttgaaaatcaaaagaaagaaaagaagctaaaaaagaacacaagggagaggtagttcacttagtactatcaaagtcaaagttgcagaatatgattgagattcatatatctacttatacagtttagtaagctacagcttggttcggtaaattgcagaacatcatgaatcatgacctcttatgcatggatggtaaattatttttagtttacatctcagtgttcattttacttaattgaccatcaatagcatggagtaccaaattttcttcgtcttaggaaatatatcctcattacttgtgcgaacctctcaacttatggaatgatacttagactgctctctttcgtctaggttcatttgatcgttcttttactgtattaatacaacttctattttcaagctactaagaaagctgctgaaattggacagctgaacgatggttatatgtttgacacatcaaccgacatgtcatgaatgtgaagataatacaccctgccctccattgacccactacattttttgttatattttgcgttttttgacattagttgcttataggttagattccccaacatgtccagtttgtccgcaaggtttttgtggggatttcaaacaaacattaaccccttccgggttggattggaaaatggactgcggactgccttataatccttgggggcatgctgtgcacgacatggccaccgagagccgatggatgccagatgagaagaagctggcttctgctgccactgagaaattcgaagaggaagataatacctcctattgtcaacagtgatgtgtcaatggagtgtgtatagcatgaaaaaaccaaacatgacagttcaagagagacatttcagaactgcttagtttgtatatcccatgagttatctcctaacatcttttaactgcttcaacattgcatcgaaagcaatataggcatgcctgatgatggagagatagatattttcatcgaagctgtcggtgacatgctatttgagttgcagaaacatttcatattttctattattatatacataggtttttgtatggagaaccataaaatatctgtttggaagggacgagatttgaaggtgatgaggctccttaaagaaggtttaatggaacaaatattagcataaggagtttgctggccatgtcaaaatctctatgggcagattctaactagagacctctaaaggttcaatgagatgaacattcatcaagtcttcgtctagatagaatctcatggtttcaagactgccttcaggttttggatccttggaactcattcgctgcacccagtcactgcctcccagatcctcaacatatggatttccccaattttagtgttgacaatcctcacttctaggaggtccattgtgatatctactttgaagtgcatgccatcaacaatactttgacgccactatttgtggcactaaactttgaaggggttgtagctaactgattgcaatcaattgaactcagggccactcactatttggaaacgtcagcagctaatttggacaacttgcaccttctatctatcttcaacaactaatttcgacaatttctgactttcatttagaacaatcatctactatttcggaattggaagaagagcgcacatccctcctaaacctcatttcttactcgctgtttcgaatcaagaacaaccgttttggacagcttgcagcttctatacagaacaggtcatttgtacatcttgcaacctgtacatactccagatacgctttgtccgataagcacaaatattacctttatagtatgcatcttcaggtttttccactcacgcctcaaattttattccagcctttgtatctcatttcaataagtagctgtgctcagctgcttaccacacatcaaaaaggtaactcctatctatatacctcccagattttacccacttgcaaaatgtttgcttacacgcataatatttactcaacttataatgaaactaacattaaaaaaagtaaatgttatattcagaagatgtactccccatttgtatttgcaaactcaaatgaacatattttacccttatttactgctttgtaaaaggatacgtagactccacaaataaagttcactcatatactcaattagaacataatgaactgacactttatgattacaaccaacatactctcaaatctgattctaaataacatgcttccaaatctgatactgaagaagaaactacaaaggtacaattcgtccaccttattttaaaaattgataaacacaagtacatttgtaaaatgagcgtataaaaatgctccttttcccttttataggaccaaacaacgatcgatggacaactcaaaaggaaaaaaaataatatgccctcaatggaagctcctccaaaaagaattggagcatgcacatacgagtagcagagtagcgacattacattatgggggagaagatctcccataggtggggagctgggaggtacagttgttgatggcgcccacgacgcacaggcccttgacaccatccttgtccttgtagtcccctgacaaaacagaaaaaacgacgcatgatgaccatgagcacaagattgcgtgtcagattcatcttggaacgaggggcgtggtcgcttaccgtcgtagttgtaggtgcagaggaagtaagaagaattcgttaattactgttatagagaataaaatgaagtagatggcttaatctaggctgtcgaatgtcattatcat

SEQ ID NO: 201687 - DNA, 2810 bp, Zea Mays
cttctccacccagatttccaggctcccatcctcacctctgacactacgccccgtacctcgtgcccactgccaccaactttgctctcggtgctccgtggcttcgccttggcacgcgccggtcgtgcccgcggcctcgctcctccactagcataggcacaggtgaacccgcacagcgacataggcggcgcttcgcgcctggctttgcctcggcacacgccgagtcgtgccttagcccccaacccccctcttgcacaggattagtcgtcttgtgtcttcaacattacgaagtgatgatggccttctttttcctgaaaggatgatgactatcttgctcctatccaagctgatcgagaaaaagagttgaagtttgtgcagtaggttgaactccacagggtagaggaagctgcagcaagagaggctgctcttgaaaatcaaaagaaagaaaagaagctaaaaaagaacacaagggagaggtagttcacttagtactatcaaagtcaaagttgcagaatatgattgagattcatatatctacttatacagtttagtaagctacagcttggttcggtaaattgcagaacatcatgaatcatgacctcttatgcatggatggtaaattatttttagtttacatctcagtgttcattttacttaattgaccatcaatagcatggagtaccaaattttcttcgtcttaggaaatatatcctcattacttgtgcgaacctctcaacttatggaatgatacttagactgctctctttcgtctaggttcatttgatcgttcttttactgtattaatacaacttctattttcaagctactaagaaagctgctgaaattggacagctgaacgatggttatatgtttgacacatcaaccgacatgtcatgaatgtgaagataatacaccctgccctccattgacccactacattttttgttatattttgcgttttttgacattagttgcttataggttagattccccaacatgtccagtttgtccgcaaggtttttgtggggatttcaaacaaacattaaccccttccgggttggattggaaaatggactgcggactgccttataatccttgggggcatgctgtgcacgacatggccaccgagagccgatggatgccagatgagaagaagctggcttctgctgccactgagaaattcgaagaggaagataatacctcctattgtcaacagtgatgtgtcaatggagtgtgtatagcatgaaaaaaccaaacatgacagttcaagagagacatttcagaactgcttagtttgtatatcccatgagttatctcctaacatcttttaactgcttcaacattgcatcgaaagcaatataggcatgcctgatgatggagagatagatattttcatcgaagctgtcggtgacatgctatttgagttgcagaaacatttcatattttctattattatatacataggtttttgtatggagaaccataaaatatctgtttggaagggacgagatttgaaggtgatgaggctccttaaagaaggtttaatggaacaaatattagcataaggagtttgctggccatgtcaaaatctctatgggcagattctaactagagacctctaaaggttcaatgagatgaacattcatcaagtcttcgtctagatagaatctcatggtttcaagactgccttcaggttttgagcgcacatccctcctaaacctcatttcttactcgctgtttcgaatcaagaacaaccgttttggacagcttgcagcttctatacagaacaggtcatttgtacatcttgcaacctgtacatactccagatacgctttgtccgataagcacaaatattacctttatagtatgcatcttcaggtttttccactcacgcctcaaattttattccagcctttgtatctcatttcaataagtagctgtgctcagctgcttaccacacatcaaaaaggtaactcctatctatatacctcccagattttacccacttgcaaaatgtttgcttacacgcataatatttactcaacttataatgaaactaacattaaaaaaagtaaatgttatattcagaagatgtactccccatttgtatttgcaaactcaaatgaacatattttacccttatttactgctttgtaaaaggatacgtagactccacaaataaagttcactcatatactcaattagaacataatgaactgacactttatgattacaaccaacatactctcaaatctgattctaaataacatgcttccaaatctgatactgaagaagaaactacaaaggtacaattcgtccaccttattttaaaaattgataaacacaagtacatttgtaaaatgagcgtataaaaatgctccttttcccttttataggaccaaacaacgatcgatggacaactcaaaaggaaaaaaaataatatgccctcaatggaagctcctccaaaaagaattggagcatgcacatacgagtagcagagtagcgacattacattatgggggagaagatctcccataggtggggagctgggaggtacagttgttgatggcgcccacgacgcacaggcccttgacaccatccttgtccttgtagtcccctgacaaaacagaaaaaacgacgcatgatgaccatgagcacaagattgcgtgtcagattcatcttggaacgaggggcgtggtcgcttaccgtcgtagttgtaggtgcagaggaagtaagaagaattcgttaattactgttatagagaataaaatgaagtagatggcttaatctaggctgtcgaatgtcattatcat

SEQ ID NO: 201688 - DNA, 3908 bp, Zea Mays
cttctccacccagatttccaggctcccatcctcacctctgacactacgccccgtacctcgtgcccactgccaccaactttgctctcggtgctccgtggcttcgccttggcacgcgccggtcgtgcccgcggcctcgctcctccactagcataggcacaggtgaacccgcacagcgacataggcggcgcttcgcgcctggctttgcctcggcacacgccgagtcgtgccttagcccccaacccccctcttgcacaggtgcacgagatatctccaacctcgcctccctgctgattagtcgtcttgtgtcttcaacattacgaagtgatgatggccttctttttcctgaaaggatgatgactatcttgctcctatccaagctgatcgagaaaaagagttgaagtttgtgcagtaggttgaactccacagggtagaggaagctgcagcaagagaggctgctcttgaaaatcaaaagaaagaaaagaagctaaaaaagaacacaagggagaggtagttcacttagtactatcaaagtcaaagttgcagaatatgattgagattcatatatctacttatacagtttagtaagctacagcttggttcggtaaattgcagaacatcatgaatcatgacctcttatgcatggatggtaaattatttttagtttacatctcagtgttcattttacttaattgaccatcaatagcatggagtaccaaattttcttcgtcttaggaaatatatcctcattacttgtgcgaacctctcaacttatggaatgatacttagactgctctctttcgtctaggttcatttgatcgttcttttactgtattaatacaacttctattttcaagctactaagaaagctgctgaaattggacagctgaacgatggttatatgtttgacacatcaaccgacatgtcatgaatgtgaagataatacaccctgccctccattgacccactacattttttgttatattttgcgttttttgacattagttgcttataggttagattccccaacatgtccagtttgtccgcaaggtttttgtggggatttcaaacaaacattaaccccttccgggttggattggaaaatggactgcggactgccttataatccttgggggcatgctgtgcacgacatggccaccgagagccgatggatgccagatgagaagaagctggcttctgctgccactgagaaattcgaagaggaagataatacctcctattgtcaacagtgatgtgtcaatggagtgtgtatagcatgaaaaaaccaaacatgacagttcaagagagacatttcagaactgcttagtttgtatatcccatgagttatctcctaacatcttttaactgcttcaacattgcatcgaaagcaatataggcatgcctgatgatggagagatagatattttcatcgaagctgtcggtgacatgctatttgagttgcagaaacatttcatattttctattattatatacataggtttttgtatggagaaccataaaatatctgtttggaagggacgagatttgaaggtgatgaggctccttaaagaaggtttaatggaacaaatattagcataaggagtttgctggccatgtcaaaatctctatgggcagattctaactagagacctctaaaggttcaatgagatgaacattcatcaagtcttcgtctagatagaatctcatggtttcaagactgccttcaggttttggatccttggaactcattcgctgcacccagtcactgcctcccagatcctcaacatatggatttccccaattttagtgttgacaatcctcacttctaggaggtccattgtgatatctactttgaagtgcatgccatcaacaatactttgacgccactatttgtggcactaaactttgaaggggttgtagctaactgattgcaatcaattgaactcagggccactcactatttggaaacgtcagcagctaatttggacaacttgcaccttctatctatcttcaacaactaatttcgacaatttctgactttcatttagaacaatcatctactatttcggaattggaagaagagcgcacatccctcctaaacctcatttcttactcgctgtttcgaatcaagaacaaccgttttggacagcttgcagcttctatacagaacaggtacacatattacctgttcaatgccatgttatgcatagaaaagtctatgttttcagatttaattaccctgagatacattattatttctttactacttccacttcgcttgaacccgcataagacgcataactaaaaaaacattccttccttactttttcccaacgcgtggttaaatactattatgaaacctcaacagcaaattcagacatcatgtaacttctattctgaaaaagagtatggttactagaccaaatattatatatttttacaaccatgtgtcacatattactccattactcatgttttgtttaaacaaataactatgcatacctgctcaccacacataaaattaatcactcctcttatcaacggtcatccatcattattgctacaatacgcatggtcatcagatttcctatgtaattaccatactttaacctctatgtacatgtaaatatgtgcttccaataggtgctcaagtacatacgatcgataccatgttgttatgcataagtacatttacacacacatactctatactgattgacatctattgatccccctactattctcttgaacctacacacaatttttaaatgtatcttatattaagatatccttagcgtttgcgttcttcatcaacgtacaaactacaaatctaatttcattcttacttcattttcacatgtttacattctaatttgaatcgacgacaggtcatttgtacatcttgcaacctgtacatactccagatacgctttgtccgataagcacaaatattacctttatagtatgcatcttcaggtttttccactcacgcctcaaattttattccagcctttgtatctcatttcaataagtagctgtgctcagctgcttaccacacatcaaaaaggtaactcctatctatatacctcccagattttacccacttgcaaaatgtttgcttacacgcataatatttactcaacttataatgaaactaacattaaaaaaagtaaatgttatattcagaagatgtactccccatttgtatttgcaaactcaaatgaacatattttacccttatttactgctttgtaaaaggatacgtagactccacaaataaagttcactcatatactcaattagaacataatgaactgacactttatgattacaaccaacatactctcaaatctgattctaaataacatgcttccaaatctgatactgaagaagaaactacaaaggtacaattcgtccaccttattttaaaaattgataaacacaagtacatttgtaaaatgagcgtataaaaatgctccttttcccttttataggaccaaacaacgatcgatggacaactcaaaaggaaaaaaaataatatgccctcaatggaagctcctccaaaaagaattggagcatgcacatacgagtagcagagtagcgacattacattatgggggagaagatctcccataggtggggagctgggaggtacagttgttgatggcgcccacgacgcacaggcccttgacaccatccttgtccttgtagtcccctgacaaaacagaaaaaacgacgcatgatgaccatgagcacaagattgcgtgtcagattcatcttggaacgaggggcgtggtcgcttaccgtcgtagttgtaggtgcagaggaagtaagaagaattcgttaattactgttatagagaataaaatgaagtagatggcttaatctaggctgtcgaatgtcattatcat

SEQ ID NO: 201689 - DNA, 3272 bp, Zea Mays
cttctccacccagatttccaggctcccatcctcacctctgacactacgccccgtacctcgtgcccactgccaccaactttgctctcggtgctccgtggcttcgccttggcacgcgccggtcgtgcccgcggcctcgctcctccactagcataggcacaggtgaacccgcacagcgacataggcggcgcttcgcgcctggctttgcctcggcacacgccgagtcgtgccttagcccccaacccccctcttgcacaggtgcacgagatatctccaacctcgcctccctgctgattagtcgtcttgtgtcttcaacattacgaagtgatgatggccttctttttcctgaaaggatgatgactatcttgctcctatccaagctgatcgagaaaaagagttgaagtttgtgcagtaggttgaactccacagggtagaggaagctgcagcaagagaggctgctcttgaaaatcaaaagaaagaaaagaagctaaaaaagaacacaagggagaggttagattccccaacatgtccagtttgtccgcaaggtttttgtggggatttcaaacaaacattaaccccttccgggttggattggaaaatggactgcggactgccttataatccttgggggcatgctgtgcacgacatggccaccgagagccgatggatgccagatgagaagaagctggcttctgctgccactgagaaattcgaagaggaagataatacctcctattgtcaacagtgatgtgtcaatggagtgtgtatagcatgaaaaaaccaaacatgacagttcaagagagacatttcagaactgcttagtttgtatatcccatgagttatctcctaacatcttttaactgcttcaacattgcatcgaaagcaatataggcatgcctgatgatggagagatagatattttcatcgaagctgtcggtgacatgctatttgagttgcagaaacatttcatattttctattattatatacataggtttttgtatggagaaccataaaatatctgtttggaagggacgagatttgaaggtgatgaggctccttaaagaaggtttaatggaacaaatattagcataaggagtttgctggccatgtcaaaatctctatgggcagattctaactagagacctctaaaggttcaatgagatgaacattcatcaagtcttcgtctagatagaatctcatggtttcaagactgccttcaggttttggatccttggaactcattcgctgcacccagtcactgcctcccagatcctcaacatatggatttccccaattttagtgttgacaatcctcacttctaggaggtccattgtgatatctactttgaagtgcatgccatcaacaatactttgacgccactatttgtggcactaaactttgaaggggttgtagctaactgattgcaatcaattgaactcagggagcgcacatccctcctaaacctcatttcttactcgctgtttcgaatcaagaacaaccgttttggacagcttgcagcttctatacagaacaggtacacatattacctgttcaatgccatgttatgcatagaaaagtctatgttttcagatttaattaccctgagatacattattatttctttactacttccacttcgcttgaacccgcataagacgcataactaaaaaaacattccttccttactttttcccaacgcgtggttaaatactattatgaaacctcaacagcaaattcagacatcatgtaacttctattctgaaaaagagtatggttactagaccaaatattatatatttttacaaccatgtgtcacatattactccattactcatgttttgtttaaacaaataactatgcatacctgctcaccacacataaaattaatcactcctcttatcaacggtcatccatcattattgctacaatacgcatggtcatcagatttcctatgtaattaccatactttaacctctatgtacatgtaaatatgtgcttccaataggtgctcaagtacatacgatcgataccatgttgttatgcataagtacatttacacacacatactctatactgattgacatctattgatccccctactattctcttgaacctacacacaatttttaaatgtatcttatattaagatatccttagcgtttgcgttcttcatcaacgtacaaactacaaatctaatttcattcttacttcattttcacatgtttacattctaatttgaatcgacgacaggtcatttgtacatcttgcaacctgtacatactccagatacgctttgtccgataagcacaaatattacctttatagtatgcatcttcaggtttttccactcacgcctcaaattttattccagcctttgtatctcatttcaataagtagctgtgctcagctgcttaccacacatcaaaaaggtaactcctatctatatacctcccagattttacccacttgcaaaatgtttgcttacacgcataatatttactcaacttataatgaaactaacattaaaaaaagtaaatgttatattcagaagatgtactccccatttgtatttgcaaactcaaatgaacatattttacccttatttactgctttgtaaaaggatacgtagactccacaaataaagttcactcatatactcaattagaacataatgaactgacactttatgattacaaccaacatactctcaaatctgattctaaataacatgcttccaaatctgatactgaagaagaaactacaaaggtacaattcgtccaccttattttaaaaattgataaacacaagtacatttgtaaaatgagcgtataaaaatgctccttttcccttttataggaccaaacaacgatcgatggacaactcaaaaggaaaaaaaataatatgccctcaatggaagctcctccaaaaagaattggagcatgcacatacgagtagcagagtagcgacattacattatgggggagaagatctcccataggtggggagctgggaggtacagttgttgatggcgcccacgacgcacaggcccttgacaccatccttgtccttgtagtcccctgacaaaacagaaaaaacgacgcatgatgaccatgagcacaagattgcgtgtcagattcatcttggaacgaggggcgtggtcgcttaccgtcgtagttgtaggtgcagaggaagtaagaagaattcgttaattactgttatagagaataaaatgaagtagatggcttaatctaggctgtcgaatgtcattatcat

SEQ ID NO: 201690 - DNA, 2717 bp, Zea Mays
cttctccacccagatttccaggctcccatcctcacctctgacactacgccccgtacctcgtgcccactgccaccaactttgctctcggtgctccgtggcttcgccttggcacgcgccggtcgtgcccgcggcctcgctcctccactagcataggcacaggtgaacccgcacagcgacataggcggcgcttcgcgcctggctttgcctcggcacacgccgagtcgtgccttagcccccaacccccctcttgcacaggattagtcgtcttgtgtcttcaacattacgaagtgatgatggccttctttttcctgaaaggatgatgactatcttgctcctatccaagctgatcgagaaaaagagttgaagtttgtgcagtaggttgaactccacagggtagaggaagctgcagcaagagaggctgctcttgaaaatcaaaagaaagaaaagaagctaaaaaagaacacaagggagaggttagattccccaacatgtccagtttgtccgcaaggtttttgtggggatttcaaacaaacattaaccccttccgggttggattggaaaatggactgcggactgccttataatccttgggggcatgctgtgcacgacatggccaccgagagccgatggatgccagatgagaagaagctggcttctgctgccactgagaaattcgaagaggaagataatacctcctattgtcaacagtgatgtgtcaatggagtgtgtatagcatgaaaaaaccaaacatgacagttcaagagagacatttcagaactgcttagtttgtatatcccatgagttatctcctaacatcttttaactgcttcaacattgcatcgaaagcaatataggcatgcctgatgatggagagatagatattttcatcgaagctgtcggtgacatgctatttgagttgcagaaacatttcatattttctattattatatacataggtttttgtatggaggtactgaaagccccctcctgaaatatagtatgattaccaccttctctacaatcctttttttgtttttgttttatttttacgttgaagcaaagaaccataaaatatctgtttggaagggacgagatttgaaggtgatgaggctccttaaagaaggtttaatggaacaaatattagcataaggagtttgctggccatgtcaaaatctctatgggcagattctaactagagacctctaaaggttcaatgagatgaacattcatcaagtcttcgtctagatagaatctcatggtttcaagactgccttcaggttttggatccttggaactcattcgctgcacccagtcactgcctcccagatcctcaacatatggatttccccaattttagtgttgacaatcctcacttctaggaggtccattgtgatatctactttgaagtgcatgccatcaacaatactttgacgccactatttgtggcactaaactttgaaggggttgtagctaactgattgcaatcaattgaactcagggccactcactatttggaaacgtcagcagctaatttggacaacttgcaccttctatctatcttcaacaactaatttcgacaatttctgactttcatttagaacaaagcgcacatccctcctaaacctcatttcttactcgctgtttcgaatcaagaacaaccgttttggacagcttgcagcttctatacagaacaggtcatttgtacatcttgcaacctgtacatactccagatacgctttgtccgataagcacaaatattacctttatagtatgcatcttcaggtttttccactcacgcctcaaattttattccagcctttgtatctcatttcaataagtagctgtgctcagctgcttaccacacatcaaaaaggtaactcctatctatatacctcccagattttacccacttgcaaaatgtttgcttacacgcataatatttactcaacttataatgaaactaacattaaaaaaagtaaatgttatattcagaagatgtactccccatttgtatttgcaaactcaaatgaacatattttacccttatttactgctttgtaaaaggatacgtagactccacaaataaagttcactcatatactcaattagaacataatgaactgacactttatgattacaaccaacatactctcaaatctgattctaaataacatgcttccaaatctgatactgaagaagaaactacaaaggtacaattcgtccaccttattttaaaaattgataaacacaagtacatttgtaaaatgagcgtataaaaatgctccttttcccttttataggaccaaacaacgatcgatggacaactcaaaaggaaaaaaaataatatgccctcaatggaagctcctccaaaaagaattggagcatgcacatacgagtagcagagtagcgacattacattatgggggagaagatctcccataggtggggagctgggaggtacagttgttgatggcgcccacgacgcacaggcccttgacaccatccttgtccttgtagtcccctgacaaaacagaaaaaacgacgcatgatgaccatgagcacaagattgcgtgtcagattcatcttggaacgaggggcgtggtcgcttaccgtcgtagttgtaggtgcagaggaagtaagaagaattcgttaattactgttatagagaataaaatgaagtagatggcttaatctaggctgtcgaatgtcattatcat

SEQ ID NO: 201691 - DNA, 3375 bp, Zea Mays
cttctccacccagatttccaggctcccatcctcacctctgacactacgccccgtacctcgtgcccactgccaccaactttgctctcggtgctccgtggcttcgccttggcacgcgccggtcgtgcccgcggcctcgctcctccactagcataggcacaggtgaacccgcacagcgacataggcggcgcttcgcgcctggctttgcctcggcacacgccgagtcgtgccttagcccccaacccccctcttgcacaggtgcacgagatatctccaacctcgcctccctgctgattagtcgtcttgtgtcttcaacattacgaagtgatgatggccttctttttcctgaaaggatgatgactatcttgctcctatccaagctgatcgagaaaaagagttgaagtttgtgcagtaggttgaactccacagggtagaggaagctgcagcaagagaggctgctcttgaaaatcaaaagaaagaaaagaagctaaaaaagaacacaagggagaggttagattccccaacatgtccagtttgtccgcaaggtttttgtggggatttcaaacaaacattaaccccttccgggttggattggaaaatggactgcggactgccttataatccttgggggcatgctgtgcacgacatggccaccgagagccgatggatgccagatgagaagaagctggcttctgctgccactgagaaattcgaagaggaagataatacctcctattgtcaacagtgatgtgtcaatggagtgtgtatagcatgaaaaaaccaaacatgacagttcaagagagacatttcagaactgcttagtttgtatatcccatgagttatctcctaacatcttttaactgcttcaacattgcatcgaaagcaatataggcatgcctgatgatggagagatagatattttcatcgaagctgtcggtgacatgctatttgagttgcagaaacatttcatattttctattattatatacataggtttttgtatggagaaccataaaatatctgtttggaagggacgagatttgaaggtgatgaggctccttaaagaaggtttaatggaacaaatattagcataaggagtttgctggccatgtcaaaatctctatgggcagattctaactagagacctctaaaggttcaatgagatgaacattcatcaagtcttcgtctagatagaatctcatggtttcaagactgccttcaggttttggatccttggaactcattcgctgcacccagtcactgcctcccagatcctcaacatatggatttccccaattttagtgttgacaatcctcacttctaggaggtccattgtgatatctactttgaagtgcatgccatcaacaatactttgacgccactatttgtggcactaaactttgaaggggttgtagctaactgattgcaatcaattgaactcagggccactcactatttggaaacgtcagcagctaatttggacaacttgcaccttctatctatcttcaacaactaatttcgacaatttctgactttcatttagaacaaagcgcacatccctcctaaacctcatttcttactcgctgtttcgaatcaagaacaaccgttttggacagcttgcagcttctatacagaacaggtacacatattacctgttcaatgccatgttatgcatagaaaagtctatgttttcagatttaattaccctgagatacattattatttctttactacttccacttcgcttgaacccgcataagacgcataactaaaaaaacattccttccttactttttcccaacgcgtggttaaatactattatgaaacctcaacagcaaattcagacatcatgtaacttctattctgaaaaagagtatggttactagaccaaatattatatatttttacaaccatgtgtcacatattactccattactcatgttttgtttaaacaaataactatgcatacctgctcaccacacataaaattaatcactcctcttatcaacggtcatccatcattattgctacaatacgcatggtcatcagatttcctatgtaattaccatactttaacctctatgtacatgtaaatatgtgcttccaataggtgctcaagtacatacgatcgataccatgttgttatgcataagtacatttacacacacatactctatactgattgacatctattgatccccctactattctcttgaacctacacacaatttttaaatgtatcttatattaagatatccttagcgtttgcgttcttcatcaacgtacaaactacaaatctaatttcattcttacttcattttcacatgtttacattctaatttgaatcgacgacaggtcatttgtacatcttgcaacctgtacatactccagatacgctttgtccgataagcacaaatattacctttatagtatgcatcttcaggtttttccactcacgcctcaaattttattccagcctttgtatctcatttcaataagtagctgtgctcagctgcttaccacacatcaaaaaggtaactcctatctatatacctcccagattttacccacttgcaaaatgtttgcttacacgcataatatttactcaacttataatgaaactaacattaaaaaaagtaaatgttatattcagaagatgtactccccatttgtatttgcaaactcaaatgaacatattttacccttatttactgctttgtaaaaggatacgtagactccacaaataaagttcactcatatactcaattagaacataatgaactgacactttatgattacaaccaacatactctcaaatctgattctaaataacatgcttccaaatctgatactgaagaagaaactacaaaggtacaattcgtccaccttattttaaaaattgataaacacaagtacatttgtaaaatgagcgtataaaaatgctccttttcccttttataggaccaaacaacgatcgatggacaactcaaaaggaaaaaaaataatatgccctcaatggaagctcctccaaaaagaattggagcatgcacatacgagtagcagagtagcgacattacattatgggggagaagatctcccataggtggggagctgggaggtacagttgttgatggcgcccacgacgcacaggcccttgacaccatccttgtccttgtagtcccctgacaaaacagaaaaaacgacgcatgatgaccatgagcacaagattgcgtgtcagattcatcttggaacgaggggcgtggtcgcttaccgtcgtagttgtaggtgcagaggaagtaagaagaattcgttaattactgttatagagaataaaatgaagtagatggcttaatctaggctgtcgaatgtcattatcat

SEQ ID NO: 201692 - DNA, 3256 bp, Zea Mays
cttctccacccagatttccaggctcccatcctcacctctgacactacgccccgtacctcgtgcccactgccaccaactttgctctcggtgctccgtggcttcgccttggcacgcgccggtcgtgcccgcggcctcgctcctccactagcataggcacaggtgaacccgcacagcgacataggcggcgcttcgcgcctggctttgcctcggcacacgccgagtcgtgccttagcccccaacccccctcttgcacaggtgcacgagatatctccaacctcgcctccctgctgattagtcgtcttgtgtcttcaacattacgaagtgatgatggccttctttttcctgaaaggatgatgactatcttgctcctatccaagctgatcgagaaaaagagttgaagtttgtgcagtaggttgaactccacagggtagaggaagctgcagcaagagaggctgctcttgaaaatcaaaagaaagaaaagaagctaaaaaagaacacaagggagaggtagttcacttagtactatcaaagtcaaagttgcagaatatgattgagattcatatatctacttatacagtttagtaagctacagcttggttcggtaaattgcagaacatcatgaatcatgacctcttatgcatggatggtaaattatttttagtttacatctcagtgttcattttacttaattgaccatcaatagcatggagtaccaaattttcttcgtcttaggaaatatatcctcattacttgtgcgaacctctcaacttatggaatgatacttagactgctctctttcgtctaggttcatttgatcgttcttttactgtattaatacaacttctattttcaagctactaagaaagctgctgaaattggacagctgaacgatggttatatgtttgacacatcaaccgacatgtcatgaatgtgaagataatacaccctgccctccattgacccactacattttttgttatattttgcgttttttgacattagttgcttataggttagattccccaacatgtccagtttgtccgcaaggtttttgtggggatttcaaacaaacattaaccccttccgggttggattggaaaatggactgcggactgccttataatccttgggggcatgctgtgcacgacatggccaccgagagccgatggatgccagatgagaagaagctggcttctgctgccactgagaaattcgaagaggaagataatacctcctattgtcaacagtgatgtgtcaatggagtgtgtatagcatgaaaaaaccaaacatgacagttcaagagagacatttcagaactgcttagtttgtatatcccatgagttatctcctaacatcttttaactgcttcaacattgcatcgaaagcaatataggcatgcctgatgatggagagatagatattttcatcgaagctgtcggtgacatgctatttgagttgcagaaacatttcatattttctattattatatacataggtttttgtatggaggtactgaaagccccctcctgaaatatagtatgattaccaccttctctacaatcctttttttgtttttgttttatttttacgttgaagcaaagaaccataaaatatctgtttggaagggacgagatttgaaggtgatgaggctccttaaagaaggtttaatggaacaaatattagcataaggagtttgctggccatgtcaaaatctctatgggcagattctaactagagacctctaaaggttcaatgagatgaacattcatcaagtcttcgtctagatagaatctcatggtttcaagactgccttcaggttttggatccttggaactcattcgctgcacccagtcactgcctcccagatcctcaacatatggatttccccaattttagtgttgacaatcctcacttctaggaggtccattgtgatatctactttgaagtgcatgccatcaacaatactttgacgccactatttgtggcactaaactttgaaggggttgtagctaactgattgcaatcaattgaactcagggccactcactatttggaaacgtcagcagctaatttggacaacttgcaccttctatctatcttcaacaactaatttcgacaatttctgactttcatttagaacaaagcgcacatccctcctaaacctcatttcttactcgctgtttcgaatcaagaacaaccgttttggacagcttgcagcttctatacagaacaggtcatttgtacatcttgcaacctgtacatactccagatacgctttgtccgataagcacaaatattacctttatagtatgcatcttcaggtttttccactcacgcctcaaattttattccagcctttgtatctcatttcaataagtagctgtgctcagctgcttaccacacatcaaaaaggtaactcctatctatatacctcccagattttacccacttgcaaaatgtttgcttacacgcataatatttactcaacttataatgaaactaacattaaaaaaagtaaatgttatattcagaagatgtactccccatttgtatttgcaaactcaaatgaacatattttacccttatttactgctttgtaaaaggatacgtagactccacaaataaagttcactcatatactcaattagaacataatgaactgacactttatgattacaaccaacatactctcaaatctgattctaaataacatgcttccaaatctgatactgaagaagaaactacaaaggtacaattcgtccaccttattttaaaaattgataaacacaagtacatttgtaaaatgagcgtataaaaatgctccttttcccttttataggaccaaacaacgatcgatggacaactcaaaaggaaaaaaaataatatgccctcaatggaagctcctccaaaaagaattggagcatgcacatacgagtagcagagtagcgacattacattatgggggagaagatctcccataggtggggagctgggaggtacagttgttgatggcgcccacgacgcacaggcccttgacaccatccttgtccttgtagtcccctgacaaaacagaaaaaacgacgcatgatgaccatgagcacaagattgcgtgtcagattcatcttggaacgaggggcgtggtcgcttaccgtcgtagttgtaggtgcagaggaagtaagaagaattcgttaattactgttatagagaataaaatgaagtagatggcttaatctaggctgtcgaatgtcattatcat

SEQ ID NO: 201693 - DNA, 2556 bp, Zea Mays
cttctccacccagatttccaggctcccatcctcacctctgacactacgccccgtacctcgtgcccactgccaccaactttgctctcggtgctccgtggcttcgccttggcacgcgccggtcgtgcccgcggcctcgctcctccactagcataggcacaggtgaacccgcacagcgacataggcggcgcttcgcgcctggctttgcctcggcacacgccgagtcgtgccttagcccccaacccccctcttgcacaggtgcacgagatatctccaacctcgcctccctgctgattagtcgtcttgtgtcttcaacattacgaagtgatgatggccttctttttcctgaaaggatgatgactatcttgctcctatccaagctgatcgagaaaaagagttgaagtttgtgcagtaggttgaactccacagggtagaggaagctgcagcaagagaggctgctcttgaaaatcaaaagaaagaaaagaagctaaaaaagaacacaagggagaggttagattccccaacatgtccagtttgtccgcaaggtttttgtggggatttcaaacaaacattaaccccttccgggttggattggaaaatggactgcggactgccttataatccttgggggcatgctgtgcacgacatggccaccgagagccgatggatgccagatgagaagaagctggcttctgctgccactgagaaattcgaagaggaagataatacctcctattgtcaacagtgatgtgtcaatggagtgtgtatagcatgaaaaaaccaaacatgacagttcaagagagacatttcagaactgcttagtttgtatatcccatgagttatctcctaacatcttttaactgcttcaacattgcatcgaaagcaatataggcatgcctgatgatggagagatagatattttcatcgaagctgtcggtgacatgctatttgagttgcagaaacatttcatattttctattattatatacataggtttttgtatggagaaccataaaatatctgtttggaagggacgagatttgaaggtgatgaggctccttaaagaaggtttaatggaacaaatattagcataaggagtttgctggccatgtcaaaatctctatgggcagattctaactagagacctctaaaggttcaatgagatgaacattcatcaagtcttcgtctagatagaatctcatggtttcaagactgccttcaggttttggatccttggaactcattcgctgcacccagtcactgcctcccagatcctcaacatatggatttccccaattttagtgttgacaatcctcacttctaggaggtccattgtgatatctactttgaagtgcatgccatcaacaatactttgacgccactatttgtggcactaaactttgaaggggttgtagctaactgattgcaatcaattgaactcagggagcgcacatccctcctaaacctcatttcttactcgctgtttcgaatcaagaacaaccgttttggacagcttgcagcttctatacagaacaggtcatttgtacatcttgcaacctgtacatactccagatacgctttgtccgataagcacaaatattacctttatagtatgcatcttcaggtttttccactcacgcctcaaattttattccagcctttgtatctcatttcaataagtagctgtgctcagctgcttaccacacatcaaaaaggtaactcctatctatatacctcccagattttacccacttgcaaaatgtttgcttacacgcataatatttactcaacttataatgaaactaacattaaaaaaagtaaatgttatattcagaagatgtactccccatttgtatttgcaaactcaaatgaacatattttacccttatttactgctttgtaaaaggatacgtagactccacaaataaagttcactcatatactcaattagaacataatgaactgacactttatgattacaaccaacatactctcaaatctgattctaaataacatgcttccaaatctgatactgaagaagaaactacaaaggtacaattcgtccaccttattttaaaaattgataaacacaagtacatttgtaaaatgagcgtataaaaatgctccttttcccttttataggaccaaacaacgatcgatggacaactcaaaaggaaaaaaaataatatgccctcaatggaagctcctccaaaaagaattggagcatgcacatacgagtagcagagtagcgacattacattatgggggagaagatctcccataggtggggagctgggaggtacagttgttgatggcgcccacgacgcacaggcccttgacaccatccttgtccttgtagtcccctgacaaaacagaaaaaacgacgcatgatgaccatgagcacaagattgcgtgtcagattcatcttggaacgaggggcgtggtcgcttaccgtcgtagttgtaggtgcagaggaagtaagaagaattcgttaattactgttatagagaataaaatgaagtagatggcttaatctaggctgtcgaatgtcattatcat

SEQ ID NO: 201694 - DNA, 3495 bp, Zea Mays
cttctccacccagatttccaggctcccatcctcacctctgacactacgccccgtacctcgtgcccactgccaccaactttgctctcggtgctccgtggcttcgccttggcacgcgccggtcgtgcccgcggcctcgctcctccactagcataggcacaggtgaacccgcacagcgacataggcggcgcttcgcgcctggctttgcctcggcacacgccgagtcgtgccttagcccccaacccccctcttgcacaggtgcacgagatatctccaacctcgcctccctgctgattagtcgtcttgtgtcttcaacattacgaagtgatgatggccttctttttcctgaaaggatgatgactatcttgctcctatccaagctgatcgagaaaaagagttgaagtttgtgcagtaggttgaactccacagggtagaggaagctgcagcaagagaggctgctcttgaaaatcaaaagaaagaaaagaagctaaaaaagaacacaagggagaggttagattccccaacatgtccagtttgtccgcaaggtttttgtggggatttcaaacaaacattaaccccttccgggttggattggaaaatggactgcggactgccttataatccttgggggcatgctgtgcacgacatggccaccgagagccgatggatgccagatgagaagaagctggcttctgctgccactgagaaattcgaagaggaagataatacctcctattgtcaacagtgatgtgtcaatggagtgtgtatagcatgaaaaaaccaaacatgacagttcaagagagacatttcagaactgcttagtttgtatatcccatgagttatctcctaacatcttttaactgcttcaacattgcatcgaaagcaatataggcatgcctgatgatggagagatagatattttcatcgaagctgtcggtgacatgctatttgagttgcagaaacatttcatattttctattattatatacataggtttttgtatggaggtactgaaagccccctcctgaaatatagtatgattaccaccttctctacaatcctttttttgtttttgttttatttttacgttgaagcaaagaaccataaaatatctgtttggaagggacgagatttgaaggtgatgaggctccttaaagaaggtttaatggaacaaatattagcataaggagtttgctggccatgtcaaaatctctatgggcagattctaactagagacctctaaaggttcaatgagatgaacattcatcaagtcttcgtctagatagaatctcatggtttcaagactgccttcaggttttggatccttggaactcattcgctgcacccagtcactgcctcccagatcctcaacatatggatttccccaattttagtgttgacaatcctcacttctaggaggtccattgtgatatctactttgaagtgcatgccatcaacaatactttgacgccactatttgtggcactaaactttgaaggggttgtagctaactgattgcaatcaattgaactcagggccactcactatttggaaacgtcagcagctaatttggacaacttgcaccttctatctatcttcaacaactaatttcgacaatttctgactttcatttagaacaatcatctactatttcggaattggaagaagagcgcacatccctcctaaacctcatttcttactcgctgtttcgaatcaagaacaaccgttttggacagcttgcagcttctatacagaacaggtacacatattacctgttcaatgccatgttatgcatagaaaagtctatgttttcagatttaattaccctgagatacattattatttctttactacttccacttcgcttgaacccgcataagacgcataactaaaaaaacattccttccttactttttcccaacgcgtggttaaatactattatgaaacctcaacagcaaattcagacatcatgtaacttctattctgaaaaagagtatggttactagaccaaatattatatatttttacaaccatgtgtcacatattactccattactcatgttttgtttaaacaaataactatgcatacctgctcaccacacataaaattaatcactcctcttatcaacggtcatccatcattattgctacaatacgcatggtcatcagatttcctatgtaattaccatactttaacctctatgtacatgtaaatatgtgcttccaataggtgctcaagtacatacgatcgataccatgttgttatgcataagtacatttacacacacatactctatactgattgacatctattgatccccctactattctcttgaacctacacacaatttttaaatgtatcttatattaagatatccttagcgtttgcgttcttcatcaacgtacaaactacaaatctaatttcattcttacttcattttcacatgtttacattctaatttgaatcgacgacaggtcatttgtacatcttgcaacctgtacatactccagatacgctttgtccgataagcacaaatattacctttatagtatgcatcttcaggtttttccactcacgcctcaaattttattccagcctttgtatctcatttcaataagtagctgtgctcagctgcttaccacacatcaaaaaggtaactcctatctatatacctcccagattttacccacttgcaaaatgtttgcttacacgcataatatttactcaacttataatgaaactaacattaaaaaaagtaaatgttatattcagaagatgtactccccatttgtatttgcaaactcaaatgaacatattttacccttatttactgctttgtaaaaggatacgtagactccacaaataaagttcactcatatactcaattagaacataatgaactgacactttatgattacaaccaacatactctcaaatctgattctaaataacatgcttccaaatctgatactgaagaagaaactacaaaggtacaattcgtccaccttattttaaaaattgataaacacaagtacatttgtaaaatgagcgtataaaaatgctccttttcccttttataggaccaaacaacgatcgatggacaactcaaaaggaaaaaaaataatatgccctcaatggaagctcctccaaaaagaattggagcatgcacatacgagtagcagagtagcgacattacattatgggggagaagatctcccataggtggggagctgggaggtacagttgttgatggcgcccacgacgcacaggcccttgacaccatccttgtccttgtagtcccctgacaaaacagaaaaaacgacgcatgatgaccatgagcacaagattgcgtgtcagattcatcttggaacgaggggcgtggtcgcttaccgtcgtagttgtaggtgcagaggaagtaagaagaattcgttaattactgttatagagaataaaatgaagtagatggcttaatctaggctgtcgaatgtcattatcat

SEQ ID NO: 201695 - DNA, 3245 bp, Zea Mays
ctctacttaagtcacttagggtatcatacacagtttgggttctttggatgatgactatcttgctcctatccaagctgatcgagaaaaagagttgaagtttgtgcagtaggttgaactccacagggtagaggaagctgcagcaagagaggctgctcttgaaaatcaaaagaaagaaaagaagctaaaaaagaacacaagggagaggtagttcacttagtactatcaaagtcaaagttgcagaatatgattgagattcatatatctacttatacagtttagtaagctacagcttggttcggtaaattgcagaacatcatgaatcatgacctcttatgcatggatggtaaattatttttagtttacatctcagtgttcattttacttaattgaccatcaatagcatggagtaccaaattttcttcgtcttaggaaatatatcctcattacttgtgcgaacctctcaacttatggaatgatacttagactgctctctttcgtctaggttcatttgatcgttcttttactgtattaatacaacttctattttcaagctactaagaaagctgctgaaattggacagctgaacgatggttatatgtttgacacatcaaccgacatgtcatgaatgtgaagataatacaccctgccctccattgacccactacattttttgttatattttgcgttttttgacattagttgcttataggttagattccccaacatgtccagtttgtccgcaaggtttttgtggggatttcaaacaaacattaaccccttccgggttggattggaaaatggactgcggactgccttataatccttgggggcatgctgtgcacgacatggccaccgagagccgatggatgccagatgagaagaagctggcttctgctgccactgagaaattcgaagaggaagataatacctcctattgtcaacagtgatgtgtcaatggagtgtgtatagcatgaaaaaaccaaacatgacagttcaagagagacatttcagaactgcttagtttgtatatcccatgagttatctcctaacatcttttaactgcttcaacattgcatcgaaagcaatataggcatgcctgatgatggagagatagatattttcatcgaagctgtcggtgacatgctatttgagttgcagaaacatttcatattttctattattatatacataggtttttgtatggaggtactgaaagccccctcctgaaatatagtatgattaccaccttctctacaatcctttttttgtttttgttttatttttacgttgaagcaaagaaccataaaatatctgtttggaagggacgagatttgaaggtgatgaggctccttaaagaaggtttaatggaacaaatattagcataaggagtttgctggccatgtcaaaatctctatgggcagattctaactagagacctctaaaggttcaatgagatgaacattcatcaagtcttcgtctagatagaatctcatggtttcaagactgccttcaggttttgccactcactatttggaaacgtcagcagctaatttggacaacttgcaccttctatctatcttcaacaactaatttcgacaatttctgactttcatttagaacaagtatgattttcaattaaacaaaattgttacctattgtcgtaagcctctacaatataaatctcatttcttgattgctattttttcgcatcatcacccagtcatctactatttcggaattggaagaaggtgcattgtgcattctaacagtctgcaacttcattcagaacaattatggtttttcaataaacaaactcttacatattttttccatactcatcagagcgcacatccctcctaaacctcatttcttactcgctgtttcgaatcaagaacaaccgttttggacagcttgcagcttctatacagaacaggtacacatattacctgttcaatgccatgttatgcatagaaaagtctatgttttcagatttaattaccctgagatacattattatttctttactacttccacttcgcttgaacccgcataagacgcataactaaaaaaacattccttccttactttttcccaacgcgtggttaaatactattatgaaacctcaacagcaaattcagacatcatgtaacttctattctgaaaaagagtatggttactagaccaaatattatatatttttacaaccatgtgtcacatattactccattactcatgttttgtttaaacaaataactatgcatacctgctcaccacacataaaattaatcactcctcttatcaacggtcatccatcattattgctacaatacgcatggtcatcagatttcctatgtaattaccatactttaacctctatgtacatgtaaatatgtgcttccaataggtgctcaagtacatacgatcgataccatgttgttatgcataagtacatttacacacacatactctatactgattgacatctattgatccccctactattctcttgaacctacacacaatttttaaatgtatcttatattaagatatccttagcgtttgcgttcttcatcaacgtacaaactacaaatctaatttcattcttacttcattttcacatgtttacattctaatttgaatcgacgacaggtcatttgtacatcttgcaacctgtacatactccagatacgctttgtccgataagcacaaatattacctttatagtatgcatcttcaggtttttccactcacgcctcaaattttattccagcctttgtatctcatttcaataagtagctgtgctcagctgcttaccacacatcaaaaaggaccaaacaacgatcgatggacaactcaaaaggaaaaaaaataatatgccctcaatggaagctcctccaaaaagaattggagcatgcacatacgagtagcagagtagcgacattacattatgggggagaagatctcccataggtggggagctgggaggtacagttgttgatggcgcccacgacgcacaggcccttgacaccatccttgtccttgtagtcccctgacaaaacagaaaaaacgacgcatgatgaccatgagcacaagattgcgtgtcagattcatcttggaacgaggggcgtggtcgcttaccgtcgtagttgtaggtgcagaggaagtaagaagaattcgttaattactgttatagagaataaaatgaagtagatggcttaatctaggctgtcgaatgtcattatcat

SEQ ID NO: 201696 - DNA, 1444 bp, Zea Mays
agacttggattcattggcaatagaaattatagtaaaaaggtccaaagaaagcatgtatacaaccttaggcaggtgatattatctggtgactctgaaagctgcagtgaacaaattttccagtacatgcaagcggtagctgatgaaattgttttggtaaatgttgacccccaaaagccacccaaggcatggaatctggtaaagcttttggatgaatttgttagtctaggcggaaaactgagtgaatcattcaaggacatccgagagcaaaacctccaatcagcacttgagcaaatgcaaggttggggtcctgtgaaggctgatagtttcgcccttccaaacatgccgttgccgcccgattcattcagaggaattcgaaaaagaacatcttcaataacgcggtggttttccatttgtgttgatgatacgtcaaagaaagggagatatacaaacactgtgaatctgctccggaaatattttggggattttctaatagctacctacttgaatgccgtgcaagagtcccgttatgacgatgcttatataggtggaattgagagggaagtactattgaagactcttgatacattatggaaagaccatttggtaaacatgaacaagcttagttctgctgtgaacgttcggagttttggacacagaaatcctctggaagagtacaagatcgatggctgccgcttcttcatctcaatgttgagcgccacacgacgtctcaccgtggaatcccttgtgcactactggtcgtcgcccatggagtccgaggagatcttcaacacagaggatcaatagcagaagacctgacgtggactggtgctgcaagttgtgggcaggttaattagcagagaggcacaggtataaacaggagccgcgcgcggcgtgtgttaaccctgtaaaatcacaagctgacatggccacggttgcgtcgatttcgcgctgtggctgtgcacctacatataaaactaagtacatctcaatgcacaagagggtagtaactggataggtgtggactgcaagacagtctgatccatcccacatcagcaatacggcgttgccgcaaagttggcatctcgttcacagtgtactgtggtcctttagcctgtcatgatgatgaaaaagtccgctctgtacctttttctttcatcgctcgtcagacggaacaggagagtgcggaatctcttgcttgtggatgacgaactcttcgtgcaggtaggtacgcagcctagtggtcatgctttgacattgccaaatatttggtttttaattttttttcgggcgtgtgatggtggcaatttgtaagtaaaaaactctagggagtatggtaccgatttaacctgtgtgtactgctgcagttgcaacaatatactgtacaaaaagtagaagcccgtgaattaaagcttaagtctcctggatgctgctggttcgttttttt

SEQ ID NO: 201697 - DNA, 1435 bp, Zea Mays
ggttgatctcgtgcgctttgctccgccatggtgtcccgcggttgtttagctaagtgtctgacagttcataagaggtacccttttgggaaggtcctcaccatggatctatcccaggcactgacctcatccagtgatgatgaaaccagggcacttggtacattgcttgatatgttcagcagttccttttcacttgatgatatagctgatgcatatatcaaagcaaatggcgatgttaacaaagctggagatttcttatacgaccttcaacattcattgcctcataccaaagatgttgagtcaagtgtcgaggctaacctttcccatactgacaaggcagttgaagaaaactgtatggacaattcaagccaaccaagaactcttctccgtactgagcaggcagttgaagaaaatcatttcgagaattcagatcacacaaaaatgcctgaaaatctgcataagtctagtgctgcatttggtactgtctccagcatgttaagaaaagagtctatcagggctacaacaacagcgagtagagcatcaaaaaaaggcaaacctcttagggttgaactgccagagtacatgcgggatgattttaaggtgacatctgatgaatctgactctgcaccgaggagagagactttgaataacagggatgttgaggagtttctgttttgcatgcttggtgaaggatttaagctcagtaaagaattgatccatgaagttctaggcagctgtggatatgatattaagaaggctgctgatgctttcagggagggtaaccagaaagaagtcgattatcttatacaggaaggcaagcgctattatcagatggctcgactcgctgatgagaaatctgctagggagattatcaagcccagggaaacagagtcaaaaaatgaattttgtcttgatctgcgcaaacaagatgcaggaaatgtatctaatctcttgagactccatcttaaacagttggcaaacattccatcttttgattacctgagagttattattggtattgacgacagcagtttcaagatgggacaaagaagaagaaaggtgatgaagtatgtggaaaagaattcactccagtggactgaagaagaacctcgctctgggaacatcctcatccggattaatcaggtggaaaatcggcagggataggttcatgtatacaaaggtggcgtgacacaaggtgacagaagatggatcgtagatcttaataagtgccgttttgaatcaaggtgatgttctttcggcacagggagtcatgtaattgctgcattgctgacgtaatgtaaccagcaatgcagcaattaactcgaaacgtctgcaatgtatgcacaaaaagaataccattcatggcaacttgaacatgtggacaatggtttctgatatctcaagggtcctttgcagtttcgaaactggtttcttcttt

SEQ ID NO: 201698 - DNA, 1231 bp, Zea Mays
cccaaaccttttcacccctcgtcgtcctcggctaatccgccgcgcctccgatactcccaaggcagcgctctcctcgtgctgcgaaagcagcagcagcaagcgagtagtcaccaccatctcaaatcttcccctccacgctccctttcccttcctctacctcccctaccccgccgccccgcaatggccggcctcctccacctccagtccacgcttctaccctcggcatccgctctccgccgccgcgcgggcgcgccggtgccctgttcgtcccgccgccgatgccgggtcgaggccaagatccgggagatcttcatgccggcgctcagctccaccatgaccgagggcaagattgtctcctggacggccgccgagggcgaccgcctctccaagggcgaccccgtcgtcgtcgtcgagtccgacaaggctgacatggacgtcgagaccttccacgacggcttcctcgccgccgtcctcgtgcccgcgggcgagtcagcgcccgtcggctccgccatcgcgctgcttgccgagtccgaggaggagatcccggtcgcgcagtcacaggcggcctccttctcctccagctccccctcgcctccgcctccgcaagaaactgctcaagaagcatccccttcgccgccgccacctcctccctcggcgccggtggcagtctctgctcccgcgctaccttcgccagcaacacaaggcgggggacgtgttgttgcttcaccctacgccaagaagctcgccaaggacctcggcgttgatcttttctctgtcacggggtcaggccccggcgggcgaattgtagccaaggatgtcgaggctgcccttgctgcgcccaagaaggccgcaccagtgactgctgcacggccggatgtgccattggggtcgacagtaccattcacgacaatgcagggtgctgtcagcaagaacatggtggagagtcttgctgtcccgaccttcagggttgggtacaccatcacgactgatgccctcgatcagctctacaaaaaaattaagtcaaagggggttacaatgacagcactgttggctaaggcgacggcaatggctctggttcagcatcctgtggtgaactgcagctgcagggatggaaagagcttcacatacaacaaaagtataaacattgctgtggcagtggccatagatggtgggttgattacaccggttcttcaagatgctgataaggaaatggaaggagttggttgataag

SEQ ID NO: 201699 - DNA, 1308 bp, Zea Mays
aggagcccactcttgggcatacctcagttccaaaaagctcgcaacagccagccctaggtctgaactctctcggacgggtgacaggctgacagccgccgcccgccagctttggagagccacggtgacaggccgccagcagccatcgacggccctccctccacctcgccgtcgtccctcttcccccatctcgccgagccatcgtccctccacagcaggaccacctcaccgagccgtcgtccctccacagcaggagtgcaggaccgcatcgccgagtcgtcgtctctccacaccaggttcgccgtcgcggcgcggctacctcgctccggctcccagctcgtccggtccagctcactcgcggtcgcgaccatctccgtccacctcatccctccggcaagcagttgctaaactcatccagggtcagatcagcagctcttgccttatcccgctggctggccgcagcaccggtggtgtggtggaggatggcatcgaaatacgtggccagggtaccgtctccatggtgggcgccacaacgtcgtttggttggttcatgggtttccgtctgctcggtaaaatgcggtgcattgggaggacgggatgttgtgtgcgctgctgttagcttcagaccatgcatcgacattcacaaggggaaagttaagcagattgttggttctactcttcgggattcatccaatgatggcatggaacttgtgacaaactttgaatcagacaaatctcctgcagaatttgcaaaatcatataaagaagatgaacttcttggaggacatgttataatgcttggctcagatcctgcaagccaggctgctgcactcgaggcactacatgcatatcctggtggcttgcaagttggaggtggaataaatttgcagaatgcaatgtcttaccttaatgaaggggccagtcatgtgatagtgacctcttatgtgcttagcgatggcaagatgaacattgaaaggctgacaaaacttgtcgagctggttgggaaacagaggcttgtgctggaccttagctgtcgaaaaaaggatggcagatatactattgtaactgacaggtggcagaagttcagtgatgtgtttgtggatgaaccggcattagaatatctcgctgccttcgcagatgagtttttggttcatggtgttgatgtggagggcaaaaggatgtgaattacaggttagggattgatgaggaacttgtggaactattggggcatcattcaccagtgcgtacagacttcaaatttggacttccagttttcttttctggatcttcgtttcattctttatatatttt

SEQ ID NO: 201700 - DNA, 1445 bp, Zea Mays
tgtattggttatggctgcttgaagtttccatgatttatttcatgtgttggcgtctcctgcaaaacgagatatgcacataattaagaattttctaggatgataaagcagtgatgggtttgattgattaactttaagttactaagtttgccagggagacaggagacacccaaacgctttcagatgttgatataaatattattgctttggcttacatgttagaagctgagatccatgggactagccatttgcgagagcaccctcctcctctgaaaattctcgaatacttcctctgaagaatattgagagtcaagatatcttcatgtgtgataccaacagtctttgtggggcacaagaggatatagagctctagccatcaaagaaggatgcacctgttgcatgggaggacgatgagaacgatgtaggttggatgcatgctattagccatagcatgcacagaagatatttgcagaggaaggcaaggcgtgatgccctcaaggaatctggacaaagttttgagacaagttctgttgttccatcaattgatgatgataaagttctctctgaaaatagtggattggagcatggtctgacttcaactgatggcctttcttctgtctctgagataattagtgcacgttctgatgattttgaacatcaagcagagaatgacactgaaattcctggagaacatttgcattctgatcagcgagcttacggtgatgatgctgatgcgtgcaccaaagaattggaaaacctagatatagaaggtgaggatgagggaggtggtgatgcacatttcattgttgatgagagcaacgagcagagttggaccctgaggtccttatctgaatcgagcattccacgttattcactatgcaaagaaagagacgtgaacttgaagtatgagaaacataaaaggtttaatgctactctttgcacttattgcaactatatttatttgcttttgttcatggaaggcttcaacgtgtggttctttttaagaagtccatggtcaatgggtcagtatactgtcacagaaaccgacaacacacatcgcaaaatcttgggcgtagagtttttttttctagactctagtaataagctgcaagaaaatctaaagatgcgtaatcatgtaatttgggggtcacttctttcagcttgtaattaaattagctcctatgatgtgggagcacgtgtgctgatctcaaacttacatgctgaaggtggtcagtgggatgacacagaaaataagagggcagatgggaagagcatgggtatagagaagtctcctgaccatagcttcatccaagtagaaacattcataatttagtttagcatgaatatgatatttgcctgcaatagacgactaacaagagtgatgccaaccaatgtagtttctgatttactgggcatgagccctcatatttcaatttccatagacatgt

SEQ ID NO: 201701 - DNA, 4034 bp, Zea Mays
tttagcctttcttttcttgaaataaatattgttttagcctttcaaagggtgttcagcttgcgatcttcgcttggggcattgacctcacccaagtcttcgtcttccttctttggcagctgccagtttcatacaccactatttttatccagatccatccttggatttctcttcattccagatacatcttctctaaagcctaaaccccttgctctcttttcttccgatgtatagttggagagggcagtttcacctgcgaggctgaggtgagcaaccattgttggagagcaagcagccacatggccagcaccgctgccactccggaagcaggcagcaatcacagtgaagacggcaccacagtggagcttcccatcgtcgtcaccggcagcaccagccaagaatccattgatactccatccaccaggtacttgttagcccctagccatgtatccagctccagcttcaccgcagacattgagctcctgtggagactgcggaagtacctgctgcttcttggcatcttagctgttggtgttacatacaatgctggattgaccccacctggagggttctggtcgaagaacacacaagggcaatctggacatgaagcgggtgaccctgtcctccgggctctcttcttcccacggcacgagcctgatgggggcctatgctgctggaagctgcagggcagtgaagtcctccatctacatctgggttctggtgctctctgttttcacatatattatgatccacatcctagtgttcatgaaagttgttccaagatttgtgtccgagaaaagatttgttccaaaacggctgaaagatgtggcgcggtctgtggagcgctggatcctatcccggtgtggtgttcacaggagtgaaaagaacagctctcacgagaaagatctagaggaagctcgcaagttcactctggtgcttgtgactttcgctgcaactgtggcataccaagcagggttgagtccaccgggtggtttttgggctgaaaatgatgagaacaaaactccagctacatctatgcttcgctctggaaaccttcctcgatataatacttttgttgtttgcaactcgacttccttcgttgcgtctttggtcacaatcatactgcttctaagcccagaactgagtcggcatggcatcagatccagagcggtgaccgtgtgtgttgttgtcgacatattgggccttgttggagcatatgctgcaggaagctgtaggagtgtggtcacatctgtctctgctgttttagtggctgttctagtatggatctgctttgcagttttagctgggatctttgttaacagatctgtagcagagtggtttgggaagaagatcaagccagatattatgaggtgcatcgacagatttggccgggtcttttcgtcgaaccatggcagaaagagatcaagaaatccggagggagagaattctattgcaagtcatcagcaaactgaagagagcataaaaggtgaagcagaagcagaaactgctagagtgccagaataccagcttccataccatcagctagctccagatattgaagagggtgaatgccctggggagcagcagagtccaggcaaacaacaacctacaaacattgaggttgtgtccatctcagagcatgcatctgtaaatgagaagcaagcagaaaatagcagcagtgtcatgtgcaagctgggaagtcagtctacagacccaaattcagctgcaaacgaggctatgactgaaactgaaacagaaaacatacaagatgcaaatatggaggaacaacaatcttccttggtggatggtcttaaaactcccactactgtggctgatcaagaatccacaaccgtggagtgcttgtccgacattgcacccaataaccataatggagccaccaacagtttcaaggaagagaaagaagcttcggagcagcatttgcaagccaatgagattgagagtttcagaaccaataatgtggccagacctgttgaaaatggcaacgttggcatgtatgaagtaactcccagacaagacgacggtgatgtaaatgctggtgccaatccaactgatgaacatctgaagaagtcccggacatacctccttcttctagccattcttgcagtatccctggcgtatcaatcaggtttaaatccaccaggtggtttctggacacaaagaggtaccaacaattcacctaagagcacccatcatcgtccctatcatttaccgggtgatcccatccttgaggatactcgccatcgacgctatattgcattcttctatttaaacgccatcgcctttgtggcatcccttgtcatgatcatcatgctcctgaaccggaggatgagctacaagggcataaaacgatatgcgctgcagatggctatgatagttgatcttcttgctctaacagggtcttacattatggggagtagtagggggacgaagagctccatatacatatggctgttggtatgccttgtgctggtttatgttgctgttcatgttctgatagcaacacatgtaatccctgaagggtgcaagaaggtcgtggcacagaagattgagaatttctcctgcagatacatatggacaaaggcttcgtttcggaaccggggaattgatggtaatggtagtgattgtgaggctgggcaaagccagaggagtgatgccgatgacaagacctgggagcggaggcgcaatctactgttgatgcttgctgttctagctgcaacagtcacgtaccaagctggcatcaaccctccaggaggtgtatggtctgatgatagctcagccagtggtaaaccaggagacccaatccttcagcacaacaattccaagcgctatgatgttttctactactcaaactcactctcattcgtggcatctgtagttatcacaatactgcttgtgaacaaggaatcctgcgagcatggtatcaagtcctatgcgctaagagtgtgtttggtggtgggcttggtgagcctcttgattgcctactctgcaggaagctctaggaaagcaagagaatctatctatctcatcgtcattgctgttgcagttctgattgctcttgtgattcaagtgcttcttctctcctgtacgcaagacagtctcagaggaccaactggacagtttatagaacgtctgctccagctgctttttgggacggacaaggcctggcatggagacacttctaaacagaaagaaagctcaggtcgtcccgagaaaaaagttcggaagaggcacaagtatttgatgctgcttgcagttttagctgcctccatcacgtatcaagctggtctcaacccacccggtggtttctggtccgacgacaatgaaggccatgtggaaggcaatcctggcctgaaaccacctggtgccttgtggtctgataacaaaggtcatttggcaggcaatcctgttctccttgatattaatcctcggcgctacgaaatattcttctgcttcaactctatctcgttcatggcatctattgtcgtagtcatgttcctgttgaacaaatctgcccggaagaaggccgtgccacttgaagtactgcacttgatcatgatactggacctgctggccctcatgactgcttttgctgctggaagctgcagaaaattcaggacttcagtctatgtgtatggtctagtgctcggtgtcgtggtataccttgtgatcgcagttcttttgtcaagtggcattgcaaaatgtctgagacccatggatagaaatagggtttcctctcagagaagtcctattcgcgctcctacagcaagcacaaggatacttggagaccatgcttgatggttccattcctttggtaatagtactagtttaatagtagtgtatgtatttggcttttcagtgtacgttatgttgtgggagtttgaattgaactgaaattcgacgctttatgttgttcatttcttttagaatgtaaaatcagtgcaatcatgaatctacatgtgtatgacgaaggttccaatgtatgcgatggaatgaaaggaaaattggtgccatagttt

SEQ ID NO: 201702 - DNA, 1816 bp, Zea Mays
aaggccgcataacttgagcccaattaccaaaatgacaccaaccgattaaactcacagcccaactcctcttctcgccctcgtctgacttcgtttcggacctccccagtttttcccctccggccgccgccggagaagcagaagccatgcaggtcgccgccgcgcgcgcccgccgcctcctcgccttaccggcggcctcggggatccccggaatactctccggaccgatcccagggcgcgcatcatgcgccgagggcgttctcctttaccgtctcaatggcgctcccgcttcgccgtcttctccgcagcataccaggggcttctcctcctcctgcttcgcctcccgatcacactgtaacctcccatcgcctaccatagcttctcaatggttgaatgagaaatcagtacactgtcacatgacgacagcacacttctcaacggaagcaagtgacatggaccaccctacagaagctgtagaggagatgtaccagaaaatgttgaaatctgttgaagctgagaccatgcctccaaatgcctggttgtggtcaatgattgatagctgctccaataaggaggacatcaaacttctttttcaaattttgcagaaactcagggtatttagactatcaaatcttcgcatcagtgcaaacttcaatgagcatctctgcagaaaagtaactgaggcttgtgctcgtgtaggcgccgttgactatgggttgaaggctttatggaaacataatgtttatggaataacaccaacgattggttctgctcattatctactgcaacatgctaaagagcaaaatgacaacaaactaatggaaaacgtaattcatgtcctatcaaaaaatttcttaccgctgcaaccaggcacagctgatatagtcttcagtatctgttataatgctgatagatgggatttactctcaaaatacgcggagagatttgttaaggcaggtgtcaaactgcatcgagctgcatttgacatttggatggactttgctgccaaagttggggattctcaatctatttggcacattaatagtctaagaggcaggtctgtcaaacattatacacttgcaacagggtttgcatgtgcaaaggggtctctgcttgatcggaagccagaaaatgccgctgacaagattaagcttctttatgaggtttggcacaggcatttgcctgatcagaagaaaccatttgtgaaagatgaactcgagaaacttattgctggatggcctacggaggtggtaaagaggcagaagaaagataagaggaaggagttggaggaagctttgatgaaggacatccctacgatggtggactgcctgacaaagtccggcctcgacatccctgtggaactggacaagcttgccaccccacagctccaagtggcgtagcaaaagaaggcgcgcggctcgccatacaaccggaacagacttgagtctcgaggaacagcatgcattttggtttggcactgatgcaggcagcgcagcgcagcgcaggacgcagattgaaaatctgtgatagatgaaatcatgtttttatttctgtttctaatgttgtagtgcaggcccgtgcgtggtgcgccctttctgttgtgcgttgaccgttgaaaatctgtgatagatgaaatcatgtttttatttctgtttctaagaagcaaattgccgtcgtatcttggcacgtgttgtaactgtacccatcctttctccaaggactttctaatctgttattacttttaatattgcattaatagacctagtcgcgaaaggggtaagtttcagttttgcatcaaaaaagatgtgagcattgaatc

SEQ ID NO: 201703 - DNA, 2639 bp, Zea Mays
cgccaagctccctctacgcacctgcctcctcctcggcccggatcccgccgccagcgcctgttatggagatgaaggcgtcggcctccgatgaaaccctagccgccgtcttggaccacctcaagccccacaccgtcggcaccttcctcccccctcgtgcgtgggacgacgacgagcgaaagcctccggccacatcttgagcgacggcagctcccccttttcgctgcgccgtccagctccccctcccctcgcgcacatgtccccaccacgctcgaatccttcagctcacgcgaccgcgactgcgaccccttcacctccctctgcaacatctagggttcgggtttgggtattggattgagcgggttcaggtagctgcgggagaggcggacgtgcggcgcgtccccctgcggcgtgccgaagatcttgacaactcgcatggccatctagggttggggttgagcgggttcgagtagttgctggagaggtggtcgggcgacgcgtccctctgcaacatgccgaaggtcttgacggtgagcatggccatctcgtcgagctggtcctgcagctacgtgatgatgtcaatggattcaacccacatagcatgggccaggccagatctaaaaaatttgtgtgttgcccccgagagcccaacgacgatggtgttgtcgtcgttaagtgaggctagcactagcactgctgctttgcactatgaggttgtcgattttatcaagccagctttggggaagcttgaaggataaaatcattgttggttcaacatcatgaatgacacttggaggaacttccgaacttgaaccatgaaggaatatatcttattttatatcaatcttgtggcacataaacaatggcgacaaacatccaattgctttcgagagcttgaaacatctccaatagaggtttgctcaatttcccaagtttgtttgggaaagggaggctcatggagctatacagtgtactcggggccttctttcatcttaacgctattcgagatcgtgagtttgccagcaagccttatgtggggagcaagaggtggaagtgtccagcgctatatctgctccggcgtcgagttgctgctgtgcgtgacctgcaagtgcggcatccacaaggagtttagcttcaaccaccgtgtcagatcaagtagctcatgtccatcctcatctttgggtttcaggtaacctcccatcgcctaccatagcttctcaatggttgaatgagaaatcagtacactgtcacatgacgacagcacacttctcaacggaagcaagtgacatggaccaccctacagaagctgtagaggagatgtaccagaaaatgttgaaatctgttgaagctgagaccatgcctccaaatgcctggttgtggtcaatgattgatagctgctccaataaggaggacatcaaacttctttttcaaattttgcagaaactcagggtatttagactatcaaatcttcgcatcagtgcaaacttcaatgagcatctctgcagaaaagtaactgaggcttgtgctcgtgtaggcgccgttgactatgggttgaaggctttatggaaacataatgtttatggaataacaccaacgattggttctgctcattatctactgcaacatgctaaagagcaaaatgacaacaaactaatggaaaacgtaattcatgtcctatcaaaaaatttcttaccgctgcaaccaggcacagctgatatagtcttcagtatctgttataatgctgatagatgggatttactctcaaaatacgcggagagatttgttaaggcaggtgtcaaactgcatcgagctgcatttgacatttggatggactttgctgccaaagttggggattctcaatctatttggcacattaatagtctaagaggcaggtctgtcaaacattatacacttgcaacagggtttgcatgtgcaaaggggtctctgcttgatcggaagccagaaaatgccgctgacaagattaagcttctttatgagcatttgcctgatcagaagaaaccatttgtgaaagatgaactcgagaaacttattgctggatggcctacggaggtggtaaagaggcagaagaaagataagaggaaggagttggaggaagctttgatgaaggacatccctacgatggtggactgcctgacaaagtccggcctcgacatccctgtggaactggacaagcttgccaccccacagctccaagtggcgtagcaaaagaaggcgcgcggctcgccatacaaccggaacagacttgagtctcgaggaacagcatgcattttggtttggcactgatgcaggcagcgcagcgcagcgcaggacgcagattgaaaatctgtgatagatgaaatcatgtttttatttctgtttctaatgttgtagtgcaggcccgtgcgtggtgcgccctttctgttgtgcgttgaccgttgaaaatctgtgatagatgaaatcatgtttttatttctgtttctaagaagcaaattgccgtcgtatcttggcacgtgttgtaactgtacccatcctttctccaaggactttctaatctgttattacttttaatattgcattaatagacctagtcgcgaaaggggtaagtttcagttttgcatcaaaaaagatgtgagcattgaatc

SEQ ID NO: 201704 - DNA, 1552 bp, Zea Mays
gttgctggagcgcatgcagattcgacaagaggtatacgaaatcttgagtgagctgtacgtccatttggaagtagcaaagaagcaactcctgatgatgcaactgtaaggacaatctttcttatagctctaagcagttcgaatatattggttcctgattattgtgtctcgtcatggatttattgcgttcattgaaccagaaaattgcatcgcagtgtctacatttgtattctagtttaccaagatctttttgttggagggttcacagtttttagacatcttcctctttctaatcctttcaccgcgtcttattttactctcttctccaaaaaagttactgctctgtaagacttgctcacttctttttcttttcgtagggtggtcaatatcaatgccttgtttatgacttcttattattttccccatgtctatatcctatgtgatggatgcatgggtccaaaaagataaaatgaaaatatactgttagtaaccaatgaattgtacaaaaaatattatatgcaatgactatacattgaaatgcacacaactaaattaaagctatagttacatgcatagtacaattgaatgttacaaatactgcttttattagccagtgttatgtctttatttatactaatgctattcacatactatggagatttagaccattggaaatgcactttgtaatacttaacttggtgttctaaaacataagataggtgttctgaaacataagatatgaaattgcacttggtaatacttagtgtggtgttctaaaacagaagagaggtgttttgaaatagaagagagggtacatatttgagcatatgtagagcccaggtacctcgctctacaacatcaaggattatcttgtcattcataagagttaaaggccctttcttcagtctttcactattaagacacaatttcatgttgcaaagatcttcaatggatgatattgatgacgatatataagggatatcactcttgagccacataagcttgatgaagagattgttgaatctaatcttgagcttgaagcagactttgtacaatttaaatatgatgatcgatcacaaaaggtacttcattctgttgccacaaacatgtttagcgacaaggagatgtgctgctaagtctgtttttacatggaagatgggaaatggacataaacagtgaacatgaagaagggtgtgctagatggaaaggaaaccggtcaagctgattgaataagaagaagtctcttaactactataaatccatccatgaaatggagaagattaatgctaagccacttcaagaaaaaaggttgggtctagtcgttgttgtctctatactggcaaagggaatgcggagatacatttcgagaagaaaaaggcaatgatatggaggtgttttgtctttcattgataaaaaattagaaatgagcaggtgatgaatgtcacatgaatatatttagctatttcaaatggaaaccaactttgttattgtactggcttttgttcataataaaaacacagaaggcaatggaaaatctacatgcaaatgttttgct

SEQ ID NO: 201705 - DNA, 1450 bp, Zea Mays
tggagcgcatgcagattcgacaagaggtatacgaaatcttgagtgagctgtacgtccatttggaagtagcaaagaagcaactcctgatgatgcaactgtaaggacaatctttcttatagctctaagttcgaatatattggttcctgattattgtgtctcgtcatggatttattgcgttcattgaaccagaaaattgcatcgcagtgtctacatttgtattctagtttaccaagatctttttgttggagggttcacagtttttagacatcttcctctttctaatcctttcaccgcgtcttattttactctcttctccaaaaaagttactgctctgtaagacttgctcacttctttttcttttcgtagggtggtcaatatcaatgccttgtttatgacttcttattattttccccatgtctatatcctatgtgatggatgcatgggtccaaaaagataaaatgaaaatatactgttagtaaccaatgaattgtacaaaaaatattatatgcaatgactatacattgaaatgcacacaactaaattaaagctatagttacatgcatagtacaattgaatgttacaaatactgcttttattagccagtgttatgtctttatttatactaatgctattcacatactatggagatttagaccattggaaatgcactttgtaatacttaacttggtgttctaaaacataagataggtgttctgaaacataagatatgaaattgcacttggtaatacttagtgtggtgttctaaaacagaagagaggtgttttgaaatagaagagagggtacatatttgagcatatgtagagcccaggtacctcgctctacaacatcaaggattatcttgtcattcataagagttaaaggccctttcttcagtctttcactattaagacacaatttcatgttgcaaagatcttcaatggatgatattgatgacgatatataagggatatcactcttgagccacataagcttgatgaagagattgttgaatctaatcttgagcttgaagcagactttgtacaatttaaatatgatgatcgatcacaaaagtgaacatgaagaagggtgtgctagatggaaaggaaaccggtcaagctgattgaataagaagaagtctcttaactactataaatccatccatgaaatggagaagattaatgctaagccacttcaagaaaaaaggttgggtctagtcgttgttgtctctatactggcaaagggaatgcggagatacatttcgagaagaaaaaggcaatgatatggaggtgttttgtctttcattgataaaaaattagaaatgagcaggtgatgaatgtcacatgaatatatttagctatttcaaatggaaaccaactttgttattgtactggcttttgttcataataaaaacacagaaggcaatggaaaatctacatgcaaatgttttgct

SEQ ID NO: 201706 - DNA, 1674 bp, Zea Mays
gttcgcacacaccactggcgatcgactgtcctcgtgcatctccattctccgccagctactcgcgacctctccacgtcaagcactgcgcatgaggatcggtcttctccacgtgaccatgttgagcactacgttagacattgccagctcgcccaacaggtatacgaaatcttgagtgagctgtacgtccatttggaagtagcaaagaagcaactcctgatgatgcaactgtaaggacaatctttcttatagctctaagttcgaatatattggttcctgattattgtgtctcgtcatggatttattgcgttcattgaaccagaaaattgcatcgcagtgtctacatttgtattctagtttaccaagatctttttgttggagggttcacagtttttagacatcttcctctttctaatcctttcaccgcgtcttattttactctcttctccaaaaaagttactgctctgtaagacttgctcacttctttttcttttcgtagggtggtcaatatcaatgccttgtttatgacttcttattattttccccatgtctatatcctatgtgatggatgcatgggtccaaaaagataaaatgaaaatatactgttagtaaccaatgaattgtacaaaaaatattatatgcaatgactatacattgaaatgcacacaactaaattaaagctatagttacatgcatagtacaattgaatgttacaaatactgcttttattagccagtgttatgtctttatttatactaatgctattcacatactatggagatttagaccattggaaatgcactttgtaatacttaacttggtgttctaaaacataagataggtgttctgaaacataagatatgaaattgcacttggtaatacttagtgtggtgttctaaaacagaagagaggtgttttgaaatagaagagagggtacatatttgagcatatgtagagcccaggtacctcgctctacaacatcaaggattatcttgtcattcataagagttaaaggccctttcttcagtctttcactattaagacacaatttcatgttgcaaagatcttcaatggatgatattgatgacgatatataagggatatcactcttgagccacataagcttgatgaagagattgttgaatctaatcttgagcttgaagcagactttgtacaatttaaatatgatgatcgatcacaaaaggtacttcattctgttgccacaaacatgtttagcgacaaggagatgtgctgctaagtctgtttttacatggaagatgggaaatggacataaacagtgaacatgaagaagggtgtgctagatggaaaggaaaccggtcaagctgattgaataagaagaagtctcttaactactataaatccatccatgaaatggagaagattaatgctaagccacttcaagaaaaaaggttgggtctagtcgttgttgtctctatactggcaaagggaatgcggagatacatttcgagaagaaaaaggcaatgatatggaggtgttttgtctttcattgataaaaaattagaaatgagcaggtgatgaatgtcacatgaatatatttagctatttcaaatggaaaccaactttgttattgtactggcttttgttcataataaaaacacagaaggcaatggaaaatctacatgcaaatgttttgct

SEQ ID NO: 201707 - DNA, 1094 bp, Zea Mays
tctccgccagctactcgcgacctctccacgtcaagcactgcgcatgaggatcggtcttctccacgtgaccatgttgagcactacgttagacattgccagctcgcccaacaggtatacgaaatcttgagtgagctgtacgtccatttggaagtagcaaagaagcaactcctgatgatgcaactgtaaggacaatctttcttatagctctaagcagttcgaatatattggttcctgattattgtgtctcgtcatggatttattgcgttcattgaaccagaaaattgcatcgcagtgtctacatttgtattctagtttaccaagaagagaggtgttttgaaatagaagagagggtacatatttgagcatatgtagagcccaggtacctcgctctacaacatcaaggattatcttgtcattcataagagttaaaggccctttcttcagtctttcactattaagacacaatttcatgttgcaaagatcttcaatggatgatattgatgacgatatataagggatatcactcttgagccacataagcttgatgaagagattgttgaatctaatcttgagcttgaagcagactttgtacaatttaaatatgatgatcgatcacaaaaggtacttcattctgttgccacaaacatgtttagcgacaaggagatgtgctgctaagtctgtttttacatggaagatgggaaatggacataaacagtgaacatgaagaagggtgtgctagatggaaaggaaaccggtcaagctgattgaataagaagaagtctcttaactactataaatccatccatgaaatggagaagattaatgctaagccacttcaagaaaaaaggttgggtctagtcgttgttgtctctatactggcaaagggaatgcggagatacatttcgagaagaaaaaggcaatgatatggaggtgttttgtctttcattgataaaaaattagaaatgagcaggtgatgaatgtcacatgaatatatttagctatttcaaatggaaaccaactttgttattgtactggcttttgttcataataaaaacacagaaggcaatggaaaatctacatgcaaatgttttgct

SEQ ID NO: 201708 - DNA, 3196 bp, Zea Mays
tggttgaagtgtatatatagcttcttgaggaacttcagcgtacatcgcagtcccctataaagttaaattgttatagatttaagttgtgctaaacgataagacatttttatgcatatattagggctgttagacaagttaaatggggctgaatagaatgcttcattagatgaagaagggagtacaatgtatagccagaagggtgcaacactagggaaggtgtggcatcctggctattagatcctgaataccgtaggtagcagcccctgataactatactaaagtagctgatcctagatgctatataggactgcactacctgctatgcttgacagaatttcgatacatatcctcttgtaggaggatggaaagaagcctacagatagtaattacaaattatagtaataatttgacaaggaccaagaagaatacatatacctgttgatcaataatcacaagatccaaatgtttgattggatcatcatcatttttgccatgaaattcccaaactcttgatatccgaacacaaatgatatagtggtagacccctggtcgaacttgtgatagtggtgtaatgtccatctgcaaatacaatttgttaaaaatagtatcaatttatgttgccatggctctcaatagattgtagtacttctttatacacaatattttctgttattgttccacatgaaccgtcgtcattttctatcaatattttgagccctttcttttctgtaactcgtgacacagctaaatatagttgaccgtgtgtaaacacctttttctttaaatataaccctacatttgatagtgtttgtccttgacttttatttatagtcatagagtagcaaaccttgattggaaattggcgttgacataatgtaaaaggccatttattgcccttagttgtcagattaatgcggggtatatgtattttttcgccaacgtgtgtacctgttattattgttccttctataattgtgtctcctagttgagttataataattctggttccattgcatagtcctaaactttgatttaaatttcgtagaagcattacaggagtgccaattttaagttttagtctatgagaagggaaattgtttgcgtttaaagtgtttagatactcaatagggtataaaatattggcatcatttggagcatctgtgcatttagatatgctatctgcactatagtattctctctctactgttggcaaaagagagataatataatcatttatttcatctacaacatcattagttgttgctaatatagctctttttttgatataatctggatcattatattttgtttgtaggtcaggataagtaaattgaactaatgcttgaattttatcctctgttgtttcaattaaaaattcttttggtatttcaatgagtgttgagtccgaggaaaaattatcgttgttgttatataccccatttccaatggcaaggatccaattattgaatgataacaagtcttcatactcttcatttgatatattactttgtcgtagtcgcatgttttcagaaaggaatataatgttgacatggttccaaaggtatgaagcaatgatacaagcatttattatttgttcttttgttccattttctataacaggtaatatttgttttggatcgccacctagcacaaccactttaccaccaaaaggaatgtcaagagctttttcatatgtttctcctactatatctctaagggatctatcaaatgcttcaaagcattgtttatttgtcattagagcttcatcccatataataagatctgtgtcaataagaagttttgcaagatttgttcctctttttatatcacacattgacaattgatccaaatctataggtatacgaaatcttgagtgagctgtacgtccatttggaagtagcaaagaagcaactcctgatgatgcaactgtaaggacaatctttcttatagctctaagttcgaatatattggttcctgattattgtgtctcgtcatggatttattgcgttcattgaaccagaaaattgcatcgcagtgtctacatttgtattctagtttaccaaggtatgatctgtcagtgtatgattctttcagttgctggatatactcggatgggaaatcaaccattccattatgggagttcaaaaatctttgtatgcagatctttttgttggagggttcacagtttttagacatcttcctctttctaatcctttcaccgcgtcttattttactctcttctccaaaaaagttactgctctaagagaggtgttttgaaatagaagagagggtacatatttgagcatatgtagagcccaggtacctcgctctacaacatcaaggattatcttgtcattcataaggtacgccgctctacaacatcaaggcttatctcgtcatttagattatgtaggctatatgcaaatattcgttatacattggttggattgcacccaatattctacttcttgtttaaatttttgatgctttcgttccaacctttatttttatactttctcatagtctgtcattgttgattgaaggtcacttttaagagctattgtcatattgattttcctcattatttatcttttttagagttaaaggccctttcttcagtctttcactattaagacacaatttcatgttgcaaagatcttcaatggatgatattgatgacgatatataagggatatcactcttgagccacataagcttgatgaagagattgttgaatctaatcttgagcttgaagcagactttgtacaatttaaatatgatgatcgatcacaaaagatgggaaatggacataaacagtgaacatgaagaagggtgtgctagatggaaaggaaaccggtcaagctgattgaataagaagaagtctcttaactactataaatccatccatgaaatggagaagattaatgctaagccacttcaagaaaaaaggttgggtctagtcgttgttgtctctatactggcaaagggaatgcggagatacatttcgagaagaaaaaggcaatgatatggaggtgttttgtctttcattgataaaaaattagaaatgagcaggtgatgaatgtcacatgaatatatttagctatttcaaatggaaaccaactttgttattgtactggcttttgttcataataaaaacacagaaggcaatggaaaatctacatgcaaatgttttgct

SEQ ID NO: 201709 - DNA, 3302 bp, Zea Mays
tggttgaagtgtatatatagcttcttgaggaacttcagcgtacatcgcagtcccctataaagttaaattgttatagatttaagttgtgctaaacgataagacatttttatgcatatattagggctgttagacaagttaaatggggctgaatagaatgcttcattagatgaagaagggagtacaatgtatagccagaagggtgcaacactagggaaggtgtggcatcctggctattagatcctgaataccgtaggtagcagcccctgataactatactaaagtagctgatcctagatgctatataggactgcactacctgctatgcttgacagaatttcgatacatatcctcttgtaggaggatggaaagaagcctacagatagtaattacaaattatagtaataatttgacaaggaccaagaagaatacatatacctgttgatcaataatcacaagatccaaatgtttgattggatcatcatcatttttgccatgaaattcccaaactcttgatatccgaacacaaatgatatagtggtagacccctggtcgaacttgtgatagtggtgtaatgtccatctgcaaatacaatttgttaaaaatagtatcaatttatgttgccatggctctcaatagattgtagtacttctttatacacaatattttctgttattgttccacatgaaccgtcgtcattttctatcaatattttgagccctttcttttctgtaactcgtgacacagctaaatatagttgaccgtgtgtaaacacctttttctttaaatataaccctacatttgatagtgtttgtccttgacttttatttatagtcatagagtagcaaaccttgattggaaattggcgttgacataatgtaaaaggccatttattgcccttagttgtcagattaatgcggggtatatgtattttttcgccaacgtgtgtacctgttattattgttccttctataattgtgtctcctagttgagttataataattctggttccattgcatagtcctaaactttgatttaaatttcgtagaagcattacaggagtgccaattttaagttttagtctatgagaagggaaattgtttgcgtttaaagtgtttagatactcaatagggtataaaatattggcatcatttggagcatctgtgcatttagatatgctatctgcactatagtattctctctctactgttggcaaaagagagataatataatcatttatttcatctacaacatcattagttgttgctaatatagctctttttttgatataatctggatcattatattttgtttgtaggtcaggataagtaaattgaactaatgcttgaattttatcctctgttgtttcaattaaaaattcttttggtatttcaatgagtgttgagtccgaggaaaaattatcgttgttgttatataccccatttccaatggcaaggatccaattattgaatgataacaagtcttcatactcttcatttgatatattactttgtcgtagtcgcatgttttcagaaaggaatataatgttgacatggttccaaaggtatgaagcaatgatacaagcatttattatttgttcttttgttccattttctataacaggtaatatttgttttggatcgccacctagcacaaccactttaccaccaaaaggaatgtcaagagctttttcatatgtttctcctactatatctctaagggatctatcaaatgcttcaaagcattgtttatttgtcattagagcttcatcccatataataagatctgtgtcaataagaagttttgcaagatttgttcctctttttatatcacacattgacaattgatccaaatctataggtatacgaaatcttgagtgagctgtacgtccatttggaagtagcaaagaagcaactcctgatgatgcaactgtaaggacaatctttcttatagctctaagttcgaatatattggttcctgattattgtgtctcgtcatggatttattgcgttcattgaaccagaaaattgcatcgcagtgtctacatttgtattctagtttaccaagatctttttgttggagggttcacagtttttagacatcttcctctttctaatcctttcaccgcgtcttattttactctcttctccaaaaaagttactgctctgtaagacttgctcacttctttttcttttcgtagggtggtcaatatcaatgccttgtttatgacttcttattattttccccatgtctatatcctatgtgatggatgcatgggtccaaaaagataaaatgaaaatatactgttagtaaccaatgaattgtacaaaaaatattatatgcaatgactatacattgaaatgcacacaactaaattaaagctatagttacatgcatagtacaattgaatgttacaaatactgcttttattagccagtgttatgtctttatttatactaatgctattcacatactatggagatttagaccattggaaatgcactttgtaatacttaacttggtgttctaaaacataagataggtgttctgaaacataagatatgaaattgcacttggtaatacttagtgtggtgttctaaaacagaagagaggtgttttgaaatagaagagagggtacatatttgagcatatgtagagcccaggtacctcgctctacaacatcaaggattatcttgtcattcataagagttaaaggccctttcttcagtctttcactattaagacacaatttcatgttgcaaagatcttcaatggatgatattgatgacgatatataagggatatcactcttgagccacataagcttgatgaagagattgttgaatctaatcttgagcttgaagcagactttgtacaatttaaatatgatgatcgatcacaaaagatgggaaatggacataaacagtgaacatgaagaagggtgtgctagatggaaaggaaaccggtcaagctgattgaataagaagaagtctcttaactactataaatccatccatgaaatggagaagattaatgctaagccacttcaagaaaaaaggttgggtctagtcgttgttgtctctatactggcaaagggaatgcggagatacatttcgagaagaaaaaggcaatgatatggaggtgttttgtctttcattgataaaaaattagaaatgagcaggtgatgaatgtcacatgaatatatttagctatttcaaatggaaaccaactttgttattgtactggcttttgttcataataaaaacacagaaggcaatggaaaatctacatgcaaatgttttgct

SEQ ID NO: 201710 - DNA, 2764 bp, Zea Mays
tggttgaagtgtatatatagcttcttgaggaacttcagcgtacatcgcagtcccctataaagttaaattgttatagatttaagttgtgctaaacgataagacatttttatgcatatattagggctgttagacaagttaaatggggctgaatagaatgcttcattagatgaagaagggagtacaatgtatagccagaagggtgcaacactagggaaggtgtggcatcctggctattagatcctgaataccgtaggtagcagcccctgataactatactaaagtagctgatcctagatgctatataggactgcactacctgctatgcttgacagaatttcgatacatatcctcttgtaggaggatggaaagaagcctacagatagtaattacaaattatagtaataatttgacaaggaccaagaagaatacatatacctgttgatcaataatcacaagatccaaatgtttgattggatcatcatcatttttgccatgaaattcccaaactcttgatatccgaacacaaatgatatagtggtagacccctggtcgaacttgtgatagtggtgtaatgtccatctgcaaatacaatttgttaaaaatagtatcaatttatgttgccatggctctcaatagattgtagtacttctttatacacaatattttctgttattgttccacatgaaccgtcgtcattttctatcaatattttgagccctttcttttctgtaactcgtgacacagctaaatatagttgaccgtgtgtaaacacctttttctttaaatataaccctacatttgatagtgtttgtccttgacttttatttatagtcatagagtagcaaaccttgattggaaattggcgttgacataatgtaaaaggccatttattgcccttagttgtcagattaatgcggggtatatgtattttttcgccaacgtgtgtacctgttattattgttccttctataattgtgtctcctagttgagttataataattctggttccattgcatagtcctaaactttgatttaaatttcgtagaagcattacaggagtgccaattttaagttttagtctatgagaagggaaattgtttgcgtttaaagtgtttagatactcaatagggtataaaatattggcatcatttggagcatctgtgcatttagatatgctatctgcactatagtattctctctctactgttggcaaaagagagataatataatcatttatttcatctacaacatcattagttgttgctaatatagctctttttttgatataatctggatcattatattttgtttgtaggtcaggataagtaaattgaactaatgcttgaattttatcctctgttgtttcaattaaaaattcttttggtatttcaatgagtgttgagtccgaggaaaaattatcgttgttgttatataccccatttccaatggcaaggatccaattattgaatgataacaagtcttcatactcttcatttgatatattactttgtcgtagtcgcatgttttcagaaaggaatataatgttgacatggttccaaaggtatgaagcaatgatacaagcatttattatttgttcttttgttccattttctataacaggtaatatttgttttggatcgccacctagcacaaccactttaccaccaaaaggaatgtcaagagctttttcatatgtttctcctactatatctctaagggatctatcaaatgcttcaaagcattgtttatttgtcattagagcttcatcccatataataagatctgtgtcaataagaagttttgcaagatttgttcctctttttatatcacacattgacaattgatccaaatctataggtatacgaaatcttgagtgagctgtacgtccatttggaagtagcaaagaagcaactcctgatgatgcaactgtaaggacaatctttcttatagctctaagttcgaatatattggttcctgattattgtgtctcgtcatggatttattgcgttcattgaaccagaaaattgcatcgcagtgtctacatttgtattctagtttaccaagaagagaggtgttttgaaatagaagagagggtacatatttgagcatatgtagagcccaggtacctcgctctacaacatcaaggattatcttgtcattcataagagttaaaggccctttcttcagtctttcactattaagacacaatttcatgttgcaaagatcttcaatggatgatattgatgacgatatataagggatatcactcttgagccacataagcttgatgaagagattgttgaatctaatcttgagcttgaagcagactttgtacaatttaaatatgatgatcgatcacaaaagatgggaaatggacataaacagtgaacatgaagaagggtgtgctagatggaaaggaaaccggtcaagctgattgaataagaagaagtctcttaactactataaatccatccatgaaatggagaagattaatgctaagccacttcaagaaaaaaggttgggtctagtcgttgttgtctctatactggcaaagggaatgcggagatacatttcgagaagaaaaaggcaatgatatggaggtgttttgtctttcattgataaaaaattagaaatgagcaggtgatgaatgtcacatgaatatatttagctatttcaaatggaaaccaactttgttattgtactggcttttgttcataataaaaacacagaaggcaatggaaaatctacatgcaaatgttttgct

SEQ ID NO: 201711 - DNA, 3072 bp, Zea Mays
tggttgaagtgtatatatagcttcttgaggaacttcagcgtacatcgcagtcccctataaagttaaattgttatagatttaagttgtgctaaacgataagacatttttatgcatatattagggctgttagacaagttaaatggggctgaatagaatgcttcattagatgaagaagggagtacaatgtatagccagaagggtgcaacactagggaaggtgtggcatcctggctattagatcctgaataccgtaggtagcagcccctgataactatactaaagtagctgatcctagatgctatataggactgcactacctgctatgcttgacagaatttcgatacatatcctcttgtaggaggatggaaagaagcctacagatagtaattacaaattatagtaataatttgacaaggaccaagaagaatacatatacctgttgatcaataatcacaagatccaaatgtttgattggatcatcatcatttttgccatgaaattcccaaactcttgatatccgaacacaaatgatatagtggtagacccctggtcgaacttgtgatagtggtgtaatgtccatctgcaaatacaatttgttaaaaatagtatcaatttatgttgccatggctctcaatagattgtagtacttctttatacacaatattttctgttattgttccacatgaaccgtcgtcattttctatcaatattttgagccctttcttttctgtaactcgtgacacagctaaatatagttgaccgtgtgtaaacacctttttctttaaatataaccctacatttgatagtgtttgtccttgacttttatttatagtcatagagtagcaaaccttgattggaaattggcgttgacataatgtaaaaggccatttattgcccttagttgtcagattaatgcggggtatatgtattttttcgccaacgtgtgtacctgttattattgttccttctataattgtgtctcctagttgagttataataattctggttccattgcatagtcctaaactttgatttaaatttcgtagaagcattacaggagtgccaattttaagttttagtctatgagaagggaaattgtttgcgtttaaagtgtttagatactcaatagggtataaaatattggcatcatttggagcatctgtgcatttagatatgctatctgcactatagtattctctctctactgttggcaaaagagagataatataatcatttatttcatctacaacatcattagttgttgctaatatagctctttttttgatataatctggatcattatattttgtttgtaggtcaggataagtaaattgaactaatgcttgaattttatcctctgttgtttcaattaaaaattcttttggtatttcaatgagtgttgagtccgaggaaaaattatcgttgttgttatataccccatttccaatggcaaggatccaattattgaatgataacaagtcttcatactcttcatttgatatattactttgtcgtagtcgcatgttttcagaaaggaatataatgttgacatggttccaaaggtatgaagcaatgatacaagcatttattatttgttcttttgttccattttctataacaggtaatatttgttttggatcgccacctagcacaaccactttaccaccaaaaggaatgtcaagagctttttcatatgtttctcctactatatctctaagggatctatcaaatgcttcaaagcattgtttatttgtcattagagcttcatcccatataataagatctgtgtcaataagaagttttgcaagatttgttcctctttttatatcacacattgacaattgatccaaatctataggtatacgaaatcttgagtgagctgtacgtccatttggaagtagcaaagaagcaactcctgatgatgcaactgtaaggacaatctttcttatagctctaagttcgaatatattggttcctgattattgtgtctcgtcatggatttattgcgttcattgaaccagaaaattgcatcgcagtgtctacatttgtattctagtttaccaagaagagaggtgttttgaaatagaagagagggtacatatttgagcatatgtagagcccaggtacctcgctctacaacatcaaggattatcttgtcattcataaggtacgccgctctacaacatcaaggcttatctcgtcatttagattatgtaggctatatgcaaatattcgttatacattggttggattgcacccaatattctacttcttgtttaaatttttgatgctttcgttccaacctttatttttatactttctcatagtctgtcattgttgattgaaggtcacttttaagagctattgtcatattgattttcctcattatttatcttttttagagttaaaggccctttcttcagtctttcactattaagacacaatttcatgttgcaaagatcttcaatggatgatattgatgacgatatataagggatatcactcttgagccacataagcttgatgaagagattgttgaatctaatcttgagcttgaagcagactttgtacaatttaaatatgatgatcgatcacaaaaggtacttcattctgttgccacaaacatgtttagcgacaaggagatgtgctgctaagtctgtttttacatggaagatgggaaatggacataaacagtgaacatgaagaagggtgtgctagatggaaaggaaaccggtcaagctgattgaataagaagaagtctcttaactactataaatccatccatgaaatggagaagattaatgctaagccacttcaagaaaaaaggttgggtctagtcgttgttgtctctatactggcaaagggaatgcggagatacatttcgagaagaaaaaggcaatgatatggaggtgttttgtctttcattgataaaaaattagaaatgagcaggtgatgaatgtcacatgaatatatttagctatttcaaatggaaaccaactttgttattgtactggcttttgttcataataaaaacacagaaggcaatggaaaatctacatgcaaatgttttgct

SEQ ID NO: 201712 - DNA, 2864 bp, Zea Mays
tggttgaagtgtatatatagcttcttgaggaacttcagcgtacatcgcagtcccctataaagttaaattgttatagatttaagttgtgctaaacgataagacatttttatgcatatattagggctgttagacaagttaaatggggctgaatagaatgcttcattagatgaagaagggagtacaatgtatagccagaagggtgcaacactagggaaggtgtggcatcctggctattagatcctgaataccgtaggtagcagcccctgataactatactaaagtagctgatcctagatgctatataggactgcactacctgctatgcttgacagaatttcgatacatatcctcttgtaggaggatggaaagaagcctacagatagtaattacaaattatagtaataatttgacaaggaccaagaagaatacatatacctgttgatcaataatcacaagatccaaatgtttgattggatcatcatcatttttgccatgaaattcccaaactcttgatatccgaacacaaatgatatagtggtagacccctggtcgaacttgtgatagtggtgtaatgtccatctgcaaatacaatttgttaaaaatagtatcaatttatgttgccatggctctcaatagattgtagtacttctttatacacaatattttctgttattgttccacatgaaccgtcgtcattttctatcaatattttgagccctttcttttctgtaactcgtgacacagctaaatatagttgaccgtgtgtaaacacctttttctttaaatataaccctacatttgatagtgtttgtccttgacttttatttatagtcatagagtagcaaaccttgattggaaattggcgttgacataatgtaaaaggccatttattgcccttagttgtcagattaatgcggggtatatgtattttttcgccaacgtgtgtacctgttattattgttccttctataattgtgtctcctagttgagttataataattctggttccattgcatagtcctaaactttgatttaaatttcgtagaagcattacaggagtgccaattttaagttttagtctatgagaagggaaattgtttgcgtttaaagtgtttagatactcaatagggtataaaatattggcatcatttggagcatctgtgcatttagatatgctatctgcactatagtattctctctctactgttggcaaaagagagataatataatcatttatttcatctacaacatcattagttgttgctaatatagctctttttttgatataatctggatcattatattttgtttgtaggtcaggataagtaaattgaactaatgcttgaattttatcctctgttgtttcaattaaaaattcttttggtatttcaatgagtgttgagtccgaggaaaaattatcgttgttgttatataccccatttccaatggcaaggatccaattattgaatgataacaagtcttcatactcttcatttgatatattactttgtcgtagtcgcatgttttcagaaaggaatataatgttgacatggttccaaaggtatgaagcaatgatacaagcatttattatttgttcttttgttccattttctataacaggtaatatttgttttggatcgccacctagcacaaccactttaccaccaaaaggaatgtcaagagctttttcatatgtttctcctactatatctctaagggatctatcaaatgcttcaaagcattgtttatttgtcattagagcttcatcccatataataagatctgtgtcaataagaagttttgcaagatttgttcctctttttatatcacacattgacaattgatccaaatctataggtatacgaaatcttgagtgagctgtacgtccatttggaagtagcaaagaagcaactcctgatgatgcaactgtaaggacaatctttcttatagctctaagttcgaatatattggttcctgattattgtgtctcgtcatggatttattgcgttcattgaaccagaaaattgcatcgcagtgtctacatttgtattctagtttaccaagatctttttgttggagggttcacagtttttagacatcttcctctttctaatcctttcaccgcgtcttattttactctcttctccaaaaaagttactgctctaagagaggtgttttgaaatagaagagagggtacatatttgagcatatgtagagcccaggtacctcgctctacaacatcaaggattatcttgtcattcataagagttaaaggccctttcttcagtctttcactattaagacacaatttcatgttgcaaagatcttcaatggatgatattgatgacgatatataagggatatcactcttgagccacataagcttgatgaagagattgttgaatctaatcttgagcttgaagcagactttgtacaatttaaatatgatgatcgatcacaaaagatgggaaatggacataaacagtgaacatgaagaagggtgtgctagatggaaaggaaaccggtcaagctgattgaataagaagaagtctcttaactactataaatccatccatgaaatggagaagattaatgctaagccacttcaagaaaaaaggttgggtctagtcgttgttgtctctatactggcaaagggaatgcggagatacatttcgagaagaaaaaggcaatgatatggaggtgttttgtctttcattgataaaaaattagaaatgagcaggtgatgaatgtcacatgaatatatttagctatttcaaatggaaaccaactttgttattgtactggcttttgttcataataaaaacacagaaggcaatggaaaatctacatgcaaatgttttgct

SEQ ID NO: 201713 - DNA, 3537 bp, Zea Mays
tggttgaagtgtatatatagcttcttgaggaacttcagcgtacatcgcagtcccctataaagttaaattgttatagatttaagttgtgctaaacgataagacatttttatgcatatattagggctgttagacaagttaaatggggctgaatagaatgcttcattagatgaagaagggagtacaatgtatagccagaagggtgcaacactagggaaggtgtggcatcctggctattagatcctgaataccgtaggtagcagcccctgataactatactaaagtagctgatcctagatgctatataggactgcactacctgctatgcttgacagaatttcgatacatatcctcttgtaggaggatggaaagaagcctacagatagtaattacaaattatagtaataatttgacaaggaccaagaagaatacatatacctgttgatcaataatcacaagatccaaatgtttgattggatcatcatcatttttgccatgaaattcccaaactcttgatatccgaacacaaatgatatagtggtagacccctggtcgaacttgtgatagtggtgtaatgtccatctgcaaatacaatttgttaaaaatagtatcaatttatgttgccatggctctcaatagattgtagtacttctttatacacaatattttctgttattgttccacatgaaccgtcgtcattttctatcaatattttgagccctttcttttctgtaactcgtgacacagctaaatatagttgaccgtgtgtaaacacctttttctttaaatataaccctacatttgatagtgtttgtccttgacttttatttatagtcatagagtagcaaaccttgattggaaattggcgttgacataatgtaaaaggccatttattgcccttagttgtcagattaatgcggggtatatgtattttttcgccaacgtgtgtacctgttattattgttccttctataattgtgtctcctagttgagttataataattctggttccattgcatagtcctaaactttgatttaaatttcgtagaagcattacaggagtgccaattttaagttttagtctatgagaagggaaattgtttgcgtttaaagtgtttagatactcaatagggtataaaatattggcatcatttggagcatctgtgcatttagatatgctatctgcactatagtattctctctctactgttggcaaaagagagataatataatcatttatttcatctacaacatcattagttgttgctaatatagctctttttttgatataatctggatcattatattttgtttgtaggtcaggataagtaaattgaactaatgcttgaattttatcctctgttgtttcaattaaaaattcttttggtatttcaatgagtgttgagtccgaggaaaaattatcgttgttgttatataccccatttccaatggcaaggatccaattattgaatgataacaagtcttcatactcttcatttgatatattactttgtcgtagtcgcatgttttcagaaaggaatataatgttgacatggttccaaaggtatgaagcaatgatacaagcatttattatttgttcttttgttccattttctataacaggtaatatttgttttggatcgccacctagcacaaccactttaccaccaaaaggaatgtcaagagctttttcatatgtttctcctactatatctctaagggatctatcaaatgcttcaaagcattgtttatttgtcattagagcttcatcccatataataagatctgtgtcaataagaagttttgcaagatttgttcctctttttatatcacacattgacaattgatccaaatctataggtatacgaaatcttgagtgagctgtacgtccatttggaagtagcaaagaagcaactcctgatgatgcaactgtaaggacaatctttcttatagctctaagttcgaatatattggttcctgattattgtgtctcgtcatggatttattgcgttcattgaaccagaaaattgcatcgcagtgtctacatttgtattctagtttaccaagatctttttgttggagggttcacagtttttagacatcttcctctttctaatcctttcaccgcgtcttattttactctcttctccaaaaaagttactgctctgtaagacttgctcacttctttttcttttcgtagggtggtcaatatcaatgccttgtttatgacttcttattattttccccatgtctatatcctatgtgatggatgcatgggtccaaaaagataaaatgaaaatatactgttagtaaccaatgaattgtacaaaaaatattatatgcaatgactatacattgaaatgcacacaactaaattaaagctatagttacatgcatagtacaattgaatgttacaaatactgcttttattagccagtgttatgtctttatttatactaatgctattcacatactatggagatttagaccattggaaatgcactttgtaatacttaacttggtgttctaaaacataagataggtgttctgaaacataagatatgaaattgcacttggtaatacttagtgtggtgttctaaaacagaagagaggtgttttgaaatagaagagagggtacatatttgagcatatgtagagcccaggtacctcgctctacaacatcaaggattatcttgtcattcataaggtacgccgctctacaacatcaaggcttatctcgtcatttagattatgtaggctatatgcaaatattcgttatacattggttggattgcacccaatattctacttcttgtttaaatttttgatgctttcgttccaacctttatttttatactttctcatagtctgtcattgttgattgaaggtcacttttaagagctattgtcatattgattttcctcattatttatcttttttagagttaaaggccctttcttcagtctttcactattaagacacaatttcatgttgcaaagatcttcaatggatgatattgatgacgatatataagggatatcactcttgagccacataagcttgatgaagagattgttgaatctaatcttgagcttgaagcagactttgtacaatttaaatatgatgatcgatcacaaaagatgggaaatggacataaacagtgaacatgaagaagggtgtgctagatggaaaggaaaccggtcaagctgattgaataagaagaagtctcttaactactataaatccatccatgaaatggagaagattaatgctaagccacttcaagaaaaaaggttgggtctagtcgttgttgtctctatactggcaaagggaatgcggagatacatttcgagaagaaaaaggcaatgatatggaggtgttttgtctttcattgataaaaaattagaaatgagcaggtgatgaatgtcacatgaatatatttagctatttcaaatggaaaccaactttgttattgtactggcttttgttcataataaaaacacagaaggcaatggaaaatctacatgcaaatgttttgct

SEQ ID NO: 201714 - DNA, 3121 bp, Zea Mays
gaatgcttcattagatgaagaagggagtacaatgtatagccagaagggtgcaacactagggaaggtgtggcatcctggctattagatcctgaataccgtaggtagcagcccctgataactatactaaagtagctgatcctagatgctatataggactgcactacctgctatgcttgacagaatttcgatacatatcctcttgtaggaggatggaaagaagcctacagatagtaattacaaattatagtaataatttgacaaggaccaagaagaatacatatacctgttgatcaataatcacaagatccaaatgtttgattggatcatcatcatttttgccatgaaattcccaaactcttgatatccgaacacaaatgatatagtggtagacccctggtcgaacttgtgatagtggtgtaatgtccatctgcaaatacaatttgttaaaaatagtatcaatttatgttgccatggctctcaatagattgtagtacttctttatacacaatattttctgttattgttccacatgaaccgtcgtcattttctatcaatattttgagccctttcttttctgtaactcgtgacacagctaaatatagttgaccgtgtgtaaacacctttttctttaaatataaccctacatttgatagtgtttgtccttgacttttatttatagtcatagagtagcaaaccttgattggaaattggcgttgacataatgtaaaaggccatttattgcccttagttgtcagattaatgcggggtatatgtattttttcgccaacgtgtgtacctgttattattgttccttctataattgtgtctcctagttgagttataataattctggttccattgcatagtcctaaactttgatttaaatttcgtagaagcattacaggagtgccaattttaagttttagtctatgagaagggaaattgtttgcgtttaaagtgtttagatactcaatagggtataaaatattggcatcatttggagcatctgtgcatttagatatgctatctgcactatagtattctctctctactgttggcaaaagagagataatataatcatttatttcatctacaacatcattagttgttgctaatatagctctttttttgatataatctggatcattatattttgtttgtaggtcaggataagtaaattgaactaatgcttgaattttatcctctgttgtttcaattaaaaattcttttggtatttcaatgagtgttgagtccgaggaaaaattatcgttgttgttatataccccatttccaatggcaaggatccaattattgaatgataacaagtcttcatactcttcatttgatatattactttgtcgtagtcgcatgttttcagaaaggaatataatgttgacatggttccaaaggtatgaagcaatgatacaagcatttattatttgttcttttgttccattttctataacaggtaatatttgttttggatcgccacctagcacaaccactttaccaccaaaaggaatgtcaagagctttttcatatgtttctcctactatatctctaagggatctatcaaatgcttcaaagcattgtttatttgtcattagagcttcatcccatataataagatctgtgtcaataagaagttttgcaagatttgttcctctttttatatcacacattgacaattgatccaaatctataggtatacgaaatcttgagtgagctgtacgtccatttggaagtagcaaagaagcaactcctgatgatgcaactttcgaatatattggttcctgattattgtgtctcgtcatggatttattgcgttcattgaaccagaaaattgcatcgcagtgtctacatttgtattctagtttaccaagatctttttgttggagggttcacagtttttagacatcttcctctttctaatcctttcaccgcgtcttattttactctcttctccaaaaaagttactgctctgtaagacttgctcacttctttttcttttcgtagggtggtcaatatcaatgccttgtttatgacttcttattattttccccatgtctatatcctatgtgatggatgcatgggtccaaaaagataaaatgaaaatatactgttagtaaccaatgaattgtacaaaaaatattatatgcaatgactatacattgaaatgcacacaactaaattaaagctatagttacatgcatagtacaattgaatgttacaaatactgcttttattagccagtgttatgtctttatttatactaatgctattcacatactatggagatttagaccattggaaatgcactttgtaatacttaacttggtgttctaaaacataagataggtgttctgaaacataagatatgaaattgcacttggtaatacttagtgtggtgttctaaaacagaagagaggtgttttgaaatagaagagagggtacatatttgagcatatgtagagcccaggtacctcgctctacaacatcaaggattatcttgtcattcataagagttaaaggccctttcttcagtctttcactattaagacacaatttcatgttgcaaagatcttcaatggatgatattgatgacgatatataagggatatcactcttgagccacataagcttgatgaagagattgttgaatctaatcttgagcttgaagcagactttgtacaatttaaatatgatgatcgatcacaaaagatgggaaatggacataaacagtgaacatgaagaagggtgtgctagatggaaaggaaaccggtcaagctgattgaataagaagaagtctcttaactactataaatccatccatgaaatggagaagattaatgctaagccacttcaagaaaaaaggttgggtctagtcgttgttgtctctatactggcaaagggaatgcggagatacatttcgagaagaaaaaggcaatgatatggaggtgttttgtctttcattgataaaaaattagaaatgagcaggtgatgaatgtcacatgaatatatttagctatttcaaatggaaaccaactttgttattgtactggcttttgttcataataaaaacacagaaggcaatggaaaatctacatgcaaatgttttgct

SEQ ID NO: 201715 - DNA, 2615 bp, Zea Mays
gaatgcttcattagatgaagaagggagtacaatgtatagccagaagggtgcaacactagggaaggtgtggcatcctggctattagatcctgaataccgtaggtagcagcccctgataactatactaaagtagctgatcctagatgctatataggactgcactacctgctatgcttgacagaatttcgatacatatcctcttgtaggaggatggaaagaagcctacagatagtaattacaaattatagtaataatttgacaaggaccaagaagaatacatatacctgttgatcaataatcacaagatccaaatgtttgattggatcatcatcatttttgccatgaaattcccaaactcttgatatccgaacacaaatgatatagtggtagacccctggtcgaacttgtgatagtggtgtaatgtccatctgcaaatacaatttgttaaaaatagtatcaatttatgttgccatggctctcaatagattgtagtacttctttatacacaatattttctgttattgttccacatgaaccgtcgtcattttctatcaatattttgagccctttcttttctgtaactcgtgacacagctaaatatagttgaccgtgtgtaaacacctttttctttaaatataaccctacatttgatagtgtttgtccttgacttttatttatagtcatagagtagcaaaccttgattggaaattggcgttgacataatgtaaaaggccatttattgcccttagttgtcagattaatgcggggtatatgtattttttcgccaacgtgtgtacctgttattattgttccttctataattgtgtctcctagttgagttataataattctggttccattgcatagtcctaaactttgatttaaatttcgtagaagcattacaggagtgccaattttaagttttagtctatgagaagggaaattgtttgcgtttaaagtgtttagatactcaatagggtataaaatattggcatcatttggagcatctgtgcatttagatatgctatctgcactatagtattctctctctactgttggcaaaagagagataatataatcatttatttcatctacaacatcattagttgttgctaatatagctctttttttgatataatctggatcattatattttgtttgtaggtcaggataagtaaattgaactaatgcttgaattttatcctctgttgtttcaattaaaaattcttttggtatttcaatgagtgttgagtccgaggaaaaattatcgttgttgttatataccccatttccaatggcaaggatccaattattgaatgataacaagtcttcatactcttcatttgatatattactttgtcgtagtcgcatgttttcagaaaggaatataatgttgacatggttccaaaggtatgaagcaatgatacaagcatttattatttgttcttttgttccattttctataacaggtaatatttgttttggatcgccacctagcacaaccactttaccaccaaaaggaatgtcaagagctttttcatatgtttctcctactatatctctaagggatctatcaaatgcttcaaagcattgtttatttgtcattagagcttcatcccatataataagatctgtgtcaataagaagttttgcaagatttgttcctctttttatatcacacattgacaattgatccaaatctataggtatacgaaatcttgagtgagctgtacgtccatttggaagtagcaaagaagcaactcctgatgatgcaactgtaaggacaatctttcttatagctctaagcagttcgaatatattggttcctgattattgtgtctcgtcatggatttattgcgttcattgaaccagaaaattgcatcgcagtgtctacatttgtattctagtttaccaagaagagaggtgttttgaaatagaagagagggtacatatttgagcatatgtagagcccaggtacctcgctctacaacatcaaggattatcttgtcattcataagagttaaaggccctttcttcagtctttcactattaagacacaatttcatgttgcaaagatcttcaatggatgatattgatgacgatatataagggatatcactcttgagccacataagcttgatgaagagattgttgaatctaatcttgagcttgaagcagactttgtacaatttaaatatgatgatcgatcacaaaagatgggaaatggacataaacagtgaacatgaagaagggtgtgctagatggaaaggaaaccggtcaagctgattgaataagaagaagtctcttaactactataaatccatccatgaaatggagaagattaatgctaagccacttcaagaaaaaaggttgggtctagtcgttgttgtctctatactggcaaagggaatgcggagatacatttcgagaagaaaaaggcaatgatatggaggtgttttgtctttcattgataaaaaattagaaatgagcaggtgatgaatgtcacatgaatatatttagctatttcaaatggaaaccaactttgttattgtactggcttttgttcataataaaaacacagaaggcaatggaaaatctacatgcaaatgttttgct

SEQ ID NO: 201716 - DNA, 3461 bp, Zea Mays
gaatgcttcattagatgaagaagggagtacaatgtatagccagaagggtgcaacactagggaaggtgtggcatcctggctattagatcctgaataccgtaggtagcagcccctgataactatactaaagtagctgatcctagatgctatataggactgcactacctgctatgcttgacagaatttcgatacatatcctcttgtaggaggatggaaagaagcctacagatagtaattacaaattatagtaataatttgacaaggaccaagaagaatacatatacctgttgatcaataatcacaagatccaaatgtttgattggatcatcatcatttttgccatgaaattcccaaactcttgatatccgaacacaaatgatatagtggtagacccctggtcgaacttgtgatagtggtgtaatgtccatctgcaaatacaatttgttaaaaatagtatcaatttatgttgccatggctctcaatagattgtagtacttctttatacacaatattttctgttattgttccacatgaaccgtcgtcattttctatcaatattttgagccctttcttttctgtaactcgtgacacagctaaatatagttgaccgtgtgtaaacacctttttctttaaatataaccctacatttgatagtgtttgtccttgacttttatttatagtcatagagtagcaaaccttgattggaaattggcgttgacataatgtaaaaggccatttattgcccttagttgtcagattaatgcggggtatatgtattttttcgccaacgtgtgtacctgttattattgttccttctataattgtgtctcctagttgagttataataattctggttccattgcatagtcctaaactttgatttaaatttcgtagaagcattacaggagtgccaattttaagttttagtctatgagaagggaaattgtttgcgtttaaagtgtttagatactcaatagggtataaaatattggcatcatttggagcatctgtgcatttagatatgctatctgcactatagtattctctctctactgttggcaaaagagagataatataatcatttatttcatctacaacatcattagttgttgctaatatagctctttttttgatataatctggatcattatattttgtttgtaggtcaggataagtaaattgaactaatgcttgaattttatcctctgttgtttcaattaaaaattcttttggtatttcaatgagtgttgagtccgaggaaaaattatcgttgttgttatataccccatttccaatggcaaggatccaattattgaatgataacaagtcttcatactcttcatttgatatattactttgtcgtagtcgcatgttttcagaaaggaatataatgttgacatggttccaaaggtatgaagcaatgatacaagcatttattatttgttcttttgttccattttctataacaggtaatatttgttttggatcgccacctagcacaaccactttaccaccaaaaggaatgtcaagagctttttcatatgtttctcctactatatctctaagggatctatcaaatgcttcaaagcattgtttatttgtcattagagcttcatcccatataataagatctgtgtcaataagaagttttgcaagatttgttcctctttttatatcacacattgacaattgatccaaatctataggtatacgaaatcttgagtgagctgtacgtccatttggaagtagcaaagaagcaactcctgatgatgcaactgtaaggacaatctttcttatagctctaagcagttcgaatatattggttcctgattattgtgtctcgtcatggatttattgcgttcattgaaccagaaaattgcatcgcagtgtctacatttgtattctagtttaccaagatctttttgttggagggttcacagtttttagacatcttcctctttctaatcctttcaccgcgtcttattttactctcttctccaaaaaagttactgctctgtaagacttgctcacttctttttcttttcgtagggtggtcaatatcaatgccttgtttatgacttcttattattttccccatgtctatatcctatgtgatggatgcatgggtccaaaaagataaaatgaaaatatactgttagtaaccaatgaattgtacaaaaaatattatatgcaatgactatacattgaaatgcacacaactaaattaaagctatagttacatgcatagtacaattgaatgttacaaatactgcttttattagccagtgttatgtctttatttatactaatgctattcacatactatggagatttagaccattggaaatgcactttgtaatacttaacttggtgttctaaaacataagataggtgttctgaaacataagatatgaaattgcacttggtaatacttagtgtggtgttctaaaacagaagagaggtgttttgaaatagaagagagggtacatatttgagcatatgtagagcccaggtacctcgctctacaacatcaaggattatcttgtcattcataaggtacgccgctctacaacatcaaggcttatctcgtcatttagattatgtaggctatatgcaaatattcgttatacattggttggattgcacccaatattctacttcttgtttaaatttttgatgctttcgttccaacctttatttttatactttctcatagtctgtcattgttgattgaaggtcacttttaagagctattgtcatattgattttcctcattatttatcttttttagagttaaaggccctttcttcagtctttcactattaagacacaatttcatgttgcaaagatcttcaatggatgatattgatgacgatatataagggatatcactcttgagccacataagcttgatgaagagattgttgaatctaatcttgagcttgaagcagactttgtacaatttaaatatgatgatcgatcacaaaaggtacttcattctgttgccacaaacatgtttagcgacaaggagatgtgctgctaagtctgtttttacatggaagatgggaaatggacataaacagtgaacatgaagaagggtgtgctagatggaaaggaaaccggtcaagctgattgaataagaagaagtctcttaactactataaatccatccatgaaatggagaagattaatgctaagccacttcaagaaaaaaggttgggtctagtcgttgttgtctctatactggcaaagggaatgcggagatacatttcgagaagaaaaaggcaatgatatggaggtgttttgtctttcattgataaaaaattagaaatgagcaggtgatgaatgtcacatgaatatatttagctatttcaaatggaaaccaactttgttattgtactggcttttgttcataataaaaacacagaaggcaatggaaaatctacatgcaaatgttttgct

SEQ ID NO: 201717 - DNA, 4122 bp, Zea Mays
cttctaagtaatttatatcataactcatttcttcttggattagtctgtttatgttatcaatatgttttgtgtgttgtcgcctgggtaaattgtagttatttatttcctgcccattcttagagaatagctcttctagttcttcaagtaaataatgttgtagttctaattcagagggtgtatatttgatagggtggtatttttggataagatgtttgtgaatgtcatcgaccattgtgtgccatgtggtgttgaaaaattctttttcatcttttatttggcaatatgttagcattatgacaaatagattgcgtagttcaaatgatgttgcccaattagttgcttcttgatatgtgcgataccactcattgtcatcgtctagtaatcctctagctgcgcaagcctctttaaaggtttggtataaaacaccattatacgttcgtatatcttcatagtttttagcacctttaacaatcattagaagcattcttaaatagaatctttcaccttcagcagggtttacataatagagccttccaaatttgaaaccatgttgtcttttcttccattgtcttttttctccatcccaacgccattgtttgggaaactcatagtatgttaattcttttgcatcttcatattgcttatttgcattaaaccattcagttagcattgtctttctatactttagatctttagctatgtctatcaatttatcatttgatttcatcttaattatattcatcaatggtagatgaactggcagtctttctataggtggccaatggtaatgtatctcgtatcctaataatctccaaagagcatcttgctcgcatatatatctgcagtctagatattcttgtatctcatctatagtttctgcttctttgtttacatgtgattcttctcctttttggatttttttgaatataacctttgctctatcaggtcctttgtttacatatttgcataaatatttcaagactgtactcttgtttacatattcaacatttatatgagcttggtatctttttaatagttttaaattatgtggcacaacccatttgttgtctaagttgtgttgttctcttctgatgaaaatcccattgttcctccttcgatatattgtaaagccattttcagagaatgtagtgttttcttcaaaatctttggggtaaattttggagcatttgccttttttcatgcatggacaattccaatttttatctccgcacggtccatgcatcatatgttcagcaacaagagcatatcccaaaggatctaactcgggatctggtatttcagcagatatccacgaatctattgtttctgtagttatttcacaacctttcttgtctaaccaaattaatgtgtgcacatgtggtagacctcgtttttggaattctatagaatatagtagtgctagtacaaggccaaatacctttcctgattgtaagtcatccaaaagttgttgtagtttcatatgaaaaacacggacaataatatcaggtctatcatttggatgctcacctggtaataaacatgttgttattttaggccatttagggttacaagtgcatgtaataaaaagatctggtggcccataggcacaacaaatagcaatgccatcatggtaattttgtatcatataccgttttgatccaacatggctagatggtaataacaccttttttcctattcgactggcgtcatatattcctttttctactgcatcaaaaataccttgtacatattcagctcgtaattttgattgatttctaacaatataatcaagcctgtcttcatcctccattgctcgaccgtctactactacttgttttgataatcggccataacataaccagggattaggctgattaggtctatagtgcacatgatatttcaaaaattcatgcaaagttactctatctcttttggagtcatctctgttttgactaatgtgttgtccatggtatttaatacctagttgaaagcctcgttcgccatatggaaataggagcgggtattgtagaggcatatatgctggatggaaaatagatatcctttgaaggctattttggtgtgtgctaacaatgatgtcccgtttgtagttctcaagtgataaatcacctacaatcagcatagctaattcttcctgatgtggcatctcatattgaattctatcagtttcgtcagcgcctactattctaatgcttacatctatgcctttgtgttcttcgagaaaatcacgagcttggcggaatatttttactaatggattatattcgtcgagcatttttttagccctctcactatttctggatctatgtcttgctcacctggttcttcatttgttagagccctaattctattttcaatttcattctttgtatcaaaaatatatagttctgcaaatttggggcaattgtctggtaagggtagtaatgatcctattcgatgatgtatttggccattgacacgaaacacatatggtccctcaccatcatttatttttttatcaatatttccccccatggaagtaaatgcaaacatgctattatattgtcttattttttgtagaaaatgtttacatcttgtgtccatttttcgttgtattaattcattaagaaaagttgggggttctttatattttggtattctgattttgccatttttgcagcagttcgaatatattggttcctgattattgtgtctcgtcatggatttattgcgttcattgaaccagaaaattgcatcgcagtgtctacatttgtattctagtttaccaaggtatgatctgtcagtgtatgattctttcagttgctggatatactcggatgggaaatcaaccattccattatgggagttcaaaaatctttgtatgcagatctttttgttggagggttcacagtttttagacatcttcctctttctaatcctttcaccgcgtcttattttactctcttctccaaaaaagttactgctctgtaagacttgctcacttctttttcttttcgtagggtggtcaatatcaatgccttgtttatgacttcttattattttccccatgtctatatcctatgtgatggatgcatgggtccaaaaagataaaatgaaaatatactgttagtaaccaatgaattgtacaaaaaatattatatgcaatgactatacattgaaatgcacacaactaaattaaagctatagttacatgcatagtacaattgaatgttacaaatactgcttttattagccagtgttatgtctttatttatactaatgctattcacatactatggagatttagaccattggaaatgcactttgtaatacttaacttggtgttctaaaacataagataggtgttctgaaacataagatatgaaattgcacttggtaatacttagtgtggtgttctaaaacagaagagaggtgttttgaaatagaagagagggtacatatttgagcatatgtagagcccaggtacctcgctctacaacatcaaggattatcttgtcattcataagagttaaaggccctttcttcagtctttcactattaagacacaatttcatgttgcaaagatcttcaatggatgatattgatgacgatatataagggatatcactcttgagccacataagcttgatgaagagattgttgaatctaatcttgagcttgaagcagactttgtacaatttaaatatgatgatcgatcacaaaagatgggaaatggacataaacagtgaacatgaagaagggtgtgctagatggaaaggaaaccggtcaagctgattgaataagaagaagtctcttaactactataaatccatccatgaaatggagaagattaatgctaagccacttcaagaaaaaaggttgggtctagtcgttgttgtctctatactggcaaagggaatgcggagatacatttcgagaagaaaaaggcaatgatatggaggtgttttgtctttcattgataaaaaattagaaatgagcaggtgatgaatgtcacatgaatatatttagctatttcaaatggaaaccaactttgttattgtactggcttttgttcataataaaaacacagaaggcaatggaaaatctacatgcaaatgttttgct

SEQ ID NO: 201718 - DNA, 4357 bp, Zea Mays
cttctaagtaatttatatcataactcatttcttcttggattagtctgtttatgttatcaatatgttttgtgtgttgtcgcctgggtaaattgtagttatttatttcctgcccattcttagagaatagctcttctagttcttcaagtaaataatgttgtagttctaattcagagggtgtatatttgatagggtggtatttttggataagatgtttgtgaatgtcatcgaccattgtgtgccatgtggtgttgaaaaattctttttcatcttttatttggcaatatgttagcattatgacaaatagattgcgtagttcaaatgatgttgcccaattagttgcttcttgatatgtgcgataccactcattgtcatcgtctagtaatcctctagctgcgcaagcctctttaaaggtttggtataaaacaccattatacgttcgtatatcttcatagtttttagcacctttaacaatcattagaagcattcttaaatagaatctttcaccttcagcagggtttacataatagagccttccaaatttgaaaccatgttgtcttttcttccattgtcttttttctccatcccaacgccattgtttgggaaactcatagtatgttaattcttttgcatcttcatattgcttatttgcattaaaccattcagttagcattgtctttctatactttagatctttagctatgtctatcaatttatcatttgatttcatcttaattatattcatcaatggtagatgaactggcagtctttctataggtggccaatggtaatgtatctcgtatcctaataatctccaaagagcatcttgctcgcatatatatctgcagtctagatattcttgtatctcatctatagtttctgcttctttgtttacatgtgattcttctcctttttggatttttttgaatataacctttgctctatcaggtcctttgtttacatatttgcataaatatttcaagactgtactcttgtttacatattcaacatttatatgagcttggtatctttttaatagttttaaattatgtggcacaacccatttgttgtctaagttgtgttgttctcttctgatgaaaatcccattgttcctccttcgatatattgtaaagccattttcagagaatgtagtgttttcttcaaaatctttggggtaaattttggagcatttgccttttttcatgcatggacaattccaatttttatctccgcacggtccatgcatcatatgttcagcaacaagagcatatcccaaaggatctaactcgggatctggtatttcagcagatatccacgaatctattgtttctgtagttatttcacaacctttcttgtctaaccaaattaatgtgtgcacatgtggtagacctcgtttttggaattctatagaatatagtagtgctagtacaaggccaaatacctttcctgattgtaagtcatccaaaagttgttgtagtttcatatgaaaaacacggacaataatatcaggtctatcatttggatgctcacctggtaataaacatgttgttattttaggccatttagggttacaagtgcatgtaataaaaagatctggtggcccataggcacaacaaatagcaatgccatcatggtaattttgtatcatataccgttttgatccaacatggctagatggtaataacaccttttttcctattcgactggcgtcatatattcctttttctactgcatcaaaaataccttgtacatattcagctcgtaattttgattgatttctaacaatataatcaagcctgtcttcatcctccattgctcgaccgtctactactacttgttttgataatcggccataacataaccagggattaggctgattaggtctatagtgcacatgatatttcaaaaattcatgcaaagttactctatctcttttggagtcatctctgttttgactaatgtgttgtccatggtatttaatacctagttgaaagcctcgttcgccatatggaaataggagcgggtattgtagaggcatatatgctggatggaaaatagatatcctttgaaggctattttggtgtgtgctaacaatgatgtcccgtttgtagttctcaagtgataaatcacctacaatcagcatagctaattcttcctgatgtggcatctcatattgaattctatcagtttcgtcagcgcctactattctaatgcttacatctatgcctttgtgttcttcgagaaaatcacgagcttggcggaatatttttactaatggattatattcgtcgagcatttttttagccctctcactatttctggatctatgtcttgctcacctggttcttcatttgttagagccctaattctattttcaatttcattctttgtatcaaaaatatatagttctgcaaatttggggcaattgtctggtaagggtagtaatgatcctattcgatgatgtatttggccattgacacgaaacacatatggtccctcaccatcatttatttttttatcaatatttccccccatggaagtaaatgcaaacatgctattatattgtcttattttttgtagaaaatgtttacatcttgtgtccatttttcgttgtattaattcattaagaaaagttgggggttctttatattttggtattctgattttgccatttttgcagcagttcgaatatattggttcctgattattgtgtctcgtcatggatttattgcgttcattgaaccagaaaattgcatcgcagtgtctacatttgtattctagtttaccaaggtatgatctgtcagtgtatgattctttcagttgctggatatactcggatgggaaatcaaccattccattatgggagttcaaaaatctttgtatgcagatctttttgttggagggttcacagtttttagacatcttcctctttctaatcctttcaccgcgtcttattttactctcttctccaaaaaagttactgctctgtaagacttgctcacttctttttcttttcgtagggtggtcaatatcaatgccttgtttatgacttcttattattttccccatgtctatatcctatgtgatggatgcatgggtccaaaaagataaaatgaaaatatactgttagtaaccaatgaattgtacaaaaaatattatatgcaatgactatacattgaaatgcacacaactaaattaaagctatagttacatgcatagtacaattgaatgttacaaatactgcttttattagccagtgttatgtctttatttatactaatgctattcacatactatggagatttagaccattggaaatgcactttgtaatacttaacttggtgttctaaaacataagataggtgttctgaaacataagatatgaaattgcacttggtaatacttagtgtggtgttctaaaacagaagagaggtgttttgaaatagaagagagggtacatatttgagcatatgtagagcccaggtacctcgctctacaacatcaaggattatcttgtcattcataaggtacgccgctctacaacatcaaggcttatctcgtcatttagattatgtaggctatatgcaaatattcgttatacattggttggattgcacccaatattctacttcttgtttaaatttttgatgctttcgttccaacctttatttttatactttctcatagtctgtcattgttgattgaaggtcacttttaagagctattgtcatattgattttcctcattatttatcttttttagagttaaaggccctttcttcagtctttcactattaagacacaatttcatgttgcaaagatcttcaatggatgatattgatgacgatatataagggatatcactcttgagccacataagcttgatgaagagattgttgaatctaatcttgagcttgaagcagactttgtacaatttaaatatgatgatcgatcacaaaagatgggaaatggacataaacagtgaacatgaagaagggtgtgctagatggaaaggaaaccggtcaagctgattgaataagaagaagtctcttaactactataaatccatccatgaaatggagaagattaatgctaagccacttcaagaaaaaaggttgggtctagtcgttgttgtctctatactggcaaagggaatgcggagatacatttcgagaagaaaaaggcaatgatatggaggtgttttgtctttcattgataaaaaattagaaatgagcaggtgatgaatgtcacatgaatatatttagctatttcaaatggaaaccaactttgttattgtactggcttttgttcataataaaaacacagaaggcaatggaaaatctacatgcaaatgttttgct

SEQ ID NO: 201719 - DNA, 4004 bp, Zea Mays
cttctaagtaatttatatcataactcatttcttcttggattagtctgtttatgttatcaatatgttttgtgtgttgtcgcctgggtaaattgtagttatttatttcctgcccattcttagagaatagctcttctagttcttcaagtaaataatgttgtagttctaattcagagggtgtatatttgatagggtggtatttttggataagatgtttgtgaatgtcatcgaccattgtgtgccatgtggtgttgaaaaattctttttcatcttttatttggcaatatgttagcattatgacaaatagattgcgtagttcaaatgatgttgcccaattagttgcttcttgatatgtgcgataccactcattgtcatcgtctagtaatcctctagctgcgcaagcctctttaaaggtttggtataaaacaccattatacgttcgtatatcttcatagtttttagcacctttaacaatcattagaagcattcttaaatagaatctttcaccttcagcagggtttacataatagagccttccaaatttgaaaccatgttgtcttttcttccattgtcttttttctccatcccaacgccattgtttgggaaactcatagtatgttaattcttttgcatcttcatattgcttatttgcattaaaccattcagttagcattgtctttctatactttagatctttagctatgtctatcaatttatcatttgatttcatcttaattatattcatcaatggtagatgaactggcagtctttctataggtggccaatggtaatgtatctcgtatcctaataatctccaaagagcatcttgctcgcatatatatctgcagtctagatattcttgtatctcatctatagtttctgcttctttgtttacatgtgattcttctcctttttggatttttttgaatataacctttgctctatcaggtcctttgtttacatatttgcataaatatttcaagactgtactcttgtttacatattcaacatttatatgagcttggtatctttttaatagttttaaattatgtggcacaacccatttgttgtctaagttgtgttgttctcttctgatgaaaatcccattgttcctccttcgatatattgtaaagccattttcagagaatgtagtgttttcttcaaaatctttggggtaaattttggagcatttgccttttttcatgcatggacaattccaatttttatctccgcacggtccatgcatcatatgttcagcaacaagagcatatcccaaaggatctaactcgggatctggtatttcagcagatatccacgaatctattgtttctgtagttatttcacaacctttcttgtctaaccaaattaatgtgtgcacatgtggtagacctcgtttttggaattctatagaatatagtagtgctagtacaaggccaaatacctttcctgattgtaagtcatccaaaagttgttgtagtttcatatgaaaaacacggacaataatatcaggtctatcatttggatgctcacctggtaataaacatgttgttattttaggccatttagggttacaagtgcatgtaataaaaagatctggtggcccataggcacaacaaatagcaatgccatcatggtaattttgtatcatataccgttttgatccaacatggctagatggtaataacaccttttttcctattcgactggcgtcatatattcctttttctactgcatcaaaaataccttgtacatattcagctcgtaattttgattgatttctaacaatataatcaagcctgtcttcatcctccattgctcgaccgtctactactacttgttttgataatcggccataacataaccagggattaggctgattaggtctatagtgcacatgatatttcaaaaattcatgcaaagttactctatctcttttggagtcatctctgttttgactaatgtgttgtccatggtatttaatacctagttgaaagcctcgttcgccatatggaaataggagcgggtattgtagaggcatatatgctggatggaaaatagatatcctttgaaggctattttggtgtgtgctaacaatgatgtcccgtttgtagttctcaagtgataaatcacctacaatcagcatagctaattcttcctgatgtggcatctcatattgaattctatcagtttcgtcagcgcctactattctaatgcttacatctatgcctttgtgttcttcgagaaaatcacgagcttggcggaatatttttactaatggattatattcgtcgagcatttttttagccctctcactatttctggatctatgtcttgctcacctggttcttcatttgttagagccctaattctattttcaatttcattctttgtatcaaaaatatatagttctgcaaatttggggcaattgtctggtaagggtagtaatgatcctattcgatgatgtatttggccattgacacgaaacacatatggtccctcaccatcatttatttttttatcaatatttccccccatggaagtaaatgcaaacatgctattatattgtcttattttttgtagaaaatgtttacatcttgtgtccatttttcgttgtattaattcattaagaaaagttgggggttctttatattttggtattctgattttgccatttttgcagcagttcgaatatattggttcctgattattgtgtctcgtcatggatttattgcgttcattgaaccagaaaattgcatcgcagtgtctacatttgtattctagtttaccaagatctttttgttggagggttcacagtttttagacatcttcctctttctaatcctttcaccgcgtcttattttactctcttctccaaaaaagttactgctctgtaagacttgctcacttctttttcttttcgtagggtggtcaatatcaatgccttgtttatgacttcttattattttccccatgtctatatcctatgtgatggatgcatgggtccaaaaagataaaatgaaaatatactgttagtaaccaatgaattgtacaaaaaatattatatgcaatgactatacattgaaatgcacacaactaaattaaagctatagttacatgcatagtacaattgaatgttacaaatactgcttttattagccagtgttatgtctttatttatactaatgctattcacatactatggagatttagaccattggaaatgcactttgtaatacttaacttggtgttctaaaacataagataggtgttctgaaacataagatatgaaattgcacttggtaatacttagtgtggtgttctaaaacagaagagaggtgttttgaaatagaagagagggtacatatttgagcatatgtagagcccaggtacctcgctctacaacatcaaggattatcttgtcattcataagagttaaaggccctttcttcagtctttcactattaagacacaatttcatgttgcaaagatcttcaatggatgatattgatgacgatatataagggatatcactcttgagccacataagcttgatgaagagattgttgaatctaatcttgagcttgaagcagactttgtacaatttaaatatgatgatcgatcacaaaagtgaacatgaagaagggtgtgctagatggaaaggaaaccggtcaagctgattgaataagaagaagtctcttaactactataaatccatccatgaaatggagaagattaatgctaagccacttcaagaaaaaaggttgggtctagtcgttgttgtctctatactggcaaagggaatgcggagatacatttcgagaagaaaaaggcaatgatatggaggtgttttgtctttcattgataaaaaattagaaatgagcaggtgatgaatgtcacatgaatatatttagctatttcaaatggaaaccaactttgttattgtactggcttttgttcataataaaaacacagaaggcaatggaaaatctacatgcaaatgttttgct

SEQ ID NO: 201720 - DNA, 2599 bp, Zea Mays
ttcaccttcaagagaaaaagcattggaagccctgcccaagtgaataccatgcaaataatcctgagatgtccaagctgttgcacaaagcaattcgtgagaaacgtgataatgcgtacactgtctaccaacaacatcttgcaagccgtcctgtcaatgttcttcgagatcttcttgaattgaaaagtgatcgtgcacctattcctattggcaaagtggagtctgcaacctccattgttgaacgtttttgtactggtggaatgtccctaggagccatttcaagggaaacgcatgaagctattgcaattgcaatgaatagaataggtgggaaatctaattcaggagaaggtggtgaggatccaatccgttggaatcccctcactgatgttgtagatggttattctccaacacttcctcatctcaagggtcttcagaatggtgacacagccacaagtgccattaagcaggttgcatctggacgttttggagttacaccaacattcttagtaaatgctgaccaaattgagataaagattgcgcaaggtgcaaagcctggtgaaggaggtcaacttcctgggaaaaaagtcagtgcatacattgctcgtctgaggaactccaaacctggagttcctctaatctccccgcctccacaccatgacatttattctatcgaggatcttgcacagttgatttatgacctccatcagataaatcctaaagctaaagtatctgtaaagcttgtgtctgaagctggaattggaactgtagcttctggagtttcaaaggcgaatgcagacataattcagatatcaggtcatgatggtggtactggagctagcccaatcagctccatcaaacatgctgggggtccgtgggaacttggtcttacagaaacaaatcagacacttatacaaaatggattgagagagagggtagtacttagggtggacggtggattcaggagtggtcaagatgttcttattgctgctgctatgggagctgatgaatatggctttggttctgtagccatgatagctactggatgtgtcatggcacggatttgtcacacgaataattgtccagttggagtggctagtcagagagaagagcttcgtgcaaggtttcctggtgttcctggtgatcttgttaactacttcctctttgttgccgaggaggttcgagctgcattagcccagttgggttatgagaagttggatgacatcattgggcgaacagatttgcttaaaccaaagcacatctcattggtgaaaacgcagcacattgatcttggatacctcctatcaaatgctggattgcctgaatggagcagctcccaaattaggagccaggacgtccacactaatggccctgttcttgatgagacaatccttgcagatcctgagatagctgatgctattgagaatgagaaggaagtttccaaggcatttcaaatctataatgttgacagagctgtctgtggtcgggtagcaggtgtgattgccaagaagtatggagacacaggttttgctggccagctcaacatcacgttcaatggaagtgcagggcagtcctttggttgtttcctgactcctggaatgaacattcggctagttggggaggccaatgattatgttggaaagggtatggctggtggagaactggtggtagttcctgtagacaaaacaggatttgttcctgaggatgctactatagttggaaacacttgtctgtatggagctacaggtggtcaggtatttgtgagaggcaaggcaggagaaagatttgctgttagaaactctctatgtcaggcagtggttgagggcaccggagatcattgctgtgagtacatgactggtggctgcgtagtcgtacttggcaaagctgggaggaatgttgcagctggaatgactggtggtcttgcctacattctagatgaggatgatacacttgtcccaaaggtcaacaaggaaatcgtcaaaatgcagagagtgaatgctccagctgggcagatgcagctaaagggcttgattgaggcctatgttgataaaacgggcagcgagaaaggtattgcgattttgagggaatgggaggcctatttgccgctcttctggcaactggtaccgcccagtgaagaagactcgcctgaggcttgtgcagagtttgagagagtacttgccaagcaagcaaccacccaattgtctgcgaagtgatcgaatcagactacaggaaggtggtaggtgttttctatttgacacaaagtgatctcatcttatcacttcaagaaaatcgaagaccataaccggcgctctgaggcaccgaagtgcccgtctgaagactgcaactttgtggaggctctgcccaggccatctttttgagttgagctaacagaaccgagggttcttctcgacgctcgtgcacctaggtaacccctgtaaattggtttgctgacgctaggctgcaaggggcctgccctgtttgaactgctgtactgtacatgattcttggccgttgccctgtgtaattatgttttggttagctcgtaaatttatacgcatccaatggaggcatacaatgcaaaaaaataattaagatacaacaataa

SEQ ID NO: 201721 - DNA, 2582 bp, Zea Mays
ctgccaacaatctaggagcaaggtgaataccatgcaaataatcctgagatgtccaagctgttgcacaaagcaattcgtgagaaacgtgataatgcgtacactgtctaccaacaacatcttgcaagccgtcctgtcaatgttcttcgagatcttcttgaattgaaaagtgatcgtgcacctattcctattggcaaagtggagtctgcaacctccattgttgaacgtttttgtactggtggaatgtccctaggagccatttcaagggaaacgcatgaagctattgcaattgcaatgaatagaataggtgggaaatctaattcaggagaaggtggtgaggatccaatccgttggaatcccctcactgatgttgtagatggttattctccaacacttcctcatctcaagggtcttcagaatggtgacacagccacaagtgccattaagcaggttgcatctggacgttttggagttacaccaacattcttagtaaatgctgaccaaattgagataaagattgcgcaaggtgcaaagcctggtgaaggaggtcaacttcctgggaaaaaagtcagtgcatacattgctcgtctgaggaactccaaacctggagttcctctaatctccccgcctccacaccatgacatttattctatcgaggatcttgcacagttgatttatgacctccatcagataaatcctaaagctaaagtatctgtaaagcttgtgtctgaagctggaattggaactgtagcttctggagtttcaaaggcgaatgcagacataattcagatatcaggtcatgatggtggtactggagctagcccaatcagctccatcaaacatgctgggggtccgtgggaacttggtcttacagaaacaaatcagacacttatacaaaatggattgagagagagggtagtacttagggtggacggtggattcaggagtggtcaagatgttcttattgctgctgctatgggagctgatgaatatggctttggttctgtagccatgatagctactggatgtgtcatggcacggatttgtcacacgaataattgtccagttggagtggctagtcagagagaagagcttcgtgcaaggtttcctggtgttcctggtgatcttgttaactacttcctctttgttgccgaggaggttcgagctgcattagcccagttgggttatgagaagttggatgacatcattgggcgaacagatttgcttaaaccaaagcacatctcattggtgaaaacgcagcacattgatcttggatacctcctatcaaatgctggattgcctgaatggagcagctcccaaattaggagccaggacgtccacactaatggccctgttcttgatgagacaatccttgcagatcctgagatagctgatgctattgagaatgagaaggaagtttccaaggcatttcaaatctataatgttgacagagctgtctgtggtcgggtagcaggtgtgattgccaagaagtatggagacacaggttttgctggccagctcaacatcacgttcaatggaagtgcagggcagtcctttggttgtttcctgactcctggaatgaacattcggctagttggggaggccaatgattatgttggaaagggtatggctggtggagaactggtggtagttcctgtagacaaaacaggatttgttcctgaggatgctactatagttggaaacacttgtctgtatggagctacaggtggtcaggtatttgtgagaggcaaggcaggagaaagatttgctgttagaaactctctatgtcaggcagtggttgagggcaccggagatcattgctgtgagtacatgactggtggctgcgtagtcgtacttggcaaagctgggaggaatgttgcagctggaatgactggtggtcttgcctacattctagatgaggatgatacacttgtcccaaaggtcaacaaggaaatcgtcaaaatgcagagagtgaatgctccagctgggcagatgcagctaaagggcttgattgaggcctatgttgataaaacgggcagcgagaaaggtattgcgattttgagggaatgggaggcctatttgccgctcttctggcaactggtaccgcccagtgaagaagactcgcctgaggcttgtgcagagtttgagagagtacttgccaagcaagcaaccacccaattgtctgcgaagtgatcgaatcagactacaggaaggtggtaggtgttttctatttgacacaaagtgatctcatcttatcacttcaagaaaatcgaagaccataaccggcgctctgaggcaccgaagtgcccgtctgaagactgcaactttgtggaggctctgcccaggccatctttttgagttgagctaacagaaccgagggttcttctcgacgctcgtgcacctaggtaacccctgtaaattggtttgctgacgctaggctgcaaggggcctgccctgtttgaactgctgtactgtacatgattcttggccgttgccctgtgtaattatgttttggttagctcgtaaatttatacgcatccaatggaggcatacaatgcaaaaaaataattaagatacaacaataa

SEQ ID NO: 201722 - DNA, 2582 bp, Zea Mays
aaaatcagcaagaacttccacagtgaataccatgcaaataatcctgagatgtccaagctgttgcacaaagcaattcgtgagaaacgtgataatgcgtacactgtctaccaacaacatcttgcaagccgtcctgtcaatgttcttcgagatcttcttgaattgaaaagtgatcgtgcacctattcctattggcaaagtggagtctgcaacctccattgttgaacgtttttgtactggtggaatgtccctaggagccatttcaagggaaacgcatgaagctattgcaattgcaatgaatagaataggtgggaaatctaattcaggagaaggtggtgaggatccaatccgttggaatcccctcactgatgttgtagatggttattctccaacacttcctcatctcaagggtcttcagaatggtgacacagccacaagtgccattaagcaggttgcatctggacgttttggagttacaccaacattcttagtaaatgctgaccaaattgagataaagattgcgcaaggtgcaaagcctggtgaaggaggtcaacttcctgggaaaaaagtcagtgcatacattgctcgtctgaggaactccaaacctggagttcctctaatctccccgcctccacaccatgacatttattctatcgaggatcttgcacagttgatttatgacctccatcagataaatcctaaagctaaagtatctgtaaagcttgtgtctgaagctggaattggaactgtagcttctggagtttcaaaggcgaatgcagacataattcagatatcaggtcatgatggtggtactggagctagcccaatcagctccatcaaacatgctgggggtccgtgggaacttggtcttacagaaacaaatcagacacttatacaaaatggattgagagagagggtagtacttagggtggacggtggattcaggagtggtcaagatgttcttattgctgctgctatgggagctgatgaatatggctttggttctgtagccatgatagctactggatgtgtcatggcacggatttgtcacacgaataattgtccagttggagtggctagtcagagagaagagcttcgtgcaaggtttcctggtgttcctggtgatcttgttaactacttcctctttgttgccgaggaggttcgagctgcattagcccagttgggttatgagaagttggatgacatcattgggcgaacagatttgcttaaaccaaagcacatctcattggtgaaaacgcagcacattgatcttggatacctcctatcaaatgctggattgcctgaatggagcagctcccaaattaggagccaggacgtccacactaatggccctgttcttgatgagacaatccttgcagatcctgagatagctgatgctattgagaatgagaaggaagtttccaaggcatttcaaatctataatgttgacagagctgtctgtggtcgggtagcaggtgtgattgccaagaagtatggagacacaggttttgctggccagctcaacatcacgttcaatggaagtgcagggcagtcctttggttgtttcctgactcctggaatgaacattcggctagttggggaggccaatgattatgttggaaagggtatggctggtggagaactggtggtagttcctgtagacaaaacaggatttgttcctgaggatgctactatagttggaaacacttgtctgtatggagctacaggtggtcaggtatttgtgagaggcaaggcaggagaaagatttgctgttagaaactctctatgtcaggcagtggttgagggcaccggagatcattgctgtgagtacatgactggtggctgcgtagtcgtacttggcaaagctgggaggaatgttgcagctggaatgactggtggtcttgcctacattctagatgaggatgatacacttgtcccaaaggtcaacaaggaaatcgtcaaaatgcagagagtgaatgctccagctgggcagatgcagctaaagggcttgattgaggcctatgttgataaaacgggcagcgagaaaggtattgcgattttgagggaatgggaggcctatttgccgctcttctggcaactggtaccgcccagtgaagaagactcgcctgaggcttgtgcagagtttgagagagtacttgccaagcaagcaaccacccaattgtctgcgaagtgatcgaatcagactacaggaaggtggtaggtgttttctatttgacacaaagtgatctcatcttatcacttcaagaaaatcgaagaccataaccggcgctctgaggcaccgaagtgcccgtctgaagactgcaactttgtggaggctctgcccaggccatctttttgagttgagctaacagaaccgagggttcttctcgacgctcgtgcacctaggtaacccctgtaaattggtttgctgacgctaggctgcaaggggcctgccctgtttgaactgctgtactgtacatgattcttggccgttgccctgtgtaattatgttttggttagctcgtaaatttatacgcatccaatggaggcatacaatgcaaaaaaataattaagatacaacaataa

SEQ ID NO: 201723 - DNA, 5660 bp, Zea Mays
ccgcctcccccgacccgctccgctccgctccgctccatccatccctcccgtccccagctccccggcttcccgctgcccctgcgtgcgtgtctctggctgtgcctgtgcgccccccggtgcacccgagaggccgagaggcgaaggctcgtcgtcgcgttgctcgtcgcctcgcctcgcctataactactccctccgctccgcgcctccgctccacacctattccgccacccgcctctcacctctccagtccccacccccgcccccgtccgctcccctatcctgttcgttcccctcctctccacacgatcccctcccttgtcggcttccgcgcgggcgggagtggccgcggccacgactccaccgcctcctgctcgcgccaccacccctcggcccctcgcggcgccgcgcgaccggcgcgtggtgcgcgtttgcctgcccgtcgtcggccctttcttattagttattattaggcggaggagaggctagctctgcggggggtcgccgcgcgccgccgaatcggatcacacgcctccccttcccgccaggccagggggccatggccacgctcccgcgcgccgcgccgcccacgcccgccgcgctgctcccgctgccccgcgccgcgccgccgctgctgctcgccgggagggccgccgccgcgcgccgctctcggctgcgcgcgcggggcccgtccgcggcggcgcgccggagctgggtcgtcgcctccgccgcttcctcctcctcacgggccgtggtcggcggcgtcgcccgccgggaggcccctcccgcgccgcagaagcccacgcagcaggctgcggacttgaaccatatcttgtctgaacgtggagcttgtggtgttggatttgtcgcaaacttgaaaaatatgtcttcatttgacattgttcgtgatgctcttatggctcttgggtgcatggagcaccgtggtggttgtggagcggacagtgactcaggtgatggtgcaggactgatgagtgccgttccatgggacttgtttgatgactgggccagcaagcaagggcttgctctctttgacagaagaaatacaggtgtaggcatggtcttccttccacaagatgagaagtcaatggaagaagccaaagctgcaactgaaaaggtttttgtggatgaaggccttgaggttcttggttggagacccgttccttttaatgtatcagttgtaggtcggaatgcaaaagaaaccatgcctaatatacaacaaatatttgtgaaagttgcaaaagaagataatgctgatgacatagagagagaattatacatcagccgaaagctgatagagcgggctgcaaaatcttttagttgggcagatgaactttatttctgctctttatcaagcagaacgattgtctacaagggaatgctacgatctgaggttcttgggcaattctatttagaccttcagaatgaactgtataaatcaccttttgccatatatcatcgaagattcagtacaaatacaagtcctcgatggcctcttgctcaacctatgaggttacttggacacaacggagaaattaacacaatacaggggaacttgaactggatgcgatcaagggaaaccacactaaagtctcctgtatggcgaggtcgtgaacatgaaatttgcccgtttggtgaccctaaagcatctgattcagcgaatcttgacagtacagctgaattgctgctaagaagtggtaggagtcctgcagaagctcttatgattctcgtccctgaggcatataagaaccatccaacattatctataaaataccccgaggtaactgacttctatgactactacaaaggacaaatggaagcttgggatggacctgctttacttctatttagtgatgggaggactgtaggagcaactcttgataggaatggtctccgtccagcacgctattggagaacgtcagatgacttcgtttatgtcgcatctgaagttggtgttataccaatggatgagtcaaaagtagtaatgaaaggacgattaggtcctggaatgatgataactgttgatctacagactggacaggtgcttgaaaacacagaagtaaagaaaactgtggcttcagcgagcccctatgggacttggttgcaagaatgcacacgtttgataaagcctgtcaactttctctcttcaactatcatggacaatgagactgttttgagacatcaacaggcatttggctattcaagtgaagatgtgcaaatggtgattgaatcaatggcttcacaaggaaaggaaccaacattttgtatgggcgatgacattccattagctgtgttatcacaaagaccacacttgttatatgattatttcaagcagcggtttgcgcaggttacaaatcctgcaattgatccccttagagaaggtttagttatgtctcttgaggttaatattgggaaaagaggcaacatcttggaggttggccctgaaaatgctgatcaggttgcactatcaagccctgtgctgaatgaaggtgaactggaaactctattgaatgactcaaaacttaagcccaaagtactgtcaacatacttcgatattcgtaaaggtctagatggttcacttgataagacaattcaggctctttgtgaagaagctgatgctgctgtgcggagcggctctcaacttcttgttctttctgatcgttctgaagcacctgaacctactcgtcctgccataccaatacttctagctgttggcgccatccaccagcatttgattcagaatggtctccgtatgtctgcttctattgttgctgatactgctcagtgttttagcacacatcattttgcctgtctgatcggatatggtgccagtgctgtgtgtccttatctggcactagaaacatgccggcaatggaggctgagcaacaaaactcttaatttgatgcggaatgggaagatgcccacagtgaccatcgagcaggcacaaaggaactttatcaaagcagtaaaatcaggtctgctcaaaattctttcaaaaatgggtatctcactgctctcaagctattgtggagctcagatctttgaaatttatggtcttggtcaagaagttgttgatcttgccttctgtggaagtgtatcgaaaattggaggtctcacacttgatgagctgggtagggagaccttatcattctgggtgaaggcgttctctgaagatactgcaaagaggctagaaaactttggatttatccaatccagacctggaggtgaataccatgcaaataatcctgagatgtccaagctgttgcacaaagcaattcgtgagaaacgtgataatgcgtacactgtctaccaacaacatcttgcaagccgtcctgtcaatgttcttcgagatcttcttgaattgaaaagtgatcgtgcacctattcctattggcaaagtggagtctgcaacctccattgttgaacgtttttgtactggtggaatgtccctaggagccatttcaagggaaacgcatgaagctattgcaattgcaatgaatagaataggtgggaaatctaattcaggagaaggtggtgaggatccaatccgttggaatcccctcactgatgttgtagatggttattctccaacacttcctcatctcaagggtcttcagaatggtgacacagccacaagtgccattaagcaggttgcatctggacgttttggagttacaccaacattcttagtaaatgctgaccaaattgagataaagattgcgcaaggtgcaaagcctggtgaaggaggtcaacttcctgggaaaaaagtcagtgcatacattgctcgtctgaggaactccaaacctggagttcctctaatctccccgcctccacaccatgacatttattctatcgaggatcttgcacagttgatttatgacctccatcagataaatcctaaagctaaagtatctgtaaagcttgtgtctgaagctggaattggaactgtagcttctggagtttcaaaggcgaatgcagacataattcagatatcaggtcatgatggtggtactggagctagcccaatcagctccatcaaacatgctgggggtccgtgggaacttggtcttacagaaacaaatcagacacttatacaaaatggattgagagagagggtagtacttagggtggacggtggattcaggagtggtcaagatgttcttattgctgctgctatgggagctgatgaatatggctttggttctgtagccatgatagctactggatgtgtcatggcacggatttgtcacacgaataattgtccagttggagtggctagtcagagagaagagcttcgtgcaaggtttcctggtgttcctggtgatcttgttaactacttcctctttgttgccgaggaggttcgagctgcattagcccagttgggttatgagaagttggatgacatcattgggcgaacagatttgcttaaaccaaagcacatctcattggtgaaaacgcagcacattgatcttggatacctcctatcaaatgctggattgcctgaatggagcagctcccaaattaggagccaggacgtccacactaatggccctgttcttgatgagacaatccttgcagatcctgagatagctgatgctattgagaatgagaaggaagtttccaaggcatttcaaatctataatgttgacagagctgtctgtggtcgggtagcaggtgtgattgccaagaagtatggagacacaggttttgctggccagctcaacatcacgttcaatggaagtgcagggcagtcctttggttgtttcctgactcctggaatgaacattcggctagttggggaggccaatgattatgttggaaagggtatggctggtggagaactggtggtagttcctgtagacaaaacaggatttgttcctgaggatgctactatagttggaaacacttgtctgtatggagctacaggtggtcaggtatttgtgagaggcaaggcaggagaaagatttgctgttagaaactctctatgtcaggcagtggttgagggcaccggagatcattgctgtgagtacatgactggtggctgcgtagtcgtacttggcaaagctgggaggaatgttgcagctggaatgactggtggtcttgcctacattctagatgaggatgatacacttgtcccaaaggtcaacaaggaaatcgtcaaaatgcagagagtgaatgctccagctgggcagatgcagctaaagggcttgattgaggcctatgttgataaaacgggcagcgagaaaggtattgcgattttgagggaatgggaggcctatttgccgctcttctggcaactggtaccgcccagtgaagaagactcgcctgaggcttgtgcagagtttgagagagtacttgccaagcaagcaaccacccaattgtctgcgaagtgatcgaatcagactacaggaaggtggtaggtgttttctatttgacacaaagtgatctcatcttatcacttcaagaaaatcgaagaccataaccggcgctctgaggcaccgaagtgcccgtctgaagactgcaactttgtggaggctctgcccaggccatctttttgagttgagctaacagaaccgagggttcttctcgacgctcgtgcacctagaatccaatggtttcgcagcaaaagctggaatccaatggttg

SEQ ID NO: 201724 - DNA, 2821 bp, Zea Mays
gtcagtctctgccgcagcagcaggacgcgtcgctcgcagtcgcaggctcgcaagtcgcagcggccgcaacgccccaacctggcctcctcccaacatttttatagccagccgcccctcgccgcctatttccaacgtctctccagctcgtctcgcattcccttcgcctcctctccgatcctgacaactgttggcgatctagggttttcccaccggtctccggtgactccgaccggccgcaggcctccgcgctgcacccatggaggggctcaccctcatcgacgtctccgtcgaggacgatcttcttttcgacatcgcctcaccgccccacgcagggtctctggtgggcgccgtggcgacttcctctggcgcttttccgtcggcggcgggacgggctccggatccggacagtgtgatggaggagcaggcgctccccgagcggacggactccccggaacagcggaaggccaagaagggggtgaacctgcgcaagagcttggcttgggacagcgctttttttacaagtgaaggtgttctcgacactgaggaattggccattgtaaacagcaccttccgtaagacgcagggttccaggttgcctggaatcgtggaggaaatgagtagatcgggggaatcagcaacctcaactctggaaagtgaatcctgggtgatggagagcgttgagactgaactatttgacaatgtccgtgcttcgatccagaggtctcttggcaaacctgataaagttccaggtcggcctgttgctggctcaaaccacccaaaggccacagcaaatgtacctcgtgttgcagttgcagctagaaaaggtgttgatcggatgccccagccaaagataagggcccctgtttcaacaagccaaggagccggtgtcagacaaagggcccaagtcaccaccaaagagcctgtggctgcacgagttaatttactaggagctgcagaagcaaagatatcctcaaaacctcctagagctttgccaagagttgctatgatgaggtcatcaactaccacagctgtcacctctggggtttcagacaaaagaagcagcactgggggtgctgccaacaggcaggcagctggtaaaactgccagtacttcagctggcctgagatctggcgggggtacaaagtctagttcaatctcaaaatcaggtcccttcacatcagcagcaacttctcatggtgtgtcaatggacactaagccggaagcaaaaaccaaatcagcaaccttaagcaacaaaaataggactgcccagagggtccctgttcatccgccatcaaaatctggtatcagcaaaactattccctcaagatcatcagggaacacgattccagctaagggccatgctgaccgtgcatcaccaagcatttcacctagcagctccatggacagcatgagctctgtcatatctggggcttcaactgcttccaccgtagggaggatgagccatacatctgagagtttaaatggactgtccccctccctcaggaagagcaatgactgccctccaactccaaagcttaggcctcctgttgtcacagagggtcattcatctggaacagcagcacctggagttaatttaaaagctacttctgaaatgaccaaccagagaaaaggttttaagccatctgggcttcggaggcccacacccaagattggttattttgatgctgagaaatacattgaccaaaacatcggtgcacagctacaaccacaaccttcaaaggtccagtgtctacctgacacaacacaatttcagagcatgaatgtggatgccgcaccagctacctacgtccaacaggattcaaaactgacagcaacacctcatgaggaaagttgtgcttccgaaagtaaggtcgtgaagctgctgcctcttaaggtggaagtagagccttttaaggtggcggaaccatgcacgcaccagactgatccagttgtggtcagacccgaagcagtgcaacagcaatccatggagatccagtgcttgctatatgccacaccaaactctcagcaaacctttggtcaacaagtattagaacctatagtagcacctcatgaggttagtgcttgcaaaagtaacacagtaaagacgcctttggaaactgtgcaaatggaagtagaagcgcctctagaagcagtgcaattggaagcagaagcttttaaggtggacaaacctgaagcgtgcagacacctggtcagtccaattgtggtgaaactcgaagacaaattctgtgatcaaaatgctagagctcttgtcgctgaacgtgaagattgcacgctcatgactgaggcagtggtggcactggctacagactattcaaaagagaacattccggttttgcatgagaatatacaagctaatgtggatgcgagttcattagttgaggtgctgacccagaagttatcctccatttctcttggggaggataactctaacgtggctctcaggtcctgcagtgaatgaggtttggatggtatgctggttgttattttattaccctcttgttatctgtaggcaaccgtaccgcagctgacgagtccaattcccttaacctgcttgtggtgtaaaatccttgtgcacagagctttatagaactaagattttctattgtatgcatgaaaacctcatctttgtctattgccggtttgcaagtaaagtgtgtttgtttggtaattatattttactttgtttagtaattcacaatggatacctagagagcctgtttgtaactgctatacgagtgggtgattttttgtgggagagggtctaatggtatatgttttgatgtcggtacatatatatgcc

SEQ ID NO: 201725 - DNA, 1643 bp, Zea Mays
aagaatggtatgtgccgtccaaacgagcgagcacacatatcctttgtggtcgccgtcgctctcctccacatgacttgcttatgccagtatgctgactgtagcctgtaccggagctaccccagcataccacgctgtgattttgctgacaacttcttcttcatcccaggcatcgctgcaccagtctttgctggagtttacacagcgcacagtcttctcagcagaggcaacgaggctccgtctgatgaaggaaccaatgaatcagatacggttcaagaagagacaaagccacctgaaacagggaactgtgaaaagaggaaggtacgggtgcagctatataagctccaggaagcagagagccaggcatctctacttgaaagctgcttgaagagtttgtgcacagtgggtctcctactcggctattcagttctcctgctctactctccggaaaccatggctgttgtggagctgaaggttggaatgcactgtgagaggtgcatcaaggccatcaagaaggcaatcaaaactattgacgacatggagagctatcgccttgagacggagataaacaaggtcacggtgacggggagcgttaccccagaggaagtcgtcaaggctctccacaagatcgggaagacggcgacatgctggacccaagactgaggagggcctggttgattcggacgtccctgagaatgagattttgttggctgtgggttggattggatggagctggagcctgcctgggcaggcaactttttcagaccatcagatgtataggaataaccacggacagatgctgtgacttgtactatatgtgagatcctacctaccactaccagcttgttcaatcatgctccacgcacgcgcgatgttcgagaccgtgtctaccaggttgcctgatagcctttccttgaccatttcttctctgaaggcgttgattcagctgtgcgataaatctcggctgacctgcctccattggcccgacatctgctacagctacagtacgtgagaccagacgcgtcagctcaagtacgtgccgcgtgatgaacgaacagctccgaagctccggtctccggactcttccacccgtctcgtatttcgtctagctagcagcactagcaggctagcagccattaataaggagttggagtttcgtgtcgcggtgttttatctgaggagctgtgggataagcacgtgtggcacgggcagagcggtgcaagtgcaatcgggatcaggagcagaggtcggcaggtcgctccgcttgcgcgaaaagaagcatggcggtgtgcgcatgggcaaaaggcagaatggctggagataggtgtcgatccgtcatcgtccatgatgaggactgcttctcgcttgcgagtttcgttgcgtgcggacgaattgaccagacgccgttcgtcctctccagtcgagtctgtgtttgtcctgtccgcgggttggaagagtgtcaacaactctacaccacgcgaggatggcgccagcccgactacagaaaacctgatgggaggaaagccgacgttggaagcggaagctgatggagctgtgaagcggagaaggagcaacagagttaagaagccgaactccaaatatattggtgccaactggctgtaacacaggggatgagcgtatctctg

SEQ ID NO: 201726 - DNA, 1647 bp, Zea Mays
aagaatggtatgtgccgtccaaacgagcgagcacacatatcctttgtggtcgccgtcgctctcctccacatgacttgcttatgccagtatgctgactgtagcctgtaccggagctaccccagcataccacgctgtgattttgctgacaacttcttcttcatcccaggcatcgctgcaccagtctttgctggagtttacacagcgcacagtcttctcagcagaggcaacgaggctccgtctgatgaaggaaccaatgaatcagatacggttcaagaagagacaaagccacctgaaacagggaactgtgaaaagaggaaggtacgggtgcagctatataagctccaggaagcagagagccaggcatctctacttgaaagctgcttgaagagtttgtgcacagtgggtctcctactcggctattcagttctcctgctctactctccggaaaccatggctctaggttgtggagctgaaggttggaatgcactgtgagaggtgcatcaaggccatcaagaaggcaatcaaaactattgacgacatggagagctatcgccttgagacggagataaacaaggtcacggtgacggggagcgttaccccagaggaagtcgtcaaggctctccacaagatcgggaagacggcgacatgctggacccaagactgaggagggcctggttgattcggacgtccctgagaatgagattttgttggctgtgggttggattggatggagctggagcctgcctgggcaggcaactttttcagaccatcagatgtataggaataaccacggacagatgctgtgacttgtactatatgtgagatcctacctaccactaccagcttgttcaatcatgctccacgcacgcgcgatgttcgagaccgtgtctaccaggttgcctgatagcctttccttgaccatttcttctctgaaggcgttgattcagctgtgcgataaatctcggctgacctgcctccattggcccgacatctgctacagctacagtacgtgagaccagacgcgtcagctcaagtacgtgccgcgtgatgaacgaacagctccgaagctccggtctccggactcttccacccgtctcgtatttcgtctagctagcagcactagcaggctagcagccattaataaggagttggagtttcgtgtcgcggtgttttatctgaggagctgtgggataagcacgtgtggcacgggcagagcggtgcaagtgcaatcgggatcaggagcagaggtcggcaggtcgctccgcttgcgcgaaaagaagcatggcggtgtgcgcatgggcaaaaggcagaatggctggagataggtgtcgatccgtcatcgtccatgatgaggactgcttctcgcttgcgagtttcgttgcgtgcggacgaattgaccagacgccgttcgtcctctccagtcgagtctgtgtttgtcctgtccgcgggttggaagagtgtcaacaactctacaccacgcgaggatggcgccagcccgactacagaaaacctgatgggaggaaagccgacgttggaagcggaagctgatggagctgtgaagcggagaaggagcaacagagttaagaagccgaactccaaatatattggtgccaactggctgtaacacaggggatgagcgtatctctg

SEQ ID NO: 201727 - DNA, 824 bp, Zea Mays
aagaatggtatgtgccgtccaaacgagcgagcacacatatcctttgtggtcgccgtcgctctcctccacatgacttgcttatgccagtatgctgactgtagcctgtaccggagctaccccagcataccacgctgtgattttgctgacaacttcttcttcatcccaggcatcgctgcaccagtctttgctggagtttacacagcgcacagtcttctcagcagaggcaacgaggctccgtctgatgaaggaaccaatgaatcagatacggttcaagaagagacaaagccacctgaaacagggaactgtgaaaagaggaaggtacgggtgcagctatataagctccaggaagcagagagccaggcatctctacttgaaagctgcttgaagagtttgtgcacagtgggtctcctactcggctattcagttctcctgctctactctccggaaaccatggctctaggttgtggagctgaaggttggaatgcactgtgagaggtgcatcaaggccatcaagaaggcaatcaaaactattgacggtgagcttattacttgcttatggtcaaacatggagagctatcgccttgagacggagataaacaaggtcacggtgacggggagcgttaccccagaggaagtcgtcaaggctctccacaagatcgggaagacggcgacatgctggacccaagactgaggagggcctggttgattcggacgtccctgagaatgagattttgttggctgtgggttggattggatggagctggagcctgcctgggcaggcaactttttcagaccatcagatgtataggaataaccacggacag

SEQ ID NO: 201728 - DNA, 558 bp, Zea Mays
gggggtctggtgaaggaataagcgagggaggaactggcgctgaatggagctcaggacggtggcggtgggcatatcctgtcgccgtctggtggcgcacgagttggcggcggcgttggcttattttcttcagcaagtccagatgtacagtcactgtggtcattccatgaaacattcaatgaaaaagagagcatagaatgaacaaacttttataatagaaggaagggaaaaagtgtggagccaaggcttccttgcctcctctctcttgtagggttttaccgtctttaccgaggtgataagctggactgtgttccttaatgatgcaaaaaaagaagaagatatggggtcattttgtttcctagcactcaccctcacctgttaacatgcgtcgatgcactgcattaggccttgtttcacctgatgtcattttttaccccggttccgcattgtttttgtcgcgcacaggtgatccatccgtccacggctgtagttatcaactgtgtttctgggacgattttggttttatatatcacccgctaacgttcattttgtatgttatca

SEQ ID NO: 201729 - DNA, 3195 bp, Zea Mays
gtctccctctcctttgccttgcccaccgagaaagaagagagagagagagaaaattcaagcaggcaacccaaaaagaagaggaaaggattggaaaagctagggttttcgccatggccgtcgcccacctcgaactcccctccctcgaatccacccatcccacgctctcctagctcccgcatctcgcatctccacaaaaagccgccgccttcgattcccctccccgctgcctcgcccccattcgagggtttcccctccccccccccctaaatcgaaacgcagcattaccgaccgagcaagcaacccccgccacccgtcttcaagggtccgagccgagcgacggcgctggcgatccagcagggcgtgagggcggcggagggcggataatcaatgtgtacgctgtgcgccgtgcagcgctggtcgcggcgcgtcgccaccatgctcccgtggctcgtcgtcccgctcatcgtcatctgggccgccacccagctgctcctcccggccgcctaccgcttcgaggtcacctccccgcgcctcgcctgcgtctccgtcctcctcctcaccctcttctggtacgagatcctcctcccgcgcctctccctctggcgcgcccgccgctctgcgcgcctccgcgaggagcgccgcgcccacgccctcgagctgcacaagctccgcaagaccgcaacgcggcgctgccgcaactgcagcaacccgtacagggaccagaaccctggcggtggtaagttcatgtgctcttactgcggtcatgtctccaagcgccccgtgcttgacctcaattcagccgggaaggcccccaccggatggccttgtgctcaggattgtggatattggctcgacttgcgctgctcctccggcaataacagctccttcttgggattctcctggcgcttgctttcgtccttttgctcgacagcaatgaggtggttattgaggaatatattcagacttacgtcctcaggagatggtgagggcttgagcatagatggtaaaaggttggcaaagagaggggagaatggaggaaaaaccgaggagagcaagaccgagaaggcgagaaggaaggcggaggagaagagactggcaaggctggagagagaaatgctggaggaagaggaaaggaagcagcgagaggagatggctaagctagtggaggaacgcaggaagctgagggatgaaaaagcagaggccgaggagcggtcaaaaagtgctacacctgtcggggagaaggatgctaagagggaggcagagaagcggcgccaggagaggaagaagaaagaggacaaggggtcaagcaagagcaattcagattgtgaggacattgataggagattggtccgagaaggcgataggaagagagactttgacagaaagagtgacttggataggcgtgagggttacaagcctcattactttgattctaacaatcacagtaataaaacaggtgagagcagatcgaaatactttggccgtatgacaggtggttttttatcttcttcaagagggtttggcagcagttcattctttggcagaagtgctcaggcccctgcccctcaagttagcaaggttagtagacctgtagttcctgcaactgaccagggtaatacagtcaaaagagatgtccctcatgcagccacacaagctacaggcaaatctgctacagctggagaaactagaaatgcatggactaattttaatcgacctgtgagtaacaaggttagtccaaatgtgcatccataccctactggccttaaaaagtcatggcatcagttatttagtcgttcagcatcagtgtctccttgtcctgacgttacaacttcagctcatgatatggttcggaaggcagaaccaaatggagctcaaatatacaatgctcatacatttctctctcagtatccgcctctggactacaagccaagttcaagccagtctatgcaatttccaggttttccaccgcttaatggagcacctcccagtaacccactacctcattttcctgctggacatatgcctttctatgatgatgcagaatcaacactacttgaagaaccagagcaatttgaggacccatgctatgatccagatgcaattgcattacttgggccagtttcagaatctctagataacttcccgttggacttagattgtgggtttttctcgagtgatgttgctaaagagtcacatgggaggccttcaccaattgagtctcctctctcaagatctcgtacggttgaagaaaagcctatcgagcccccacactcctcagttgcaagaggccctggtggttccattctacccgagtctagcagtgaacaaggcacatggcaaatgtggagcacaccattggttcaggaaagtttaggtctgcaaggtcctcagagccagtggcttcgacaaaacacaaatcaattcaaccatagtgccaaccttttcagcagcggaggcggagcaataagtccccttggtactggtttgaatgacagtgatccatggctgcagaaagcacctttccagcaattgccacctgatacaccaagcctgttcctttcacatgaaatgccaggaaaattacacaatgacttggtttttgggtctccaaacaaatcagcccgtgaacgcccatttggaccgcctggttatttgtggcccaaggaggaactggcgctgaatggagctcaggacggtggcggtgggcatatcctgtcgccgtctggtggcgcacgagttggcggcggcgttggcttattttcttcagcaagtccagatgtacagtcactgtggtcattccatgaaacattcaatgaaaaagagagcatagaatgaacaaacttttataatagaaggaagggaaaaagtgtggagccaaggcttccttgcctcctctctcttgtagggttttaccgtctttaccgaggtgataagctggactgtgttccttaatgatgcaaaaaaagaagaagatatggggtcattttgtttcctagcactcaccctcacctgttaacatgcgtcgatgcactgcattaggccttgtttcacctgatgtcattttttaccccggttccgcattgtttttgtcgcgcacaggtgatccatccgtccacggctgtagttatcaactgtgtttctgggacgattttggttttatatatcacccgctaacgttcattttgtatgttatca

SEQ ID NO: 201730 - DNA, 1347 bp, Zea Mays
cacactttcttggtacttaagtcctgtttgctgggtgaacttcttgtgggcaggcatccccttagttggtttagggtgcgatctgcatctttttatctgtccaaggagcaagaggagatgaaaaaggttactgttcaaactgtcagggatgctttgatctcaaagaaagttgaatcaagggagcaagataatgctccattatctgatgattttcctgaagacgagaatgaagaggattttgataacaggatgcgcgcacaaatccttaaaaaacgtagagagcttggtgatgtttgccctcatgaaacctctaaagcaggagggacactgaggacgatgatcaggagcatgagctacaaaaagctaaaaaactatccttgaagaaaaaaggtgctggctcagaagcgagtgctgagaggatgtccaaagcagatgctaatttgcagctactaaatccagctgaacaagagagacatttgcaaaaacagaaaaaacgtcggctccaaggccgtgaagatgagactctagcgaagttacagaagttcaagtcttctttcctcagtaagaatcttgctaccaatcatgtcgaagagaagaatccttctactgataaggcggaaaaggaagatgaagaggaggatgactacaaagggtggcacacaaacctactgtctttcttacccagttcttccaaggatggaatgactaggaaagatgatccagatgactatgtagtggtagacccacttctggagaaaggaaaagaaaaattcaacaagatgcaagcaaagcttaagcggagagagcgcgaatgggcaggcagatctctcacctgattggaaagcttaactcaaattatgtcaatgctccttacgtccttacctaccctggacggttggaaacactggaaatgatgcagttttggcatggtcttgggactgcgcgcagatgattggtagtgaccgtttgtggactagtgttttcctttttggcatgtgtcatgattgcttacactgtaaatgcaattgtacaatagattggttataagctcactgtgaaagcagctctctgtatcactagctatttaatatccgtttcttcaaggagccgattggctgaagttgacactatagcttttgtctcaatttccttatttttattaagaagcggaatagacagtaattggccttcctagtttgttaggtagtgtttggttctggagctaatttggatggagtcgctatgtccgagagattttgaggagtcccgagagattttgaggagccggatggtttattatttgagtataattttttaagtcattctatcttacatgaaattaatcca

SEQ ID NO: 201731 - DNA, 1416 bp, Zea Mays
gcctccgaatctctctgcctcattctctctccaccggcgacggcgagtccgaccgcactgctcctctccgtgcggagatctctcgcgtgctggcaggcgcgtcctggtgactgggacacgggagaagagaccttggtgggtggcagcggcaggccatggaggcgctgctggtgacggtgcttcttctcctcctctcctctaccctcgccgcagcacaatggtgcgtgtgcaggcaggacgcgtcgcaggccgcgctgcagaagaccatcgactacgcgtgcggctccggggcggactgcaactccatccatgagaccggggcgtgctacaaccccaacaccgtcccggcgcactgctcctgggccgccaacagctactaccagaacaacaaggccaagggcgccacctgcgacttcgccggcaccgccaccctcaccaccagcgacccgagtaagtggaaccaacgaacgatcatgcatgccgtgtagcattgttaagcttcaaggaatcgggttctgtacagggtaattaattttggctatcggtgtagcactgtagcctcgcctaataactaataataggaagaagaagaaaaaaaacaccaactttctgagcgaataactgtaaaataagatttgcaaagtgcaaagctgtttgcggtatatatgctttattattctcgaccctaaaagtaaaaccctatcatagtgtctactgggcagacattggcatcaaagtgcgtccaattttccccccgatttttccaaaagggaaagtaaactgtaacgcggtcttttgttttgttttatgactccaaactccaaagccagattccaatgtcttctatggtgtgtggtgtctgtgttctgctgcttccatgctcttcagtcttgtgacactgtccatttttaccacccattcagagtcctacctgtagtaccttatatgacctttgtgttccaaactttcaggctcttcgggctgctcttaccccaccaccagtgcaagcgccgcgggaaccgtgaccccgaccaccggcggcacaatgggaggagcgggaggcccagggaccttgacgcccgccgggacaggcgcaggcacagccggcactaccggcatggggactgcaggcactacgggtaccgggttcggcggcctaggaccagcaggcatggacacagcggcggcggcggcggggggcttgctcctcctcccagaggctgggctgtgcgctgccctcgtcgcgctcctcctctccgccatcgtgctcgcgtgacgccttcacatgacctcggaaacaacaacctactgcctgcatgctagtagtagtagaaagcgctgcccttttgggaggtgtatgtagttcaggagtactctgattatctatggagaaagggtgggaattattggggaaaa

SEQ ID NO: 201732 - DNA, 1423 bp, Zea Mays
gcctccgaatctctctgcctcattctctctccaccggcgacggcgagtccgaccgcactgctcctctccgtgcggagatctctcgcgtgctggcaggcgcgtcctggtgactgggacacgggagaagagaccttggtgggtggcagcggcaggccatggaggcgctgctggtgacggtgcttcttctcctcctctcctctaccctcgccgcagcacaatggtgcgtgtgcaggcaggacgcgtcgcaggccgcgctgcagaagaccatcgactacgcgtgcggctccggggcggactgcaactccatccatgagaccggggcgtgctacaaccccaacaccgtcccggcgcactgctcctgggccgccaacagctactaccagaacaacaaggccaagggcgccacctgcgacttcgccggcaccgccaccctcaccaccagcgacccgagtaagtggaaccaacgaacgatcatgcatgccgtgtagcattgttaagcttcaaggaatcgggttctgtacagggtaattaattttggctatcggtgtagcactgtagcctcgcctaataactaataataggaagaagaagaaaaaaaacaccaactttctgagcgaataactgtaaaataagatttgcaaagtgcaaagctgtttgcggtatatatgctttattattctcgaccctaaaagtaaaaccctatcatagtgtctactgggcagacattggcatcaaagtgcgtccaattttccccccgatttttccaaaagggaaagtaaactgtaacgcggtcttttgttttgttttatgactccaaactccaaagccagattccaatgtcttctatggtgtgtggtgtctgtgttctgctgcttccatgctcttcagtcttgtgacactgtccatttttaccacccattcagagtcctacctgtagtaccttatatgacctttgtgttccaaactttcaggctcttcgggctgctcttaccccaccaccagtgcaagcgccgcgggaaccgtgaccccgaccaccggcggcacaatgggaggagcgggaggcccagggaccttgacgcccgccgggacaggcgcaggcacagccggcactaccggcatggggactgcaggcactacgggtaccgggttcggcggcctaggaccagcaggcatggacacagcggcggcggcggcggggggcttgctcctcctcccagaggctgggctgtgcgctgccctcgtcgcgctcctcctctccgccatcgtgctcgcgtgacgccttcacatgacctcggaaacaacaacctactgcctgcatgctagtagtagtagaaagcgctgcccttttgggaggtgtatgtagttcaggagtactctgattatctatggagaaagggtgggaattattggggaaaaaaactaa

SEQ ID NO: 201733 - DNA, 2719 bp, Zea Mays
acgatgtcgctccctcttctccccgtccgatccgatctggaaggagaagaaggactactcgacggcgatactagagaggaaaaagtcaccgaaccgccttgtcgtcgacgaggccaccaacgacgataactccgtcgtcgcactgcaccctgacaccatggagaggctgcagctcttccgcggcgatactgtgctcctcaagggtaagaagaggaaagacactgtttgcattgtccttgcggatgaaacctgtgaggagccaaaggttcggatgaacaaggttgtccgccagaacctgagggtgaggcttggtgatgtggtttctgtccaccagtgccaggatgtgaaatatgggaagcgtgtgcacattcttccaattgatgatacagttgaaggcattacagggaacctgtttgatgccttcttgaaaccatacttcctagaagcatacaggcccgtgaggaaaggagaccttttccttgtcaggggtggaatgagaagcgtggaattcaaagtgatagagactgacccttctgaatattgtatcgttgccccagatactgaaatattttgtgatggggagcctattaagagagaggatgaggagcgtcttgatgaagttggttatgatgatgttggtggagttagaaagcaaatggcccaaatcagagagcttgttgagcttccactacgccatcctcagcttttcaaatctattggtgtgaagccaccaaagggcatattgctgtatgggccacctggttctggaaagactcttattgctcgtgctgttgctaatgagactggagcctttttctttctgatcaatggcccagagattatgtcgaagttagcaggagagagtgagagcaatctcagaaaggcatttgaagaagcagagaagaatgctccatctatcattttcattgatgaaattgattccattgcacccaagagagaaaagaccaatggagaagtagaacgtcgtattgtttcacagctactgactcttatggatggactcaaatctcgttcccatgttattgttatgggtgctacaaaccggccaaacagcatcgatcctgctcttagaagatttggaaggtttgaccgggaaattgacattggagttcctgatgaagttggccggcttgaggttctccgtattcacactaagaacatgaagctagctgaagatgttaatttggaactcatttcaaaggatacccatggatacgttggtgctgatcttgctgctctttgtactgaggctgctcttcagtgcattcgtgagaagatggacatcatagatcttgaggatgagacaatagatgcagagatattgaactcgatggctgttacaaatgaccatttcaagactgcgcttggaacaagcaacccatctgctctccgtgaaactgttgttgaagtcccaaatgtctcttgggaggatattggtgggctggagaatgtcaagagggagctccaggagactgttcaatatcctgtggaacatccagagaagttcgagaagtttggcatgtctccatccaaaggagttctgttttatggtcctcctggttgtggtaaaaccttgttggcgaaggcaattgccaacgagtgccaggctaacttcatcagtgtcaagggtcctgaattgcttaccatgtggtttggtgagagtgaagccaacgtccgcgaaatttttgataaggctcgccaatctgctccttgtgtcctcttctttgatgagcttgactcaattgcgactcagagaggaagtagtgtgggtgatgctggaggcgcggctgatagagtgcttaatcagctactgaccgagatggatggcatgaacgccaagaaaactgtgtttattattggtgctacaaacaggcctgacatcattgatcctgctcttctgaggccagggcgtcttgaccagctgatctacattccactgcctgatgagcagtctaggctccagatcttcaaggcctgcctaaggaagtcccctgtggcaaaggatgtggacctgaatgctcttgctaagtacacacaagggttcagtggagcagatatcacagaaatttgccagcgtgcgtgcaaatatgcaatcagagagaacattgagaaggacattgagagggaaaggcggatgaaggacaaccctgaggcgatggaggaagatgaagtggacgagattgccgagatcaaagcagctcacttcgaggagtctatgaagtatgctcggcgcagtgtcagtgatgctgatatccgcaagtaccaggcgttcgcccagacgttgcagcagtcccgtgggttcggcagcgagttccgcttctcagagcagtcggcgacagctggtgctgctgcagccgatccgtttgcttcggctggtgctgcggctgacgatgacgatctatacagctaggtgtcctgttgggttggttctgggttgtgcaatatcagtctcatcagtcatctgtttaaaactctgattatacttagacacgggatgtcatgcaatgatatttgttttccgtacatttggacgttgagataatgcctgtttattttatgccatactctccatgccattttatgaatgattgtttgtcattgagtatatgagtcacgttttatatggtgacgtgactgagatctatctccggtgtcagattagtgttggcagaagcaggtctggatgagatgaatggct

SEQ ID NO: 201734 - DNA, 2800 bp, Zea Mays
cgagttccaaaccctcgccgcaagaaagaagctataaaggaaagctaatcccccttccttgagtcctccgcatctcgcattctcgccggtgctgctgcaattaacgccacccccggccaaccgcctgaaaactacctctgccgccggcgccgccatccccaacatggcgagccaaggggagccctcggcctctgcttccgatccgaaggagaagaaggactactcgacggcgatactagagaggaaaaagtcaccgaaccgccttgtcgtcgacgaggccaccaacgacgataactccgtcgtcgcactgcaccctgacaccatggagaggctgcagctcttccgcggcgatactgtgctcctcaagggtaagaagaggaaagacactgtttgcattgtccttgcggatgaaacctgtgaggagccaaaggttcggatgaacaaggttgtccgccagaacctgagggtgaggcttggtgatgtggtttctgtccaccagtgccaggatgtgaaatatgggaagcgtgtgcacattcttccaattgatgatacagttgaaggcattacagggaacctgtttgatgccttcttgaaaccatacttcctagaagcatacaggcccgtgaggaaaggagaccttttccttgtcaggggtggaatgagaagcgtggaattcaaagtgatagagactgacccttctgaatattgtatcgttgccccagatactgaaatattttgtgatggggagcctattaagagagaggatgaggagcgtcttgatgaagttggttatgatgatgttggtggagttagaaagcaaatggcccaaatcagagagcttgttgagcttccactacgccatcctcagcttttcaaatctattggtgtgaagccaccaaagggcatattgctgtatgggccacctggttctggaaagactcttattgctcgtgctgttgctaatgagactggagcctttttctttctgatcaatggcccagagattatgtcgaagttagcaggagagagtgagagcaatctcagaaaggcatttgaagaagcagagaagaatgctccatctatcattttcattgatgaaattgattccattgcacccaagagagaaaagaccaatggagaagtagaacgtcgtattgtttcacagctactgactcttatggatggactcaaatctcgttcccatgttattgttatgggtgctacaaaccggccaaacagcatcgatcctgctcttagaagatttggaaggtttgaccgggaaattgacattggagttcctgatgaagttggccggcttgaggttctccgtattcacactaagaacatgaagctagctgaagattgcattcgtgagaagatggacatcatagatcttgaggatgagacaatagatgcagagatattgaactcgatggctgttacaaatgaccatttcaagactgcgcttggaacaagcaacccatctgctctccgtgaaactgttgttgaagtcccaaatgtctcttgggaggatattggtgggctggagaatgtcaagagggagctccaggagactgttcaatatcctgtggaacatccagagaagttcgagaagtttggcatgtctccatccaaaggagttctgttttatggtcctcctggttgtggtaaaaccttgttggcgaaggcaattgccaacgagtgccaggctaacttcatcagtgtcaagggtcctgaattgcttaccatgtggtttggtgagagtgaagccaacgtccgcgaaatttttgataaggctcgccaatctgctccttgtgtcctcttctttgatgagcttgactcaattgcgactcagagaggaagtagtgtgggtgatgctggaggcgcggctgatagagtgcttaatcagctactgaccgagatggatggcatgaacgccaagaaaactgtgtttattattggtgctacaaacaggcctgacatcattgatcctgctcttctgaggccagggcgtcttgaccagctgatctacattccactgcctgatgagcagtctaggctccagatcttcaaggcctgcctaaggaagtcccctgtggcaaaggatgtggacctgaatgctcttgctaagtacacacaagggttcagtggagcagatatcacagaaatttgccagcgtgcgtgcaaatatgcaatcagagagaacattgagaaggacattgagagggaaaggcggatgaaggacaaccctgaggcgatggaggaagatgaagtggacgagattgccgagatcaaagcagctcacttcgaggagtctatgaagtatgctcggcgcagtgtcagtgatgctgatatccgcaagtaccaggcgttcgcccagacgttgcagcagtcccgtgggttcggcagcgagttccgcttctcagagcagtcggcgacagctggtgctgctgcagccgatccgtttgcttcggctggtgctgcggctgacgatgacgatctatacagctaggtgtcctgttgggttggttctgggttgtgcaatatcagtctcatcagtcatctgtttaaaactctgattatacttagacacgggatgtcatgcaatgatatttgttttccgtacatttggacgttgagataatgcctgtttattttatgccatactctccatgccattttatgaatgattgtttgtcattgagtatatgagtcacgttttatatggtgacgtgactgagatctatctccggtgtcagattagtgttggcagaagcaggtctggatgagatgaatggct

SEQ ID NO: 201735 - DNA, 2462 bp, Zea Mays
gccttctattaatcctaaaattatttttttgaaagaattctaaaactatttttcttgaaagaatcctgatattctttttgacttgaatgctgaataaatttgctgagacgaacctcatggaggagaaagttcttgtcaatttaggacccgctggccaccaggagatcattgctgggaattcaaatatgcaaaccagtaaattcaatgtttcatatactcctcaaatcgccggggaatatgaaatttgggtactgtgtgggaacatagtgctaaatggtggaaatccatatgccatgacagttttgccagttgcgatcaatacatctttatcaagggttgtccagtttgaccccaaagtaagactgtcaattgaaaacgaagttgttgttcgacttgttgactcattcatgaacccggtggagtcttccaagtcaaaattgaaatttcggctgacatctgcaagtaccacaacccctgtaactacgactacgagttttgtggcaaaagaatttgtcaacaacagcgatggatcatatactggtcattatgcggcagggggccttggttcatatggcatatgcgttctttttgaggacaaacagctgcctccatgtccattcgaggtcactgttcatgcagatgagtacttttcagatgttaagaatgacactgtttcggtgtgggaggatgaatccgtttccttcgacgtattgtcaaatgaccgcattgcaggaagtaaagcggagatagcgaactcatcttctccacttcacgggtcagtcctgcagttcggccaaacctaccgttacacacctttccaaggattctttgggaatgactcgttctcgtatacagtacgcgatgagcataacaatgtcgtcactgcaacggtcttcatatctgttctctgcagaccacctcagttcgtatctttacccgagaagttgcatgttactgaagatacaatcagcccactttttggtggattcccggggatgaaaatggtgtattcagatacgacagaaaatatatctgtcacggtgacagcacagtccgggagcgtgtcttttgatccagtgagaattaaacttggacagttttcagaagatgtactttcaatcagcagcagaggtggcaaggacctggtgttacaaggaactgtagaagcggtgaatggtgcactagactctctgctgtacactgggaacgaagacttccacggagacgatgtcgtagcgctaaatgcctcgagcagaaacggtgtgcgaagaacccagttcccaacattcgtcgagccaatcaatgacccttcggtgatacttgctccaagttcgattttgctgagtgggaacgaatcatgggaagggtatagaatatttgataagaacagggatacatttgaattttccattgttgaccctgatatttacaatttcccagggaagaagtcctcctttttcctagtgctctcgctagaagtcctggaggggacgctaaccgtgaccttgccgtccagcgtcattgccgcggcgtcgatgaagaccgaagccggtagctgctggcagccggttcagacgtacgtgaccatcgcgaatcgcttcatagtgagaggaaccgccatcaggttccgtgggagcgtccgggactgcaacagggcaatgcggcagctgcgttattaccaaggtccgacgcatggaacgaccttgtccatcgctgtgaacgaccaggcaaaccatggatgctaccctgactgctcggagaggatgacgatgccgctatccaccgccaagaccattcgcctagttccacttccagtcgttgcaggcgccctaggacacgtgagctcaaggcgagctatcttgttcagatggctggcggcggccgggatcgtggtaatgctatgccagggctgtgttctcatgtgctgcctattcaaatgcatgagagctctaaagagcgagcgaagacataaaacctacggtcaaattcgcgcaccggagcagacggccccatttcgtcagaatatgtgtgcttcaacatcgcaacgcgaggacgttggatactcccctgctactgcaactgcgtcccagcttggtgcaagcagatcgagtcttcgccagaggtctccgcgttcatgcaatcaagaaatggaactccagccagtctctggggccgtaaacaatagaaatgaaggtagccgtcctgtttcatacaaggacaaataaggaaggcactttatcgtttaatccgttttccgaatccaaactatcctctgctcatccaaaaacttgtcagatgccaccgaacgagtttccagtgtataatagtgagtgcagcacaacgtgaaaaaataatggggggaaacgagatgtgtctgttctattgacagccattacaatataggaacccaagctaattccctccccgctccattataaaagaagacataaccaaatcctgca

SEQ ID NO: 201736 - DNA, 1149 bp, Zea Mays
cccgcgccgggcataaataaaaacgccctctctcgagtctcgactctgcttccacggttcctcagcttcgtctctctcgccggcgcggcaggcaactatcatcacttcattagctcatccaatctattccgatgacgaccgtgcccaagccacagcaggtggcgcactcacgggcacggctcgcaccccgcgcgatcggcgccttgctggagtttgccccagcctcctcctccctccgcttcgccgtgcaccgctgccgcactgctcgcctagaggtgaaggcatctggaaacacgtttggaaactactttcaggttgcaacctatggtgaatctcatgggggtggtgttggttgtgttatcagtggttgtccacctagaattccactcactgaggcagacctacaagttgaactcgatcgaagacggcccggacagagcagaataacctccacaaggaaggagactgatacatgcaaaattctgtcagggacacatgaaggggtgactactggaacgccaattcttgttattgtcccaaacacagatcaaataggcagtgatcaccgtgaaatagccaatgtgtaccgaccttctcatgcagacgcaacttatgacttcaagtacggtgttagagctgtacagggaggtgggaggtcgtcgggcagagaaaccgttggaagggtggctgcaggggccctcgccaagaaaattcttaagctcaaatgtggattagagatagagagcaacatcgttagatgtcctgatccagagtacgcagagaagatgatagacgcaatcgacagagtacgagttcgaggggattcggtcggtggagtgatcacatgcgtcgctagaaacgttcctcgcgggctcggttctcctgtgttcgacaagctcgaatccgaactggcaaaagctatgctttctattcctgcgagcaacgggttcgagattggcagcggattcgccgggaccgacttgacaggaagtgagcataatgatgagttttatatggataaggctggaagtgtcaggacacggactaatcgctcgggtggtgtgcagggagggatatcgaatggtgagattgtgcacttcaaagttgcttttaagccgacaccatctatcggggtatcttcggactcaa

SEQ ID NO: 201737 - DNA, 3181 bp, Zea Mays
atgacccacccacccacagccacacaggccgagctgaagggagggggactgcctgcgggctgcggcttccggcgcaagatgccatgtggactccggatgactcgaaagtccatccatctcctctctatctctctatctatctatttcacgcctccacggctccacggctgctgccagcctgactagtgaggtgattgccgcagcggcggtcggccagagcgcgtgtgctcctccccagcataatcccaccaccatcgcgcacccgcccacctcaagcgagcggccccaattcccagccaccgcaagtggcttaaccctcgctcccgcacccccactcttccaccgcacgcacccgcgcgagcgagtgcggcagatcgcggccggccgctgggtccggtgcagttccgggctgcggcgccgggccacagttgatgcggacgatccgaggaggacgggacgggatggcggcttcggcggcgcctgggtcggctgggaggcaggcgcgcggagtcgcggcagcggcgaccggaaacgcggtatttaagagtggccctctcttcatatcatcgaaaggaattggatggaaaacgtggaaaaaacgctggttcatcctcacacgaacatcactggttttcttcaagagtgatcctagtacgttaccacagagaagtgaagtgaaccttacattgggaggaattgaccttaataattctgggagtgtagtagtcagggaagacaaaaggctactgactgtcctttttccagatggccgtgatggccgtgccttcaccttgaaggcagaaagttctgaagatttgtttgagtggaaaacagcgctggaagaagctcttgcacaagctccaaatgcagctcttgtgatggggcataatggaatatttcgcaatgacacaacagatgtatatgaaggggctattccgaattggggaaagaagagacctatcaaatcaatagttgttggcaggccaatactgcttgcactggaagatatagatggcagtccttcttttctggaaaaagctttgtgtttccttgagaaacatggaatgaaggtggaaggaattttgcgtcaagctgcagatgtggaggaggttgacaggagattgcaagaatatgagcaaggaaggacagaatttgcaccagaagaggatgctcatgttgttggtgactgtgtaaagcatgttctccgtgagcttccatcttctcctgttccagcttcgtgctgtacagcattattggaagctttccgtctggaaaccaaggaatctcagatcaaatccatgcgtgcagcaatatctgaaacatttcctgagcctaataggcggctgctacagaggatgagcactttaggtgctccttatcacctgattctcaaacaggagatagtggaagtgaagaatcaactgatgacgaaactgtggataccaagggtaatggatttcatgatgcggaaaatgatgtagatcaagaattagatgatgccgagcgaatgctgagtggaaaattcactgaaaccagtgcaagtgcttgtgctgacctctatgaccacaaggaagttaatggcaatagttcagacactgagctctttgttgaggatcacacatttgaatcaaatgtagatttaaatgatgctcccctaagtcgtttaacagaaaatggaaagggtccatcaaatctgatgtccgctcatgaaactccattatcagtgggagagattcttctgtctttggatgctggaattccattaccttgtcgtgcagctgaatattctagcaaacccaatggaactcagcagcatgtgaagcgtactaacttatggggatggagcaatgtgagaaagggccaacgatcggagttagttgatccatcaggtgaagaagagcttgctattcaacgacttgaggtaatgaagaatgacttgcagatcaggattgcaaaggaggctagaggcaatgcaatcctacaggcaagtttggaaagaagaaaacaagcactacacgagcgtcgtgtggctctggaacaggatgtgtcaaggttgcaagagcagctacaggctgaaagggatcttagagctgcactggaggttgggctaagcatgtcttcttcacaattttctagctcactctccatggactcgaagacaaagtcagagcttgaggaaattgctctcgcagaagctgatgttgcaagattaaaacagaaggttgcagagctgcatttccaactcaatcaacagcgccagcaccagtatggctcttccgtagatgcaaatgatcatcctcaacaccttctaaatcatctctcgcagaacattgtccaaacaggatttgataggagcgttgctttctgtaatcaagagaagcaaagaaatgaggagagcctgccgagcacatcccactggagaagcatcaaacagcatgtgctatctcatggttcttcaaggcctttctcccgaaagcattcctcggacacctccttgagtgattctacaagtgtgcctgcagagggcgggccaatgttggtgaacatccctagaacaacgaaaggtgtcgaatatgggagaccgccgtctgtgtcgtcatccactctggttgaactaacaaccaggctagatttcttcaaagaacggcggtcacaattgatggaacagctccacagcctcgatttagggcatggatccacgtcccatggtttcccatacaaaccttcatctccctggaacagcccaaagtaaagtaggggatgatcatttgctgcagtacgacgtctctgtatattcttggtatagaatctcctttatgtttcactccatctttgtagagcctggtagtgagaatgtatatcccttgccttcacttgttttgctagtgcttgcagcggatctttttttagcatgattttgttttactgtatatgtaatgagttgaggagattgtgacacggcttttatatgttttagcaattttgttctattgtgtatgtaatgagttaaggggattgtgacacggtttttatatgttttcgcaatatatagatgcgtcttttttcttggggatatatagtccactgcaggtggagctactgttgtcatttcgaaaacaatgtggctgatccttgtaggcagctaattctctcccccaaatggattggaggaaacgagtgg

SEQ ID NO: 201738 - DNA, 952 bp, Zea Mays
taattattcttaggtatgtgactttggcctttcaagactgaaagctaacactttcctgtcttccaagtctttggctggaactcctgaatggatggcacctgaagtgcttcgagatgaaccatccaatgagaaatctgatgtctatagcttcggtgttatcctatgggaactaatgacactgcaacaaccatggtgtaacctgaatcctgcccaggtggttgctgctgtaggtttcaaaggaagaaggcttgaaatcccaaaagatctgaatcctctagtagccgtattaattgaatcttgctgggccaatgaaccatggcgaagaccctcgtttgcaaatattatggacactttgaaaccattaataaataaggttccggcacagttgatccgttcagattcgtagcctgttctatacgggtacgggaagatgtattttactgagtggtcctgataacatcaacatgagtgtcctaatactgatctgctataattgaataatccttggatggtattactcattatgataatacaattctcataatctttcaaatgaagtgtgcctggcaatttctttccatggcttaagttaaatacaaaatcaaatacatctacaatggacaggaagtaaagcaatgctgatgttaagcaaactatgttgatggacaagttaaacgaggctaaatatcaaacacggactgtgctagctgtagttccttagtgtccattttgtcttgtgttaattttcagttgttctcttgcaacctatgttgtataaaaggttgactgagttaaaaccattttgttcatttatataattatatgtatcaagttcatagctacggactgcagcaattcattgattactcaaaattatacttctgatattttaatacattaaagacaagatttgattagtgtgctctgatagctggtactactagtacttatg

SEQ ID NO: 201739 - DNA, 1473 bp, Zea Mays
tgttgcttactgttccttattcctcccttggtctactgagactatgttcaacgccggttccttcgtccacacgaccgcgcgctcggaaaactccgcggagggcgaaggaggcgaaccaagggcgacgtatccgccgccggagaaggtagccctcgatccgccgtctcccgcgattcgtttgtcttgcgacagctgggcgaccgtcgtcgccgccgcccttctccaggtgcccaggtcttcgccggtccctttgccgcctccttgccgccgacgagcaccagccaggaagaaaagaagctgaaccatggggaagagaaagtcagctgctaagccacctcctaagaagcggatggacaagcttgacactgtcttttcctgcccattctgcaaccacgggagtagtgttgagtgccgaattgacatgaagaatctgattggcgaagcatcttgtagaatctgtcaggaaaacttcagcacaactgttaatgcactcactgagcctattgatattgaatggattgatgagtgtgagcgtgtcaacactgttgaaggcgacgatgatgcgtgagcttgccccatgcgatgaaactgttacctacaatcgtaatgtaatgtgctggtattctcgaatgccatagcccatagtcagccatggcttggaataacgtagtggctgactgatatgccagtaggcacctgtctagtacttacagaactacaaaaagtttgtactatacatatatggacaaccttataagtggctatgtgtgtacctatcctaacgcttatcccagatggtgtatcagcgtttttctgtgagattgttttcaagcaaggggttgttcattcattgggtcttctcgggaaaaagagaattatgctgcagtcaaccagatggccgctgttgtgccgacaatacagggtaaaccaaatgcaaccagaatataatctgcagcggaagatattcatagatacaattgttttcagttcattcaacgctgaaagcggtttcggtctggaggctgagctttggatcattggatggcactatgcagctttggcacctggagtaccgctcattagtttttcataaagtcccgttcatttcttgtgcacattgctggagattgagagatcgagatcaagactgtacgcatcataaaccgatcagtctattctttgctgtgtacacctgggttgtctttgtgcctgtggtctctgccaggagggtgttcttcgaagtttgaagtacatgtggtttgtgtcttaatgcagttcggtttcatggacgggttgtcaagtgttttaccaggaacagttgtcggtgcagcagtatgcttaatcatgaataaatgatttttgtatttaaatctgggcgcgcggtttggtttgcatttcttctggttttcttgtgcgtttcttctgttcttttaagtgaatgttgtctgagatttgtcgttacaggttcaccac

SEQ ID NO: 201740 - DNA, 1875 bp, Zea Mays
ctaaacaagtctagtgaagtaggatgctccaatgttgaacggaaacttaggcagctacttgatataactgaagatgaagcttatttccatacaaggcagagtgcatttctatatcatcttggagtgcagactatgccgaaaactcaccattgcttgaacatgagattgacagtagaatatttcaagtctggatcaaatcatgtggatcagttaaatgaccagaagcttgaaagtcctgccttacatcactatgtaatgttttccaggaatgtacttgcagcttccaccactatcaattcaacggttatgaactcccaggattcggaccacatcgttttccatgtattcactgatgcacaaaacttttatgcgatgaagtattggttcgataaaaattcatacttggagtcgactgtacgcgtaactaacattgaggacaaccagaagctctctaaggatgtagattcccttgagatgcaacaattatggcctacagaggaatatcgtgtcacgattcgtaatcattctgaacctttccagaggcagatgaaaactaagtacatatctatcttcggcctttcacatttcctcttgcctgaccttcttcctggcttgaatagagtagttgttctggatgatgatttgattgtccagaaggacttgtcacctctatggaacctcgatatgggtggtaaagtgattggagcagtccagttctgtggagtgagattagggcagctgaaaccttatatagcagaccataacgtcgatgatgattcatgtgtgtggttgtcgggcctgaatgtcattgaattggataaatggagggacaccggcattaccagtttgcatgatcaatcagtccagaagttgcgaaaggacagcctgaaatcacagcgactgcaagcactccctgcaggtctacttgcctttcaagacctgatatatcctttggaagattcatgggttgagtcaggccttggacatgattatggaatcagccatgtcgatatagagaaggctgctactctgcactacaatggtgtgatgaaaccttggcttgacttggggatacttgattacaagaactactggaggaagtacatgaccagtggagagaagttcatgacggaatgcaacattcactaattaacagggcatgaaatgcaccaaacactcattttttcgggcatttggacaacagacttcatgggctttgttcatcatgaaaataaacagaatcacgcctgacctgcaacatccatgatgacacaaattcacccctgacgtgacgagggagtgctcagtccaattccaagaggagaataagatgaaatgctttctgcggaacgttgccataacagcatccacgatgtctgaaggacgctagcacgaaacctgagttatgttgcagagtaccaagatataacgtagaatatttcacactgttcattatggtttgatgagtttttttccctatattcagcttggcattgcaaaagtgcagttccttgctgttcatttttagtataagatctttggtgctattctttttgctcattgtgcaagagcaatactgagggagttcaatgttgacggcggcacatcgtgtataggaaacagcaaaccatgactgaattagcgagtatttccttgtactctttgcagcaagtcgtgtgtttgttatcgtcagatgttgatgtcccattgacgacataccaaatggtggtttgttccgctcaatggcagtctctctcaatctatctgatttgttgggatctttttgtttggaaaatctcaaggtactagaattcagatagttatgtctacgtcccgtttggatcattggtttggatccttggaactgaattttat

SEQ ID NO: 201741 - DNA, 2487 bp, Zea Mays
aaacagatcagttggttctgtgcactgtactgtcgccaatgctggtgatgaaactttgctcaagtctgcaaactggatgtttccaaaaaggtgtctggatctgatggggtttccgctgagagatctactagatcgaggtttagccaggatcatgctgccaaatcaaaagcaaagctcaagggcgctttctctttacttggactgaacaatgataccttcaaaggacctcgtacctccaaaaggtttcagttgaaggacctgtcctggagatcaaaggatactactgtcaatgggaaagagaaccatgatcaagagacagtgcatgaggagaataccaagtcctgtgaacatgaatatgggagttactgcctctggtctactgaacacagggaagtaatgaaggatgccattgtcaagaagcttaaagatcaactttttatggcaagagctcattatcctagcattgcaaaattgaagcaacatgaagcatttacacgtgaactgaagcaaaacatccaagaacatgaacgcatgctgagtgacaccatcacagatgctgatcttccaccattttttgcaaagaagctggagaagatggagcacacaattgtgagagccaagtctagtgaagtaggatgctccaatgttgaacggaaacttaggcagctacttgatataactgaagatgaagcttatttccatacaaggcagagtgcatttctatatcatcttggagtgcagactatgccgaaaactcaccattgcttgaacatgagattgacagtagaatatttcaagtctggatcaaatcatgtggatcagttaaatgaccagaagcttgaaagtcctgccttacatcactatgtaatgttttccaggaatgtacttgcagcttccaccactatcaattcaacggttatgaactcccaggattcggaccacatcgttttccatgtattcactgatgcacaaaacttttatgcgatgaagtattggttcgataaaaattcatacttggagtcgactgtacgcgtaactaacattgaggacaaccagaagctctctaaggatgtagattcccttgagatgcaacaattatggcctacagaggaatatcgtgtcacgattcgtaatcattctgaacctttccagaggcagatgaaaactaagtacatatctatcttcggcctttcacatttcctcttgcctgaccttcttcctggcttgaatagagtagttgttctggatgatgatttgattgtccagaaggacttgtcacctctatggaacctcgatatgggtggtaaagtgattggagcagtccagttctgtggagtgagattagggcagctgaaaccttatatagcagaccataacgtcgatgatgattcatgtgtgtggttgtcgggcctgaatgtcattgaattggataaatggagggacaccggcattaccagtttgcatgatcaatcagtccagaagttgcgaaaggacagcctgaaatcacagcgactgcaagcactccctgcaggtctacttgcctttcaagacctgatatatcctttggaagattcatgggttgagtcaggccttggacatgattatggaatcagccatgtcgatatagagaaggctgctactctgcactacaatggtgtgatgaaaccttggcttgacttggggatacttgattacaagaactactggaggaagtacatgaccagtggagagaagttcatgacggaatgcaacattcactaattaacagggcatgaaatgcaccaaacactcattttttcgggcatttggacaacagacttcatgggctttgttcatcatgaaaataaacagaatcacgcctgacctgcaacatccatgatgacacaaattcacccctgacgtgacgagggagtgctcagtccaattccaagaggagaataagatgaaatgctttctgcggaacgttgccataacagcatccacgatgtctgaaggacgctagcacgaaacctgagttatgttgcagagtaccaagatataacgtagaatatttcacactgttcattatggtttgatgagtttttttccctatattcagcttggcattgcaaaagtgcagttccttgctgttcatttttagtataagatctttggtgctattctttttgctcattgtgcaagagcaatactgagggagttcaatgttgacggcggcacatcgtgtataggaaacagcaaaccatgactgaattagcgagtatttccttgtactctttgcagcaagtcgtgtgtttgttatcgtcagatgttgatgtcccattgacgacataccaaatggtggtttgttccgctcaatggcagtctctctcaatctatctgatttgttgggatctttttgtttggaaaatctcaaggtactagaattcagatagttatgtctacgtcccgtttggatcattggtttggatccttggaactgaattttat

SEQ ID NO: 201742 - DNA, 1123 bp, Zea Mays
gtttatattcaaatatatggaaataaatctaaacacatatattaaacaatatttaatttgaaacggacgaaatattatttataatacaaaatagtattttggagaactatatacaccatctgacaccatatctccgagcagatagtctgacttactgcactggcttgcagtatagctgcatccaccgtcccttccgcgccccccggagacaggctaaaaagtgatgtgttgtgcacagtctaaagtccattttgttgctttgcccgcaacttttgcttgccacgatggaggccagatccagctcctgcctcttgggcgtccgtcatccttccatctcccgccctccctcgtcggagcacgagcaccaaaggactggcgtcctgccatggctccacgccaagattgttgatcccatgctgcaggtcatcagaaggggagcagaacccaagcaactagccttctctgctgcccttggtatcacgattgggatctttccggtatgtgggacaactgttattcttggtgctgttgctgtagcagtgttgggaagtcgttgcaatgctgttactgttatggttttaaatttggccgccactccaattgagctaagcttgatcgtccctttcttgcgtttgggggaaaccatcactggcagtgggcacttccccttgacagccaacgcactgaagaatgttctcactggtcatgcatcaaaggatgtgctgctgagcatcgtcaatgcgatgctgggttggcttattgctgcaccatttgtacttgccgtgctgtacgctgtttcgttcccttgtttcaaggtcctggttaacaggtttggcggcattccatcgagccccaggaccccactcaaggcggtgtaggtagtgtgtagcatgctgaatgctcctgaaattgtgtacaccaaattctttgtgatgccgttgggttgagatgggttccggcgtcatgttgctcggccatcccaggcactggcgaataaatccgacttgagaggcacgtgtcctctataattctgtatgctggcttggtaatcatatagtgagatgtgtatttatgaatttacaaactcttcatgaataaagccatgtttggataaaggattaaa

SEQ ID NO: 201743 - DNA, 1302 bp, Zea Mays
gtttatattcaaatatatggaaataaatctaaacacatatattaaacaatatttaatttgaaacggacgaaatattatttataatacaaaatagtattttggagaactatatacaccatctgacaccatatctccgagcagatagtctgacttactgcactggcttgcagtatagctgcatccaccgtcccttccgcgccccccggagacaggctaaaaagtgatgtgttgtgcacagtctaaagtccattttgttgctttgcccgcaacttttgcttgccacgatggaggccagatccagctcctgcctcttgggcgtccgtcatccttccatctcccgccctccctcgtcggagcacgagcaccaaaggtccccgtactgcccttacctctgctctccttttcttctcctgttcacccctcgtgccataactgggcgaccgccgctcccgccctacgccaggtgcccagatcttcgtcggccctgcccctgcttccttcaactccaccaccaggcgatgccctagacttaattgaatgggctctcttctcaccaggactggcgtcctgccatggctccacgccaagattgttgatcccatgctgcaggtcatcagaagaacccaagcaactagccttctctgctgcccttggtatcacgattgggatctttccggtatgtgggacaactgttattcttggtgctgttgctgtagcagtgttgggaagtcgttgcaatgctgttactgttatggttttaaatttggccgccactccaattgagctaagcttgatcgtccctttcttgcgtttgggggaaaccatcactggcagtgggcacttccccttgacagccaacgcactgaagaatgttctcactggtcatgcatcaaaggatgtgctgctgagcatcgtcaatgcgatgctgggttggcttattgctgcaccatttgtacttgccgtgctgtacgctgtttcgttcccttgtttcaaggtcctggttaacaggtttggcggcattccatcgagccccaggaccccactcaaggcggtgtaggtagtgtgtagcatgctgaatgctcctgaaattgtgtacaccaaattctttgtgatgccgttgggttgagatgggttccggcgtcatgttgctcggccatcccaggcactggcgaataaatccgacttgagaggcacgtgtcctctataattctgtatgctggcttggtaatcatatagtgagatgtgtatttatgaatttacaaactcttcatgaataaagccatgtttggataaaggattaaa

SEQ ID NO: 201744 - DNA, 1218 bp, Zea Mays
gtttatattcaaatatatggaaataaatctaaacacatatattaaacaatatttaatttgaaacggacgaaatattatttataatacaaaatagtattttggagaactatatacaccatctgacaccatatctccgagcagatagtctgacttactgcactggcttgcagtatagctgcatccaccgtcccttccgcgccccccggagacaggctaaaaagtgatgtgttgtgcacagtctaaagtccattttgttgctttgcccgcaacttttgcttgccacgatggaggccagatccagctcctgcctcttgggcgtccgtcatccttccatctcccgccctccctcgtcggagcacgagcaccaaaggtgcccagatcttcgtcggccctgcccctgcttccttcaactccaccaccaggcgatgccctagacttaattgaatgggctctcttctcaccaggactggcgtcctgccatggctccacgccaagattgttgatcccatgctgcaggtcatcagaaggggagcagaacccaagcaactagccttctctgctgcccttggtatcacgattgggatctttccggtatgtggggacaactgttattcttggtgctgttgctgtagcagtgttgggaagtcgttgcaatgctgttactgttatggttttaaatttggccgccactccaattgagctaagcttgatcgtccctttcttgcgtttgggggaaaccatcactggcagtgggcacttccccttgacagccaacgcactgaagaatgttctcactggtcatgcatcaaaggatgtgctgctgagcatcgtcaatgcgatgctgggttggcttattgctgcaccatttgtacttgccgtgctgtacgctgtttcgttcccttgtttcaaggtcctggttaacaggtttggcggcattccatcgagccccaggaccccactcaaggcggtgtaggtagtgtgtagcatgctgaatgctcctgaaattgtgtacaccaaattctttgtgatgccgttgggttgagatgggttccggcgtcatgttgctcggccatcccaggcactggcgaataaatccgacttgagaggcacgtgtcctctataattctgtatgctggcttggtaatcatatagtgagatgtgtatttatgaatttacaaactcttcatgaataaagccatgtttggataaaggattaaa

SEQ ID NO: 201745 - DNA, 1116 bp, Zea Mays
gtttatattcaaatatatggaaataaatctaaacacatatattaaacaatatttaatttgaaacggacgaaatattatttataatacaaaatagtattttggagaactatatacaccatctgacaccatatctccgagcagatagtctgacttactgcactggcttgcagtatagctgcatccaccgtcccttccgcgccccccggagacaggctaaaaagtgatgtgttgtgcacagtctaaagtccattttgttgctttgcccgcaacttttgcttgccacgatggaggccagatccagctcctgcctcttgggcgtccgtcatccttccatctcccgccctccctcgtcggagcacgagcaccaaaggactggcgtcctgccatggctccacgccaagattgttgatcccatgctgcaggtcatcagaaggggagcagaacccaagcaactagccttctctgctgcccttggtatcacgattgggatctttccgggacaactgttattcttggtgctgttgctgtagcagtgttgggaagtcgttgcaatgctgttactgttatggttttaaatttggccgccactccaattgagctaagcttgatcgtccctttcttgcgtttgggggaaaccatcactggcagtgggcacttccccttgacagccaacgcactgaagaatgttctcactggtcatgcatcaaaggatgtgctgctgagcatcgtcaatgcgatgctgggttggcttattgctgcaccatttgtacttgccgtgctgtacgctgtttcgttcccttgtttcaaggtcctggttaacaggtttggcggcattccatcgagccccaggaccccactcaaggcggtgtaggtagtgtgtagcatgctgaatgctcctgaaattgtgtacaccaaattctttgtgatgccgttgggttgagatgggttccggcgtcatgttgctcggccatcccaggcactggcgaataaatccgacttgagaggcacgtgtcctctataattctgtatgctggcttggtaatcatatagtgagatgtgtatttatgaatttacaaactcttcatgaataaagccatgtttggataaaggattaaa

SEQ ID NO: 201746 - DNA, 1209 bp, Zea Mays
gtttatattcaaatatatggaaataaatctaaacacatatattaaacaatatttaatttgaaacggacgaaatattatttataatacaaaatagtattttggagaactatatacaccatctgacaccatatctccgagcagatagtctgacttactgcactggcttgcagtatagctgcatccaccgtcccttccgcgccccccggagacaggctaaaaagtgatgtgttgtgcacagtctaaagtccattttgttgctttgcccgcaacttttgcttgccacgatggaggccagatccagctcctgcctcttgggcgtccgtcatccttccatctcccgccctccctcgtcggagcacgagcaccaaagatcttcgtcggccctgcccctgcttccttcaactccaccaccaggcgatgccctagacttaattgaatgggctctcttctcaccaggactggcgtcctgccatggctccacgccaagattgttgatcccatgctgcaggtcatcagaaggggagcagaacccaagcaactagccttctctgctgcccttggtatcacgattgggatctttccggtatgtgggacaactgttattcttggtgctgttgctgtagcagtgttgggaagtcgttgcaatgctgttactgttatggttttaaatttggccgccactccaattgagctaagcttgatcgtccctttcttgcgtttgggggaaaccatcactggcagtgggcacttccccttgacagccaacgcactgaagaatgttctcactggtcatgcatcaaaggatgtgctgctgagcatcgtcaatgcgatgctgggttggcttattgctgcaccatttgtacttgccgtgctgtacgctgtttcgttcccttgtttcaaggtcctggttaacaggtttggcggcattccatcgagccccaggaccccactcaaggcggtgtaggtagtgtgtagcatgctgaatgctcctgaaattgtgtacaccaaattctttgtgatgccgttgggttgagatgggttccggcgtcatgttgctcggccatcccaggcactggcgaataaatccgacttgagaggcacgtgtcctctataattctgtatgctggcttggtaatcatatagtgagatgtgtatttatgaatttacaaactcttcatgaataaagccatgtttggataaaggattaaa

SEQ ID NO: 201747 - DNA, 1399 bp, Zea Mays
cgtcgcccaccggattgctggattccagggaccccttcgatctgcagcagccacagatcggaccaagaagcgtgtgaggagctttcagctgccacccggtgccaccatgctccggcatctccagcgatccctccgtgccattcactactcacccatcatcggccgtgatgccgcctgcaaccccattcccctccaccggttctgggattcacatatagagcatgccacccgagatttctctacttccacaagacttacaggacatccaatatatcagcagaatgagttagaaccaactacgcctgtgaaggatactgacataataattgaccgcatacgaaagagcacacggaaattggaggaaggccctgttggaaaaaatctgtcttcagcggagaaaaggaaatttcttgtcaacactctccttagccttgaagattcaagagaagctgtttatggcacccttgatgcctgggttgcctttgagcaggattttcctttggcttcactaaagcaagcactttcagttcttgagaaggaggaacagtggcatagaattgtccaggtgatcaaatggatgctgagcaaagggcaaggaaatacaatgagaacatatgagctattggcatgtgcactcgagaaggataatagagctgaggaagcacatagaatctggcagaataaagtgggccacgatctgcattcggttccttggcgtttctgccgtcttatgttggctatctactaccgaaacaataggctagacaggctcgtgaagctcttcaaagaactcgaagcttgtggccgtaaacctccaagcaaagacattgtgcggaaagtcgaagatgcgtacgaaacgcttggattactagaagataaaaaggtgttgcttgataaatacaaggatttatacaacaaaccgtctcgggacgatcggaagaaaggctccaaatccaaaaagatcgagtctgataaaccatctgcattattattctgttctcagatggtgacagtaaggaaagcaagatggaaacatctgagaaccttgaagaccgctgtttccctgtggatgcaaaaccagatgcctctgcttaggctcatcactgaaccaccgacgtcgccataagatttggccaaaacccggtgctgtcagcattagcgattggcgtgctctcagtacacgtttgctcccctaaccagttagtgttttttctttctctctagacatgttacaagggcatttgtatttgctgttttgcactgacatcatttttgccaagaccctaagcggtataatactgtgcgacggctatgtataatactgtgcgacgttcattactggcagcaatatacacaccccttgttcgatataatgtgcgcagggaaccgagttacaata

SEQ ID NO: 201748 - DNA, 1387 bp, Zea Mays
gcagcctgcttgctcaaactgacccggcttctgcgccagccagtggccactctctccgtctctcgactgaaaaaaaggacccttcttcttggcactccaagcggaaggaacggtggcgtttctccgttctacgaagtggcgcgccatctgcaccggtcggctgcggcggattgagcggtggctttcctcgtcagttgctcttcccggttctgggattcacatatagagcatgccacccgagatttctctacttccacaagacttacaggacatccaatatatcagcagaatgagttagaaccaactacgcctgtgaaggatactgacataataattgaccgcatacgaaagagcacacggaaattggaggaaggccctgttggaaaaaatctgtcttcagcggagaaaaggaaatttcttgtcaacactctccttagccttgaagattcaagagaagctgtttatggcacccttgatgcctgggttgcctttgagcaggattttcctttggcttcactaaagcaagcactttcagttcttgagaaggaggaacagtggcatagaattgtccaggtgatcaaatggatgctgagcaaagggcaaggaaatacaatgagaacatatgagctattggcatgtgcactcgagaaggataatagagctgaggaagcacatagaatctggcagaataaagtgggccacgatctgcattcggttccttggcgtttctgccgtcttatgttggctatctactaccgaaacaataggctagacaggctcgtgaagctcttcaaagaactcgaagcttgtggccgtaaacctccaagcaaagacattgtgcggaaagtcgaagatgcgtacgaaacgcttggattactagaagataaaaaggtgttgcttgataaatacaaggatttatacaacaaaccgtctcgggacgatcggaagaaaggctccaaatccaaaaagatcgagtctgataaaccatctgatggtgacagtaaggaaagcaagatggaaacatctgagaaccttgaagaccgctgtttccctgtggatgcaaaaccagatgcctctgcttaggctcatcactgaaccaccgacgtcgccataagatttggccaaaacccggtgctgtcagcattagcgattggcgtgctctcagtacacgtttgctcccctaaccagttagtgttttttctttctctctagacatgttacaagggcatttgtatttgctgttttgcactgacatcatttttgccaagaccctaagcggtataatactgtgcgacggctatgtataatactgtgcgacgttcattactggcagcaatatacacaccccttgttcgatataatgtgcgcagggaaccgagttacaata

SEQ ID NO: 201749 - DNA, 1589 bp, Zea Mays
gcttgctcaaactgacccggcttctgcgccagccagtggccactctctccgtctctcgactgaaaaaaaggacccttcttcttggcactccaagcggaaggaacggtggcgtttctccgttctacgaagtggcgcgccatctgcaccggtcggctgcggcggattgagcggtggctttcctcgtcagttgctcttcccgaacgccgccagcaccgctcgtggcatctgcgtctctgccttctccaaccgccagcaccgctcccgatccaggaccaagaagcgtgtgaggagctttcagctgccacccggtgccaccatgctccggcatctccagcgatccctccgtgccattcactactcacccatcatcggccgtgatgccgcctgcaaccccattcccctccaccggttctgggattcacatatagagcatgccacccgagatttctctacttccacaagacttacaggacatccaatatatcagcagaatgagttagaaccaactacgcctgtgaaggatactgacataataattgaccgcatacgaaagagcacacggaaattggaggaaggccctgttggaaaaaatctgtcttcagcggagaaaaggaaatttcttgtcaacactctccttagccttgaagattcaagagaagctgtttatggcacccttgatgcctgggttgcctttgagcaggattttcctttggcttcactaaagcaagcactttcagttcttgagaaggaggaacagtggcatagaattgtccaggtgatcaaatggatgctgagcaaagggcaaggaaatacaatgagaacatatgagctattggcatgtgcactcgagaaggataatagagctgaggaagcacatagaatctggcagaataaagtgggccacgatctgcattcggttccttggcgtttctgccgtcttatgttggctatctactaccgaaacaataggctagacaggctcgtgaagctcttcaaagaactcgaagcttgtggccgtaaacctccaagcaaagacattgtgcggaaagtcgaagatgcgtacgaaacgcttggattactagaagataaaaaggtgttgcttgataaatacaaggatttatacaacaaaccgtctcgggacgatcggaagaaaggctccaaatccaaaaagatcgagtctgataaaccatctgatggtgacagtaaggaaagcaagatggaaacatctgagaaccttgaagaccgctgtttccctgtggatgcaaaaccagatgcctctgcttaggctcatcactgaaccaccgacgtcgccataagatttggccaaaacccggtgctgtcagcattagcgattggcgtgctctcagtacacgtttgctcccctaaccagttagtgttttttctttctctctagacatgttacaagggcatttgtatttgctgttttgcactgacatcatttttgccaagaccctaagcggtataatactgtgcgacggctatgtataatactgtgcgacgttcattactggcagcaatatacacaccccttgttcgatataatgtgcgcagggaaccgagttacaata

SEQ ID NO: 201750 - DNA, 1153 bp, Zea Mays
cttctacgctgttagaaaaaaaggttattggctggtcaatgtggtttgcagagtacctctttttggaaaggagctgggccaaggatgaaaagacactaaagtggggtctccaaaggttgaaagacttccctagaccattttggctagctcttttcgtcgagggtactcgctttactccagcaaagcttctcgcagctcaggaatatgcggcctcccagggcttaccggctcctagaaatgtacttattccacgtaccaagggatttgtatctgctgtaagtattatgcgagattttgttccagccatttatgatacaactgtaatagtccctaaagattcccctcaaccaacaatgctgcggattttgaaagggcaatcatcagtgatacatgtccgcatgaaacgtcatgcaatgagtgagatgccaaaatcagatgaggatgtttcaaaatggtgtaaagacatttttgtggcaaaggatgccttactggacaagcatttggcaacaggcactttcgatgaggagattagacctattggccgtccagtgaaatcattgctggtgaccctgttctggtcgtgcctcctgctgtttggcgccatcgagttcttcaagtggacacagcttctgtcgacgtggaggggtgtggcgttcactgccgcagggatggcgcttgtgacgggtgtcatgcatgtcttcatcatgttctcccaggctgagcggtcgagctcagccagggcggcacggaaccgggtcaagaaggaatgaaaaatggagggtggagatgaggttctcgtggggtttgttatgggcaaccttcaaaaggactctccattcatattagtattaattcatatatatgcagcgccaaattccagacattgatatgctctcaaataggatgttctgctcccctcttgtatttgtatgcaggaaagggtttgtagggagtttacccccccccccccccccccccgcctttcttttgggcagaaagacatattctggaagcctttcagtagttcatttatcagcaacaattgcatctttcttccattgctgtgcaccttgtatcacctatcagaatgtggtcatatggggattgtacggcagcactgctgtgtgtgttgaaatgttgttccgttctgtga

SEQ ID NO: 201751 - DNA, 868 bp, Zea Mays
gcgggtgagcctggcccgtgctcgcctggtaaaagtgctagggttcttctcgcccatcgcagccgccgccgcggctctcgcctcttgactcgctctcgcctctcggagcaaaagctgtgtccgctcctcctggtgatcccggagccagtcctcgccgcaccgcgctgtgtctgctcctcctggtgatcccgcaccgtgctgtgtccgctccatcttcctccgccgccacactcagcgccggtgcgagggcatgtctacctacccgaggacctacgatctcatccatgcggactcggtgttcaccctgtacaggaacagggagaagatcctcctggttgtcaagacgtattggactacccatgaggccatgaccaagatcagtagcaggactgtcaatacttgctcggataggaaatttaacatgtggggggaaggaaggatctattaatgatatgaaagaacactgcttctggtcccaaattatggagagaaagggtccaacagtcgagacgcctgaatggtgccaggaatgaattggtaatgtacaaacacatttgacaggacagtaggccatgtaaacaggtcatttttactgtagcccagaggcttcgcgcatgggctatgctacagaggcaggactcatgcaggactcagtttttttcccgggagcatagttggcggtctagtcttcggattgatagccactagtgtgtgtttttagattctgttgggctgtgtgctcctatgggcagaggccggaagtgactttcaaggaattgtatcatctcgatgtactgttcttgatgaataaaaatccttccctttcaaaaaaagaccactacacaatcggtgcacaagcgcacatcat

SEQ ID NO: 201752 - DNA, 706 bp, Zea Mays
tttggaacacacgtcttttccttcgcgggtgagcctggcccgtgctcgcctggtaaaagtgctagggttcttctcgcccatcgcagccgccgccgcggctctcgcctcttgactcgctctcgcctctcggagcaaaagctgtgtccgctcctcctggtgatcccggagccagtcctcgccgcaccgcgctgtgtctgctcctcctggtgatcccgcaccgtgctgtgtccgctccatcttcctccgccgccacactcagcgccggtgcgagggcatgtctacctacccgaggacctacgatctcatccatgcggactcggtgttcaccctgtacaggaacagggagaagatcctcctggttgtcaagacgtattggactacccatgaggccatgaccaagatcagtagcaggactgtcaagtcatttttactgtagcccagaggcttcgcgcatgggctatgctacagaggcaggactcatgcaggactcagtttttttcccgggagcatagttggcggtctagtcttcggattgatagccactagtgtgtgtttttagattctgttgggctgtgtgctcctatgggcagaggccggaagtgactttcaaggaattgtatcatctcgatgtactgttcttgatgaataaaaatccttccctttcaaaaaaagaccactacacaatcggtgcacaagcgcacatcat

SEQ ID NO: 201753 - DNA, 718 bp, Zea Mays
gcgggtgagcctggcccgtgctcgcctggtaaaagtgctagggttcttctcgcccatcgcagccgccgccgcggctctcgcctcttgactcgctctcgcctctcggagcaaaagctgtgtccgctcctcctggtgatcccggagccagtcctcgccgcaccgcgctgtgtctgctcctcctggtgatcccgcaccgtgctgtgtccgctccatcttcctccgccgccacactcagcgccggtgcgagggcatgtctacctacccgaggacctacgatctcatccatgcggactcggtgttcaccctgtacaggaacagggagaagatcctcctggttgtcaagacgtattggactacccatgaggccatgaccaagatcagtagcaggactgtcaaatctattaatgatatgaaagaacactgcttctggtcccaaattatggagagaaagggtccaacagtcgagacgcctgaatggtgccaggaatgaattggtaatgtacaaacacatttgacaggacagtaggccatgtaaacaggtctctggtctctattaaaatcatagtttctgtttaattacaatcgtagttctgttttttgttatccatattttaagttgctgctatagttcatatgattgtaatcgaaatgattgtaattagttcaatgagagaaattactagcaagaggatcaatttaattcagattattgtaaatc

SEQ ID NO: 201754 - DNA, 1111 bp, Zea Mays
ttttattttaattcatattagttgatgtgtatgtatgatgcattttaattcatgcatttatgactcctgtgatttgcaaaaatattagttgctgactagttggcttgaatgctgttttcagtttcaaggcatcgtacaatcatgaatatttttgagaaagagccaaggatccatagagatgtgtttgttgctcccagtgcagcagtcattggggatgttgagattggtcatggatcgtcaatctggtacggatccatattgagaggtcacagtgctgtattacatgcatgtaccattgaggatgaagcttttgttggtatgggtgccactctgcttgatggagtggtggttgaaaagcacagcatggttggtgcaggatctcttgttaagcagaatacaaggattccttctggagaggtctgggtcggtaatcctgccaagttcctaaggaagcttacagaagaggagattgcgttcatcgctcaatcagcaaccaactatatcaacctagcccaggtccatgcagccgagaacgccaagagcttcgacgagattgagctcgagaagatgctgaggaagaagtacgcgcacaaagacgaggagtacgactcgatgcttggggtggtccgcgagatcccgccccagctcatccttcccgataacatcctcccacacaatgctcagaaggcggttgcccgctgaaccttttctcaacccatgcttggcgttgttgcctgttgtcttggagcattttgacacgcgttcgttctctgtttttttatgaagcccaataagattgggtcgagcactgttttaggatcgaccgcacacaacaccacctctattttaaactgcaatggacaagaagctcagggtctcatttactcatctttgacttctctctgtggagcacttgtaatcgaagatcgtgccctgttttctgtactatttcaaactgcatgcagactcctgggttccgttgcttttgctttgcttcatagatattcctttggtccttcatacaatgctcgttttatgttcaaggcactattataatttaaggatagttttggaaccttatttttttaagagatttctatctcatttttct

SEQ ID NO: 201755 - DNA, 1435 bp, Zea Mays
cctctcctgtctccccctccccctccccctccccctctctctcgtggagacgactgggccgccgtcgttgctgccctacgcggctacgcccaggtcttcttcgggcccttagccgcgacgagcgccaccagggagtagaagaggttaaccttctggttggaaacgatgtacttcgaaggctatggcttccgtggaagtactttcgagcagacatatcgctgctatcctgcgtctttcatcgacaagccacaacttgaggccggtgacaaaattataatgccaccatcagctcttgatcgtcttgcatctctgcatattgaataccctatgctatttgaagtccacaatgcagcagcagaacggacttcgcattgtggtgttctggagttcattgcagaagaaggcatgatctacatgccatattggatgatgcaaaatcttcttttgcaagagggagatatggtgttcataaaaaatgccaacctccccaagggcacatatgtgaagttgcagcctcatacaacagactttctagatatttcaaaccccaaagcaatcttggagaaaactttgcggaacttttcttgtctaactacaggtgacagcattatggttgcatataataacaagaagtactacattgatatagtagagacaaagccctccaatgctataagtattattgagaccgattgtgaggttgactttgctccaccacttgactacaaagaacctgagccagtaaaacctgctgttcctgcaagcacggagcctggtaccgacgttccagctgaagaagaaccaaagttcatccccttcactggttcaggaaggcgcttggatgggaagccttccaaagataaagatgtgctagcctcttcccctgcaaagcgacaagctaatgcgaccaacggtgtacagccttcaacagccaccacatcacagggcagttcatcgcgtaaggccacaggaaaacttgtctttggctctggtggtaaccgagccgaaaaggcacctgaaaaggaagcagaggagcccaagaaagaagacccaaaattcgcagcattcacaggaaagaaatactcactgaagggctgaataaataggaagacaatgtattatcagtatttccggtgacggacattctcagggagaagcgcttaccaaccctgttatgtgggagggtctttcggtgggatagtggtctctgtttctcctgaactattacccttgtgtagttgtgtcagccacaccggagcaactgatgtataaagccgctcttgtccgataatggatttctgttgagcttgcatgtacattttctaaaaagataactgaaatcgccaaaaaaactacaaatactatctagaattctgttgaaattttagattttatttgcacttatctttgtttcactctagctttgtcactgaga

SEQ ID NO: 201756 - DNA, 1353 bp, Zea Mays
gcgtgctggggagacagcctaaacgcaaccagtagccggagtccgaagtcgggccctcccttctgcccgcgaccgcgttagctaaacccgacccagcaaccaggccaccgctcctttcctctccgatccggatctccccacccgctccggcgagccatcgccgcgtcgcctccacgcgaccgactacttctcatatcaatctatctatccggcttacccgccgccgcacgcaccaaggttgcgttcaccatattacctgtttgcttatcttctcccgagcccagcaaaccctagccgccgccacccatggacatagaggccgacggacgattcggcaacaaacgagtgcacaatcgcctaggcccgggctccggcggcgctccaccatctaccaacggaaaggtctgcaactactggcgtgccggtcggtgcaaccgctttccgtgccccttcctccacagcgagctccccgaggctgcgccgcccaagcgccccactggacccggggggaacgtatggcgcaaccccaacaccggaggacgaggaggtggccatcacaatagatgggggaagggcccaggagggggcagcgggattgcgagccacaagccgcctgagaggccctgcaagtactttctcgccggtaccgaatgtagctatggcgagaggtgccgctatccgcacagctactgcataagcgatagtatcgcgatgcttaccttgctcaagggacacgagcagggtgtcacgggcattgcactgcccgctgggtcagacaagctttattccgggagtaaggatggaactgttcgcatgtgggattgccaaactgggcagtgtgctggtgtcatcaccatgggtcgtgaggttgggtgtatgatcattgaaggtccgtggttatttgttggaatacctgatgcagtgaaggtttggaatatgcaaacagcagcggaaatgagccttactggaccaactgggcaagtctatgcactcgccgttgccagtgagttactctttgctgcaacacaagctgggaggattttagcatggagatttagtgccgcaactaactgttttgagccagctgcttctctagatggccataagcttgctgttgtttcattgatagtaggaggcatgaggctttattctgcttcaatggataaaactatcagattggagctagtgtgtgaaagaaaagaagtgcactatagtactgtatgatttgatttccaaaggatacctatcaatgctggaactgtgtactagtgcttagaagatatgtgcatgacggtgcatctgaaagttgaatttattcacagtgcagtgaatgctcgtcactccagtgttttg

SEQ ID NO: 201757 - DNA, 2132 bp, Zea Mays
gcgtgctggggagacagcctaaacgcaaccagtagccggagtccgaagtcgggccctcccttctgcccgcgaccgcgttagctaaacccgacccagcaaccaggccaccgctcctttcctctccgatccggatctccccacccgctccggcgagccatcgccgcgtcgcctccacgcgaccgactacttctcatatcaatctatctatccggcttacccgccgccgcacgcaccaaggttgcgttcaccatattacctgtttgcttatcttctcccgagcccagcaaaccctagccgccgccacccatggacatagaggccgacggacgattcggcaacaaacgagtgcacaatcgcctaggcccgggctccggcggcgctccaccatctaccaacggaaaggtctgcaactactggcgtgccggtcggtgcaaccgctttccgtgccccttcctccacagcgagctccccgaggctgcgccgcccaagcgccccactggacccggggggaacgtatggcgcaaccccaacaccggaggacgaggaggtggccatcacaatagatgggggaagggcccaggagggggcagcgggattgcgagccacaagccgcctgagaggccctgcaagtactttctcgccggtaccgaatgtagctatggcgagaggtgccgctatccgcacagctactgcataagcgatagtatcgcgatgcttaccttgctcaagggacacgagcagggtgtcacgggcattgcactgcccgctgggtcagacaagctttattccgggagtaaggatggaactgttcgcatgtgggattgccaaactgggcagtgtgctggtgtcatcaccatgggtcgtgaggttgggtgtatgatcattgaaggtccgtggttatttgttggaatacctgatgcagtgaagtcttttacttcaggtttggaatatgcaaacagcagcggaaatgagccttactggaccaactgggcaagtctatgcactcgccgttgccagtgagttactctttgctgcaacacaagctgggaggattttagcatggagatttagtgccgcaactaactgttttgagccagctgcttctctagatggccataagcttgctgttgtttcattgatagtaggaggcatgaggctttattctgcttcaatggataaaactatcagagtatgggatttggcaactttgcagtgcatacagactctttctgatcataccgatgttgttatgtccgtgctttgctgggatcaatttctattatcttgctctttggatcaaacaataaaagtttgggccgctacagagagtggaaacttagaagtaacatatacacacaaagaggatcagggtgcacttgccctcagtggtatgcctgacgcacagtcaaaacctgtgctactgtgttcattaaatgacaacactgtccgcttatatgatctgccatcgttcagtgacagaggcagattattctccaaaaaagaaattagggcaatacagatgggtcctggtggtttattttttaccggggatggaactggtgagctcaaggtttggcagtgggtagatttagcccaaacctaatgaacatagtgtgctagattagttttctctcatgtattttatgagggagttcgtacaaatacgcataatgagttcaggttgtggtcggtggccagttctttttttgtaatatgccccacatttgtcacaaatgacacgagattcggtggatctgttcggcagtaaaatcagaagcagagtatgtgttatggactgtagttttgtcctggaatggattttaagacaggagaataattggttgttgtaatatgtaaggcactggaacgagcaattctgacgactgcttggaggtggtggcagtttcaaaaggatatatgctaatatacaagggtttgttcagccgcatttgcaaatgagcaggtcttttcacggccgtaccatttttcacaactgttgaatgatcatgttttttttgtaacctcgatcagtcatttggctcggtttttggaagctgcacacagaacctgtgccgatatttatctatatttgttcctggatagcttccaggctcaggctctgatgatatttt

SEQ ID NO: 201758 - DNA, 801 bp, Zea Mays
acaacagtgagacctgcctctcagtcgccatggcaaagggtgcacttgccctcagtggtatgcctgacgcacagtcaaaacctgtgctactgtgttcattaaatgacaacactgtccgcttatatgatctgccatcgttcagtgacagaggcagattattctccaaaaaagaaattagggcaatacagatgggtcctggtggtttattttttaccggggatggaactggtgagctcaaggtttggcagtgggtagatttagcccaaacctaatgaacatagtgtgctagattagttttctctcatgtattttatgagggagttcgtacaaatacgcataatgagttcaggttgtggtcggtggccagttctttttttgtaatatgccccacatttgtcacaaatgacacgagattcggtggatctgttcggcagtaaaatcagaagcagagtatgtgttatggactgtagttttgtcctggaatggattttaagacaggagaataattggttgttgtaatatgtaaggcactggaacgagcaattctgacgactgcttggaggtggtggcagtttcaaaaggatatatgctaatatacaagggtttgttcagccgcatttgcaaatgagcaggtcttttcacggccgtaccatttttcacaactgttgaatgatcatgttttttttgtaacctcgatcagtcatttggctcggtttttggaagctgcacacagaacctgtgccgatatttatctatatttgttcctggatagcttccaggctcaggctctgatgatatttt

SEQ ID NO: 201759 - DNA, 1013 bp, Zea Mays
ggagaagtaccaaactgggctgaacccgcaggagaaggtgaagctagagaaggagcccatggggcagttcgtggatgacgacatcagggacctgcctagatctccatggaggagatcgacgctgccaagctcaccaaggacgacgtcgacgtccgcctcaagtggttcggcctcttccaccgctacaagcaccagtgttgttgttgctgttggtaggagcgaccccacgagcgtgacacggacaaagtagccttcggtgccaggttcgatttggtttctgctaagtttatcactcctacattttcgcaattagtttctataaattatatcactccatttcactcctatgaaattactgcgacttaatttcaatcgaggtcattcttcttgctccttcgctttgcttagcagtaaagacaataacttcatttaccttgctcaatagtttgccttttaatttgaacaaaaatctaatcacctgacattgcgtgggaggtaagctcctgtttttcacaaactttatcggtggacagttcacagtcctgacagacccattaatctgatagaacagttagcattaggtaattattttggcattggcaattttgatctactcctattttaaaacgccatcataggggtgcttgcatttcttgttcatggttttattgctcaagtaaaaatgcctgctttttatattacttattacatatgcatggaaaagcatgtagaaggtaacaccaataaagtttggatcatatgtttccatctataattgttgtcttggtattctcaatcagtggacttgtgcatcggcaaaatttgcagtctccataaggatgctaatgataggtcctcaacacaagccttattggaccatccattcttgagcgtgtatgatgacctgcatgtagataggacgagatctcccctcgccaccttcaagtaatgataatgtacttgttcttttaatcttttctttttatgtatccatcgttgtgcacataagtgat

SEQ ID NO: 201760 - DNA, 1596 bp, Zea Mays
caaagagtagacgcaacggcacaacgcaagcgcgcgctctgcaactaaccaagaagaggggagaggcaaagcgcagagcgaagccaagaagatggccgcggctgccgccgtcccggacggcgtctcctcctgcgggagcaccaacatgcgccgcgccgaccaccttcctcgtcctacggcagctgcgccgcgtggagcgccgggtcgctcaccaggcaccgccccgcatcgccgtccccgatctgcagccccgcgaacagccacgacggcggcggcgaggaggaggaggaccgcgaaccgcacggcggtgacgacgcctcctcgtttgtcacgccacgggaagaagagcaaggcaggaccagagcagatttcatgaatccttctgctatgccacggaatatcagactgcagacacccaggcacccttctctgctggataggagagttgaaggcgccaatcaaatgcctccgagattcatccacaagaccacaccagctagatttatgcgccgagttcgctcctcacgtaatttccgacagcgcgtggatgcattagatgctaccaatgaatggagattgcccaaagtcagtgaaggggatgacgagggaggtgataaaaaagactggcagagcaataccgtgtcatctcgcgtatcttcagcccgtgattggaattttgagtctgacggtgcctatcagggtagcaatcgtagtgatcgtgcatttggcgattcagatggtgagaactgtccagttgaagtgcaaaggacagagagatggaccccgagctccgtgttaaaaccccaaggcaatttagtccatgctaagttggttgcctggaaggatgcgcagattgcaaagctcatagaaaagctgaaaaagaaagaagccgatattgatgattggcagaggaagaagaccataaaggccaggcagaagatgagaagcgctgagttgaagctggagaagaagagagcggaaatcgcagaaaagatgcaaaaggcaataaagcgtgcacaaaaaaaggctgataagaagaaagtcaaggagcaggtagccactaaagttcagattgatggtgttgagagagcattggataagatgtcaaggacaggaaaactcccctggtcactggcttttctgtgatccagctcttcgtatgtgcctgtcctagataagctggtttgccgaactgtggaagctactggtggtggcagcatggcaagagcaatacgagtgaaatcagctgctaaatgattgaaatcggcaaattgcgtattaaggaaaagagaagaggatatgctggtgattgaccattctttggcaatgaaagttttggcttatgtaacactatgatttgtttgaggcaatagttactagcaatcgaacactgtttttgaacacgacatggataactcgaggtgaattttttggtacattactgtatgttgtccgataactcttctagtgttctgacatctgagacaaacattcttgatccttacagctgtgctgtgatagtgtacatcacttcaactttgtgagtatgatgcgatgaacaaatgaacaatgctatgcttattcatatttgtttac

SEQ ID NO: 201761 - DNA, 2063 bp, Zea Mays
caaagagtagacgcaacggcacaacgcaagcgcgcgctctgcaactaaccaagaagaggggagaggcaaagcgcagagcgaagccaagaagatggccgcggctgccgccgtcccggacggcgtctcctcctgcgggagcaccaacatgcgccgcgccgaccaccttcctcagctcccgattccgctgccctgcatgggcgagcccaccgccgcctcccgcgtctcgccgggctcctccccggcccgctccgaggcctcgcgaggcgccccctgctacaacgccgacgccgagccggacccggacccggagccggagcccgaggcgtccgtggggcggagcacgcagatgctgctcgcgatggccgccatgggcgggcacggcgggcactacggccgccgcccggcctcgtcctacggcagctgcgccgcgtggagcgccgggtcgctcaccaggcaccgccccgcatcgccgtccccgatctgcagccccgcgaacagccacgacggcggcggcgaggaggaggaggaccgcgaaccgcacggcggtgacgacgcctcctcgtttgtcacgccacgggaagaagagcaaggcaggaccagagcagatttcatgaatccttctgctatgccacggaatatcagactgcagacacccaggcacccttctctgctggataggagagttgaaggcgccaatcaaatgcctccgagattcatccacaagaccacaccagctagatttatgcgccgagttcgctcctcacgtaatttccgacagcgcgtggatgcattagatgctaccaatgaatggagattgcccaaagtcagtgaaggggatgacgagggaggtgataaaaaagactggcagagcaataccgtgtcatctcgcgtatcttcagcccgtgattggaattttgagtctgacggtgcctatcagggtagcaatcgtagtgatcgtgcatttggcgattcagatggtgagaactgtccagttgaagtgcaaaggacagagagatggaccccgagctccgtgttaaaaccccaaggcaatttagtccatgctaagttggttgcctggaaggatgcgcagattgcaaagctcatagaaaagtaatccttcttatcccatttttcataacatccaaacttgatattcattaccaattaattttggacgtgttcagagagagaatcatagtataagaatattgtattgctacggtggtcagatttgaatttttgacatgtacaatatcacttcagcctgaaattgtgttttgaagttacaagctcaattcattactggtgttatggtgtgggtatgaaaacatggactcctgctgaaaaagaaagaagccgatattgatgattggcagaggaagaagaccataaaggccaggcagaagatgagaagcgctgagttgaagctggagaagaagagagcggaaatcgcagaaaagatgcaaaaggcaataaagcgtgcacaaaaaaaggctgataagaagaaagtcaaggagcaggtagccactaaagttcagattgatggtgttgagagagcattggataagatgtcaaggacaggaaaactcccctggtcactggcttttctgtgatccagctcttcgtatgtgcctgtcctagataagctggtttgccgaactgtggaagctactggtggtggcagcatggcaagagcaatacgagtgaaatcagctgctaaatgattgaaatcggcaaattgcgtattaaggaaaagagaagaggatatgctggtgattgaccattctttggcaatgaaagttttggcttatgtaacactatgatttgtttgaggcaatagttactagcaatcgaacactgtttttgaacacgacatggataactcgaggtgaattttttggtacattactgtatgttgtccgataactcttctagtgttctgacatctgagacaaacattcttgatccttacagctgtgctgtgatagtgtacatcacttcaactttgtgagtatgatgcgatgaacaaatgaacaatgctatgcttattcatatttgtttac

SEQ ID NO: 201762 - DNA, 1658 bp, Zea Mays
tatggaagcctaaacacagcttcccaggccaggcctccctcacaaaccgccccaatccccaaagagtagacgcaacggcacaacgcaagcgcgcgctctgcaactaaccaagaagaggggagaggcaaagcgcagagcgaagccaagaagatggccgcggctgccgccgtcccggacggcgtctcctcctgcgggagcaccaacatgcgccgcgccgaccaccttcctcgtcctacggcagctgcgccgcgtggagcgccgggtcgctcaccaggcaccgccccgcatcgccgtccccgatctgcagccccgcgaacagccacgacggcggcggcgaggaggaggaggaccgcgaaccgcacggcggtgacgacgcctcctcgtttgtcacgccacgggtggaagaagagcaaggcaggaccagagcagatttcatgaatccttctgctatgccacggaatatcagactgcagacacccaggcacccttctctgctggataggagagttgaaggcgccaatcaaatgcctccgagattcatccacaagaccacaccagctagatttatgcgccgagttcgctcctcacgtaatttccgacagcgcgtggatgcattagatgctaccaatgaatggagattgcccaaagtcagtgaaggggatgacgagggaggtgataaaaaagactggcagagcaataccgtgtcatctcgcgtatcttcagcccgtgattggaattttgagtctgacggtgcctatcagggtagcaatcgtagtgatcgtgcatttggcgattcagatggtgagaactgtccagttgaagtgcaaaggacagagagatggaccccgagctccgtgttaaaaccccaaggcaatttagtccatgctaagttggttgcctggaaggatgcgcagattgcaaagctcatagaaaagctgaaaaagaaagaagccgatattgatgattggcagaggaagaagaccataaaggccaggcagaagatgagaagcgctgagttgaagctggagaagaagagagcggaaatcgcagaaaagatgcaaaaggcaataaagcgtgcacaaaaaaaggctgataagaagaaagtcaaggagcaggtagccactaaagttcagattgatggtgttgagagagcattggataagatgtcaaggacaggaaaactcccctggtcactggcttttctgtgatccagctcttcgtatgtgcctgtcctagataagctggtttgccgaactgtggaagctactggtggtggcagcatggcaagagcaatacgagtgaaatcagctgctaaatgattgaaatcggcaaattgcgtattaaggaaaagagaagaggatatgctggtgattgaccattctttggcaatgaaagttttggcttatgtaacactatgatttgtttgaggcaatagttactagcaatcgaacactgtttttgaacacgacatggataactcgaggtgaattttttggtacattactgtatgttgtccgataactcttctagtgttctgacatctgagacaaacattcttgatccttacagctgtgctgtgatagtgtacatcacttcaactttgtgagtatgatgcgatgaacaaatgaacaatgctatgcttattcatatttgtttac

SEQ ID NO: 201763 - DNA, 1209 bp, Zea Mays
ttactcttgatttggctaaaggtttgtatgcaaagtttattgactgggatgagcaaatgtttgattgggaaacaaatacacctgctcattcagctaactattagcgaggacctcggacagattgaatatattttgagtgacaaaactgggacactcacagagaataaaatgatcttcaaacaatgctgcataagtgatactttgtatggaaatgacaacggagatgcattaaacgatgtcagacttgtaaatgcggtctcaagtaatgatcctgatgtcatcaaatttctgttggttatggctctttgcaatacagtggtccctatcaaaagcaatgatggtactgtgtcatacaaagcacaatcccaagatgaggaagctttagttaacgctgcagcaaagctgaatatgatgctcatcagtaaagacaccattacagctgagatttgtttcaatgggtctaagttttggtatgagttgttggacattttggaattcacttctgatcgcaaaagaatgtctgtagtggtaaaggaaggggagactggtaagatccttcttttatcaaaaggtgctgatgaagctctcctgcctcgtgcctgtccaggacaacaaatacagagatatcttgaagcagtagaaatgtattctcagttgggattgcgaaccttatgtttggggtggcgtgatttaaaagaaaatgaatataaggaatggtccaaaaactttcaaaaggctagctgctcattggacaatagagagtttaaaattgctgaagtttgtaatagcttagagcaagaccttcaaattcttggtgttactgctatagaggatcgtcttcaggatggtgttcctgaaaccattaaattgttgaggaatgctggaattaatgtgtggatgctaaccggtgataagcaaaatacagcaattcagattggacttctctgtaacctcataacttctgggcccaatagtcaattgttatctatcagtgggaaaactgaagaggacgtgctaagaagcctagagagggcattatttattatgaaaaatacatctgaaacaaagggtcttgcatttgttttggatggttgggcacttgaattaattttgaagcattccaaggagtcttttactaggttggcgatgctgtcaaaaacagcaatatgctgtcgaatgacacctttgcagaaagcacagagttcaggc

SEQ ID NO: 201764 - DNA, 3273 bp, Zea Mays
caaagcttgcaatggcacaatagtgacatcttgggaaacaatgaaacgttttgtctatatcaatgatgattcgtgccggtattcctactgtgacaaccggatatccaataccaagtatactctgtggaattttctcccgaaaaatttatgggagcaattcaggcgtttcatgaatcagtattttctactaatagcctgccttcagttgtggtcccgtatcacccctgtcagccctgcaactacatggggtccacttatcatcatcttcattgtttctgcttcaaaagaggcttgggatgattacaataggtatctttctgacaagaaagcaaatgagaggaaaatatggttggtaaaggatggcgtccgcatacagatcaaagcacaggaggtacatgttggagatttagtgtggctccatgagaatgatgagataccatgtgatcttgttctcattggcacttctgatcgacaaggcatttgttatgttgagactgctgctttggatggtgaaactgacttgaaaacaagaaccattcctccaatttctgctaacttgtcagtagagcagctaggaaaagtcaagggtgtaattgagtgccccaacccagacaatgacatacggaggtttgatgctaacatgcgcttgttcctccctataattgacaatgaaaaaagtcctttgactatcaacaatacacttcttcagtcatgttaccttcgatacactgaatgggcttgtggagttgcagtttacacaggcaatgaaacaaaatctggaataagtaggggagctgcggagcccaagttcactgctgctgatgtaataatagacaagctcactattgcaatattcatgttccaagttgttgttgtacttgttctgggttattttgggaatacttggaaggacactcaggggcttaagcaatggtatcttatgtatcctatggaggtagagggcccatggtatgatttcttgattatcccgttacgctttgagctgttgtgctccataatgattccaatctccataaaggttactcttgatttggctaaaggtttgtatgcaaagtttattgactgggatgagcaaatgtttgattgggaaacaaatacacctgctcattcagctaactattagcgaggacctcggacagattgaatatattttgagtgacaaaactgggacactcacagagaataaaatgatcttcaaacaatgctgcataagtgatactttgtatggaaatgacaacggagatgcattaaacgatgtcagacttgtaaatgcggtctcaagtaatgatcctgatgtcatcaaatttctgttggttatggctctttgcaatacagtggtccctatcaaaagcaatgatggtactgtgtcatacaaagcacaatcccaagatgaggaagctttagttaacgctgcagcaaagctgaatatgatgctcatcagtaaagacaccattacagctgagatttgtttcaatgggtctaagttttggtatgagttgttggacattttggaattcacttctgatcgcaaaagaatgtctgtagtggtaaaggaaggggagactggtaagatccttcttttatcaaaaggtgctgatgaagctctcctgcctcgtgcctgtccaggacaacaaatacagagatatcttgaagcagtagaaatgtattctcagttgggattgcgaaccttatgtttggggtggcgtgatttaaaagaaaatgaatataaggaatggtccaaaaactttcaaaaggctagctgctcattggacaatagagagtttaaaattgctgaagtttgtaatagcttagagcaagaccttcaaattcttggtgttactgctatagaggatcgtcttcaggatggtgttcctgaaaccattaaattgttgaggaatgctggaattaatgtgtggatgctaaccggtgataagcaaaatacagcaattcagattggacttctctgtaacctcataacttctgggtcttgcatttgttttggatggttgggcacttgaattaattttgaagcattccaaggagtcttttactaggttggcgatgctgtcaaaaacagcaatatgctgtcgaatgacacctttgcagaaagcacagagttcaagtttcttaagagattgatacttattcatgggcgttattcatacaatcgaacagcatttatttcacagtactccttctacaagtcacttcttatgtgctttattcagattctgtttgcctttttgtcggggctatctgggactagcttattcaactcaattagcttgatggcttataacgttttctatacaagtttacccgtcatgactataatctttgacaaggatatctctgaaacaacggttatgcagtacccccagattttactgcattctcaagctgggaggcttttaaatctcactacattttgcggatggtttgggcgctcgctatatcacgcactcgtcgttttcttcattacgatatgcgcctactcagatgagaaaagtgagatgcaggaactgtcaatggtagcactgtccggttgcatttggttacaggcttttgttgtgacaatggatacaaactcattcacttgcccgcaaatccttctcatctggggaaactttgtggccttctacatgatcaacttaatactcagtaccgtcccaagtctccaactgtacacaatcacgttccgcctgtgtagccaaccttcctactggatctccatggctctgacggttgcagtaggaatgggaccggtggtggctttcaggtacttgaagaacctgtatcagcctagcgccgttaacatactccagcaggtcgagcagcgcaatggatctatcagaacttctgggaatctggagtcggcgggagccaatctcactaatctactgactggctcacgtaaaaacagggattctaattatcgccctctgctttcagagtctgcggagtctgtaagtgcaagcggcagctaagaattgtctaggctttccgtactagcatgacagtcatacactcatacagacggcagaacagtgaactgtaacagaatcatgcttgtactaaaaaatatttcgtcggggtcaaagccaataattgttttgttggcctaaatttgatcatttttctcagtctgcgctgtggcaccgtctgtgctgtccgctgtcgcacgtagggatggtaataggatctaaattttacgctataaaatttaattatcaaatcatattaggatttaat

SEQ ID NO: 201765 - DNA, 3394 bp, Zea Mays
ctggcgacgagcaaccacaggcgtttcatgaatcagtattttctactaatagcctgccttcagttgtggtcccgtatcacccctgtcagccctgcaactacatggggtccacttatcatcatcttcattgtttctgcttcaaaagaggcttgggatgattacaataggtatctttctgacaagaaagcaaatgagaggaaaatatggttggtaaaggatggcgtccgcatacagatcaaagcacaggaggtacatgttggagatttagtgtggctccatgagaatgatgagataccatgtgatcttgttctcattggcacttctgatcgacaaggcatttgttatgttgagactgctgctttggatggtgaaactgacttgaaaacaagaaccattcctccaatttctgctaacttgtcagtagagcagctaggaaaagtcaagggtgtaattgagtgccccaacccagacaatgacatacggaggtttgatgctaacatgcgcttgttcctccctataattgacaatgaaaaaagtcctttgactatcaacaatacacttcttcagtcatgttaccttcgatacactgaatgggcttgtggagttgcagtttacacaggcaatgaaacaaaatctggaataagtaggggagctgcggagcccaagttcactgctgctgatgtaataatagacaagctcactattgcaatattcatgttccaagttgttgttgtacttgttctgggttattttgggaatacttggaaggacactcaggggcttaagcaatggtatcttatgtatcctatggaggtagagggcccatggtatgatttcttgattatcccgttacgctttgagctgttgtgctccataatgattccaatctccataaaggttactcttgatttggctaaaggtttgtatgcaaagtttattgactgggatgagcaaatgtttgattgggaaacaaatacacctgctcattcagctaacacagctattagcgaggacctcggacagattgaatatattttgagtgacaaaactgggacactcacagagaataaaatgatcttcaaacaatgctgcataagtgatactttgtatggaaatgacaacggagatgcattaaacgatgtcagacttgtaaatgcggtctcaagtaatgatcctgatgtcatcaaatttctgttggttatggctctttgcaatacagtggtccctatcaaaagcaatgatggtactgtgtcatacaaagcacaatcccaagatgaggaagctttagttaacgctgcagcaaagctgaatatgatgctcatcagtaaagacaccattacagctgagatttgtttcaatgggtctaagttttggtatgagttgttggacattttggaattcacttctgatcgcaaaagaatgtctgtagtggtaaaggaaggggagactggtaagatccttcttttatcaaaaggtgctgatgaagctctcctgcctcgtgcctgtccaggacaacaaatacagagatatcttgaagcagtagaaatgtattctcagttgggattgcgaaccttatgtttggggtggcgtgatttaaaagaaaatgaatataaggaatggtccaaaaactttcaaaaggctagctgctcattggacaatagagagtttaaaattgctgaagtttgtaatagcttagagcaagaccttcaaattcttggtgttactgctatagaggatcgtcttcaggatggtgttcctgaaaccattaaattgttgaggaatgctggaattaatgtgtggatgctaaccggtgataagcaaaatacagcaattcagattggacttctctgtaacctcataacttctgggcccaatagtcaattgttatctatcagtgggaaaactgaagaggacgtgctaagaagcctagagagggcattatttattatgaaaaatacatctgaaacaaagggtcttgcatttgttttggatggttgggcacttgaattaattttgaagcattccaaggagtcttttactaggttggcgatgctgtcaaaaacagcaatatgctgtcgaatgacacctttgcagaaagcacagcttgttgctatcctaaaatccgttggctacctaactctagcaattggtgatggtggtaatgatgttagaatgattcaagaggctaacattggagtagggattagtggtagggaaggactgcaagctgcaagagctgctgattatagcattgggaagttcaagtttcttaagagattgatacttattcatgggcgttattcatacaatcgaacagcatttatttcacagtactccttctacaagtcacttcttatgtgctttattcagattctgtttgcctttttgtcggggctatctgggactagcttattcaactcaattagcttgatggcttataacgttttctatacaagtttacccgtcatgactataatctttgacaaggatatctctgaaacaacggttatgcagtacccccagattttactgcattctcaagctgggaggcttttaaatctcactacattttgcggatggtttgggcgctcgctatatcacgcactcgtcgttttcttcattacgatatgcgcctactcagatgagaaaagtgagatgcaggaactgtcaatggtagcactgtccggttgcatttggttacaggcttttgttgtgacaatggatacaaactcattcacttgcccgcaaatccttctcatctggggaaactttgtggccttctacatgatcaacttaatactcagtaccgtcccaagtctccaactgtacacaatcacgttccgcctgtgtagccaaccttcctactggatctccatggctctgacggttgcagtaggaatgggaccggtggtggctttcaggtacttgaagaacctgtatcagcctagcgccgttaacatactccagcaggtcgagcagcgcaatggatctatcagaacttctgggaatctggagtcggcgggagccaatctcactaatctactgactggctcacgtaaaaacagggattctaattatcgccctctgctttcagagtctgcggagtctgtaagtgcaagcggcagctaagaattgtctaggctttccgtactagcatgacagtcatacactcatacagacggcagaacagtgaactgtaacagaatcatgcttgtactaaaaaatatttcgtcggggtcaaagccaataattgttttgttggcctaaatttgatcatttttctcagtctgcgctgtggcaccgtctgtgctgtccgctgtcgcacgtagggatggtaataggatctaaattttacgctataaaatttaattatcaaatcatattaggatttaat

SEQ ID NO: 201766 - DNA, 3955 bp, Zea Mays
ctaggccttacatctctagccacacccacacctgtacctgtttgctgctgttttttctcccacgcgatccaaccgtttgtttacgccgggctaggtttctcgaccgtacggggacaggacatcagtgcaactgtgcaagcgaccgccaccgcattacccggaactgcccagatcttcgtcgaatcgtcgggccctttgctggcgacgagcaaccacagcttgcaatggcacaatagtgacatcttgggaaacaatgaaacgttttgtctatatcaatgatgattcgtgccggtattcctactgtgacaaccggatatccaataccaagtatactctgtggaattttctcccgaaaaatttatgggagcaattcaggcgtttcatgaatcagtattttctactaatagcctgccttcagttgtggtcccgtatcacccctgtcagccctgcaactacatggggtccacttatcatcatcttcattgtttctgcttcaaaagaggcttgggatgattacaataggtatctttctgacaagaaagcaaatgagaggaaaatatggttggtaaaggatggcgtccgcatacagatcaaagcacaggaggtacatgttggagatttagtgtggctccatgagaatgatgagataccatgtgatcttgttctcattggcacttctgatcgacaaggcatttgttatgttgagactgctgctttggatggtgaaactgacttgaaaacaagaaccattcctccaatttctgctaacttgtcagtagagcagctaggaaaagtcaagggtgtaattgagtgccccaacccagacaatgacatacggagtcatgttaccttcgatacactgaatgggcttgtggagttgcagtttacacaggcaatgaaacaaaatctggaataagtaggggagctgcggagcccaagttcactgctgctgatgtaataatagacaagctcactattgcaatattcatgttccaagttgttgttgtacttgttctgggttattttgggaatacttggaaggacactcaggggcttaagcaatggtatcttatgtatcctatggaggtagagggcccatggtatgatttcttgattatcccgttacgctttgagctgttgtgctccataatgattccaatctccataaaggttactcttgatttggctaaaggtttgtatgcaaagtttattgactgggatgagcaaatgtttgattgggaaacaaatacacctgctcattcagctaacacagctattagcgaggacctcggacagattgaatatattttgagtgacaaaactgggacactcacagagaataaaatgatcttcaaacaatgctgcataagtgatactttgtatggaaatgacaacggagatgcattaaacgatgtcagacttgtaaatgcggtctcaagtaatgatcctgatgtcatcaaatttctgttggttatggctctttgcaatacagtggtccctatcaaaagcaatgatggtactgtgtcatacaaagcacaatcccaagatgaggaagctttagttaacgctgcagcaaagctgaatatgatgctcatcagtaaagacaccattacagctgagatttgtttcaatgggtctaagttttggtatgagttgttggacattttggaattcacttctgatcgcaaaagaatgtctgtagtggtaaaggaaggggagactggtaagatccttcttttatcaaaaggtgctgatgaagctctcctgcctcgtgcctgtccaggacaacaaatacagagatatcttgaagcagtagaaatgtattctcagttgggattgcgaaccttatgtttggggtggcgtgatttaaaagaaaatgaatataaggaatggtccaaaaactttcaaaaggctagctgctcattggacaatagagagtttaaaattgctgaagtttgtaatagcttagagcaagaccttcaaattcttggtgttactgctatagaggatcgtcttcaggatggtgttcctgaaaccattaaattgttgaggaatgctggaattaatgtgtggatgctaaccggtgataagcaaaatacagcaattcagattggacttctctgtaacctcataacttctgggcccaatagtcaattgttatctatcagtgggaaaactgaagaggacgtgctaagaagcctagagagggcattatttattatgaaaaatacatctgaaacaaagggtcttgcatttgttttggatggttgggcacttgaattaattttgaagcattccaaggagtcttttactaggttggcgatgctgtcaaaaacagcaatatgctgtcgaatgacacctttgcagaaagcacagcttgttgctatcctaaaatccgttggctacctaactctagcaattggtgatggtggtaatgatgttagaatgattcaagaggctaacattggagtagggattagtggtagggaaggactgcaagctgcaagagctgctgattatagcattgggagtaagcatacttctagttggcacaaataaattctatttacttccaaatatccataaacctgatctaatggttttgctagctggtacagaaatagcatattaaccagcttcaaacaagtgcagacttcttttttgttcattagtaatttcaatcttgcttatccatccaaaaagggtaccatttgcaaggttaaattggttgcggttatcctgttattttattaccctttttgcacttcacctccaaatttcaatatacttattatgtattattcctttttttttgcagagttcaagtttcttaagagattgatacttattcatgggcgttattcatacaatcgaacagcatttatttcacagtactccttctacaagtcacttcttatgtgctttattcagattctgtttgcctttttgtcggggctatctgggactagcttattcaactcaattagcttgatggcttataacgttttctatacaagtttacccgtcatgactataatctttgacaaggatatctctgaaacaacggttatgcagtacccccagattttactgcattctcaagctgggaggcttttaaatctcactacattttgcggatggtttgggcgctcgctatatcacgcactcgtcgttttcttcattacgatatgcgcctactcagatgagaaaagtgagatgcaggaactgtcaatggtagcactgtccggttgcatttggttacaggcttttgttgtgacaatggatacaaactcattcacttgcccgcaaatccttctcatctggggaaactttgtggccttctacatgatcaacttaatactcagtaccgtcccaagtctccaactgtacacaatcacgttccgcctgtgtagccaaccttcctactggatctccatggctctgacggttgcagtaggaatgggaccggtggtggctttcaggtacttgaagaacctgtatcagcctagcgccgttaacatactccagcaggtcgagcagcgcaatggatctatcagaacttctgggaatctggagtcggcgggagccaatctcactaatctactgactggctcacgtaaaaacagggattctaattatcgccctctgctttcagagtctgcggagtctgtaagtgcaagcggcagctaagaattgtctaggctttccgtactagcatgacagtcatacactcatacagacggcagaacagtgaactgtaacagaatcatgcttgtactaaaaaatatttcgtcggggtcaaagccaataattgttttgttggcctaaatttgatcatttttctcagtctgcgctgtggcaccgtctgtgctgtccgctgtcgcacgtagggatggtaataggatctaaattttacgctataaaatttaattatcaaatcatattaggatttaat

SEQ ID NO: 201767 - DNA, 2836 bp, Zea Mays
gacagcctgccattgccaagcaccgctcaccggttctcacgccgtaggtaggtaggggtcgatcccaactccttccttcccctttgctgctgctttaattccttgcgcgaagatccctcttcttcttcttcgtttacagccgttctttgctctaacctctggactttagccgctcccacacggcctccatctttcggcatcgagagatccaataacatcaggaccaagaaagtaaaaagacgcaatcattaggaactactttctctccgtttctttttaattgtcgctggatagttcaattttgcactatccagcgacaaataaaacgaaacgctacttatctgcattgcgcagattctctgctagctaggctgttggctcgctccttcaattctcctctcctctccttccgcactccaccccctcctccgtagtagtagcagcatagcatctggtggtgtggtggtcaaggttcaagaacaaattcagctggaggccggcggagattattttattcattcccctccgagaggctgcatcgaaaaggggagatcaaggatccccggaggcttgtagccgcaacaaccacaagggaggcggagggcgagaggcttcttctctgaccagcgaccggctcgccgtccagagaagaagaagaagaagaggaggaggaggaggaagaagaagaagaagcgctcttgggctccgtcgtcgcatgaagaaggaaaccatggaggggcatgtgccattgccattgccattgctcccggacggagaaactgcggtgggctacagcaaggacgacgcctcctcgcctctgcaagaggagatttcgagcctgcggtcaaggcagcggcgtgttgacaggagacggcgggaggcgctcgacaggctcgttgaactgaaaggaagcgttagggtcttctgccgggtccggccgctggctcacacgaacagcttgcatgcccagtcatcacctgttaccgtcgagcaggagaggatcacggtcaagcagccgggatcaagagggagttcggcgctgatagggttttcggccaggagtccacgcaaggaaggaaccggcggtaataagctcggcgtcgtgcctcgggctatccaggagctgttctctcgcgcttcggaggacggctcatgcgcctactctttctccatgagcatgcttgaggtctacctggggagtctcagggacttgctggcagcaccgaggcagcctctcttcaggcgaacagagtgcaaagcagcggcgtgtagtagtagcctcagcatactggcaacgaaaggtggcgccgtggaagtggaggggctgacggacgtctcgacgccggacctcaagaacgccagccagtggtaccgcagagggcggcgagcccggtcgacggcctggacgaacgtcaacgacgcctccagccggtcgcactgcctgacgaggatcaccataaggagaaggatgaggcatggaggaggaggaggagtcagcaagctctggctcgtcgacctcggcggcagcgagcggctgctcaagaccggcgcgtccgggctcaccatggacgagggcaaggccatcaacctctccctgtcggcgctcggagacgtcattgctgcgctcaggaggaagaggccccatgttccttatagaaacagcaagcttacccagattctcagcgactcgctcggcgatggttcgaaagttgtaatggtggtgcacgtcagcctatccgaggacgacgtcggcgagacggtctgctcgctgaacctggcgaaacgagccagatcgatcgagccgaacagagaaatcccacaggatctgaaaacgctgaagcagaagagggtcgcagagctggacagggagatccgcgccgccgaggaagagctgaagcgtctcgacgagcagataaggagagcggaggagaaggagatctcactcgaggaggaggaggaggaggaggaggagaagaagctcttcgcctcgtcggtctgccaggctctcagcgacgacgagaaggggtcgccgaggagcactctggtggtggtggggcacaccgatgccgcggagagcccgcgcgcgacgacggagaaggcgaagggcaggaggccgccgccggctcgtggccatggtggctcagcagctccccacttcatgtcctccacggtgtgcagccggcagagacggtgcgcgggaggctaccattctgtcggtaacggtaagccgaggctgacggcggtgtcggtgaacaggtacccgccgccggctgctgagctgagtgggagccagaacgcggcggccagggctagcaggtcggcgtcagtggcactctcgtccggtgtgcacaagttgaggtgcttgcgtgtcaacaagtccgatcaggtcaacgtaataagcaacagcagcgtcgactcgaccgctgcgtcggcaccgccgccgcggcggagggaaagctgcttcggctccaggccggttctacaaagagcggcagcgcccctgcatctgcacaggaggaggatgtctagcctgacatgaacaccgattgcacagttatgatttttcttaacttaattgtttttattagtggtgaaagggttctgaaagatgtttgtgtatgtatggttgttagcttcgtagttcttgactgctgtaactattggttggaggccccttgggcttttgttttttttttgggtttggcttggaaggggcaaaatgatgcgaggaataattgttgatacatggaataatggaatttacctgtggttctggttgcgatggattttgaatggaatttgcgaggtagcaaaacaatctaacaagttacgtagg

SEQ ID NO: 201768 - DNA, 2759 bp, Zea Mays
gacagcctgccattgccaagcaccgctcaccggttctcacgccgtaggtagccgctcccacacggcctccatctttcggcatcgagagatccaataacatcaggaccaagaaagtaaaaagacgcaatcattaggaactactttctctccgtttctttttaattgtcgctggatagttcaattttgcactatccagcgacaaataaaacgaaacgctacttatctgcattgcgcagattctctgctagctaggctgttggctcgctccttcaattctcctctcctctccttccgcactccaccccctcctccgtagtagtagcagcatagcatctggtggtgtggtggtcaaggttcaagaacaaattcagctggaggccggcggagattattttattcattcccctccgagaggctgcatcgaaaaggggagatcaaggatccccggaggcttgtagccgcaacaaccacaagggaggcggagggcgagaggcttcttctctgaccagcgaccggctcgccgtccagagaagaagaagaagaagaggaggaggaggaggaagaagaagaagaagcgctcttgggctccgtcgtcgcatgaagaaggaaaccatggaggggcatgtgccattgccattgccattgctcccggacggagaaactgcggtgggctacagcaaggacgacgcctcctcgcctctgcaagaggagatttcgagcctgcggtcaaggcagcggcgtgttgacaggagacggcgggaggcgctcgacaggctcgttgaactgaaaggaagcgttagggtcttctgccgggtccggccgctggctcacacgaacagcttgcatgcccagtcatcacctgttaccgtcgagcaggagaggatcacggtcaagcagccgggatcaagagggagttcggcgctgatagggttttcggccaggagtccacgcaagaggatgtgttcgaagaagtgaaaccgatcctcaggtctgcactcgacggccacaacgtctgcatcctcgcgtacggccagaccgggacggggaagacctacacaatggaaggaaccggcggtaataagctcggcgtcgtgcctcgggctatccaggagctgttctctcgcgcttcggaggacggctcatgcgcctactctttctccatgagcatgcttgaggtctacctggggagtctcagggacttgctggcagcaccgaggcagcctctcttcaggcgaacagagtgcaaagcagcggcgtgtagtagtagcctcagcatactggcaacgaaaggtggcgccgtggaagtggaggggctgacggacgtctcgacgccggacctcaagaacgccagccagtggtaccgcagagggcggcgagcccggtcgacggcctggacgaacgtcaacgacgcctccagccggtcgcactgcctgacgaggatcaccataaggagaaggatgaggcatggaggaggaggaggagtcagcaagctctggctcgtcgacctcggcggcagcgagcggctgctcaagaccggcgcgtccgggctcaccatggacgagggcaaggccatcaacctctccctgtcggcgctcggagacgtcattgctgcgctcaggaggaagaggccccatgttccttatagaaacagcaagcttacccagattctcagcgactcgctcggcgatggttcgaaagttgtaatggtggtgcacgtcagcctatccgaggacgacgtcggcgagacggtctgctcgctgaacctggcgaaacgagccagatcgatcgagccgaacagagaaatcccacaggatctgaaaacgctgaagcagaagagggtcgcagagctggacagggagatccgcgccgccgaggaagagctgaagcgtctcgacgagcagataaggagagcggaggagaaggagatctcactcgaggaggaggaggaggaggaggaggagaagaagctcttcgcctcgtcggtctgccaggctctcagcgacgacgagaaggggtcgccgaggagcactctggtggtggtggggcacaccgatgccgcggagagcccgcgcgcgacgacggagaaggcgaagggcaggaggccgccgccggctcgtggccatggtggctcagcagctccccacttcatgtcctccacggtgtgcagccggcagagacggtacccgccgccggctgctgagctgagtgggagccagaacgcggcggccagggctagcaggtcggcgtcagtggcactctcgtccggtgtgcacaagttgaggtgcttgcgtgtcaacaagtccgatcaggtcaacgtaataagcaacagcagcgtcgactcgaccgctgcgtcggcaccgccgccgcggcggagggaaagctgcttcggctccaggccggttctacaaagagcggcagcgcccctgcatctgcacaggaggaggatgtctagcctgacatgaacaccgattgcacagttatgatttttcttaacttaattgtttttattagtggtgaaagggttctgaaagatgtttgtgtatgtatggttgttagcttcgtagttcttgactgctgtaactattggttggaggccccttgggcttttgttttttttttgggtttggcttggaaggggcaaaatgatgcgaggaataattgttgatacatggaataatggaatttacctgtggttctggttgcgatggattttgaatggaatttgcgaggtagcaaaacaatctaacaagttacgtagg

SEQ ID NO: 201769 - DNA, 2392 bp, Zea Mays
ctgccattgccaagcaccgctcaccggttctcacgccgtagggaggcggagggcgagaggcttcttctctgaccagcgaccggctcgccgtccagagaagaagaagaagaagaggaggaggaggaggaagaagaagaagaagcgctcttgggctccgtcgtcgcatgaagaaggaaaccatggaggggcatgtgccattgccattgccattgctcccggacggagaaactgcggtgggctacagcaaggacgacgcctcctcgcctctgcaagaggagatttcgagcctgcggtcaaggcagcggcgtgttgacaggagacggcgggaggcgctcgacaggctcgttgaactgaaaggaagcgttagggtcttctgccgggtccggccgctggctcacacgaacagcttgcatgcccagtcatcacctgttaccgtcgagcaggagaggatcacggtcaagcagccgggatcaagagggagttcggcgctgatagggttttcggccaggagtccacgcaagaggatgtgttcgaagaagtgaaaccgatcctcaggtctgcactcgacggccacaacgtctgcatcctcgcgtacggccagaccgggacggggaagacctacacaatggaaggaaccggcggtaataagctcggcgtcgtgcctcgggctatccaggagctgttctctcgcgcttcggaggacggctcatgcgcctactctttctccatgagcatgcttgaggtctacctggggagtctcagggacttgctggcagcaccgaggcagcctctcttcaggcgaacagagtgcaaagcagcggcgtgtagtagtagcctcagcatactggcaacgaaaggtggcgccgtggaagtggaggggctgacggacgtctcgacgccggacctcaagaacgccagccagtggtaccgcagagggcggcgagcccggtcgacggcctggacgaacgtcaacgacgcctccagccggtcgcactgcctgacgaggatcaccataaggagaaggatgaggcatggaggaggaggaggagtcagcaagctctggctcgtcgacctcggcggcagcgagcggctgctcaagaccggcgcgtccgggctcaccatggacgagggcaaggccatcaacctctccctgtcggcgctcggagacgtcattgctgcgctcaggaggaagaggccccatgttccttatagaaacagcaagcttacccagattctcagcgactcgctcggcgatggttcgaaagttgtaatggtggtgcacgtcagcctatccgaggacgacgtcggcgagacggtctgctcgctgaacctggcgaaacgagccagatcgatcgagccgaacagagaaatcccacaggatctgaaaacgctgaagcagaagagggtcgcagagctggacagggagatccgcgccgccgaggaagagctgaagcgtctcgacgagcagataaggagagcggaggagaaggagatctcactcgaggaggaggaggaggaggaggaggagaagaagctcttcgcctcgtcggtctgccaggctctcagcgacgacgagaaggggtcgccgaggagcactctggtggtggtggggcacaccgatgccgcggagagcccgcgcgcgacgacggagaaggcgaagggcaggaggccgccgccggctcgtggccatggtggctcagcagctccccacttcatgtcctccacggtgtgcagccggcagagacggtgcgcgggaggctaccattctgtcggtaacggtaagccgaggctgacggcggtgtcggtgaacaggtacccgccgccggctgctgagctgagtgggagccagaacgcggcggccagggctagcaggtcggcgtcagtggcactctcgtccggtgtgcacaagttgaggtgcttgcgtgtcaacaagtccgatcaggtcaacgtaataagcaacagcagcgtcgactcgaccgctgcgtcggcaccgccgccgcggcggagggaaagctgcttcggctccaggccggttctacaaagagcggcagcgcccctgcatctgcacaggaggaggatgtctagcctgacatgaacaccgattgcacagttatgatttttcttaacttaattgtttttattagtggtgaaagggttctgaaagatgtttgtgtatgtatggttgttagcttcgtagttcttgactgctgtaactattggttggaggccccttgggcttttgttttttttttgggtttggcttggaaggggcaaaatgatgcgaggaataattgttgatacatggaataatggaatttacctgtggttctggttgcgatggattttgaatggaatttgcgaggtagcaaaacaatctaacaagttacgtagg

SEQ ID NO: 201770 - DNA, 2826 bp, Zea Mays
ccaagcaccgctcaccggttctcacgccgtaggtaggtaggggtcgatcccaactccttccttcccctttgctgctgctttaattccttgcgcgaagatccctcttcttcttcttcgtttacagccgttctttgctctaacctctggactttagccgctcccacacggcctccatctttcggcatcgagagatccaataacatcaggaccaagaaagtaaaaagacgcaatcattaggaactactttctctccgtttctttttaattgtcgctggatagttcaattttgcactatccagcgacaaataaaacgaaacgctacttatctgcattgcgcagattctctgctagctaggctgttggctcgctccttcaattctcctctcctctccttccgcactccaccccctcctccgtagtagtagcagcatagcatctggtggtgtggtggtcaaggttcaagaacaaattcagctggaggccggcggagattattttattcattcccctccgagaggctgcatcgaaaaggggagatcaaggatccccggaggcttgtagccgcaacaaccacaagggaggcggagggcgagaggcttcttctctgaccagcgaccggctcgccgtccagagaagaagaagaagaagaggaggaggaggaggaagaagaagaagaagcgctcttgggctccgtcgtcgcatgaagaaggaaaccatggaggggcatgtgccattgccattgccattgctcccggacggagaaactgcggtgggctacagcaaggacgacgcctcctcgcctctgcaagaggagatttcgagcctgcggtcaaggcagcggcgtgttgacaggagacggcgggaggcgctcgacaggctcgttgaactgaaaggaagcgttagggtcttctgccgggtccggccgctggctcacacgaacagcttgcatgcccagtcatcacctgttaccgtcgagcaggagaggatcacggtcaagcagccgggatcaagagggagttcggcgctgatagggttttcggccaggagtccacgcaagaggaaccggcggtaataagctcggcgtcgtgcctcgggctatccaggagctgttctctcgcgcttcggaggacggctcatgcgcctactctttctccatgagcatgcttgaggtctacctggggagtctcagggacttgctggcagcaccgaggcagcctctcttcaggcgaacagagtgcaaagcagcggcgtgtagtagtagcctcagcatactggcaacgaaaggtggcgccgtggaagtggaggggctgacggacgtctcgacgccggacctcaagaacgccagccagtggtaccgcagagggcggcgagcccggtcgacggcctggacgaacgtcaacgacgcctccagccggtcgcactgcctgacgaggatcaccataaggagaaggatgaggcatggaggaggaggaggagtcagcaagctctggctcgtcgacctcggcggcagcgagcggctgctcaagaccggcgcgtccgggctcaccatggacgagggcaaggccatcaacctctccctgtcggcgctcggagacgtcattgctgcgctcaggaggaagaggccccatgttccttataggtaacagaaacagcaagcttacccagattctcagcgactcgctcggcgatggttcgaaagttgtaatggtggtgcacgtcagcctatccgaggacgacgtcggcgagacggtctgctcgctgaacctggcgaaacgagccagatcgatcgagccgaacagagaaatcccacaggatctgaaaacgctgaagcagaagagggtcgcagagctggacagggagatccgcgccgccgaggaagagctgaagcgtctcgacgagcagataaggagagcggaggagaaggagatctcactcgaggaggaggaggaggaggaggaggagaagaagctcttcgcctcgtcggtctgccaggctctcagcgacgacgagaaggggtcgccgaggagcactctggtggtggtggggcacaccgatgccgcggagagcccgcgcgcgacgacggagaaggcgaagggcaggaggccgccgccggctcgtggccatggtggctcagcagctccccacttcatgtcctccacggtgtgcagccggcagagacggtgcgcgggaggctaccattctgtcggtaacggtaagccgaggctgacggcggtgtcggtgaacaggtacccgccgccggctgctgagctgagtgggagccagaacgcggcggccagggctagcaggtcggcgtcagtggcactctcgtccggtgtgcacaagttgaggtgcttgcgtgtcaacaagtccgatcaggtcaacgtaataagcaacagcagcgtcgactcgaccgctgcgtcggcaccgccgccgcggcggagggaaagctgcttcggctccaggccggttctacaaagagcggcagcgcccctgcatctgcacaggaggaggatgtctagcctgacatgaacaccgattgcacagttatgatttttcttaacttaattgtttttattagtggtgaaagggttctgaaagatgtttgtgtatgtatggttgttagcttcgtagttcttgactgctgtaactattggttggaggccccttgggcttttgttttttttttgggtttggcttggaaggggcaaaatgatgcgaggaataattgttgatacatggaataatggaatttacctgtggttctggttgcgatggattttgaatggaatttgcgaggtagcaaaacaatctaacaagttacgtagg

SEQ ID NO: 201771 - DNA, 587 bp, Zea Mays
tcgccccccactccctctcgccggacggttgcagatcagcggggcggggccggggccgggaggagggcggacgacccggggctcctcaagagggccttcgacagggtgttccgcttcgtccgcctcgccgagttcgagatcttcttcgtcctcttcttcctcatcgccttcttcctcttcaaggacctcatggcacggcctcaatacaatcagctgtttgtcaagaagcctgatctagatgattcctggccttagtacccaaataacctggtatttttctttgagctgtgttgccagtacattctttgaaggcctgcgtggccggctggtcacccccctttgttgtcaggagcatgttttatgattacctagagtattctcttcagtgacgatgaatatatttagccagtcattttcttcagttaaagaggaagattttcatgtcaatactggtatgcggcggcgatactgtggttggtgccagccgttattgtttgcactgtttatgtgttgtgaagccccatgagttcgaggtgagatgaccatatgattaagtgcagttctttttaatggcatctagtgtttct

SEQ ID NO: 201772 - DNA, 683 bp, Zea Mays
gttcacggctgtaccagactcatacgccaaatacggtgcagcccagctccctcacgtacacacgatctttgcccgatggcccactggtcaggctcttctgacgcgcgtgctcgtatcactctcaccggctggtggggtatcgcagtcagcgcaaatgctgccactgtaacagctcaagctgacaaaaagaaaactgcgaaggcaggaaataagcatacattagaagctactgctgatggcacagaaggaacatcaaaggttgacgaggaacctgccccagagagcaagagagcctctgaatctgcagaatatggcgcatcccagttgcaccagttttcgcagggtgctggtgaggaagatggtgatatcgtggatggccaagttgcactgcctgatgtgctaatgatgacgccttctggaagtgaacttggagcagagcaggacgatgatgattcagagaggcgaagtcaatcaatcagcaagaagctatggtcattcttcactacatgacggctgaagatgcctctgaatagatcgtttctagcttttgtgctttcgattcatgataccccattgttggaacttaattatgcttctatcccgtgtaattgaaatatatttgcagtagacagcttgatggcacttaaacgatgagatgtgcaatggcgataatgatatgccct

SEQ ID NO: 201773 - DNA, 329 bp, Zea Mays
cccgcggtacgtgccctccttctcgcgctcctaaacaatcgcccggcctcctccccttccattctaggctccgcgtctcgctgtccccactccgtctcctccggctccgtctcatcccgatgccgctccttctcatcgtcgtcgtcccagtcccggagtcgctcccctcctctggctaagcgcagttcgcctggagcacggaaagacgatcaccttcacccccccctaaaaagggttcaccttcaaaaaaagtttgttcgccatcaccaccccctaaaaaggcttcaccccctaggtatataaaagttttcatacaaattgcatatgtt

SEQ ID NO: 201774 - DNA, 1741 bp, Zea Mays
cccgcggtacgtgccctccttctcgcgctcctaaacaatcgcccggcctcctccccttccattctaggctccgcgtctcgctgtccccactccgtctcctccggctccgtctcatcccgatgccgctccttctcatcgtcgtcgtcccagtcccggagtcgctcccctcctctggctaagcgcagccttgatgtgtcggcaactggagtatttgttacaattggtccttgtggccctcaacagtttggatgctgtcattcagcattgaacagagccagagtctggtaacagtttttaatcatgttcttgataggatggatacatctgttaaatgtgtgaccctgcattcagaattcagatcgacacctttgattggttccaattccctgctgctggcttattatttaactttcctttttgcagtttctataatagcagagacatgcgctaaccagcatttgctaacccaatcaatttgttggcatcattttattgatcgaatccatcccgcctcatgcttttgcttcgccctgttaacatgtttttattgctgccgtgggctcttcgcaatttaaagttctctcgtatatgaagtcacatagttacatgacgtacattctacttgaacatggttgtttggtatttttctcatgaattgtaatgtttcttatgctggttctctttatcctgggtgcatttacttctggataatgttgtatgcctctgattacatatcgtccgactaatcgtgattagtcgcgattagtcggtctgatcggttgttagaactcgataaggtgtaacgattcgatcagggtagctgatcgtccttatcgtccgcctaatcgcgatttatagcgattaatcaccgcgttggtccatcagcggataggcctgatagtccaaaagccattttaggcttaaatgatgtctgggggaggccaaaggacgcccaatcccttcagatacagcctgggtagacgtgagcagtcagcagtcctttaaatgctgtttgggaggccaaaagccattttagacgtgagcagtcagcagcaccagccttctcccccattttagacgtgagcagtcagcagcagccttctccgccattttagtcgcgaaaaacagcagctgagcagtccaaccaaagatgagcagctcttctgaaggtatggatgttgtgctgcttttgcctgttctttactctttgttctctgctatcttcccccctctgttcttcattcctctttgttcagcaaggtctggactttggaggcagagctgctactaagatgtttgacgtcgcagatatgcatggacatcatggtgatggacgttgtgctgctgctgttcaagtcatcttcccgcagtcctctatactatataattatatatttatatatagtgttatatatgactatatgtctctatatatatcatatatgtcctggaatacacaggacgaccagggggacgattagggtcgatcaggggcgactaatcgccttgatcgatgcctaatcgcgactaatcgcctgatcgcccagtggcttcgatcaggcgatcagacgatctgaaaactatgttgtatgcccagttcgcctggagcacggaaagacgatcaccttcacccccccctaaaaagggttcaccttcaaaaaaagtttgttcgccatcaccaccccctaaaaaggcttcaccccctaggtatataaaagttttcatacaaattgcatatgtt

SEQ ID NO: 201775 - DNA, 3024 bp, Zea Mays
ctgccctgtcaccgaggatccctgcccggtgctgagcagagctgacttttgctccgcttgcccgctggccttgccccagcctcatattctcctcctccttcctgtagctgtagctttcaccccactcccatagtccctctccctccagggcgccgcgcctccctccctttccctaatcccccgctaccgcggcgcttccccctcccccgctccctccacaattaggccagtagcccgcttgcagctgcggcgtcggtcgggaagaggccttgctccagtcccgcagatcgggggaggcgctcccccccgcccccgcctcgtcagctcggccgcttccccgccgccggtccctcccggaggcgccagcgtcgccgatgagctgcttcgtctgcttcgggtcggcggcgcacgacggggagtccaggaagccccccgccgcgggcgccggcaaagacgtcccgccggatcgcgcggtggtccgcgtcggatcagacaaatcaagatcacagggtggaccagaatctaagaaggacctgattatacatagggatgggaatagtcaaaatattgcagcacatactttcacttttcgtgaacttgctgcagccactaagaatttcaggcaagattgccttttaggggagggaggttttggtcgtgtatataaaggacgcttggagaatggacaggtaagcatatctgaaacatgacgcattgacattttgattgtaaagctaaatcctctcaaatttggcttctgagttgaaacattaagtaaaatgttggtgggaaatgctaacataacgattatacttgcgccctggattagccctggatactaacagagttttacttcccaggctgttgctgtgaagcaacttgatcgtaatggcctccaaggaaatagggaatttctggttgaggttctcatgctcagtctcttacatcacactaacctggtcaatctaattggctactgtgctgacggtgaccaacgccttcttgtttatgagtttatgccattggggtcactagaagatcatctgcatggtttgtgtatctcctctttgtcatctagtctccggaatattccatgagtgcctgtagctgtaatgaagcattgtgttattctataggagtggcgtgcttcatctgactgttaaatctattttgtatatagcatgactgtaactgcgcgcttaggttgatagatcgtaattgttggttcagcttaaaatgatcggcatgcatgttgtactactgttggatctatcgtataggtagggtgctatttttttgtattgtgtgcctggccatgtaaatttgcatgcactatctatattaaaaaaaacctcgaccagagggagagatgcccctatgattttgtttttaagaagtttgtgccacccttcaaacctgaactggtgatggggggtttcatcaacccccagacttcaacggctaactagtgtaactcgggagaagttggcttttcataggctaaaatgaatatgttgatgttttctctctcttccatttctttgcattcagttcacgggtcttgtaactgaaaagtatttatttgtgtagatctgccaccagataaagaacctctagactggaacacacggatgaagatagctgcaggtgcagctaagggcttagagtaccttcacgacaagacgagtcctcctgttatttaccgggattttaagtcgtcaaacattcttcttggagaaggatttcatccgaagctatcagactttggccttgcaaaacttggcccggttggtgacaagacccatgtttcaacacgtgtgatgggtacatatggctactgtgccccagaatatgcaatgactgggcagctcacagttaaatccgatgtgtatagctttggagtcgtgttccttgaacttatcacagggcgcaaagcaattgacaacaccaagacccaaggggagcaaaacctagtggcatgggctcgtccactgttcaaggaccgcaggaaattccctaaaatggctgatccaatgcttcagggccgcttccctatgaggggtctatatcaggccttagctgttgctgccatgtgcttgcaagagcaagctgctacacgccctcacatcggggatgttgtcactgctctctcatatctcgcttctcaggcttatgacccaaacgcccctgttcaacacagccggagcaacgcatctacccccagacccgcggcggagggaccctgccagggcatccaagtatggagcagaggttagcaggactagctctgccagcgattctggccggcggtcaggtctggatgacatggacccgaccgggtcgcaagtgggaagcccagctcaaaccggaagaagaagagaagctccaagggccaccgacagacagcgcgctgtcggagaggccaggatgtggggggagaactcaagggagcgaacgaatggccatggtagcttcgacagcacgcatgagtgaagccgtcaggttccactccaggcatcatttcagacgaacgatgggtttgagcccactcatcggcaccggtcggatctgatcttgggacatggcgtggtgccgcccggtccgggtgtctgtgaataaggctctctctcttgccctcatgtggcgaatgcaattctcctcatgtccatcccttccgaaggcgatgcttccggcgacggggagcctgaggagcctcctgtaggattcagtcagaggtagacaggtcagtgaagaaaaaggatgcgcggagtcacattggcgagtgtgtgtttttggtggctagagctgagtattttcagctgcatgtatccttttttgtgtatgggtaagagcaaccgtgtcaggtttggctacctgagagacctttgaagctagccagctgctgttgctgctgcttctgcttcttcctccccccttttgggagttcagagctggaatgtaggtaggataggcgatgatgttgagtacagcaactgttttacacccttccatgttgaacagtat

SEQ ID NO: 201776 - DNA, 1159 bp, Zea Mays
ctctactccactagagctagcaatatggtgctattggtttcacctatccctttgccatccacttatatgggcttttgagattttcctgggatttattagaaattcttaattgggccaagcccataaatcctaacaagtttttccagctacccactatttttccagggttgtgcttcttatagtgctgatccatattatggcggggtgtgggcaggatacgcttcaaatggaattgtccatccccaaattagtggtgcagcaaacactagggtaccattgccagttgggcctgcagcagaggaacccatatttgtcaatgcaaagcaatacaatgctatcctccggaggaggcaaaaacgcgcaaaactggaggcccaaaataaactggtgaaaggtcggaagccagcatattcctgtcatgcaaattaagttggatacaccatatctccatgaatctcggcatcgtcatgcaatgaagcgagtccgtggaccagggggcgtttcctcaacaaaaaggagctccaggagcagcagctgaaggcactgccttcacttcagactccaacaggtggggtcagcaaaatggcctttggcaggaacctatgccctgaaagcagcacatctcactcgccttcgacgagctctacaatctcgagtgcttcaaactggagtggcacgctagctcatcaagagcacgttagcttcgcatctgctaataaattcctccccagcatgaacttccacgcggagaatggaggtgaaaagatggccatcaatggcgtccgccaccacacccctgtcctgaggtgaacaacctcaactgtgggggtgctgtgctggtaccatcactggcgcgctccggtgtgcccgtggcaattcatccttggcttatgatgtatcttatagtaatttgctttcactttcatatggaacttgtctcagattaaactcggtgatatttattgcaactggatgactgaaataatctcatgtttcttacaagtgtgtgagccaagacccgtttatcttgtaaaagtttacataggtcaatgcccatttatgttgctagaaggctatctccagtagcttactcatccacatacttatattcaaacctcactctatgaatgatgcggtctatatttttggatgatcttat

SEQ ID NO: 201777 - DNA, 5197 bp, Zea Mays
cccggcctccccgcctggcttggcctcacttccacgcaggccaccgctgctctctctgcgcagcagcgcattcgtcgcccgccgtcaggcttctcagatccagcgtgggctgacaccgtcgtgtcttcgactgctactccacccacatcctccgcgcttgtcgcagccatcgccaccatccaggcagccgttgccgcttcccaggagcacgaacgcgccgcgtctcttgccttggagcaagaacgtgccatgggtgccgccctcaccgcccagatggccaccgcgcaacgtctcctcctcggtcgcagccccaccatgctggtcgcccatgacgatctcccgatcacttccgaggctccccatgtctctgggctcgacgccaccaccatcgtcgccctccacgcccaggccgtcgaggttcacaacattcggtccctttgtgtctgcggtgttggatccgacgtcctcccactaccctcgctggcgcgctcaggtgctcctcacgcttcggcggttcgccctcgccgaccacgttctctacgacctcgtcaccccgctgtcaccatcgtgggcccagatggacagtgtggtcctcttttggctcaacaacaccatcaccgtcgagctacaggacatcgtccgcgaccaggcggacaccgctcgccagttgtggctagctcttgaggaccagttcttcaggaaccgggaggcctgggcgctccacctcgacgaccagttccacctgttctctcagggggatctctccgtgggggagtactgccgccagatgaagggcatggcggactccctccgggacctcggcgagccggtcgccgaccgtaccgtggtgttaaaccttttgcgtggccttagcccccgctacagtcacctgaaggctttgattaagaggaccgtgccctttcccaccttccatgtcgtgtggaacaagcttcttctcgaggagctcatcatggagactgaggcacccgctccggccccgcccctctacagctctcctcccggcggtcaggcgccttcgagggagcaggcccctcgctctctgtcgatcggggctcctacccgccctccacccgcagtccctgcggctcctcgttcggcttccaccgccaacggaggtcgtcgctcccgcaagggcggtcgcgggggtggcggctccacccgaggtggtcccttcggccaaggtggcggccaggcgtggccatcattctacaacccctggaccaggaccatctccatgtggtcgggccaggcctctagtgcctcctatcctccggtgctggcgctcctgacagcgcctccctacggcgtgcctcccacgcctccctatggcgtgccaccaacgactctggcaccattccagctctcgccctcgtggaccaccacatcgacgccttggtccccgctggctggaggatggaactctgcctccctcgtcgccgccttcagcaccatggcgatgaccccacccccctccgactgggtggtcgactcaggtgcttcctaccacaccactcccactgcaggcacgctctctcggtcccatcccatccattcctcccacccctcctcgatcgttgttggaaacagtgccactttgctagtcacctcagtaggtgcctcggttctccctgggccgttcggcgttctcgtagcccctcacatcactcataatcttattttgtttgtcggttcaccaccgacaactcttgttccatttttgacccctctgttttttctgtgaaggatctgaccaccaggacccctctcgcccgctgtgacaactcaggggccctctacaggctctgccctaaccccaccggtgcgtctccacctcccgtcctggtctccaccacttggcatcgtcgtctcgaccatcaaggatcatgatcaagctcaccaatagtttagatctttcatgtagtgggggacattttgatggtctctgccatgcttgttagctagatcgatatacttgtctcccattcactacttctagggctaagcaggcttttgatctgggtcattatgatctctggacctcccctgtactcagtttgtctggatataaatactatctggtgatttaagatgattttcccaaaatctttggactattcctcttcggttgaagtccgacaagttcatcaccctcacacacttcgcctaggcatccacccagtttcgtcgtcccgctgtgtgataatggtcgcgagttcgacaatcacgcctcccgtgtttttttctcactcatggcgtccagttgcgtctctcgtgcccctacacctctccctaggatggtcgggccaaacatatgattcacaccaccaatatgatccgctgccttctcttacaagtgtccttgctagctactgggcagaggccctgcacaccaccacacctgctcaaccgccttccctcaaaggcggtgagccaccctactccccactccgtcctgtacagcacaacctcctcttacggccaccttcgtgtgttcgactgtgtctactatcccaacactaccatttccgctccctataagctatctcctcgctccactcgctgcctcttccttgactactcccctgaccgcagggggtatcgctgtcttgacctcgtctcacactgcatcctcatctctcgtcacgaagatgtgtttccccttgctagctcctccccacccactaatctcaactccttcctcgagtctgatctggttccccctccaccccgtcgctctcgaccactcttacccaggttcagacgccaccgctcccgcctctacccgcaccacgtgcaactcagacgccccgccttgcgccattgcccgcgccacgcgtgaccccatcgatgatgtggcctgctttgccgatctcgccctcgtctaccaccgccgtgggcgtgccactacctcgactcccactgactcggggcccgtcaacgagcgcggcttgcttcgctgatccgccgtcgtctatcaccaccatgagcaagccatacccgcggctcccgacgccccagcagcctgcaccgagcctcttgtgtaccacctggtcgccatccaccgcgactacaggcacgtccacccgatggtgactcggcgcgccgccagcgttctccaccctgtcgaggggctgatcctagcagctgatacgactgccactcctccggacgcctccccgatcccctcctctatttgcaccgccctcgtcgacccccactggcgtcgcgctatggaggagtacgcgaccctgctggccaaccacacctgagacctgatgccgtgtccaccaagcaccaacgtggttaccggcaagtggctttttcgccacaagctcacctcagacggctccctcgaccgctacaaggcccattgggtccttcggggattcacccagcgccccggagtggactacgacgagaccttcagccctgtcgtcaagttcgccaccgttcgcgtcgtcctcgccctctcttgggactgggcgatccatcagctcgatgtcaagaatgccttcctccatgacactctaatggggtttgtctactgcagccagcccatcggcttcgtcgacgccgctcgtccggatctagtctgtcggctgaaccgctccctatacgacctcaagcaggcgccgcgggcatggtacagtcgcttcgcctcctacttagcctccatcagcttcgtcgaggccaagtcggacacatcccttttcatctagtttcccactgttatgtccaatactccctctggtcataaaacatatagtttaggacaatttagttaaatctttaaaactacaaacatcaataatgtttaattgttgatttaaaaacatgcaagttatatatagatttgtattaaaaaaatcggttgaatctcataaattttaagtaattcaagaatatattgtagaagaaattagtggtcaatgatttgcatcaaagaccatgcgaagtcaaatgtgacaactacttctgaccatatgagagtatttttgtagaaaaaatcatttcaccgaaataatagtgactttcataccttaacacatcactctttttctccattttccttgtgtagatttttttctctcgaatatacaggagagttgtgtatcattgcattaagaacaaacatatagattacaattatgttttgtttgcttaaacatcacttattgttacctaaacaaccattctaggatgctttctctgctccactgctttcccttgataatgaaagaaccaataaacttctttgcatgttatgattcgtctcatggcataatcatgtgtcaacctcttattattctatggctctacacttctacctcactaggatcttttcgtactgaaattattctattcagttatgtcatttagctattgaataacatagtgcttcttttctgaaagcatcagccagcatattcctgtcatgcaaattaagttggatacaccatatctccatgaatctcggcatcgtcatgcaatgaagcgagtccgtggaccagggggcgtttcctcaacaaaaaggagctccaggagcagcagctgaaggcactgccttcacttcagactccaacaggtggggtcagcaaaatggcctttggcaggaacctatgccctgaaagcagcacatctcactcgccttcgacgagctctacaatctcgagtgcttcaaactggagtggcacgctagctcatcaagagcacgttagcttcgcatctgctaataaattcctccccagcatgaacttccacgcggagaatggaggtgaaaagatggccatcaatggcgtccgccaccacacccctgtcctgaggtgaacaacctcaactgtgggggtgctgtgctggtaccatcactggcgcgctccggtgtgcccgtggcaattcatccttggcttatgatgtatcttatagtaatttgctttcactttcatatggaacttgtctcagattaaactcggtgatatttattgcaactggatgactgaaataatctcatgtttcttacaagtgtgtgagccaagacccgtttatcttgtaaaagtttacataggtcaatgcccatttatgttgctagaaggctatctccagtagcttactcatccacatacttatattcaaacctcactctatgaatgatgcggtctatatttttggatgatcttat

SEQ ID NO: 201778 - DNA, 1716 bp, Zea Mays
cactcccaaattcatttttctaaattaaaaagggggaaagggaaagattatcttctccgtcccctcccccctcccctcccgtacagctgtctgtctcggagcagcgggcagcggcggccggcaggcaatgcaatgaagaaatgctcggcgttggcctcggcgtccgactgatggtagctgttgcccctgcgcctccagttccagccccaccaggcaaaccgccccttcctctctgctcctctctccgccaccgctcctccggctggtggttctccaacggcgacgcccatggaagagacagcaccgccgccaccacgagcagcagggcgacgaggcggaagtggtggtccgaccccgacggcagccaagaagactacggttcctcttctctagaggaggacgagtacggttacggttacgactacgattacgaggatgaggctgcgttccccggatttggaggggctggggagatgttcgacgagccctggttctccaaggtattcaagacgtacggattcatgctaccggtgatgcttgcatccatgtttgctgtaacagggctaaaggcctttctaatggccatggcgatcccgctcggtcagtcggccatatcatttataattgacgctgtatggccaaggagaaaaggcaaccgtgacgacaggtggaggagaccagtccaagaggaggaggaggaggaggaagatttccctagggacgccactgactttgcaacaggtggtcgaggcagatacagcagcagctattatgaggggaggagagggaggcagagctaccagtcaagtgtctctaacgattttgctgatgctgcctcagctgctgttggagctgatgatagcaccaagagcagcagcagtggagatggcggaggcaacaaaagcagcggtggatatggaggatgggatgagcttctggacaacaataacaacactgctgctgcccgggaggcaaagaggagcagcaactcattctcagctggcaacacttattacagcacgaaatcgcggccttcggcgactggggaggcagatgcggattataccgccgctggcggtggcggaagagcggagcagggagtaggagctcctccggaaagaatgagaatgagacgacggcgggtgccgagaacgatggggctgggcagtaccaggtacaagcaggcgccactcttgatgcgcctgttggtggcagtattcccattcctgggatcatggttcagtgtgctctgaactgtgctccttcgttccaaattataagacgttttggttgtcggctttctctagattcatagctttttgctatgtacttggatatacactatgtctacaaacgttataaaagcaatgtgtatagaaatgtcataatttggaacaagcaatgtatatagaaaagtcatgatttggaatggagggagtagtattatatattagcccatgttggctcactcatgaattcacatacaagtaaccagtggcagtaagcaaaagattatgattgtgaaactgccttcatccggtctccaggcagtcgcagaagtttgattcaatcataggctggagccgaatggaatcagaagtgaagctgtggattggaaggaagacaagtgtcgtgaagaagatcgattgattcaggcagtgtgcctgcagcatcagctaagcggaaaagtatataagatgtctgtacataacccca

SEQ ID NO: 201779 - DNA, 1612 bp, Zea Mays
cactcccaaattcatttttctaaattaaaaagggggaaagggaaagattatcttctccgtcccctcccccctcccctcccgtacagctgtctgtctcggagcagcgggcagcggcggccggcaggcaatgcaatgaagaaatgctcggcgttggcctcggcgtccgactgatggtagctgttgcccctgcgcctccagttccagccccaccaggcaaaccgccccttcctctctgctcctctctccgccaccgctcctccggctggtggttctccaacggcgacgcccatggaagagacagcaccgccgccaccacgagcagcagggcgacgaggcggaagtggtggtccgaccccgacggcagccaagaagactacggttcctcttctctagaggaggacgagtacggttacggttacgactacgattacgaggatgaggctgcgttccccggatttggaggggctggggagatgttcgacgagccctggttctccaaggtattcaagacgtacggattcatgctaccggtgatgcttgcatccatgtttgctgtaacagggctaaaggcctttctaatggccatggcgatcccgctcggtcagtcggccatatcatttataattgacgctgtatggccaaggagaaaaggcaaccgtgacgacaggtggaggagaccagtccaagaggaggaggaggaggaggaagatttccctagggacgccactgactttgcaacagctgctgttggagctgatgatagcaccaagagcagcagcagtggagatggcggaggcaacaaaagcagcggtggatatggaggatgggatgagcttctggacaacaataacaacactgctgctgcccgggaggcaaagaggagcagcaactcattctcagctggcaacacttattacagcacgaaatcgcggccttcggcgactggggaggcagatgcggattataccgccgctggcggtggcggaagagcggagcagggagtaggagctcctccggaaagaatgagaatgagacgacggcgggtgccgagaacgatggggctgggcagtaccaggtacaagcaggcgccactcttgatgcgcctgttggtggcagtattcccattcctgggatcatggttcagtgtgctctgaactgtgctccttcgttccaaattataagacgttttggttgtcggctttctctagattcatagctttttgctatgtacttggatatacactatgtctacaaacgttataaaagcaatgtgtatagaaatgtcataatttggaacaagcaatgtatatagaaaagtcatgatttggaatggagggagtagtattatatattagcccatgttggctcactcatgaattcacatacaagtaaccagtggcagtaagcaaaagattatgattgtgaaactgccttcatccggtctccaggcagtcgcagaagtttgattcaatcataggctggagccgaatggaatcagaagtgaagctgtggattggaaggaagacaagtgtcgtgaagaagatcgattgattcaggcagtgtgcctgcagcatcagctaagcggaaaagtatgaccaagagtgaagcaagt

SEQ ID NO: 201780 - DNA, 1762 bp, Zea Mays
cactcccaaattcatttttctaaattaaaaagggggaaagggaaagattatcttctccgtcccctcccccctcccctcccgtacagctgtctgtctcggagcagcgggcagcggcggccggcaggcaatgcaatgaagaaatgctcggcgttggcctcggcgtccgactgatggtagctgttgcccctgcgcctccagttccagccccaccaggcaaaccgccccttcctctctgctcctctctccgccaccgctcctccggctggtggttctccaacggcgacgcccatggaagagacagcaccgccgccaccacgagcagcagggcgacgaggcggaagtggtggtccgaccccgacggcagccaagaagactacggttcctcttctctagaggaggacgagtacggttacggttacgactacgattacgaggatgaggctgcgttccccggatttggaggggctggggagatgttcgacgagccctggttctccaagggctaaaggcctttctaatggccatggcgatcccgctcggtcagtcggccatatcatttataattgacgctgtatggccaaggagaaaaggcaaccgtgacgacaggtggaggagaccagtccaagaggaggaggaggaggaggaagatttccctagggacgccactgactttgcaacaggtggtcgaggcagatacagcagcagctattatgaggggaggagagggaggcagagctaccagtcaagtgtctctaacgattttgctgatgctgcctcagctgctgttggagctgatgatagcaccaagagcagcagcagtggagatggcggaggcaacaaaagcagcggtggatatggaggatgggatgagcttctggacaacaataacaacactgctgctgcccgggaggcaaagaggagcagcaactcattctcagctggcaacacttattacagcacgaaatcgcggccttcggcgactggggaggcagatgcggattataccgccgctggcggtggcggaagagcggagcagggagtaggagctcctccggaaagaatgagaatgagacgacggcgggtgccgagaacgatggggctgggcagtaccaggtacaagcaggcgccactcttgatgcgcctgttggtggcagtattcccattcctgggatcatggttcagtgtgctctgaactgtgctccttcgttccaaattataagacgttttggttgtcggctttctctagattcatagctttttgctatgtacttggatatacactatgtctacaaacgttataaaagcaatgtgtatagaaatgtcataatttggaacaagcaatgtatatagaaaagtcatgatttggaatggagggagtagtattatatattagcccatgttggctcactcatgaattcacatacaagtaaccagtggcagtaagcaaaagattatgattgtgaaactgccttcatccggtctccaggcagtcgcagaagtttgattcaatcataggctggagccgaatggaatcagaagtgaagctgtggattggaaggaagacaagtgtcgtgaagaagatcgattgattcaggcagtgtgcctgcagcatcagctaagcggaaaagtatgtacgtaccctgttgctctagcgcaatggttttcacttgcactatatggtagtgatacatagacagttgccttgtcattttttttcgtgtcacaatgaaatggaacagtaaagaaggccttcgttttatag

SEQ ID NO: 201781 - DNA, 5206 bp, Zea Mays
gccgcccgctgccatgggacccacggaatccaacctcacccgccggctgccgctcggctgccctccggcctccgggcatcgccatcggagtgtgcaggaaccaggaggaggccggtagagtccgtgcacccgggtcccactcccctgaggccgtccgtggctccgtgcaagatggggattgcgcaagggtgcgaggtcaccatccccgcgcctggtcatcagtgtgagttgagattctgcgtctcctcgctcgatttacttgcagccacatgcttgcgagttgcggtacccagcttagctttttcgagtccttgctaatcttggtggggacgacggagacctgatgctatgcttccttccctccctgtgctgttgagttccgcttccacagctcgtgtatggccgacacggtaatcgctgcgaaacgaggtcatgcgcgtcttccttgtgctttcggatgcaccgaggcttgccatccaaaattcgctgcaatgcttagctagatcgaaggcctacttacgctcagaggtgtcagcttggggatccccatcttttatctcttgtcgtggttaaaacagcggcctgatatgtcaggtgtttgttccgcaaaagggttggacttcccacgttttgggatgagagtttgttcggaatagcatgctcaaagtcatggaatttggtcgcagggagtgatcaagtaggtactaggacagtcctctccctttggtggtgctgttgattccttgcaagacctgtacctctgtgctcagataatccagcatgtgctgcattcagatgggagattgaatgaaagtgtgtaataccagtagcttcctcaaatactgcagattgaatgcacgacaggaacattccaactttgttgtcggtatccattcttcatgaagacgtcagtatagccggctccactgaattcttcaaatggaataccttgttaattatctgcaaaattttgtaaccaataatggagcacttggaggctcatagaagctacatttactagctggatttttaaattggtttctctttggagaagtaggtgcaatcttttttgtaagcatagtcaaatttttaccctttcagaaagttcttgtgccgaaagcttgtggaatgtggtactgaggaccacttaattcaaaactaaagtggctaggtgatcatatttcaaggcctaaatatttagaatgcctcccctaatcaagacttttttccccttgtcaatctacatcagttgcactgtttcatagctggaaggttggtaatccaggctgtcaatcagtgaattagtctgacgggatgtagcgatacccagcccattctcttttagtggcatctcctaaagttagtcttcgtaatgtgagcagtagtcatgttcatggaagattcaggaataccaagtctgattcaggaatacaagtcttttgctaggatgttgcactatactgtggttttatacttttatctgtcagtaactgcctaactggtggtgaatttctagtttcttctgcgtgttttgtccatttcattgatcagcttgatcattggtgaatcacaattgaacttggaatgataggctaatactttcaagtagggaatttggtagtttgattcatctggtagggttacatagaaattgaaacttaaatggtttggtaaaaagtaaatctgggacaaaattttaccattaagaacctatatgagacgatatcgcttgtttgattcatcttgatgtaattaacaaccatctattgatgaattctaaggggtaaaggatacaaacagaagttaggatttaggattgacacacttctccccttgcctttttctctactcaactgaattgcaatgtgaaactgaaaattcgtatgatggtagatccttgagtactacctttacagttgttttagaagttttcatattatcttttaggaacaaaatgatagtatttgtcatgatagctagtgtgtgatctgctcatctgcattatgtctcatggaaatgtacatcacaaattatagcttattgataaatattggaaggctggatggatgatacctatgacctaggaaattattgttttcatctgccacttctcttcaaaaagcaaacttctgtttactgcttttacttttcaacacagaaacacacatcgctacctgggatagcaacagtgcacagactctgagagtaacaattaaacagttgcaatttttatggtgtgggcattttgtttgcatggacattttttctcttattttttatacaagatgcatgcagaagaatgagttagcattgtgtatcagaagattgatgctgttctatcagcagttgctaacattttccttggattggattgtgtttatgtagaaataataatctgttaaactttctgtcttgtgttatatttgtctatataaataataagatgctctagttttagtgcacagtctttcacagattggagcttcttgcatatgcagattcagcagaagaatgagttggtgtctttccgatctcaatgcatttcaccgctccaccagaaattccctctgcccctaccgtactccagtttatctgttatagtgcaacacaatgataaaatggttggtgagatatagttgcttaagatggcaacaggggcggcacacatatatgcttttgtggggaatggaggcttcaatacttagagataatcatactttagttcctgttgcatcatctgcaaacaaattcccgtgtttagaaaaggatagctaactagaaatttgagctaatttatctgcaaatagggtgttgttcatttcagtatgctagttaattaagatcacaccatccttttgtaccatattgtaatattgaagtaaataatcagcttggtcaaagatgctgacacatctcatttgaatgaacatgattatcaaccctagtagtagtaccctatgatgctgccgcacgatttgtaactgtttttttagcaagggcttgacatggtacaatttattataggtcagacttaaactcttgcttccagtttactctaaagtaaccaaatcaccatcactttctacatcagcaaatagaaaagcatggaatgcacaggacattttttttagtgaaattgcacggagctatacatacatgtgggcagacatccactgcagttgcaatggagctttcacagctcttttatatgatgtttgtctgcagagtttggtggctcacagcatatataaaatgcaatataagcataccgatagccttgttaactcagtggttaatctagtacaagttgccagctgatagtaaattgatcaatggggagacagccgtgctgtgacaaggagggggtgaagcgagggccatggacagcggaggaggacaagaagctcattagcttcatcctgacacatggccggtgctgctggcgggcagtgcctaaacttgcagggctgcttcgttgtggcaagagctgccgtctgcggtggactaactatcttcgccctgacctcaagcgtggcctcctcagcactgccgaggagcagcttgtcattgacctccatgccaagctcggaaatagatggtcccagatcgctgccaagttacctggaagaacagacaatgagatcaagaaccactggaacacgcacatcaagaagaagcttatcaagatgggcatcaacccggccacgcaccagcctctagccaactccaaggcagctccctcacactccacagggaggttccgctgtccaccgattcatcggagcagtccagctggccagagccaggcagcaacgtcggcgaccaagaccctgaactgctggtgaattggccgtcggagaccgacttgtcagtggacgagtcttggctgggttttatgagcaacggcaatgagcttggcgatgtcgaggggacgtcgccgtgggacggaacaacagactggctgctggactaccaagattttggcatgtgcagctccaacttggtggacgattcaatgttccgcgcctcaaatggattgaacttctaaatgtcggagaaaggctgtccaatttcaagaaatagggaggaagacagactgcaagtttgagcgcactgcacagctcccagtatagaaaatagatacaacactttcaagaataagattgtgaaaagagagagagagaggcatggggcatatcttgaccatagaatagtgataccttgcccttaaaagtaaggggtttgtattgttagaaacctaatgtttctcggtacgagaagctgaagaactagacccaaatgttcgaaccatgcaaggcatcctatcctatgaacaaagttagggtgttgcagcttttctgtgcaagctaaggctgtgctctgagcagtacaacagcgaggttttatcttgatatctccctgttgctgtccctggcaactgtggagcaattacagagttcaggacatgttgtgttagagactcacactcaccatccttgttccaacatcagactcatcacacaggcttgtggactttgatgtgcgtaatgttaagcagttgcacggcagagacgaaaggaacacgactgtacgtggatcagcaagagccttcctggattctgcacgttggtcagtccagttgcggcggttggtcagtccagttttcatgagggcaaaggtgtgttcccttctctgttccgttgccgtccatgtctgtccctgacaaagatgcaggaccttaaaaggagccagtgaaccaaccatcttccaaatcctgacgtgtttcttccaactccgatgactgaaataaaatgaagtgccagcagaaaccaaagccttgttcgagagctaacttccttccaagctcaccaggtggctttgttgcgtcgtaagcactgttgaacttctccactgcactgatggtgatggcaataacttggctgacagggagggattcatggggactaatctccatgctattcaaaattgaatagcaaactgatttctctctatagatactctctattttcctgtccaccaaaccagccctgaaagattcggaaacccctgtcgtggaaagcttgagcgcgagcctgtttgtgtggcgcagtttagggaaatttggtttataggactaaattttagtacctaaattgccgaacacagatattaaaatagagataaaaaatagagagaatttctcttt

SEQ ID NO: 201782 - DNA, 894 bp, Zea Mays
aatcgaaacagctgcaacaacccgaccggactcgacccaacccaacccaacccgtccataaccccaccggcccctccgcctcgcctgtcccaggctccccagctcaggtcctcacgccacgcacgcacgagccggagccgagggcgcgcccatccggacccagacagagctcgccggcgcctgcgcctccaccgttcggcaagcgggagggagatgaggggttcgtcgcggaggccggtggccgtggtgatggcctgggtgcgtcgccagccgcccaaggtcaaggccttcctcgccgtcgtcgcggggatggccgcgctcgtcttcatccgcttcatcgtccacgaccacgacaacctcttcgtcgccgccgaggccgcgcacgcgctcgggatcgccgtgctcatctacaagctcaccaaggagaagacctgcgccggattgtcactcaagtctcaagatttgactgccttatttctggctgttaggctgtattgtagttttgttatggagtatgacatccatacaattctagatacagctacacttgcagctactctttttgttatttacatgattcggttcaaactgaggtcgacatatatgctggataaagacaactttgccttgtactatgtggtattgccctgtgctgtgctagcgctacttgttcatccttcaacatcgcacaacattgtgaacagaatctgctgggccttctgtgtttatttggaagcagtttcagtgttgccccagttgcgcttgatgcaaaataccaagattgtggagccgttcacagctcattatgtgtttgcgctgggtgttgcaaggtttcttagctgtgcacactgggtccttcagttagactacggactaaatcgttgcaaaggtctg

SEQ ID NO: 201783 - DNA, 1022 bp, Zea Mays
atgaggtgccagcaccttgatggaactgccattgagccacctacctgtccaaaatttggtgttaaccccgttgcccacctctgtctccactgcataatcaaacaaggcctaagtacaacccttaatcgagatcccaaaatctgcccaggcctcgtactaagagtgatcaaacaaccagggtacatggcctcaagtctggaaagatgctgaaagaatttcgaggtcattcttcatatgtaaattatgccatcttcactactgacggtagccgtgtcattacagcttccagtgattgtactgttaaggtctgggatactaaaacaacagattgcttgcatactttcaagccaccacctcctttgaggggaggagatgcatctgttaattctgtccatttatttccaaaaaatactgatcacattgttgtctgcaataagacttcatcaatattcatcatgactttacaaggacaggttgtgaagagtttctcatcaggtaagcgagaagggggagattttgttgcagcttcagtttcaccaaaaggagaatggatatattgtgttggtgaagacatgaacatgtattgctttagctaccaatctggtaaactggagcatctgatgaaggtgcatgagaaggatgtcataggcattacgcaccatcctcacaggaacttagtagccaccattgctgaggattgtatgatgaagatatggaagccttgactttttttctttttaaaaaaaccttgaaccgatgattaaataggatgtattttgttttgtaatttagataactggtaggcgctacagctatggactcgttggtgcttatgttgccccatgtcttactaccattgtatcctgtactagatttagggacctttcaatggtgtaaacacagcttactacgactcctcgctacaagttcattatggttaatttggttatagcacgctggatgctgattgtgtccgcaggcatatagcagtcgaaaattagcagttactataataattgaag

SEQ ID NO: 201784 - DNA, 903 bp, Zea Mays
gttgaattgtcattgtcatgttttgcttctttcattctcttgggaacaaagagtttatgggtacatggcctcaagtctggaaagatgctgaaagaatttcgaggtcattcttcatatgtaaattatgccatcttcactactgacggtagccgtgtcattacagcttccagtgattgtactgttaaggtctgggatactaaaacaacagattgcttgcatactttcaagccaccacctcctttgaggggaggagatgcatctgttaattctgtccatttatttccaaaaaatactgatcacattgttgtctgcaataagacttcatcaatattcatcatgactttacaaggacaggttgtgaagagtttctcatcaggtaagcgagaagggggagattttgttgcagcttcagtttcaccaaaaggagaatggatatattgtgttggtgaagacatgaacatgtattgctttagctaccaatctggtaaactggagcatctgatgaaggtgcatgagaaggatgtcataggcattacgcaccatcctcacaggaacttagtagccaccattgctgaggattgtatgatgaagatatggaagccttgactttttttctttttaaaaaaaccttgaaccgatgattaaataggatgtattttgttttgtaatttagataactggtaggcgctacagctatggactcgttggtgcttatgttgccccatgtcttactaccattgtatcctgtactagatttagggacctttcaatggtgtaaacacagcttactacgactcctcgctacaagttcattatggttaatttggttatagcacgctggatgctgattgtgtccgcaggcatatagcagtcgaaaattagcagttactataataattgaag

SEQ ID NO: 201785 - DNA, 1028 bp, Zea Mays
gttggcctgcacaaggaggtcttcttaacgcaatgctcaggggctgttttacccccgtttggcgtatacgaactggtcagtgcttgcgacgccttgagcgtgcacattcgaaaggtgttacaagtgttacattttcacgtgatggaacccaaatattgagtacatcctttgacactaccgcgagggtacatggcctcaagtctggaaagatgctgaaagaatttcgaggtcattcttcatatgtaaattatgccatcttcactactgacggtagccgtgtcattacagcttccagtgattgtactgttaaggtctgggatactaaaacaacagattgcttgcatactttcaagccaccacctcctttgaggggaggagatgcatctgttaattctgtccatttatttccaaaaaatactgatcacattgttgtctgcaataagacttcatcaatattcatcatgactttacaaggacaggttgtgaagagtttctcatcaggtaagcgagaagggggagattttgttgcagcttcagtttcaccaaaaggagaatggatatattgtgttggtgaagacatgaacatgtattgctttagctaccaatctggtaaactggagcatctgatgaaggtgcatgagaaggatgtcataggcattacgcaccatcctcacaggaacttagtagccaccattgctgaggattgtatgatgaagatatggaagccttgactttttttctttttaaaaaaaccttgaaccgatgattaaataggatgtattttgttttgtaatttagataactggtaggcgctacagctatggactcgttggtgcttatgttgccccatgtcttactaccattgtatcctgtactagatttagggacctttcaatggtgtaaacacagcttactacgactcctcgctacaagttcattatggttaatttggttatagcacgctggatgctgattgtgtccgcaggcatatagcagtcgaaaattagcagttactataataattgaag

SEQ ID NO: 201786 - DNA, 1556 bp, Zea Mays
agcagccgctcccgacttttaccttcctacctggtgctgtagcatccgccgcctcccgcagaacccgaagatggcgtcgtcggcgtcgaccctcgaaatcgaggcccgcgacgtggttaagatagtgctgcagttctgcaaggagaattcgctgcagcagacgttccagacgctgcaaaacgagtgccaggtctccctcaacactgttgacagcatcgacaccttcattgccgacatcaatgccgggcgttgggatgctgtgcttccccaggtcgcacagctcaagctgccacgcaagaagctcgaggacctctatgagcagattgtgttggagatggctgagctccgtgagcttgacacggcccgtgccatcctccgtcagacgcaggtcatgggtgttatgaagcaggagcagcctgagcggtacctccgccttgagcacctccttgtccgcacatactttgaccccaatgaggcctaccaagaatccaccaaggagaagcggcgagcactgattgctcaagctgttgcttcagaagtctcagtagtaccgccatctcgtcttatggcactgattggtcaggctttgaagtggcaacagcaccaaggattgttgcctcctggcacacagtttgatttatttagaggaactgctgcaatgaagcaggatgaagaagaaacataccctacttccttatctcatcaaataaagggtacatggcctcaagtctggaaagatgctgaaagaatttcgaggtcattcttcatatgtaaattatgccatcttcactactgacggtagccgtgtcattacagcttccagtgattgtactgttaaggtctgggatactaaaacaacagattgcttgcatactttcaagccaccacctcctttgaggggaggagatgcatctgttaattctgtccatttatttccaaaaaatactgatcacattgttgtctgcaataagacttcatcaatattcatcatgactttacaaggacaggttgtgaagagtttctcatcaggtaagcgagaagggggagattttgttgcagcttcagtttcaccaaaaggagaatggatatattgtgttggtgaagacatgaacatgtattgctttagctaccaatctggtaaactggagcatctgatgaaggtgcatgagaaggatgtcataggcattacgcaccatcctcacaggaacttagtagccaccattgctgaggattgtatgatgaagatatggaagccttgactttttttctttttaaaaaaaccttgaaccgatgattaaataggatgtattttgttttgtaatttagataactggtaggcgctacagctatggactcgttggtgcttatgttgccccatgtcttactaccattgtatcctgtactagatttagggacctttcaatggtgtaaacacagcttactacgactcctcgctacaagttcattatggttaatttggttatagcacgctggatgctgattgtgtccgcaggcatatagcagtcgaaaattagcagttactataataattgaag

SEQ ID NO: 201787 - DNA, 1840 bp, Zea Mays
agcagccgctcccgacttttaccttcctacctggtgctgtagcatccgccgcctcccgcagaacccgaagatggcgtcgtcggcgtcgaccctcgaaatcgaggcccgcgacgtggttaagatagtgctgcagttctgcaaggagaattcgctgcagcagacgttccagacgctgcaaaacgagtgccaggtcgcacagctcaagctgccacgcaagaagctcgaggacctctatgagcagattgtgttggagatggctgagctccgtgagcttgacacggcccgtgccatcctccgtcagacgcaggtcatgggtgttatgaagcaggagcagcctgagcggtacctccgccttgagcacctccttgtccgcacatactttgaccccaatgaggcctaccaagaatccaccaaggagaagcggcgagcactgattgctcaagctgttgcttcagaagtctcagtagtaccgccatctcgtcttatggcactgattggtcaggctttgaagtggcaacagcaccaaggattgttgcctcctggcacacagtttgatttatttagaggaactgctgcaatgaagcaggatgaagaagaaacataccctacttccttatctcatcaaataaagtttgggaagaaaactcatcctgaatgtgctcgattttcacctgatggtcagtaccttgtttcatgctcagttgatggaataattgaagtctgggattatcttagtggaaagcttaaaaaggatcttcaatatcaagccgatgaaagctttatgatgcacgaggaacctgtgctgtgtgttgattttagtagggattctgaaatgctggcatctggatcacaggatggaaagattaaggtttggcgtatacgaactggtcagtgcttgcgacgccttgagcgtgcacattcgaaaggtgttacaagtgttacattttcacgtgatggaacccaaatattgagtacatcctttgacactaccgcgagggtacatggcctcaagtctggaaagatgctgaaagaatttcgaggtcattcttcatatgtaaattatgccatcttcactactgacggtagccgtgtcattacagcttccagtgattgtactgttaaggtctgggatactaaaacaacagattgcttgcatactttcaagccaccacctcctttgaggggaggagatgcatctgttaattctgtccatttatttccaaaaaatactgatcacattgttgtctgcaataagacttcatcaatattcatcatgactttacaaggacaggttgtgaagagtttctcatcaggtaagcgagaagggggagattttgttgcagcttcagtttcaccaaaaggagaatggatatattgtgttggtgaagacatgaacatgtattgctttagctaccaatctggtaaactggagcatctgatgaaggtgcatgagaaggatgtcataggcattacgcaccatcctcacaggaacttagtagccaccattgctgaggattgtatgatgaagatatggaagccttgactttttttctttttaaaaaaaccttgaaccgatgattaaataggatgtattttgttttgtaatttagataactggtaggcgctacagctatggactcgttggtgcttatgttgccccatgtcttactaccattgtatcctgtactagatttagggacctttcaatggtgtaaacacagcttactacgactcctcgctacaagttcattatggttaatttggttatagcacgctggatgctgattgtgtccgcaggcatatagcagtcgaaaattagcagttactataataattgaag

SEQ ID NO: 201788 - DNA, 1871 bp, Zea Mays
cgcctctcctctccctctccagcagccgctcccgacttttaccttcctacctggtgctgtagcatccgccgcctcccgcagaacccgaagatggcgtcgtcggcgtcgaccctcgaaatcgaggcccgcgacgtggttaagatagtgctgcagttctgcaaggagaattcgctgcagcagacgttccagacgctgcaaaacgagtgccaggtctccctcaacactgttgacagcatcgacaccttcattgccgacatcaatgccgggcgttgggatgctgtgcttccccaggtcgcacagctcaagctgccacgcaagaagctcgaggacctctatgagcagattgtgttggagatggctgagctccgtgagcttgacacggcccgtgccatcctccgtcagacgcaggtcatgggtgttatgaagcaggagcagcctgagcggtacctccgccttgagcacctccttgtccgcacatactttgaccccaatgaggcctaccaagaatccaccaaggagaagcggcgagcactgattgctcaagctgttgcttcagaagtctcagtagtaccgccatctcgtcttatggcactgattggtcaggctttgaagtggcaacagcaccaaggattgttgcctcctggcacacagtttgatttatttagaggaactgctgcaatgaagcaggatgaagaagaaacataccctacttccttatctcatcaaataaagtttgggaagaaaactcatcctgaatgtgctcgattttcacctgatggtcagtaccttgtttcatgctcagttgatggaataattgaagtctgggattatcttagtggaaagcttaaaaaggatcttcaatatcaagccgatgaaagctttatgatgcacgaggaacctgtgctgtgtgttgattttagtagggattctgaaatgctggcatctggatcacaggatggaaagattaaggtttggcgtatacgaactggtcagtgcttgcgacgccttgagcgtgcacattcgaaagggtacatggcctcaagtctggaaagatgctgaaagaatttcgaggtcattcttcatatgtaaattatgccatcttcactactgacggtagccgtgtcattacagcttccagtgattgtactgttaaggtctgggatactaaaacaacagattgcttgcatactttcaagccaccacctcctttgaggggaggagatgcatctgttaattctgtccatttatttccaaaaaatactgatcacattgttgtctgcaataagacttcatcaatattcatcatgactttacaaggacaggttgtgaagagtttctcatcaggtaagcgagaagggggagattttgttgcagcttcagtttcaccaaaaggagaatggatatattgtgttggtgaagacatgaacatgtattgctttagctaccaatctggtaaactggagcatctgatgaaggtgcatgagaaggatgtcataggcattacgcaccatcctcacaggaacttagtagccaccattgctgaggattgtatgatgaagatatggaagccttgactttttttctttttaaaaaaaccttgaaccgatgattaaataggatgtattttgttttgtaatttagataactggtaggcgctacagctatggactcgttggtgcttatgttgccccatgtcttactaccattgtatcctgtactagatttagggacctttcaatggtgtaaacacagcttactacgactcctcgctacaagttcattatggttaatttggttatagcacgctggatgctgattgtgtccgcaggcatatagcagtcgaaaattagcagttactataataattgaag

SEQ ID NO: 201789 - DNA, 1927 bp, Zea Mays
aatcaccagagcgcctctcctctccctctccagcagccgctcccgacttttaccttcctacctggtgctgtagcatccgccgcctcccgcagaacccgaagatggcgtcgtcggcgtcgaccctcgaaatcgaggcccgcgacgtggttaagatagtgctgcagttctgcaaggagaattcgctgcagcagacgttccagacgctgcaaaacgagtgccaggtctccctcaacactgttgacagcatcgacaccttcattgccgacatcaatgccgggcgttgggatgctgtgcttccccaggtcgcacagctcaagctgccacgcaagaagctcgaggacctctatgagcagattgtgttggagatggctgagctccgtgagcttgacacggcccgtgccatcctccgtcagacgcaggtcatgggtgttatgaagcaggagcagcctgagcggtacctccgccttgagcacctccttgtccgcacatactttgaccccaatgaggcctaccaagaatccaccaaggagaagcggcgagcactgattgctcaagctgttgcttcagaagtctcagtagtaccgccatctcgtcttatggcactgattggtcaggctttgaagtggcaacagcaccaaggattgttgcctcctggcacacagtttgatttatttagaggaactgctgcaatgaagcaggatgaagaagaaacataccctacttccttatctcatcaaataaagtttgggaagaaaactcatcctgaatgtgctcgattttcacctgatggtcagtaccttgtttcatgctcagttgatggaataattgaagtctgggattatcttagtggaaagcttaaaaaggatcttcaatatcaagccgatgaaagctttatgatgcacgaggaacctgtgctgtgtgttgattttagtagggattctgaaatgctggcatctggatcacaggatggaaagattaaggtttggcgtatacgaactggtcagtgcttgcgacgccttgagcgtgcacattcgaaaggtgttacaagtgttacattttcacgtgatggaacccaaatattgaggtacatggcctcaagtctggaaagatgctgaaagaatttcgaggtcattcttcatatgtaaattatgccatcttcactactgacggtagccgtgtcattacagcttccagtgattgtactgttaaggtctgggatactaaaacaacagattgcttgcatactttcaagccaccacctcctttgaggggaggagatgcatctgttaattctgtccatttatttccaaaaaatactgatcacattgttgtctgcaataagacttcatcaatattcatcatgactttacaaggacaggttgtgaagagtttctcatcaggtaagcgagaagggggagattttgttgcagcttcagtttcaccaaaaggagaatggatatattgtgttggtgaagacatgaacatgtattgctttagctaccaatctggtaaactggagcatctgatgaaggtgcatgagaaggatgtcataggcattacgcaccatcctcacaggaacttagtagccaccattgctgaggattgtatgatgaagatatggaagccttgactttttttctttttaaaaaaaccttgaaccgatgattaaataggatgtattttgttttgtaatttagataactggtaggcgctacagctatggactcgttggtgcttatgttgccccatgtcttactaccattgtatcctgtactagatttagggacctttcaatggtgtaaacacagcttactacgactcctcgctacaagttcattatggttaatttggttatagcacgctggatgctgattgtgtccgcaggcatatagcagtcgaaaattagcagttactataataattgaag

SEQ ID NO: 201790 - DNA, 1254 bp, Zea Mays
atcaaagtcaatctaggcgtgtatgtagccgatggaaaatatgagctgtcagtacttgtggaccgtgctgttggagcatcaagtattcaggatggtcagctagagattatgctacacaggcgtgtaatcagagatgacgacaaaggtgttgatgaaccacttggtgaagttgtttgtttggatggaagttgcaaggggctcacagtgaggggaacatactatgtcaaagttgacaagatagggcatggagctcactggcgaagaacatatggccaacaagtctattcaccctatcttcttgcttttactcatgaggatgagacaagttggaaatcctacaatgttgccaaacaaagcacgatggatgagaattacagtcttcctgataatgttgccattattaccttgcagaatctagatgatgacaccacattactccgcttggcccatctatttcaggtgtattagttttctgtagaatagtgttttcttttcgttcctcctaaataatgaatcaataattgatcttttgtcgagtctccaggatctagaggacgctcagtattcagtgatagcaaaagttgaactaagaagggtgttcggaaagagaaccatcaaggaattagctgagactaacctttctgccaatcaaaagaagtcagagatgaaaaagctcaactggagagtattggggaacgataaaagtgatcccatcccactgaaaggtggtcccgttgatagtcaagctcttgtcgttgaactcggacccatggagatacgcacattcttgctgaagttctagattgcatacacttagtaattgcctagtttttaaaggggaaaaagaaacatcagaatctaggacccatttggctatcattggttttcaattgactgggtaagaggacatcaataccaattctacattctattctcgctgctttcatgtatatatctctcaatcacccactagctagttggactctcatcagacttcgcttagagttcttgacccaagcatgcatattgaattcatatatcttgatattgtgaggtttgttttagaatatgatacccctgcttatatgaaacttgtcaaggatctctgaaaagatattgtgagtacaacacaagattgaactatatcaagaatgatagacaatctcacagaaactcatagatgacaggttgaagcaaccacgacatgagattaggatctggtgaaggcaattagggctgataacgagccgagct

SEQ ID NO: 201791 - DNA, 2042 bp, Zea Mays
ctgcaagtcgagagtcgagaccgccatcgaagcaccggcgccaatgaagacttgaagagggctaaaacgaaaaagatgccaggatgacaaaatttcccactccactcgaattaaaaccctagcggcaaaaccttcgctctgcgccgccgtcgcctgctcccgtcccgccaccacatccgcccaggagctcgccgtcggggaggctgctcgaggagccgcgctgtctctcccgcgccgcgaccttcgccctcgccgccgccatgatctgcgcgatctccggtgaggtgccggacgagccggtggtgtcgaagaagtcggggcttctcttcgagcggcggctcatcgagcgctacattgaggaccatggcaagtgccccatcaccaaggatgagcttactatggatgatatcgtgccggtcaataccaacaaggtcgtgaagcccaggcctttgcaggctgcaagcattccaggactccttgggatttttcagaaccatgacgctgcctgccgtgttatagccaggttgaagaaggaaagagatgaggctagagcacttttggctcaagctgagagacagattccagcatcagttgcaggagctgctcctgcagctgttgtttccaatggaaaaagagcaatggaagatgaaattggccctgacggaaagaagattcgtcctggtatcaaccctgtcatgattgatgaacttacagagtgtaataccatgctttcagcacagcgtaagaaaagacaggttcctccaactctggcaccattagatgcactcgagagatacactcaaatctccagccatccccttcataagacaaacaaaccaggcattttgtccatggatgttcatccttcaaaggatgttgttgcaactgggggtatcgatacaaatgcagtaatctttgatcggtcatctggtcaaatcttgtgcacgcttactggtcactcaaagaagataaccactttaaagtttgttccacgggatcaactctttgtaactggatcagcagataagactgttcgcatttggcaagagaacgagaatggaaactataactgcgtccatacattgaaagatcatactgctgaggttgaagctgttacagtacatgcgactcagaagtattttgtgagtgcttccaaggataattcgtggtgcttctatgatatttcaacaggatcttgcctgacacaggttggcgaggcttcaggacaagagggatatacatccgcgtctttccatccagatggtcttatccttggaacaggaactactgatgctgttgttaaaatttgggatgtgaagactcagtcgaatgtcgcgaagtttgaggggcatgtaggaccagtcactgctatgtccttctctgaaaatggttacttcctagcgactgctgctcatgatggtgtcaagctttgggatcttcggaaattaagaaattttaggaccttctctccctatgattcagatacgccaacaaatactgtggaatttgattttagtggaaactatcttgccattggtggttcagatataagggtctaccaagtagctaatgttaaggccgaatggaatctcatcaagacattaccagatttatctggaacagggaaagtaacttcggtaaagttcggagcagatgctaagtacatagccgtaggttctatggaccgcaatctacggatatttggcctccctggagacgaccaaatggaggaatcaaccacagcggcagagtgaggaaaatccatggttatcggcattcattgtctatttggccactgtcgagaggtaatccacggagacacaccgctggcgcccgtgacacttggcctgtttggttacttgctaaaaattgctacacatttttgtgccacacttgtttaagcacacttgtttaaggtgtttaaggttatacgctcaaattccgcgtcacagcttgtttgtcactcataagagaatattgcctgtaaaatgagagtctgaacgacttgcccgtaaaatgagatggaaaatcagttagctgta

SEQ ID NO: 201792 - DNA, 2087 bp, Zea Mays
ctgcaagtcgagagtcgagaccgccatcgaagcaccggcgccaatgaagacttgaagagggctaaaacgaaaaagatgccaggatgacaaaatttcccactccactcgaattaaaaccctagcggcaaaaccttcgctctgcgccgccgtcgcctgctcccgtcccgccaccacatccgcccaggagctcgccgtcggggaggctgctcgaggagccgcgctgtctctcccgcgccgcgaccttcgccctcgccgccgccatgatctgcgcgatctccggtgaggtgccggacgagccggtggtgtcgaagaagtcggggcttctcttcgagcggcggctcatcgagcgctacattgaggaccatggcaagtgccccatcaccaaggatgagcttactatggatgatatcgtgccggtcaataccaacaaggtcgtgaagcccaggcctttgcaggctgcaagcattccaggactccttgggatttttcagaaccagctacacacagcaagacaagaacttagtcatgcactctaccagcatgacgctgcctgccgtgttatagccaggttgaagaaggaaagagatgaggctagagcacttttggctcaagctgagagacagattccagcatcagttgcaggagctgctcctgcagctgttgtttccaatggaaaaagagcaatggaagatgaaattggccctgacggaaagaagattcgtcctggtatcaaccctgtcatgattgatgaacttacagagtgtaataccatgctttcagcacagcgtaagaaaagacaggttcctccaactctggcaccattagatgcactcgagagatacactcaaatctccagccatccccttcataagacaaacaaaccaggcattttgtccatggatgttcatccttcaaaggatgttgttgcaactgggggtatcgatacaaatgcagtaatctttgatcggtcatctggtcaaatcttgtgcacgcttactggtcactcaaagaagataaccactttaaagtttgttccacgggatcaactctttgtaactggatcagcagataagactgttcgcatttggcaagagaacgagaatggaaactataactgcgtccatacattgaaagatcatactgctgaggttgaagctgttacagtacatgcgactcagaagtattttgtgagtgcttccaaggataattcgtggtgcttctatgatatttcaacaggatcttgcctgacacaggttggcgaggcttcaggacaagagggatatacatccgcgtctttccatccagatggtcttatccttggaacaggaactactgatgctgttgttaaaatttgggatgtgaagactcagtcgaatgtcgcgaagtttgaggggcatgtaggaccagtcactgctatgtccttctctgaaaatggttacttcctagcgactgctgctcatgatggtgtcaagctttgggatcttcggaaattaagaaattttaggaccttctctccctatgattcagatacgccaacaaatactgtggaatttgattttagtggaaactatcttgccattggtggttcagatataagggtctaccaagtagctaatgttaaggccgaatggaatctcatcaagacattaccagatttatctggaacagggaaagtaacttcggtaaagttcggagcagatgctaagtacatagccgtaggttctatggaccgcaatctacggatatttggcctccctggagacgaccaaatggaggaatcaaccacagcggcagagtgaggaaaatccatggttatcggcattcattgtctatttggccactgtcgagaggtaatccacggagacacaccgctggcgcccgtgacacttggcctgtttggttacttgctaaaaattgctacacatttttgtgccacacttgtttaagcacacttgtttaaggtgtttaaggttatacgctcaaattccgcgtcacagcttgtttgtcactcataagagaatattgcctgtaaaatgagagtctgaacgacttgcccgtaaaatgagatggaaaatcagttagctgta

SEQ ID NO: 201793 - DNA, 1799 bp, Zea Mays
tccactcagccatacgcagcatgcccaggatgcaaagcttatcagccacgtcccaaccaaactcctacacgccatcttcttcctaggccgacggccttagcctccacgccggctgtccttgctctggtttctccccggctccagctcgccagccgcgccctccctgctcgcccagccatctcctcgcctccatggccgctgcaccagccgagtccctccccatgtcagctgcaagcacgccgtgcttccttcccatggccgtctgcagcttctcccatggtgagctccctccagtgccctaggtttccatggccgcccctccctcatcttcctccccaagctgagctcgcccagcccctctctgctccctggtttctccccacgccagcagccatggcacctccttcccctgctcgccctccctctgtgcccagcctcctctctgttcttccgtggagcagtagccctcctctaattctgcagcagcagcttcccctttttcttttgttctccatgaatgaaagcccaagcgccagccccctcccttttgtcaagtgattggaagagagttctagggaaaatcaatggagaagaaaccgtgtttcagttcgacgcgctctaggtgtttgatggaatggatgaaccgaagatccttgttgctcttgcgaaatctgagtctatttagtgttggtacgctagctgaaaatcgtgcgaagcgaagggtgtggatcaaaacaacccacaagacgatgtcggccaatgagcctgaagatggatggactaagcggatgtcaaaacgaaagttgatcgtcaagtggccttcatctaacaacactaacatagtgtttatttcaggtacgctagctgaaaatcgtgcgaagcgaagggtgtggatcaaaacaacccacaagacgatgtcggccaatgagcctgaagatggatggactaagcggatgtcaaaacgaaagttgatcgtcaagtggccttcatctaacaacactaacatagtgtttatttcaggcaagccccggtgcatttgccacctccttgttgttttaaaacttttatcacttatatgctgcattaggtgataggagttgagtgatgaaacagttgatgcattgccattccttggaatttgattatcctccttgatacctgttttacaaaaagaactaatgaggcttagccctgcctagagaattaaaacttgtttctttttaaaagaatgatgtgtgacactgggtatgggtttgttttatgaaaaaggacttgtaatggtgagcgcatcatctgcagtgatgaattcatcattcaagtatggtacctctgtcaggtacatggtttgggtgttaaataataagatgagactagacgttgagcaggaaaggtcgcccgtctgtgtcgcttaaggacagttctgattgttggcctgctgatctaggaccctttaactggccacatgcctcatcatgggtaagctttgcctcggtcggaccaataccagaacagctcgcacgcactgggagtggagagatggcgagagtagcttgtaccctccgtggcaagagactggaaggtggggtgctgtactctcagaaacatggcgggcaccatggcgagagtaacgtgtaccaaccaggccaatggctggatggtggagtgctgtgctctcgggtcgcgtgaacccgttctggtcttgagaaacccgtgggcgagttgacatatgcaagggttaagtgctacatatatcgtgtggttggagatcctcagctgagtattaatcgattcggatcgcc

SEQ ID NO: 201794 - DNA, 1634 bp, Zea Mays
tccactcagccatacgcagcatgcccaggatgcaaagcttatcagccacgtcccaaccaaactcctacacgccatcttcttcctaggccgacggccttagcctccacgccggctgtccttgctctggtttctccccggctccagctcgccagccgcgccctccctgctcgcccagccatctcctcgcctccatggccgctgcaccagccgagtccctccccatgtcagctgcaagcacgccgtgcttccttcccatggccgtctgcagcttctcccatggtgagctccctccagtgccctaggtttccatggccgcccctccctcatcttcctccccaagctgagctcgcccagcccctctctgctccctggtttctccccacgccagcagccatggcacctccttcccctgctcgccctccctctgtgcccagcctcctctctgttcttccgtggagcagtagccctcctctaattctgcagcagcagcttcccctttttcttttgttctccatgaatgaaagcccaagcgccagccccctcccttttgtcaagtgattggaagagagttctagggaaaatcaatggagaagaaaccgtgtttcagttcgacgcgctctaggtgtttgatggaatggatgaaccgaagatccttgttgctcttgcgaaatctgagtctatttagtgttggtacgctagctgaaaatcgtgcgaagcgaagggtgtggatcaaaacaacccacaagacgatgtcggccaatgagcctgaagatggatggactaagcggatgtcaaaacgaaagttgatcgtcaagtggccttcatctaacaacactaacatagtgtttatttcaggcaagccccggtgcatttgccacctccttgttgttttaaaacttttatcacttatatgctgcattaggtgataggagttgagtgatgaaacagttgatgcattgccattccttggaatttgattatcctccttgatacctgttttacaaaaagaactaatgaggcttagccctgcctagagaattaaaacttgtttctttttaaaagaatgatgtgtgacactgggtatgggtttgttttatgaaaaaggacttgtaatggtgagcgcatcatctgcagtgatgaattcatcattcaagtatggtacctctgtcaggtacatggtttgggtgttaaataataagatgagactagacgttgagcaggaaaggtcgcccgtctgtgtcgcttaaggacagttctgattgttggcctgctgatctaggaccctttaactggccacatgcctcatcatgggtaagctttgcctcggtcggaccaataccagaacagctcgcacgcactgggagtggagagatggcgagagtagcttgtaccctccgtggcaagagactggaaggtggggtgctgtactctcagaaacatggcgggcaccatggcgagagtaacgtgtaccaaccaggccaatggctggatggtggagtgctgtgctctcgggtcgcgtgaacccgttctggtcttgagaaacccgtgggcgagttgacatatgcaagggttaagtgctacatatatcgtgtggttggagatcctcagctgagtattaatcgattcggatcgcc

SEQ ID NO: 201795 - DNA, 861 bp, Zea Mays
gcagcatgcccaggatgcaaagcttatcagccacgtcccaaccaaactcctacacgccatcttcttcctaggccgacggccttagcctccacgccggctgtccttgctctggtttctccccggctccagctcgccagccgcgccctccctgctcgcccagccatctcctcgcctccatggccgctgcaccagccgagtccctccccatgtcagctgcaagcacgccgtgcttccttcccatggccgtctgcagcttctcccatggtgagctccctccagtgccctaggtttccatggccgcccctccctcatcttcctccccaagctgagctcgcccagcccctctctgctccctggtttctccccacgccagcagccatggcacctccttcccctgctcgccctccctctgtgcccagcctcctctctgttcttccgtggagcagtagccctcctctaattctgcagcagcagcttcccctttttcttttgttctccatgaatgaaagcccaagcgccagccccctcccttttgtcaagtgagagttctagggaaaatcaatggagaagaaaccgtgtttcagttcgacgcgctctaggtgtttgatggaatggatgaaccgaagatccttgttgctcttgcgaaatctgagtctatttagtgttggtacgctagctgaaaatcgtgcgaagcgaagggtgtggatcaaaacaacccacaagacgatgtcggccaatgagcctgaagatggatggactaagcggatgtcaaaacgaaagttgatcgtcaagtggccttcatctaacaacactaacatagtgtttatttcaggcaagccccggtgcatttgccacctcctt

SEQ ID NO: 201796 - DNA, 695 bp, Zea Mays
ccaaactcctacacgccatcttcttcctaggccgacggccttagcctccacgccggctgtccttgctctggtttctccccggctccagctcgccagccgcgccctccctgctcgcccagccatctcctcgcctccatggccgctgcaccagccgagtccctccccatgtcagctgcaagcacgccgtgcttccttcccatggccgtctgcagcttctcccatggtgagctccctccagtgccctaggtttccatggccgcccctccctcatcttcctccccaagctgagctcgcccagcccctctctgctccctggtttctccccacgccagcagccatggcacctccttcccctgctcgccctccctctgtgcccagcctcctctctgttcttccgtggagcagtagccctcctctaattctgcagcagcagcttcccctttttcttttgttctccatgaatgaaagcccaagcgccagccccctcccttttgtcaagtggtacgctagctgaaaatcgtgcgaagcgaagggtgtggatcaaaacaacccacaagacgatgtcggccaatgagcctgaagatggatggactaagcggatgtcaaaacgaaagttgatcgtcaagtggccttcatctaacaacactaacatagtgtttatttcaggcaagccccggtgcatttgccacctcctt

SEQ ID NO: 201797 - DNA, 1658 bp, Zea Mays
cgacagaaaaacaaagggagaatcaggggttgttggattggattgtagcctgcgccaccatattttaacttcaaatccgttgagatatgcttctttttcgggtctctttgtttccttcctccttttgctggagccactgactttgatgtctcaccaccatttcttcattgcattcccttttctctcaacttgaggcatccttgtgtacacaagatctgcctacgtgtttcagctgatctaagccaggcgcaactgtgaaacaatggcgacatccaagaaggatccccccaatcctagcagaggcaggacgtcacccaacctcatgtcgtccagcagtgagtcctctgggcacggatatggtgctaggcgggctcggtctgtaccgagttccgcgcaccgcaaatttggctcatcgtcgccgtctgtgtctgcctctggctccacagacgtgcatcattcatcattgttcaacgctggtaggtccatctcatcacggaccatgggctcttccatccagggcaccaaggcccagccattcccatctgcagcctcaaaacctacactggcaaaggagaaatccgacaaggtcagcaccaccttgcagcggcctccagtgcttgctgtgccggcagctaaggcatcgccatccaccttgccgaggagtaagccatctccaaggcctagttctgacagttgcaaagcggcagcatcactgaaacctagcagtcagagggtcatgttgccaggtgctgctcaaggagacaaagttcagccactgtctaccgcacagtcacctggtgcagctgcaaggaagagattggatactgttaatggtgctactaccaactcaaaggctaaaagtgtttctcagaaggcaatgggggcatcttcagccaggaaggagaaacataaggacccatcaatgcagattaagggaactgagtgcataaacaccaccacgtctatagaagagcacttgcacaaggagctccccgacccagttgatctgaaatccatggagatgactgtacctgatcagcatgagccatctttcaatgaaccagaacatgtactcaaagacgatgagaaatccgagggtcatttctctgaagagaaagtagatgcaggagctaatgagattcataatggagggcaagatgacaatggtggtgtcaagactatatatgaatgtgggattgttgagaagaaggctgaccggagtgtggataagacagtgccgaagactgaagtggctcaggtatggaggaaggatgatccaaagggcaatgacgtgattgaggaaaccaaaagcaagctcctgctggagaggaagagccgggtgaaggccttggtgggggcctttgaaactgtattgtcgttcaaggagtagtcctcaatcttgtcttctggtctcttgtgcccatctcaatattgagtaatatatatgatgacttccttggctcgttgtactctatatcgtatttcctttttctgaatcatcgttgcattcgatgtggatttgtctatttgttgctctttattgatgtagaattaaattaaattccggtgcttatggcgagaacatttggattctgtgaggaatattcttacttgcaatttttaatatctttcaaatttgtgcgctataatttcgtcag

SEQ ID NO: 201798 - DNA, 1497 bp, Zea Mays
gggagattctaggctccatctgatctcgctgcattttgttcttttcctccagtccgaggcgcaatagataactgatctaagccaggcgcaactgtgaaacaatggcgacatccaagaaggatccccccaatcctagcagaggcaggacgtcacccaacctcatgtcgtccagcagtgagtcctctgggcacggatatggtgctaggcgggctcggtctgtaccgagttccgcgcaccgcaaatttggctcatcgtcgccgtctgtgtctgcctctggctccacagacgtgcatcattcatcattgttcaacgctggtaggtccatctcatcacggaccatgggctcttccatccagggcaccaaggcccagccattcccatctgcagcctcaaaacctacactggcaaaggagaaatccgacaaggtcagcaccaccttgcagcggcctccagtgcttgctgtgccggcagctaaggcatcgccatccaccttgccgaggagtaagccatctccaaggcctagttctgacagttgcaaagcggcagcatcactgaaacctagcagtcagagggtcatgttgccaggtgctgctcaaggagacaaagttcagccactgtctaccgcacagtcacctggtgcagctgcaaggaagagattggatactgttaatggtgctactaccaactcaaaggctaaaagtgtttctcagaaggcaatgggggcatcttcagccaggaaggagaaacataaggacccatcaatgcagattaagggaactgagtgcataaacaccaccacgtctatagaagagcacttgcacaaggagctccccgacccagttgatctgaaatccatggagatgactgtacctgatcagcatgagccatctttcaatgaaccagaacatgtactcaaagacgatgagaaatccgagggtcatttctctgaagagaaagtagatgcaggagctaatgagattcataatggagggcaagatgacaatggtggtgtcaagactatatatgaatgtgggattgttgagaagaaggctgaccggagtgtggataagacagtgccgaagactgaagtggctcaggtatggaggaaggatgatccaaagggcaatgacgtgattgaggaaaccaaaagcaagctcctgctggagaggaagagccgggtgaaggccttggtgggggcctttgaaactgtattgtcgttcaaggagtagtcctcaatcttgtcttctggtctcttgtgcccatctcaatattgagtaatatatatgatgacttccttggctcgttgtactctatatcgtatttcctttttctgaatcatcgttgcattcgatgtggatttgtctatttgttgctctttattgatgtagaattaaattaaattccggtgcttatggcgagaacatttggattctgtgaggaatattcttacttgcaatttttaatatctttcaaatttgtgcgctataatttcgtcag

SEQ ID NO: 201799 - DNA, 348 bp, Zea Mays
atattaataagaagcaattacggcggttcaagtaggtttgtcccgtcgtttcattccggccggccgccgccacaccaaagcaaccatggccttttctgccgccctcgcctgggccgccacgcaactcctccgcgggagcctccctcctgcccgcttcgccgctgccgtctcgcctctcacatacagcagcagccgccaactctgcagtacccccatcgccaacgattcctccgccgcaggaccgtgggacgaggccgagacggagatcctccgcgacgtcgagcccatcgtgaatatcgtcaaggacatcatccactcccgcagatggggataatgtggatatgattg

SEQ ID NO: 201800 - DNA, 1731 bp, Zea Mays
cacgcgcacgcccgttcccctccctacgcgcgcgaatcacgcgcccgccgcacaggcccgccgccatcgccgattcccctaccccgcggatcacgcgcacgcccccacccccccaaccgcaattcccctccctacgtgcgcggatcacgcgcccgtcgccttgcccctacgaatcctgccgcaaaacccacctaccggcgccactacagcacacccgccgccatgccgctccctacgcccgcaacgatcgcctccctacgcgcgggtgaccggcagcacctcgtctctctcgatgtgccaatggcgccgcctccatcctacccagtctccacctctgtcaccgcgttcgtcaaggaggaggacgccccaacccctttggtggcctccccgatggcgccgcctctgtcctacccgacctcgagttcattgagatccagaaggagcaggcgcaaacttctccatgcacgggaggtcaagcggagtatgcgcgaacttctttgtgttgtcgcccgaggctgactccagcatctccttcctggccagatccatggaggcatcgcaagcccagatcccgctgtcgttaggagctaatggttggtgctcgtgtggcacggcaacgcgacgacggagcaaatcggagagcctcggtccgccctccaatatgagtacaaggttttcataaatccgagcattagtgatgtcctgtgcacaacaacaatagaggctctttcaatggggaaattcatgatctgcgcaagacatccatgaaatgagtttttcatgtcattttccgaactgtttgacatacaagacttcagaggagtttgttgcgagagtgaaagaggcaatggatagagaaccccaacagctaacccctgagcaaagatacaacctttcatgggaggcagcgactgagagattcatggagtactcagaccttgacaaggttctgaacaatgaggctgctcagcctaaacaaggtaggaaaagaaagaataaaagaacctcacagcctaatttgttcgacatcatggatggcggtctagcgttggcccatcgatgcttaaccggcaatgaggttctcaggctggcaaccgaagccattcctggtacccgggactacgataagagcaatgtgtggatatgggtctcttgcctcctcaagtacaacaccctgtatatggctggtgatgactgatgagcacccaaagctaatcgtagaaatgtgtagtacatggacatcaaaagttcatgactccagaagactgtcagcacaatattgtctgcttttgccattgaattagagaaacatagtcttaaaaatttaagagcatctctggccgcagagggcgcgcctgtgccaacgacggaagcaaagaagctggcgtcctccatcgcgaggtccaagcaggagatcacagaggacttctcgtcgattggcaggacatggcccccgcggcggtctaagaagagaccaggtgcaacgacaactcaataaggaagcccgaattcctatgctagatccaccatgccatttaatgttgcaggtcatgacgaatcttgtgattggtctgtgtcaaagcaatggatacacatatgttcgcattgcatcatttctatggtttgttgtctcatttgatcgattgacgacaatgattatacattaccagcgcttttgatgtatcctatgaaagaaagggaaaaatcaatgattgaatttcctaatatgag

SEQ ID NO: 201801 - DNA, 3477 bp, Zea Mays
cacgcgcacgcccgttcccctccctacgcgcgcgaatcacgcgcccgccgcacaggcccgccgccatcgccgattcccctaccccgcggatcacgcgcacgcccccacccccccaaccgcaattcccctccctacgtgcgcggatcacgcgcccgtcgccttgcccctacgaatcctgccgcaaaacccacctaccggcgccactacagcacacccgccgccatgccgctccctacgcccgcaacgatcgcctccctacgcgcgggtgaccggcagcacctcgtctctctcgatgtgccaatggcgccgcctccatcctacccagtctccacctctgtcaccgcgttcgtcaaggaggaggacgccccaacccctttggtggcctccccgatggcgccgcctctgtcctacccgacctcgagttcattgagatccagaaggagcaggcgcaaacttctccatgcacgggaggtcaagcggagtatgcgcgaacttctttgtgttgtcgcccgaggctgactccagcatctccttcctggccagatccatggaggcatcgcaagcccagatcccgctgtcgttaggagctaatggttggtgctcgtgtggcacggcaacgcgacgacggagcaaatcggagagcctcggtccgccctccaatatgagttcatctccttcctgctactccattgcctcttttggactcaattcactaaaatctccttctgtaattactattggccggagtggtacattatttgtgaattcctgataataaaaatctcagacagaagtcacaagcaagaaacataaaagagtcccccacgcataaaaatatggaaatgacatggcatcgagtccatgctccactaagtttccatcggtatataaaagcatgagcatccatgctcagtacacattcacacccatatcatgcatatatggattatgagaaagtacatcgtttggtattgtttgtatagggtgctctgttaagttcatgtcagtaaaagcgtaggagttgtctcattttgagcagaacaattaatttgttattaggcacgagtctttgtttagggttatgtctcatgaagtttggtacaattctaaatgttgtaaaacacaataaatcattttctaaatgagatatgtttttattgccgatgcgactgtgatgcatgttgttcattgatttggtaatggttagagcttgcagtcagttctaggtaggagttgggaaggctcaatacaccaattgtaccccaaattcatttctgattttagtgctatatatatgtgagaccaaatgttttttttctaatgggtcccatagtttgtgataacctatctgtgccacttatacacaagacattgtacaacactattggtctagaattttatttctcacatgatgttgcatattttgctttgcaatatagtcagacaaattgtgttgtctatgaggatccctttgccctgcacatttcatcactgtttggcactttggagttccatagttcatgtttagcagtggcaggatctaggcataagcttttctaaatatgtttaaacgctagatctgacaccgatgttcactagcgaatttagttcctccttgttaaaaaagtgaaagtatattaaatacatcagcttttgtattgaatatttcattatagtgtgccactatgccatctacaataagtcgtagatcactttcacttgcatgagcattcactgcagtcctcaactcatttatttgctaattttggtcctctagccatctagcatattctatgtcaaaagtcaacgctcctgcaacaagtttaaggcaattgtcaaagataattaattctgtattccactttttttgttgattactgatgctgccatttgctgtttgtattttttttcaggtacaaggttttcataaatccgagcattagtgatgtcctgtgcacaacaacaatagaggctctttcaatggggaaattcatgatctgcgcaagacatccatgaaatgagtttttcatgtcattttccgaactgtttgacatacaagacttcagaggagtttgttgcgagagtgaaagaggcaatggatagagaaccccaacagctaacccctgagcaaagatacaacctttcatgggaggcagcgactgagagattcatggagtactcagaccttgacaaggttctgaacaatgaggctgctcagcctaaacaagaaatgtgtagtacatggacatcaaaagttcatgactccagaagactgtcagcacaatattgtctgcttttgccattgaattagagaaacatagtcttaaaaatttaagagcatctctggccgcagagggcgcgcctgtgccaacgacggaagcaaagaagctggcgtcctccatcgcgaggtccaagcaggagatcacagaggacttctcgtcgattggcaggacatggcccccgcggcggtctaagaagagaccaggtgcaacgacaactcaatgaggtgaaggatgaggtcccatgggccatggtccatccactcagcgttcttcagatggaggtcgcctctatgtgcaggaaagaaagcgacgtcctctgcagatagagttcgatcttatccacgccggacgccgccccacaccatccccccccccccccccccccccccccccaaaaaaaaagatccatctctttgtgcattccgcttccaccttgttttcacatagaggcgacctccagatgttgttgagactttgaccacaacaattgaataaacatgtgcttatcatgaactattacatgtggtacaatttccttttgtgcttttctaattactagcgggaatgtttagcctctacaaaaacaataggaatgagtttctgtacacccgtggctatgtttgaattgttaatagtgagactgagagagtggtatggttaggatgttagatttgtgcttccagtgactgattagtatctttttttggtagctggtatgtgttagttttaccataagcttaaagtttaggtagaatgaagtggatgtgttgtgccaaattaaatgaattttcaaatgctcctacccgggctctgctttgtgttttttgaactcctttgtgatgttgaacaattgtgcttattagttggtaatttactgatattgcattgtcagtccattatattgttgtttaatagaatatttgtgcgtgtttattgaatattgagttattgacagatatgttttccataccaaaacaatgttcttaaacatgcattttaggatgagttattggaaaatgttcggattcctttgcaagatcaaagtttctatgcacttaatcagcttgtgatttcatcatcttggtaattttacaaaaaataaaactctggtataattgatcatgcactttgcagtaggttgcagtttactttagttttttacactcacattctcagttctttggtccttaggtcg

SEQ ID NO: 201802 - DNA, 3461 bp, Zea Mays
cacgcgcacgcccgttcccctccctacgcgcgcgaatcacgcgcccgccgcacaggcccgccgccatcgccgattcccctaccccgcggatcacgcgcacgcccccacccccccaaccgcaattcccctccctacgtgcgcggatcacgcgcccgtcgccttgcccctacgaatcctgccgcaaaacccacctaccggcgccactacagcacacccgccgccatgccgctccctacgcccgcaacgatcgcctccctacgcgcgggtgaccggcagcacctcgtctctctcgatgtgccaatggcgccgcctccatcctacccagtctccacctctgtcaccgcgttcgtcaaggaggaggacgccccaacccctttggtggcctccccgatggcgccgcctctgtcctacccgacctcgagttcattgagatccagaaggagcaggcgcaaacttctccatgcacgggagatccatggaggcatcgcaagcccagatcccgctgtcgttaggagctaatggttggtgctcgtgtggcacggcaacgcgacgacggagcaaatcggagagcctcggtccgccctccaatatgagttcatctccttcctgctactccattgcctcttttggactcaattcactaaaatctccttctgtaattactattggccggagtggtacattatttgtgaattcctgataataaaaatctcagacagaagtcacaagcaagaaacataaaagagtcccccacgcataaaaatatggaaatgacatggcatcgagtccatgctccactaagtttccatcggtatataaaagcatgagcatccatgctcagtacacattcacacccatatcatgcatatatggattatgagaaagtacatcgtttggtattgtttgtatagggtgctctgttaagttcatgtcagtaaaagcgtaggagttgtctcattttgagcagaacaattaatttgttattaggcacgagtctttgtttagggttatgtctcatgaagtttggtacaattctaaatgttgtaaaacacaataaatcattttctaaatgagatatgtttttattgccgatgcgactgtgatgcatgttgttcattgatttggtaatggttagagcttgcagtcagttctaggtaggagttgggaaggctcaatacaccaattgtaccccaaattcatttctgattttagtgctatatatatgtgagaccaaatgttttttttctaatgggtcccatagtttgtgataacctatctgtgccacttatacacaagacattgtacaacactattggtctagaattttatttctcacatgatgttgcatattttgctttgcaatatagtcagacaaattgtgttgtctatgaggatccctttgccctgcacatttcatcactgtttggcactttggagttccatagttcatgtttagcagtggcaggatctaggcataagcttttctaaatatgtttaaacgctagatctgacaccgatgttcactagcgaatttagttcctccttgttaaaaaagtgaaagtatattaaatacatcagcttttgtattgaatatttcattatagtgtgccactatgccatctacaataagtcgtagatcactttcacttgcatgagcattcactgcagtcctcaactcatttatttgctaattttggtcctctagccatctagcatattctatgtcaaaagtcaacgctcctgcaacaagtttaaggcaattgtcaaagataattaattctgtattccactttttttgttgattactgatgctgccatttgctgtttgtattttttttcaggtacaaggttttcataaatccgagcattagtgatgtcctgtgcacaacaacaatagaggctctttcaatggggaaattcatgatctgcgcaagacatccatgaaatgagtttttcatgtcattttccgaactgtttgacatacaagacttcagaggagtttgttgcgagagtgaaagaggcaatggatagagaaccccaacagctaacccctgagcaaagatacaacctttcatgggaggcagcgactgagagattcatggagtactcagaccttgacaaggttctgaacaatgaggctgctcagcctaaacaaggtaggaaaagaaagaataaaagaacctcacagcctaatttgttcgacatcatggatggcggtctagcgttggcccatcgatgcttaaccggcaatgaggttctcaggctggcaaccgaagccattcctggtacccgggactacgataagagcaatgtgtggatatgggtctcttgcctcctcaagtacaacaccctgtatatggctggtgatgactgatgagcacccaaagctaatcgtagaaatgtgtagtacatggacatcaaaagttcatgactccagaagactgtcagcacaatattgtctgcttttgccattgaattagagaaacatagtcttaaaaatttaagagcatctctggccgcagagggcgcgcctgtgccaacgacggaagcaaagaagctggcgtcctccatcgcgaggtccaagcaggagatcacagaggacttctcgtcgattggcaggacatggcccccgcggcggtctaagaagagaccaggtgcaacgacaactcaatgaggtgaaggatgaggtcccatgggccatggtccatccactcagcgttcttcagatgttgttgagactttgaccacaacaattgaataaacatgtgcttatcatgaactattacatgtggtacaatttccttttgtgcttttctaattactagcgggaatgtttagcctctacaaaaacaataggaatgagtttctgtacacccgtggctatgtttgaattgttaatagtgagactgagagagtggtatggttaggatgttagatttgtgcttccagtgactgattagtatctttttttggtagctggtatgtgttagttttaccataagcttaaagtttaggtagaatgaagtggatgtgttgtgccaaattaaatgaattttcaaatgctcctacccgggctctgctttgtgttttttgaactcctttgtgatgttgaacaattgtgcttattagttggtaatttactgatattgcattgtcagtccattatattgttgtttaatagaatatttgtgcgtgtttattgaatattgagttattgacagatatgttttccataccaaaacaatgttcttaaacatgcattttaggatgagttattggaaaatgttcggattcctttgcaagatcaaagtttctatgcacttaatcagcttgtgatttcatcatcttggtaattttacaaaaaataaaactctggtataattgatcatgcactttgcagtaggttgcagtttactttagttttttacactcacattctcagttctttggtccttaggtcg

SEQ ID NO: 201803 - DNA, 1500 bp, Zea Mays
cacgcgcacgcccgttcccctccctacgcgcgcgaatcacgcgcccgccgcacaggcccgccgccatcgccgattcccctaccccgcggatcacgcgcacgcccccacccccccaaccgcaattcccctccctacgtgcgcggatcacgcgcccgtcgccttgcccctacgaatcctgccgcaaaacccacctaccggcgccactacagcacacccgccgccatgccgctccctacgcccgcaacgatcgcctccctacgcgcgggtgaccggcagcacctcgtctctctcgatgtgccaatggcgccgcctccatcctacccagtctccacctctgtcaccgcgttcgtcaaggaggaggacgccccaacccctttggtggcctccccgatggcgccgcctctgtcctacccgacctcgagttcattgagatccagaaggagcaggcgcaaacttctccatgcacgggaggtcaagcggagtatgcgcgaacttctttgtgttgtcgcccgaggctgactccagcatctccttcctggccagatccatggaggcatcgcaagcccagatcccgctgtcgttaggagctaatggttggtgctcgtgtggcacggcaacgcgacgacggagcaaatcggagagcctcggtacaaggttttcataaatccgagcattagtgatgtcctgtgcacaacaacaatagaggctctttcaatggggaaattcatgatctgcgcaagacatccatgaaatgagtttttcatgtcattttccgaactgtttgacatacaagacttcagaggagtttgttgcgagagtgaaagaggcaatggatagagaaccccaacagctaacccctgagcaaagatacaacctttcatgggaggcagcgactgagagattcatggagtactcagaccttgacaaggttctgaacaatgaggctgctcagcctaaacaaggtaggaaaagaaagaataaaagaacctcacagcctaatttgttcgacatcatggatggcggtctagcgttggcccatcgatgcttaaccggcaatgaggttctcaggctggcaaccgaagccattcctggtacccgggactacgataagagcaatgtgtggatatgggtctcttgcctcctcaagtacaacaccctgtatatggctggtgatgactgatgagcacccaaagctaatcaaatgtgtagtacatggacatcaaaagttcatgactccagaagactgtcagcacaatattgtctgcttttgccattgaattagagaaacatagtcttaaaaatttaagagcatctctggccgcagagggcgcgcctgtgccaacgacggaagcaaagaagctggcgtcctccatcgcgaggtccaagcaggagatcacagaggacttctcgtcgattggcaggacatggcccccgcggcggtctaagaagagaccaggtgcaacgacaactcaatcaaaattgcggagaccaacccacacc

SEQ ID NO: 201804 - DNA, 1346 bp, Zea Mays
caaggttttcataaatccgagcattagtgatgtcctgtgcacaacaacaatagaggctctttcaatggggaaattcatgatctgcgcaagacatccatgaaatgagtttttcatgtcattttccgaactgtttgacatacaagacttcagaggagtttgttgcgagagtgaaagaggcaatggatagagaaccccaacagctaacccctgagcaaagatacaacctttcatgggaggcagcgactgagagattcatggagtactcagaccttgacaaggttctgaacaatgaggctgctcagcctaaacaaggtaggaaaagaaagaataaaagaacctcacagcctaatttgttcgacatcatggatggcggtctagcgttggcccatcgatgcttaaccggcaatgaggttctcaggctggcaaccgaagccattcctggtacccgggactacgataagagcaatgtgtggatatgggtctcttgcctcctcaagtacaacaccctgtatatggctggtgatgactgatgagcacccaaagctaatcgtagaaatgtgtagtacatggacatcaaaagttcatgactccagaagactgtcagcacaatattgtctgcttttgccattgaattagagaaacatagtcttaaaaatttaagagcatctctggccgcagagggcgcgcctgtgccaacgacggaagcaaagaagctggcgtcctccatcgcgaggtccaagcaggagatcacagaggacttctcgtcgattggcaggacatggcccccgcggcggtctaagaagagaccaggtgcaacgacaactcaatgtaagaattgctggattttgtctcccctccaaattcagtgtttcatgagattttttcccttttcctttaattttcctatatcacaaagaagaaccgaaaggcgagaggatttcatttcacaggtcgacttgcttctaccatctggttgtttgtggacagtattttggtgctgatttcgttatcatgtgttatgtttgttttattttaacatcactccagatttgatgaatcatagctcggcttctacacgatgctaaccccaggctcgtcgggttttttcaagaaggaagcccgaattcctatgctagatccaccatgccatttaatgttgcaggtcatgacgaatcttgtgattggtctgtgtcaaagcaatggatacacatatgttcgcattgcatcatttctatggtttgttgtctcatttgatcgattgacgacaatgattatacattaccagcgcttttgatgtatcctatgaaagaaagggaaaaatcaatgattgaatttcctaatatgag

SEQ ID NO: 201805 - DNA, 1233 bp, Zea Mays
tttgtcgccttagcccttatcagacctgagttcatacagccattaaactgcaatcaaacaatccggtatacctatacattgtagccacattctaattttttaacagctacaatccataaagccaccaaggataattattttgtgcaacatcttgaaattttataaacataaatgtgtactgcagtatcctcatagctggatgttttataaggctcttactttggttcatgttgttcaacattctcagtaagtagcatctcatattgtgcaaagtccatttgccatggaagtacatatcttgcattaatacatctctatgcaaagcaccagtactgaatctcaaattggcaagaaatgattcagtttcctccaaaaatatgcacaaatttccataccgagctacctatacatgtgatgcaggttgcaatttggatttgtgtaactccaaaatggaatccataccaacatgtggacagtgatatcctaagagtggtcaagtttttcatacgagcccatgtaggtaggtttgatgttggcaatcaccagttctcatgcagctgtacaatactagaaacaagctgattgtgttcaaacaccaccatatcaaccatgcagtcttactgcatgttcagcaactagcaaagctcatgataaagactgcctgataaatattagaccatagaacaccttaagattctatacttgatcctcccccaagcttgtcgatccaatttttcatttcaaatatgctactgacaactattcccgtgagatccattcttccaatgacactttaatcttcaactcatgcatacaatgcaagtttccattattcatatcattcaaccaggactgactgttgtaatcttgcagagtagagagtacgttatcactgctttggatgcctcagaataaaaatcttatgaagcttgtacacacatgtacatcgaagtatggttcagacaacatttccgtctttagggcatttctatcgtgctgtagctttcagtgatttctccttttgtcttggatctgacgaacacattcagcaaccaaaacactgaactttagggtgaccttgcctgtaaggggtgggttcaagccaaccttcttataagcttgtgcaatgtttttctggcatttttgcaagtgaatattacagagggagggagctgcagactttatgatcggcctactacaggggataagcccaccttgtagcccactggaaaa

SEQ ID NO: 201806 - DNA, 1556 bp, Zea Mays
ctcaacttcaattttcgtttcatcacaggcttatgtacatgctccatggttgctgctaaatctttgcagtttctgttgcatttggcttaatcactcttgcctaactaaaagttaccagtttctcagatcatatttcactcaaacaacatttgtcttagattatttggctaaaacaacaattggcccaggcaacatgacatttattttggggctattgcaaccgctgggcataaacctaggagaaaatcccttcaatgccatccaaaacgataacaattccttcaatgccatcgaaaaatacgcgttctctctaatatcatcagttttaattggtttttggacaacatggcatctaaggttctaaaaattaaaactgatggcattgaagggaacacacatttttcgatggtattgaagggattgttatagttttgaatggcattgaagggtgtgaatgttgcatttagggaaattcagagatatcacactatctactatgggttcagatttacaaatccagattccactaggtcaagtaaaatgtaagactacaaagaaaattaaatctgcatagtgaacatcaaccaggttaaaattctaaatgaaactgaaacttaaaatacattcacataacagttgctttgctcagacaacgaatttactttatttttcagtgtagatattccatacatgattcttcatagccaaaccaaaattgaaattaagtcttcctacattgtagtataaaagaagatactgtcatggtaaatctacctggcaactataagtattattcttgtttgataatgataataagaccattaatcatcgttcttgttttttgacatcatgtcactgttgccagaatgtgaagtcatgaagacttaacacgatgtcctggcatggcaactatacccaatcagataggcatcacaaggatacagaagtgctggaagctatgataaacagaatcccatcgagtgccttgagcgtcatcttaaaatggtagcattagatggatatgacggcatgggaccacatgtcaagtttgcccaattctttgttcgaaatgcccagttgctagagttaatgaagttcagaatctttagaaactaccactgtgaacctgggaaaaccaaggcatggattgaggatcagcaaaggcaactgcaagtcaggagcatgacttcccgacctgtgaagtttaagtttgtacatgattctagatataatcaggatgtttactgtggtgaggatatcagtgacctgtcagagcacatccacgatgacccatttgatcaatggtttgaatcagagaaggaagccccccggcatgctgaaggaaaagaagatgctatagtttggaactccagccaaaggcttgattcatttgatcaaagctgaataagaacctcgtcctgaacttttatttaattcgttatgtttgtgtgctttcagttgataacatcacattttctgttttgatgcttcagtaccacatcatattgttcacttaatatctctcattaaacagctgtctttccacaaacttcata

SEQ ID NO: 201807 - DNA, 1296 bp, Zea Mays
tcctagccaccacaattctccaccacctccaaacaccacgaccttcccccatcctcccctccaccactcccgcctagcccttcgctccaccaccttcgagactcccccttcgccggtcggcgtcgttggtggttggagagatggggcagcagcgtacgttggtgtatagcttcgtggcgcgaggcaccattgtgctagcggaccacgccgaggtctccggcaactttgcatctgttgccgctcagtgcctgcagaaacttcctgccaacaacaatcgtttcaactacaactgcgatgggcacacattcaactaccacattcatgatggatttacatactgcgttgttgctactgaatcagctggtcgacagcttccagttggatttattgaaagagtcaaggatgatttttccaagaagtatagcggagggaaagccaaaactgctaatgctaatggcctcaagcgagaatatgggcctaaacttaaagagcacatgaagtattgtgaccagcaccccgaggagatcgacaagcttgcaaaagtgaaggctcaagtcacagaggtcaagggagtgatgatgcaaaacatcgagaaggtactagatcgtggtgaaaaaatcgaacttcttgtggataaaacggaggatctccgagcacaggcacaagatttcaggcaacagggaacgaagatacgaagaaagatgtggtgggagaatatgaagatgaagctcatcgttttcggcatcgtggttgcactgatcctcctcattgtcttgacagtttgcaaggacttcgattgctgataagatgcaggaacatgaaaggaaagaacatgagaaaaaatgtagggggagtgtagtgccatgacaccgcgggaccaaaatccatcatttgtgtgatgttgttggcattggccacaatgttcttagctacgcctagaacgatgggctcaaattaagttataacagggctctctaatattttaaataattgtaatagtagcaaatatcgttgtgaatcatgatttgataaggtgattactctacaatttagtgaagagcttcttattgatgtaccccacttctagctgtgctggtgacactttgagtttccttaatgtctttgtaagccttttagggcttgatgcatggggattggaggggatttggattatatggacctcaatcccctccaatcccatgcatcaaacaagcccttactcttggggacttcaccttgttcccaagtatttaccccttttctcatctttgccaacgtccctgctgcagatccgtg

SEQ ID NO: 201808 - DNA, 2636 bp, Zea Mays
aaatccaaaaccaacgcgagcacgagtcggggacgagcagctccacaacaattcgtgcctgcctccctgcctcggcctcctccctcgtcctcccctcctccgccgcctcaaacccggccccctcgcgcgcgtgcgcggcgctcgaggcgacgaatccagccacctcctccgcacccatccccgccgccggtcgccgatattggaaggagctcggaaggctgggacgctgacccgaattttatggggagaggatgccagagctgcgaagcaatactcgtcaagcacgcttaaggtctaagaagcttgacgatctgcagccaggagagccgcttgcgaaaccggtgtcacctgctctgccgagcgcacggaagcgtgctcctacacgtgctgctaggggcagaaagggtgctgctgggagaggagtgcctcccgcaccaaagcctagaagaaagggggttgatattgtcgtcttagaagctgatcctgcttgtgaaaccccacttaaagctttcaagggactggaagttgctgctgctgcgcccaagaaccttcctttgaagcaggtagccgaagttggtgttccgaaaatgaatggtgaaagtggggagaagattgttggggctgaagatgaatcgacagctacacctgtcccagaaagggttcaagtaggtaattctccagagtacataactgacaggaagttaggtaaaggtggttttggtcaggtgtatgttggtcgaagggtttctggtggtgctgctcgcactggtcctgatgcatatgaggttgcattgaaattcgagcatcgtaacagtaaaggatgcaattatggccccccatatgagtggcaagtttataagtaatggatatgcttggtcccagcctttgggatgtgtggaattcgatggggcaggcgatgactccaaatatggctgcttgcattgctgtagagagcatatcaattcttgagaagctccattctaaagggtttgtgcatggtgatgtgaaaccagagaattttctgcttggtcagcctggatcgcctgaagataagaagctttaccttatagatcttggtttagcatccaagtggagagagaataatggtcatcatgttgattatgatcaacggcctgatatctttaggggaacaattagatatgcgagtgtccatgctcatttggggcgcactggtagtaggagggatgatttagagtcactggcatacacccttattttcctgataagaggaagattaccttggcaaggctaccagggagataccaagagtttccttgtttgcaagaagaaaatggctacttctccggagatgctttgttgttattgtccagctccattcaaacagtttcttgagattgtcacaaatatgaaatttgacgaagagccaaattatgccaagcttatctctctttttgatggtttgattgaagcgcctgcttcgagacaaatcagaattgatggggctctcaaggttggacagaaacgtggaagattggttgcagatctagaagaagatgaacaacctaaaaagaaggttagattagggagcccagcggctcaatggatttcagtttataatgctaggcggcccatgaagcagaggtaccattacaatgtggctgactcgaggctaagccaacatatagaaaagggcaacgatgatgggctttacattagcagcgtggcttcctcggcaaacctttgggcactcatcatggacgcaggaactggtttctgttctcaggtttatgagctctcaccagttttcctccacaaggactggataatggagcagtgggagaaaagctactacataacagcaattgctggatcatccaacgggagctcattggttgtcatgtccaaaggaactccttacacccaacaatcatacaaggttagcgagtcgttcccttacaagtggatcaataagaagtggaaagaagggttccatgtgacatccatggccaccgctgggaatcgctggggcgtagtcatgtcaaggaattcagggttctctactcaggttgtagagttggatttcctgtaccccagcgagggcatccaccggcgctgggagagcggctacaggataacttccacggcagccaccaacgaccaagccgctttcatcctgagcatgccgaaacggaagccgatggacgagacacaggaaacgctgcggacctccgccttccccagctcacacgtcaaggagaaatgggccaagaacctctacatcgcttcgatttgcttcgggcggaccgtgtgctgatcgcgcgcgcctgggaaatggaagtcgaagcgagggccaccgatccggtacggtggcgcctcgcatcaagagatgcgagatggggcgtcaagtcgaaaccagttctaatgataggatcagtgtatctctgaagatacggtatgggttaccctaccgtatttgtaaagtaatgatgccggccgaacgacctttcctaacataaattgaattgattgaatatttagagctcagtcagtcaaggcccgattaagtaacatatgaacgtatgtctatattcattcattattattttaataaatatggatagaaaaaaaaagttggctaaaaagataaacaataa

SEQ ID NO: 201809 - DNA, 1264 bp, Zea Mays
cgccacgacccacggcacgagggtggcgcaccgcgtctccaaatccaaaaccaacgcgagcacgagtcggggacgagcagctccacaacaattcgtgcctgcctccctgcctcggcctcctccctcgtcctcccctcctccgccgcctcaaacccggccccctcgcgcgcgtgcgcggcgctcgaggcgacgaatccagccacctcctccgcacccatccccgccgccggtcgccgatgagctcggaaggctgggacgctgacccgaattttatggggagaggatgccagagctgcgaagcaatactcgtcaagcacgcttaaggtctaagaagcttgacgatctgcagccaggagagccgcttgcgaaaccggtgtcacctgctctgccgagcgcacggaagcgtgctcctacacgtgctgctaggggcagaaagggtgctgctgggagaggagtgcctcccgcaccaaagcctagaagaaagggggttgatattgtcgtcttagaagctgatcctgcttgtgaaaccccacttaaagctttcaagggactggaagttgctgctgctgcgcccaagaaccttcctttgaagcaggtagccgaagttggtgttccgaaaatgaatggtgaaagtggggagaagattgttggggctgaagatgaatcgacagctacacctgtcccagaaagggttcaagtaggtaattctccagagtacataactgacaggaagttaggtaaaggtgggccaccgatccggtacggtggcgcctcgcatcaagagatgcgagatggggcgtcaagtcgaaaccagttctaatgataggatcagtgtatctctgaagatacggtatgggttaccctaccgtatttgtaaagtaatgatgccggccgaacgacctttcctaacgcgtttgggcagaaattcgttgctgtcaccatattttgacgggagtttctcccgtgttgtcggtagaaatttgcgtgtgcactcttcccgttttggcgcccatgcgatgtgtttcacccgatgtatcgctgggcttcctgtttcgtgactcgtgagccgcaatgtctggtggcctgccgactccggttggcattttattttgagagacgtagataaattgaattgattgaatatttagagctcagtcagtcaaggcccgattaagtaacatatgaacgtatgtctatattcattcattattattttaataaatatggatagaaaaaaaaagttggctaaaaagataaacaataa

SEQ ID NO: 201810 - DNA, 814 bp, Zea Mays
ctggcctgtcacctctttgggaggaaatggcatgtcctggcaaggaataccagggagacgacgccctgcagcttgattaactctgagatgatcagcactcccggatccacaacaagatccagccactcttcccaccgcagggtgaaagctcctcctgtgcacgccatcccaagttcaacggagatgaacgagtacttcgctgctgaacagcgacgccaacaacaggctttcattgacaagtacaactttgatcctgtaaatgactgccctctcccaggcaggtttgaatgggtgaagctagactgatagattcagaggacatgagagcagcagcatggaactcacctccgctccctccaccgccgcagcgtcgtggcagaggcgcataccgtcgtgttagctttgtttctgttgtaaaaacttagcgttagcttgtagccttaattgtcgcgtgtcacagtacagaactgatgctgagttacagcaccctgatatgatctggtccctcaactccaatgtaacccttaacagctcattctgtaaggaacctatcatcctgttaccagttgccgaattaatgaagtagagctagataatgatgttctgtcacagttattaatacttatactctgtgatgttgcacctgaagctgatgtaatttttgtgtgtgattcatgcactcctcttggtacctgcaaagctggctgccatggtttgacctttggagccttgtgctgtgcccttcctgcagtggcatcttctctctcagggctcaggatgctgctgcatgtgtcattattgctggatgctggcc

SEQ ID NO: 201811 - DNA, 2568 bp, Zea Mays
tagagttgcatgcgggccttagcctcggtggggccggagaacagcttctcacaattttcttcctggagtttcatgtgagggtgctcctcctgaccagatgggagcaagctatcctcacatgtttttgatcctcttgctgcttcgtggagccaatgctgctttgaaatctccagcagggccgaaatggcagactctgagcgctgctaatgctgttgctatcaccctacaggcggtccccctctagtcatagctcgaggaggattctctggcgtgtttcctgactcgagccagtttgcctaccagtttgccttgactgccagcttgcctgacgtcgttctgttatgtgatctacaattctcaagcgaccatataggcttctgcaaaacagggttgaccctggataactcgacgactgtctccgagaggttccccaagatggagagaacatacaaactgctcggagaggacgtccatggctggttctctctagattttaccgcggagcagctggttcagaacatcacattgatccaaaacatcttctcgcgcccaagcacatttgatgactccttggggatgtacacgcttgatgatgttgttgaactccacccccctcaaatatggcttaatgtacagtacaattcgttctttttggagcacaaattaagtagcgaagattatatattagaactgccaaaagatagcctctcttacatctcctccccggaggttgaattcctgaaaagcttggctgggaagctcaagaaagccaagacaaagctcatcttccggttcctcaatgaaaacgtcgaggagccttcgaccaagaagacatatggggaactcctgaaagatctgaaatccatcaaggcattcgcggctgggattcttgtgcccaagacatacatctggccgctgaaaaaggatcagtacctggcgccatccaccagtctggtcaaagatgctcatgccctcgggctggaggtgtatgcatccggatttgccaatgatatcgtcttgagctacaactacagctacgatcccagtgaagagtacttgcagttcatggacaatccagacttctctgtggacggtgtgctcacggacttcccgtccaccgcatcaggagctgttgcttgcttggctcattccaagggcaatcctctaccgcctcctggaaaggacaccaggccgctgatcatcacccacaatggcgcgagcggcgtgtttcccggcagcacagatcttgcctaccagcaggcgatcaaagatgccgccgacatcatagattgcacggtccagatgtcgaaagacggaacggccttctgcaagcactccgctgacatctccagctccacgaccgcgtccgtcgctttcgcgtccaaagcctccaccgtccacgagatccagaataagtctggcatcttctcgttcgatctgtcgtggagcgagatcgcaaccttgaagcccagcatcatctcccccttcgctcaggcaggcatgttaagaaatcctgcagcgaagaatgccggcaagctgatgactttgcccgaattcttagacttggccaaggccagcaacatcaccggtatactgatcgaaatagagcatgcttcctacctcgccaagagagggatcggcgtggtggaggcggtgtccagcgcgctgaccaaggcgggctacgacaaggagaccaagcagcaggtgttcatccagtccgatgactcgtctgtgctcgcggcgttcaagaagttcgccaggttcaggagggtgctcaacatcgaggccaagatcagcggcgcctccaaaccgtcggtggatgacatcaagaagtacgcggacacggtgagggtcaaccggaactccgtggcgcagatcaatggctacttcctgacgcacttcaccgacacggtcagcagcctacaggacgccaacatcaccgtgtttgtcggcgtactcaagaacgagttcatgaacctcggcttcgactacttcgctgacccgacggtcgagatcgctacctacacgttggcggtgctggctgatgggctcgtcacggacaaccctgccactgcagcttcctacttcaggagtccatgcagtgacatgaagctgaacctgagctacacgatcctgcctgcacaacctggcgctctggtcaacctggcatccccgggggcgctggctccggcgggagcgccggcaccgttgctccaacccgctgacgttgtggacccgccgctgcctccagttaaagctgtgatcgccgccgacgcgccggcgccaggggcggctgacaacacctcctcggcgttcagctccagcgcggggaacggcctcttgtgggctggcatcgctgccctcttgtccctgacctttctgcactgatctttccttggcgtggcttccattcacgttttccttcttcctctccgtgtttccctcttactcctcaaatgtagctctaactgtaacataatgttccttaaatagatataaattgtcatcaacctgcacataaatacagatcagaaaagaagttaccgtgcaccagttcaagattgggtg

SEQ ID NO: 201812 - DNA, 707 bp, Zea Mays
ctccactttaaaacaagaaagaacgttacatcacgcacacacgcgcaccaaagccaagcgcccaagcccagcactcgacaccaccacagcgcgcagccacgctcacgcacaccgagctgcgggagtggagtagtggaccgatggggagcagcgggggcagcagcgagcacttcctgcggcagctgagttcgagcgacggcggcagcgcgccgcaccatctgctgcagcgagagtgggagtgcggcggcgtcaccggcagcggcagcaggcgcgggtcgcggaagaagaccagggcgcggggacaccgccgccgcggcggcgggttctgcagggcggaggaggctgcgccggggcggaagcgggtaatggtggtggtggaccagagctccggcgccaagcacgccatgttgtgggcgctcacccacgtggccaacaagggcgacttcctcaccctgctccacgtcctgccgccggagagcggccacagcagccgcggtgctgcggaggacgcctccgcgctcgccaactccctcggcgcgctttgcaaggcctgcaagcctgaggtcgaggtggaggcgcttgtgatccaggggcccaagctgccgaccatcctcagccaggtgaagaagctggaggcgtccgtgctggtgctgagccaacgcagcccctcgcctttctgctgttgtttctctagctacggctagtgg

SEQ ID NO: 201813 - DNA, 5273 bp, Zea Mays
ctccaccctccactgcagcagcttgcttgcctttgctccactcccatacagagtccagacgcccgccccgtcgccgccggcactcagctaccaagccgccgtcccggaccctcgattttcctcgccggagcggagcgcccacccctcttcgctcgcctcggatctcgcccccgatttgctccgcccgctcatccccaaccactattctctcgtctcgatccagcgcaggctactcgagattcagctgccgccgccctctggatccggccacacaatccgcttccgctcccgctgcctccccgacccgaccgcccatctcgctcaggctccctcctagtccctaccctagctgctagctaccactaccactaccatggccgccgggagaggccacgcggaggacatgctgggcttcaaggaggacgacgccatgcgcttcatcttcggcgaagacatcatgggaatggaggaccacggcgccttcgacagatccctcatggagcttcaggttttcaaggaggtcttctgcggggccgcccataacgtcgccgccaccacccatctgcccaccgagatggaccttggattcgtccacaccagcgccgccgctgcccacctcaaggccacggagacctcgccctctccatttgtctcccatgcgcagcagcagcagcctgctgccgctgccactgctgatccacagctcacaatggatcgtagccagccaaactatggacctcgccacgaccttcacccccaggttcaggagcacgcgcacactcgtgcgcagcaaaacgggaccgagctggatgatgctgcgttcatgcacagattcatgggttcctggcagcctggggataagcacgcgatccatctgctcggcctatccgatgaccaacacccattcgtcggcgcagatttggatgtgcacgcgcaagatattggagctgggatgtgcaatgctcccgggctgggctgcagcagcagcactagcgcggttgatgaccccatgccttccttcatagaagcgctagcggagatttctgaattccagagtgccactctccttccagatccctttttgcatcagtggttccaggagcagcagcaattccctaccaatgcatgcttctcttacgatcaaggccagatggatgacaccacttatcccctatgtgcaagtacaaaggatttccctgacagagagcagcatctgtgttacagtgaagaagctcatagtactccaacaatacctcatcagtcccatatttggttcagccctggtcagttcacccagctcgatggcaccaccatttgccaggaaggcacgcctgatgcgaatattagttgcccggatgaaattgatgttcatggatgcggcagcagcgcggtacactttggctcggcagctgctgtttccaagaaggccttgggcagggatattcctgaccagctggaagcacatgcgcatcgccttttcaaggacgctggatggactattaagccacggaaaaggaatgacagggctaagatggcgtcctacttcacagctccaaacaaggaagcggttcatacctcactaacccaggcttggaagttttgtggcaaaaagttatatgaagcttccccagatacagaaaggggaaggtatccaaaggagtggtcagatgttgattcgttttggaaggatctcacagatgcaatgacctatgttgataggatgcttgcaaaccagcaaaatgcactcacgcttctccaacgttggcagattttggatccttttgtagctgttgtgttcatcagtaggaaaatcactgctctgcagcaatataaaactcttagagctgtcgacagttcaacctttgttcttgatggcagctcagacacatcatcggtaagtaagatcatgcacaaagccagtgagcttttgacaagccgaatgatccggttgactccactgatcacagactctgattgcagcacacttgcaactgagagctacaacgggcatcaatctttacagagctgtcatgatgtagaagacaacaactatagggatacggacccaaagctttcctgcaatgagagtctgaattacaatgcaagtgacgagacaaaacatcacatcgatgcaagtaatgatggaagacaaacttatgctcaaccaaaaactcttaatagctctgtaaaaatgtcaagcaagaaaccgaaaagaatatttgatattagtgcagatggactggacgagaccaatgtagcaactatggacatggctgacccaggagacactaatgcctttgaggaacacattatgtattcaggtgttagcacactaaaagacgatatgaaagctgaaacaaaatcagaaaagctagataaagatgatcaaagcagcaagtgtgacatgctcctctcttcagtggtcaagcaacttaaggattacagtacattctcagatacccattgtactacaagggagtcacagtcagatgccacaacattctgccatgatgacaaggtctggaaaaagatagtcccatcccatggagaattttatgaggattcacagagtgagccaacaggaaatactgcacctgttgaattatcccatgatgttctgggaacttatctaatctgtgactcacaaatctgcgagagaggcactgccaaaatgaaaacgaaggattggttgaagtacatgaagaaaagacctcgcgagttgcggatcaatgatgaggaccttttgatgacagctatagtgaaaaacaaggaccttggcacctgtcacaaatttgcttcaggttcttcagccgcaaagaagtttaagaagctgaagagccacaagaaaggtaacaagctactttctaaaattgggaaagctggcacaaacctattgggtggaaagagagtaagtttggcccgtaaaactgtaatctgctggttgcttgcgactggctttctgagcgtaaaagatgtgatacagtaccgggatccaaaaagtaataaaattataaaggatgggatggttacctgggaaggtattgtttgcaattgctgcaaaaaaaacttatccgtatctgatttcatggctcatgctggtcgtagtcacccacagtcctcattgggcctctttctagagtctggcaagtcatacactttgtgcctggttgaggcttggtctgctgaatctatgagcaggagaagcaatgcatggggtagaaaagttgaggcaatagatgaaagtgatgacacctgtggtttctgtggagatggtggtgaattactttgctgtgacaattgcccatcgacatatcatcaagcttgcttgtctgctaaggagcttccagaaggtagttggtactgccataattgcacttgtcaggtttgtggggggccatttagtgaaaaggaggtttcaacattctcggcgattttcaaatgtttccaatgcggagatgcataccatgacacttgcattgaacaagagaagctacctcttgaggatcaaatatctcagacatggttttgtgggaaatactgtaaagagatattcatagggctgcgtagtcatgtcgggacagataatattcttgacagtgacctttcatggtccatactgagatgcaacaatgacgggcagaagctacattctgttcagaagattgcctgtttggcagaatgtaatatgaaattagcagtggctcttactctattggaggaatgtttcattcgtatggtggatcctagaactggtgtggacatgataccccatgttttatacaacaagggatcaaactttgctcgtgtggattatcagggattctatactgtaatcctggagaaaggtgatgaaatattatgtgtggcttctatcagagtacatggaactaaagccgctgagcttccttttattgctacttctgtagactttcgacggcaaggaatgtgccgaattctaatgagcatcattgaaaagatgctctgttcatttaatgttaagatgttggtcctttctgccatcccagagttggttagcacatgggtgtcaggatttggcttcaaacctatcgaagatgctgaaaggaaacaacttcataatgtaaacttgatgttgtttcctggaacatccttactaacaaagagattggatggatttattatggccacaaaaccaggcgaggaaaaggatatacatgaagtttctggagtgcctaatcttaagcgtatgcctaatgggaaagcaaatgagcatttcaaactccatgaccttgatttgtccgggacagagtttaaagctgaggtttccgtgaatggtccattcagaacactgaaacatgaatgtggttcagcagcatggtttcagtctactaagttagctgttggggaagtgtgatattcttacacaaattatctgggctcatgctctgcatcgatactagctgctttgtgttggccaatttcgtcttcccacttcatggctcaaattaatttgcagcagcaaaatcattcgaacacttgctgctgcatgaactcatccttttcaagtaaagttctcacaagactactgggaaatggttgggatgacgcaggcatccatgaatttgggttgagcaaagttgaagaaaccacagattggtgtggtctgttctgcatcgagaaaatggaaattataactgtctctcctgggtgaagtgctctcctgagactgggtaaagtacgcaacacctgagttgatattgcttgcacgttgaacaaagaggatgtatttgcactccaacgtacaaagtgtaacgcattcggccccttttcaaagtaagccatgataggaattaatctaagctgtttggtatatacatcaaaagggtactgcagtaacatgtttggtaccttctcttgcgagttttattttgatatatgtgttttatatgtgtctagattaatcatcatctatttaaatatagacataaaaagaattatattctggaacggagtgagtattattttgccatatgtgctgttaggttgaggcccaaatggcaatgcaatgcatctgtcggcagttgattttcctgagtgccagattggttttgtaatccttgcggctatggaacgattgttcgtcaagtccttaagttattttggtttgtgattaaataatcgggcgtccgatccatggtgggcaccgttctctctacctgattttcttctgtcgctgcctgcaagcaacagagttttggttgccgtcatttcggtctgctgcaacaaagtttctt

SEQ ID NO: 201814 - DNA, 412 bp, Zea Mays
atgccgaaagataaaaatggtcacatgaagctgtcagattttgggctgtgcaagccaattgactgttcaaagctctcaacgttgagtgaagatgaacccatgggtgatgacaacatgagggaatcaatggatattgatagttctttgtccaatacagcaaatggtagaagatggagaagtcaacacgaacagcttcagcactggcagatgaacagaagaaaactggcattctcaactgttgggacaccagattatattgctccagaggttctgctgaagaagggatgtggaatggaatgtgattggcgcgatcatgtatgagatgctagttgggtatccaccattttatgccgatgatccaataactacatgccgaaagcttagcacacttataggcttatcctcgaaataa

SEQ ID NO: 201815 - DNA, 2046 bp, Zea Mays
ctcggtcgccagtattcatagctgggggtagggcgggcgacccgccgcgactgggagaaccttggacatgagttgaaaggccctatcttttcatgtccatgtccatctcccgagtgaaagcgagcgagcgagcgaccgattgattgacgtgtgatgcctcactagctggagagcgctctctcctttgtggcaaatctcatcagcaacagagacggctggtgtgacaccttgtgaaaacgcccgctcgctcgctcagtcgctccgtctctctctccctccctccatatctccctttgccacctgctgtctccctcctcatctctctccagtcgagtcggcagtctctaccactctgcttcctttcccctcctcttcttctccagaaagcagaggcatggagcggcagaggaaggcaatgtggctgtaccccaaggtggtcggcttcaacccgccggagaggtggggccactccgcctgcttcttcgaaggggtcgtctacgtctttgggtttcctgtcaagggcgcgtcgcctggcgtcagagcaggtcatgcggctttgagtgttgggtccaagatctatattatcggaggagttggtgacaagcaatactacagcgacgtctgggttctcgatgtcgccaaccgttcgtggagtcagctcgaggtgagcgggcagcgaccgcagggaaggttttcccacaccgcagtagtcatgaacaatgacattgcaatctatggaggatgcggcgaagacgagcgtcccctgaacgagcttctcattctgcaattgggctccgagcatccgaacggccgttacaacatttcgacgtgcaaggttctgagcaaccaatggagccaagagaggaggaagtttctccaatcagagactaaagatacaggtgcgagcaacggagaaacggtgcagaaacgtcgagaggcagaaattgagcagaggaatccgttcctgcgtggcctagagaacagccgtgcgaaacgaaggaaaaccgatgaagctcgcccgagcgaggcggccgagtcagagcagcaggaggagcactcgctgactctctcccagcactcctcgccgtcgcagtcagaccaagagcagaacggcggcggagctcacaagctctcgccctcgcccaacgcgtcggtctcagcgctgcaaccgttcgctcgcctcaaggctaacgacggcgctccgagtgctcctgggcgcggaggcggcggcgtgtcttcgaggccggctctgaagacggaccagttcctccgcaccgtcgcgccacagcatcatcggcaggaagtgcagttcctttcctccgaccataagaagcctcagccccggccggctcctggaccaccccttattggcgcagaggtccatgggacgatcgatggagctttcgattccgggtacctcatgacggccgtcgtgaatgggcagctcttcagaggcgttctgtttgctccgggacctggggttacggctccgagaccgacggtgcaccatcagatcctgacgagctcggccatgcctccccagcagcggccactgctcgcgcacgccatccctgtccacgcccggccggtgccgcaggcgacggggttcgtgctgccgaactgtgtccaccgcgcgcggcaagggttcccggcaaaggcagtcaagtccgagccggagcgaggcggcagcgacctgcacgatgttgtgctcaccctgggagggcctggagggggcaagtgagcccctcaagaacggtggtccaggtcgtcctggcctactgctgtttacctttgggaattgctttgtaaattagtcatctggtcgagtggaaataagtgtagcggcttttctgtgatcttttcaagggtcattttagggttcttcgatctgtgactttacatatatgaatatagtgttagcttgatctgtcattttagctagttttgttatcaacaagttggtgttgggagcttccttgcacacttgtgagtgtttgtattttctgatgctcatgtggggggtccacctcggtctcctgattctcg

SEQ ID NO: 201816 - DNA, 2275 bp, Zea Mays
gaagcttaatacttactggtagctgcgaactagttcatcaggaagaagacgcatgctggtggtggtttgagctatgaccccgcctctaccggctgagggtagattattttggacaaaagggatgctgcggcggcctgcacttcagcgacgtggtgacgctggacgtggagacgatggcgtggagcgcgctggccacgacggggcagcggccgggcacgcgggacagccacggcgccgcgctggtgggccaccggatgctcgtgttcgggggcaccaacggcggcaagaaggtgaacgagctgcacgtgctggacctgcgcaccagggagtggagccgcccgcagtgcaggggggcggcgccgtcgccgcgggagagccacagcgtcaccgtcgtcgggggcgaccgcctcgtggtcttcggcgggagcggggagggggagggcaactacctcagcgacgtgcacgtgctggacgtgcccaccatgacgtggtccacgccggaggccatcaggggcggcgcccccgcgcccagggacagccacagcgccgtcgccgtcggcgccaggctcttcgtcttcggcggggactgcggcgaccgctaccacggcggggtggacgtgctcgacgtcgacaccatggcgtggtcaaggtttcctgtcaagggcgcgtcgcctggcgtcagagcaggtcatgcggctttgagtgttgggtccaagatctatattatcggaggagttggtgacaagcaatactacagcgacgtctgggttctcgatgtcgccaaccgttcgtggagtcagctcgaggtgagcgggcagcgaccgcagggaaggttttcccacaccgcagtagtcatgaacaatgacattgcaatctatggaggatgcggcgaagacgagcgtcccctgaacgagcttctcattctgcaattgggctccgagcatccgaacggccgttacaacatttcgacgtgcaaggttctgagcaaccaatggagccaagagaggaggaagtttctccaatcagagactgtaagctagctcaattcgcctcgagcagttcttaccttaacctgctacgcaaacactagtgtgactcataagacagcaacatggcagaaagatacaggtgcgagcaacggagaaacggtgcagaaacgtcgagaggcagaaattgagcagaggaatccgttcctgcgtggcctagagaacagccgtgcgaaacgaaggaaaaccgatgaagctcgcccgagcgaggcggccgagtcagagcagcaggaggagcactcgctgactctctcccagcactcctcgccgtcgcagtcagaccaagagcagaacggcggcggagctcacaagctctcgccctcgcccaacgcgtcggtctcagcgctgcaaccgttcgctcgcctcaaggctaacgacggcgctccgagtgctcctgggcgcggaggcggcggcgtgtcttcgaggccggctctgaagacggaccagttcctccgcaccgtcgcgccacagcatcatcggcaggaagtgcagttcctttcctccgaccataagaagcctcagccccggccggctcctggaccaccccttattggcgcagaggtccatgggacgatcgatggagctttcgattccgggtacctcatgacggccgtcgtgaatgggcagctcttcagaggcgttctgtttgctccgggacctggggttacggctccgagaccgacggtgcaccatcagatcctgacgagctcggccatgcctccccagcagcggccactgctcgcgcacgccatccctgtccacgcccggccggtgccgcaggcgacggggttcgtgctgccgaactgtgtccaccgcgcgcggcaagggttcccggcaaaggcagtcaagtccgagccggagcgaggcggcagcgacctgcacgatgttgtgctcaccctgggagggcctggagggggcaagtgagcccctcaagaacggtggtccaggtcgtcctggcctactgctgtttacctttgggaattgctttgtaaattagtcatctggtcgagtggaaataagtgtagcggcttttctgtgatcttttcaagggtcattttagggttcttcgatctgtgactttacatatatgaatatagtgttagcttgatctgtcattttagctagttttgttatcaacaagttggtgttgggagcttccttgcacacttgtgagtgtttgtattttctgatgctcatgtggggggtccacctcggtctcctgattctcg

SEQ ID NO: 201817 - DNA, 1212 bp, Zea Mays
ttgcgacttctccaaatcccaaagtttgtgacattgaataatccttggagcggaggctgtgtgtttattaacactacattcaagttggaggttgtcatgacgactccgggagtgctcgaggttattgaagatctttgcaggagttatccttctttaacattcggggttggcacggtcttaaatgctgctgatgcaaggaaagctatttgcgctggtgcacaatttcttatgagtcctggcacagtcctggacatacttcatgatcttaaagaaagtaatgttctttatattccaggagtgctgacatcaactgaagttttatccgcttgcagtgctggtgcaaaagttgtcaaggtgtacccagtttcagtcatgggtggggagatgtacatgtcagctctgaagaaaccatttcctcttgtaccaatggttgcttctcaaggaattaaaatcggttcaatcaagggatatatggaagcaggggcatctgcagtggtcttatctgatgctatttttgacagtcaattgatgagggatgggaaattcaatgaaatttcggaacttgcaaatctagcaactttagaggcattgcagttcacgaaatgagacaaatctacaatcataacagatttgcgtccagaatatgtggccttctgttctgtggaaggagtcaattcacctcctggtaactacatgctacttctgtgtaaagagtcagttcacctcctaaataaagctgtaggagctctggtgttctatgcacctgcaagaggctgagactgcaacaaatttgtgtgctccgaagtctgaacagggacctgatcattgaggatgccgtgatgctaagaagccaaccatacatttaggtgccgtgtaatggaatcaccacaactcgcaagagaacagaggtgaatggaagagagattgctggtttgcttgtgctttgactgacctagtagatgttaacgcaggttcataggagtgtactagtagtgcatctctgaagaccgttatacttctaggcaaggtcatggactttgtgtgtttaaaaaaaaggtcatggactttgtgtcgatcaaatgatcaatgtgcttgaacaggtgttgtctgtttttacccgggaattctgcatgaaatgagttggtgctatgtatcaatagacttgtagattttaatgcagttttcttttaaaaaaaacttttcgaaacctag

SEQ ID NO: 201818 - DNA, 3167 bp, Zea Mays
cgatccgtccagggagcagggtgctcgcctgctcggtcgtagctccagcccaaggccggccggccggttccttggattttgttgttgctcttggccggcacgtacttctgtgatcctgcttgttttgtgcgctggctacgtggatgtcgcgaggggacagacaactgaccctactgaagtgaacgctctcaaggcaatcaaagccagcctggttgatccttctaataagcttaaaaattggggcagtggggatccatgcacatccaattggacaggaatcttctgtgacaagataccaagtgattcatatcttcatgtaacagaaatacagttgtttaagatgaatctttccggaactttggcaccggagattggtctcctaccccagttgaaaacattggacttcatgtggaacaatttgactggtaacatcccaaaagaagttggaaatatcacaacattgaagctcataactttgaatggtaacctgttatctggttctttgcctgatgagatcggttacctgatgaacttaaacagattacaaatagatgagaacaacatatcaggccccatacctaaatcttttgctaacttaacaagcattaaacatcttcacatgaataataactcattaagtgggcaaatcccatctgagttgtccagcttacctgcactccttcatctccttgttgataacaataatttatctgggcctcttccaccagaattagcagatacacgtagtttggaaatacttcaggctgataataacaacttcagtggaagctccatccctgctgaatacagcaacatacgaacacttctaaagctgagtctaagaaactgcagtttgcaaggagctgttccagatttgagtgtcgtacctaaatttggctacttggatcttagctggaaccagttgaaaggatctataccgactaataggcttgcttcaaatattactacaattgatttatcacacaactttcttcaaggaactgttccatcaaacttctcagggctacctaatattcagtacttgtcagtcaatggcaacctcctaaacggttctgttccaccgacaatttggagtaacattactttcacgggaaatagagcccttgttttggacttccaaaacaactcccttgacactattccacctgtatttgagcctccacaaaatgtcacggttctactttatggaaaccctgtatgtacggcatctaatgcagcaagagctgctaatctttgtcaacctacttctgtaactgatgccccatctggagagggaaagcaagttagtacgacgtgttttccttgcccaacaaattttgaatacaatccatcatcccctattccttgcttctgtgctgcgcctctgggagttggatttcgactaaagagtccaggaatatcggacttccgaccctataaagaagcctttgagaatgacttaacctctctgctggaattgcgtgtttatcagctgtacattgaacgctacatatgggaggctggcccaaggctgaatacacatttaaagttattcccaaataatacaaatttattcgatatggctgaggttgtgcggcttagggaagtacttgctggatggcagatcactctattagatgtttttggtccatatgagcttctcaatttcacacttggtttctatgcagatgaatttcgtactgcggcgtcgccaggtttaaaaggcggtgcacttgctgggattttggtggggacaattgttgctgccattgcagtatctgtgttttctacagtttttataatgaaaaggcgcagaaaacaacgaacaatttcaagacggtcattactttcaaggttttctgtcaaggttgatggtgtgaaatgcttcacatttgacgaaatggctgtggcaacaagggattttgatatttcagctcaagttggtcaagggggttatggaaaagtttacagaggaaatttagctgatggaacaacagtggcaatcaaacgtgcacatgaagattctctgcaaggttcaaaggagttctgcacagaaatagaattgctgtcaagattacatcatcgcaatttggtttctcttgttggctattgtgatgaagaagacgagcagatgctggtttatgagttcatgcccaatggtaccctacgtgatcatctttctgctaagactgaaagacctctgagctttggtcagagggtccatattgcgcttggtgctgcgaaaggacttctatatctacataccgaggcaaatcctcctatatttcatcgtgatgttaaggccagcaatattcttctagattccaagtttgtagcaaaggtggctgactttggtctttcgaggcttgctccagtgcctgatattgaagggactttgccagctcatatctctactgttgttaagggcaccccaggctatctcgatccagaatatttcctgacccataaactgacggaaagaagtgacgtgtatagcctaggtgttgtttttcttgaactattgactggtatgaagccaatccagcatggtaaaaacattgttagagaggtaaacatcgcttaccagtcaggcgacgtttccgggatcatagacagccggatgtcctcataccctccggaatgcgtaaagaggttcctctccctcgcaataaggtgctgccgggacgacaccgaagagaggccctacatggccgacattgtcagagagctggagaccatccggagcatgctgcccgagggagaggacgtcctgtcctcgacctcggggtcgggcttgctggcgaagtccatgtcatcatcatcgaccaccaccaccggggccctctacgtgtcgtcgcatatttctggcagtggtcaggcggacagtggcatcccctccgggatggtggctcctcggtagcgttgctggagccggaggttttgtagacacctgacgggcggctgtgatctgtagtgaactagcttgtaagtagtgacaggacaggagtaatggtggggtggtgttaccttgccctgcaggtgagttgttgttctgtacatgagtttttttgtgaactgtgctggagcctgctgggaccaggttgtgctgtaatagtggcattggtaaagaatacagatgaggggtatatactgagttactgacgtaa

SEQ ID NO: 201819 - DNA, 2872 bp, Zea Mays
tcggttagcttttactcatcttttctcttgccttctactcctcgcccacgcctcctcctccctccctcccgtcgtcgcttcgcttcgcttcccttcccttcttcccttgcgaatcctctgaccaccgcagagccacccccggaggaaacgaaccgtagcgcagccgccgatcaccatggcgtccccggcacggcccgccgccgcatccgtctccgccgccttcggcctctcgcccgaccccaaacgctgctccttcgaccaggcgctccggcacaagactgttgatgtcatttgttaattaccacgatcaagaaaaggtctctaaagaaatcgtaacagacgctatagaaagctgcatgaagaaacaggcagataacttgttgaattcgctggaagttatcagtggtaggctgtcgcaattggagctgtattgctataagctggaaaggtccattggagaattacgaagtgacgtgatggattatcataacgaagcaaatctcaacttccagtgccttgataagcaattgaaagaggttcagaaatctgtgcaggtcgttcaggaaaggcaggagcttgctgaaactcagaaagaaatgaccaaacttcagatagtacatgaggattccgcacaaaagagtgaacgtagtgctccatcagttttcataaatagggaaaatgagattgcccttgtgccattgcaccaagtaaattctgtccagtctcctgctgtgcaattccaaagttgcagtggccttattctacagcaactggtgccagtccaagaccagcagcgctcaaaccaaactgccatgtactgcatgcgaggccaaagtcatctggagcacagacaggcccaaatgttccaagctgctgctcaacctgtgcagacacacactactaggaaaactcaggcacatacagtacttgaggtacctcaggtaaccaccagacagacaccagagttctacgctcaaccgcagcatcaatggcaacatcaaacaggtcagcagcttcagtcccaggtaaggcaaccacaaccacaggtggttcaacaacagcagcagtacaacaatatccagcaaggtccagcacagatggtccagccgcaaacatcctctccacatgctcatagcacgccacagatcacactagtatatcctccatacggagctcatcagtctgcatgtggtaacgctgaggcacgcactgggagcattgtcgtgccaccttcgcactctacaatttcctcatcccagcggaagcatcatgaagctgctcctatttatgtacaaagcaacacagtttctgttccattgacggagcagcaccagcaacttcattcacttggcaatggctcatttgtacctcagccaagtaaagttagtccatgcggtgtagcatcatatacggtacaagggaatgcacaggcctacagccctgcttacggaagcccttccagcaatcctgctactattgttgctgtccttaatcaacaagcacattgcagtgctcccatggtgcttcatcacctgggaccatctcagtcagtgcagaaccatccgataggcattgctgataaggttgctcgaatgggttacccaaaggatcaagtagttgatggccttgcgctccgtatggtggatgcaggccagcctgcagaatgtaacaccctgcacgataggttgagctctgtcacccatgcggtggctcctcaggcatggtctggatagttaagaatgaattagtcatgagatgctcgtgtgataatgtacctcattatcgttggaaatcttcaggtatttcctctggcgtcttcttatctgccaggactacatatccaccagcttattttttgcagctggatggtcaagatgaaataagactgattagattagttgaaatgatgctggcatatgtcctgccttttaatggacatatgtgattgtaacctgtttgtgacttgcacacgcatgcttgcaatataaaaagatacgatgatttgttggttgctgctactttgctgtggtgaagtgttgagctcgttccatctgctccggcgccagttgaagtgtgggagaaagatggatgcgaagttaagttgacttgtttttgaaataaattcaattggattgcgagtttgagcggatgatattatattttttatgagagggatacccccaactctattacttgcataatagaaatacaacatgtttacagaaaggttttcagcgcataacagcatggtggccaagttcagaacccattattacatcatggtggagtacctgattgaggcatcacaaccatcagaccacaacaagtgcgacaacacatcaatcaagcatccacctagactgggcgatgaagtctacatactacagtcacaaaggggctgaaacccagagagataacaccagaaagcagtagcacacaaaacagagagacgacgttgtcgcagctggaagccaggattactccgcatcatcaactttatcattggtgcccgtgatctgccttccacttgcagcccggacaagaagtttagcaccctcctaaagatcctgcaaatctttttgctgagtcctgcccaacacaaaatcaaagcaccagcatggcaaataatcacattaggtgatttgattaagattttttcgaagctcattttgtttctggtcttccatatggcccaacaagtaacggcaattagaactacacgagtagacttgtcaattttgagatatctctgtaaccacacaatacaatgatctaagttccccaggcacataaggtgtgtcgaggcacttggccaccactccccatatcactttagcaacagagcatgtaaagaaaaggtgatcaactgttt

SEQ ID NO: 201820 - DNA, 1014 bp, Zea Mays
aaacgacctaaagagctgatcctggagattagaatctcccaacatggaccatatactacactcatcaaccattgttttaggagacccagaatgttcgacaaaactccatcaaacacacaggtacctcatgaaggacccatgtgtgatcttttgtggtctgacccagatgaccgatgtgggtggggaatttcacccagaggagcaggttacacatttgggcaagacattgcacagcagttcaaccatacaaatggtctctctctcatttcaagggcccatcaacttgtaatggaaggatttaattggtgccaggataagaatgtagtcacagtcttcagtgcgcctaattactgttaccgctgtggtaacatggctgctattcttgaaatcggggaaaacatggaccagaacttccttcaattcaaccccgcacctcggcaaattgagccagacacaactcgcaaaaccccagactactttctgtaattgtggtggtgaccttaactttctggtgtttgatgctcctctcttccgcagcatcaggggaatggaggacgcagtaggaacgcccctgctatgcttttgctcatcacatcatccgcgtggctgaataaattgcgtccagatgcgaaggttttggtttgcagcttccccatctgatgtgcctagtgctgtgtaatgttggttggcgccttgcagtttctacatgtgaatatgtgatggccaaaatggtttcatggtgattcttatatcacttatggcaaatcaagattattcaatatgtacagatgacgcataatcggcagttcaacagatcagctctattcatgcttacatgattttgctgttgtattgagacgcgtgatggaacatcttggcatgtgatgggatctagctggctagagggagtaaataatctatattttaaatgctgtaaagtaataaagcaagtgatgcaaaagaaatacttatactagctctattttactgttttataatgaacattgatttggc

SEQ ID NO: 201821 - DNA, 1391 bp, Zea Mays
aaaaatctttgccgctgattctttgtgcatacaaatatcacctatagtgagaggattcgcttatgaatggataggagcaggctttacaaatgtgaacatctctggtgtgagaactggaaccatagacttgtcttcaaataattgggcatacaagattggactggaaggggaatattataatttgttcaagcctgatcagacaaataaccaacggtggataccacaatccgagccaccaaaaaaccaacctttgacatggtataaggtaaatgttgatgttccacaaggagatgacccagttgggatagacatgcagtctatggggaaaggcttggcttggttgaatggaaatgccatcgggcggtattggccgaggaccagttctattaatgataggtgcactcccagttgtaactacaggggaacatttattccagacaagtgcaggacaggttgtggacagccaactcagagatggtaccatatcccacggtcatggtttcatccctcagggaacatcctcgtggtctttgaggagaagggtggggatcccacgaagatcacattctcaagaagagctgtgacgagcgtgtgctcctttgtgtcagagcacttcccttccatagacttggaatcctgggatgaaagtgccatgaccgaaggcacacccccagccaaagcacagctgttttgccccgagggtaaaagtatatcttccgtgaagtttgcgagcttgggaaaccccagtggaacctgtagatcataccaaatggggcgctgccaccacccgaactccttatctgttgttgagaaggcttgtctgaacaccaacagctgtacagtctccctgacagacgagagctttgggaaggatttatgccctggagtcaccaaaacactcgccatcgaagcggactgttcttagtggcctacggagtacgaagtgtctcggtgtgcatctaggttccactgcaagtatgcccgtcaaaattctaaaactgtagtgcttgttgcacggcaatgctattgtaacctggatttgaatcgcaaatatgtttcctagattttaagagtcttcagaggcattactcaatatgataagtgttcaattgtcccaaagaccaaattaccatcaaaagataattgttcaattaggctaagtacaaagtatggggcagctaatcgcgaaccaaacaaaagctaaagttaagcaatttagcggtgctaaatcgtgatttagcagtcgcaactcacgtagcggcagctctcgcagccactatagcgccgccatctaaaaccatgctgagcagtattcagtgatgctggtaggtgacagttagcgattgatactgaccatccgcgctagcaaatgcaatattgtatttgggatc

SEQ ID NO: 201822 - DNA, 3337 bp, Zea Mays
acgaacggcgccggcgggtggccgtccacgacgctgtcacgcacgcttggcacggcacaccgagagagagagagcgcgcgcgcgcgacgcagccaatcccccacggcatgcccaaaaccctcagttccgtgcaataattctgcctcgtcctcccatcgctgtcccccaccgaaacactctcggacgcgtcgtcgtctccccaagaccaaagccaggcggcctgtctgtcctccagtctccccacttcgctctcaccccacgccgcgtaccgctattaataccaccaccagtaccaccacctctgccagttcgccaccatcgtgctccgtacacgctccgctccggccatggccgccgccgcggcctccttttcggccctgccgttccttctacttttgctgctggtgccgtcgctcgacggcgcctccaatgtgacgtacgaccaccgctccctcatcatctccggccgccgccgcctcgtcatctccacctccatccactacccccgcagcgtccccgagatgtggcccaagctggtggctgaagccaaggacggcggcgccgactgcatcgagacctacgtcttctggaacggccatgaaatcgccccaggccagtactacttcgaggaccggtttgacctggtgcggtttgtgaaggtcgttagagacgctgggctgctcttgatcctgcgcatcgggccctatgtggccgccgagtggaattatggaggcgtgccggtgtggttgcactacgtgccaggaacggttttcaggacaaacaacgagccattcaagaaccatgtgaagagtttcacgacatacatcgtggatatgatgaagaaagagcagctcttcgcttctcagggagggaacattatcctagctcagatagagaacgaatatggagattattatgaacaagcgtatggagctggcggcaaaccatacgccatgtgggcagctagtatggctcttgctcaaaacactggtgtcccttggattatgtgccaagagtctgatgctcctgatcccgtggttccagacttttggtgaaagtaatccccacagaccacctgaagatgttgcattcgctgttgcacgttttttcgagaaaggtggcagtgttcagaattactatgtgtatcatggtggcacaaattttggtcgcactactggggggccattcattacaactagctacgactatgatgcaccaattgatgaatatggacttcggagatttccaaagtgggcacatctgagggatcttcacaaatctataagattgtgtgagcacaccctgctttatggaaatacaacgtttctttctctgggtcctaaacaagaggctgatatttacagtgatcagtctggaggctgtgttgcattcttggcaaatattgattcagccaatgacaaagttgtcactttccgtaacaggcaatatgatcttcctgcttggtcagttagcattcttcctgactgcaggaatgtggtgttcaacactgcaaaggtgcaatctcaaacttcaatggtgaccatggttccagaaagtttgcaagcatcaaaacctgagcgatggagcattttcagggagagaactgggatttggggtaaaaatgactttgtccggaatggatttgtggaccatattaatacgacaaaggactccaccgactacctatggtacacaacaagttttagtgtggatggaagttactcctcaaaagggagccatgctgtccttaatatcgactccaatggccatggtgtccatgctttcttgaataatgtgctcataggtagtgcatatggtaatggctcacaatcaagattcagtgtcaaattgcccatcaacctgaggactggaaagaatgaacttgcccttctaagtatgactgttggtttacaaaatgcaggattcgcttatgaatggataggagcaggctttacaaatgtgaacatctctggtgtgagaactggaaccatagacttgtcttcaaataattgggcatacaagattggactggaaggggaatattataatttgttcaagcctgatcagacaaataaccaacggtggataccacaatccgagccaccaaaaaaccaacctttgacatggtataaggtaaatgttgatgttccacaaggagatgacccagttgggatagacatgcagtctatggggaaaggcttggcttggttgaatggaaatgccatcgggcggtattggccgaggaccagttctattaatgataggtgcactcccagttgtaactacaggggaacatttattccagacaagtgcaggacaggttgtggacagccaactcagagatggtaccatatcccacggtcatggtttcatccctcagggaacatcctcgtggtctttgaggagaagggtggggatcccacgaagatcacattctcaagaagagctgtgacgagcgtgtgctcctttgtgtcagagcacttcccttccatagacttggaatcctgggatgaaagtgccatgaccgaaggcacacccccagccaaagcacagctgttttgccccgagggtaaaagtatatcttccgtgaagtttgcgagcttgggaaaccccagtggaacctgtagatcataccaaatggggcgctgccaccacccgaactccttatctgttgttgagaaggcttgtctgaacaccaacagctgtacagtctccctgacagacgagagctttgggaaggatttatgccctggagtcaccaaaacactcgccatcgaagcggactgttcttagtggcctacggagtacgaagtgtctcggtgtgcatctaggttccactgcaagtatgcccgtcaaaattctaaaactgtagtgcttgttgcacggcaatgctattgtaacctggatttgaatgtatccatctgagctaggttatgtttcaggagctttcttaaactaacgttgttgctgagcagcatgaaatctgattagcgcaaatatgtttcctagattttaagagtcttcagaggcattactcaatatgataagtgttcaattgtcccaaagaccaaattaccatcaaaagataattgttcaattaggctaagtacaaagtatggggcagctaatcgcgaaccaaacaaaagctaaagttaagcaatttagcggtgctaaatcgtgatttagcagtcgcaactcacgtagcggcagctctcgcagccactatagcgccgccatctaaaaccatgctgagcagtattcagtgatgctggtaggtgacagttagcgattgatactgaccatccgcgctagcaaatgcaatattgtatttgggatc

SEQ ID NO: 201823 - DNA, 2883 bp, Zea Mays
cgcatagccgcatatatttggcagcaggagcggcctctcacttgcttcgacgtatttctctatctatcgatacggttcaagggaccgaagaaggtagagagagaaacttgaaggggagaggaaggagatacaggttcatgttcatttaggtgtcagttcatctgatttctcagaagcaaaatgttgtttggagctcagtgacaccattttgtaatgcatgtgccttttacgggaaatggaggatcattatgtccatcccaagtctaagtctaaccatggctccttgtcaggaaatggttatgagatgaaaaatccaggccatgaagtttgtgatagggattcatcatcagagtctgatcgatctcacccagaagcatcagcagtgagtgaaagcagtctagatgaacacacatcaactcaatcagacaatgatgaagatcatgggaaggataatcaggacacattgaagccagtattgtccttggggaaggaagggtctgcctttttggccccaaaaatagattacaacccatcttttgcttatattccttatactgctgatgcttactatggtggcgttggggtcttgacaggatatgctccacataccattagagagatcgtccatgactccttgtatactaggtgttacgaaggatccttgtgaaacacattatttctgtttccttagttctggattgattatttttcaaagcaacagaaatggtccatccccagcaaaatgatacaacaaatagtccggttatgttgcctgcggaacctgcagaagaagaaccaatatatgtcaatgcaaaacaataccatgcaatccttaggaggaggcagacacgtgctaaactggaggcgcagaacaagatggtgaaaggccggaaggtgatgagacaatatttgttcacaaaatgatgctttaaggggcagatgagatcacttgttctgaactgatacaagattttaccttgtgagacgaagcatccacaaaatgatcatcttgggacagaactgaagcaatctccttcaggatccgccttccttcatccgttgaacgtactcgcaagaagctcaagactattcaccttctcgtccattacaaaacaatgtaatagtatatgtatgtttccatccataaatttccttgaggaccgctggggttatgttcaggctttttccttgttaaagctgaatgtgaataaatctcaagaaagttaaaaatacttactgagaggttactagtcactattatatttatatataaaagagagcacattttcatcccagtacggctagattagcatggaagatggattcttcaatttcgaatccccgtggtgctatgctcgctaggatttacgagggtaggcaccagccaggcgtgtcaagagtacctggtccctacgcgttctcataacgcaggggctaacctagcctctggtccctcaaagtatgtttggatgcactagaactaatagttagctgttaaaattagctgaagacatcaaaacagtctaactaatagttcaactattagctatttttagcaaattagctaatagttagccaactactccctccgtaccataccacaatagagttcgttttatcacttgctctttatgtctatattcaaataaatgataatgaatctagactagagatgtcaatgagaaatttcacaccgggttatagcatcccagatccatctccatcatgtttgatccatcctcatacccatcatgggtgcaaaactcatcccatacctatccccattcgggttacgggtccccagtgggtcctcatccccaattaagggataaataggtactaacagctagcacaaactatccagatttcagacatcaccacatcggcaagcactcatccatgaaccataatccattcatccatttatcagaaaagaaattagtacttcgggaccgatagaagaaataaagaaatagagtctgttcaccttcctgggtcaccatctaagttcgttggcgcctgagaatccatggtcgtcaccatcatcctaggctcttagcagtcagcggtgctcctcgtcgctggtgaagtcgctagtgtgcagtgccagagcaacgtccaggcgtgcggcggttgaccggctggatagggcgtagcgtatggctggttattttagggttttgttttttgctagtctgctagttgccttgctgtgttgccttgttgggctagaacttaggcctagtgcgctgtcgtgctacgcttggtggccgactcggcctcaactcattcatacaaacatgataggtgtacacgtatgaaatacccatgggtaatcgggttcggatttttgcttcccaaacccatacacgtttacccaatggatggagattttgtcccatattcatacccatggggacaatttttgtcccatacccataccctaataggggaattccccacgagttagcgggtatcgggtcccattgacatctctaatctagacacatacaaaacacatacactaattattgtatgaatacaataaaaggctaaaacgaattttaatttggaacacaggcagtatttgttagctagctaattccaatagaatttttttagccaactaactattaggtatagtgcattcaaacactcccttactaaggacagaatttcacttcaattccagagtactgctacagaaaaaaggaacagaattgtcaaattccgccaaagacatcgaaccacctaccaccatgtagtcatgtactatatggtccttcctagcaaggcagtagaatcagattctgcaaaaaaagatatctttttcacatccagaatctccttacagatgccgaagggcagaaccgtataactctt

SEQ ID NO: 201824 - DNA, 1391 bp, Zea Mays
cgcatagccgcatatatttggcagcaggagcggcctctcacttgcttcgacgtatttctctatctatcgatacggttcaagggaccgaagaaggtagagagagaaacttgaaggggagaggaaggagatacaggttcatgttcatttaggtgtcagttcatctgatttctcagaagcaaaatgttgtttggagctcagtgacaccattttgtaatgcatgtgccttttacgggaaatggaggatcattatgtccatcccaagtctaagtctaaccatggctccttgtcaggaaatggttatgagatgaaaaatccaggccatgaagtttgtgatagggattcatcatcagagtctgatcgatctcacccagaagcatcagcagtgagtgaaagcagtctagatgaacacacatcaactcaatcagacaatgatgaagatcatgggaaggataatcaggacacattgaagccagtattgtccttggggaaggaagggtctgcctttttggccccaaaaatagattacaacccatcttttgcttatattccttatactgctgatgcttactatggtggcgttggggtcttgacaggatatgctccacataccattgtccatccccagcaaaatgatacaacaaatagtccggttatgttgcctgcggaacctgcagaagaagaaccaatatatgtcaatgcaaaacaataccatgcaatccttaggaggaggcagacacgtgctaaactggaggcgcagaacaagatggtgaaaggccggaagccataccttcatgagtctcgacaccgtcatgccatgaagcgggcccgtggctcaggagggcggttcctcaacacaaagcagcagccccaggagcagaaccagcagtaccaggcgtcgagtggttcaatgtgctcaaagaccattggcaacagcgtaatctcccaaagtggccccatttgcacgccctcttctgacgctgcaggtgcttcagcagccagccaggaccgcggctgcttgccctcggtgggcttccgccccacagccaacttcagtgagcaaggtggaggcggctcgaagctggtcgtgaacggcatgcagcagcgtgtttccaccataaggtgaagagaagtgggcacgacaccattcccaggcgcgcactgcctgtggcaactcatccttggcttttgaaactatggatatgcaatggacatgtagcttcgagttcctcagaataaccaaacgtgaagaatatgcaaagtccttttgagatttgctgtagctgaaagaactgtggttaggttatgagtttcttcctggagactgatccatacatgacatgctacctcgtgctgagtttctgaggtgatgagacaatatttgttcacaaaat

SEQ ID NO: 201825 - DNA, 1966 bp, Zea Mays
cgcatagccgcatatatttggcagcaggagcggcctctcacttgcttcgacgtatttctctatctatcgatacggttcaagggaccgaagaaggtagagagagaaacttgaaggggagaggaaggagatacaggttcatgttcatttaggtgtcagttcatctgatttctcagaagcaaaatgttgtttggagctcagtgacaccattttgtaatgcatgtgccttttacgggaaatggaggatcattatgtccatcccaagtctaagtctaaccatggctccttgtcaggaaatggttatgagatgaaaaatccaggccatgaagtttgtgatagggattcatcatcagagtctgatcgatctcacccagaagcatcagcagtgagtgaaagcagtctagatgaacacacatcaactcaatcagacaatgatgaagatcatgggaaggataatcaggacacattgaagccagtattgtccttggggaaggaagggtctgcctttttggccccaaaaatagattacaacccatcttttgcttatattccttatactgctgatgcttactatggtggcgttggggtcttgacaggatatgctccacataccattagagagatcgtccatgactccttgtatactaggtgttacgaaggatccttgtgaaacacattatttctgtttccttagttctggattgattatttttcaaagcaacagaaatggtaaatcatgcttttacttgatgtttggcaatgcacacaaaattttgttgtagcgtgtttcgaccaacgctcttagttttttataatttgcgcggaacttaatggaaactatcttcaaataaaagatagaaggaatacaaaaccatagttgcatgctaccacaattttggccatcatgctagctgtcattcttgataacactaacacataggctccttcatactaaaaaaactttgttgttgccaaacaaatgagccttcattaatgtcgtcattcctgtaatacgcatttaggtccatccccagcaaaatgatacaacaaatagtccggttatgttgcctgcggaacctgcagaagaagaaccaatatatgtcaatgcaaaacaataccatgcaatccttaggaggaggcagacacgtgctaaactggaggcgcagaacaagatggtgaaaggccggaagccataccttcatgagtctcgacaccgtcatgccatgaagcgggcccgtggctcaggagggcggttcctcaacacaaagcagcagccccaggagcagaaccagcagtaccaggcgtcgagtggttcaatgtgctcaaagaccattggcaacagcgtaatctcccaaagtggccccatttgcacgccctcttctgacgctgcaggtgcttcagcagccagccaggaccgcggctgcttgccctcggtgggcttccgccccacagccaacttcagtgagcaaggtggaggcggctcgaagctggtcgtgaacggcatgcagcagcgtgtttccaccataaggtgaagagaagtgggcacgacaccattcccaggcgcgcactgcctgtggcaactcatccttggcttttgaaactatggatatgcaatggacatgtagcttcgagttcctcagaataaccaaacgtgaagaatatgcaaagtccttttgagatttgctgtagctgaaagaactgtggttaggttatgagtttcttcctggagactgatccatacatgacatgctacctcgtgctgagtttctgaggtgaagccatcgaaacatgaccgtgtggttcagtacccttgctgccttcagtgtctgataagctagctctccagtttgcagtttctctgaattccagcatgtctagtctctgcttatcttttgcatgtaacgtgatggtgacttagcatacacatctattcatccatctatgttctcaaagcagcactgcagagatg

SEQ ID NO: 201826 - DNA, 1688 bp, Zea Mays
cgcatagccgcatatatttggcagcaggagcggcctctcacttgcttcgacgtatttctctatctatcgatacggttcaagggaccgaagaaggtagagagagaaacttgaaggggagaggaaggagatacaggttcatgttcatttaggtgtcagttcatctgatttctcagaagcaaaatgttgtttggagctcagtgacaccattttgtaatgcatgtgccttttacgggaaatggaggatcattatgtccatcccaagtctaagtctaaccatggctccttgtcaggaaatggttatgagatgaaaaatccaggccatgaagtttgtgatagggattcatcatcagagtctgatcgatctcacccagaagcatcagcagtgagtgaaagcagtctagatgaacacacatcaactcaatcagacaatgatgaagatcatgggaaggataatcaggacacattgaagccagtattgtccttggggaaggaagggtctgcctttttggccccaaaaatagattacaacccatcttttgcttatattccttatactgctgatgcttactatggtggcgttggggtcttgacaggatatgctccacataccattttattttcattgcagagagagatcgtccatgactccttgtatactaggtgttacgaaggatccttgtgaaacacattatttctgtttccttagttctggattgattatttttcaaagcaacagaaatggtccatccccagcaaaatgatacaacaaatagtccggttatgttgcctgcggaacctgcagaagaagaaccaatatatgtcaatgcaaaacaataccatgcaatccttaggaggaggcagacacgtgctaaactggaggcgcagaacaagatggtgaaaggccggaagccataccttcatgagtctcgacaccgtcatgccatgaagcgggcccgtggctcaggagggcggttcctcaacacaaagcagcagccccaggagcagaaccagcagtaccaggcgtcgagtggttcaatgtgctcaaagaccattggcaacagcgtaatctcccaaagtggccccatttgcacgccctcttctgacgctgcaggtgcttcagcagccagccaggaccgcggctgcttgccctcggtgggcttccgccccacagccaacttcagtgagcaaggtggaggcggctcgaagctggtcgtgaacggcatgcagcagcgtgtttccaccataaggtgaagagaagtgggcacgacaccattcccaggcgcgcactgcctgtggcaactcatccttggcttttgaaactatggatatgcaatggacatgtagcttcgagttcctcagaataaccaaacgtgaagaatatgcaaagtccttttgagatttgctgtagctgaaagaactgtggttaggttatgagtttcttcctggagactgatccatacatgacatgctacctcgtgctgagtttctgaggtgaagccatcgaaacatgaccgtgtggttcagtacccttgctgccttcagtgtctgataagctagctctccagtttgcagtttctctgaattccagcatgtctagtctctgcttatcttttgcatgtaacgtgatggtgacttagcatacacatctattcatccatctatgttctcaaagcagcactgcagagatg

SEQ ID NO: 201827 - DNA, 1949 bp, Zea Mays
tcggcgacgcccttcgccctccaggactccaggccttcactccacgcaacctgttcgcaccggccacagccgccaccggccttcgccgcgagcccgcgacgacgcccagacttgttgccttactaccacggagacggaggcaccaccgcatcaggcagggaccggacgacgacgcccagacctatttcaacctgccggtctccccaggcccccagcccccagcaggaggacaccatgaagcttgacgtgaatgcccttcgctacctcgccaaggacgacttccgtgtcctcaccgccgtcgagatgggcatgcgcaaccatgagattgttccagtagaacttattgacaggattgccagattgaagcatggaggcacatacaaagtgctgaggaatcttttgaggaacaagctggtgcatcatggtgccactaaatacgatggatatcggctcacctatctgggatatgacttccttgccatcaagactttggttaatcgaggagtttttgcttcagttggccgccagattggtgttggaaaggagtcagatatatttgaggtagccacagacgatggtacagtacttgccatgaagcttcataggttgggcaggacatcttttagagctgtgaaatctaagcgtgactatctaaggcaccgaaggagctttaattggctgtatctctcacgactcgcagccttgaaggaatttgcctttatgaaggctttaggagatcatggtttccctgttccaactgctgtggattgcaaccggcattgtgtgatcatgtcacttgtgcagggatatcctcttgttcaagtgaaaaagttacaaaatccggatgatgtttttgactcaattcttggtcttatcgttcgtttggctgagcatggactcatacactgtgactttaatgagttcaatatcatgattgacgatgatgaaaaaattacagtgattgactttccgcagatggtgtctgtttctcaccgtaatgcccaaatgttttttgaccgagacattgaatgcatctacaagttctttaacaaaaggttcaatctgaggtcagtgaaaaatgaagaacaagctggatctgaaaatgatgatgaagggaacagcagaccttcctttttgtccgtggaaaagggtgctggttccttggacaaggaactagctgccagtggatttaccaggaaagagaaagtggatatggataagtacatcgaggaagttgttgaagggcatgattccagctcagatgatgataatgatgaggacagttccgatgagcctgattgtgatcttaccccaagtgattcagacgcgcctggaactttttctgaagagcatggaacaagttgtagcggcgagaacagattggaaattcctccctcggatggcaatggagtggttatggcaccgctcgaatctgggatcaagacgttttccatggaagatgatgataacgatgatggctcgtcagaggatgctgatgaagaagaagatgctgagctcacgaaacaattgaacaagcaaaggagaaaagcaatcgcagctgcccatgggcggagaagaccaacgtcatccaggaacgcctacaaggacaagggtaagggcaccatgaactccaagatgcagaggcaggcgtgcaactggtgatggttgagtgcctcttgcggcagtaaatagattaggcgcagggttttgtgtggttgtataaccgtgggaccctttactagaatcaactccggctttatatttttactaggtgagtaatcgtgcgtcgcaacgagaacacataatattacgagaacttatatataaaatgtcgcaacgaaaacatataatattatgagaacttatatacaaaatgtgtgttatactgttatgaaaaaagatttcataactcatttgtgattctggcaatacataaatttattatttta

SEQ ID NO: 201828 - DNA, 1454 bp, Zea Mays
ttgccctcctctctttcttcctccccgctccccaccccctcaaacccgaaaggaaccctaatcctagccgcacgcgggaggcagctaagagagcttgaagcaccagccatggcggaccacgacctcacggcgctgatggcggcgcagctggaccggcacctggtcttcccgctgctggagttcctccaggagcggcagctctactcgaggctcaggtcgctcgacgaggccgcagccccgctcgtcgccttcctccagaacccgcagctcgtgcaggagctcaggcccgacaaacagtacaacatccacatgctccaggagagataccagattggtcctgaccagattgaagctctgtatcagtatgccaaatttcagtttgagtgtggtaactactcctgggctgctgagtacctgtaccagtatcgtgctttgtgcacagatactgagcgaagtgtgagtgccctctggggaaagctagcagcagaaatcctaatgcagaactgggatgtggctttggaggaattcaaccgcttgaaggaaataattgattcaaagaacttctcatcacctctgaatcagctccagaacaggatatggctgatgcattgggctctgttcatcttctttaaccatgaaaatggtagaaatgggatcattgatctgttcttccaggacaggtacttgaatgctatacagacaaatgctcaccatcttctgagatacctagctactgcagttgttgttaacaaaaggagaaggaatatgcttaaagagttgattaaggtcattcagcaggagcagcatagctacaaggatcccataactgagtttctgcaatgcttatatgtcaactatgattttgatggtgctcaacagaaactcgtggagtgtgagcaggttatactgaatgatcctttcctgggcaagcgcgttgaagagggaaattttgtcactgttcctttgagagctgagttccttgaaaatgcccgactgtttattttcgagacatactgccgtatccatcggtgcattgatatcagcatgcttgctcagaggctgaacatgagctacgatgaggccgagttgtggataatgaacttggttaggagctcaaaactggatgcaaggatcgattcagtgtcaggaactcttatcatgacaaccaatcacatcaatgtgcatgagcagattatcgagagcatgaagggccttaacatgcggacgtacatgctcgcaaagaacatcgtggagccagctcagcaggcagctcggtaaggttagcggagtacagttttgaggcgccaacaactagtttagaggtggcttgccgtttggtacagcttagtatgctgacattttcaatattttgtactcggaatttcgtaacagtttatccttctcaatgtatattattactattaatgcctgtttggatcacattaattgaaaca

SEQ ID NO: 201829 - DNA, 2059 bp, Zea Mays
ctttttttattgtcattttattttgttccgtgagcacatcacaccaccatcgacatggcgagtgacgacgggttgaaaaccgaagcaccgaacacacgcgcaccgcaggccgcagcttgtcagttgtccgtatcgccgcccatcgccatgctcgcctacctcctccacggcccagccgccgccatcgccgcggcgcccagcgccttcctcctccgctccctcccgccggcgaagaccccgttcctatcctctctcccgcgcccggtctcgccgaggcgcgctgccgcagccgcgttcgccttcaaccccgctgccgcagcggcccccatcgtggcgtcgctgctcgagggccccgtgctggtctgggccggccggctctgcctctactacgcgctcctccacgtcgggctcgccggctccccgcgcaaccccttcctctctcacgagatcggcggcgaggacggcgccggggatagcgacctagggttctccaagtgggccgagaagctccgtggcggtgcctcaggtttcgtgcagttctctaaattttgtttgcccgattacaattgtttgtttgcttatttatttatgcattcctcggatttgtcgttgatgctctgttcggtggaagtggatgctatgaaagagttatacggttctgcccttcggcatctgtaaggagattctggatgtgaaaaagatatctttttttgcagaatctgattctactgccttgctaggaaggaccatatagtacatgactacatggtggtaggtggttcgatgtctttggcggaatttgacaattctgttccttttttctgtagcagtactctggaattgaagtgaaattctgtccttagtaagggagtgtttgaatgcactatacctaatagttagttggctaaaaaaattctattggaattagctagctaacaaatactgcctgtgttccaaattaaaattcgttttagccttttattgtattcatacaataattagtgtatgtgttttgtatgtgtctagattagagatgtcaatgggacccgatacccgctaactcgtggggaattcccctattagggtatgggtatgggacaaaaattgtccccatgggtatgaatatgggacaaaatctccatccattgggtaaacgtgtatgggtttgggaagcaaaaatccgaacccgattacccatgggtatttcatacgtgtacacctatcatgtttgtatgaatgagttgaggccgagtcggccaccaagcgtagcacgacagcgcactaggcctaagttctagcccaacaaggcaacacagcaaggcaactagcagactagcaaaaaacaaaaccctaaaataaccagccatacgctacgccctatccagccggtcaaccgccgcacgcctggacgttgctctggcactgcacactagcgacttcaccagcgacgaggagcaccgctgactgctaagagcctaggatgatggtgacgaccatggattctcaggcgccaacgaacttagatggtgacccaggaaggtgaaaaagatgctcagcataagagaaagctaactagcaaatggaagcccacgaccaaaggcacactgaagagaacctaccgagtacgttcaacggatgaaggaaggcggatcctgaaggagattgcttcagttctgtcccaagatgatcattttgtggatgcttcgtctcacaaggagggaaagtgctcatggcgaaagtgtttgctgctacaacgtgagagcgttgttcgatgagcttccaactcctcacttgcttctggagataacaccgtttcctgctggacaacttacggacaacgactaccgtaaggcagagaggcttgagatggtcctgaggctcagcacttctatttaaaaaacctggggactgatttttcaatttcccctaatacttaatttgcccaagttgtaaattgtcttcctatgggcctgtaaattgacgcagttggcaaagaatcacttgaaaacacaagttctggttgcatggattgatccattgagatactttagttcattaa

SEQ ID NO: 201830 - DNA, 2218 bp, Zea Mays
gttcgatgtctttggcggaatttgacaattctgttccttttttctgtagcagtactctggaattgaagtgaaattctgtccttagtaagggagtgtttgaatgcactatacctaatagttagttggctaaaaaaattctattggaattagctagctaacaaatactgcctgtgttccaaattaaaattcgttttagccttttattgtattcatacaataattagtgtatgtgttttgtatgtgtctagattagagatgtcaatgggacccgatacccgctaactcgtggggaattcccctattagggtatgggtatgggacaaaaattgtccccatgggtatgaatatgggacaaaatctccatccattgggtaaacgtgtatgggtttgggaagcaaaaatccgaacccgattacccatgggtatttcatacgtgtacacctatcatgtttgtatgaatgagttgaggccgagtcggccaccaagcgtagcacgacagcgcactaggcctaagttctagcccaacaaggcaacacagcaaggcaactagcagactagcaaaaaacaaaaccctaaaataaccagccatacgctacgccctatccagccggtcaaccgccgcacgcctggacgttgctctggcactgcacactagcgacttcaccagcgacgaggagcaccgctgactgctaagagcctaggatgatggtgacgaccatggattctcaggcgccaacgaacttagatggtgacccaggaaggtgaacagactctatttctttatttcttctatcggtcccgaagtactaatttcttttctgataaatggatgaatggattatggttcatggatgagtgcttgccgatgtggtgatgtctgaaatctggatagtttgtgctagctgttagtacctatttatcccttaattggggatgaggacccactggggacccgtaacccgaatggggataggtatgggatgagttttgcacccatgatgggtatgaggatggatcaaacatgatggagatggatctgggatgctataacccggtgtgaaatttctcattgacatctctagtctagattcattatcatttatttgaatatagacataaagagcaagtgataaaacgaactctattgtggtatggtacggagggagtagttggctaactattagctaatttgctaaaaatagctaatagttgaactattagttagactgttttgatgtcttcagctaattttaacagctaactattagttctagtgcatccaaacatactttgagggaccagaggctaggttagcccctgcgttatgagaacgcgtagggaccaggtactcttgacacgcctggctggtgcctaccctcgtaaatcctagcgagcatagcaccacggggattcgaaattgaagaatccatcttccatgctaatctagccgtactgggatgaaaatgtgctctcttttatatataaatataatagtgactagtaacctctcagtaagtatttttaactttcttgagatttattcacattcagctttaacaaggaaaaagcctgaacataaccccagcggtcctcaaggaaatttatggatggaaacatacatatactattacattgttttgtaatggacgagaaggtgaatagtcttgagcttcttgctgatcaggtgaaaaagatgctcagcataagagaaagctaactagcaaatggaagcccacgaccaaaggcacactgaagagaacctaccgagtacgttcaacggatgaaggaaggcggatcctgaaggagattgcttcagttctgtcccaagatgatcattttgtggatgcttcgtctcacaagggttgccaaattaggagggaaagtgctcatggcgaaagtgtttgctgctacaacgtgagagcgttgttcgatgagcttccaactcctcacttgcttctggagataacaccgtttcctgctggacaacttacggacaacgactaccgtaaggcagagaggcttgagatggtcctgaggctcagcacttctatttaaaaaacctggggactgatttttcaatttcccctaatacttaatttgcccaagttgtaaattgtcttcctatgggcctgtaaattgacgcagttggcaaagaatcacttgaaaacacaagttctggttgcatggattgatccattgagatactttagttcattaa

SEQ ID NO: 201831 - DNA, 1424 bp, Zea Mays
gatgtctttggcggaatttgacaattctgttccttttttctgtagcagtactctggaattgaagtgaaattctgtccttagtaagggagtgtttgaatgcactatacctaatagttagttggctaaaaaaattctattggaattagctagctaacaaatactgcctgtgttccaaattaaaattcgttttagccttttattgtattcatacaataattagtgtatgtgttttgtatgtgtctagattagagatgtcaatgggacccgatacccgctaactcgtggggaattcccctattagggtatgggtatgggacaaaaattgtccccatgggtatgaatatgggacaaaatctccatccattgggtaaacgtgtatgggtttgggaagcaaaaatccgaacccgattacccatgggtatttcatacgtgtacacctatcatgtttgtatgaatgagttgaggccgagtcggccaccaagcgtagcacgacagcgcactaggcctaagttctagcccaacaaggcaacacagcaaggcaactagcagactagcaaaaaacaaaaccctaaaataaccagccatacgctacgccctatccagccggtcaaccgccgcacgcctggacgttgctctggcactgcacactagcgacttcaccagcgacgaggagcaccgctgactgctaagagcctaggatgatggtgacgaccatggattctcaggcgccaacgaacttagatggtgacccaggaagctttaacaaggaaaaagcctgaacataaccccagcggtcctcaaggaaatttatggatggaaacatacatatactattacattgttttgtaatggacgagaaggtgaatagtcttgagcttcttgctgatcaggtgaaaaagatgctcagcataagagaaagctaactagcaaatggaagcccacgaccaaaggcacactgaagagaacctaccgagtacgttcaacggatgaaggaaggcggatcctgaaggagattgcttcagttctgtcccaagatgatcattttgtggatgcttcgtctcacaagggttgccaaattaggagggaaagtgctcatggcgaaagtgtttgctgctacaacgtgagagcgttgttcgatgagcttccaactcctcacttgcttctggagataacaccgtttcctgctggacaacttacggacaacgactaccgtaaggcagagaggcttgagatggtcctgaggctcagcacttctatttaaaaaacctggggactgatttttcaatttcccctaatacttaatttgcccaagttgtaaattgtcttcctatgggcctgtaaattgacgcagttggcaaagaatcacttgaaaacacaagttctggttgcatggattgatccattgagatactttagttcattaa

SEQ ID NO: 201832 - DNA, 1291 bp, Zea Mays
gatgtctttggcggaatttgacaattctgttccttttttctgtagcagtactctggaattgaagtgaaattctgtccttagtaagggagtgtttgaatgcactatacctaatagttagttggctaaaaaaattctattggaattagctagctaacaaatactgcctgtgttccaaattaaaattcgttttagccttttattgtattcatacaataattagtgtatgtgttttgtatgtgtctagattagagatgtcaatgggacccgatacccgctaactcgtggggaattcccctattagggtatgggtatgggacaaaaattgtccccatgggtatgaatatgggacaaaatctccatccattgggtaaacgtgtatgggtttgggaagcaaaaatccgaacccgattacccatgggtatttcatacgtgtacacctatcatgtttgtatgaatgagttgaggccgagtcggccaccaagcgtagcacgacagcgcactaggcctaagttctagcccaacaaggcaacacagcaaggcaactagcagactagcaaaaaacaaaaccctaaaataaccagccatacgctacgccctatccagccggtcaaccgccgcacgcctggacgttgctctggcactgcacactagcgacttcaccagcgacgaggagcaccgctgactgctaagagcctaggatgatggtgacgaccatggattctcaggcgccaacgaacttagatggtgacccaggaaggtgaaaaagatgctcagcataagagaaagctaactagcaaatggaagcccacgaccaaaggcacactgaagagaacctaccgagtacgttcaacggatgaaggaaggcggatcctgaaggagattgcttcagttctgtcccaagatgatcattttgtggatgcttcgtctcacaagggttgccaaattaggagggaaagtgctcatggcgaaagtgtttgctgctacaacgtgagagcgttgttcgatgagcttccaactcctcacttgcttctggagataacaccgtttcctgctggacaacttacggacaacgactaccgtaaggcagagaggcttgagatggtcctgaggctcagcacttctatttaaaaaacctggggactgatttttcaatttcccctaatacttaatttgcccaagttgtaaattgtcttcctatgggcctgtaaattgacgcagttggcaaagaatcacttgaaaacacaagttctggttgcatggattgatccattgagatactttagttcattaa

SEQ ID NO: 201833 - DNA, 1062 bp, Zea Mays
cccacccagcggagcatcacgtgccaggcggcgagcagcatccccgccgaccgcgtccccgacatggagaagcggaagctgatgaacctcctcctcctgggcgccatatcgctgcccaccgtcggcatggtcgtcccctacggcgccttcttcgtccccgccggctccgggaacggcggcggcgggacctacgccaaggacaagctgggcaacgacatcacggtggaggagtggctcaacacgcacggtcccaacgaccgcacgctcgcgcaggggctcaagggtgaccccacgtacctggtggtggagcaggacaagacgctggccacctacgggatcaacgccgtgtgcacccacctcggctgcgtcgtgccgtggaacggcgccgagaacaagttcatctgcccctgccatggatcccagtacaacaaccagggcaaggtggtccgcggaccggcgcctctgtcgctggccctggttcacgccgacgtcgacgacggcaaggtcctcttcgtcccgtgggtggagaccgacttcaggaccggccaggacccgtggtggagtgcatgaggaggatcatccgacacaagcggtgctcagtactcataggctttctccgagggcgttgttgctacaaattcacttgcctcttgcctccaaattatatatattacacacactgcatgaaacaagaacacagctgtttgtcatctcttcactataaccttttgaacactctgaaatctgctgtaatcaaatatagactttctctgccatctgctgatcaagtgaccagcagggagagcaatttagacttttttttttgccgaaatgacttttatgtagtaggctcacaccaatttctagttacttggtcaatatttctcttcctcaatgaatgtacaagtttttagatcttgatctagatctacttatgctaagtttttagttaactcctctactagttatacatcaacatagccttttagtctcaagcaagttgtggtaggctatagttaaaatccaacaagatatcaccaaaaagagaaagaggaggaaaaa

SEQ ID NO: 201834 - DNA, 1031 bp, Zea Mays
agtatatgttgtatcgttaatgcttattaataatctggacttagtccttaagaggagctgtcgtcattcgttagggcttcatttatcttctaagcctcttccacctcttcctaatcttgaggtctcagatgcgattgttgaaaaagctgcaaatcatgctcttgtatggatcaataggctgctggctgttggtcatgacatcgccatcaagagagataggaaagtttttataaaggtgatactgattttgtgggtggtttcattcattggaatgctcttcaattttcttacgcttatttacattggtgtaatgctttctctgttggttccaccactctatgagaagtaccaggaccaggttgatgagaaggttggtgtagcgtacagtgtactatcaaggcacatagataccatcattaccagggctgggcaatcagccaagcagaagaagactgagtaaaagaaacgttttgctgtattgtggaacatccctggttgtccaatgaagttgacagtgggcctttcatctttgaccctctattccactaaaatgaaccctcgatatgctgatatgaggttttgatgtgcattacgggaaatgaggtggcttgtgtatttcctttttggacatggggtttactatgggtgcatatcgcactcggaatgatatcgagaaattgcgactcgtacatgcaattatgcaggctgcttgctctgttagtcatatgatctttccgtcagtgattttaagttttaggctgctccgaggaactttgcaggctgctccgagcaattatgcaggctgcttgctcattcgatgcccatctactggtagctcgttttctgaaatactactactccctccgtttctttttagttgtcgctggatagttcaattttgtactatccagcgacaactaaaacgaaacggagagagtacctaataaggtgtattctacatagacagttgcatatcatgtgaatggataggtatttctggcggcagttctgtttttgctttacctgtattt

SEQ ID NO: 201835 - DNA, 1142 bp, Zea Mays
gccgcaacggggactctggggagtgattcgagtgaacctttttccttttctttttgattttacaaggcacgaataggaagagaagcgtgggaggaggatttttttgccgcagcgtccccatggcggcgggaagagaaaccgacgaacagctgaccgagtacgagaagcagcggctgtcgcggatacgcgagaacgaggcccgactcgaggccctgggcctccgcagcctcgcagcgtcccctcttctccgcaactcgtcgccggggacggccaaggggaagcagaagaagaggtccgtcgacgaggacgaggagtacgtcccgtccgatagcggcggtgaggagaaggacgagagctcgtcggagagcgcgcaagacgaagaggtggatggagaggggaaatcagcttctatgtcacgcgccaagggaaagaaaaggaaattgtcaaaatctggtaaatctacaaagaacacgcctactaagggtagtgcttcttttgctgaggtggtggatgatgatacatccttacagcaggctattgctctctccctggcggaatattcagaaaagcctgtgacttcattgggtgcagaaacatcaagcacagtaacaagagcgagtgaaagtactccccagaagaacagcaaagcatccattcaggactcagctaagaacaagaagattaaaaagctgggtaagagcaggattcagctgtcagaagatgatgtggttcaattcttcttctcatttgacgataaacctcgaggatttccgcagcattatatctcaatgcaacatgttgcaggagcatgagaagtgaggatgacgagtgttgctggtctgcagatgcttgtactctagttttgcatggcctaacctgtgacattgcatcaacattgttggaatagtagcggacataaagccattgcacataacctttgtagttgcagcttgtcaagtccagttgaccggggattttatgattctactaacttgtttgagagaaggggattagatggaattgagtggctattcaaaattgaatagaaaggttatgttcttccgtggaacaaaccaattctaaaattgatagttactgcaatcatagctttaaaagttttgtataagagacgtcttactaag

SEQ ID NO: 201836 - DNA, 1052 bp, Zea Mays
gagtgaacctttttccttttctttttgattttacaaggcacgaataggaagagaagcgtgggaggaggatttttttgccgcagcgtccccatggcggcgggaagagaaaccgacgaacagctgaccgagtacgagaagcagcggctgtcgcggatacgcgagaacgaggcccgactcgaggccctgggcctccgcagcctcgcagcgtcccctcttctccgcaactcgtcgccggggacggccaaggggaagcagaagaagaggtccgtcgacgaggacgaggagtacgtcccgtccgatagcggcggtgaggagaaggacgagagctcgtcggagagcgcgcaagacgaagaggtggatggagaggggaaatcagcttctatgtcacgcgccaagggaaagaaaaggaaattgtcaaaatctggtaaatctacaaagaacacgcctactaagggtagtgcttcttttgctgaggtggtggatgatgatacatccttacagcaggctattgctctctccctggcggaatattcagaaaagcctgtgacttcattgggtgcagaaacatcaagcacagtaacaagagcgagtgaaagtactccccagaagaacagcaaagcatccattcaggactcagctaagaacaagaagattaaaaagctgataaacctcgaggatttccgcagcattatatctcaatgcaacatgttgcaggagcatgagaagtgaggatgacgagtgttgctggtctgcagatgcttgtactctagttttgcatggcctaacctgtgacattgcatcaacattgttggaatagtagcggacataaagccattgcacataacctttgtagttgcagcttgtcaagtccagttgaccggggattttatgattctactaacttgtttgagagaaggggattagatggaattgagtggctattcaaaattgaatagaaaggttatgttcttccgtggaacaaaccaattctaaaattgatagttactgcaatcatagctttaaaagttttgtataagagacgtcttactaag

SEQ ID NO: 201837 - DNA, 2426 bp, Zea Mays
caagaaacgccagggagtagaactataagcttccaagagttcaagaacaagttactagaacctggtttagttgatcgcattgttgtttcaaataaatcagtagcgaaggtctacatcaggagttcacctcatccaaagagccaaggccaagatagtgatatccatattactaccactgatgctccaggcaagcctgctcccagcagatgcaagtattacttcaatattggtagtgttgatttgtttgaagagaagttagaggaagcccaggaagctttgggaatagatccacatgattttgtcccagtaacttatgttgctgaagtaaattggttccaagaagttatgaggtttgccccaacagcattgattgttggtctattatatttcacgggaaaaaggatgcagagtggtttcaatattggaggtggtgctggcaaaggaagaggaggtattttcaacattggaaaagctacagtgatgaagatggacaagaactccaaaaataaggtgttttttaaggatgtagccggttgtgacgaagcaaaacaagaaataatggagtttgtgcatttccttaaaaaccctaagaagtatgaagatttgggagctaaaatacccaaaggtgctctacttgtaggccctcctgggacagggaagactttgctcgccaaagctacagcaggagagtctggtgtgccatttttgtctatttctggttcagatttcatggaaatgtttgttggtgttggaccgtccagggtacggaacttgttccaagaagctaggcagtgtgctcctagtattgtattcattgacgaaatcgatgctattggtcgtgcaagaggacgtggaggtttttcaggttcaaatgatgaacgtgagagtactttgaaccagctgcttgtagagatggatggatttggaacaacttctggtgttgttgttcttgctgggacaaatagacctgacatcctggataaggcattattaaggccaggaagatttgatcgccagatagcaattgacaaaccagatataaagggccgtgatcaaatattccgcatatatcttaaaaagcttaagttggacaacaaaccatcattttattctcaaaggctagctgccttgacacctgggttcgcaggagctgacattgccaatgtttgtaatgaagctgctttaattgctgcgagaagtgaggaaactcagattaccatgcagcattttgagtccgcaattgataggattatcggtggtttggagaagaaaaatagggtcattagcaaactggagcgccgtactgttgcttaccatgaatctggacatgcagttgctggatggttcttggaacatgctgagcctcttctaaaagttacaattgttcctcgtggaacagctgctttaggctttgcacaatacgtcccaaatgaaaatcttttgatgacaaaagagcagctttttgatatgacatgcatgacattaggtggccgtgctgcagaggaggttttgattggcaaaatctcaactggtgctcagaatgacctggagaaagttaccaaaatgacatatgcacaggtcgccgtgtatggttttagtgaaaaggttgggcttctgtccttcccccagaaagatggtggtttcgaaatgagcaagccttacagtaatcagacagcatccatcatcgacgatgaggtccgggaatgggttggcaaggcctacaagaaaacagttgaattgataacagagcacaaggagcaagttgcacagatcgcagaattgctgctcgagaaggaagtcctacaccaggacgatctaaccagggtactaggagaacgtccattcaaggcactggagccaaccaactacgacctctttaagaaaggtttcgaggatggtggtgacaacagccaagcaccagcagagaacgccgagctgcctgatgattcatctcccccagttggtgacgttgtacccacgtagtgtttctctcctcaacgtcagagctgtacattgagcgctcattctcgatagattcttgtttgttggttgcatcataaaaaagatctgtataaattcgcgcccaagctgattatgccactgtggaaatgcatttggatttccgtagtgtcagtccggtcgatagggtgccttgggttcttcatggcacgagcaaatgttctgattcttgtattcgaatgttttgaaatattctgtctgacgggactgcggagttggcgcgagaagtgtgcttgttcagttctatctgaaggcttagctgtctgtagctgtagctggtaacaacagtggctaaaatggtacctctgaaatctttgtgacagtaacaagccattttcctttgaatttttatcaggtagtcggcgcgattactttgtttgacaagcacaaactaaatgtcttggttt

SEQ ID NO: 201838 - DNA, 821 bp, Zea Mays
agacttaaataaacatagtttaatattatttgtaacccatcacgttataattatgtggaccaaacattattaaaaatgacaaaccattactagatggagtgagtactgtttgtgacgaagtgtactcatcaataaataaaacaaaataagagcaagtctagcttcccggtcaacggctcctcgtataaggcacccctacttgtatcacaaattcacaaccagaagcagctctcaggattcgtagcgcctgcatgcagctccaggatggcggaggccatcgttggtccgctggtggggaagctccaggagatggcggtgagcgaggcgaaggctctagtggcagtgaacgacgacatccgcggcctccgggaccggctcatgtggatgcaggccttcttgcggcatgccgacccgcggcgacgcgacacctccgacgagctcatcagggtgtggctcaagcagacccgcgatgttgccttcgacgccgaggacgccattgacgactactccctcaaggtcgacctctcaagatatccaaattggagccagtccattgtttgttttttctctggattcactacacaagtaagcattcgacacaatctatcaagaaagatcgcagagatcaacttaaggcttgaagacatcattaacaataaggagaaatacaagattgaagctgcacccaatgattttccattggtgacatggaaaccttctacggacatctctactgtggcaaaaagtttgtaagttcccacaacactactctctaaagtgtcgttcgaggagttgagtgtaaatagaactttgttaatgac

SEQ ID NO: 201839 - DNA, 1656 bp, Zea Mays
ctttcggatgctttacccctctggtctctgaatacacctcgtgcggcatgctgtggagggttgctgagcctttaaccatcgtttctttgcgtagaggtcacacttgcagtagatttgaaggcgagttttagcatagcttaccttccagggctgggttttcggcttctccttctcctccctagacagatttcctccctccggcagggtcccgtcgccaacgatgcgtggcagaagcggttcttcagcgtcgcgccgccggccacgctggtcttcttcttcgtgctgatattcgtcgccggtgcaattgttacgcttgatcataaggagagcctggccatactgcagctgcagccaagaggagtgatcgcagcagagcagatgaggcctccagcgacgagcgagctgcgcgctgagccagcagcagaggaacccgacatctgtgagaataaatgtaggcctgcaggcagcgaggcgttgccgaggggcatcgtgcaggacaagtccaacttcgagatggagtcgctgggtggcaaccctgaacggaaggagaagaagggcaacggcaggcactcgaaaagcctcctcgccatccccgtcggcatcaagcagaaggcgatcgtcgacaagctcgtatccaagttcccggacaccaatttcatcgtgatgctgttccactacgacggcgaggtggacgggtggcgagacctggagtggtcgggccgcgcgatccacgtcggcgtacgcgaccagaccaagtggtggttcgccaagaggttcctgcacccggacctggtggcggagtacgactacgtcttcctctgggacgaggacatcgaggtggacagcttcgacccgctccggtacctgcgggtcgtgagggaggagcggctggagatctcgcagccggcgctcgaccggcggtcgcagatccaccaccggctcacggcgcgcgccgcgcggagcgggggcgtccaccggcggtactacaagacgagcgggcacggccggtgctacggcaacagcacgggaccgccgtgcgcggggtgggtggagatgatggtgcccgtgttctcgcgcgcggcgtggcggtgcgcgtggcacatgatccagaacgacctcatctacgcctggggcatggactacaagctcggctactgcgcgcagggcgaccggagccgcaacgtcggggtcgtcgacagccagtacgtgctccaccggggcatccctacgctcggcgacggcggcaaggcgacggcgacggctgccgcgtcggcattggggacggcagaccggttagcggtcaggcagcggtcctacaccgagctgcagctgttcaacaggaggtggaagaaggccgtggcggaggacgggtgctggaccgacccttacccgaacccggcgacgaccaccggctgaccgttggacggagcgaggcagcgcagggaagtacagtagttggtagctgtcagattgaccttgcctagaagatggtagtagatcatacactcgcattaatttacaggttcacagagagctatacatataatgtacagaactacagattgttttttttcctgtctcttgcctgtgatccatacaagggaataagcgtgcatgaataaaagaaattttgaaaatcataaatgaaattgccaa

SEQ ID NO: 201840 - DNA, 2942 bp, Zea Mays
gcggtttcttctcgtccggtcgccatggtgcacgagacgagatcacgggtgcacgcagctgcccaggaagaaggcaagctcgcctcaaaaaagcagaaaccagataatgaaaccaaggaaaggggccagaatgtgccctccaagaacaagaagtctgccgacaacgaagggaaagacggggagccggaggcgccaacaaagagcaagaagctcaaagctgaggaatctgagccaaatgggagggaagctgctgcaagagagtttgcagagttttgcaaggccataggagaacgcctctccctcgaggacatgcgcaagatccttcaagccaatgagcaagatgcttctggatcggaggatgcggtcgttccaagatgtgaggatatgatgttctatgggcctctcgagaagtgcccagtatgtgagggtcagcttgaatttaaggagtggaaatacaagtgcactgggaactacagcgagtgggcacgctgtactttcagtactaacgacccttcaaggagaagcggttctatagaagttcctgatgacataaaagatgattttatccgcaagtggctgaagcaacaagaaggaaaggagttccctaaacgtgatcttgatgaagaggctcatatcttctctggcatgatgattgcattgtctggacggatgtcacgctcacatggttacttcaaggagcagatcatgaagcatggagggaaggtcaagaattctgtgcttggtgctacctgtgtcgtggcttctccggctgagagagacaaaggtggctctggaggatttgctgaagcattggagcgtggaactcctgttgttagtgagaattggataatcgatagcattgagaaaaaggaagctcagccttttgctgcctatgatattgttactgatgttgttccggaaggccgaggactcccgctaggccaacttgatccaagtgaggaggccattgagaccttagctgcagaggttaaacttgctggcaagagatctgtccacaaggattccaaactcgataaagacggtggatgtgtctttgagaaggatggcataatctacaactgcgcttttgctgtttgcgatctcggatgccagatgaacgactggttatggtccctggaaatcgtttgcacctgttctacaagaaaggcccaattggtcatgaccagatggcggaggaacgggtggaggattttggtagccgtgtcaatgatgctattaaagaatttgttcggctatttgaggaggtcactggaaatgagtttgagccttgggaaaggcagaagaagttcgagaagaagagtatgaagatgtatcccttggacatggatgttggggttgatgtgcgtcacggaggtgcagcacttcgtcagctgggttctgcagcagcacattgcaagcttgatccttctgtttctttcctgctgaaacagttatgtggacaagagatctacaggtatgctctgatggagatggcccaggacctacctgaccttcccatagggatgcttaccgatctccatctgaagagaggggaggaaatgctgcttcagatgaggcgagacgcggagacggtggcagagtccggcccagaagcagacgcgttctggaccgacgccagcagcaaatggttcactctgttccccacaactcggccgtacacgatgaggggcttcgagcagatcgccgacaacgtagcatcaggtttcgagacagtgcgcgatataaacgacgcgtctcgtctcatcggggatgcgttccgctcgacactactggatgacccactctctgaatgctacaagaagctcggttgttgtatcagtgctgtcgccgagggctcggaagactacaagatggttctcaagtacctggagaagacgtacgagcctgtcgaggtggaggatgtggtctatggtgtgtctgtcgagaggatatatgctgttgaatccagcgcattccctttgtacgaggaaatcaggaacctgccaaacaaaatccttctctggtgtgggactagaagctcgaacttgcttaggcacctccacaaagggttcctgcctgccgtctgccatctgcctgtgccagggtacatgttcggcaaagccatagtgtgttccgacgcagcggcggaggcggctcgctacggcttcactgcagtggaccgtccggaagggtacctggtcctggcggtggcctctctgggagaagagatcgaggaagtcaccggaacaccaggggcagaggaggcacgagtcctggaagagaagaaggtgggcgtgaaaggcgtcgggaggaagacgaccgacgagtcggagcacttcagctggagggacggcgtcaaggtcccctgcggcaagctggtgccgtcggcgaacaaggacggcccgctcgagtacaacgagtacgccgtgtacgaccccaagcaggtgagcatctgcttcctggtcggggtgaagtacgaggagcagaacatggaggtggtgccgccggacgaccagtgaaggagtcgtctcgtggagtgtcctagggcagggcagggcaggccaggccaggaggtggtgggacccattttggttagtggagccggtagcggcgacgcgttggccgtcgggtggaatggaaacgtgaggggtgccagaacatcctgggctgcctgccgcctcctggttttgtgtcaattgccgtgtctgtggctgtgtgtactacttggtagttggtagcgtactttattagtagcgaaggtgctagtgaccctggctaggtacaagcccttgggaggctgcttgctttgtatgctaacagttcgttccgttccgttccagcggcccttttgggtgctgacagttcgttagcacggctctgagagagaacgtgttccgctctggtttagcactaaatgaaaaaaaaaacatgtttcctttcga

SEQ ID NO: 201841 - DNA, 2974 bp, Zea Mays
cccgctcccgcgtctatttatccccggcgatagaggatggtcgagagactggtgcttcttgctggcggtttcttctcgtccggtcgccatggtgcacgagacgagatcacgggtgcacgcagctgcccaggaagaaggcaagctcgcctcaaaaaagcagaaaccagataatgaaaccaaggaaaggggccagaatgtgccctccaagaacaagaagtctgccgacaacgaagggaaagacggggagccggaggcgccaacaaagagcaagaagctcaaagctgaggaatctgagccaaatgggagggaagctgctgcaagagagtttgcagagttttgcaaggccataggagaacgcctctccctcgaggacatgcgcaagatccttcaagccaatgagcaagatgcttctggatcggaggatgcggtcgttccaagatgtgaggatatgatgttctatgggcctctcgagaagtgcccagtatgtgagggtcagcttgaatttaaggagtggaaatacaagtgcactgggaactacagcgagtgggcacgctgtactttcagtactaacgacccttcaaggagaagcggttctatagaagttcctgatgacataaaagatgattttatccgcaagtggctgaagcaacaagaaggaaaggagttccctaaacgtgatcttgatgaagaggctcatatcttctctggcatgatgattgcattgtctggacggatgtcacgctcacatggttacttcaaggagcagatcatgaagcatggagggaaggtcaagaattctgtgcttggtgctacctgtgtcgtggcttctccggctgagagagacaaaggtggctctggaggatttgctgaagcattggagcgtggaactcctgttgttagtgagaattggataatcgatagcattgagaaaaaggaagctcagccttttgctgcctatgatattgttactgatgttgttccggaaggccgaggactcccgctaggccaacttgatccaagttaaacttgctggcaagagatctgtccacaaggattccaaactcgataaagacggtggatgtgtctttgagaaggatggcataatctacaactgcgcttttgctgtttgcgatctcggatgccagatgaacgactggttatggtccctggaaatcgtttgcacctgttctacaagaaaggcccaattggtcatgaccagatggcggaggaacgggtggaggattttggtagccgtgtcaatgatgctattaaagaatttgttcggctatttgaggaggtcactggaaatgagtttgagccttgggaaaggcagaagaagttcgagaagaagagtatgaagatgtatcccttggacatggatgttggggttgatgtgcgtcacggaggtgcagcacttcgtcagctgggttctgcagcagcacattgcaagcttgatccttctgtttctttcctgctgaaacagttatgtggacaagagatctacaggtatgctctgatggagatggcccaggacctacctgaccttcccatagggatgcttaccgatctccatctgaagagaggggaggaaatgctgcttcagatgaggcgagacgcggagacggtggcagagtccggcccagaagcagacgcgttctggaccgacgccagcagcaaatggttcactctgttccccacaactcggccgtacacgatgaggggcttcgagcagatcgccgacaacgtagcatcaggtttcgagacagtgcgcgatataaacgacgcgtctcgtctcatcggggatgcgttccgctcgacactactggatgacccactctctgaatgctacaagaagctcggttgttgtatcagtgctgtcgccgagggctcggaagactacaagatggttctcaagtacctggagaagacgtacgagcctgtcgaggtggaggatgtggtctatggtgtgtctgtcgagaggatatatgctgttgaatccagcgcattccctttgtacgaggaaatcaggaacctgccaaacaaaatccttctctggtgtgggactagaagctcgaacttgcttaggcacctccacaaagggttcctgcctgccgtctgccatctgcctgtgccagggtacatgttcggcaaagccatagtgtgttccgacgcagcggcggaggcggctcgctacggcttcactgcagtggaccgtccggaagggtacctggtcctggcggtggcctctctgggagaagagatcgaggaagtcaccggaacaccaggggcagaggaggcacgagtcctggaagagaagaaggtgggcgtgaaaggcgtcgggaggaagacgaccgacgagtcggagcacttcagctggagggacggcgtcaaggtcccctgcggcaagctggtgccgtcggcgaacaaggacggcccgctcgagtacaacgagtacgccgtgtacgaccccaagcaggtgagcatctgcttcctggtcggggtgaagtacgaggagcagaacatggaggtggtgccgccggacgaccagtgaaggagtcgtctcgtggagtgtcctagggcagggcagggcaggccaggccaggaggtggtgggacccattttggttagtggagccggtagcggcgacgcgttggccgtcgggtggaatggaaacgtgaggggtgccagaacatcctgggctgcctgccgcctcctggttttgtgtcaattgccgtgtctgtggctgtgtgtactacttggtagttggtagcgtactttattagtagcgaaggtgctagtgaccctggctaggtacaagcccttgggaggctgcttgctttgtatgctaacagttcgttccgttccgttccagcggcccttttgggtgctgacagttcgttagcacggctctgagagagaacgtgttccgctctggtttagcactaaatgaaaaaaaaaacatgtttcctttcga

SEQ ID NO: 201842 - DNA, 3058 bp, Zea Mays
tgcctttcctcccgcctccgcctccaattccccaacgggaactgttcccgctcccgcgtctatttatccccggcgatagaggatggtcgagagactggtgcttcttgctggcggtttcttctcgtccggtcgccatggtgcacgagacgagatcacgggtgcacgcagctgcccaggaagaaggcaagctcgcctcaaaaaagcagaaaccagataatgaaaccaaggaaaggggccagaatgtgccctccaagaacaagaagtctgccgacaacgaagggaaagacggggagccggaggcgccaacaaagagcaagaagctcaaagctgaggaatctgagccaaatgggagggaagctgctgcaagagagtttgcagagttttgcaaggccataggagaacgcctctccctcgaggacatgcgcaagatccttcaagccaatgagcaagatgcttctggatcggaggatgcggtcgttccaagatgtgaggatatgatgttctatgggcctctcgagaagtgcccagtatgtgagggtcagcttgaatttaaggagtggaaatacaagtgcactgggaactacagcgagtgggcacgctgtactttcagtactaacgacccttcaaggagaagcggttctatagaagttcctgatgacataaaagatgattttatccgcaagtggctgaagcaacaagaaggaaaggagttccctaaacgtgatcttgatgaagaggctcatatcttctctggcatgatgattgcattgtctggacggatgtcacgctcacatggttacttcaaggagcagatcatgaagcatggagggaaggtcaagaattctgtgcttggtgctacctgtgtcgtggcttctccggctgagagagacaaaggtggctctggaggatttgctgaagcattggagcgtggaactcctgttgttagtgagaattggataatcgatagcattgagaaaaaggaagctcagccttttgctgcctatgatattgttactgatgttgttccggaaggccgaggactcccgctaggccaacttgatccaagtgaggaggccattgagaccttagctgcagaggttaaacttgctggcaagagatctgtccacaaggattccaaactcgataaagacggtggatgtgtctttgagaaggatggcataatctacaactgcgcttttgctgtttgcgatctcggatgccagatgaacgagctatgcatcatgcagctggttatggtccctggaaatcgtttgcacctgttctacaagaaaggcccaattggtcatgaccagatggcggaggaacgggtggaggattttggtagccgtgtcaatgatgctattaaagaatttgttcggctatttgaggaggtcactggaaatgagtttgagccttgggaaaggcagaagaagttcgagaagaagagtatgaagatgtatcccttggacatggatgttggggttgatgtgcgtcacggaggtgcagcacttcgtcagctgggttctgcagcagcacattgcaagcttgatccttctgtttctttcctgctgaaacagttatgtggacaagagatctacaggtatgctctgatggagatggcccaggacctacctgaccttcccatagggatgcttaccgatctccatctgaagagaggggaggaaatgctgcttcagatgaggcgagacgcggagacggtggcagagtccggcccagaagcagacgcgttctggaccgacgccagcagcaaatggttcactctgttccccacaactcggccgtacacgatgaggggcttcgagcagatcgccgacaacgtttcgagacagtgcgcgatataaacgacgcgtctcgtctcatcggggatgcgttccgctcgacactactggatgacccactctctgaatgctacaagaagctcggttgttgtatcagtgctgtcgccgagggctcggaagactacaagatggttctcaagtacctggagaagacgtacgagcctgtcgaggtggaggatgtggtctatggtgtgtctgtcgagaggatatatgctgttgaatccagcgcattccctttgtacgaggaaatcaggaacctgccaaacaaaatccttctctggtgtgggactagaagctcgaacttgcttaggcacctccacaaagggttcctgcctgccgtctgccatctgcctgtgccagggtacatgttcggcaaagccatagtgtgttccgacgcagcggcggaggcggctcgctacggcttcactgcagtggaccgtccggaagggtacctggtcctggcggtggcctctctgggagaagagatcgaggaagtcaccggaacaccaggggcagaggaggcacgagtcctggaagagaagaaggtgggcgtgaaaggcgtcgggaggaagacgaccgacgagtcggagcacttcagctggagggacggcgtcaaggtcccctgcggcaagctggtgccgtcggcgaacaaggacggcccgctcgagtacaacgagtacgccgtgtacgaccccaagcaggtgagcatctgcttcctggtcggggtgaagtacgaggagcagaacatggaggtggtgccgccggacgaccagtgaaggagtcgtctcgtggagtgtcctagggcagggcagggcaggccaggccaggaggtggtgggacccattttggttagtggagccggtagcggcgacgcgttggccgtcgggtggaatggaaacgtgaggggtgccagaacatcctgggctgcctgccgcctcctggttttgtgtcaattgccgtgtctgtggctgtgtgtactacttggtagttggtagcgtactttattagtagcgaaggtgctagtgaccctggctaggtacaagcccttgggaggctgcttgctttgtatgctaacagttcgttccgttccgttccagcggcccttttgggtgctgacagttcgttagcacggctctgagagagaacgtgttccgctctggtttagcactaaatgaaaaaaaaaacatgtttcctttcga

SEQ ID NO: 201843 - DNA, 3062 bp, Zea Mays
gcaggcgggcatggccgcatggccacagctggagcgcagccgcggcgacacccaggcaccttcttgcggccttgcctttcctcccgcctccgcctccaattccccaacgggaactgttcccgctcccgcgtctatttatccccggcgatagaggatggtcgagagactggtgcttcttgctggcggtttcttctcgtccggtcgccatggtgcacgagacgagatcacgggtgcacgcagctgcccaggaagaaggcaagctcgcctcaaaaaagcagaaaccagataatgaaaccaaggaaaggggccagaatgtgccctccaagaacaagaagtctgccgacaacgaagggaaagacggggagccggaggcgccaacaaagagcaagaagctcaaagctgaggaatctgagccaaatgggagggaagctgctgcaagagagtttgcagagttttgcaaggccataggagaacgcctctccctcgaggacatgcgcaagatccttcaagccaatgagcaagatgcttctggatcggaggatgcggtcgttccaagatgtgaggatatgatgttctatgggcctctcgagaagtgcccagtatgtgagggtcagcttgaatttaaggagtggaaatacaagtgcactgggaactacagcgagtgggcacgctgtactttcagtactaacgacccttcaaggagaagcggttctatagaagttcctgatgacataaaagatgattttatccgcaagtggctgaagcaacaagaaggaaaggagttccctaaacgtgatcttgatgaagaggctcatatcttctctggcatgatgattgcattgtctggacggatgtcacgctcacatggttacttcaaggagcagatcatgaagcatggagggaaggtcaagaattctgtgcttggtgctacctgtgtcgtggcttctccggctgagagagacaaaggtggctctggaggatttgctgaagcattggagcgtggaactcctgttgttagtgagaattggataatcgatagcattgagaaaaaggaagctcagccttttgctgcctatgatattgttactgatgttgttccggaaggccgaggactcccgctaggccaacttgatccaagtgaggaggccattgagaccttagctgcagaggttaaacttgctggcaagagatctgtccacaaggattccaaactcgataaagacggtggatgtgtctttgagaaggatggcataatctacaactgcgcttttgctgtttgcgatctcggatgccagatgaacgagctatgcatcatgcagctggttatggtccctggaaatcgtttgcacctgttctacaagaaaggcccaattggtcatgaccagatggcggaggaacgggtggaggattttggtagccgtgtcaatgatgctattaaagaatttgttcggctatttgaggaggtcactggaaatgagtttgagccttgggaaaggcagaagaagttcgagaagaagagtatgaagatgtatcccttggacatggatgttggggttgatgtgcgtcacggaggtgcagcacttcgtcagctgggttctgcagcagcacattgcaagcttgatccttctgtttctttcctgctgaaacagttatgtggacaagagatctacaggtatgctctgatggagatggcccaggacctacctgaccttcccatagggatgcttaccgatctccatctgaagagaggggaggaaatgctgcttcagatgaggcgagacgcggagacggtggcagagtccggcccagaagcagacgcgttctggaccgacgccagcagcaaatggttcactctgttccccacaactcggccgtacacgatgaggggcttcgagcagatcgccgacaacgtagcatcaggtttcgagacagtgcgcgatataaacgacgcgtctcgtctcatcggggatgcgttccgctcgacactactggatgacccactctctgaatgctacaagaagctcggttgttgtatcagtgctgtcgccgagggctcggaagactacaagatggttctcaagtacctggagaagacgtacgagcctgtcgaggtggaggatgtggtctatggtgtgtctgtcgagaggatatatgctgttgaatccagcgcattccctttgtacgaggaaatcaggaacctgccaaacaaaatccttctctggtgtgggactagaagctcgaacttgcttaggcacctccacaaagggttcctgcctgccgtctgccatctgcctgtgccagggtacatgttcggcaaagccatagtgtgttccgacgcagcggcggaggcggctcgctacggcttcactgcagtggaccgtccggaagggtacctggtcctggcggtggcctctctgggagaagagatcgaggaagtcaccggaacaccaggggcagaggaggcacgagtcctggaagagaagaaggtgggcgtgaaaggcgtcgggaggaagacgaccgacgagtcggagcacttcagctggagggacggcgtcaaggtcccctgcggcaagctggtgccgtcggcgaacaaggacggcccgctcgagtacaacgagtacgccgtgtacgaccccaagcaggtgagcatctgcttcctggtcggggtgaagtacgaggagcagaacatggaggtggtgggacccattttggttagtggagccggtagcggcgacgcgttggccgtcgggtggaatggaaacgtgaggggtgccagaacatcctgggctgcctgccgcctcctggttttgtgtcaattgccgtgtctgtggctgtgtgtactacttggtagttggtagcgtactttattagtagcgaaggtgctagtgaccctggctaggtacaagcccttgggaggctgcttgctttgtatgctaacagttcgttccgttccgttccagcggcccttttgggtgctgacagttcgttagcacggctctgagagagaacgtgttccgctctggtttagcactaaatgaaaaaaaaaacatgtttcctttcga

SEQ ID NO: 201844 - DNA, 413 bp, Zea Mays
cgcgaaagccgcgggcgccgcccgggtcttcgctggcgtgccctctagtctagtggatggaaactggaaatgggttgaccttcgcgacaggcacgcgttggtggacatcttctcgtcgcacaggtaaccgacaacgcccaattcccaagagatggaaccaatcgcattgtttgccaattgccatagtacatttgtatgggtggcctctaagggcatgtacagtggtgtttaatgtggaggctcttaaggtgtttaagggggttatttgcaaaaaaatcttagagccgtctctccgtgaagagacgcctctggctcgtaaaccaagtagcaacagacgcctcacttcccactgtacgaatttgtcgtctgttctatcgatctgatgctatacaaatacatttaattctgtattt

SEQ ID NO: 201845 - DNA, 1287 bp, Zea Mays
gtaaatctgtgtgtcacggagaagccatgcagacatgctgcatgctatccgtgacaaagatcttcaatgcggacggttccagattttgttgctcgtgtctcgggccatccacccgtctagcgtttctgttcactagtgctagtgtgctgcgactgcgatgctatttttctgtggctagcagctaggagctgcaaaaaatggcgatccttgctcccaacagatggattgttcttgtttaatactggtgttctcgtcatctgcaactgtctatgggtggcccaaggaagtaccctgcaccgaagaattcccgctctgcgccaccaatccctatgggcggacaaagcttgtgattgaagacatctgccgcgacgtccaccgctccgaccccgactggaagatcatactgctcaggtacttcaaccccgttggcgctcatccaagcgggtacatcggcgaagacccctgcggtgtcccgaacaacctgatgccctacgtgcagcaagtcgctgttgggaggttacctcacctcacggtctacgggacggactacagcaccaaggatgggactggggtgcgtgattacatccacgttgtcgacctggctgacggccacatagcagccctgaggaagctctacgaagactccgacaaaataggctgtgaagtgtacaacttggggactggaaaggggacgtcggtgttggaaatggtggctgcattcgagaaggcttctgggaagaaaatccctctggtgttcgctgggcgaagacccggagacgcagagatcgtctacgccgcaactgccaaggcagagaaggagctcaaatggaaggccaagtacgggatcgaggagatgtgcagagatctgtggaactgggcgagcaagaacccgtacgggtacgctgggtcacgcgacaacagcaaatgaaccacccatccatgcatcccatcctgcagtaggagcaagcagcagccttatagcctatgctaccataattagtaactcatcaatcatgcatacataatcagccagtcatctgattaggggtactgcgatgggcctcgcttcttcagtgtatagagggaggaggaggggggtcatcttgatattcttttttttatcattcccgaatgattattattagtagccagttcgatattactccatggttggttgctagagaaggaataagctccattcatatacctaactaaagatatatatatacatgcattcactgtgactgtctctgtctgctactaatatgatactgtacttgactgttg

SEQ ID NO: 201846 - DNA, 915 bp, Zea Mays
cttgcatgtgtacacattttttatgccttgctgttctcacttccattggagagcaaatggataacgatgatatcaagaatatgtattgaatgcacgaggaatgaatctcttcacatgccaatggagacctttgaactctgaaccaaaagctctgatctttctatgccatggcacaggtacaaggttggcgcaggctggatttgtagtgcatggaatggactatgaaggccatggaaaatcttctggacttcaaggatatattaatagtttcgatgacattgtggttgattgctctaagtactttgcaagtgtctgtgagaaagaagagtataagaaacaaaagagatttttacttggagaatccatgggcggggcaattgtgcttatgcttcatagaaaggaacctaccttttgggatggggccattttggttgctccgatgtgcaaggttactctaccattcatcatagtccacggtggtgatgatgctgtaactgaccccacagagaacccgaggaaaacatagatattgtgtttgcagacatcatcaaatggttgaatgacagggtatcatcaatttcctatcttggatccaacagcggtttacagttacaagaacaatgttgatagctcacaaaaatcaatgggtgtgtgtacgagaagatgacatccatctgtcgataggtggaacaatcaatggtgtcgacatatgtaagattctctactggcacatgacactagcaaggtagttatttttgtctattaaataaaaatgaatatactaggtgtaaaccaatatatcgatgtaaatcaatacaaatatatagatgtaagaatcttttagaaatagggaaggtgagaggattattttaaaaatatgatatttttaaaaaaatcttccacctccattcttac

SEQ ID NO: 201847 - DNA, 1148 bp, Zea Mays
ggagagcaaatggataacgatgatatcaagtatgatgaggaatatgtattgaatgcacgaggaatgaatctcttcacatgccaatggagacctttgaactctgaaccaaaagctctgatctttctatgccatggatatgccatggaatgcagtatttcaatgagaggcacaggtacaaggttggcgcaggctggatttgtagtgcatggaatggactatgaaggccatggaaaatcttctggacttcaaggatatattaatagtttcgatgacattgtggttgattgctctaagtactttgcaagtgtctgtgagaaagaagagtataagaaacaaaagagatttttacttggagaatccatgggcggggcaattgtgcttatgcttcatagaaaggaacctaccttttgggatggggccattttggttgctccgatgtgcaagatattagatgatatgaagcctcaccctattatgatgtcaattttaagtaagcttagcaatgtgatccctacatggagaatcattcctaatgaagatatcatagatagagcaattaaatgtgaggagcgacgtgaagaggtaagaaataatcattattgctataaaggaaagcctagggtaaagactggccatgaaatttttatggcaagcttggatattgaaagtaatcttgacaaggttactctaccattcatcatagtccacggtggtgatgatgctgtaactgaccccacagagaacccgaggaaaacatagatattgtgtttgcagacatcatcaaatggttgaatgacagggtatcatcaatttcctatcttggatccaacagcggtttacagttacaagaacaatgttgatagctcacaaaaatcaatgggtgtgtgtacgagaagatgacatccatctgtcgataggtggaacaatcaatggtgtcgacatatgtaagattctctactggcacatgacactagcaaggtagttatttttgtctattaaataaaaatgaatatactaggtgtaaaccaatatatcgatgtaaatcaatacaaatatatagatgtaagaatcttttagaaatagggaaggtgagaggattattttaaaaatatgatatttttaaaaaaatcttccacctccattcttac

SEQ ID NO: 201848 - DNA, 1991 bp, Zea Mays
atggatggcccatgaaaggcgagcctgcctcgtcggccgtcgttccttttggcatttcacaaacgcagagacgtttctcctcgactccgcctcccccgctcctcaccgccgcgccgcctcgtccattgccgccgccgcatcaattgacccccggaccacgcggtatctggaacccgtctccatctccacttcttctcgcttatactctctgtttgttgtgttccgctgctactcgcttccccatcggttgcccactacacttctagtggaccggattgtcctgtctgcctaacaagtgatggttctgtttcgctccgagaacgacctgtaagctcctgccgcacgagcagatcaagtgtatagctgcacatgcgttggattggtctcttccattcatcatgaagttcgtagctgaataacgggcgttggtgcattgcgcgatccgtgacattttaaaaaaaataaaaacaatggaaacccgtatcagttgataaggaatgaaatatggaacactgtacggttgtttttgcccatcctatttcctctttttgttcctttttgaatcaatcctgctttgtccatcttaagtttgttataagttatgtcgtgatgacttgtggtactggattttgtggcattaattgttaagctctagttgccactgcacctggatcaattgactatgtgatttgttcatatatgttagctccaatcccatgcttatgctcttatttgtagcatttcttcatatatctcaggcggtaattggtatgtttgtaaattttatgtatgaaggagaagaaacatgttattgatatgtaagacaagttgtcacatttaaatttaatatcttttatacattcacttacttacttgtaataataaaccacgattcactcggtaaaattgtaatcttcgtcttcgaaggagttatcccggagggattactgctttaagacgaagactgactgtctcttttaatattgtgttgccttgttttcaattgtgtatagcaattgagaacaagtaaccaacatttatgctcttatttgtaacatttcttcacatatctcaggcggtaattggggtgttgtaacatttgtttttatatcccaggcagtaaccgggatggtgcatatatgaggaattctaaatatatgccattgcttatgttcatgtttgaatatgttaccctatgtgtcaccccaaaacccatatgttcttagaatatgttgaaaacttgtacatagttatatcctgaagaattgaatgtattgacacccccttgcaaaaaaaagagaatatgttgttattgcgtgattatctgtctattttacatctgctatttgcggagttttggataactttggtttcagaatggcactgaagtctcaagatatcttgaaattgaatatgcattgctattatgtgactgtcctacatgttggttcctggaattctggttaccatttatacatactgtttcagaatggccgctgaagactcaaaagatatcctaaagaagcgtctcccaaagaaaatcagagaagtccctgactgctattttctccctcgtcgatcatggccttctgcactggcaatctacggtgctgtatgtgctgctagctttggtgcagggatgcttcttgaggtttggataaacaaaaagatcaaagaggacagtggcattgtctgggagatggataaatgatgcaatgcatgctttgttgtggtgaatcccgcgttgtcatcatggacacagctagctctgaagatttctggtggaaattgacacaaccttgtttctgtatctggatctattatgcataatggcagaatgatgtcacaaacctttgagcctcattagtcgaataaactcaaattatccaaacagtataagaaactgttgttccggtgggcactgtcgcctatgcactgcggtacatcaaattatcgtgcattcacctgtatgttaagcagaaactttattg

SEQ ID NO: 201849 - DNA, 2264 bp, Zea Mays
gtaccaggcctccattccacgggccaacgtgccacttcccccactcgtcttcgccagaaacccgctggcgctttggtctctgtcgtccaagttcccatctccggccaccaatagttccgacccgtaagcaccaacgccccatttgccactaccctaccgcgcaccggcaaagcgcagcgccaggccgcagcttgcaggggcaggcggcggcgggcagggcaaccgccactgcagccgggatccggcggccagcggcaaccggcggggggcaggcggtcgggacctggtgtcggtctacagccagacagcagcagcagcagcgtgaccctcaaaatcctagaccactaccgtatggtccactgctcctttgctggtgtcgtccactgctcctctgcaacgtcgtttgatctcctgtgcagtctgcacacgcgtgttgaaggagttgattcctggacagcacacgatagcacaatcctctactggttcattcctggactaccggtggtaatctgacctgctatatcgctttgcttattatctatattcatcaaagcatctatttgatcataatgttaaaagcgcgggcaagtttctagtgcttatcatttgccctccggtcaccccgttgtcgcgcgaagccgacgctatttcattccccgacaggaccggggctccgctgccgcctcttcgcccctatatggcggtcccgaggcctcaaatccgtgccctacgtcggggcacgctgcttctcttccttgtcccgctcatctactctgtgtccaggctgcaaccctgggctccagaaaagggtgtgtgcctgccacccccaaccgcgccgaagcggcctgaccatctcgtgctcggccccgccgccggacaggaccgccccgaccgcctacagtgccgaggacttagagctctgaacaagattggcatatcaagtgaagagaactattctggagaacatgtttcttttgctactgtattcacaacctacaattctgtctcagctggagatgacaatgttccatctgattctgtaactgttggaaacagttcttatagcaaaatagaaagatccatggccattctgaacactttcatcagtttcataaaggtatcaatgccaagaagcgacttgatcatattgactgatcctggttcaaaaatttcagtaaatcaagggactgctacactattgccagttgaaggaaactattctcgaggaaatttgatgcttcagagaataaagacatacattgcatttctggagcaaaagcttgtggaatttgataggatggagaggttgaatcattttgttttaactgattccgatatagcagtggttggtgatcttggacatatattcaaaaaatatcctcattttcatctggctgttacttttcgtaataacaaagggcaaccgttgaattctgggtttgttgcggtaaggggaaccagggatggcatcactaacgctgtggaattcttgaaacaagtccttggaacttacagtttaagatatatgaaggcttctcgtatgcttggtgaccaattagcacttgcatgggttgtcaagtctcatctaccatcggctttcggaaaattttctaagaatgaagcatttactggtgaagttaatggaacatctgttctcttcttgccttgtgctgtttataattggaccccgcctgagggtgctggacagtttcatggtgtacccttggatgttaaggttgttcatttcaaaggttccagaaagcgattgatgcttgaggcatggaatttctacagctcaacctctaagctgtctgatatgctatgcctaatcttgagaagtggccggacgaaatatgacttctgaacttttgggttaaaactgacacatgttgatactgttcaaagctgttgtatgttcaagtatagtacaaaaaaatgctgaccatgaggctgtcattgcaagaattcagatcagcataaaaaattgctagtagcattcagtatgtaacaaaaacatgtgagaacccatacgagaaccacgcagggtgaccatcgccttgtgttcttttggtttatccctacctgttaaatatgtaatgtggttccccaccaatgtgcgctatgtaggcaatttcgccgtcagatgtcgtcagcagtattaaatagagctggcgctgtttcaatgtgtcaccggcaaaatttgcagatgtttttttttgctgtcattcatcgcattttcacccattgttgagcaccgttttgag

SEQ ID NO: 201850 - DNA, 2230 bp, Zea Mays
gggccaacgtgccacttcccccactcgtcttcgccagaaacccgctggcgctttggtctctgtcgtccaagttcccatctccggccaccaatagttccgacccgtaagcaccaacgccccatttgccactaccctaccgcgcaccggcaaagcgcagcgccaggccgcagcttgcaggggcaggcggcggcgggcagggcaaccgccactgcagccgggatccggcggccagcggcaaccggcggggggcaggcggtcgggacctggtgtcggtctacagccagacagcagcagcagcagcgtgacaccactaccgtatggtccactgctcctttgctggtgtcgtccactgctcctctgcaacgtcgtttgatctcctgtgcagtctgcacacgcgtgttgaaggagttgattcctggacagcacacgatagcacaatcctctactggttcattcctggactaccggtggtaatctgacctgctatatcgctttgcttattatctatattcatcaaagcatctatttgatcataatgttaaaagcgcgggcaagtttctagtgcttatcatttgccctccggtcaccccgttgtcgcgcgaagccgacgctatttcattccccgacaggaccggggctccgctgccgcctcttcgcccctatatggcggtcccgaggcctcaaatccgtgccctacgtcggggcacgctgcttctcttccttgtcccgctcatctactctgtgtccaggctgcaaccctgggctccagaaaagggtgtgtgcctgccacccccaaccgcgccgaagcggcctgaccatctcgtgctcggccccgccgccggacaggaccgccccgaccgcctacagtgccgaggacttagagctctgaacaagattggcatatcaagtgaagagaactattctggagaacatgtttcttttgctactgtattcacaacctacaattctgtctcagctggagatgacaatgttccatctgattctgtaactgttggaaacagttcttatagcaaaatagaaagatccatggccattctgaacactttcatcagtttcataaaggtatcaatgccaagaagcgacttgatcatattgactgatcctggttcaaaaatttcagtaaatcaagggactgctacactattgccagttgaaggaaactattctcgaggaaatttgatgcttcagagaataaagacatacattgcatttctggagcaaaagcttgtggaatttgataggatggagaggttgaatcattttgttttaactgattccgatatagcagtggttggtgatcttggacatatattcaaaaaatatcctcattttcatctggctgttacttttcgtaataacaaagggcaaccgttgaattctgggtttgttgcggtaaggggaaccagggatggcatcactaacgctgtggaattcttgaaacaagtccttggaacttacagtttaagatatatgaaggcttctcgtatgcttggtgaccaattagcacttgcatgggttgtcaagtctcatctaccatcggctttcggaaaattttctaagaatgaagcatttactggtgaagttaatggaacatctgttctcttcttgccttgtgctgtttataattggaccccgcctgagggtgctggacagtttcatggtgtacccttggatgttaaggttgttcatttcaaaggttccagaaagcgattgatgcttgaggcatggaatttctacagctcaacctctaagctgtctgatatgctatgcctaatcttgagaagtggccggacgaaatatgacttctgaacttttgggttaaaactgacacatgttgatactgttcaaagctgttgtatgttcaagtatagtacaaaaaaatgctgaccatgaggctgtcattgcaagaattcagatcagcataaaaaattgctagtagcattcagtatgtaacaaaaacatgtgagaacccatacgagaaccacgcagggtgaccatcgccttgtgttcttttggtttatccctacctgttaaatatgtaatgtggttccccaccaatgtgcgctatgtaggcaatttcgccgtcagatgtcgtcagcagtattaaatagagctggcgctgtttcaatgtgtcaccggcaaaatttgcagatgtttttttttgctgtcattcatcgcattttcacccattgttgagcaccgttttgag

SEQ ID NO: 201851 - DNA, 2276 bp, Zea Mays
gtctgacatgttttaaaccatatttgtactaatgatttctttaattacactcctaaaatttaagactaaactttagtctatagaaatcctatttaaaagatctattttagtcttcccgtttagtattttcaaaacaaaaaatgactcactaaaacttagaggttggaaccaaacaccacggagggtacgaatttctacttcgagggtacgaatttctacttcgtgaagtgcgtgaagtgtatttatctacctgtccccaccggagggtacgaatttactctgtcttgttcagctgtcctttttcttcccgtttaaacacccccagatttctctatatcacgacgctacccctccacgtctccgcttctcgtgttcttgttcgtctccgcctcaggcaaactccacacggacacgaggtgacgtgaggcgtggggacgcgcgtagctgattggttcgaggaggcggggatggacccggacttctcgccggcgagtgggggcccgagctttgagttcgccttcaactcggtcaacttctctgaccgggtgttgcggatcgagatcgtcgctggggatgacgccctcggggccaagggcgccaccggcgaggggtgctcatctcttgccgactgggcgtgccaccgcaagcgacgacgggaggagctccgacgcgacaaagaatctagaaaatacatgccagatccagcaaactgcaaagttgaagctgaagaatgtgatgcctacgaggaaggcaatgagcctgtagctatgatagaagaatctccgcctgatattgaggcagatggtgaggatggaaaaagcagcgactcatactgtagtatggagtgtactcaggttttgagagttaagtctatgtacatcagctctgcaattctagctgcaaagagccctttcttttacaagcttttctcaaatggaatgaaagaatccgaccagaggcatgcaactcttaggataactgcttcagaggaaaatgcgcttatggagcttctaagctttatgtatagcggcaagttgacgacaaaccagccaactgtcctgctggatatattgatgatcgctgacaaatttgagttcagccattgacggacaccgccaaggaattccttgccaacaaatacaaggatttgactaagttccaagatgaagcaatgaacattcctcttgctggaattgaagccatcctatggagcaatgaccttcaggtcgcgtcggaggatgctatctacgacttcatgataaagtgggcacgtgctcaatacccaaaattggaggaaagacgtgagatcttgggcacacgcttgctgccccttgttcggttctgccatatgacctgcaggaagttgcggaaggttattgcctgcagtgatctggatcacgagcaggcgacgaaatgtgtcacagaggcacttctctacaaagctgatgcaccacataggcagcgtgcccttgcagcagacgtgatgacatgtaggaagtatgctgagcgagcttacaaatatcgcccgcttaaggttgtagagtttgataggccgtaccggcagtgcatagcatacttggacctgaagcgagaggagtgcagccgacttttcccatctgggcggatatactcgcaagctttccatctagctggacagggcttcttcctctcagcacactgtaacgtggaccagcaaagtgcgttctattgttttggtctcttcctagggatgcaagagaaagggtcgacaagtgttaccgtggattatgagttcgctgcaaggacaaggccgtcaggcgagtttgtcagcaaatataagggctactatactttcactggcggtaaggctgttgggtaccggaatctctttgcgatcccgtggccgttattcatggctgatgacagtctcttctttatcgacggggtattgcatctcagagctgagctgaccataaaacaaccctagatgaggccgtgtttgtgccgcgcgcgtgtccaaatccatgcaatggtgttctgcagtgtagaatatggaaatcttgtgtgctgttttgttttgaaaacgacaactcaattctctcttgttcagttgtttgtacacctgaggaggatcatgtcatgttttgtactctcactaaactgtgataagtgatttagctaatcaaactttaagttcaccagcaacaaactaccacctcctatccattgcatcacttattggtttgtgcatgtattataaatatatactaatttttttaaaataaaaaacagtgttg

SEQ ID NO: 201852 - DNA, 1683 bp, Zea Mays
cccgccgctaccggcttagtcccagcctcgccccctctccgcagagcgcatccatctccctacctcgagcccaaatcgatgtccagacgccaacccgtccccgccgccgctgcgaagctggaggaaggggagcatgagctgagcatcgtcgacgcgctcctcgaggtgttgtcgggccgctgcgagctgcgacggacctccttcggctctcggcgcctgtaccggcgctttagcttcacctccatgggggcgccgccacagggaagacgcgtgcgctcctcctcgctctccgccaagtgataaattttctcaaatttgtgaggttttgaatgccttgtccatttgtgccttttgatattgtcactcatgtctttctaatgatgggcgatgttcactgattgctagacttctccaggttttcaaatgtatctatagatttgttttttccctgatcgttagagtattctaggtaacaactttgctcgaatttatgaggttttgaatgccatgtttattttgccctttgatattttcgcttctgtatttctgatgacgggactaatgtaggttgtgaatatggtggaatttcttgattaatgtcttggcgtggggattcagttgcctgggtaccagatatagcgatgagcgaaatttaaggccccagagaattgatttttcaggttatatctgatttgactcaagaattcactagcagatgggttgctaaaactgacagaacaagtaacttctgacaatcggagtattgcatctttatctatatgtatgcacatttggttgaaattctatgcagtgtcaacaggtacacactttacaagattacattttcattacaagatgcttgattgcagccaatattttcatttctttggtgcttgtgtagaagtatcgccttgcaaagtatataccagactctcatgctaaaggttttaaggacgacaagaaagtttgagtgattccctctcgaacatggattatgtaccatattctgaaatgtgtttagaggattgcaaatcaatgaggcactaaagatgcaactggaagttcagaagcggctacacgagcaactggaggtatttgaaggtgtttgagataaataatgatgctaaaatgaaaaggacaatgcgacgtcccctaccatctggtcgtgttagttctacacatgctgccatgtgggctacaagtgcaggaattgcaggaacaactttgctggcctctcgaaggttagcgctatgtcgtggtgctccactttaaagatgtgcatgccacgtctacacttcccgtctctgattatagattaggtctttactccctgatgtttagccagtgcgtgctgttacccactaggtctagccgtagtcagtgactgcacaaccacaacccgctcttgtgtattttgcgtttgcggatcgcatcgcatgttattttggtccttctatattcatgctacaaggctgcaaactgtggtgctcatacatttatgtaaccagtaacctataacgactttgatgtatattatattttgtaacagtgaacttgactatcgtagatatgtagcttgctggaacgattttttagtgtacgactgtgctacaatgactgtagcgcccggtagggcgctgccctattctagtagaaataaaggaggaagtcccttgatatata

SEQ ID NO: 201853 - DNA, 2063 bp, Zea Mays
atcccgccgctaccggcttagtcccagcctcgccccctctccgcagagcgcatccatctccctacctcgagcccaaatcgatgtccagacgccaacccgtccccgccgccgctgcgaagctggaggaaggggagcatgagctgagcatcgtcgacgcgctcctcgaggtgttgtcgggccgctgcgagctgcgacggacctccttcggctctcggcgcctgtaccggcgctttagcttcacctccatgggggcgccgccacagggaagacgcgtgcgctcctcctcgctctccgccaagtgataaattttctcaaatttgttttcaaatgtatctatagatttgttttttccctgatcgttagagtattctaggttgtgaatatggtggaatttcttgattaatgtcttggcgtggggattcagttgcctgggtaccagatatagcgatgagcgaaatttaaggccccagagaattgatttttcaggttatatctgatttgactcaaggtagggtatgtgtccacttctttttcccctgaactaaaattcatgtttacatttaggttttagttacaaataatgatggatatttgttgctcggaatttctataaaagaattagaaacagtgcatgtttttttatctagatcacatacatgcttacagcttatatacccattgtttgcattgtaaaacaagaatatgtaagccatatagactcgtgatgagattcactcgctattgtctgttcttcagatttcttcatggcttttcagtcctagacacagcaacccctatacttttcttgaactaagtttggaaggtattctacaaaagtagtaagaggattaggttccttaataccttcagattcatgcaccgcactcatatttcatgttcgaaagtggaaactgctcctttggctggtcttgtaacatattctgacaaagaaatgttcctacattgtatgaggttatatatgctaggctgctagcaacctttatgttaaccctttcatacttctgttatagtattcattaggacaacagtcactcaaaatcattacttcattttcatttatcatttgttactctgatctcatatgggctaccttttttggaaataatgctggtgagtttcaaacctcattggaatctattcagaattcactagcagatgggttgctaaaactgacagaacaagtaacttctgacaatcggagtattgcatctttatctatatgtatgcacatttggttgaaattctatgcagtgtcaacagaagtatcgccttgcaaagtatataccagactctcatgctaaaggttttaaggacgacaagaaagtttgagtgattccctctcgaacatggattatgtaccatattctgaaatgtgtttagaggattgcaaatcaatgaggcactaaagatgcaactggaagttcagaagcggctacacgagcaactggaggtatttgaaggtgtttgagataaataatgatgctaaaatgaaaaggacaatgcgacgtcccctaccatctggtcgtgttagttctacacatgctgccatgtgggctacaagtgcaggaattgcaggaacaactttgctggcctctcgaaggttagcgctatgtcgtggtgctccactttaaagatgtgcatgccacgtctacacttcccgtctctgattatagattaggtctttactccctgatgtttagccagtgcgtgctgttacccactaggtctagccgtagtcagtgactgcacaaccacaacccgctcttgtgtattttgcgtttgcggatcgcatcgcatgttattttggtccttctatattcatgctacaaggctgcaaactgtggtgctcatacatttatgtaaccagtaacctataacgactttgatgtatattatattttgtaacagtgaacttgactatcgtagatatgtagcttgctggaacgattttttagtgtacgactgtgctacaatgactgtagcgcccggtagggcgctgccctattctagtagaaataaaggaggaagtcccttgatatata

SEQ ID NO: 201854 - DNA, 2139 bp, Zea Mays
cccatcccgccgctaccggcttagtcccagcctcgccccctctccgcagagcgcatccatctccctacctcgagcccaaatcgatgtccagacgccaacccgtccccgccgccgctgcgaagctggaggaaggggagcatgagctgagcatcgtcgacgcgctcctcgaggtgttgtcgggccgctgcgagctgcgacggacctccttcggctctcggcgcctgtaccggcgctttagcttcacctccatgggggcgccgccacagggaagacgcgtgcgctcctcctcgctctccgccaagtgataaattttctcaaatttgttgtgaatatggtggaatttcttgattaatgtcttggcgtggggattcagttgcctgggtaccagatatagcgatgagcgaaatttaaggtgtgaatcccaggtagcagattcacaggaaacttttggggccttgatattgattccctaatgtttgttgggattgctttcatcggttttttctttgttggatcggtcactaccttggcgtatttaggccccagagaattgatttttcaggttatatctgatttgactcaaggtagggtatgtgtccacttctttttcccctgaactaaaattcatgtttacatttaggttttagttacaaataatgatggatatttgttgctcggaatttctataaaagaattagaaacagtgcatgtttttttatctagatcacatacatgcttacagcttatatacccattgtttgcattgtaaaacaagaatatgtaagccatatagactcgtgatgagattcactcgctattgtctgttcttcagatttcttcatggcttttcagtcctagacacagcaacccctatacttttcttgaactaagtttggaaggtattctacaaaagtagtaagaggattaggttccttaataccttcagattcatgcaccgcactcatatttcatgttcgaaagtggaaactgctcctttggctggtcttgtaacatattctgacaaagaaatgttcctacattgtatgaggttatatatgctaggctgctagcaacctttatgttaaccctttcatacttctgttatagtattcattaggacaacagtcactcaaaatcattacttcattttcatttatcatttgttactctgatctcatatgggctaccttttttggaaataatgctggtgagtttcaaacctcattggaatctattcagaattcactagcagatgggttgctaaaactgacagaacaagtaacttctgacaatcggagtattgcatctttatctatatgtatgcacatttggttgaaattctatgcagtgtcaacagaagtatcgccttgcaaagtatataccagactctcatgctaaaggttttaaggacgacaagaaagtttgagtgattccctctcgaacatggattatgtaccatattctgaaatgtgtttagaggattgcaaatcaatgaggcactaaagatgcaactggaagttcagaagcggctacacgagcaactggaggtatttgaaggtgtttgagataaataatgatgctaaaatgaaaaggacaatgcgacgtcccctaccatctggtcgtgttagttctacacatgctgccatgtgggctacaagtgcaggaattgcaggaacaactttgctggcctctcgaaggttagcgctatgtcgtggtgctccactttaaagatgtgcatgccacgtctacacttcccgtctctgattatagattaggtctttactccctgatgtttagccagtgcgtgctgttacccactaggtctagccgtagtcagtgactgcacaaccacaacccgctcttgtgtattttgcgtttgcggatcgcatcgcatgttattttggtccttctatattcatgctacaaggctgcaaactgtggtgctcatacatttatgtaaccagtaacctataacgactttgatgtatattatattttgtaacagtgaacttgactatcgtagatatgtagcttgctggaacgattttttagtgtacgactgtgctacaatgactgtagcgcccggtagggcgctgccctattctagtagaaataaaggaggaagtcccttgatatata

SEQ ID NO: 201855 - DNA, 932 bp, Zea Mays
cggaagggacatctgactctgtcacagtttaacaagtgcatgtcctgcagcatgggaaaccagaagagcgttctacaataattacacaactcgctggacagatagtgaaaatgagccagcagaaatttgcttctaatgttgttgaaaagtgtcttacttttggtaatcctgagcaacgtcagattctgatcactgaaatgcttggcacaactgatgagaatgagccgttacaggcaatgatgaaagaccagttcgcaaactatgtggtgcagaaggttctggagatatgtgatgaccagaaccgtgaattgattctttcccgtatcaaggtccacttgaatgcactgaaaagatacacctatgggaagcatatcgtggcacgtgttgagaagcttattgctgcaggagaacggcgcattggtgccccatcctcttgctgagatggcaataaagctatatacaggtcgcagaataacacctgtacagacagacagggatagcgaggcctagctttttaccattaccagtagtcggtaatattgagcgacggagaggttaaaaaaggctcccaaatcctttgatgtaaataaaggatagccgctggaaataaataaaaagaatgagaaaagatgaagagattttgcttgtccttgagggaagagttgtatatttgtgtggtttattttcccctcttgaagcagatggataaatgttttaggatcatagatgatgggaagcaagggcagctgtagattatcctttctttttttccttgggtttcattagtcaatgtataatgtattaatgttcatggtgatgctaatctctgtaaagcctgccttgagtttactgacattttcctgaaatgaaattaaatgcatgtttcctggtacttgtgaaatgcctgcgtctaggcagctcatcaaatatca

SEQ ID NO: 201856 - DNA, 2174 bp, Zea Mays
gcaaggagtgtcatcacaacaaacaactgaaggtactggtgtttttggtcgattcagattcttgaaccaaagagtttcatctcagagtgaagattcattatcatgtcatagaattgatctcagaacttcaacaattaagattgatgcagatgaaaatgatttaagattttgcttcagaataatctcacctgttaaggcatacacattacaggcagaatcaggggctgatcaaaaggactggatccagaaaattactggagttatcgcatcgctactaaattcaccattcccacagcagttgtcatatggtaatgtagcagcagagagtaacagatccacaagttctgttgattctttgtctattgaagataacaagagttcagagggacatgatgatatattcaaccttctgaggaatatccctggaaatgacagttgtgcagaatgtcgttcccctgatcctgattgggcatctctaaacttgggtattctgatttgcattgagtgctctggggctcataggaatcttggagtgcacatttcaaaggttcgatccttgagactagatgtgaaagtctgggagccagtaattatggatctcttccatgcactaggaaatgattacgctaattccatttgggaagccctgcttccaaaagaagatcaaggaatgaacgactcaaatggagctattctttttattgaaaagcctaaacctagtgatgctttctcaataaaggagagtatgtggacaaactgctttttgccagagatcccgatcagaataccattaatattttggaagccataaggaaaaatgatgtgagagcagcatatcgaattcttgcaatagctgaagtcagtgctaacatgacatatgatgctttgagcaaagatgtccatcatgttcagccagtgacagacaagatgttacttgatccgatttcttgtgagataattcaggactctggaaaaccagaaggctgtctacaaggttgttctttattgcactttgcatgcgaatacggttatcctataatggtggagcttcttctactttttggcgcggatattaatatgcaggatttccatggccgaacaccattgcatcattgtgtccaaaagaaaaatgatgagctcaccaagcatctgctgaagaggggtgcgagaacgacaattaaagatggcggaggtctgactgctctggagagaagaatggaacttggagcgataactgatgaagacttattcatactatttgtgaggtgatgttgcaaacttgcaatacaggcctttggcaactagctgtttgtacctgatagcattgtattgtacccacctaatttagcttctggaaagaacatgatttctacacctgaagacaaatgccttttactgtaccacgatataacttatgggactgctgcgcttggctgtgttttaaaattccactggtcgacatgaccacatcgttggtttgtacaacaattataggcaatcacagtattcgattctttgagtatggttattgaggtatgagtttctgatgtcaagcacgtaaggaaagaacacacgataatcgtgcatgcatattaccgttgggcaattttctttttttattgcaattttacaactgtactgcatatggtcgacctgtaacaattattgaatttatgggtacgtgtatcctgcaagatatgaatcaacttgtaacagcatctaagtatcgcttcaataaaaaagtgcaaatgcagcatagttttcccgtgaatttgttattcagtatactagcgtggcaaactgattaaggatgctaattcaggctctagggtacctagagatcaagcattgacatgatcggtacgtacataaggagtttgcaagccacatggtctacctaaataagctttgagaaatttgaccaaacttaacaaatggttaaaatttattggacaagcaacacaaatctaaatcaagttagtacttcatactaatatgaggcactaacttgaaaaatcagaaaaacaaatggaagtaggaatcatttttgtagtgttgtcaccaattactaaaaaggatgggattgaaagctctatatgttgttttggtagttgagacaattaggtgattaactattttatgagtgaaatgaatgagataggtttggagtccac

SEQ ID NO: 201857 - DNA, 2155 bp, Zea Mays
gtcatcacaacaaacaactgaaggtactggtgtttttggtcgattcagattcttgaaccaaagagtttcatctcagagtgaagattcattatcatgtcatagaattgatctcagaacttcaacaattaagattgatgcagatgaaaatgatttaagattttgcttcagaataatctcacctgttaaggcatacacattacaggcagaatcaggggctgatcaaaaggactggatccagaaaattactggagttatcgcatcgctactaaattcaccattcccacagcagttgtcatatggtaatgtagcagcagagagtaacagatccacaagttctgttgattctttgtctattgaagataacaagagttcagagggacatgatgatatattcaaccttctgaggaatatccctggaaatgacagttgtgcagaatgtcgttcccctgatcctgattgggcatctctaaacttgggtattctgatttgcattgagtgctctggggctcataggaatcttggagtgcacatttcaaaggttcgatccttgagactagatgtgaaagtctgggagccagtaattatggatctcttccatgcactaggaaatgattacgctaattccatttgggaagccctgcttccaaaagaagatcaaggaatgaacgactcaaatggagctattctttttattgaaaagcctaaacctagtgatgctttctcaataaaggagaggtacatacaaacgaagagatcccgatcagaataccattaatattttggaagccataaggaaaaatgatgtgagagcagcatatcgaattcttgcaatagctgaagtcagtgctaacatgacatatgatgctttgagcaaagatgtccatcatgttcagccagtgacagacaagatgttacttgatccgatttcttgtgagataattcaggactctggaaaaccagaaggctgtctacaaggttgttctttattgcactttgcatgcgaatacggttatcctataatggtggagcttcttctactttttggcgcggatattaatatgcaggatttccatggccgaacaccattgcatcattgtgtccaaaagaaaaatgatgagctcaccaagcatctgctgaagaggggtgcgagaacgacaattaaagatggcggaggtctgactgctctggagagaagaatggaacttggagcgataactgatgaagacttattcatactatttgtgaggtgatgttgcaaacttgcaatacaggcctttggcaactagctgtttgtacctgatagcattgtattgtacccacctaatttagcttctggaaagaacatgatttctacacctgaagacaaatgccttttactgtaccacgatataacttatgggactgctgcgcttggctgtgttttaaaattccactggtcgacatgaccacatcgttggtttgtacaacaattataggcaatcacagtattcgattctttgagtatggttattgaggtatgagtttctgatgtcaagcacgtaaggaaagaacacacgataatcgtgcatgcatattaccgttgggcaattttctttttttattgcaattttacaactgtactgcatatggtcgacctgtaacaattattgaatttatgggtacgtgtatcctgcaagatatgaatcaacttgtaacagcatctaagtatcgcttcaataaaaaagtgcaaatgcagcatagttttcccgtgaatttgttattcagtatactagcgtggcaaactgattaaggatgctaattcaggctctagggtacctagagatcaagcattgacatgatcggtacgtacataaggagtttgcaagccacatggtctacctaaataagctttgagaaatttgaccaaacttaacaaatggttaaaatttattggacaagcaacacaaatctaaatcaagttagtacttcatactaatatgaggcactaacttgaaaaatcagaaaaacaaatggaagtaggaatcatttttgtagtgttgtcaccaattactaaaaaggatgggattgaaagctctatatgttgttttggtagttgagacaattaggtgattaactattttatgagtgaaatgaatgagataggtttggagtccac

SEQ ID NO: 201858 - DNA, 635 bp, Zea Mays
ttccattcttcttctccgcttctgctaggcgtgtgtgcccgttcacggacaagaagacgaaccgggcgaacaaggtgtcgttttccaaccacaagacgaagaagcagcagttcgtgaacctgcagtacaagaagctgtggtgggaggccggcaagcgcttcgtcaagctgcgcctttccaccaaggccctcaagaccatcgagaagcacggcctcgacgccgtcgcgcgcaaggccggcatcgacctcaacaagaagtgagcccatccgatgagcagccaaactagtgtggggtggcactagcttagcattcacattcacggggtcgtctcgtctgtctgtctgcctgcctacctcctgctgttctttcgcaatcaaatcatatcattatatttcctccccgttttgatttgtgtaccataccaatcagtgtaggcagatcgaggttgcacatatacgtttttggtctcgtgttgggtcctcctctgaatcgatcgtgtctccatttcacagtcgtgatcaatgccagaaagttaagtaacctggtcggctgatcctccctctcacgaattcgctgctgatgaagtatagattcaattgaaatttaaacgaattgttcctgcccaagagaagaga

SEQ ID NO: 201859 - DNA, 781 bp, Zea Mays
cccgcatgcacagggaacccgttcccaacttcaaccccttgagtctgtgcccggccgccatattaaaccctgcgccaacctccggtttcatccacctgtccttcgccctagtagttacgacccatgagctcgcctttggatttgggaacgccgccggaggccgccatagccgtctgccgccgccgtccccgttttaacacccgtggtgcgctcccggacagcccgacgggggtgtggatcgtgtgtcggggggaatcgggtgcgtggacccgcggtgtgaggggaattgctcgccgtcccttacctcccgccgtaaagccgccccgctccgtgggcaagttcatcatcaagccaatcgtcagccctccgtgtggagcgaaaacatctctaattcccagggattttaactccgagcacatcaggatcaagcaaggacccgtgcgcatccaaaaagaaactcctaagaaaccctcccaagactgaatgctaccttctaccatcagcagcctttgaagttctaaagtgtttattttatatatgagcaagtgattaaggactcaggtgttcagcaggtagaagttgttgagcaggagctcattgaaggcaagttgtgcccttgaccacttttatttatccaataatgttctctataatcattttggcatgcataggcttaattttgatgggacccaataggtcaccctagtttggtcatctttacaccttgtttatccctgaacttttgggtggtctttgttattgctatatatggttttgggtg

SEQ ID NO: 201860 - DNA, 666 bp, Zea Mays
cccgcatgcacagggaacccgttcccaacttcaaccccttgagtctgtgcccggccgccatattaaaccctgcgccaacctccggtttcatccacctgtccttcgccctagtagttacgacccatgagctcgcctttggatttgggaacgccgccggaggccgccatagccgtctgccgccgccgtccccgttttaacacccgtggtgcgctcccggacagcccgacgggggtgtggatcgtgtgtcggggggaatcgggtgcgtggacccgcggtgtgaggggaattgctcgccgtcccttacctcccgccgtaaagccgccccgctccgtgggcaagttcatcatcaagccaatcgtcagccctccgtgtggagcgaaaacatctctaattcccagggattttaactccgagcacatcagatgagcaagtgattaaggactcaggtgttcagcaggtagaagttgttgagcaggagctcattgaaggcaagttgtgcccttgaccacttttatttatccaataatgttctctataatcattttggcatgcataggcttaattttgatgggacccaataggtcaccctagtttggtcatctttacaccttgtttatccctgaacttttgggtggtctttgttattgctatatatggttttgggtg

SEQ ID NO: 201861 - DNA, 2415 bp, Zea Mays
gcgccgcctgcacttcctcctcctcctcttcctccatgcaacctcctccgcagccgcgcccgcggccgctagcggcggcgtcgggtgcgaccggcagtgcggcaacaccacagtgccgtaccctttcggcttctccggcgcctgtcccatccgcctggactgcaacgtcaccacgccgcagctcgtcacgaacagctccgcggcgtcgccctacccgatcctctcgttcgacgccaccgcctccactttcctcgtctcgctgccgccctcgtgcaaccgcaccgtcggagaggccagggcggcgctcgacggctcccgctacggcgtcacgagccacaccgggctcttcctggcccgtggctgcctcgggaaagcggcggccaccggcaactgctccgtgtccgcgaccatcatgaaaaccgcgctccgcacggcggggtgcggcgacaaaggcgccatctggacgtgcgtggccgcgccgctgccgccgccgcagggcctcaacgccacggctgctgctgcggcgtgggacggggaggcgggccagttcctgccgtggaagaaggtggaggacgctgggtgcgaggacgcactcacgtccgcggtgtccgcgttatcgccggaggggctgccgtcggtggatttcggcgccgcggagctggggtggtggctcgacgggacgtgcgccaacgctaccgcgggcggccagtgcgcgcggaacgcgacatgccaggacatcgagacgtcgagaggcacgaggggccaccgctgcgcgtgcgtggtcgccgggatgtccggtgacggatacgccgccggcgatggatgctactacgtcgccgagcgttccgcgaagaagattgtcctcgtagttgcagcaggtgttgcggcgagcgtggcggcggccaccggcgcgcttctgctgtgctggctgcagtgccggcggcgcaaggccgggcgctcggcgtcggagcggctggcggcgatgcggctgctgtcggaggcggcgacgtcgagcggcgtgccggtgtactcgtacggcgagatcgcgcgcgcgaccaactccttctcgcacacacaccgcctgggcacgggcgcgtacggcaccgtgtacgtgggcaagctcccgggcacgggcagcgcgccggcgctggtggccatcaagcgcctgcgccgacgccaccaccacgacgaggacgaggacgcggctgcggaggcggcgctgctgctgaacgagatcaagctcatctcctccgtgagccacccgaacctggtccgcctcctcggctgctgcctcgacggcggcgagcaggtgctcgtctacgagtacgtgcccaacggcacgctctcccagcacctccactccgcgggcgccagcaccgggggccgcggcgcgttgacgtggcgcgcgcggctcggcgtggcggtggagacggcgggcgccatcgcgcacctgcacggcatgcggccgcccatcttccaccgcgacgtcaagtccagcaacatcttgctcgacgccgcgctgcgccccaagctggccgacttcggcctgtcccgcgccgtggaccgcctggaggccgcgcgctcgcacgtgtccaccgcgccgcagggcacacccgggtacgtggacccggagtaccaccagaacttccacctctccgacaagagcgacgtgtacagcttcggcgtcgtgctgctagagctcgtcaccgctatgaaggtcgtcgacttcgaccgcccgcccgccgaggtcaacctcgcctccctcgcgctcgaccgcatcggcaagggccaggtcgccgagatcgtcgacccggccctccttggcgccggcgaggactgggtcatgggctccgtccgccacgtcagcgagctagccttccggtgcctggcgttccagaaggacgtccggccgtccatgcgcgaggtggccgccgagctgcagcggatccggtccgccgccccggacggcgccgatcccgaggagcccgcggggtctaggctccggcctgtgagtatgatggacatccagatcgacgtgagcttgggcggcccggacacggcggcaaagaaggcggcttcgcccgtgtcggtgcaggaggtgtgggtcagcgaccggagctcgccgtccaccaacggctccatgccgcgctttgctgcgtagcttaagctagctagctcttgtacactgatgagaaaaaccaatgtaatttagcaaaaaaaaagaacattttttgtctagtaaaattttctctataaaaaaaccactgtacaagatgccatccattgttgtaacggaaacgtaatttactgtatagcattaccttaaattcccaccggcattagcacgaaaactgcccatggcattgctaacagggtcacgataaggcatcatttgtttctttcgtcgtaatttac

SEQ ID NO: 201862 - DNA, 1915 bp, Zea Mays
gaagctgccacggccgtcgtcgatcctcctcatttcggcactgggccccactcgtcactcaccctttcaggcctccacggcacctcccgacagggactcccctcctactcctgctctcccagcctgcctttacttctcccgaatgctcgaggcctgcaaagctccagcacatccaatcgcacgacactccctgctgctctctgctgagaggtgctagatctcggactcgccgttgatttgattccaagttaaagacagcgagcaatccatagattgaccggtggagagcgagagaaagcgagagagagaagggaattggttggtaggtggagaccggagggagagctcagctcaggagattgatgcttgcatggtgatgcgggcgcgggcgatggggctgagcagcatccggcgggaggtgctggtctccgccgtcttcacggcgctcctcgtggcctccatcctcctcctcccctcgctcctcctaacgggcgctgggcccatcaggtggccgtccctgtccccgtcgaaggatgccggcatcggcgaggaggaggagcagcaggcgcggtaccccgtgacgttcgcgtacctgatctcggcgtcgacgggggacgcgtcccgcgccgcgcggctgctggcggcgctgtaccacccgggcaacgtgtggatcgtgggcaggcccaacctggtaacctaccgtggccccaccatgctgaccaccacgctgcacgccgtcgccgtgctgctccgcctccgccgccgctgggactggttcatcaacctcagcgcctccgactacccgctcgtcacccaggacgatttgatggaggcgttcgccgggctgcccagggacctcaacttcatccagcacacgagccacctgggctggaagataagcgggcgcggccggtgatcctggacacggcgctgtacgaggacgggagggcggagctgatccgcccggtgaacatctccaccaacctcaggaggctgcccacggcattcaagctcttcacagggtcggcgtggacgatgctgtcgcgggcgttcgcggagtacgtgacgatggggtgggacgacaacctgccgcggacgctgctgctgtaccacgccaacatcgtctcctcgcccgagttctacttccagacggtggcctgcaactcgcgccggttccgcaacgccacggtcaaccacgacctgcacttcatccgctgggacaccccgcccaagcagcacccgctctacctcaccgccagggactaccgccggatgctgctcagcggggccgccttcgcgcgcaagttcagggacggcgaccccgtgctggaccgcatcgacagggacatcctccgccgccgggaccccgccgcccacttcgcctacggcggctggtgctccgaggccggcgaccaaaacggcggcgccgcgctctgctccaacccgcaggagcccgggaggcgcggggccgtcaagcccggcgccgggtccaggcggctcaaggccatgctcaggaagacgctgtcgccgaggaatttcaggaggcagcagtgtaggtaggggaactgttctgttatgttctgatcaaacaaacaggtcgttgactcaattttgtatgtatagaaaaggcagatctgaaacgcatcaaagcggcccaaagccaattttgttcagttgattcgcacaagtctgaattgaattgtagtagggagatactcctggtggttgatcatctcatacacggaataataatggaaggggcattatgcaaactgtttagttatatggtactaaactgtttagtaatacatagatgctcgtcaatttgttggtgacaaacagcaaagccaatgaggaaaacatttgatttatcacaggaaatagcgaaacgaatagtgcgacctttcaatcgagt

SEQ ID NO: 201863 - DNA, 1907 bp, Zea Mays
gatatgtggatgtggttgttgtctctccgttttcagaacacgtctcgtttgcacgagggtgaagctgccacggccgtcgtcgatcctcctcatttcggcactgggccccactcgtcactcaccctttcaggcctccacggcacctcccgacagggactcccctcctactcctgctctcccagcctgcctttacttctcccgaatgctcgaggcctgcaaagctccagcacatccaatcgcacgacactccctgctgctctctgctgagaggtgctagatctcggactcgccgttgatttgattccaagttaaagacagcgagcaatccatagattgaccggtggagagcgagagaaagcgagagagagaagggaattggttggtaggtggagaccggagggagagctcagctcaggagattgatgcttgcatggtgatgcgggcgcgggcgatggggctgagcagcatccggcgggaggtggccgtccctgtccccgtcgaaggatgccggcatcggcgaggaggaggagcagcaggcgcggtaccccgtgacgttcgcgtacctgatctcggcgtcgacgggggacgcgtcccgcgccgcgcggctgctggcggcgctgtaccacccgggcaacgtgtggatcgtgggcaggcccaacctggtaacctaccgtggccccaccatgctgaccaccacgctgcacgccgtcgccgtgctgctccgcctccgccgccgctgggactggttcatcaacctcagcgcctccgactacccgctcgtcacccaggacgatttgatggaggcgttcgccgggctgcccagggacctcaacttcatccagcacacgagccacctgggctggaagattagagctcgatctgtagaaagaagcgggcgcggccggtgatcctggacacggcgctgtacgaggacgggagggcggagctgatccgcccggtgaacatctccaccaacctcaggaggctgcccacggcattcaagctcttcacagggtcggcgtggacgatgctgtcgcgggcgttcgcggagtacgtgacgatggggtgggacgacaacctgccgcggacgctgctgctgtaccacgccaacatcgtctcctcgcccgagttctacttccagacggtggcctgcaactcgcgccggttccgcaacgccacggtcaaccacgacctgcacttcatccgctgggacaccccgcccaagcagcacccgctctacctcaccgccagggactaccgccggatgctgctcagcggggccgccttcgcgcgcaagttcagggacggcgaccccgtgctggaccgcatcgacagggacatcctccgccgccgggaccccgccgcccacttcgcctacggcggctggtgctccgaggccggcgaccaaaacggcggcgccgcgctctgctccaacccgcaggagcccgggaggcgcggggccgtcaagcccggcgccgggtccaggcggctcaaggccatgctcaggaagacgctgtcgccgaggaatttcaggaggcagcagtgtaggtaggggaactgttctgttatgttctgatcaaacaaacaggtcgttgactcaattttgtatgtatagaaaaggcagatctgaaacgcatcaaagcggcccaaagccaattttgttcagttgattcgcacaagtctgaattgaattgtagtagggagatactcctggtggttgatcatctcatacacggaataataatggaaggggcattatgcaaactgtttagttatatggtactaaactgtttagtaatacatagatgctcgtcaatttgttggtgacaaacagcaaagccaatgaggaaaacatttgatttatcacaggaaatagcgaaacgaatagtgcgacctttcaatcgagt

SEQ ID NO: 201864 - DNA, 903 bp, Zea Mays
ctacttcccctagtccccacgagtaccccacccaccaccttcctctgctgtatgttcagtgcctgcctggtttctgggtttctccccttccctcctcgacctctcttccagcttccaacgcagctcatcaccagacaccactacttccccagttcccctcaccgtccctgcgctccatcgtctttggtgtccatagctttaaatacgaccacgaagccggtgcggcgactcggcgatctctccatcactgctgcggtgctgcctagctaccttctcggcctcgggtgggggcggcattgtcggtccagactccagagcgcgctgcttccggagctggccgcttgcgctgagccctctgccggaggcaatgaggagcggccgtgcctgctccgctctcgcgtcgctcctgctgctgtggctgggcgtcgccgccgcgcagaaggcctcgtcctggaagacattgagcggcaaggctccagcaatcgtagccaagggtggattctccgggttattccctgattcaagcgaatacgcttatcaatttgcgctgctcgctagctcgccggatacgatactgtactgcgatgtgcggctgaccaaggatgagattggcatttgcctgccggacatcaagatggataactgcacgaacattccagatttctatgcgcagggtcagaagagctacctcgtcaatggcgtgcctacttcgggatggttctcggtggactacaatggcactgagcttgaacaagtgactctcaagcaatcaatcaattctcggacacccagatttgattcaagtttctttccactacttgctgttgaagatgtgcagtccaaattcaaaccttctggaatttggctcaatgttcagcatgacagtttctacagccagtcaat

SEQ ID NO: 201865 - DNA, 826 bp, Zea Mays
cgcgaccgtaaaaaatcgtcttgccttccatccttaccctatcccctctcattcttatcttggcggcggcgcaggcgcaggcgagcggccgtccagtcgcgcgggcagcagggggcggccgtccgtccaggcgcaggcgagcggccgtccgtccagcgcaggctagcggccatccgtccaggcgaactgcgagcaggcgtccgtccaaacgaactgcgagcgtccgtccaggcttccgtccagcgagcggcacaacttttctacgcacaacacattccaagaaccaaaaatgtatggctgaaacagagattgatgagggagatggtaatgctgttcctagtcctatagatgatattggggcttcatcctcagctcctagacctaggaagaaggcaagggttactggtaaagaagaggcagggctgtttggagcattcaaagatggtgctgaaaggcttgcaatggctattgagaaggctggttcagatgacctaccacctgacttgcttcaaacattgcaaagtattccaggttttgatgacacacacaaggccttttactttgcatatctagtgaaaaatcctagattggcaaggcagttccctactctcccattgacatatcagataagtttgcttgctcgcttcgttagtgagaactttccttagattatgaggaccgggaattaggactatgttggaggttaagtggaaattagaactatgttgttcttttgttatgtaataatggctttgctatgtcgaaatactgggtttgttatgaaatattgggtttgttatgaccaacacggatgctcggtttgttt

SEQ ID NO: 201866 - DNA, 505 bp, Zea Mays
ctaccacattttttacactatttggatgagggtcatatggaggcgaggtgaaccccaaaccatttttcggtggcagcgctgtccagcaaaaacgagcggacggatccgcccccgcccctctcgcgaccgtaaaaaatcgtcttgccttccatccttaccctatcccctctcattcttatcttggcggcggcgcaggcgcaggcgagcggccgtccagtcgcgcgggcagcagggggcggccgtccgtccaggcgcaggcgagcggccgtccgtccagcgcaggctagcggccatccgtccaggcgaactgcgagcaggcgtccgtccaaacgaactgcgagcgtccgtccaggcttccgtccagcgagcggcacaacttttctacgcacaacacattccaagaaccaccgttgattttgatcttcgattcacatatgtcttggctggttgggagggttcaacacatgatgctttagtactaagagatgctttagagcgagagaat

SEQ ID NO: 201867 - DNA, 297 bp, Zea Mays
cgcgaccgtaaaaaatcgtcttgccttccatccttaccctatcccctctcattcttatcttggcggcggcgcaggcgcaggcgagcggccgtccagtcgcgcgggcagcagggggcggccgtccgtccaggcgcaggcgagcggccgtccgtccagcgcaggctagcggccatccgtccaggcgaactgcgagcaggcgtccgtccaaacgaactgcgagcgtccgtccaggcttccgtccagcgagcggcacaacttttctacgcacaacacattccaagaaccatttctttcgct

SEQ ID NO: 201868 - DNA, 722 bp, Zea Mays
gcgaggtgaaccccaaaccatttttcggtggcagcgctgtccagcaaaaacgagcggacggatccgcccccgcccctctcgcgaccgtaaaaaatcgtcttgccttccatccttaccctatcccctctcattcttatcttggcggcggcgcaggcgcaggcgagcggccgtccagtcgcgcgggcagcagggggcggccgtccgtccaggcgcaggcgagcggccgtccgtccagcgcaggctagcggccatccgtccaggcgaactgcgagcaggcgtccgtccaaacgaactgcgagcgtccgtccaggcttccgtccagcgagcggcacaacttttctacgcacaacacattccaagaaccagggggaaaatgtcgttctagctactacactatcatcgtcaggcactcaggccacacgatgcttgctttagcgtctggttctggttcatcgtcttcatcatcccgcaacatttaccacgcactgctgcatttgcactgcaccacagcccgagaactgaacgtactggttctggttctgcctttgcccaacaccagcgacgacagccactgtctgttcgagatctgccgagtcctgtctctggtgatggacaaggcgaccaagcttttgatttatggtgcttcagcacacatgttgttgtccatgatggctatggttattgagtctagaaaaagaaaaagatatagtagaagagtcggt

SEQ ID NO: 201869 - DNA, 1054 bp, Zea Mays
atggaggcgaggtgaaccccaaaccatttttcggtggcagcgctgtccagcaaaaacgagcggacggatccgcccccgcccctctcgcgaccgtaaaaaatcgtcttgccttccatccttaccctatcccctctcattcttatcttggcggcggcgcaggcgcaggcgagcggccgtccagtcgcgcgggcagcagggggcggccgtccgtccaggcgcaggcgagcggccgtccgtccagcgcaggctagcggccatccgtccaggcgaactgcgagcaggcgtccgtccaaacgaactgcgagcgtccgtccaggcttccgtccagcgagcggcacaacttttctacgcacaacacattccaagaaccagggggaaaatgtcgttctagctactacactatcatcgtcaggcactcaggccacacgatgcttgctttagcgtctggttctggttcatcgtcttcatcatcccgcaacatttaccacgcactgctgcatttgcactgcaccacagcccgagaactgaacgtactggttctggttctgcctttgcccaacaccagcgacgacagccactgtctgttcgagatctgccgagtcctgtctctggtggtgagtaatcttatgagaggtcaactatattcgtgtgttgtactatgggaaatctattcgtgtgttgtattgaaaaaaaattatttaaaacaaaaatccgccaagaatacaattcttttatacacaatttgcttcttatgagaggtcagccttattgcactatgggaaatttggaaaactatatgatctttgctgtcagtttataattgccttgcttggtttcggtatttttataccatagatttagggtggtctggcagctttggtgggtctgtctctggtggtgagtaatctttcatctcttcttccttgttatttcattgtagatggacaaggcgaccaagcttttgatttatggtgcttcagcacacatgttgttgtccatgatggctatggttattgagtctagaaaaagaaaaagatatagtagaagagtcggt

SEQ ID NO: 201870 - DNA, 1710 bp, Zea Mays
atggaggcgaggtgaaccccaaaccatttttcggtggcagcgctgtccagcaaaaacgagcggacggatccgcccccgcccctctcgcgaccgtaaaaaatcgtcttgccttccatccttaccctatcccctctcattcttatcttggcggcggcgcaggcgcaggcgagcggccgtccagtcgcgcgggcagcagggggcggccgtccgtccaggcgcaggcgagcggccgtccgtccagcgcaggctagcggccatccgtccaggcgaactgcgagcaggcgtccgtccaaacgaactgcgagcgtccgtccaggcttccgtccagcgagcggcacaacttttctacgcacaacacattccaagaaccagtacttttctatgctctttttcgttgtgctactagatcaggggaaaatgcgatggttcacgttacaacataatttacatctcatatgccatctgttctaaatccgtattcaaggggggaaaatgtcgttctagctactacactatcatcgtcaggcactcaggccacacgatgcttgctttagcgtctggttctggttcatcgtcttcatcatcccgcaacatttaccacgcactgctgcatttgcactgcaccacagcccgagaactgaacgtactggttctggttctgcctttgcccaacaccagcgacgacagccactgtctgttcgagatctgccgagtcctgtctctggtgaaaatggagagtgaaggagctggtgagcactttgtggaacaagctgatggtagtggccatgttgtgtggacttctgcaatgtccgcttacatgctcagtaacctagcaagccttgtggttgaagggatcaggacatcaacaggcttcaagaaagttcaccttaacatgtgtgctaaggctctaaatgactatttcaagatgaagctcactggagaacaagtgaagaaccatttgagcatattgttactatatttcagcatattacttttacatgtactgttaatatattttagcatattacttttacatgatcacaaatctgatgctgagtttttaaacaagcctttggagaactataaggaaatgttcattgtctttggaaacaatatggctataggaaagtatgcaaaaggatcaagtgaagctctaggtactgaagatagaaaatgtatggctgaaacagagattgatgagggagatggtaatgctgttcctagtcctatagatgatattggggcttcatcctcagctcctagacctaggaagaaggcaagggttactggtaaagaagaggcagggctgtttggagcattcaaagatggtgctgaaaggcttgcaatggctattgagaaggctggttcagatgacctaccacctgacttgcttcaaacattgcaaagtattccaggttttgatgacacacacaaggccttttactttgcatatctagtgaaaaatcctagattggcaaggcagttccctactctcccattgacatatcagataagtttgcttgctcgcttcgttagtgagaactttccttagattatgaggaccgggaattaggactatgttggaggttaagtggaaattagaactatgttgttcttttgttatgtaataatggctttgctatgtcgaaatactgggtttgttatgaaatattgggtttgttatgaccaacacggatgctcggtttgttt

SEQ ID NO: 201871 - DNA, 695 bp, Zea Mays
gcgctgtccagcaaaaacgagcggacggatccgcccccgcccctctcgcgaccgtaaaaaatcgtcttgccttccatccttaccctatcccctctcattcttatcttggcggcggcgcaggcgcaggcgagcggccgtccagtcgcgcgggcagcagggggcggccgtccgtccaggcgcaggcgagcggccgtccgtccagcgcaggctagcggccatccgtccaggcgaactgcgagcaggcgtccgtccaaacgaactgcgagcgtccgtccaggcttccgtccagcgagcggcacaacttttctacgcacaacacattccaagaaccagggctttagagaccggggtttacttgaagatacaatacacatgtgtgttgaggaacaagtggccatgtttttgaacacagtgggacataaccttaggaataggttggtgggaacaaattatggtagatctggtgagactgttagtcgctacttcaacaaagtgcttcgtgctattggagagctacgagctgaacttattaggccaccatcattagagactccatccaaaatagcaggaaatccaagatgggatccctactttaagccgttgattttgatcttcgattcacatatgtcttggctggttgggagggttcaacacatgatgctttagtactaagagatgctttagagcgagagaat

SEQ ID NO: 201872 - DNA, 813 bp, Zea Mays
gagttttccccctttctcgcttctcctcgtggttcctcaagtcccgctgctgccgccctctccttctcatccagtggcgattccattcctctccgtgtggacgcaaggactcagtgaaccacttccagatactcgctgcttctcccgtgcccatggctacaccacttatagcaggacttgcagttgcagcagctgcccttgccggtagatatagcatccaagcttggaatgcttataaggcccggcccgtagttccaaggatgcgcaaattctatgaaggtggtttccaacctacgatgacacgaagggaagctgctttaatccttggtgtcagggaaactgccagtgcagagaaggtcaaagaagcacacaagagagtgatggtggccaatcatccagatgcgggtggaagtcattaccttgcttcaaagattaacgaggcaaaggatgtaatgacagggaaaacaaaagggggtgggtctgccttttgatcggtacacggacaacgtgttcttccactgaaagagcaattttgtgtctccagactcgcattagaagatatgccgaaatctttgtgtgttttatgaaaatttgtggacaaaaaaaaaagtagtggacctttatggagcaggcaattcgttgcttagtaaagctcggctcagttgtgcttgtgcccgaatcaattggacattgttgctaattgagtcccctgtcctttgtttttccttttttttcattgatatcctgaaattcaccaacacaaagtatcatgaactgccttttattgataaattctgtatctgttttgaccaa

SEQ ID NO: 201873 - DNA, 830 bp, Zea Mays
cggcatccccccccctgcagccggtgagctgctgtgagcctatgcctcctcatcggctcaccacccaggtttacccaccttgcagatccagtggcgattccattcctctccgtgtggacgcaaggactcagtgaaccacttccagatactcgctgcttctcccgtgcccatggctacaccacttatagcaggacttgcagttgcagcagctgcccttgccggtagatatagcatccaagcttggaatgcttataaggcccggcccgtagttccaaggatgcgcaaattctatgaaggtggtttccaacctacgatgacacgaagggaagctgctttaatccttggtgtcagggaaactgccagtgcagagaaggtcaaagaagcacacaagagagtgatggtggccaatcatccagatgcgggtggaagtcattaccttgcttcaaagattaacgaggcaaaggatgtaatgacagggaaaacaaaagggggtgggtctgccttttgatcggtacacggacaacgtgttcttccactgaaagagcaattttgtgtctccagactcgcattagaagatatgccgaaatctttgtgtgttttatgaaaatttgtggacaaaaaaaaaagtagtggacctttatggagcaggcaattcgttgcttagtaaagctcggctcagttgtgcttgtgcccgaatcaattggacattgttgctaattgagtcccctgtcctttgtttttccttttttttcattgatatcctgaaattcaccaacacaaagtatcatgaactgccttttattgataaattctgtatctgttttgaccaa

SEQ ID NO: 201874 - DNA, 607 bp, Zea Mays
cggcatccccccccctgcagccggtgagctgctgtgagcctatccagtggcgattccattcctctccgtgtggacgcaaggactcagtgaaccacttccagatactcgctgcttctcccgtgcccatgggaaactgccagtgcagagaaggtcaaagaagcacacaagagagtgatggtggccaatcatccagatgcgggtggaagtcattaccttgcttcaaagattaacgaggcaaaggatgtaatgacagggaaaacaaaagggggtgggtctgccttttgatcggtacacggacaacgtgttcttccactgaaagagcaattttgtgtctccagactcgcattagaagatatgccgaaatctttgtgtgttttatgaaaatttgtggacaaaaaaaaaagtagtggacctttatggagcaggcaattcgttgcttagtaaagctcggctcagttgtgcttgtgcccgaatcaattggacattgttgctaattgagtcccctgtcctttgtttttccttttttttcattgatatcctgaaattcaccaacacaaagtatcatgaactgccttttattgataaattctgtatctgttttgaccaa

SEQ ID NO: 201875 - DNA, 338 bp, Zea Mays
cggcatccccccccctgcagccggtgagctgctgtgagcctatccagtggcgattccattcctctccgtgtggacgcaaggactcagtgaaccacttccagatactcgctgcttctcccgtgcccatggctacaccacttatagcaggacttgcagttgcagcagctgcccttgccggtagatatagcatccaagcttggaatgcttataaggcccggcccgtagttccaaggatgcgcaaattctatgaaggtggtttccaacctacgatgacacgaagggaagctgctttaatccttggtgtcaggagtgtcactgctttgttacccagttttcgt

SEQ ID NO: 201876 - DNA, 333 bp, Zea Mays
cggcatccccccccctgcagccggtgagctgctgtgagcctatccagtggcgattccattcctctccgtgtggacgcaaggactcagtgaaccacttccagatactcgctgcttctcccgtgcccatggctacaccacttatagcaggacttgcagttgcagcagctgcccttgccggtagatatagcatccaagcttggaatgcttataaggcccggcccgtagttccaaggatgcgcaaattctatgaaggtggtttccaacctacgatgacacgaagggaagctgctttaatccttggtgtcaggactagaccacaggaaacagtgaagt

SEQ ID NO: 201877 - DNA, 2285 bp, Zea Mays
tataaagacacgaagtgattcagtgcaatataagtctattgtttggaacacattaatatagatttatgctaagttgataattggtttgttgttagttaatatgaagacatgatgtgatttgaagaatgattatttatttctatagatgctactagaattatttcaaaatgattggttttatcagttttgggtaaatctggtaaaactcgaccccgaatccgaattattggatatccaaaatttcggataatattttgtcgaaacagaattaggttaggaatttttaatacccggttttttatttatccaaattacgcgacccgattatttcagctaaccagaatgggaggcctctccggttgcctctttctttctcagttctcacctcaacgtcaccgcaactccgcaagtccgcaacctcctccttcccaccccttctcacgcgattcaagcgtttcccattcggagccctaatcctctctttccatactcgcggaagccaccaccaccggcaggggaagcggaaggggagcacctcgggccaggcaagatggtgctcgcgcagctgggcgggagcatctcccgcgccctggcgcagatgagcaacgccacggtgatcgatgagaaggtgctcaacgactgcctcaacgagatctcgcgcgctctcctacaggccgatgtccagttcaagatggtccgcgacatgcaggccaacatcaagcgcatcgtcaacctcgaggcgcttgccgcaggcaccaacaagcgccgtatcatgcagcaggctgtcttcacggaactctgcaacatgttagatcccgggaagccttctttcactcccaaaaagggcaagccaagcgtagtcatgtttgttggtctgcaaggttcgggtaaaactaccacttgttcaaaatatgcttattatcatcagaagaaaggattcaaaccagcgctggtttgtgccgatacatttagagctggtgcttttgatcagttaaagcaaaatgcaacgaaggccaagattcccttttacggaagttacatggaatctgatccagtgaaaattgctgttgagggtgtggagaggttcaagaaagaaaactgtgatctcatcattgtggatacaagtggaaggcacaaacaagaagcagcactctttgaagaaatgcggcaagtttcggaagcaacaggtcgcagcaacaaaaagtcctgttatattcattggaactggagagcacattgatgattttgaagtttttgatgtgaagccatttgttagtcgcctgttaggtatgggagattggtcaggctttatggacaagattcatgaagtgatacctacagatcaacagcctgaccttctgcagaaactgtctgaaggaagctttagtctcaggcttatgtatgagcagttccagaaccttcttaaaatgggtcctattggccaggctaagattaagcgctacatgacaatgatggattccatgactgatgcagagcttgacagcacaaatcctaagttgatgactgaatcacggatcattcggattgcacgggggtctgggcggcctgtcagggatgtcatggacatgctggaagagtacaagcgacttgctaaaatctggggcaagatgaagggtctcaagctccaaaagaaaggggacatgagtgcactgacccgcaacatgaatgttcagcagatgagcaaggcccttcctccgcagatgcttaaacagattggtggcatgggcggtctgcagtctctgatgaaacagatgggatcgaaggagatgagcggaatgtttggaggcatgggtggttgacttgtttttggtggatcgtcgctgtgatgctaaattgagagcgtttaatgctgcggtctgatcaccatcagagcattccctgaagatcagcctgcgctatgttttggatcaggcttagcgtagctccccatgcctgcaaatttaacctatatgaacagtacgtttgtcctctgaaaaaacggataaggtatatattacaaagcgaatatgcttatgtagatggttactccaaacattagtcttccagtggtggtgtcgttgggttggcaaaggatgcgccatggaactttcttgccagggtgcttgtttaggtgtgcactttgtgctcggcggaagttggaaattgactgccggtgatgcagcgctgtttgtgctgctgcaaggacagctgtgctacagccaacgtagaaaaaaataggcagccgagcagatccagatcgaggaaacagtaccatcagtgtaaac

SEQ ID NO: 201878 - DNA, 4053 bp, Zea Mays
tctttctctcttctccgcgtaatccaatccggtggttccttcgataattaacgccaaaccccgcaggccgcggcacgccacgcactgggccgacccgacccaacccgggacccgatccgccagccgccacagtcacaaagcagccgcgccattttgcagtcacgccacgccccgcggagacggacgactaggactccacccgctttcggctttccttcgcatttcccgttccccccacctgctcgcggcatccgcttctcgtcgttgtcgtcgctcctcctcgccgaccgggacgcggagacgatcgacgcaagcagaccctagccgacgagctcgcagggagccgggagggatgaagagcctgttcaagagtaagatcaggtggcagcaccggtccaacgacccggcgtccccgtcggggcagccgcagccacagccgcagcaggcgttgggcccgccgtcgccgtcgccttcgagctccccgtcgtctgcggcgccgctctccgtgtcaacggcggccacctcctccccctcctcgcccccctccgcggcggcgacgcccacgggtgctggggcagcagcggcagcgggagcgggagcggcaggggaggactacatagcgtcggaggaggagttccagatgcagctggccatggcgctgtccgcgtcttccaacagcgattgcgtgggggacctggacggggagcagatcaggaaggccaagctcataagcctcgatcgcttcgctgcccaccgcgacgagggccacaccgcggagtcgctctcccgccgatactgggactataactttcttgattatcatgagaaagttattgatggcttctatgacatctttggctctatggaatcctctaggcagggaaatatgccatcattagcagatctccaaacaggcataggggacctaggctttgaagtcattgtagtaaaccgtgccattgatagtaccttgcaggagatggagcaagtggcacagtgcatcctgttggacttccctgttgccaatattgcactcttagtgcaaagaatagctgagcttgttacagataatatgggtggacctgtcaaagatgctaacgacatgctcacaaggtggctggagaagagtactgagttgagaacctcgctacaaacaagtttgttgcctattggttgcatcaagatagggctatcacgtcaccgtgccttacttttcaagatccttgcagatagtgttgggattctatgcaaacttgtcaaagggagcaattatactggtggtgatgatgacgatgctataaacataattaagatggacaatgaaagggagtttttggttgatctgatggctgctcctggtgctcttattccagcagatatcttaagttggaaaggcaattcgttaaattctaatagaaaacttggcctgagtcagacagctggatcatcgagtaccgttggtgctaatatgggtcctagtgtattgccacttgaacctaaaggtgatcagctgcctttgttcagcagtggtgattggatatcagagagtggttctggatatggggcagcagaaactgcagcttctactcaaacctcttctggtgccacatcatctgttcctgctggaagtgcttttgacagttcatggatgctgattaatcatgaccaatcagatggaccatcaacttctgctggtacatcatcccagcagaaagttgtacctcaaaacgaacatccacggaatttaaaccgtcttccagatttgcaggaaattccagagtcaaaaaacctttttgctgaccttaatccttttggggatacgaagtccaagaaaacttcagtaccattcaaaggaccagatcaaaggaacaatgagttgcaaaagcgcagagagaacattgtccctaatggtggaagaccacagcagcggttagttatgaagaattggtctccttataatgatgtttctaacaacaaacagtacaattatgtcgaggattcatttgcacgtagaaatgttggcaacaatgccgcatcatcatcatcccagataacacaacaagccgcaaggtctaatcttaattctggattgcgtaatgatgcatcatatcataattatgatagtattatggctggtacctctgccacgaatattacatctacagctgagactgggaaggttcctgaaagggttctgcgtggtgatttggataaaggtcaaacaaattatagacttcaggatcaacatgttgtaggtcaaccaccacaggaaagacttccatggggtaatcctgctgaaggaagagttccaatgaatagatttcagaatcaagcaaaacaacacatgggaaacattgatacaaagcaagaccataagaaattgctccctgatccaaaaaaatctccccttgacagattcatggacacgtcattgccatcaagaaacttggacgtgaggtcacagaggcttgactttgatgatgtgtctgaatgtgaaattccttgggaagatcttgtgattggtgaaaggattggcttaggttcatatggagaggtttaccgtgctgactggaatggaacagaagtagctgtaaaaaaattcttggatcaagatttctatggtgatgctctggatgagtttaggagtgaagtccgaattatgcgtcggctgcgccatccaaatattgttctctttatgggtgctgttacacgccctccgaacttatctattgtatctgaataccttccaaggtgcgacgtttacagctttggtgtcatattatgggagctggcaacgcttagaatgccatggagtgggatgaatccaatgcaggttgtgggggcagttggtttccaggatagacggcttgatattcccaaggaagttgatcctctggtagcaaggatcatattcgaatgctggcagaaggacccaaatctgcgcccttcatttgcacagttaacaagtgccctaaagactgttcaaagactagtgaccccttctcaccaggagacccagagcccccatcccgcaaatgcgggcgcggcttgtagattgagcgccccaggcggtggtagacactctgccgtctgcgacaaggaccccgtggtagggtatgtatagagttgcccatcatcgggagaagtgattcagtgtgtagcaactgatcgtcaatccctcttttagtcctttgtacacccaaccggtcgaccgggtgcgagccctctgaaagcagtgagctctgtgttcattgtgaagtgcgtggctatgctaagtggattttctgtcttgctgcgcaataggcagcagcgtatctggaagtttgaagcgttgtaaaactctgtacaatcaggacacttgaatacaggatacatacattgtgttctttgtttttgaagatgtgcaagcagtccttctgtgcaagcgtccactttcgttggaccgctgggaagatgtaccgtgggcccgtggcagacaaaccctgagccccattctttttccgctcctcgcaagacacgcatacgtcacctcccgaccatgcgtcctcccgatcaccgtccacgcgcgccgacagccgagatccaacggtctattgccttcccctctgctgctctgctctgttcgcttgtgctccttctttccatggcggcatacgccggaatcctagttccaccgctccccgtccgcctctcggtctctcaccttagatccgttaccccggcttcctactccctgaaccaccgtcccccccgccccgcggtcgcccgtgcggcttcccgcggcaacggcaacggcgggccaccggtggagggggagaaggagcggcgacgctcgtcgctcccggcgctgtcggagatccggttgggagagcttctgtccccggaccccgccaatgccgtggctgtggtgctcacgggcgcgctcgtatgggctggcgcctcactgctgctgcagctcacgctcatctccgcagcaatcttcgccgccgccgtcaagtactcgtttgtcgccgcgctcctgctaatcgtccttatcgccctgctgtgatcgac

SEQ ID NO: 201879 - DNA, 2718 bp, Zea Mays
atgaagagcctgttcaagagtaagatcaggtggcagcaccggtccaacgacccggcgtccccgtcggggcagccgcagccacagccgcagcaggcgttgggcccgccgtcgccgtcgccttcgagctccccgtcgtctgcggcgccgctctccgtgtcaacggcggccacctcctccccctcctcgcccccctccgcggcggcgacgcccacgggtgctggggcagcagcggcagcgggagcgggagcggcaggggaggactacatagcgtcggaggaggagttccagatgcagctggccatggcgctgtccgcgtcttccaacagcgattgcgtgggggacctggacggggagcagatcaggaaggccaagctcataagcctcgatcgcttcgctgcccaccgcgacgagggccacaccgcggagtcgctctcccgccgatactggatccttgcagatagtgttgggattctatgcaaacttgtcaaagggagcaattatactggtggtgatgatgacgatgctataaacataattaagatggacaatgaaagggagtttttggttgatctgatggctgctcctggtgctcttattccagcagatatcttaagttggaaaggcaattcgttaaattctaatagaaaacttggcctgagtcagacagctggatcatcgagtaccgttggtgctaatatgggtcctagtgtattgccacttgaacctaaaggtgatcagctgcctttgttcagcagtggtgattggatatcagagagtggttctggatatggggcagcagaaactgcagcttctactcaaacctcttctggtgccacatcatctgttcctgctggaagtgcttttgacagttcatggatgctgattaatcatgaccaatcagatggaccatcaacttctgctggtacatcatcccagcagaaagttgtacctcaaaacgaacatccacggaatttaaaccgtcttccagatttgcaggaaattccagagtcaaaaaacctttttgctgaccttaatccttttggggatacgaagtccaagaaaacttcagtaccattcaaaggaccagatcaaaggaacaatgagttgcaaaagcgcagagagaacattgtccctaatggtggaagaccacagcagcggttagttatgaagaattggtctccttataatgatgtttctaacaacaaacagtacaattatgtcgaggattcatttgcacgtagaaatgttggcaacaatgccgcatcatcatcatcccagataacacaacaagccgcaaggtctaatcttaattctggattgcgtaatgatgcatcatatcataattatgatagtattatggctggtacctctgccacgaatattacatctacagctgagactgggaaggttcctgaaagggttctgcgtggtgatttggataaaggtcaaacaaattatagacttcaggatcaacatgttgtaggtcaaccaccacaggaaagacttccatggggtaatcctgctgaaggaagagttccaatgaatagatttcagaatcaagcaaaacaacacatgggaaacattgatacaaagcaagaccataagaaattgctccctgatccaaaaaaatctccccttgacagattcatggacacgtcattgccatcaagaaacttggacgtgaggtcacagaggcttgactttgatgatgtgtctgaatgtgaaattccttgggaagatcttgtgattggtgaaaggattggcttaggttcatatggagaggtttaccgtgctgactggaatggaacagaagtagctgtaaaaaaattcttggatcaagatttctatggtgatgctctggatgagtttaggagtgaagtccgaattatgcgtcggctgcgccatccaaatattgttctctttatgggtgctgttacacgccctccgaacttatctattgtatctgaataccttccaaggtgcgacgtttacagctttggtgtcatattatgggagctggcaacgcttagaatgccatggagtgggatgaatccaatgcaggttgtgggggcagttggtttccaggatagacggcttgatattcccaaggaagttgatcctctggtagcaaggatcatattcgaatgctggcagaaggacccaaatctgcgcccttcatttgcacagttaacaagtgccctaaagactgttcaaagactagtgaccccttctcaccaggagacccagagcccccatgttcatcaagaaatctcagtgaacttgactccataggagggctgtcaacttcccgttgtgcatagtttttgttcttttgccgtttgtgttttgtccaagagcccgcaaatgcgggcgcggcttgtagattgagcgccccaggcggtggtagacactctgccgtctgcgacaaggaccccgtggtagggtatgtatagagttgcccatcatcgggagaagtgattcagtgtgtagcaactgatcgtcaatccctcttttagtcctttgtacacccaaccggtcgaccgggtgcgagccctctgaaagcagtgagctctgtgttcattgtgaagtgcgtggctatgctaagtggattttctgtcttgctgcgcaataggcagcagcgtatctggaagtttgaagcgttgtaaaactctgtacaatcaggacacttgaatacaggatacatacattgtgttcttt

SEQ ID NO: 201880 - DNA, 1460 bp, Zea Mays
atttttccttcgaagggacgaaaagcgcagacaagagagagaaatcggaatccaagcgcaaccaaaagagaagagggcagacacgagggagcgcgtggggggagagggcatggtctctctcgtcccggcagtcccgtctcaagcaaaagctctctcctcttcttccgctcagtgcaccaatcactgcaacatactggcctgaggtcattgagttggtgaaagggaaggagggggtatcatgggcatctcatccaagtggattaaatccttggttggcataaggaagcaagaaaaagcgcagaatgcagaaaagcaagaaaaagggtggaacgctgagagcagtgaaactaagagctctgctaatcaatcactgcacaaacggaaacattctttggatcccggagctgcacttgcagtcgaagaaattacagtacaaagtgaagcattgactgataacaaaagcgcacaaatggtttcaaattcatttttttcagacagtacaccgcttgatgtgcacatttctcaggctgaacatcatagtaacgaagatttggccgcaactgttgtccagtctgcgtttcgagcgttcttggctaggcgtgctttacgagctttgaaaggaatagttctacttcaagcccttattaggggccattctgttagaaggcagacagcagagacgcttcagtgtatgcaagcgctggtaaaagcaaaagctcgtgtccgagcaagacaagttcgtgttgccttagaaaatcaagtggcacggaaaaagattcctgaacaagatgatcatgagaaccatgtccgagaagtcgagggaggctggtgtggcagtattggttccatggaggaaatgcaagctaaagcactgaaaagacgagaagctgctgctaagcgtgagagggcaatggcatatgctttgactcatcagcggcaagctggttccaagcaacaaaattctttgagcctgcaaggtcttgaacttggtgagaaccactgggagtcaaattggttagacaggtggatggctgtacgtccatgggagaacaggttacttgactgtaatgccaaagagagtctgccaacgcatgaagataaggatgaggaagcaaattctcagatcacaccaaagggtaaagtgtcaacttcaaatactcctggtctgagcaagaagaaaggtgttaaccacaaaaagtcatattcagatgttagttgtacttcatttgcacgaccagcaaatgtattaccatccacatctttaggatcatccaaacagaaggcaaaggctgtgggtgaagtttttgaggaagtcagctcccagccaacagatataggttctaaggatgtgcacaattcaaaagataagcttgtgcaagtgaatggaccagccaagaagcggttatccctcccaaataatgtgcagccgtgtatgagattaggggttcgagggatttctc

SEQ ID NO: 201881 - DNA, 1923 bp, Zea Mays
gaagggacgaaaagcgcagacaagagagagaaatcggaatccaagcgcaaccaaaagagaagagggcagacacgagggagcgcgtggggggagagggcatggtctctctcgtcccggcagtcccgtctcaagcaaaagctctctcctcttcttccgctcagtgcaccaatcactgcaacatactggcctgaggtcattgagttggtgaaagggaaggagggggtatcatgggcatctcatccaagtggattaaatccttggttggcataaggaagcaagaaaaagcgcagaatgcagaaaagcaagaaaaagggtggaacgctgagagcagtgaaactaagagctctgctaatcaatcactgcacaaacggaaacattctttggatcccggagctgcacttgcagtcgaagaaattacagtacaaagtgaagcattgactgataacaaaagcgcacaaatggtttcaaattcatttttttcagacagtacaccgcttgatgtgcacatttctcaggctgaacatcatagtaacgaagatttggccgcaactgttgtccagtctgcgtttcgagcgttcttggtacgttcttggctaggcgtgctttacgagctttgaaaggaatagttctacttcaagcccttattaggggccattctgttagaaggcagacagcagagacgcttcagtgtatgcaagcgctggtaaaagcaaaagctcgtgtccgagcaagacaagttcgtgttgccttagaaaatcaagtggcacggaaaaagattcctgaacaagatgatcatgagaaccatgtccgagaagtcgagggaggctggtgtggcagtattggttccatggaggaaatgcaagctaaagcactgaaaagacgagaagctgctgctaagcgtgagagggcaatggcatatgctttgactcatcagcggcaagctggttccaagcaacaaaattctttgagcctgcaaggtcttgaacttggtgagaaccactgggagtcaaattggttagacaggtggatggctgtacgtccatgggagaacaggttacttgactgtaatgccaaagagagtctgccaacgcatgaagataaggatgaggaagcaaattctcagatcacaccaaagggtaaagtgtcaacttcaaatactcctggtctgagcaagaagaaaggtgttaaccacaaaaagtcatattcagatgttagttgtacttcatttgcacgaccagcaaatgtattaccatccacatctttaggatcatccaaacagaaggcaaaggctgtgggtgaagtttttgaggaagtcagctcccagccaacagatataggttctaaggatgtgcacaattcaaaagataagcttgtgcaagtgaatggaccagccaagaagcggttatccctcccaaataatgttggcagagaatcagggaagggaccaacccgcaggaattcgcttaacaggtctgctccaaaagcacgggcggactctcctaaccagggtgatgagttagaggcctgataacacattcctccaatttgacgtcggcaagccatcctaaagtgtgcttctccaggttgcccataacgtaacattcccaaacgatatcatgcagctagatttgggttgtgattcatatttctgttgtgtaatgctgtggtgtgttgtgccttgtgtggccttttattccgcatcgccaattttcttatgtttccagcttccctgtaagttgttctaactgctgaaactaaaagaaggaaatgtgctgtattgtgtttatgtgttgaagtttctcgggaacttcgatcctgcttttgcagttgcagaacaccatcctctgattgtataccttcgagtgcaatcattcaggtcaaatatgcatgatcctgatttgtttatgtatgattggtcgtaaa

SEQ ID NO: 201882 - DNA, 1797 bp, Zea Mays
gtttttgtgcctgccaagggagaagttaaagtagtctttgttgcagtgcaccaatcactgcaacatactggcctgaggtcattgagttggtgaaagggaaggagggggtatcatgggcatctcatccaagtggattaaatccttggttggcataaggaagcaagaaaaagcgcagaatgcagaaaagcaagaaaaagggtggaacgctgagagcagtgaaactaagagctctgctaatcaatcactgcacaaacggaaacattctttggatcccggagctgcacttgcagtcgaagaaattacagtacaaagtgaagcattgactgataacaaaagcgcacaaatggtttcaaattcatttttttcagacagtacaccgcttgatgtgcacatttctcaggctgaacatcatagtaacgaagatttggccgcaactgttgtccagtctgcgtttcgagcgttcttggctaggcgtgctttacgagctttgaaaggaatagttctacttcaagcccttattaggggccattctgttagaaggcagacagcagagacgcttcagtgtatgcaagcgctggtaaaagcaaaagctcgtgtccgagcaagacaagttcgtgttgccttagaaaatcaagtggcacggaaaaagattcctgaacaagatgatcatgagaaccatgtccgagaagtcgagggaggctggtgtggcagtattggttccatggaggaaatgcaagctaaagcactgaaaagacgagaagctgctgctaagcgtgagagggcaatggcatatgctttgactcatcagcggcaagctggttccaagcaacaaaattctttgagcctgcaaggtcttgaacttggtgagaaccactgggagtcaaattggttagacaggtggatggctgtacgtccatgggagaacaggttacttgactgtaatgccaaagagagtctgccaacgcatgaagataaggatgaggaagcaaattctcagatcacaccaaagggtaaagtgtcaacttcaaatactcctggtctgagcaagaagaaaggtgttaaccacaaaaagtcatattcagatgttagttgtacttcatttgcacgaccagcaaatgtattaccatccacatctttaggatcatccaaacagaaggcaaaggctgtgggtgaagtttttgaggaagtcagctcccagccaacagatataggttctaaggatgtgcacaattcaaaagataagcttgtgcaagtgaatggaccagccaagaagcggttatccctcccaaataatgttggcagagaatcagggaagggaccaacccgcaggaattcgcttaacaggtctgctccaaaagcacgggcggactctcctaaccagggtgatgagttagaggcctgataacacattcctccaatttgacgtcggcaagccatcctaaagtgtgcttctccaggttgcccataacgtaacattcccaaacgatatcatgcagctagatttgggttgtgattcatatttctgttgtgtaatgctgtggtgtgttgtgccttgtgtggccttttattccgcatcgccaattttcttatgtttccagcttccctgtaagttgttctaactgctgaaactaaaagaaggaaatgtgctgtattgtgtttatgtgttgaagtttctcgggaacttcgatcctgcttttgcagttgcagaacaccatcctctgattgtataccttcgagtgcaatcattcaggtcaaatatgcatgatcctgatttgtttatgtatgattggtcgtaaa

SEQ ID NO: 201883 - DNA, 1786 bp, Zea Mays
ctgccaccgcgtagagtaatgactgacagaatatatgcaccaatcactgcaacatactggcctgaggtcattgagttggtgaaagggaaggagggggtatcatgggcatctcatccaagtggattaaatccttggttggcataaggaagcaagaaaaagcgcagaatgcagaaaagcaagaaaaagggtggaacgctgagagcagtgaaactaagagctctgctaatcaatcactgcacaaacggaaacattctttggatcccggagctgcacttgcagtcgaagaaattacagtacaaagtgaagcattgactgataacaaaagcgcacaaatggtttcaaattcatttttttcagacagtacaccgcttgatgtgcacatttctcaggctgaacatcatagtaacgaagatttggccgcaactgttgtccagtctgcgtttcgagcgttcttggctaggcgtgctttacgagctttgaaaggaatagttctacttcaagcccttattaggggccattctgttagaaggcagacagcagagacgcttcagtgtatgcaagcgctggtaaaagcaaaagctcgtgtccgagcaagacaagttcgtgttgccttagaaaatcaagtggcacggaaaaagattcctgaacaagatgatcatgagaaccatgtccgagaagtcgagggaggctggtgtggcagtattggttccatggaggaaatgcaagctaaagcactgaaaagacgagaagctgctgctaagcgtgagagggcaatggcatatgctttgactcatcagcggcaagctggttccaagcaacaaaattctttgagcctgcaaggtcttgaacttggtgagaaccactgggagtcaaattggttagacaggtggatggctgtacgtccatgggagaacaggttacttgactgtaatgccaaagagagtctgccaacgcatgaagataaggatgaggaagcaaattctcagatcacaccaaagggtaaagtgtcaacttcaaatactcctggtctgagcaagaagaaaggtgttaaccacaaaaagtcatattcagatgttagttgtacttcatttgcacgaccagcaaatgtattaccatccacatctttaggatcatccaaacagaaggcaaaggctgtgggtgaagtttttgaggaagtcagctcccagccaacagatataggttctaaggatgtgcacaattcaaaagataagcttgtgcaagtgaatggaccagccaagaagcggttatccctcccaaataatgttggcagagaatcagggaagggaccaacccgcaggaattcgcttaacaggtctgctccaaaagcacgggcggactctcctaaccagggtgatgagttagaggcctgataacacattcctccaatttgacgtcggcaagccatcctaaagtgtgcttctccaggttgcccataacgtaacattcccaaacgatatcatgcagctagatttgggttgtgattcatatttctgttgtgtaatgctgtggtgtgttgtgccttgtgtggccttttattccgcatcgccaattttcttatgtttccagcttccctgtaagttgttctaactgctgaaactaaaagaaggaaatgtgctgtattgtgtttatgtgttgaagtttctcgggaacttcgatcctgcttttgcagttgcagaacaccatcctctgattgtataccttcgagtgcaatcattcaggtcaaatatgcatgatcctgatttgtttatgtatgattggtcgtaaa

SEQ ID NO: 201884 - DNA, 1032 bp, Zea Mays
ctggtgggctgaccaatcagttcggagtctgccatcagcccatctctgtgcgcgactccccgtccgttcccctcttccactacgtgctcgcgagtcgcgtccgctcctcctctttccaaagggcgagttcgcatcgcagcgtcgcccgcagcagcagcggaccgcagaccacgccacctcagccagcgacagggagcgagggagcgattcgatcagaatcgacatggacggcggcgagcacgaagcggaggagtcctcctacaagcgccgggagcgcctgctcgccctccgctccgccgcaaacgcgtctccggcaggggctcctccgccgacggccgcggggagcatcctcccggaccctgacctcccgggagacgaggccgcatccgtgtgcccgaccccgccccagcggttcgactactacaccaaccccgccgccgccttcacttcctcctcaggaggtgccacaaatcccacctggtcccacaagcgcaagagccctcccgcctgctacgccccgcctccgcctccgccggcttacgggaactatggcagcgactatcaccgtccacaccagcagcctacatcatggcaagttcactcaacatccccgatgccacaagatgcggcaaggagcagtccatggcaaagccctatgcagttccaggatccaatgtcaggataccaaggaggtcctcccagcgctccacgtccttggggctcacattctggtcctggaggccgaggttcttattcaaatccaccaaactttgggttcagacacccgaatcccagccggggtggcagcccaatgaactatggaccaagaggtggcccatattcatcttatggacgtggcagggggcccaactactttggcagcccaggatcaagggggagaggtgggagggttggctgccatggccggagttacttcaacaagtcaatgcttgatgacccttggctggacctgcaacctggtgtcggcaacatactgatacctaggggatgcggtttgacggatggcgagaa

SEQ ID NO: 201885 - DNA, 1594 bp, Zea Mays
gacgaggtaggcttttaggcggctacgatccgatttgtacgcctcaactagacctcactcgtacgccgccgccccctccaccgccgtcgtgcgagagggaggagggagctctggacctccgtggggcgtggaggagtgggacgacgcacgcggaggcagccccggtcggttgctgctgtatccgtccaggatcgggggaattccaggaggcaggacctaggccttctgaactttatggaaagtttacatggagaattgattatttctcccaaatcaacaggagtgagctaaggagcacttcatttgatgtcggcgcatataagtggtatatattaatatacccgcgaggatgtggtgtctgcgatcacctctctctctttctttgtgctgaccataataagctactcccaggatggagtcactttgcgcaatttacaatagctcttattaataaagaccctaagaaatctaagtattctgatacactgcatcggttttggaagaaagagcatgattgggggtggaaaaagtttatggagctgtcagaattacacgatggctttattgttcaggatgctcttaccatcaaagcccaagttcaagtcattagggagaagatagaccgtccatttcgttgccttgatggccagtaccgaagggaactaattagggtgtatctatcaactgtggaacaaatttatcggcgttttattgatgaaaaaagaaggatgttcagcaggctgattgaggataaactcgggtggtccagtttcagtggattctggctagcaatggatccaagtgtgcgtcggcacatgacacgggaaaagactgaaactatattgaaagttgtagtgaaacagttctttatagagaaagaagttacatcaaccttggtatttgactcgctatatagcggacttaaggcacttgaataccagagcaacaacaaaaaggggatacctaaaataacagaggcagatgctcggagcactccaatggtgcttattgatcaagacatgtttgttttggctgatgatgcgctactgttgtttgaaagagctgcattggacacacaatcacaccaaccattgcccaaaaaagatgataaaggatcaccgaaccgtacaaaggatgacacctcaagtgacgagtttgacaaagattctattgagcgtgatgatagatggcttgaagagctaggctgcaagacactggaactttttgccgtaactcatatattcagccgagcagaagcggcgtaccaagaagcgatggctttgcagctccaagaggaactcattcgtgaagaagcatccgagcgagctggaactgaacttaagccaaagcgtcgtgctgctgataagaaaaggcgtggcaagaacatgtgaagtgttatattttctttttaaaaaactagcaataattcatcggatgctaggctatttcccctcattttttgtgaacagacatatatatgccgccgttcgtagattctagtctcgtgcattccctttgagaatgtaagattgaagtgtgtttttccattggttgatctcaggtttatatacatgttattaggctgggttcaagt

SEQ ID NO: 201886 - DNA, 4841 bp, Zea Mays
ccgagaccaaaaataacagaaaggagagccgcgtgtcctcccagccactgccacccttccccacctatcgatctcgagttctctcgaccccacccgacccggagccgcaccgcctcgacccagaccggcgccgacgagccccagcgcccaatggcggcggctttcctcgccctggaggcccgcgtgacatgatccctgtcccccgaggatgggaatatcccccctccaccctcccttctcgactcttcctcgggtctctccttctccaccgcctcgcgctccgcaattggctgctcgtgctcgcgtggccccggatcgccgccaggtccgggaacaagaacaaatgttgcaagaagacatgaaatgggaaagaccgagagagcaagagggaaagataccgtggattggttgggcggtggccggtgctgcagctcatggaacttgaatggtaggccaagcagggcgacgcgttgagcgggccgagcgtgggctgttttagcagaccgtggagttggattgtgggccaggacggtggaagtgggctgctcactgcaattttggtcccatatacttgctatttttatttccaattttgcagtatattcaacgtatatataaggatagaaaaaatttgaggtggggccacgacccactttgcccccctgcccatgacagcagatgacttttgcattttttttgggatccttcattattggtggtccttgtttttttgtggaaaatcgccggagaactaggtatgcggtagccttaggatttcctaaggtgccattggatggacttgcagaataaagcactcctatatgctttgtggtaactgtgtgatttggtgacggagtttcgtgtagatcagttatctgggtgatggggatgcacacttcacctttttgctgccttccttttaatgcactaataactgttttcccccttccaacaggaagtagctaattggtgctgggcataggacttgctggatttcagtcgtctgatatactgagacttagtagtgctgatccagtgaacctatccacaccaacttgattacagtctctctgacacaactatggcgccctctgccgctgccccaggcatctctgaggctgagggggcaccacgcatggccaagttcctctgcagctttggaggtagtatccttccccgaccacttgatggctgtcttcgatatgttggtggcgagacaaggattgtcatattgccgcgtgacatatcatatgccgacctagctgcacggatgagagatctctacaaggatgctgataccatcaaataccagcaacctgatgaggatctggatgcgctggtctcggtcgtgaatcacgatgatgtggtgaacatgatggaggagtatgacaaagtcactgccacaggggaggcgttcactcggctcaggatcttcttattttctcagcaattggatgacaatgctgcatcagtggctgtgcattacaatgtagacgagcgggaaacagagagaaggtatgtagatgcgctcaacagccttggtgatgttaggtcaccttcctcccctgtatctgtggagcagctttttggcatcggaggcaatgattcaggaattcctgattttgctggcttgagacatttgaatgtccctcgtccatcacatggtcagaggtatggagagatggattctccttggagccctgcttatgtctcaccaagccagtacagagtgcatgacccgagggattttccaatttcaccgtcatctgcaaggttccaagtaggagcggaggattttgatgacaggattcctgacgactttgtaaggcagtcaccaaaatatcattattatgaggctcaatcaccatcacatatggataatttagtctggcttccacctggtgctgtaattcagcaaaatgcaggtttccctggtgatttgagcaagcacaataaatttttggatgggaacagtggatgtgatcactgtggttcactattccacaagggtcagggttcggtgactgatcctatctatatgaatcctcgttggactcggccagtccaacaacattttgaccaaccaagcatgattaatgattatcccggtcaccatgctaattcttgtccagattactgccgccctggtgagcattatgcgggaggtcaagatgttagattggaaaatggtgtttatgttaaagagcaaaatggtggtcatactcccatgctttataatgagtcacgtcctcacgatagagtctggtatgcgcataccaaccaaagtcatcagcggtatgaggatccaaggctgcattatcctactaatgatagagtgatcgagccatacattgtcgatgctagctctgtaaattccgcatttgcaccaaacaaagtatatgaaatgcattcagcatctcttggtcattctagttctagccatgaaagtcctcactattttcatggtagcagtgagctcataaatgacgcatatcacaaccaacaagttggaggcagtgggtcatatgtgcagccagcagggtctgaagaatcccctggtcagcattacaaccacttttcggcctatggtgcagattccttttatcaaatgcaacaaaatttgccacccattcaatctttgaggaggagagcgaacagtcctgttcacactgcctcaccatatgattccccacacctgccaataccaaatgggagcattaacatgaattctgttagaaatacaggtgatgcgagtcccaggatagcaggtcttattggatatgatcgaatgccaaacccatttactccgcccaatggcagcatactatatagagttggtgggcatgatgttcctgcagctatggagaacactagtgcttttggtcctaggtctaatccaactgctgctcagtatgttcagccttttattgctcctgaatcaatccagcatcaacctggagttcccttgagggaggtttatcctgaaagagcataccctgaacccatgccgtcatcatatgctgatggcaaagtagctgtttctgcattgcccctcaccgaccaattattcaggttggatataaacacaatgaagaaacttgaaggacaagatgatgggaactctactcgaaatgtgaatgaaacaactcttttgcatgctgtggatgaaccaagtaccttaccccaccatgttggatctgtacatgaagtcgatcctaagcaggagaagctaaccgaaaaagaaagcaggcaaaagcaacatgaagctggggctacagcactgcaggaatgtgaggatatttcagaggatatgttgaatttccttcctgaattaattgcctctgttaaaaaggtaacactggaagatgctgctgagacacaaatagcccaatcagatgctaatgctgctgtttcacctgttcctgatgatgacgataatggaaagaagctggatgaggcaacagctggtaatacaaatgcaaatcaggaccttgatttgcaaggaagccttgatcggcagaagagtttcaagattgagtctacaactgctgaagctgaagctttgtcgaaaggactacagactataaaaaatgatgatttagaggaaattagagagctgggttcaggtacttatggggcggtctatcatggtaaatggaggggatgcgatgttgctattaaaagaataaaagcaagttgctttgctggaagaccatctgaaagagagcgtttgatcacggatttctggaaagaagctctgatcctaagctcacttcatcatccaaatgtggttgcattttatggtgtagttcgtgatggtccagatggaagcttagcaactgttactgagtttatggttaatgggtctctcaaacagttcctgaggaaaaaagacaggacaatagatcgccggaagagagtaatattagccatggatgctgcatttggcatggaatatttgcacgggaagaatatagtccattttgacctgaagtgtgagaatctactggtgaacatgagggatccacagcgaccaatctgcaagatcggtgatctcgggctatcaaaggttaaacagcatactttggtatctggtggtgttagaggaaccttaccgtggatggcaccagagcttctgagtgggaaaaacaatatggtgtcagagaagattgacgtctattcgtttggaattgtcatgtgggagctgcttactggggaagagccatactctgatatgcgtgctgctgaaattattggggccattgtaaacgattccttacgccctcaaatcccttcatggtgtgatcctgagtggaagggattgatggaaagctgttggtccagtgatccagcggagagaccgtccttcactgatatatctcaaaggttgaggaaaatggccgctgcaatgaatgtgaagtgaaggttcggaagccatatttgtcttgattttccttagtcctggagtaacccggctgtcatttgccttgtgtcgaaaataagtatgctataaagcgttctgtcttgatgggaactgttgggctgtaattgtaaataagttttgacttgcttcatcttgctgtgcaaagtagtaattaataggcacgatcaaagctgggcacagttatcttttccccccatacaaaagtgtgtcctaggactaggaggagagatggatcgaacacgactagagctgtacatagtatactgtttgctctgtatataatcatcacttcctatttgaatgctcataagtttgcacagtcccttgtggtcttcctgttgagtcctaatcgaccagggtgattggtgaagccactgtctatccgaagagaccattg

SEQ ID NO: 201887 - DNA, 4123 bp, Zea Mays
ccgagaccaaaaataacagaaaggagagccgcgtgtcctcccagccactgccacccttccccacctatcgatctcgagttctctcgaccccacccgacccggagccgcaccgcctcgacccagaccggcgccgacgagccccagcgcccaatggcggcggctttcctcgccctggaggcccgcgtgacatgatccctgtcccccgaggatgggaatatcccccctccaccctcccttctcgactcttcctcgggtctctccttctccaccgcctcgcgctccgcaattggctgctcgtgctcgcgtggccccggatcgccgccaggaagtagctaattggtgctgggcataggacttgctggatttcagtcgtctgatatactgagacttagtagtgctgatccagtgaacctatccacaccaacttgattacagtctctctgacacaactatggcgccctctgccgctgccccaggcatctctgaggctgagggggcaccacgcatggccaagttcctctgcagctttggaggtagtatccttccccgaccacttgatggctgtcttcgatatgttggtggcgagacaaggattgtcatattgccgcgtgacatatcatatgccgacctagctgcacggatgagagatctctacaaggatgctgataccatcaaataccagcaacctgatgaggatctggatgcgctggtctcggtcgtgaatcacgatgatgtggtgaacatgatggaggagtatgacaaagtcactgccacaggggaggcgttcactcggctcaggatcttcttattttctcagcaattggatgacaatgctgcatcagtggctgtgcattacaatgtagacgagcgggaaacagagagaaggtatgtagatgcgctcaacagccttggtgatgttaggtcaccttcctcccctgtatctgtggagcagctttttggcatcggaggcaatgattcaggaattcctgattttgctggcttgagacatttgaatgtccctcgtccatcacatggtcagaggtatggagagatggattctccttggagccctgcttatgtctcaccaagccagtacagagtgcatgacccgagggattttccaatttcaccgtcatctgcaaggttccaagtaggagcggaggattttgatgacaggattcctgacgactttgtaaggcagtcaccaaaatatcattattatgaggctcaatcaccatcacatatggataatttagtctggcttccacctggtgctgtaattcagcaaaatgcaggtttccctggtgatttgagcaagcacaataaatttttggatgggaacagtggatgtgatcactgtggttcactattccacaagggtcagggttcggtgactgatcctatctatatgaatcctcgttggactcggccagtccaacaacattttgaccaaccaagcatgattaatgattatcccggtcaccatgctaattcttgtccagattactgccgccctggtgagcattatgcgggaggtcaagatgttagattggaaaatggtgtttatgttaaagagcaaaatggtggtcatactcccatgctttataatgagtcacgtcctcacgatagagtctggtatgcgcataccaaccaaagtcatcagcggtatgaggatccaaggctgcattatcctactaatgatagagtgatcgagccatacattgtcgatgctagctctgtaaattccgcatttgcaccaaacaaagtatatgaaatgcattcagcatctcttggtcattctagttctagccatgaaagtcctcactattttcatggtagcagtgagctcataaatgacgcatatcacaaccaacaagttggaggcagtgggtcatatgtgcagccagcagggtctgaagaatcccctggtcagcattacaaccacttttcggcctatggtgcagattccttttatcaaatgcaacaaaatttgccacccattcaatctttgaggaggagagcgaacagtcctgttcacactgcctcaccatatgattccccacacctgccaataccaaatgggagcattaacatgaattctgttagaaatacaggtgatgcgagtcccaggatagcaggtcttattggatatgatcgaatgccaaacccatttactccgcccaatggcagcatactatatagagttggtgggcatgatgttcctgcagctatggagaacactagtgcttttggtcctaggtctaatccaactgctgctcagtatgttcagccttttattgctcctgaatcaatccagcatcaacctggagttcccttgagggaggtttatcctgaaagagcataccctgaacccatgccgtcatcatatgctgatggcaaagtagctgtttctgcattgcccctcaccgaccaattattcaggttggatataaacacaatgaagaaacttgaaggacaagatgatgggaactctactcgaaatgtgaatgaaacaactcttttgcatgctgtggatgaaccaagtaccttaccccaccatgttggatctgtacatgaagtcgatcctaagcaggagaagctaaccgaaaaagaaagcaggcaaaagcaacatgaagctggggctacagcactgcaggaatgtgaggatatttcagaggatatgttgaatttccttcctgaattaattgcctctgttaaaaaggtaacactggaagatgctgctgagacacaaatagcccaatcagatgctaatgctgctgtttcacctgttcctgatgatgacgataatggaaagaagctggatgaggcaacagctggtaatacaaatgcaaatcaggaccttgatttgcaaggaagccttgatcggcagaagagtttcaagattgagtctacaactgctgaagctgaagctttgtcgaaaggactacagactataaaaaatgatgatttagaggaaattagagagctgggttcaggtacttatggggcggtctatcatggtaaatggaggggatgcgatgttgctattaaaagaataaaagcaagttgctttgctggaagaccatctgaaagagagcgtttgatcacggatttctggaaagaagctctgatcctaagctcacttcatcatccaaatgtggttgcattttatggtgtagttcgtgatggtccagatggaagcttagcaactgttactgagtttatggttaatgggtctctcaaacagttcctgaggaaaaaagacaggacaatagatcgccggaagagagtaatattagccatggatgctgcatttggcatggaatatttgcacgggaagaatatagtccattttgacctgaagtgtgagaatctactggtgaacatgagggatccacagcgaccaatctgcaagatcggtgatctcgggctatcaaaggttaaacagcatactttggtatctggtggtgttagaggaaccttaccgtggatggcaccagagcttctgagtgggaaaaacaatatggtgtcagagaagattgacgtctattcgtttggaattgtcatgtgggagctgcttactggggaagagccatactctgatatgcgtgctgctgaaattattgtgatccagcggagagaccgtccttcactgatatatctcaaaggttgaggaaaatggccgctgcaatgaatgtgaagtgaaggttcggaagccatatttgtcttgattttccttagtcctggagtaacccggctgtcatttgccttgtgtcgaaaataagtatgctataaagcgttctgtcttgatgggaactgttgggctgtaattgtaaataagttttgacttgcttcatcttgctgtgcaaagtagtaattaataggcacgatcaaagctgggcacagttatcttttccccccatacaaaagtgtgtcctaggactaggaggagagatggatcgaacacgactagagctgtacatagtatactgtttgctctgtatataatcatcacttcctatttgaatgctcataagtttgcacagtcccttgtggtcttcctgttgagtcctaatcgaccagggtgattggtgaagccactgtctatccgaagagaccattg

SEQ ID NO: 201888 - DNA, 4212 bp, Zea Mays
ccgagaccaaaaataacagaaaggagagccgcgtgtcctcccagccactgccacccttccccacctatcgatctcgagttctctcgaccccacccgacccggagccgcaccgcctcgacccagaccggcgccgacgagccccagcgcccaatggcggcggctttcctcgccctggaggcccgcgtgacatgatccctgtcccccgaggatgggaatatcccccctccaccctcccttctcgactcttcctcgggtctctccttctccaccgcctcgcgctccgcaattggctgctcgtgctcgcgtggccccggatcgccgccagggaagtagctaattggtgctgggcataggacttgctggatttcagtcgtctgatatactgagacttagtagtgctgatccagtgaacctatccacaccaacttgattacagtctctctgacacaactatggcgccctctgccgctgccccaggcatctctgaggctgagggggcaccacgcatggccaagttcctctgcagctttggaggtagtatccttccccgaccacttgatggctgtcttcgatatgttggtggcgagacaaggattgtcatattgccgcgtgacatatcatatgccgacctagctgcacggatgagagatctctacaaggatgctgataccatcaaataccagcaacctgatgaggatctggatgcgctggtctcggtcgtgaatcacgatgatgtggtgaacatgatggaggagtatgacaaagtcactgccacaggggaggcgttcactcggctcaggatcttcttattttctcagcaattggatgacaatgctgcatcagtggctgtgcattacaatgtagacgagcgggaaacagagagaaggtatgtagatgcgctcaacagccttggtgatgttaggtcaccttcctcccctgtatctgtggagcagctttttggcatcggaggcaatgattcaggaattcctgattttgctggcttgagacatttgaatgtccctcgtccatcacatggtcagaggtatggagagatggattctccttggagccctgcttatgtctcaccaagccagtacagagtgcatgacccgagggattttccaatttcaccgtcatctgcaaggttccaagtaggagcggaggattttgatgacaggattcctgacgactttgtaaggcagtcaccaaaatatcattattatgaggctcaatcaccatcacatatggataatttagtctggcttccacctggtgctgtaattcagcaaaatgcaggtttccctggtgatttgagcaagcacaataaatttttggatgggaacagtggatgtgatcactgtggttcactattccacaagggtcagggttcggtgactgatcctatctatatgaatcctcgttggactcggccagtccaacaacattttgaccaaccaagcatgattaatgattatcccggtcaccatgctaattcttgtccagattactgccgccctggtgagcattatgcgggaggtcaagatgttagattggaaaatggtgtttatgttaaagagcaaaatggtggtcatactcccatgctttataatgagtcacgtcctcacgatagagtctggtatgcgcataccaaccaaagtcatcagcggtatgaggatccaaggctgcattatcctactaatgatagagtgatcgagccatacattgtcgatgctagctctgtaaattccgcatttgcaccaaacaaagtatatgaaatgcattcagcatctcttggtcattctagttctagccatgaaagtcctcactattttcatggtagcagtgagctcataaatgacgcatatcacaaccaacaagttggaggcagtgggtcatatgtgcagccagcagggtctgaagaatcccctggtcagcattacaaccacttttcggcctatggtgcagattccttttatcaaatgcaacaaaatttgccacccattcaatctttgaggaggagagcgaacagtcctgttcacactgcctcaccatatgattccccacacctgccaataccaaatgggagcattaacatgaattctgttagaaatacaggtgatgcgagtcccaggatagcaggtcttattggatatgatcgaatgccaaacccatttactccgcccaatggcagcatactatatagagttggtgggcatgatgttcctgcagctatggagaacactagtgcttttggtcctaggtctaatccaactgctgctcagtatgttcagccttttattgctcctgaatcaatccagcatcaacctggagttcccttgagggaggtttatcctgaaagagcataccctgaacccatgccgtcatcatatgctgatggcaaagtagctgtttctgcattgcccctcaccgaccaattattcaggttggatataaacacaatgaagaaacttgaaggacaagatgatgggaactctactcgaaatgtgaatgaaacaactcttttgcatgctgtggatgaaccaagtaccttaccccaccatgttggatctgtacatgaagtcgatcctaagcaggagaagctaaccgaaaaagaaagcaggcaaaagcaacatgaagctggggctacagcactgcaggaatgtgaggatatttcagaggatatgttgaatttccttcctgaattaattgcctctgttaaaaaggtaacactggaagatgctgctgagacacaaatagcccaatcagatgctaatgctgctgtttcacctgttcctgatgatgacgataatggaaagaagctggatgaggcaacagctggtaatacaaatgcaaatcaggaccttgatttgcaaggaagccttgatcggcagaagagtttcaagattgagtctacaactgctgaagctgaagctttgtcgaaaggactacagactataaaaaatgatgatttagaggaaattagagagctgggttcaggtacttatggggcggtctatcatggtaaatggaggggatgcgatgttgctattaaaagaataaaagcaagttgctttgctggaagaccatctgaaagagagcgtttgatcacggatttctggaaagaagctctgatcctaagctcacttcatcatccaaatgtggttgcattttatggtgtagttcgtgatggtccagatggaagcttagcaactgttactgagtttatggttaatgggtctctcaaacagttcctgaggaaaaaagacaggacaatagatcgccggaagagagtaatattagccatggatgctgcatttggcatggaatatttgcacgggaagaatatagtccattttgacctgaagtgtgagaatctactggtgaacatgagggatccacagcgaccaatctgcaagatcggtgatctcgggctatcaaaggttaaacagcatactttggtatctggtggtgttagaggaaccttaccgtggatggcaccagagcttctgagtgggaaaaacaatatggtgtcagagaagattgacgtctattcgtttggaattgtcatgtgggagctgcttactggggaagagccatactctgatatgcgtgctgctgaaattattggggccattgtaaacgattccttacgccctcaaatcccttcatggtgtgatcctgagtggaagggattgatggaaagctgttggtccagtgatccagcggagagaccgtccttcactgatatatctcaaaggttgaggaaaatggccgctgcaatgaatgtgaagtgaaggttcggaagccatatttgtcttgattttccttagtcctggagtaacccggctgtcatttgccttgtgtcgaaaataagtatgctataaagcgttctgtcttgatgggaactgttgggctgtaattgtaaataagttttgacttgcttcatcttgctgtgcaaagtagtaattaataggcacgatcaaagctgggcacagttatcttttccccccatacaaaagtgtgtcctaggactaggaggagagatggatcgaacacgactagagctgtacatagtatactgtttgctctgtatataatcatcacttcctatttgaatgctcataagtttgcacagtcccttgtggtcttcctgttgagtcctaatcgaccagggtgattggtgaagccactgtctatccgaagagaccattg

SEQ ID NO: 201889 - DNA, 4253 bp, Zea Mays
ccgagaccaaaaataacagaaaggagagccgcgtgtcctcccagccactgccacccttccccacctatcgatctcgagttctctcgaccccacccgacccggagccgcaccgcctcgacccagaccggcgccgacgagccccagcgcccaatggcggcggctttcctcgccctggaggcccgcgtgacatgatccctgtcccccgaggatgggaatatcccccctccaccctcccttctcgactcttcctcgggtctctccttctccaccgcctcgcgctccgcaattggctgctcgtgctcgcgtggccccggatcgccgccaggaagtagctaattggtgctgggcataggacttgctggatttcagtcgtctgatatactgagacttagtagtgctgatccagtgaacctatccacaccaacttgattacagtctctctgacacaactatggcgccctctgccgctgccccaggcatctctgaggctgagggggcaccacgcatggccaagttcctctgcagctttggaggtagtatccttccccgaccacttgatggctgtcttcgatatgttggtggcgagacaaggattgtcatattgccgcgtgacatatcatatgccgacctagctgcacggatgagagatctctacaaggatgctgataccatcaaataccagcaacctgatgaggatctggatgcgctggtctcggtcgtgaatcacgatgatgtggtgaacatgatggaggagtatgacaaagtcactgccacaggggaggcgttcactcggctcaggatcttcttattttctcagcaattggatgacaatgctgcatcagtggctgtgcattacaatgtagacgagcgggaaacagagagaaggtatgtagatgcgctcaacagccttggtgatgttaggtcaccttcctcccctgtatctgtggagcagctttttggcatcggaggcaatgattcaggaattcctgattttgctggcttgagacatttgaatgtccctcgtccatcacatggtcagaggtatggagagatggattctccttggagccctgcttatgtctcaccaagccagtacagagtgcatgacccgagggattttccaatttcaccgtcatctgcaaggttccaagtaggagcggaggattttgatgacaggattcctgacgactttgtaaggcagtcaccaaaatatcattattatgaggctcaatcaccatcacatatggataatttagtctggcttccacctggtgctgtaattcagcaaaatgcaggtttccctggtgatttgagcaagcacaataaatttttggatgggaacagtggatgtgatcactgtggttcactattccacaagggtcagggttcggtgactgatcctatctatatgaatcctcgttggactcggccagtccaacaacattttgaccaaccaagcatgattaatgattatcccggtcaccatgctaattcttgtccagattactgccgccctggtgagcattatgcgggaggtcaagatgttagattggaaaatggtgtttatgttaaagagcaaaatggtggtcatactcccatgctttataatgagtcacgtcctcacgatagagtctggtatgcgcataccaaccaaagtcatcagcggtatgaggatccaaggctgcattatcctactaatgatagagtgatcgagccatacattgtcgatgctagctctgtaaattccgcatttgcaccaaacaaagtatatgaaatgcattcagcatctcttggtcattctagttctagccatgaaagtcctcactattttcatggtagcagtgagctcataaatgacgcatatcacaaccaacaagttggaggcagtgggtcatatgtgcagccagcagggtctgaagaatcccctggtcagcattacaaccacttttcggcctatggtgcagattccttttatcaaatgcaacaaaatttgccacccattcaatctttgaggaggagagcgaacagtcctgttcacactgcctcaccatatgattccccacacctgccaataccaaatgggagcattaacatgaattctgttagaaatacaggtgatgcgagtcccaggatagcaggtcttattggatatgatcgaatgccaaacccatttactccgcccaatggcagcatactatatagagttggtgggcatgatgttcctgcagctatggagaacactagtgcttttggtcctaggtctaatccaactgctgctcagtatgttcagccttttattgctcctgaatcaatccagcatcaacctggagttcccttgagggaggtttatcctgaaagagcataccctgaacccatgccgtcatcatatgctgatggcaaagtagctgtttctgcattgcccctcaccgaccaattattcaggttggatataaacacaatgaagaaacttgaaggacaagatgatgggaactctactcgaaatgtgaatgaaacaactcttttgcatgctgtggatgaaccaagtaccttaccccaccatgttggatctgtacatgaagtcgatcctaagcaggagaagctaaccgaaaaagaaagcaggcaaaagcaacatgaagctggggctacagcactgcaggaatgtgaggatatttcagaggatatgttgaatttccttcctgaattaattgcctctgttaaaaaggtaacactggaagatgctgctgagacacaaatagcccaatcagatgctaatgctgctgtttcacctgttcctgatgatgacgataatggaaagaagctggatgaggcaacagctggtaatacaaatgcaaatcaggaccttgatttgcaaggaagccttgatcggcagaagagtttcaagattgagtctacaactgctgaagctgaagctttgtcgaaaggactacagactataaaaaatgatgatttagaggaaattagagagctgggttcaggtacttatggggcggtctatcatggtaaatggaggggatgcgatgttgctattaaaagaataaaagcaagttgctttgctggaagaccatctgaaagagagcgtttgatcacggatttctggaaagaagctctgatcctaagctcacttcatcatccaaatgtggttgcattttatggtgtagttcgtgatggtccagatggaagcttagcaactgttactgagtttatggttaatgggtctctcaaacagttcctgaggaaaaaagacaggacaatagatcgccggaagagagtaatattagccatggatgctgcatttggcatggaatatttgcacgggaagaatatagtccattttgacctgaagtgtgagaatctactggtgaacatgagggatccacagcgaccaatctgcaagatcggtgatctcgggctatcaaaggttaaacagcatactttggtatctggtggtgttagaggaaccttaccgtggatggcaccagagcttctgagtgggaaaaacaatatggtgtcagagaagattgacgtctattcgtttggaattgtcatgtgggagctgcttactggggaagagccatactctgatatgcgtgctgctgaaattattggggccattgtaaacgattccttacgccctcaaatcccttcatggtgtgatcctgagtggaagggattgatggaaagctgttggtccagtgatccagcggagagaccgtccttcactgatatatctcaaaggttgaggaaaatggccgctgcaatgaatgtgaagtgaaggttcggaagccatatttgtcttgtaagtgttcccacatccagtataagtgattacaagaggaaggattttccttagtcctggagtaacccggctgtcatttgccttgtgtcgaaaataagtatgctataaagcgttctgtcttgatgggaactgttgggctgtaattgtaaataagttttgacttgcttcatcttgctgtgcaaagtagtaattaataggcacgatcaaagctgggcacagttatcttttccccccatacaaaagtgtgtcctaggactaggaggagagatggatcgaacacgactagagctgtacatagtatactgtttgctctgtatataatcatcacttcctatttgaatgctcataagtttgcacagtcccttgtggtcttcctgttgagtcctaatcgaccagggtgattggtgaagccactgtctatccgaagagaccattg

SEQ ID NO: 201890 - DNA, 4359 bp, Zea Mays
ccgagaccaaaaataacagaaaggagagccgcgtgtcctcccagccactgccacccttccccacctatcgatctcgagttctctcgaccccacccgacccggagccgcaccgcctcgacccagaccggcgccgacgagccccagcgcccaatggcggcggctttcctcgccctggaggcccgcgtgacatgatccctgtcccccgaggatgggaatatcccccctccaccctcccttctcgactcttcctcgggtctctccttctccaccgcctcgcgctccgcaattggctgctcgtgctcgcgtggccccggatcgccgccaggaagtagctaattggtgctgggcataggacttgctggatttcagtcgtctgatatactgagacttagtagtgctgatccagtgaacctatccacaccaacttgattacagtctctctgacacaactatggcgccctctgccgctgccccaggcatctctgaggctgagggggcaccacgcatggccaagttcctctgcagctttggaggtagtatccttccccgaccacttgatggctgtcttcgatatgttggtggcgagacaaggattgtcatattgccgcgtgacatatcatatgccgacctagctgcacggatgagagatctctacaaggatgctgataccatcaaataccagcaacctgatgaggatctggatgcgctggtctcggtcgtgaatcacgatgatgtggtgaacatgatggaggagtatgacaaagtcactgccacaggggaggcgttcactcggctcaggatcttcttattttctcagcaattggatgacaatgctgcatcagtggctgtgcattacaatgtagacgagcgggaaacagagagaaggtatgtagatgcgctcaacagccttggtgatgttaggtcaccttcctcccctgtatctgtggagcagctttttggcatcggaggcaatgattcaggaattcctgattttgctggcttgagacatttgaatgtccctcgtccatcacatggtcagaggtatggagagatggattctccttggagccctgcttatgtctcaccaagccagtacagagtgcatgacccgagggattttccaatttcaccgtcatctgcaaggttccaagtaggagcggaggattttgatgacaggattcctgacgactttgtaaggcagtcaccaaaatatcattattatgaggctcaatcaccatcacatatggataatttagtctggcttccacctggtgctgtaattcagcaaaatgcaggtttccctggtgatttgagcaagcacaataaatttttggatgggaacagtggatgtgatcactgtggttcactattccacaagggtcagggttcggtgactgatcctatctatatgaatcctcgttggactcggccagtccaacaacattttgaccaaccaagcatgattaatgattatcccggtcaccatgctaattcttgtccagattactgccgccctggtgagcattatgcgggaggtcaagatgttagattggaaaatggtgtttatgttaaagagcaaaatggtggtcatactcccatgctttataatgagtcacgtcctcacgatagagtctggtatgcgcataccaaccaaagtcatcagcggtatgaggatccaaggctgcattatcctactaatgatagagtgatcgagccatacattgtcgatgctagctctgtaaattccgcatttgcaccaaacaaagtatatgaaatgcattcagcatctcttggtcattctagttctagccatgaaagtcctcactattttcatggtagcagtgagctcataaatgacgcatatcacaaccaacaagttggaggcagtgggtcatatgtgcagccagcagggtctgaagaatcccctggtcagcattacaaccacttttcggcctatggtgcagattccttttatcaaatgcaacaaaatttgccacccattcaatctttgaggaggagagcgaacagtcctgttcacactgcctcaccatatgattccccacacctgccaataccaaatgggagcattaacatgaattctgttagaaatacaggtgatgcgagtcccaggatagcaggtcttattggatatgatcgaatgccaaacccatttactccgcccaatggcagcatactatatagagttggtgggcatgatgttcctgcagctatggagaacactagtgcttttggtcctaggtctaatccaactgctgctcagtatgttcagccttttattgctcctgaatcaatccagcatcaacctggagttcccttgagggaggtttatcctgaaagagcataccctgaacccatgccgtcatcatatgctgatggcaaagtagctgtttctgcattgcccctcaccgaccaattattcaggttggatataaacacaatgaagaaacttgaaggacaagatgatgggaactctactcgaaatgtgaatgaaacaactcttttgcatgctgtggatgaaccaagtaccttaccccaccatgttggatctgtacatgaagtcgatcctaagcaggagaagctaaccgaaaaagaaagcaggcaaaagcaacatgaagctggggctacagcactgcaggaatgtgaggatatttcagaggatatgttgaatttccttcctgaattaattgcctctgttaaaaagctggatgaggcaacagctggtaatacaaatgcaaatcaggaccttgatttgcaaggaagccttgatcggcagaagagtttcaagattgagtctacaactgctgaagctgaagctttgtcgaaaggactacagactataaaaaatgatgatttagaggaaattagagagctgggttcaggtacttatggggcggtctatcatggtaaatggaggggatgcgatgttgctattaaaagaataaaagcaagttgctttgctggaagaccatctgaaagagagcgtttgatcacggatttctggaaagaagctctgatcctaagctcacttcatcatccaaatgtggttgcattttatggtgtagttcgtgatggtccagatggaagcttagcaactgttactgagtttatggttaatgggtctctcaaacagttcctgaggaaaaaagacaggacaatagatcgccggaagagagtaatattagccatggatgctgcatttggcatggaatatttgcacgggaagaatatagtccattttgacctgaagtgtgagaatctactggtgaacatgagggatccacagcgaccaatctgcaagatcggtgatctcgggctatcaaaggttaaacagcatactttggtatctggtggtgttagaggaaccttaccgtggatggcaccagagcttctgagtgggaaaaacaatatggtgtcagagaagattgacgtctattcgtttggaattgtcatgtgggagctgcttactggggaagagccatactctgatatgcgtgctgctgaaattattggggccattgtaaacgattccttacgccctcaaatcccttcatggtgtgatcctgagtggaagggattgatggaaagctgttggtccagtgatccagcggagagaccgtccttcactgatatatctcaaaggttgaggaaaatggccgctgcaatgaatgtgaagtgaaggttcggaagccatatttgtcttgtaagtgttcccacatccagtataagtgattacaagaggaaggtagagttcaaacaggattgatttgagtaaatatgcccaaaatgtcttggcagcatctcagtttaccctactccaagtgataattttattatgtcatggagattccaaagcatgtttgatgcgagccagctgttgggtttatttactccttgtatgaccattagtaaaagggaaaactgacgtttctgcttacctgtttcaggattttccttagtcctggagtaacccggctgtcatttgccttgtgtcgaaaataagtatgctataaagcgttctgtcttgatgggaactgttgggctgtaattgtaaataagttttgacttgcttcatcttgctgtgcaaagtagtaattaataggcacgatcaaagctgggcacagttatcttttccccccatacaaaagtgtgtcctaggactaggaggagagatggatcgaacacgactagagctgtacatagtatactgtttgctctgtatataatcatcacttcctatttgaatgctcataagtttgcacagtcccttgtggtcttcctgttgagtcctaatcgaccagggtgattggtgaagccactgtctatccgaagagaccattg

SEQ ID NO: 201891 - DNA, 4334 bp, Zea Mays
ccgagaccaaaaataacagaaaggagagccgcgtgtcctcccagccactgccacccttccccacctatcgatctcgagttctctcgaccccacccgacccggagccgcaccgcctcgacccagaccggcgccgacgagccccagcgcccaatggcggcggctttcctcgccctggaggcccgcgtgacatgatccctgtcccccgaggatgggaatatcccccctccaccctcccttctcgactcttcctcgggtctctccttctccaccgcctcgcgctccgcaattggctgctcgtgctcgcgtggccccggatcgccgccaggtccgggaacaagaacaaatgttgcaagaagacatgaaatgggaaagaccgagagagcaagagggaaagataccgtggattggttgggcggtggccggtgctgcagctcatggaacttgaatggaagtagctaattggtgctgggcataggacttgctggatttcagtcgtctgatatactgagacttagtagtgctgatccagtgaacctatccacaccaacttgattacagtctctctgacacaactatggcgccctctgccgctgccccaggcatctctgaggctgagggggcaccacgcatggccaagttcctctgcagctttggaggtagtatccttccccgaccacttgatggctgtcttcgatatgttggtggcgagacaaggattgtcatattgccgcgtgacatatcatatgccgacctagctgcacggatgagagatctctacaaggatgctgataccatcaaataccagcaacctgatgaggatctggatgcgctggtctcggtcgtgaatcacgatgatgtggtgaacatgatggaggagtatgacaaagtcactgccacaggggaggcgttcactcggctcaggatcttcttattttctcagcaattggatgacaatgctgcatcagtggctgtgcattacaatgtagacgagcgggaaacagagagaaggtatgtagatgcgctcaacagccttggtgatgttaggtcaccttcctcccctgtatctgtggagcagctttttggcatcggaggcaatgattcaggaattcctgattttgctggcttgagacatttgaatgtccctcgtccatcacatggtcagaggtatggagagatggattctccttggagccctgcttatgtctcaccaagccagtacagagtgcatgacccgagggattttccaatttcaccgtcatctgcaaggttccaagtaggagcggaggattttgatgacaggattcctgacgactttgtaaggcagtcaccaaaatatcattattatgaggctcaatcaccatcacatatggataatttagtctggcttccacctggtgctgtaattcagcaaaatgcaggtttccctggtgatttgagcaagcacaataaatttttggatgggaacagtggatgtgatcactgtggttcactattccacaagggtcagggttcggtgactgatcctatctatatgaatcctcgttggactcggccagtccaacaacattttgaccaaccaagcatgattaatgattatcccggtcaccatgctaattcttgtccagattactgccgccctggtgagcattatgcgggaggtcaagatgttagattggaaaatggtgtttatgttaaagagcaaaatggtggtcatactcccatgctttataatgagtcacgtcctcacgatagagtctggtatgcgcataccaaccaaagtcatcagcggtatgaggatccaaggctgcattatcctactaatgatagagtgatcgagccatacattgtcgatgctagctctgtaaattccgcatttgcaccaaacaaagtatatgaaatgcattcagcatctcttggtcattctagttctagccatgaaagtcctcactattttcatggtagcagtgagctcataaatgacgcatatcacaaccaacaagttggaggcagtgggtcatatgtgcagccagcagggtctgaagaatcccctggtcagcattacaaccacttttcggcctatggtgcagattccttttatcaaatgcaacaaaatttgccacccattcaatctttgaggaggagagcgaacagtcctgttcacactgcctcaccatatgattccccacacctgccaataccaaatgggagcattaacatgaattctgttagaaatacaggtgatgcgagtcccaggatagcaggtcttattggatatgatcgaatgccaaacccatttactccgcccaatggcagcatactatatagagttggtgggcatgatgttcctgcagctatggagaacactagtgcttttggtcctaggtctaatccaactgctgctcagtatgttcagccttttattgctcctgaatcaatccagcatcaacctggagttcccttgagggaggtttatcctgaaagagcataccctgaacccatgccgtcatcatatgctgatggcaaagtagctgtttctgcattgcccctcaccgaccaattattcaggttggatataaacacaatgaagaaacttgaaggacaagatgatgggaactctactcgaaatgtgaatgaaacaactcttttgcatgctgtggatgaaccaagtaccttaccccaccatgttggatctgtacatgaagtcgatcctaagcaggagaagctaaccgaaaaagaaagcaggcaaaagcaacatgaagctggggctacagcactgcaggaatgtgaggatatttcagaggatatgttgaatttccttcctgaattaattgcctctgttaaaaaggtaacactggaagatgctgctgagacacaaatagcccaatcagatgctaatgctgctgtttcacctgttcctgatgatgacgataatggaaagaagctggatgaggcaacagctggtaatacaaatgcaaatcaggaccttgatttgcaaggaagccttgatcggcagaagagtttcaagattgagtctacaactgctgaagctgaagctttgtcgaaaggactacagactataaaaaatgatgatttagaggaaattagagagctgggttcaggtacttatggggcggtctatcatggtaaatggaggggatgcgatgttgctattaaaagaataaaagcaagttgctttgctggaagaccatctgaaagagagcgtttgatcacggatttctggaaagaagctctgatcctaagctcacttcatcatccaaatgtggttgcattttatggtgtagttcgtgatggtccagatggaagcttagcaactgttactgagtttatggttaatgggtctctcaaacagttcctgaggaaaaaagacaggacaatagatcgccggaagagagtaatattagccatggatgctgcatttggcatggaatatttgcacgggaagaatatagtccattttgacctgaagtgtgagaatctactggtgaacatgagggatccacagcgaccaatctgcaagatcggtgatctcgggctatcaaaggttaaacagcatactttggtatctggtggtgttagaggaaccttaccgtggatggcaccagagcttctgagtgggaaaaacaatatggtgtcagagaagattgacgtctattcgtttggaattgtcatgtgggagctgcttactggggaagagccatactctgatatgcgtgctgctgaaattattggggccattgtaaacgattccttacgccctcaaatcccttcatggtgtgatcctgagtggaagggattgatggaaagctgttggtccagtgatccagcggagagaccgtccttcactgatatatctcaaaggttgaggaaaatggccgctgcaatgaatgtgaagtgaaggttcggaagccatatttgtcttgattttccttagtcctggagtaacccggctgtcatttgccttgtgtcgaaaataagtatgctataaagcgttctgtcttgatgggaactgttgggctgtaattgtaaataagttttgacttgcttcatcttgctgtgcaaagtagtaattaataggcacgatcaaagctgggcacagttatcttttccccccatacaaaagtgtgtcctaggactaggaggagagatggatcgaacacgactagagctgtacatagtatactgtttgctctgtatataatcatcacttcctatttgaatgctcataagtttgcacagtcccttgtggtcttcctgttgagtcctaatcgaccagggtgattggtgaagccactgtctatccgaagagaccattg

SEQ ID NO: 201892 - DNA, 4245 bp, Zea Mays
ccgtagcgtgtgccgccgcaacacccaggcaagcccgagaccaaaaataacagaaaggagagccgcgtgtcctcccagccactgccacccttccccacctatcgatctcgagttctctcgaccccacccgacccggagccgcaccgcctcgacccagaccggcgccgacgagccccagcgcccaatggcggcggctttcctcgccctggaggcccgcgtgacatgatccctgtcccccgaggatgggaatatcccccctccaccctcccttctcgactcttcctcgggtctctccttctccaccgcctcgcgctccgcaattggctgctcgtgctcgcgtggccccggatcgccgccaggaagtagctaattggtgctgggcataggacttgctggatttcagtcgtctgatatactgagacttagtagtgctgatccagtgaacctatccacaccaacttgattacagtctctctgacacaactatggcgccctctgccgctgccccaggcatctctgaggctgagggggcaccacgcatggccaagttcctctgcagctttggaggtagtatccttccccgaccacttgatggctgtcttcgatatgttggtggcgagacaaggattgtcatattgccgcgtgacatatcatatgccgacctagctgcacggatgagagatctctacaaggatgctgataccatcaaataccagcaacctgatgaggatctggatgcgctggtctcggtcgtgaatcacgatgatgtggtgaacatgatggaggagtatgacaaagtcactgccacaggggaggcgttcactcggctcaggatcttcttattttctcagcaattggatgacaatgctgcatcagtggctgtgcattacaatgtagacgagcgggaaacagagagaaggtatgtagatgcgctcaacagccttggtgatgttaggtcaccttcctcccctgtatctgtggagcagctttttggcatcggaggcaatgattcaggaattcctgattttgctggcttgagacatttgaatgtccctcgtccatcacatggtcagaggtatggagagatggattctccttggagccctgcttatgtctcaccaagccagtacagagtgcatgacccgagggattttccaatttcaccgtcatctgcaaggttccaagtaggagcggaggattttgatgacaggattcctgacgactttgtaaggcagtcaccaaaatatcattattatgaggctcaatcaccatcacatatggataatttagtctggcttccacctggtgctgtaattcagcaaaatgcaggtttccctggtgatttgagcaagcacaataaatttttggatgggaacagtggatgtgatcactgtggttcactattccacaagggtcagggttcggtgactgatcctatctatatgaatcctcgttggactcggccagtccaacaacattttgaccaaccaagcatgattaatgattatcccggtcaccatgctaattcttgtccagattactgccgccctggtgagcattatgcgggaggtcaagatgttagattggaaaatggtgtttatgttaaagagcaaaatggtggtcatactcccatgctttataatgagtcacgtcctcacgatagagtctggtatgcgcataccaaccaaagtcatcagcggtatgaggatccaaggctgcattatcctactaatgatagagtgatcgagccatacattgtcgatgctagctctgtaaattccgcatttgcaccaaacaaagtatatgaaatgcattcagcatctcttggtcattctagttctagccatgaaagtcctcactattttcatggtagcagtgagctcataaatgacgcatatcacaaccaacaagttggaggcagtgggtcatatgtgcagccagcagggtctgaagaatcccctggtcagcattacaaccacttttcggcctatggtgcagattccttttatcaaatgcaacaaaatttgccacccattcaatctttgaggaggagagcgaacagtcctgttcacactgcctcaccatatgattccccacacctgccaataccaaatgggagcattaacatgaattctgttagaaatacaggtgatgcgagtcccaggatagcaggtcttattggatatgatcgaatgccaaacccatttactccgcccaatggcagcatactatatagagttggtgggcatgatgttcctgcagctatggagaacactagtgcttttggtcctaggtctaatccaactgctgctcagtatgttcagccttttattgctcctgaatcaatccagcatcaacctggagttcccttgagggaggtttatcctgaaagagcataccctgaacccatgccgtcatcatatgctgatggcaaagtagctgtttctgcattgcccctcaccgaccaattattcaggttggatataaacacaatgaagaaacttgaaggacaagatgatgggaactctactcgaaatgtgaatgaaacaactcttttgcatgctgtggatgaaccaagtaccttaccccaccatgttggatctgtacatgaagtcgatcctaagcaggagaagctaaccgaaaaagaaagcaggcaaaagcaacatgaagctggggctacagcactgcaggaatgtgaggatatttcagaggatatgttgaatttccttcctgaattaattgcctctgttaaaaaggtaacactggaagatgctgctgagacacaaatagcccaatcagatgctaatgctgctgtttcacctgttcctgatgatgacgataatggaaagaagctggatgaggcaacagctggtaatacaaatgcaaatcaggaccttgatttgcaaggaagccttgatcggcagaagagtttcaagattgagtctacaactgctgaagctgaagctttgtcgaaaggactacagactataaaaaatgatgatttagaggaaattagagagctgggttcaggtacttatggggcggtctatcatggtaaatggaggggatgcgatgttgctattaaaagaataaaagcaagttgctttgctggaagaccatctgaaagagagcgtttgatcacggatttctggaaagaagctctgatcctaagctcacttcatcatccaaatgtggttgcattttatggtgtagttcgtgatggtccagatggaagcttagcaactgttactgagtttatggttaatgggtctctcaaacagttcctgaggaaaaaagacaggacaatagatcgccggaagagagtaatattagccatggatgctgcatttggcatggaatatttgcacgggaagaatatagtccattttgacctgaagtgtgagaatctactggtgaacatgagggatccacagcgaccaatctgcaagatcggtgatctcgggctatcaaaggttaaacagcatactttggtatctggtggtgttagaggaaccttaccgtggatggcaccagagcttctgagtgggaaaaacaatatggtgtcagagaagattgacgtctattcgtttggaattgtcatgtgggagctgcttactggggaagagccatactctgatatgcgtgctgctgaaattattggggccattgtaaacgattccttacgccctcaaatcccttcatggtgtgatcctgagtggaagggattgatggaaagctgttggtccagtgatccagcggagagaccgtccttcactgatatatctcaaaggttgaggaaaatggccgctgcaatgaatgtgaagtgaaggttcggaagccatatttgtcttgattttccttagtcctggagtaacccggctgtcatttgccttgtgtcgaaaataagtatgctataaagcgttctgtcttgatgggaactgttgggctgtaattgtaaataagttttgacttgcttcatcttgctgtgcaaagtagtaattaataggcacgatcaaagctgggcacagttatcttttccccccatacaaaagtgtgtcctaggactaggaggagagatggatcgaacacgactagagctgtacatagtatactgtttgctctgtatataatcatcacttcctatttgaatgctcataagtttgcacagtcccttgtggtcttcctgttgagtcctaatcgaccagggtgattggtgaagccactgtctatccgaagagaccattg

SEQ ID NO: 201893 - DNA, 1999 bp, Zea Mays
acagaaccccccacggaaatgcgtcgcccaatcgctttcgaacccctccccttccagctcgttgcgagctcccatttttgaccttcaccagcgccaccttccacgccaaggctacgacgacaatggtggcgaggagcccgaacgccaagccggacaggcagaaggctgcagccctcgccgcggctgccgcgctcaacccggctctcctcagggagacgctcaagaaggagctgcagtacacggtagccggcggcgccaaggtcgtctccggcgtcagtctcagcccccgcagcacgcgcgggtacctccggaccagcctccggtgcaagcaggagaccgtcaggatgaggggcggcgcgtcggcgcagaagaggtccccaagcggcaagttcgggggcggcgtcggcggagagggcgcgcagtggcgacgaatgtcgctgccggcgatgctgctcggcgagaccgtgctagagatcgtgcaggccagccagttcgcgcgggacatcgtgacggccgccggcgctacgaatcgggagcccccaaggaccccgaaaccggctcccaggaccaggaagccggcggcgggcgagccgacgcctctccgcgcgcggcgtgcccgggagaagcagagccatcggggtggcgccgcgacacggggcgccgacgccgccacgccgccgtcgcgcagccgcgtgcggtcccggatccagttcaagcccgtgtcgccggtcgccgtcggccggccgtccgtgtccgccaaccgcgtctcccccaagaaccggccgtgggcaaagaaggcggtgatgttcccgaaccccacgttccacgcctccacctctgccgccaccgacccgtgcgcgacgccgtcgccttccaagaagcagaagcggctctacaagacgcggtccccggtcgcggcccggcagacgccgcacaagttcctggtcaagtcgccaccgagcgcgctgggatcgaagctcaggatgcacgggaaggccctgcccgcgagacccgccgccgtgtcaccgccgccgcccgtgaaggcgcaggcatcacctgcaaaaacgcggcgctgctcgttctcgccgtcgaggttggcgacaaggctcatgtcgcctatcaaagcgaggctgtcgctgggcaggagcagggacagcggcgtcggtgtcggcggtggcccgatgagcgggctgaagcagcggccaggtgttagcttgacggtgcggacggtgtcgagcaagatatcatcgaggtgatgatcttcgtttgtcttcggcgtcatgtgaagacgagagggggtacagattgcagagaagagaattgcgttgatcttcttcagaaataagatattctctgctgggaaagcctcctgtcttggggtgcttgtacacacactcgttacggttatatgtaattttcgttgatccttggtgataatacaggggtggtctcctcgaccctataatcgaaaggcaatacacttgatctgcgattgttgttcagtcaggacttgaggctttcagaagatactgcgcttgcactagaatctcggaaattttgcaaacagcaatttcggaagctgcaattcagcaggatcaagcagccggcgggaccaaacaagttacttttaagggcagtgccgatgagacttggacttggaagcaagcacgtgctcgcccgtcaaaggtctagctgtcaggctctactacaagcactacctgctaaatactttgttggtagggtgtttcagtgtttgaatgcactcaactaatagttagcttcttaaattagttgaagacatccaaacagtctatttgatagttcaactattagttatttttatcaaattgcctaatagttggctgctaactaattctcctagcaatttgtagccaactaactattagctctagtggattcaaacactttcttaagacaatatttgaatgcactagaactaataggtgactgctaaaattgaataaaagagtacattctt

SEQ ID NO: 201894 - DNA, 2088 bp, Zea Mays
gttggtggttcgttgatcgccgttgggccacccgttgagattgcgcacaataataagtggcacgcttcggcgtagcaagctagcggcagcggaagccgcacagcagaagaagaagaaaaaatcctccccactaacaatgtcgtcgtctccttcctcggcccactggctgagcttggtagggagcgtctggctccagaccgtcaacggccccaacgccgacttcgccgtctactcgtcgcagctcaaggagaccaagggcatctcgcaggtgcagctcaacttcctcgccttcgcctccgacgccggcaagctcttcggctggctcgcgggtgtggccgcgctgcgcctcccgctctgggtggtggcgctgaccggggccacgttcggcctcgtcgggtacggcgtccagttcctgttcctcgacagggccggcctcgcgtactggcacatgttcgcgctcacctccctcgccggcaacggcatctgctgggtcaacaccgtgtgctacctcctctgcatcaacaacttccctgcccacagccgcgtcgcggtcagcctggccacgagctacctcgggctcagcgccaagttctacaccaccatggcggacaccatccccagggcggcgagggcgaggtactccaccgcggaggtgtacctcctcctcaatgccgtcgtcccgatggccgtcgcgctcgtggcggcgccgtccctccgggtggtggaactcaaggagggccgccgcaggaggaccgaagcgccgttcctcgccatgttcgtgatcaccctggccaccggagcctgcgccgtcgtcggcagcgtaggggccaagtccatcgggctctcgtctagagcacacatggtcagcctctacgtgctgctcgccctgcctctgctgatcccagtgtggctcagagtcagggagggcacggccaagatacgcgagagtatgtgggagaaccgggtccacgatcacgactccgacgggcccgagtccgagacggcggtacccgcgccggtgtcggtggtcgagattcaggcggaggacaagcaggaggaggcaggggcggagctccaacgacagaataatggtcaacaagaggaggtcggcggcctccgcttgctgagactatttgacttctggctgtactttctcagctacatgttcagcggcactctgggtctggtcttcctcaacaacctgggacagatcgcagactcgcgaggactcaccgatgcgtccactctagtctccctgtcctcctcgttcggcttcttcggtcgtctccttcccgccttcttggactactacactgccaatggctactccctatcaagaacggcgtccatggcgtggctgatggcccccatgcccggcgcgttcctcctgctgctgcacccgaagaacatgtccctgtacgccagcacggccgtggtcggcacgtgcacgggcgccatcacctcggtggccgcatcgacgacgaacgagctgttcggcacgaagaacttcggcgtcaaccacaacgtagtggtggccaacatccccctgggctcgctctgcttcggctacctggccgcgttcctgtaccagaggggcgcgcacggcggcaaccgatgcctcggcgccgcctgctaccgggacagcttcatcctctggggcgcgacgtgcgccctgggcacggcgctgtgcaccgtgctgtacgtgcggtcgcgccgttcccccgggaggctacctcgctagggcgctggttggctaacgcagatgacgacgacgacgatggtgataacgagggaccagaagcttctctgatgaacgagtttagctgttcactagatgcgacaggattgagttgagaggagaataaaatatctagagagtgctgctaggtggacatagcatctttttttttctttttaggattgttttgctttgttagtttgttgacagttgacacacagtccggctttggagaggcactggaaatctctctgcatgcttatatgggtgaaacggaacagagtacctgtaaacagtgctggaaattgcaacttttgccaggccagcggtaaatcctacgttctgacaca

SEQ ID NO: 201895 - DNA, 1545 bp, Zea Mays
gtatagagcaagatggcgtgcgggtatgactattcaggatatgggcaatcatcaggaaagccgagtgaacacaatacttatgctgacatagaggcagcttacaagtgcctcatagagaaatttggtgccaaggaagaagaaataattctttatggacaatctgttggaagtgggcctactgtagatttggccagtcgtttatctcagctgcgagctgttgtcctgcatagtcctatattgtcagggctgagagttatgtatcctgtgaagcgcacatattggtttgacatctacaagaatattgataaaatccctcaagttacatgtcctgtgctcattatacatggaactgctgatgaagtggtggattggtctcatggtaaacaactttgggaactttgcaaagacaagtatgagcccttatggctcaggggaggaaagcactgtgatttggagctctttccggaatacatccggcacctcaagaattttttccactcactagagaaatcgccatcccataggcaagcatggagggagaatgtggaccggattgaaccctcgcggaagagcactgatttctttgaaccctcgcgaaagagcacagaccaaaggaaaaaatcaaggtcaactcgagataagacgagaaacactgaacatagatatagcaacgtcgagaaggtagacaagctaaagatatcatttgatcagttcgagaaatccaggagaagtgttgatatcttcgagaggccaaagaggaacattgagcagctggattgtggccggaagagtgtcgacagattggacaggatctgggctagttaattcctttctttcacatgatatacaggttgggcttcggttgttttgggggattttacaggtgtggcgttaagagttgattcaccgacactaaaggagccaagcgtcgttgacgaggcttcgtgtagatgtgatggcttgtgtggtgggagaagtgtatgttgttggtcttcaaaaaaattgttatctggtcttaaactaaatgacactggggaggagtccatggcagcattgtgtataatctaatgctttggatcaacgatgtttttttcttctatttcattgaatcgaacttttccttccatggatattggctgtgtatggattttacggaccgtgaagttaaaagaaaggtgaattagataacttacaatatatttctaatactatggcttttaattttattttaatgaaacttttattttaacaaaactatgctaatttctaatttatcaaaatctatataataaaatggtgtatcttgatgtgtaattaaggttttgataaatatgttgctatatttatcgtaaaagagtaggctagtttctaactctatcactaggtatccaactatataaaggacacaacttaaatgcgtaatataaataaaaaaactcaacagtaccgttgaataattagatagtttctatattgaatttcgaatatagatagcatgctagtttctatattgaatttcgaatatagatagcatgctgttcttat

SEQ ID NO: 201896 - DNA, 633 bp, Zea Mays
cccggcacttccctccggcgctgcctggtacacctgctatgacctcaaggggtttggttgagaaggacttcgtgcagattgccgagtaccttcaccgagctgtgaccatctgcttgagcatccaggcggagcatggcaagattctcaaggacttcaagaagggcttggtgcaaaacaaggacatagagaacctgagggcggaggtcgagaagttcgccacttcatttgacatgcctggcttcagggtgtctgacatgaagtacacagactagactgctgctgacttgggtgcaaaccgttgctcctgttacagtaacactggcaggctggtgcaatgcaaaccgttcttctgttacggtaatattaacgcctctgaaatgtcacgtgaatggtggtaaacctgaatttcacacgactagagggatggtttactttctattcagtgctctgccattctgttggcctgctattccgtcggtctattttgttggaactgataataatatgtttagagaataatgattgagaaagaaaatggcattgcactggagataattctgcttagctcggccttccagaagctctatgataaaccccccttgatttgttagttggcttgatatgacacgctgg

SEQ ID NO: 201897 - DNA, 1114 bp, Zea Mays
tgcgattgttatacaccaacatatatctcttataaagagatacaggctccaagaatccgcatctattcaagtcactctccaaaatgtggatagcttgtgcacaccgtggcaatcaaatcaccagtgcacgcaggatggtcacatttgctatccagaaactggaatatctaagttttcacttgtgtttggtaggcaaacagaaaactgcctcctccgctatataagcatatggcctgctcagttttctatatccattgctcccaccagttgatacatgtcttgtgacttgtgaagtgtgttcctatctgcatcaccttccttcgccttgcaaccctttggctagttcattcatacgaatggattattctaatttgcgtcgccaagctgcatccatgaaaaagactctctttgatcaggggtacctagatgagcaattttgccaggtggaagacttgcaggatgaagctagtcctaatttcgcggaagaggttgtcactttgtttttcaaggactcggccaggctaatatcaaatgctgaacaggctctggaaaaataccccaaagatttcaatagatgggatgcatacatgcagcagctaaaaggcagctgttccagcattggtgcttcaaggatgaagagtgagtgcgtgtcattccgggattactgcggacagggaaatgttgaagttgtatgagatcgttccagaaagtgaagagggagcacggtgccctgaggcagaaactagaggcctatttccagctgctacgacaagctggtcctgctggagctgccaccaggcctggatgtaagaactaggagttgcaggaaaacggagtatgacccaagaagatacctcactacaactgactggcccagtggccctgctgcgcagcaattaggggtcagcatacgaagcgaaacaagagatgatatgcatggatatgcacaaaactgtaataagagattgttttttcaagaacaaaaaaaaaatcagaggagaggaagggatgggaaccttgtgtagtgagtttacaagctttactgaaagatggtattattgtctcatgtgtaatatattccttccattttaaaatatatttattcttagagtca

SEQ ID NO: 201898 - DNA, 2321 bp, Zea Mays
cagctccacaagacaaccgcaaccgcagcagctagaccgacacgcactctactctcgcacacagccgccgggcgggcacagtgacgcggccacgcgggcgccggagctagggtttccctgatccggcagggccggggagccgccggaaaccgttgctcgatttcggcgccggaggcgcggcatcggtgtctccgaggacggcggacgcgaggcgggttggggagctgaggcgcggcgccgggggctcagatctggtatgaccgacggcggcgaagacgggaatgcggcggcgcccagggccccctcgcgccgaaggggacctgtgcgggccagcctcgatgccgacgagttcatggcgctgatgcacggctcggatcccgtcagggtcgagctcacccgcctggagaacgagctcagggacaaggagagggagcttggggaggcacagacggagatacgcgcactgcgcttgtcggagagggcgcgggagaaagccgtcgaggagcttacagatgaattggagaagatggctgagaaactcaagctgacagaatctctccttgaaagcaaaaaccttgaagttaaaaagataaatgatgagagaaaggctgcattggctgcccagtttgcagcagaagcaactttgcggagagtacatgcagcccagaaagatgatgacatgccaccaattgaagccattcttgcaccacttgaagctgagctaaagctttctcgccaggagattgcaaatctccaggatgacaacagagctttggatcgtctaacaaaacaaaaggaggcagctctgctagaagcagagaggactgtgcaaattgctatggcaaaagctgctatggttgacgatttgcaaaacaagaaccaagagttgatcaagcaaattgagatctgccatgaagaaaataaaatcttagataagctgcatcgccaaaagattgcagaagttgaaaagcttagccaaactgtgagggagttggaagaagctgttcttcaaggtggtgcaacggctaatgttgttcgagattaccagcgcagatttcaagaaataaatgaagaaaagagaacacttgaccgtgaacttgcacgtgcaaaagttacagcaaacagggttgcttctgttgtggccaatgagtggaaagattctaatgacaaggtgatgccagttaaacagtggcttgaagagcgtaggttcttgcagggggagatgcaacaacttcgtgacaagctagctgttgcagaacgtacagcacgatccgaagctcaactgaagcagcttggtcctgaagcatgctaaaggcacttcgaagtcatttgatggcggaactaggtcactagataggggaaaaatccatggaagtggagctcatttactcaacagatctacagatgctgttagagataaggagactagtgatagttggaagggcgatatggatgagagaactaatgagagggcagacaacaacacagatgagaaaagtaacgaaaccacaaataaaaactcagctgagacagtttctggtttcctatatgatatgctgcaaaaagaggtaatttctttgagaaagtcatgccatgaaaaggatcagattctaaaagataaagatgatgctattgagatgttagcaaagaaagtagacaccttaaccaaagcaatggaagtggaggctagaaaggtcagacgagaggttgcagccatggagaaagaagttgcagcaatgcgtgccagtaaagaacaagaaaccagagccaagctgcttggtacgaaaggctctggtagttcacaactgcttcctggaaggaacgcagcacgaactgggtcgatgcgcaacttccagtgatggcagcactaacacgaagcagcattcttggatagatccttctccgttccaccatttgttctattcctatcctattaattttgtgtctaaaattatagtagagtgagatgacccaacggtacctagatcagggtaaagagtaggctcggatctgatgagaccattgtgggagtgaaaccgagcctgtgtctaaccttgtggcgcgccctcttgtttctttgtccaggaagcgcacccgatgcttgtataggctggggccgctggggatcttcggatgcccagtctgcaatgtatcttgagtgctcagttacacaggacacccgttgcccaggttgtgaatattgtatcctctcacatgcttgtttgcgctgctcaatttgccccgtgttctggttggaatttttagcacggcttctggcttatccgaattctgttgattacgtacacatttattggcaactg

SEQ ID NO: 201899 - DNA, 560 bp, Zea Mays
atgtttggcattgggtcgaagaaatcggtgggcatgaacagctaaatgagaagcttcttaagcgaaagaaaggcgaggagcttccaacgtttatacccccaaagccaacactggaagcattgattgagtcagggtactcgctggtgaaggagcaggaactaataatgagctccaagctttcaaaagagtatatgaagaacttagaatagtttgatacacgagaaggggtaacttcttgttttcagtttatttggagcaataatacaccatccaatttgttccaacatccaaccaccggagtcgaatcgatgcttcgattgtcccagaaatcgtggtgggttcagatatgaactgctgaaaggaacgcatatcgtcattgtccttaattactctcatcgtgcattgccaaaaagtctttgggttgactcgaaagacttgtgagctgtgccacggagtggcccatgtatgtatgtatgtggagcgagcggaagcgtccaaagagcctcatcagtcctccttctgacacacagtttatacctgcaagatcgctgattatttct

SEQ ID NO: 201900 - DNA, 1515 bp, Zea Mays
ggctctcttctccaccggtcctaccccttacctcccaagatcacaatcctctgctccttatatattagccacaccgctcgttccctgctgcaccgggtgacacacaggcacaaagacaccgcccgtacacaggctcgttggcttggctgctgtgtgttgcgctcagccattcagacttgagagctactagctaactgctcgttgggtgtgggtgcgctcccggcctagaccgtggaggaaaggagtccagtccactcactaccccctctgctccgttcgggttccaggccagcacagccgagggttccgcacagcgataagcgcgaagcggaagagatggagcatatcgccaggttcttcttcggagtttctgtgtcaccttctggagggtcatcaggaagcggtcgacggaggacttctccggcgtgccctacaacatgacgctgctcaactgcctcctatcggcttggtacggcctgccgttcgtgtccccgaacaacatcctggtgtcgacgatcaacgggacggggtcggtgatcgaggccatctacgtggtgatcttcctcatcttcgcggtggaccggcgggccaggctcagcatgctgggcctcctgggcatcgtcgcctccatcttcaccaccgtggtgctcgtctcgctgctggccctccacggcaacgcccgcaaggtcttctgcggcctcgccgccaccatcttctccatctgcatgtacgcctcgccgctctccatcatgaggctggtgatcaagacgaagagcgtggagttcatgccgttcctgctctccctggccgtgttcctgtgcggcacctcctggttcatctacggcctcctcggccgcgaccccttcattattatcccgaacgggtgcgggagcttcctgggcctgatgcagctcatcctgtacgccatctaccggaaaaacaagggccccgccgcgccggccggcaagggagaggccgccgccgccgccgcggaggtggaggacaccaagaaggtggccgctgccgtggagctggccgatgccacgaccaacaaggcagcggacgccgtcggcggcgacggcaaggtcgccagccaggtgtaggcgggcaaggcttatttgctgtctgggactgggaggaacatcctaaacgaggctgccttagtttgtcggtggagcagattggtgttggtttctgtgggcttttacggttgttgttactctcatctccatctctcccaggaggctaccccaagcatgtagtagcttccattctgattctgggacggtgttgcacgttacagtgctctcaagctgtctctgcaaagtgtgtttttttattccatttccctcctgctcttgttctccaactgcgcttacctgcccccgatttctctaaaaaatgtattaaactatctgagaaattcatccaactgcgagtactgtgctgtgcgtgagcaatgcatcttttgcgtgtacggtgtgtgtgacacgctgaaccctgacttatcacaac

SEQ ID NO: 201901 - DNA, 2171 bp, Zea Mays
ggctctcttctccaccggtcctaccccttacctcccaagatcacaatcctctgctccttatatattagccacaccgctcgttccctgctgcaccgggtgacacacaggcacaaagacaccgcccgtacacaggctcgttggcttggctgctgtgtgttgcgctcagccattcagacttgagagctactagctaactgctcgttgggtgtgggtgcgctcccggcctagaccgtggaggaaaggagtccagtccactcactaccccctctgctccgttcgggttccaggccagcacagccgagggttccgcacagcgataagcgcgaagcggaagagatggagcatatcgccaggttcttcttcggagtttctgatctgtctccccagggaatgtcattgcgctcttcctcttcctgtcgcctgttgtcaccttctggagggtcatcaggaagcggtcgacggaggacttctccggcgtgccctacaacatgacgctgctcaactgcctcctatcggcttggtacggcctgccgttcgtgtccccgaacaacatcctggtgtcgacgatcaacgggacggggtcggtgatcgaggccatctacgtggtgatcttcctcatcttcgcggtggaccggcgggccaggctcagcatgctgggcctcctgggcatcgtcgcctccatcttcaccaccgtggtgctcgtctcgctgctggccctccacggcaacgcccgcaaggtcttctgcggcctcgccgccaccatcttctccatctgcatgtacgcctcgccgctctccatcatgaggctggtgatcaagacgaagagcgtggagttcatgccgttcctgctctccctggccgtgttcctgtgcggcacctcctggttcatctacggcctcctcggccgcgaccccttcattattgtacgcacacggttctctctctagtctagatcctgagccgcactcaccgcccggccgtacgcacgtgctatccgcgcatgttgtccgattggcactcggaaaccactgtagcagcactgtatcactagctgttgggactggacgtaactgcatctgatctggccagcacagtacccccgggctgggcgtcggttgccctttcgatgtcccgcccaagcccaaccaggcgcacatgcctgccgctgccgcagccgatgcacgggcatgggcgccggtagcgtctagcagcgtgggcgtggccacccacaggcagcgcacgccggtgctagctgccgatgggccgccgtgcccatgtccatgcagctggattggacccggcacaggcagaagcaacagcgcccgcgctctttcttgtcgcaatgctagttagcaaactgcacggtgcactccacttcagtacacaccaacgcgacagactgcgatgaaatatctaaggccgagttttttttttttgcaaatctcatcatgtcggaatgattcatgcggtccaaacttcagcacacccccactgtcgctaaacccgcgctgtctgtgcatgcgtgcagatcccgaacgggtgcgggagcttcctgggcctgatgcagctcatcctgtacgccatctaccggaaaaacaagggccccgccgcgccggccggcaagggagaggccgccgccgccgccgcggaggtggaggacaccaagaaggtggccgctgccgtggagctggccgatgccacgaccaacaaggcagcggacgccgtcggcggcgacggcaaggtcgccagccaggtgtaggcgggcaaggcttatttgctgtctgggactgggaggaacatcctaaacgaggctgccttagtttgtcggtggagcagattggtgttggtttctgtgggcttttacggttgttgttactctcatctccatctctcccaggaggctaccccaagcatgtagtagcttccattctgattctgggacggtgttgcacgttacagtgctctcaagctgtctctgcaaagtgtgtttttttattccatttccctcctgctcttgttctccaactgcgcttacctgcccccgatttctctaaaaaatgtattaaactatctgagaaattcatccaactgcgagtactgtgctgtgcgtgagcaatgcatcttttgcgtgtacggtgtgtgtgacacgctgaaccctgacttatcacaac

SEQ ID NO: 201902 - DNA, 937 bp, Zea Mays
aacttcttgataccctatcatattaacatttaatcagaaaatgaccagtcagggagcgatgctgcagatgctctatcaagattctattatccaccggttgctgctgtaactgtttcgtatccaaaggaagcaattagaaaagaatgcttaattgatggggaactccagggctttggccagttgcatccacgtagtcaaggagttgagacattaggaacaatatacagttcctcactctttccaaatcgtgctcctgacggtagggtgttacttctaaactacataggaggtgctacaaacacaggaattgtttccaagactgaaagtgagctggtcgaagcagttgaccgtgacctccgaaaaatgcttataaattctacagcagtggaccctttagtccttggtgttcgagtttggccacaagccatacctcagttcctggtaggacatcttgatcttctggaagccgcaaaagctgccctggaccgaggtggctacgatgggctgttcctaggagggaactatgttgcaggagttgccctgggcagatgcgttgagggcgcgtatgaaagtgcctcgcaaatatctgacttcttgaccaagtatgcctacaagtgatgaaagaagtggagcgctacttgttaatcgtttatgttgcatagatgaggtgcctccggggaaaaaaagcttgaatagtattttttattcttattttgtaaattgcatttctgttcttttttctatcagtaattagttatattttagttctgtaggagattgttctgttcactgcccttcaaaagaaattttatttttcattcttttatgagagctgtgctacttagattgccttggatgattattttgcttctgcgtttttctggaagtacaaacaaattcaaatattccctctgtcccaaaataatagtcgttttag

SEQ ID NO: 201903 - DNA, 2224 bp, Zea Mays
ccaaggccaggttctagagcgaacaaggcccacgtcacccgtggcccgtcaggcgaagcaggtcttgtgtagactttgagagggattggatattaacggaaccaatcacgcacgggaatgcgattcccagcccacctgtaacgttccagtgggccatccttaactccaagcccaacggccctaccccatctcgtcgtgtcatccactccgccgcacaggcgctcagctccgcaacgccgccggaaatggtcgccgccaccgccaccgccaccgccatggccaccgctgcatcgccgctactcaacgggacccgaatacctgcgcggctccgccatcgaggactcagcgtgcgctgcgctgctgtggcgggcggcgcggccgaggcaccggcttccaccggcgcgcggctgtccgcggactgcgtcgtggtgggcggaggcatcagtggcctctgcaccgcgcaggcgctggccacgcggcacggcgtcggggacgtgcttgtcacggaggcccgcgcccgccccggcggcaacattaccaccgtcgagcgccccgaggaagggtacctctgggaggagggtcccaacagcttccagccctccgaccccgttctcaccatggccgtggacagcggactgaaggatgacttggtttttggggacccaaacgcgccgcgtttcgtgctgtgggaggggaagctgaggcccgtgccatccaagcccgccgacctcccgttcttcgatctcatgagcatcccagggaagctcagggccggtctaggcgcgcttggcatccgcccgcctcctccaggccgcgaagagtcagtggaggagttcgtgcgccgcaacctcggtgctgaggtctttgagcgcctcattgagcctttctgctcagcatgaaggctgcatttgggaaggtttggcggttggaagaaactggaggtagtattattggtggaaccatcaagacaattcaggagaggagcaagaatccaaaaccaccgagggatgcgtaagagattgatgcattttctttttgttccgttaattggctgttctgccatattgatctgttttaacctcttttagccgccttccgaagccaaaagggcagacagttgcatctttcaggaagggtcttgccatgcttccaaatgccattacatccagcttgggtagtaaagtcaaactatcatggaaactcacgagcattacaaaatcagatgacaagggatatgttttggagtatgaaacgccagaaggggttgtttcggtgcaggctaaaagtgttatcatgactattccatcatatgttgctagcaacattttgcgtccactttcaagcgatgctgcagatgctctatcaagattctattatccaccggttgctgctgtaactgtttcgtatccaaaggaagcaattagaaaagaatgcttaattgatggggaactccagggctttggccagttgcatccacgtagtcaaggagttgagacattaggaacaatatacagttcctcactctttccaaatcgtgctcctgacggtagggtgttacttctaaactacataggaggtgctacaaacacaggaattgtttccaagactgaaagtgagctggtcgaagcagttgaccgtgacctccgaaaaatgcttataaattctacagcagtggaccctttagtccttggtgttcgagtttggccacaagccatacctcagttcctggtaggacatcttgatcttctggaagccgcaaaagctgccctggaccgaggtggctacgatgggctgttcctaggagggaactatgttgcaggagttgccctgggcagatgcgttgagggcgcgtatgaaagtgcctcgcaaatatctgacttcttgaccaagtatgcctacaagtgatgaaagaagtggagcgctacttgttaatcgtttatgttgcatagatgaggtgcctccggggaaaaaaagcttgaatagtattttttattcttattttgtaaattgcatttctgttcttttttctatcagtaattagttatattttagttctgtaggagattgttctgttcactgcccttcaaaagaaattttatttttcattcttttatgagagctgtgctacttagattgccttggatgattattttgcttctgcgtttttctggaagtacaaacaaattcaaatattccctctgtcccaaaataatagtcgttttag

SEQ ID NO: 201904 - DNA, 2262 bp, Zea Mays
ccaaggccaggttctagagcgaacaaggcccacgtcacccgtggcccgtcaggcgaagcaggtcttgtgtagactttgagagggattggatattaacggaaccaatcacgcacgggaatgcgattcccagcccacctgtaacgttccagtgggccatccttaactccaagcccaacggccctaccccatctcgtcgtgtcatccactccgccgcacaggcgctcagctccgcaacgccgccggaaatggtcgccgccaccgccaccgccaccgccatggccaccgctgcatcgccgctactcaacgggacccgaatacctgcgcggctccgccatcgaggactcagcgtgcgctgcgctgctgtggcgggcggcgcggccgaggcaccggcttccaccggcgcgcggctgtccgcggactgcgtcgtggtgggcggaggcatcagtggcctctgcaccgcgcaggcgctggccacgcggcacggcgtcggggacgtgcttgtcacggaggcccgcgcccgccccggcggcaacattaccaccgtcgagcgccccgaggaagggtacctctgggaggagggtcccaacagcttccagccctccgaccccgttctcaccatggccgtggacagcggactgaaggatgacttggtttttggggacccaaacgcgccgcgtttcgtgctgtgggaggggaagctgaggcccgtgccatccaagcccgccgacctcccgttcttcgatctcatgagcatcccagggaagctcagggccggtctaggcgcgcttggcatccgcccgcctcctccagtttcagggccgcgaagagtcagtggaggagttcgtgcgccgcaacctcggtgctgaggtctttgagcgcctcattgagcctttctgctcaggtgtctatgctggtgatccttctaagctcagcatgaaggctgcatttgggaaggtttggcggttggaagaaactggaggtagtattattggtggaaccatcaagacaattcaggagaggagcaagaatccaaaaccaccgagggatgcgtaagagattgatgcattttctttttgttccgttaattggctgttctgccatattgatctgttttaacctcttttagccgccttccgaagccaaaagggcagacagttgcatctttcaggaagggtcttgccatgcttccaaatgccattacatccagcttgggtagtaaagtcaaactatcatggaaactcacgagcattacaaaatcagatgacaagggatatgttttggagtatgaaacgccagaaggggttgtttcggtgcaggctaaaagtgttatcatgactattccatcatatgttgctagcaacattttgcgtccactttcaagcgatgctgcagatgctctatcaagattctattatccaccggttgctgctgtaactgtttcgtatccaaaggaagcaattagaaaagaatgcttaattgatggggaactccagggctttggccagttgcatccacgtagtcaaggagttgagacattaggaacaatatacagttcctcactctttccaaatcgtgctcctgacggtagggtgttacttctaaactacataggaggtgctacaaacacaggaattgtttccaagactgaaagtgagctggtcgaagcagttgaccgtgacctccgaaaaatgcttataaattctacagcagtggaccctttagtccttggtgttcgagtttggccacaagccatacctcagttcctggtaggacatcttgatcttctggaagccgcaaaagctgccctggaccgaggtggctacgatgggctgttcctaggagggaactatgttgcaggagttgccctgggcagatgcgttgagggcgcgtatgaaagtgcctcgcaaatatctgacttcttgaccaagtatgcctacaagtgatgaaagaagtggagcgctacttgttaatcgtttatgttgcatagatgaggtgcctccggggaaaaaaagcttgaatagtattttttattcttattttgtaaattgcatttctgttcttttttctatcagtaattagttatattttagttctgtaggagattgttctgttcactgcccttcaaaagaaattttatttttcattcttttatgagagctgtgctacttagattgccttggatgattattttgcttctgcgtttttctggaagtacaaacaaattcaaatattccctctgtcccaaaataatagtcgttttag

SEQ ID NO: 201905 - DNA, 2222 bp, Zea Mays
aacaaatcggagcaacgacctccatgccaactgtattcgcactctcggctagatctcgcttccctccacctccagagtccagatccaccccgaactctccgaaggccgcccccgccatggcagcgccgccccccaccactccccgtctcctctcgccgacgtccaaggaccttctcacagccgcctccttcacctcgccgccctcccccacctccgacgatcccgcctccccgctcgacgccttcgcctccgatcccgtcctctccgccttcctgtcgccgtccttctccccttctgtcttctcctccgccgcgctttcctcaggactcgctgcctcccgcgccgagcagctgcaggatgccatccgcctcctccgccgccatctccgcgtcgaggagggtgagcctcttataacagagagagtttgggatgcaattgtcaaggcctttgcaagtcagatgaagactacctttacggcttcaagctttgtgaaagaaatatttactcttgggtatccaagactgttttcgatggttgaaaacctccttgagaggatttcaagagatactgatgtaaagggcacccttccagctctcactcctgaaggaaaagatcatatgatttcagccattgagatgttccagacagcctttttggctctgtgtcatagtcggctatctgattatgtcaacagcatatttccaatgtcaaaccgtggaactataccttcaaaggatcagatctcaagattggtttctcgcatacaagaagaaatcgaagtagtgagaactcatgggcatttgcttgttcttgttctacgtgaaattggaaagaccttgcttcttttagcacagagagcagaatatcagatctctactggccccgaagctcgacaagttaccggcacagcgactgcagcccaactaaaaaattttgctctgtgtcttcaccttcaggaggttcacatgcgcatttctagcgtcttgtcaacactcccaaatgttgcttctgaagtcctttcaccctcccttggtgttgtttatggtgttgcttgtgattcagtgacttccctgttccaagcgatgcttgatcgtctcgagtcatgcatcctgaaaatgcatgagcaggactttgcaggtcagggaatggatgcatcaatggataacaatgcatcagcttacatggaagagcttcagaaatgtgctgtccacttccgcagcgagttcttatcgaagctgttgccttcatcatcctctcgatcagaaaccatatgtaccatcatggttagaaggatggcctcaagggtactcatattttttataaggcatgcttctcttgtcaggccactctcagaagcagggaagttgagaatggcacgggacatggctgagctggagcttgctgttggtcagaatctgtttccagtggagcagctgggggcaccataccgggcactacgggcattccgtcctgtcttgttcctggaaacatctcagcttgacaagtttccgctccttcaggacttgccgcctagtgtgatcctccaccatctgtattctcgagggcctgatgaactgcagtcgccattacagcgcaacaagctcacacctttgcagtactctctgtggcttgattcacaaggcaaggaccagatctggaagggggtcaaagcaaccctagatgactacgagatgagggtcagatctcgaggagacaaggaattcagtccggtgtatcctctcatgcttcagattggatcttcattgtctcagcccaacacctaacatgtctctggttcaatcttgcatctgtatcatcttgtaggcattgatttttgaggggtcgggtgaagcttcggcatagtctatacacatgaaataggggatttgtgtttgttcctgaaaataatggttagcgtacattgtcttgatgttctgctagtttctgtatctttttgtaactctgatccgtgaaatatttgaaaaaggtgtcgtttcacaaatacatcagcgtcgtggaaggaggtaaatatagaggttaaaaaaggcgagaagacctcttgtgatcaacttcatccaatttcgtattttttttgctagacatagttgcttgattcgagtaggaccatacaataaaacaaaactagttagttgttagatgagtgctctctttctagataggtttaaattccaacagatgtatatttttttaatattttccgc

SEQ ID NO: 201906 - DNA, 1663 bp, Zea Mays
ccacactcacctgatcggtcgaccacataatcgcccattcggtccatgaccgaatccaccagcccactacacatcccaaatcccccaaccctaactaatccgccgtcacccctcccggatcgccagcaggcctcatcccttccacagttccacggctacgccgccgtcgtcggctcatccctcctccccctcccgcccgcagttccaggtggtgcacccctcgaccccatcagactcgatctgtcgtttcctggctcccttaggtcccctcttcgccaccactccgccgcatgctccccaaatccgccgctctatgggtgcatcaggtctcgctgccagttccaatggagggaataaatgggcaaaggcggccaacgaggaagctacgatgacggtggtggctgtggagtcagatgagcctaggacagaatcgccgttggagcggggaacaatcatctacaacctcctcgtcacgctcccctttccctccggcctgatctcgcgcctccgccgtgcattcctcctctgccgcttcaccaccgacctggtctctagatcctccctccacatgctccaactcctggtacaagagtgcctgaggtccgctatcgacctgagctccgctcaggtcgccgctaccactgataatcggcctccagcccactgctttacttttggcgacgagtcgacgactgggcaactaccgctgcccaagttggaggtgtccatcctgcgacctctggtttggtctgggatggagcacccatctgtatttgatagattcaactatgatcgcgcatatgctccgctttgtaaacacgtagaccaccaatcctacattccagggtttcaagttgaccaaacagagtggatacagtcatgctcaaagttggcaagctgtgtcaacaagcaggccccatctgctactcgcttcatgggcatgcaacaaagccttggtattcagccgacgcagcttgggaaggatgcacctgcagcaggagttgcacgtagagttagtgcttaatgaaagatgatcgaggttgagtctgttgcagctgctgattaacaagagattcgagaagtagtgaagaagtgattctgtgctgaggatgattatgcagcagaaaaacttgatattgagctgagtggaagttacctgttaccaccacgttattctaagggtgcattggcactgcattggcgtactggtcataaaaatgattgactccagataataagttctgctgcttcaaattcagttctgccagctgtaggaataggaatcataaaagcatatggaggaactacgtataggctacaaagaagcataagaagcatgtttatagcagaagcaaagtgttctgatgattttgttttttcaattgtgttttctgttattggttcagtatgcacatatattgacatgatttatggcatgacatctgccatctttgttatatttatgacatcgttcttgattgatgtgtgcagacatgaatgatggatcttttttaacatcctgaccatcattatcgtattttgtatatcatttatgggttcacagatatgaaatgacaggtttcttatttttgagatctgaaccatgtgttgccttttggttgttacataataaatggtcctgtcgatgtgctttacgttcaaa

SEQ ID NO: 201907 - DNA, 1610 bp, Zea Mays
ccatgaccgaatccaccagcccactacacatcccaaatcccccaaccctaactaatccgccgtcacccctcccggatcgccagcaggcctcatcccttccacagttccacggctacgccgccgtcgtcggctcatccctcctccccctcccgcccgcagttccaggtggtgcacccctcgaccccatcagactcgatctgtcgtttcctggctcccttaggtcccctcttcgccaccactccgccgcatgctccccaaatccgccgctctatgggtgcatcaggtctcgctgccagttccaatggagggaataaatgggcaaaggcggccaacgaggaagctacgatgacggtggtggctgtggagtcagatgagcctaggacagaatcgccgttggagcggggaacaatcatctacaacctcctcgtcacgctcccctttccctccggcctgatctcgcgcctccgccgtgcattcctcctctgccgcttcaccaccgacctggtctctagatcctccctccacatgctccaactcctggtacaagagtgcctgaggtccgctatcgacctgagctccgctcaggtcgccgctaccactgataatcggcctccagcccactgctttacttttggcgacgagtcgacgactgggcaactaccgctgcccaaggtcaggtgctcgagtatccgtcgaccccttcgctaggccattcccgttgacagcaagcatcagttcaataattccaataaggatctcaagacctacagctggggaatgttatttgacaatggtttcaagttgaccaaacagagtggatacagtcatgctcaaagttggcaagctgtgtcaacaagcaggccccatctgctactcgcttcatgggcatgcaacaaagccttggtattcagccgacgcagcttgggaaggatgcacctgcagcaggagttgcacgtagagttagtgcttaatgaaagatgatcgaggttgagtctgttgcagctgctgattaacaagagattcgagaagtagtgaagaagtgattctgtgctgaggatgattatgcagcagaaaaacttgatattgagctgagtggaagttacctgttaccaccacgttattctaagggtgcattggcactgcattggcgtactggtcataaaaatgattgactccagataataagttctgctgcttcaaattcagttctgccagctgtaggaataggaatcataaaagcatatggaggaactacgtataggctacaaagaagcataagaagcatgtttatagcagaagcaaagtgttctgatgattttgttttttcaattgtgttttctgttattggttcagtatgcacatatattgacatgatttatggcatgacatctgccatctttgttatatttatgacatcgttcttgattgatgtgtgcagacatgaatgatggatcttttttaacatcctgaccatcattatcgtattttgtatatcatttatgggttcacagatatgaaatgacaggtttcttatttttgagatctgaaccatgtgttgccttttggttgttacataataaatggtcctgtcgatgtgctttacgttcaaa

SEQ ID NO: 201908 - DNA, 1931 bp, Zea Mays
accgaatccaccagcccactacacatcccaaatcccccaaccctaactaatccgccgtcacccctcccggatcgccagcaggcctcatcccttccacagttccacggctacgccgccgtcgtcggctcatccctcctccccctcccgcccgcagttccaggtggtgcacccctcgaccccatcagactcgatctgtcgtttcctggctcccttaggtcccctcttcgccaccactccgccgcatgctccccaaatccgccgctctatgggtgcatcaggtctcgctgccagttccaatggagggaataaatgggcaaaggcggccaacgaggaagctacgatgacggtggtggctgtggagtcagatgagcctaggacagaatcgccgttggagcggggaacaatcatctacaacctcctcgtcacgctcccctttccctccggcctgatctcgcgcctccgccgtgcattcctcctctgccgcttcaccaccgacctggtctctagatcctccctccacatgctccaactcctggtacaagagtgcctgaggtccgctatcgacctgagctccgctcaggtcgccgctaccactgataatcggcctccagcccactgctttacttttggcgacgagtcgacgactgggcaactaccgctgcccaaggtcaggtgctcgagtatccgtcgaccccttcgctaggccattcccgttgacagcaagcatcaggtattccggcctcttgactagatttttaaaaataatattaccatttatatgcttaaataagtttgctgcgaaaatatattttgtgattcatctactgctatttgtttggggatcataaacattaagttatatatataaagttggacaaacttaaaatatgtgatctgcacgcaagccaatgatgattagatattacatctggaattaccttcattacatctggaattaccttcagattcgtttatgacgaggcatatgcattatacatctcctgttttggttatgtactctctcaatttaatctgattatgtggacgtcgttgtagttcaataattccaataaggatctcaagacctacagctggggaatgttatttgacaatggtttcaagttgaccaaacagagtggatacagtcatgctcaaagttggcaagctgtgtcaacaagcaggccccatctgctactcgcttcatgggcatgcaacaaagccttggtattcagccgacgcagcttgggaaggatgcacctgcagcaggagttgcacgtagagttagtgcttaatgaaagatgatcgaggttgagtctgttgcagctgctgattaacaagagattcgagaagtagtgaagaagtgattctgtgctgaggatgattatgcagcagaaaaacttgatattgagctgagtggaagttacctgttaccaccacgttattctaagggtgcattggcactgcattggcgtactggtcataaaaatgattgactccagataataagttctgctgcttcaaattcagttctgccagctgtaggaataggaatcataaaagcatatggaggaactacgtataggctacaaagaagcataagaagcatgtttatagcagaagcaaagtgttctgatgattttgttttttcaattgtgttttctgttattggttcagtatgcacatatattgacatgatttatggcatgacatctgccatctttgttatatttatgacatcgttcttgattgatgtgtgcagacatgaatgatggatcttttttaacatcctgaccatcattatcgtattttgtatatcatttatgggttcacagatatgaaatgacaggtttcttatttttgagatctgaaccatgtgttgccttttggttgttacataataaatggtcctgtcgatgtgctttacgttcaaa

SEQ ID NO: 201909 - DNA, 1501 bp, Zea Mays
cccaaatcccccaaccctaactaatccgccgtcacccctcccggatcgccagcaggcctcatcccttccacagttccacggctacgccgccgtcgtcggctcatccctcctccccctcccgcccgcagttccaggtggtgcacccctcgaccccatcagactcgatctgtcgtttcctggctcccttaggtcccctcttcgccaccactccgccgcatgctccccaaatccgccgctctatgggtgcatcaggtctcgctgccagttccaatggagggaataaatgggcaaaggcggccaacgaggaagctacgatgacggtggtggctgtggagtcagatgagcctaggacagaatcgccgttggagcggggaacaatcatctacaacctcctcgtcacgctcccctttccctccggcctgatctcgcgcctccgccgtgcattcctcctctgccgcttcaccaccgacctggtctctagatcctccctccacatgctccaactcctggtacaagagtgcctgaggtccgctatcgacctgagctccgctcaggtcgccgctaccactgataatcggcctccagcccactgctttacttttggcgacgagtcgacgactgggcaactaccgctgcccaaggtcaggtgctcgagtatccgtcgaccccttcgctaggccattcccgttgacagcaagcatcagagtggatacagtcatgctcaaagttggcaagctgtgtcaacaagcaggccccatctgctactcgcttcatgggcatgcaacaaagccttggtattcagccgacgcagcttgggaaggatgcacctgcagcaggagttgcacgtagagttagtgcttaatgaaagatgatcgaggttgagtctgttgcagctgctgattaacaagagattcgagaagtagtgaagaagtgattctgtgctgaggatgattatgcagcagaaaaacttgatattgagctgagtggaagttacctgttaccaccacgttattctaagggtgcattggcactgcattggcgtactggtcataaaaatgattgactccagataataagttctgctgcttcaaattcagttctgccagctgtaggaataggaatcataaaagcatatggaggaactacgtataggctacaaagaagcataagaagcatgtttatagcagaagcaaagtgttctgatgattttgttttttcaattgtgttttctgttattggttcagtatgcacatatattgacatgatttatggcatgacatctgccatctttgttatatttatgacatcgttcttgattgatgtgtgcagacatgaatgatggatcttttttaacatcctgaccatcattatcgtattttgtatatcatttatgggttcacagatatgaaatgacaggtttcttatttttgagatctgaaccatgtgttgccttttggttgttacataataaatggtcctgtcgatgtgctttacgttcaaa

SEQ ID NO: 201910 - DNA, 3486 bp, Zea Mays
aattctcttcaacacgcgcacatgtgacatgccccatggtcgccgccgctccaggcatcctcccgtggcctcacctccctctcccttcctcctcccacccgtctgacgcctctgacgccgccgcagcagcaacagacgccaacacctccgcgtatgacatccagatcttcgagcccacctccatcgaggagcgtcgtcgcctcctgatccagcggcgtcgcctccgactcgccgcctcccatgcctcgcggctcaccgttgcctcgcgcgtctcctccaaactcatcagcgccaccgcctcctgctccagcggcgtcgcatccgatctgccgcctcccctcctcatggctcgtcgttgcctcccgcctcttccccaacctcgcccttgccgcccttggaggatcccaaatccgacgacgagctcagtaggcccacgcagacgcggatgtgctatgaacttcaggctgatgtgcatttctgatatattgagctcaagcgtcagattctgtatcgatggcaatgggttccagaacagtacacaaggcaatttcaagacggttattcaattgctcaaatagttcagtaagtgagaacaaagaaacttcctaaatgtattaatatggtatgatgaatagtgtctcacacattgtgttgttgagctctggtctccatttccgtgctgctagaatgtgatttgaagtattcaccttttgacatggataaacatcttctctctgttgcatttgcaggcgaaagaaggctcatgtgctgcttcgaaaatcagttctaagaaggcaaccagggacaacaaacctgataagggaagaaacatgttctggataaatattggcctttgtttcaagactccaaggtaagccattgaatgtaagtactcaatgtttcttttcttgtccagccaagtagccaagtagttgttgtgtctgttagattattagcccatatgtatctaaaaagattccaaaggacacataaaaaattgtttgcaataatatagatgtgtgctttagtgcccatggacactgacctgctgccaaatttctagccaatatataactttctgagcactacttaatttatctaaaatgcacgatcgtatatgaagtcaaaataaagtgtgatgcacaaacgaatgtatcccatgagctctacgtttcttttcctatgcaatattattgacatcatttataaaaagctacattttgtgtcagttagcgaacatagaatcctattgacagcttctataataagaaaaatcaataaaagaaatgcttggaaaaatggaatataatttacactcattaaattgtagtaatttccttaccttgatataggtgtttggaaattcttccttcaaatcattcaggcccttgtgccaccacgtctctgtcaagtagatggttgtattagcagaaaaagccaacactcctcacgagagccaaaacctcatcagggttagaccagtcttttgttcaagcgtcactggttgtcttacaactcttcttttccaacaagttcgcaaattgattgctaacaccttcccatttgattttttgcacacaacaaaatccacaataacactataaagtgaatatataaatcagaaaaaagatattcccactcatgctcaggcaattattttcaggatatgaatccttctaatttagactataaagtcacccattaggccattacaacttttttactatgcatttatgctttatttatacaccaaaaaaacttcaaaccctcgacaccattcatgcttcatttggtgtatgttttgctactttttccttgaacgtaaaagcattcttctctgatatctgtagctgtaaaaagattattgttctataactatctgttatttattgttccatcgctacctcactacctatttcctatctgatgttttgctataacatcgccatcgctgtgttgttcagacttaagttatgtgatgcttgttctttttagatgtaaatcctacaattttcgcctccaaagtcacccattacaatattttttactgaatctatatcttttacttatgtgtcactctgcattttttaagattcaaaaaaacattccttattttatacgcggtaaaacaacaaccttcataattcatcggatcttcttagtattatctctgacaaaaaaatataaagtctgtccccacaaatgcaaattagtttcttgattttcaattggttgttaaatgtctgacatgagcaatcagtttggttagcataaaaggatggtgattttgacaactacacagtttgtaggaacaacaataaaaacacttcattatatattagggttctatgatgttcaccattcatggcttcctaccagatcacacattgcataaatcaagttctacgctattggttacttttcagagattcagacagaacatttatattctgtttcctggattgagcatattccgttatagaatgtctagaaattttttcaaacttatgcatctgatatgatctctcgatatataagtactgacgaaagaagtgtgatggtcaattccagcccgccaccatccagggatcaatcctcaccacgaggaccaggggtgatgccaacaaggtgtacgtgaacctttcctggggtgttgataatttagctctcgcaaacctgttcactgagcaaggaccatctatgacagtgagaacaagtcaagagggtttgatttttgtcatgtatggttccacagaagagcctgagaatgcattatcgaatctcaatggagctatgagttctgaaacccttttttcttccccttgctgctcgcggcatagcatttggaaattgaagtacaatttgtctttcacgatatactgaattgatttatcattgtcctgcaggacttggatgatagatccgtgttacgataccagcatcaaagccgcctagaagcaatactgaactttcacttgagatgtgagtagttgtagtagtagcccaaactctggaatatagtatcatcattcctagatatgtagttgtaaattctctgcccagaggtttgagctatcactcagattatgggttcaatgtcatgtatagagtcaagaaaaaacatcttctgtgcgtcttcgagtctttcaaaggcaaaacaaattacacgcgcgctgacgcgcaccaatttactagtatatattcaggtacaaagtttgttccgatttctgtgaattgttcatgcagaactgggttttggtggtcatcacgaaagttgtagcaagttttctgcagatttccataatacacatgtttgcctcatttggggccagtgaatcattctggataaacgactgcaggtccagagatcagtccgataatctaggaaaatgaatctcactataattcattcgatatttgatgtgcctatcacatcgagtatttgaataatacctacgaatactaaatatggcttaattataaaac

SEQ ID NO: 201911 - DNA, 3639 bp, Zea Mays
aattctcttcaacacgcgcacatgtgacatgccccatggtcgccgccgctccaggcatcctcccgtggcctcacctccctctcccttcctcctcccacccgtctgacgcctctgacgccgccgcagcagcaacagacgccaacacctccgcgtatgacatccagatcttcgagcccacctccatcgaggagcgtcgtcgcctcctgatccagcggcgtcgcctccgactcgccgcctcccatgcctcgcggctcaccgttgcctcgcgcgtctcctccaaactcatcagcgccaccgcctcctgctccagcggcgtcgcatccgatctgccgcctcccctcctcatggctcgtcgttgcctcccgcctcttccccaacctcgcccttgccgcccttggaggatcccaaatccgacgacgagctcagtaggcccacgcagacgcggatgtgctatgaacttcaggttcgtcttttttcctgtacaccaattatagtcctccagcgcctacgaattttttttgcaaactttatacaagtccttcgctcaacaccgcctttggttgcaacggaagctgctactgttgttgaacgttagttgcttttattagatttatgcattttttttaaattcgagttcaaaattaagcaaaacacacgcttaatcaatttttttgcgttgttttcaactgatatatagacaacatattcctatcaagtggttgtttgcaagattgacgagttgtaggcaccaaatatatcgagtccttgctatcaacatatgagcatattattgtcaaagtaggcaacatctcatttaacagacaactctccgctctatcattctctcaaggctgatgtgcatttctgatatattgagctcaagcgtcagattctgtatcgatggcaatgggttccagaacagtacacaaggcaatttcaagacggttattcaattgctcaaatagttcagcgaaagaaggtctgttgaagcagcctaaactattttcgttgtgatttccaacgctacattttccaatatgcctttgtttcatacatttttcctttttttcaaataaggctcatgtgctgcttcgaaaatcagttctaagaaggcaaccagggacaacaaacctgataagggaagaaacatgttctggataaatattggcctttgtttcaagactccaaggtaagccattgaatgtaagtactcaatgtttcttttcttgtccagccaagtagccaagtagttgttgtgtctgttagattattagcccatatgtatctaaaaagattccaaaggacacataaaaaattgtttgcaataatatagatgtgtgctttagtgcccatggacactgacctgctgccaaatttctagccaatatataactttctgagcactacttaatttatctaaaatgcacgatcgtatatgaagtcaaaataaagtgtgatgcacaaacgaatgtatcccatgagctctacgtttcttttcctatgcaatattattgacatcatttataaaaagctacattttgtgtcagttagcgaacatagaatcctattgacagcttctataataagaaaaatcaataaaagaaatgcttggaaaaatggaatataatttacactcattaaattgtagtaatttccttaccttgatataggtgtttggaaattcttccttcaaatcattcaggcccttgtgccaccacgtctctgtcaagtagatggttgtattagcagaaaaagccaacactcctcacgagagccaaaacctcatcagggttagaccagtcttttgttcaagcgtcactggttgtcttacaactcttcttttccaacaagttcgcaaattgattgctaacaccttcccatttgattttttgcacacaacaaaatccacaataacactataaagtgaatatataaatcagaaaaaagatattcccactcatgctcaggcaattattttcaggatatgaatccttctaatttagactataaagtcacccattaggccattacaacttttttactatgcatttatgctttatttatacaccaaaaaaacttcaaaccctcgacaccattcatgcttcatttggtgtatgttttgctactttttccttgaacgtaaaagcattcttctctgatatctgtagctgtaaaaagattattgttctataactatctgttatttattgttccatcgctacctcactacctatttcctatctgatgttttgctataacatcgccatcgctgtgttgttcagacttaagttatgtgatgcttgttctttttagatgtaaatcctacaattttcgcctccaaagtcacccattacaatattttttactgaatctatatcttttacttatgtgtcactctgcattttttaagattcaaaaaaacattccttattttatacgcggtaaaacaacaaccttcataattcatcggatcttcttagtattatctctgacaaaaaaatataaagtctgtccccacaaatgcaaattagtttcttgattttcaattggttgttaaatgtctgacatgagcaatcagtttggttagcataaaaggatggtgattttgacaactacacagtttgtaggaacaacaataaaaacacttcattatatattagggttctatgatgttcaccattcatggcttcctaccagatcacacattgcataaatcaagttctacgctattggttacttttcagagattcagacagaacatttatattctgtttcctggattgagcatattccgttatagaatgtctagaaattttttcaaacttatgcatctgatatgatctctcgatatataagtactgacgaaagaagtgtgatggtcaattccagcccgccaccatccagggatcaatcctcaccacgaggaccaggggtgatgccaacaaggtgtacgtgaacctttcctggggtgttgataatttagctctcgcaaacctgttcactgagcaaggaccatctatgacagtgagaacaagtcaagagggtttgatttttgtcatgacttggatgatagatccgtgttacgataccagcatcaaagccgcctagaagcaatactgaactttcacttgagatgtgagtagttgtagtagtagcccaaactctggaatatagtatcatcattcctagatatgtagttgtaaattctctgcccagaggtttgagctatcactcagattatgggttcaatgtcatgtatagagtcaagaaaaaacatcttctgtgcgtcttcgagtctttcaaaggcaaaacaaattacacgcgcgctgacgcgcaccaatttactagtatatattcaggtacaaagtttgttccgatttctgtgaattgttcatgcagaactgggttttggtggtcatcacgaaagttgtagcaagttttctgcagatttccataatacacatgtttgcctcatttggggccagtgaatcattctggataaacgactgcaggtccagagatcagtccgataatctaggaaaatgaatctcactataattcattcgatatttgatgtgcctatcacatcgagtatttgaataatacctacgaatactaaatatggcttaattataaaac

SEQ ID NO: 201912 - DNA, 731 bp, Zea Mays
ctatgttactgcttgcggtggaccttgtaaaggttataaccagagaagcctccaggagcatcagagaagtccaaagttggaaaaatagattgtactccgaggaaggtccttctcatgttcaaagtagtggattacactcacctagtgcaaaggtcagagcttccccaatctgtgctgcctttgattctaagggtaaaatttctgacaatatattgctccataagattgaagaacttaatcgatcagtgaagaatcttgagtctctactcgtaagatcacatagaagagaatgatctgatattatatcatctttgaaaattagctcaaattaaacatggaaagaacaggaggaacaagtggagtatatgaactctgtttttctatttagtccttcagatcagataccatgggaaattgcaaagctgctcatgccgtgaaggagcttctagtttgattcaagtttcacaagttatctgttgtacataggtcttgctgattcttccaagtttcacaatttgatgtacaaagaatcacagaatcagtggacagtggtctagggtcacaaagtagatcaacgtacatgtaagcttgtttactgtataaattctaaaatggtaatctgtgccaatacgtgtactgtaatgggcttaggctcagcccatatatgtttatagctatcaatacaacattctaatcctagttagggttttctattccaacatggtatcaag

SEQ ID NO: 201913 - DNA, 4023 bp, Zea Mays
gcaatatttttttctccgggccatcggcaataattgggcatatcttgaagcttacatcaccgatatcttttgcttacgacgaggccgaggccgaggccaggtccagggatgcagcagtgcagatgagcccgaacccgagccccacccagctcttcctcccctagcagccagctatcgctagcttcgcacagccaccaataagccccccctcccccgcggcggcatctctctccagctcgctcgctcgctcgtgattcacccgcaggagccacccaggcacgagggcctatctcttcccctcgatcggcagacagacgacggaagtggccgcgacccgggtgccggccttgtctttcggctttcgcgcgcggcgtggacgatgtgtgaccttgacatggcgatgcgggtggagaacaacgggcgcccccgtcaagtgcccatcatggtgaggaagaagagaactggccctggcggctctggagaaacttctggagagtcttcaggagcttctggacaaggttcctcacagcggcctgaacggactcaacaacctggggcaggacgtggctgggtgcctcagcagggtggccgtggtggcgggcaacaccagggtcgtggtggacattatcaaggccgtggagggccaggtccacatcaccctggtggactgcctgagtatcaccagcgtgaataccagggacgaggtggtgagtaccagggacagtaccaggggcgtggtggtgcccgctccagaggtggaatttcacagccatactatggtgggcataggggaggtagtgttggacgaaatgttcctccaggtccatccagaacagttcccgagctgcaccaagccccatacgtccagtatcaagccccggtgatttcaccatccccatcgggacctggctcatcctcacagcctatggcagaggtgagctctggacaagtccagcaacagtttgagcaacttgccattcatggtcagagttccatgagtcaagaagttcaagtggcaccagcatcaagcaaatcggttcgattcccattacgccccggcaagggcacttatggggacaggtgcattgtgaaggcgaatcatttttttgctgagcttcctgacaaagaccttcaccaatatgatgtaactataacacctgaagttacttcacgtggcgttaatcgtgctgtcatgggagagcttgtaacactatatagacaatcccatttgggcgggcgtctacctgcgtacgatggaagaaagagcctttataccgctggaccattgccttttacttctatgacatttgaaattaccttgcaagatgaggaagatagtgttggcggtggccagggcggacaaaggcgcgagagagtatttagggtggtgatcaaatttgcggcccgtgctgatctccatcatctggctatgtttctagctggaaggcaagcagacgctcctcaagaagctcttcaagtgcttgacattgtactacgtgaattgcctactgcgaggtattctcctgttggtaggtcattttattctcccaacttagggagacgtcagcaacttggtgagggtttggaaagttggcgcggtttttaccaaagcataaggccgacacagatgggcctttcactgaatattgatatgtcctctactgcatttatcgagcctctccctgtgattgattttgttgctcagcttcttaatagagatatttcagttaggccattgtctgattctgatcgcgtgaagatcaaaaaagccttaagaggtgtgaaggttgaggtcactcacaggggaaacatgcgcagaaagtatcgcatttctggcctcacctcacaagcaacaagagagctatcattccctgttgatgatcgtggtactgtgaagactgtggtccaatacttcatggagacttatggttttagcatccagcacaccactttaccgtgcttgcaagtgggcaatcaacaaagaccaaattatctgcctatggaggtttgcaagatagttgaaggacagcgttactcaaagcgactcaatgagaaacaaatcactgctttactgaaagtgacctgccagcgccctcaagagcgtgagctggacattttacagactgtgcatcacaatgcgtactatgaagacccgtatgcacaggaatttggtataagaattgatgaacgccttgctgcagttgaagctcgtgttctgccaccaccaaggcttaaataccatgatagtggccgagagaaggatgttttgcccagagttggccaatggaacatgatgaataagaaaatggtaaatggtggcagagtcagcaactgggcatgtattaacttctctcggaatgtgcaagatagtgccgctaggggtttctgtcatgaactggcaatcatgtgccaaatatcaggaatggatttttcccttgagcctgtgctgcctccagtgactgcaaggccagaacatgttgaaagagcgttgaaggcacgttatcaagatgcaatgaacatactgaggccacaggggagggaacttgatctgctgattgtaatactgcctgacattaatggttccttatatggggatctcaaaaggatctgtgagactgatctcggattggtctcccagtgttgtctgactaaacatgtttttaagatgagcaagcagtatcttgcaaatgttgcactcaaaataaatgttaaggttggtggaaggaatactgtacttgtagatgctttgacaaggagaatcccccttgtcagtgacagaccgaccataatatttggtgctgatgttacccatccacatcctggagaagattccagtccttccattgcagctgtggttgcttcgcaagactggcctgaggtcaccaaatatgctggactagtgagtgcccaagcccatcgccaggagctgatacaggatcttttcaaagtatggcaagatccacagagaaggacagtaactggtggcatgataaaggaacttctcatttctttcaagagagcaactggacagaagccccagaggatcatattctacagggatggtgtcagtgagggacagttctatcaagtattgttgtatgaacttgatgccatcagaaaggcatgtgcatccttggagcccaactaccagcctccagttacttttgtcgtggtgcagaaacgacatcacactaggctgtttgctaataaccacaacgatcagcgtacagttgatagaagcggaaacatactgcctggcaccgtggttgattcgaagatttgccatcctactgaatttgatttctacctgtgtagccatgctggcattcagggaacaagccgccctgctcattaccatgtcctgtgggacgagaacaagttcacagctgatgagctgcagactctgacaaacaacctatgctacacgtacgctaggtgcacccgctccgtgtcaattgtgcccccggcatactatgctcatctggcagccttccgagctcgcttctacatggagccagatacctctgacagtggctcaatggccagtggtgcccgtggccctccaccaggtgcggcacgcagcatgagaggagcggggagtgttgcggtcaggcccctacctgctctcaaggaaaacgtgaagcgtgtcatgttttactgctgagatgctgagctaccttcaccaagaaaatatcctgacttgttccatgtacccgcactgtttcggtgatactatctgacaccgaatttatgcattaagtcttccagtggtctggagattttaagtaacgcctgtttttattcgtgagttgtaacgctgcagttcgaggagcttcagtgctgtatgatgtgtaaactatttgttgtaagttgtaaccaattgttgtaagttgtaaccagccactatgttataatcctgtttgtttcagctttttacagtttctcgctaccaaaagctgttgtgaactgtcaaacgtttagctttttagttagctctataaaaatcgatttgttaaaaaccat

SEQ ID NO: 201914 - DNA, 3783 bp, Zea Mays
gcccaccctgccctgccgctgccttgcctgccctcgcttcggcgctttctccagtgagccgcgcccgcactgccgctgccgctaattaaccacaagcggccgtcgccttccccccctcccctcctcaaaaaaggcggagaggtggtggtgctcgtgggcacgcagtggagcacccagtacagcagcagcgctgcggcagtggagttaggagcttagcactccgcctccgttcccatcccgcgcgcagccgtcggccgagcctgctcagtgcccatcatggtgaggaagaagagaactggccctggcggctctggagaaacttctggagagtcttcaggagcttctggacaaggttcctcacagcggcctgaacggactcaacaacctggggcaggacgtggctgggtgcctcagcagggtggccgtggtggcgggcaacaccagggtcgtggtggacattatcaaggccgtggagggccaggtccacatcaccctggtggactgcctgagtatcaccagcgtgaataccagggacgaggtggtgagtaccagggacagtaccaggggcgtggtggtgcccgctccagaggtggaatttcacagccatactatggtgggcataggggaggtagtgttggacgaaatgttcctccaggtccatccagaacagttcccgagctgcaccaagccccatacgtccagtatcaagccccggtgatttcaccatccccatcgggacctggctcatcctcacagcctatggcagaggtgagctctggacaagtccagcaacagtttgagcaacttgccattcatggtcagagttccatgagtcaagaagttcaagtggcaccagcatcaagcaaatcggttcgattcccattacgccccggcaagggcacttatggggacaggtgcattgtgaaggcgaatcatttttttgctgagcttcctgacaaagaccttcaccaatatgatgtaactataacacctgaagttacttcacgtggcgttaatcgtgctgtcatgggagagcttgtaacactatatagacaatcccatttgggcgggcgtctacctgcgtacgatggaagaaagagcctttataccgctggaccattgccttttacttctatgacatttgaaattaccttgcaagatgaggaagatagtgttggcggtggccagggcggacaaagctggaaggcaagcagacgctcctcaagaagctcttcaagtgcttgacattgtactacgtgaattgcctactgcgaggtattctcctgttggtaggtcattttattctcccaacttagggagacgtcagcaacttggtgagggtttggaaagttggcgcggtttttaccaaagcataaggccgacacagatgggcctttcactgaatattgatatgtcctctactgcatttatcgagcctctccctgtgattgattttgttgctcagcttcttaatagagatatttcagttaggccattgtctgattctgatcgcgtgaagatcaaaaaagccttaagaggtgtgaaggttgaggtcactcacaggggaaacatgcgcagaaagtatcgcatttctggcctcacctcacaagcaacaagagagctatcattccctgttgatgatcgtggtactgtgaagactgtggtccaatacttcatggagacttatggttttagcatccagcacaccactttaccgtgcttgcaagtgggcaatcaacaaagaccaaattatctgcctatggaggtttgcaagatagttgaaggacagcgttactcaaagcgactcaatgagaaacaaatcactgctttactgaaagtgacctgccagcgccctcaagagcgtgagctggacattttacagactgtgcatcacaatgcgtactatgaagacccgtatgcacaggaatttggtataagaattgatgaacgccttgctgcagttgaagctcgtgttctgccaccaccaaggcttaaataccatgatagtggccgagagaaggatgttttgcccagagttggccaatggaacatgatgaataagaaaatggtaaatggtggcagagtcagcaactgggcatgtattaacttctctcggaatgtgcaagatagtgccgctaggggtttctgtcatgaactggcaatcatgtgccaaatatcaggaatggatttttcccttgagcctgtgctgcctccagtgactgcaaggccagaacatgttgaaagagcgttgaaggcacgttatcaagatgcaatgaacatactgaggccacaggggagggaacttgatctgctgattgtaatactgcctgacattaatggttccttatatggggatctcaaaaggatctgtgagactgatctcggattggtctcccagtgttgtctgactaaacatgtttttaagatgagcaagcagtatcttgcaaatgttgcactcaaaataaatgttaaggttggtggaaggaatactgtacttgtagatgctttgacaaggagaatcccccttgtcagtgacagaccgaccataatatttggtgctgatgttacccatccacatcctggagaagattccagtccttccattgcagctgtggttgcttcgcaagactggcctgaggtcaccaaatatgctggactagtgagtgcccaagcccatcgccaggagctgatacaggatcttttcaaagtatggcaagatccacagagaaggacagtaactggtggcatgataaaggaacttctcatttctttcaagagagcaactggacagaagccccagaggatcatattctacagggatggtgtcagtgagggacagttctatcaagtattgttgtatgaacttgatgccatcagaaaggcatgtgcatccttggagcccaactaccagcctccagttacttttgtcgtggtgcagaaacgacatcacactaggctgtttgctaataaccacaacgatcagcgtacagttgatagaagcggaaacatactgcctggcaccgtggttgattcgaagatttgccatcctactgaatttgatttctacctgtgtagccatgctggcattcagggaacaagccgccctgctcattaccatgtcctgtgggacgagaacaagttcacagctgatgagctgcagactctgacaaacaacctatgctacacgtacgctaggtgcacccgctccgtgtcaattgtgcccccggcatactatgctcatctggcagccttccgagctcgcttctacatggagccagatacctctgacagtggctcaatggccagtggtgcccgtggccctccaccaggtgcggcacgcagcatgagaggagcggggagtgttgcggtcaggcccctacctgctctcaaggaaaacgtgaagcgtgtcatgttttactgctgagatgctgagctaccttcaccaagaaaatatcctgacttgttccatgtacccgcactgtttcggtgatactatctgacaccgaatttatgcattaagtcttccagtggtctggagattttaagtaacgcctgtttttattcgtgagttgtaacgctgcagttcgaggagcttcagtgctgtatgatgtgtaaactatttgttgtaagttgtaaccaattgttgtaagttgtaaccagccactatgttataatcctgtttgtttcagctttttacagtttctcgctaccaaaagctgttgtgaactgtcaaacgtttagctttttagttagctctataaaaatcgatttgttaaaaaccat

SEQ ID NO: 201915 - DNA, 3060 bp, Zea Mays
aaccacaagcggccgtcgccttccccccctcccctcctcaaaaaaggcggagaggtggtggtgctcgtgggcacgcagtggagcacccagtacagcagcagcgctgcggcagtggagttaggagcttagcactccgcctccgttcccatcccgcgcgcagccgtcggccgagcctgctcaggtaactataacacctgaagttacttcacgtggcgttaatcgtgctgtcatgggagagcttgtaacactatatagacaatcccatttgggcgggcgtctacctgcgtacgatggaagaaagagcctttataccgctggaccattgccttttacttctatgacatttgaaattaccttgcaagatgaggaagatagtgttggcggtggccagggcggacaaaggcgcgagagagtatttagggtggtgatcaaatttgcggcccgtgctgatctccatcatctggctatgtttctagctggaaggcaagcagacgctcctcaagaagctcttcaagtgcttgacattgtactacgtgaattgcctactgcgaggtattctcctgttggtaggtcattttattctcccaacttagggagacgtcagcaacttggtgagggtttggaaagttggcgcggtttttaccaaagcataaggccgacacagatgggcctttcactgaatattgatatgtcctctactgcatttatcgagcctctccctgtgattgattttgttgctcagcttcttaatagagatatttcagttaggccattgtctgattctgatcgcgtgaagatcaaaaaagccttaagaggtgtgaaggttgaggtcactcacaggggaaacatgcgcagaaagtatcgcatttctggcctcacctcacaagcaacaagagagctatcattccctgttgatgatcgtggtactgtgaagactgtggtccaatacttcatggagacttatggttttagcatccagcacaccactttaccgtgcttgcaagtgggcaatcaacaaagaccaaattatctgcctatggaggtttgcaagatagttgaaggacagcgttactcaaagcgactcaatgagaaacaaatcactgctttactgaaagtgacctgccagcgccctcaagagcgtgagctggacattttacagactgtgcatcacaatgcgtactatgaagacccgtatgcacaggaatttggtataagaattgatgaacgccttgctgcagttgaagctcgtgttctgccaccaccaaggcttaaataccatgatagtggccgagagaaggatgttttgcccagagttggccaatggaacatgatgaataagaaaatggtaaatggtggcagagtcagcaactgggcatgtattaacttctctcggaatgtgcaagatagtgccgctaggggtttctgtcatgaactggcaatcatgtgccaaatatcaggaatggatttttcccttgagcctgtgctgcctccagtgactgcaaggccagaacatgttgaaagagcgttgaaggcacgttatcaagatgcaatgaacatactgaggccacaggggagggaacttgatctgctgattgtaatactgcctgacattaatggttccttatatggggatctcaaaaggatctgtgagactgatctcggattggtctcccagtgttgtctgactaaacatgtttttaagatgagcaagcagtatcttgcaaatgttgcactcaaaataaatgttaaggttggtggaaggaatactgtacttgtagatgctttgacaaggagaatcccccttgtcagtgacagaccgaccataatatttggtgctgatgttacccatccacatcctggagaagattccagtccttccattgcagctgtggttgcttcgcaagactggcctgaggtcaccaaatatgctggactagtgagtgcccaagcccatcgccaggagctgatacaggatcttttcaaagtatggcaagatccacagagaaggacagtaactggtggcatgataaaggaacttctcatttctttcaagagagcaactggacagaagccccagaggatcatattctacagggatggtgtcagtgagggacagttctatcaagtattgttgtatgaacttgatgccatcagaaaggcatgtgcatccttggagcccaactaccagcctccagttacttttgtcgtggtgcagaaacgacatcacactaggctgtttgctaataaccacaacgatcagcgtacagttgatagaagcggaaacatactgcctggcaccgtggttgattcgaagatttgccatcctactgaatttgatttctacctgtgtagccatgctggcattcagggaacaagccgccctgctcattaccatgtcctgtgggacgagaacaagttcacagctgatgagctgcagactctgacaaacaacctatgctacacgtacgctaggtgcacccgctccgtgtcaattgtgcccccggcatactatgctcatctggcagccttccgagctcgcttctacatggagccagatacctctgacagtggctcaatggccagtggtgcccgtggccctccaccaggtgcggcacgcagcatgagaggagcggggagtgttgcggtcaggcccctacctgctctcaaggaaaacgtgaagcgtgtcatgttttactgctgagatgctgagctaccttcaccaagaaaatatcctgacttgttccatgtacccgcactgtttcggtgatactatctgacaccgaatttatgcattaagtcttccagtggtctggagattttaagtaacgcctgtttttattcgtgagttgtaacgctgcagttcgaggagcttcagtgctgtatgatgtgtaaactatttgttgtaagttgtaaccaattgttgtaagttgtaaccagccactatgttataatcctgtttgtttcagctttttacagtttctcgctaccaaaagctgttgtgaactgtcaaacgtttagctttttagttagctctataaaaatcgatttgttaaaaaccat

SEQ ID NO: 201916 - DNA, 3338 bp, Zea Mays
aaccacaagcggccgtcgccttccccccctcccctcctcaaaaaaggcggagaggtggtggtgctcgtgggcacgcagtggagcacccagtacagcagcagcgctgcggcagtggagttaggagcttagcactccgcctccgttcccatcccgcgcgcagccgtcggccgagcctgctcagtgcccatcatggtgaggaagaagagaactggccctggcggctctggagaaacttctggagagtcttcaggagcttctggacaagtccagcaacagtttgagcaacttgccattcatggtcagagttccatgagtcaagaagttcaagtggcaccagcatcaagcaaatcggttcgattcccattacgccccggcaagggcacttatggggacaggtgcattgtgaaggcgaatcatttttttgctgagcttcctgacaaagaccttcaccaatatgatgtaactataacacctgaagttacttcacgtggcgttaatcgtgctgtcatgggagagcttgtaacactatatagacaatcccatttgggcgggcgtctacctgcgtacgatggaagaaagagcctttataccgctggaccattgccttttacttctatgacatttgaaattaccttgcaagatgaggaagatagtgttggcggtggccagggcggacaaaggcgcgagagagtatttagggtggtgatcaaatttgcggcccgtgctgatctccatcatctggctatgtttctagctggaaggcaagcagacgctcctcaagaagctcttcaagtgcttgacattgtactacgtgaattgcctactgcgaggtattctcctgttggtaggtcattttattctcccaacttagggagacgtcagcaacttggtgagggtttggaaagttggcgcggtttttaccaaagcataaggccgacacagatgggcctttcactgaatattgatatgtcctctactgcatttatcgagcctctccctgtgattgattttgttgctcagcttcttaatagagatatttcagttaggccattgtctgattctgatcgcgtgaagatcaaaaaagccttaagaggtgtgaaggttgaggtcactcacaggggaaacatgcgcagaaagtatcgcatttctggcctcacctcacaagcaacaagagagctatcattccctgttgatgatcgtggtactgtgaagactgtggtccaatacttcatggagacttatggttttagcatccagcacaccactttaccgtgcttgcaagtgggcaatcaacaaagaccaaattatctgcctatggaggtttgcaagatagttgaaggacagcgttactcaaagcgactcaatgagaaacaaatcactgctttactgaaagtgacctgccagcgccctcaagagcgtgagctggacattttacagactgtgcatcacaatgcgtactatgaagacccgtatgcacaggaatttggtataagaattgatgaacgccttgctgcagttgaagctcgtgttctgccaccaccaaggcttaaataccatgatagtggccgagagaaggatgttttgcccagagttggccaatggaacatgatgaataagaaaatggtaaatggtggcagagtcagcaactgggcatgtattaacttctctcggaatgtgcaagatagtgccgctaggggtttctgtcatgaactggcaatcatgtgccaaatatcaggaatggatttttcccttgagcctgtgctgcctccagtgactgcaaggccagaacatgttgaaagagcgttgaaggcacgttatcaagatgcaatgaacatactgaggccacaggggagggaacttgatctgctgattgtaatactgcctgacattaatggttccttatatggggatctcaaaaggatctgtgagactgatctcggattggtctcccagtgttgtctgactaaacatgtttttaagatgagcaagcagtatcttgcaaatgttgcactcaaaataaatgttaaggttggtggaaggaatactgtacttgtagatgctttgacaaggagaatcccccttgtcagtgacagaccgaccataatatttggtgctgatgttacccatccacatcctggagaagattccagtccttccattgcagctgtggttgcttcgcaagactggcctgaggtcaccaaatatgctggactagtgagtgcccaagcccatcgccaggagctgatacaggatcttttcaaagtatggcaagatccacagagaaggacagtaactggtggcatgataaaggaacttctcatttctttcaagagagcaactggacagaagccccagaggatcatattctacagggatggtgtcagtgagggacagttctatcaagtattgttgtatgaacttgatgccatcagaaaggcatgtgcatccttggagcccaactaccagcctccagttacttttgtcgtggtgcagaaacgacatcacactaggctgtttgctaataaccacaacgatcagcgtacagttgatagaagcggaaacatactgcctggcaccgtggttgattcgaagatttgccatcctactgaatttgatttctacctgtgtagccatgctggcattcagggaacaagccgccctgctcattaccatgtcctgtgggacgagaacaagttcacagctgatgagctgcagactctgacaaacaacctatgctacacgtacgctaggtgcacccgctccgtgtcaattgtgcccccggcatactatgctcatctggcagccttccgagctcgcttctacatggagccagatacctctgacagtggctcaatggccagtggtgcccgtggccctccaccaggtgcggcacgcagcatgagaggagcggggagtgttgcggtcaggcccctacctgctctcaaggaaaacgtgaagcgtgtcatgttttactgctgagatgctgagctaccttcaccaagaaaatatcctgacttgttccatgtacccgcactgtttcggtgatactatctgacaccgaatttatgcattaagtcttccagtggtctggagattttaagtaacgcctgtttttattcgtgagttgtaacgctgcagttcgaggagcttcagtgctgtatgatgtgtaaactatttgttgtaagttgtaaccaattgttgtaagttgtaaccagccactatgttataatcctgtttgtttcagctttttacagtttctcgctaccaaaagctgttgtgaactgtcaaacgtttagctttttagttagctctataaaaatcgatttgttaaaaaccat

SEQ ID NO: 201917 - DNA, 3627 bp, Zea Mays
cggcaggatatttatcattttgtgtgtagatgaaatcgtgcccatcatggtgaggaagaagagaactggccctggcggctctggagaaacttctggagagtcttcaggagcttctggacaaggttcctcacagcggcctgaacggactcaacaacctggggcaggacgtggctgggtgcctcagcagggtggccgtggtggcgggcaacaccagggtcgtggtggacattatcaaggccgtggagggccaggtccacatcaccctggtggactgcctgagtatcaccagcgtgaataccagggacgaggtggtgagtaccagggacagtaccaggggcgtggtggtgcccgctccagaggtggaatttcacagccatactatggtgggcataggggaggtagtgttggacgaaatgttcctccaggtccatccagaacagttcccgagctgcaccaagccccatacgtccagtatcaagccccggtgatttcaccatccccatcgggacctggctcatcctcacagcctatggcagaggtgagctctggacaagtccagcaacagtttgagcaacttgccattcatggtcagagttccatgagtcaagaagttcaagtggcaccagcatcaagcaaatcggttcgattcccattacgccccggcaagggcacttatggggacaggtgcattgtgaaggcgaatcatttttttgctgagcttcctgacaaagaccttcaccaatatgatgtaactataacacctgaagttacttcacgtggcgttaatcgtgctgtcatgggagagcttgtaacactatatagacaatcccatttgggcgggcgtctacctgcgtacgatggaagaaagagcctttataccgctggaccattgccttttacttctatgacatttgaaattaccttgcaagatgaggaagatagtgttggcggtggccagggcggacaaaggcgcgagagagtatttagggtggtgatcaaatttgcggcccgtgctgatctccatcatctggctatgtttctagctggaaggcaagcagacgctcctcaagaagctcttcaagtgcttgacattgtactacgtgaattgcctactgcgaggtattctcctgttggtaggtcattttattctcccaacttagggagacgtcagcaacttggtgagggtttggaaagttggcgcggtttttaccaaagcataaggccgacacagatgggcctttcactgaatattgatatgtcctctactgcatttatcgagcctctccctgtgattgattttgttgctcagcttcttaatagagatatttcagttaggccattgtctgattctgatcgcgtgaagatcaaaaaagccttaagaggtgtgaaggttgaggtcactcacaggggaaacatgcgcagaaagtatcgcatttctggcctcacctcacaagcaacaagagagctatcattccctgttgatgatcgtggtactgtgaagactgtggtccaatacttcatggagacttatggttttagcatccagcacaccactttaccgtgcttgcaagtgggcaatcaacaaagaccaaattatctgcctatggaggtttgcaagatagttgaaggacagcgttactcaaagcgactcaatgagaaacaaatcactgctttactgaaagtgacctgccagcgccctcaagagcgtgagctggacattttacagactgtgcatcacaatgcgtactatgaagacccgtatgcacaggaatttggtataagaattgatgaacgccttgctgcagttgaagctcgtgttctgccaccaccaaggcttaaataccatgatagtggccgagagaaggatgttttgcccagagttggccaatggaacatgatgaataagaaaatggtaaatggtggcagagtcagcaactgggcatgtattaacttctctcggaatgtgcaagatagtgccgctaggggtttctgtcatgaactggcaatcatgtgccaaatatcaggaatggatttttcccttgagcctgtgctgcctccagtgactgcaaggccagaacatgttgaaagagcgttgaaggcacgttatcaagatgcaatgaacatactgaggccacaggggagggaacttgatctgctgattgtaatactgcctgacattaatggttccttatatggggatctcaaaaggatctgtgagactgatctcggattggtctcccagtgttgtctgactaaacatgtttttaagatgagcaagcagtatcttgcaaatgttgcactcaaaataaatgttaaggttggtggaaggaatactgtacttgtagatgctttgacaaggagaatcccccttgtcagtgacagaccgaccataatatttggtgctgatgttacccatccacatcctggagaagattccagtccttccattgcagctgtggttgcttcgcaagactggcctgaggtcaccaaatatgctggactagtgagtgcccaagcccatcgccaggagctgatacaggatcttttcaaagtatggcaagatccacagagaaggacagtaactggtggcatgataaaggaacttctcatttctttcaagagagcaactggacagaagccccagaggatcatattctacagggatggtgtcagtgagggacagttctatcaagtattgttgtatgaacttgatgccatcagaaaggcatgtgcatccttggagcccaactaccagcctccagttacttttgtcgtggtgcagaaacgacatcacactaggctgtttgctaataaccacaacgatcagcgtacagttgatagaagcggaaacatactgcctggcaccgtggttgattcgaagatttgccatcctactgaatttgatttctacctgtgtagccatgctggcattcagggaacaagccgccctgctcattaccatgtcctgtgggacgagaacaagttcacagctgatgagctgcagactctgacaaacaacctatgctacacgtacgctaggtgcacccgctccgtgtcaattgtgcccccggcatactatgctcatctggcagccttccgagctcgcttctacatggagccagatacctctgacagtggctcaatggccagtggtgcccgtggccctccaccaggtgcggcacgcagcatgagaggagcggggagtgttgcggtcaggcccctacctgctctcaaggaaaacgtgaagcgtgtcatgttttactgctgagatgctgagctaccttcaccaagaaaatatcctgacttgttccatgtacccgcactgtttcggtgatactatctgacaccgaatttatgcattaagtcttccagtggtctggagattttaagtaacgcctgtttttattcgtgagttgtaacgctgcagttcgaggagcttcagtgctgtatgatgtgtaaactatttgttgtaagttgtaaccaattgttgtaagttgtaaccagccactatgttataatcctgtttgtttcagctttttacagtttctcgctaccaaaagctgttgtgaactgtcaaacgtttagctttttagttagctctataaaaatcgatttgttaaaaaccat

SEQ ID NO: 201918 - DNA, 1751 bp, Zea Mays
taacatcatcattttgagttcattgaaaagaaaatggtaaatggtggcagagtcagcaactgggcatgtattaacttctctcggaatgtgcaagatagtgccgctaggggtttctgtcatgaactggcaatcatgtgccaaatatcaggaatggatttttcccttgagcctgtgctgcctccagtgactgcaaggccagaacatgttgaaagagcgttgaaggcacgttatcaagatgcaatgaacatactgaggccacaggggagggaacttgatctgctgattgtaatactgcctgacattaatggttccttatatggggatctcaaaaggatctgtgagactgatctcggattggtctcccagtgttgtctgactaaacatgtttttaagatgagcaagcagtatcttgcaaatgttgcactcaaaataaatgttaaggttggtggaaggaatactgtacttgtagatgctttgacaaggagaatcccccttgtcagtgacagaccgaccataatatttggtgctgatgttacccatccacatcctggagaagattccagtccttccattgcagctgtggttgcttcgcaagactggcctgaggtcaccaaatatgctggactagtgagtgcccaagcccatcgccaggagctgatacaggatcttttcaaagtatggcaagatccacagagaaggacagtaactggtggcatgataaaggaacttctcatttctttcaagagagcaactggacagaagccccagaggatcatattctacagggatggtgtcagtgagggacagttctatcaagtattgttgtatgaacttgatgccatcagaaaggcatgtgcatccttggagcccaactaccagcctccagttacttttgtcgtggtgcagaaacgacatcacactaggctgtttgctaataaccacaacgatcagcgtacagttgatagaagcggaaacatactgcctggcaccgtggttgattcgaagatttgccatcctactgaatttgatttctacctgtgtagccatgctggcattcagggaacaagccgccctgctcattaccatgtcctgtgggacgagaacaagttcacagctgatgagctgcagactctgacaaacaacctatgctacacgtacgctaggtgcacccgctccgtgtcaattgtgcccccggcatactatgctcatctggcagccttccgagctcgcttctacatggagccagatacctctgacagtggctcaatggccagtggtgcccgtggccctccaccaggtgcggcacgcagcatgagaggagcggggagtgttgcggtcaggcccctacctgctctcaaggaaaacgtgaagcgtgtcatgttttactgctgagatgctgagctaccttcaccaagaaaatatcctgacttgttccatgtacccgcactgtttcggtgatactatctgacaccgaatttatgcattaagtcttccagtggtctggagattttaagtaacgcctgtttttattcgtgagttgtaacgctgcagttcgaggagcttcagtgctgtatgatgtgtaaactatttgttgtaagttgtaaccaattgttgtaagttgtaaccagccactatgttataatcctgtttgtttcagctttttacagtttctcgctaccaaaagctgttgtgaactgtcaaacgtttagctttttagttagctctataaaaatcgatttgttaaaaaccat

SEQ ID NO: 201919 - DNA, 3571 bp, Zea Mays
ctcgcctgctccacccccgccaccacaccgctttgccgctccgatctccgcacgctccggcgagaggggcccactggacagccagctcagtaccctcctacggcgacgctgtcgcacgcgccaccattaggtgtcacccgtccttgcgccgccgcacgcatcccaacgcagccggaccccacggcagccgccgccgctgcggcgaaggcccagcccaggccacgcgcgtcatcctcgcgccgaacgacgcaaggtggagcggcggtccactccccgcgcgcgcttcgcctccgctgcactgaaaccgtgccctgctggtgcgagtgtccggatgctaccaaatcctagggccgggcatcgactgactgactgagtgagtaagggagggagggagggaggagccagggcctcgccgcccgctgaacgagggagtgatgcggcgcggaagctcggccgcatgaggtgcctcgtcggcggcggcgtccaggacagcccgcgtgcagcggccaagagggtgtcgccggcgtcgtggcggctggacaccgccgcggcggaggcggagacgggcgcggggggagcggcggctaaggggccgagggtctgcttcaggccgccggatgtgatggagacggtgcacgaggtggccatttacatccaccgcttccacaacctcgatctgttccagcaaggatggtatcagatgaagattagtgcactgtgggaggaaggtggcaacagaacaccggcttcgcctgccagggtcgtgcaatatgaaggtggattgtgcagcttctgatgttggtggagacgatgcattaggcatttggaaaatagatgatattgataatagcttccacacacagccgttccggatcaagtatgccagacaagatatctatctgtcggttatggtgtctttcaacatattcaacagtgaagaggagggtccagcagcttcagatgtgatgatgaagtttgagctgatatatgccccaacactagacaatgggtctgagcttcatgcttctagtgccacatcttcagcagctgtgcacgaatttaggatcccacacagagcacttctgggtctacactcatactgtcctgttcactttgatgcgttccactctgtgcttgttgatctgacattgcacatagtgtacctgaaagctggtgcagctaaatcatcactgaaggtacacaggtaccagagcaaggtttacgtcctacatcatatcacattgttaaggcattattaacttctagaaaaatgttgcttgaagaactgaacaaaatcagtggtgctattggtaagacagtagaggatttagatgttgctgacttgaatcttggtaaatatgagtcatttaatccatcaaaatcttggctaccgaattctagtaaagtgttccccgaaactggcaaaggtgtgggacagttggctggaattttacatgacttcttggagagacccaacgatatggttaatggtacagatgattctttattgtatactcttccccatgaagagctgtttgaactgtttctaactctgagtggacagctttcacttctatggaatgcattcttgaaatttcataggctaaataaaacaaagatattggactacttgcacgatgcttgggctattggcaggaaggcagaatggtcaatatggactattcactcgaaaattgagatccctcatcgctatctgcagagtatgagtgatgactcaccccaccgttattctcttagagtttctggctcaaggaagttccatgatgaccatgtacagagctctgcttcacgggcggaactacacaggaaaagcatagcacaaatgaagattaatccacattatgttcaagatatgcatatatatggtgatccttcacgtgttcctgttgttcttatagaacaacatgtcatggttgttccacagcatagttccagcaaggatatggcttcaaatgtttctgaacaaaaggatactattgtggtaccgaaactacaaggagagcctctggtacccaaaagtagtgctggtaaaaaaagtggacgcatattgagagctgtcatttttgtgcatggatttcagggtcaccatctggatttacgtcttgttagaaaccaatggcttctattggatcctggagctgactgcctgatgtctgaggctaatgaagataaaacatctggagattttaaagaaatgggtagcaggttggctggggaggtagttgccttcctgaagaagaaaatggataagctttcgagatatggaggctgcaaagagctgaagttaagtttcgtaggtcattccattggaaacgtcatcattagaagtgccctggcagaacctgcattgcaaccatacttgaagaacctttacacttacatgtcaatatcagggcctcacttgggttactggtacagttcaaattctttgttcaattctggactctggctgctgaaaaagctcaagggtgcgcaatgcatccatcaactcactttcagtgatgatcaagacccccagaatacatacttttataagctttgcaagttgaaaacgttggagaacttccaaaatatcatattgctgtcatcaccacaggatggctacgtaccatatcattcagcgagaatcgagctctgcccagctgcatcatcggacacgtcaaagaagggccaagtcttcacagaaatgctgaacaactgcttggaccagatccgcacgccctcgtccgacacccggacattcatgcgctgcgacgtgaatttcgaccagtccaaccaagggcgaagcctgaacaccatgattggcagagcggcccacatcgagttcctggaaaccgacctctacgccaagttcatcatgtggtcctttcccgacctgttccgatgacgacgacgacaccgctcgtctttgtaatactggcacataccaaaccaataacgcacactacccagtactgaccaggcaaggaatactaaagctcgctccaccagaacccaacaccgagacaggcaggaagcactgtgaaggtcctagaagcaatggtttttccagcttgctagatcctattctgtataagtagttgattctttttcatttcattcatagtgctgtagattgcacccttgctgtgaaaatttataatccttgtcgtctgttgtaccttacacttcagtttaggatgtgctgacaatcagtgagcttattatgtccaaataagctctctttttttaacgtttgatttttagtcaccttcgttcttgtggtgctgtaaatcctgcaacatgctttgtacatgcagacgatcaccctgtctgatactagatccggatggtcctgccgtccaggtccagggtgttgtttcagtgtttctgtttgacgaaactgctgtaggaatatataaataatatttttttggttctggcatcctgccgttggtggacctgcatcagcatctgcttctagaactgttccctcatgccgtccttgtctgtttgttatgctcgtgcgagtgctgccgtatgtgtgtgacagacatgctggcttttccgg

SEQ ID NO: 201920 - DNA, 3351 bp, Zea Mays
ctccacccccgccaccacaccgctttgccgctccgatctccgcacgctccggcgagaggggcccactggacagccagctcagtaccctcctacggcgacgctgtcgcacgcgccaccattaggtgtcacccgtccttgcgccgccgcacgcatcccaacgcagccggaccccacggcagccgccgccgctgcggcgaaggcccagcccaggccacgcgcgtcatcctcgcgccgaacgacgcaaggtggagcggcggtccactccccgcgcgcgcttcgcctccgctgcactgaaaccgtgccctgctggtgcgagtgtccggatgctaccaaatcctagggccgggcatcgactgactgactgagtgagtaagggagggagggagggaggagccagggcctcgccgcccgctgaacgagggagtgatgcggcgcggaagctcggccgcatgaggtgcctcgtcggcggcggcgtccaggacagcccgcgtgcagcggccaagagggtgtcgccggcgtcgtggcggctggacaccgccgcggcggaggcggagacgggcgcggggggagcggcggctaaggggccgagggtctgcttcaggccgccggatgtgatggagacggtgcacgaggtggccatttacatccaccgcttccacaacctcgatctgttccagcaaggatggtatcagatgaagattagtgcactgtgggaggaaggtggcaacagaacaccggcttcgcctgccagggtcgtgcaatatgaagcttctgatgttggtggagacgatgcattaggcatttggaaaatagatgatattgataatagcttccacacacagccgttccggatcaagtatgccagacaagatatctatctgtcggttatggtgtctttcaacatattcaacagtgaagaggagggtccagcagcttcagatgtgatgatgaagtttgagctgatatatgccccaacactagacaatgggtaccagagcaaggtttacgtcctacatcatatcacattgttaaggcattattaacttctagaaaaatgttgcttgaagaactgaacaaaatcagtggtgctattggtaagacagtagaggatttagatgttgctgacttgaatcttggtaaatatgagtcatttaatccatcaaaatcttggctaccgaattctagtaaagtgttccccgaaactggcaaaggtgtgggacagttggctggaattttacatgacttcttggagagacccaacgatatggttaatggtacagatgattctttattgtatactcttccccatgaagagctgtttgaactgtttctaactctgagtggacagctttcacttctatggaatgcattcttgaaatttcataggctaaataaaacaaagatattggactacttgcacgatgcttgggctattggcaggaaggcagaatggtcaatatggactattcactcgaaaattgagatccctcatcgctatctgcagagtatgagtgatgactcaccccaccgttattctcttagagtttctggctcaaggaagttccatgatgaccatgtacagagctctgcttcacgggcggaactacacaggaaaagcatagcacaaatgaagattaatccacattatgttcaagatatgcatatatatggtgatccttcacgtgttcctgttgttcttatagaacaacatgtcatggttgttccacagcatagttccagcaaggatatggcttcaaatgtttctgaacaaaaggatactattgtggtaccgaaactacaaggagagcctctggtacccaaaagtagtgctggtaaaaaaagtggacgcatattgagagctgtcatttttgtgcatggatttcagggtcaccatctggatttacgtcttgttagaaaccaatggcttctattggatcctggagctgactgcctgatgtctgaggctaatgaagataaaacatctggagattttaaagaaatgggtagcaggttggctggggaggtagttgccttcctgaagaagaaaatggataagctttcgagatatggaggctgcaaagagctgaagttaagtttcgtaggtcattccattggaaacgtcatcattagaagtgccctgaacctgcattgcaaccatacttgaagaacctttacacttacatgtcaatatcagggcctcacttgggttactggtacagttcaaattctttgttcaattctggactctggctgctgaaaaagctcaagggtgcgcaatgcatccatcaactcactttcagtgatgatcaagacccccagaatacatacttttataagctttgcaagttgaaaacgttggagaacttccaaaatatcatattgctgtcatcaccacaggatggctacgtaccatatcattcagcgagaatcgagctctgcccagctgcatcatcggacacgtcaaagaagggccaagtcttcacagaaatgctgaacaactgcttggaccagatccgcacgccctcgtccgacacccggacattcatgcgctgcgacgtgaatttcgaccagtccaaccaagggcgaagcctgaacaccatgattggcagagcggcccacatcgagttcctggaaaccgacctctacgccaagttcatcatgtggtcctttcccgacctgttccgatgacgacgacgacaccgctcgtctttgtaatactggcacataccaaaccaataacgcacactacccagtactgaccaggcaaggaatactaaagctcgctccaccagaacccaacaccgagacaggcaggaagcactgtgaaggtcctagaagcaatggtttttccagcttgctagatcctattctgtataagtagttgattctttttcatttcattcatagtgctgtagattgcacccttgctgtgaaaatttataatccttgtcgtctgttgtaccttacacttcagtttaggatgtgctgacaatcagtgagcttattatgtccaaataagctctctttttttaacgtttgatttttagtcaccttcgttcttgtggtgctgtaaatcctgcaacatgctttgtacatgcagacgatcaccctgtctgatactagatccggatggtcctgccgtccaggtccagggtgttgtttcagtgtttctgtttgacgaaactgctgtaggaatatataaataatatttttttggttctggcatcctgccgttggtggacctgcatcagcatctgcttctagaactgttccctcatgccgtccttgtctgtttgttatgctcgtgcgagtgctgccgtatgtgtgtgacagacatgctggcttttccgg

SEQ ID NO: 201921 - DNA, 3521 bp, Zea Mays
ctccacccccgccaccacaccgctttgccgctccgatctccgcacgctccggcgagaggggcccactggacagccagctcagtaccctcctacggcgacgctgtcgcacgcgccaccattaggtgtcacccgtccttgcgccgccgcacgcatcccaacgcagccggaccccacggcagccgccgccgctgcggcgaaggcccagcccaggccacgcgcgtcatcctcgcgccgaacgacgcaaggtggagcggcggtccactccccgcgcgcgcttcgcctccgctgcactgaaaccgtgccctgctggtgcgagtgtccggatgctaccaaatcctagggccgggcatcgactgactgactgagtgagtaagggagggagggagggaggagccagggcctcgccgcccgctgaacgagggagtgatgcggcgcggaagctcggccgcatgaggtgcctcgtcggcggcggcgtccaggacagcccgcgtgcagcggccaagagggtgtcgccggcgtcgtggcggctggacaccgccgcggcggaggcggagacgggcgcggggggagcggcggctaaggggccgagggtctgcttcaggccgccggatgtgatggagacggtgcacgaggtggccatttacatccaccgcttccacaacctcgatctgttccagcaaggatggtatcagatgaagattagtgcactgtgggaggaaggtggcaacagaacaccggcttcgcctgccagggtcgtgcaatatgaagcttctgatgttggtggagacgatgcattaggcatttggaaaatagatgatattgataatagcttccacacacagccgttccggatcaagtatgccagacaagatatctatctgtcggttatggtgtctttcaacatattcaacagtgaagaggagggtccagcagcttcagatgtgatgatgaagtttgagctgatatatgccccaacactagacaatgggtctgagcttcatgcttctagtgccacatcttcagcagctgtgcacgaatttaggatcccacacagagcacttctgggtctacactcatactgtcctgttcactttgatgcgttccactctgtgcttgttgatctgacattgcacatagtgtacctgaaagctggtgcagctaaatcatcactgaaggtacacaggtaccagagcaaggtttacgtcctacatcatatcacattgttaaggcattattaacttctagaaaaatgttgcttgaagaactgaacaaaatcagtggtgctattggtaagacagtagaggatttagatgttgctgacttgaatcttggtaaatatgagtcatttaatccatcaaaatcttggctaccgaattctagtaaagtgttccccgaaactggcaaaggtgtgggacagttggctggaattttacatgacttcttggagagacccaacgatatggttaatggtacagatgattctttattgtatactcttccccatgaagagctgtttgaactgtttctaactctgagtggacagctttcacttctatggaatgcattcttgaaatttcataggctaaataaaacaaagatattggactacttgcacgatgcttgggctattggcaggaaggcagaatggtcaatatggactattcactcgaaaattgagatccctcatcgctatctgcagagtatgagtgatgactcaccccaccgttattctcttagagtttctggctcaaggaagttccatgatgaccatgtacagagctctgcttcacgggcggaactacacaggaaaagcatagcacaaatgaagattaatccacattatgttcaagatatgcatatatatggtgatccttcacgtgttcctgttgttcttatagaacaacatgtcatggttgttccacagcatagttccagcaaggatatggcttcaaatgtttctgaacaaaaggatactattgtggtaccgaaactacaaggagagcctctggtacccaaaagtagtgctggtaaaaaaagtggacgcatattgagagctgtcatttttgtgcatggatttcagaaaccaatggcttctattggatcctggagctgactgcctgatgtctgaggctaatgaagataaaacatctggagattttaaagaaatgggtagcaggttggctggggaggtagttgccttcctgaagaagaaaatggataagctttcgagatatggaggctgcaaagagctgaagttaagtttcgtaggtcattccattggaaacgtcatcattagaagtgccctggcagaacctgcattgcaaccatacttgaagaacctttacacttacatgtcaatatcagggcctcacttgggttactggtacagttcaaattctttgttcaattctggactctggctgctgaaaaagctcaagggtgcgcaatgcatccatcaactcactttcagtgatgatcaagacccccagaatacatacttttataagctttgcaagttgaaaacgttggagaacttccaaaatatcatattgctgtcatcaccacaggatggctacgtaccatatcattcagcgagaatcgagctctgcccagctgcatcatcggacacgtcaaagaagggccaagtcttcacagaaatgctgaacaactgcttggaccagatccgcacgccctcgtccgacacccggacattcatgcgctgcgacgtgaatttcgaccagtccaaccaagggcgaagcctgaacaccatgattggcagagcggcccacatcgagttcctggaaaccgacctctacgccaagttcatcatgtggtcctttcccgacctgttccgatgacgacgacgacaccgctcgtctttgtaatactggcacataccaaaccaataacgcacactacccagtactgaccaggcaaggaatactaaagctcgctccaccagaacccaacaccgagacaggcaggaagcactgtgaaggtcctagaagcaatggtttttccagcttgctagatcctattctgtataagtagttgattctttttcatttcattcatagtgctgtagattgcacccttgctgtgaaaatttataatccttgtcgtctgttgtaccttacacttcagtttaggatgtgctgacaatcagtgagcttattatgtccaaataagctctctttttttaacgtttgatttttagtcaccttcgttcttgtggtgctgtaaatcctgcaacatgctttgtacatgcagacgatcaccctgtctgatactagatccggatggtcctgccgtccaggtccagggtgttgtttcagtgtttctgtttgacgaaactgctgtaggaatatataaataatatttttttggttctggcatcctgccgttggtggacctgcatcagcatctgcttctagaactgttccctcatgccgtccttgtctgtttgttatgctcgtgcgagtgctgccgtatgtgtgtgacagacatgctggcttttccgg

SEQ ID NO: 201922 - DNA, 3640 bp, Zea Mays
ctccacccccgccaccacaccgctttgccgctccgatctccgcacgctccggcgagaggggcccactggacagccagctcagtaccctcctacggcgacgctgtcgcacgcgccaccattaggtgtcacccgtccttgcgccgccgcacgcatcccaacgcagccggaccccacggcagccgccgccgctgcggcgaaggcccagcccaggccacgcgcgtcatcctcgcgccgaacgacgcaaggtggagcggcggtccactccccgcgcgcgcttcgcctccgctgcactgaaaccgtgccctgctggtgcgagtgtccggatgctaccaaatcctagggccgggcatcgactgactgactgagtgagtaagggagggagggagggaggagccagggcctcgccgcccgctgaacgagggagtgatgcggcgcggaagctcggccgcatgaggtgcctcgtcggcggcggcgtccaggacagcccgcgtgcagcggccaagagggtgtcgccggcgtcgtggcggctggacaccgccgcggcggaggcggagacgggcgcggggggagcggcggctaaggggccgagggtctgcttcaggccgccggatgtgatggagacggtgcacgaggtggccatttacatccaccgcttccacaacctcgatctgttccagcaaggatggtatcagatgaagattagtgcactgtgggaggaaggtggcaacagaacaccggcttcgcctgccagggtcgtgcaatatgaagcttctgatgttggtggagacgatgcattaggcatttggaaaatagatgatattgataatagcttccacacacagccgttccggatcaagtatgccagacaagatatctatctgtcggttatggtgtctttcaacatattcaacagtgaagaggagggtccagcagcttcagatgtgatgatgaagtttgagctgatatatgccccaacactagacaatgggtctgagcttcatgcttctagtgccacatcttcagcagctgtgcacgaatttaggatcccacacagagcacttctgggtctacactcatactgtcctgttcactttgatgcgttccactctgtgcttgttgatctgacattgcacatagtgtacctgaaagctggtgcagctaaatcatcactgaaggtacacaggtaccagagcaaggtttacgtcctacatcatatcacattgttaaggcattattaacttctagaaaaatgttgcttgaagaactgaacaaaatcagtggtgctattggtaagacagtagaggatttagatgttgctgacttgaatcttggtaaatatgagtcatttaatccatcaaaatcttggctaccgaattctagtaaagtgttccccgaaactggcaaaggtgtgggacagttggctggaattttacatgacttcttggagagacccaacgatatggttaatggtacagatgattctttattgtatactcttccccatgaagagctgtttgaactgtttctaactctgagtggacagctttcacttctatggaatgcattcttgaaatttcataggctaaataaaacaaagatattggactacttgcacgatgcttgggctattggcaggaaggcagaatggtcaatatggactattcactcgaaaattgagatccctcatcgctatctgcagagtatgagtgatgactcaccccaccgttattctcttagagtttctggctcaaggaagttccatgatgaccatgtacagagctctgcttcacgggcggaactacacaggaaaagcatagcacaaatgaagattaatccacattatgttcaagatatgcatatatatggtgatccttcacgtgttcctgttgttcttatagaacaacatgtcatggttgttccacagcatagttccagcaaggatatggcttcaaatgtttctgaacaaaaggatactattgtggtaccgaaactacaaggagagcctctggtacccaaaagtagtgctggtaaaaaaagtggacgcatattgagagctgtcatttttgtgcatggatttcagggtcaccatctggatttacgtcttgttagaaaccaatggcttctattggatcctggagctgactgcctgatgtctgaggctaatgaagataaaacatctggagattttaaagaaatgggtagcaggttggctggggaggtagttgccttcctgaagaagaaaatggataagctttcgagatatggaggctgcaaagagctgaaaacctgcattgcaaccatacttgaagaacctttacacttacatgtcaatatcagggcctcacttgggttactggtacagttcaaattctttgttcaattctggactctggctgctgaaaaagctcaagggtgcgcaatgcatccatcaactcactttcagtgatgatcaagacccccagaatacatacttttataagctttgcaagttgaaaacgttggagaacttccaaaatatcatattgctgtcatcaccacaggttattccctttcctcatctctaatagcaatttacttgcgtgtggaatttgttttgctgcaataaataactgggactctatagtccttatagcagcatgtcatgacttgtgagctatgccctatgcacacctttgtgttcttccaggatggctacgtaccatatcattcagcgagaatcgagctctgcccagctgcatcatcggacacgtcaaagaagggccaagtcttcacagaaatgctgaacaactgcttggaccagatccgcacgccctcgtccgacacccggacattcatgcgctgcgacgtgaatttcgaccagtccaaccaagggcgaagcctgaacaccatgattggcagagcggcccacatcgagttcctggaaaccgacctctacgccaagttcatcatgtggtcctttcccgacctgttccgatgacgacgacgacaccgctcgtctttgtaatactggcacataccaaaccaataacgcacactacccagtactgaccaggcaaggaatactaaagctcgctccaccagaacccaacaccgagacaggcaggaagcactgtgaaggtcctagaagcaatggtttttccagcttgctagatcctattctgtataagtagttgattctttttcatttcattcatagtgctgtagattgcacccttgctgtgaaaatttataatccttgtcgtctgttgtaccttacacttcagtttaggatgtgctgacaatcagtgagcttattatgtccaaataagctctctttttttaacgtttgatttttagtcaccttcgttcttgtggtgctgtaaatcctgcaacatgctttgtacatgcagacgatcaccctgtctgatactagatccggatggtcctgccgtccaggtccagggtgttgtttcagtgtttctgtttgacgaaactgctgtaggaatatataaataatatttttttggttctggcatcctgccgttggtggacctgcatcagcatctgcttctagaactgttccctcatgccgtccttgtctgtttgttatgctcgtgcgagtgctgccgtatgtgtgtgacagacatgctggcttttccgg

SEQ ID NO: 201923 - DNA, 953 bp, Zea Mays
actgctttcttttagtttaacattttggactacaattgcatcaccacactcaccgcaccaccgaccactgcctccgtacgcgtccctctggcggaaaatcggtcctagtgccgagctcgttttgtttggatcttctgtatatctattaaggaggcttctccatctcctcggagcagcaaggctgtgcagcaatggagaacgataacagcaacactcaatttgcaccattgagagagactccgtttgccctccgtggtgctcttggtagttcaagctcatatcttgagcaagccaggggctacacatcttcccctgtagcagctctgcgcccaaagatgtctacacctggaaatcgactcctgcatacgagctgccccctgtcatctgctgtagcgaaccgcccgctgtcgccccatcttcctctgaagaagccacagttcagcgctactttctctatctcgcaccgtatcttcggtgtcgcgctgggagttgccatcatatccgtccccctcgccaccaagttcagcctgatgtttggcgtttgagagcgatttgctgcatcttatgaggaactgcatttccccgttcctgtgactgtttcatcgttcgtctgggttaccttgcaacacaactttaggtgcagttggaataacatctttgtcatgctgacagacttctgtaatacagtaataagtaaaactataaaatatcagtgcaaggaggtttgccccattatggatgtacatggtcatgaggtctgcagcctgcaggtttggctgggaaatagttgattatcatcacaacatattaactgcatggtgcgtatcttcgctacgtgcccttaagctcgtctggaaaatttgtgaaaattgttaaacgtaacgtttctcaaaatatacgtatgagctatgttttctaggcatcactgttattgtgaaatgataaatttgttc

SEQ ID NO: 201924 - DNA, 4258 bp, Zea Mays
atgatacacagtgactcagtgagtcagcgacgtataggggaaacgaatcgccgcagccgcgtgggatgcgatcgccttctttcgcccaatcctgcgtgcgtgccgccgccgccgtggacgggcagacggctggacgcattcgccaggcgccagctcgttcggtctttcctctctgcctgaatcgccagatcgctatctcactgatcgccacgacggcacacagttctgttcctgaatcgctgctactgctagcctgctgctggacgcctgaactggacaggctgtgttccaaattccaatactaacggttgatcttgatatattttaagtctgaattttcccaaactatcttactccgggaccaaataattatgaaattgactctactttgaaacaaatagaagatataatgcaatactttgagacatatagaactgaggggttttcgtctagcttgatcattgccaaaggtattggagataaaatgggtgtggaggcttcatttcctgtaaagcgtcgtgcaataagaaagaaagaatttgatgaaagtaattgtcaagaggaaattcttgaagctgagagggcttttgaagtgaaatattttttggttatggttgacatggcgatcacttctttgaagaccagatttgaagaactcatgatatttaaagatatatttggatttttactgagctcaaacaccctgaagttgttaaatgataatgaacttgaagagtgttgcattaaatttgctaagactttctcccatgatggttcatctaatgttgaggtacatgatcttatttctgaattgaagattatgaaattcactttgccagatggagtattgtctgctaaagagatttttgagcatgtcatagaggtgaattgctatcctaatgtctccattgcatatcgaatcttatttactgtgcatgtgactgttgcatctgccgaaagaagcttttcaaagctgaaattgttgaaaaactatttgagatcaacaatgactcaagaaaggttgaatcatttggcgactttatgcatcgagaagaaattattagatgagattgatatcaacactattattgatgactttgtatcgcaaaatgttagaagaaacttgtcaacttgatatcaagtacaagggttccaaacaactgtaacgaagaatatatgaaacctcgtgaacttcattcttgaattatttcaatgataataatctatttcagtagcaagcaaaaggaaagatgagcattcacaagaccagcatcaggaaggcctcctttcctcacaacaaatgttcttttcttctcatgatcaataatggcaattttcgatggtgtgcccagatatattctgtccagctgtaaaaagtgcaaacgttttgttgagtaataatgagaaagaaagtggacaaatgataaataaaatgctttgtcgacgcacttcggattcaaaaacaattgcatcgccttgttcagtggaacgagctctatcttgtaagttgtctaggtaatccagagtttccaatccttctactcgcacctcactgtattagcatggaatcacgtaaacaattctgtacttaagaacgctaattacaaaatcaaagataattatggtttaataccagagtttggtcaaacgaattgggactggggataaacatgctgccacaagattacttcaaaaactatgctggcaaattgaatatttcaaagatgatgaccataacttgaaacaacatacctgatatcagaaatcttgaagtatgtgtggtatgcaaaagtgaaagagaatggcttcccgtctgcattagtgtttcttatacgtgaagttagcatcaaatcaccaccaggactaagtgcaaccctcaggcggtattcaaaaactgcaaatacaatatatctgtaaaacatacagatagccacgcttgccttctaatgcaacaaacatactaagaaatataacaaagataagtctttcaggtgtcctacagtagcattaaatcaatacaagtgacaataagctcacctatgaggccagatcttcaaatcatcttcagtaggtttgaggatcaagtcaatataagcgctattggaggttggcactggaaatggtggaggatcatcatcaacactccatgtcctattccttgcaaatccatgtggttccagattcccaaagttggagaactacataagtggaattaagattcctgcaaaagaagatacagagaagccaaggctattggaacgacaatggcatacctgcggaaagcatattggtattcctccacgtatagcttttggaggcttgaaaatagcctgatataatagcaatagtagcactcaaaagtcaagcggccaagacaaaatgcaactcaaactcgagcgaatcctcccccccaattcaaatattattgaatttaaagaagcacaaaagagcaccagtaacattcacattattttgacaacacctactgataaagagagaaaggtgcacgcgaaacactgacagtgaaggttagtgtagatattattttgcttactgaagtaaatgatcaactgtaactcaaggaataacttgatggctacagaaattatttccctacaaatgaactaaacaagtagtatactacatttcacaatggcgatgtttttgttagcatgcatgcaaaaatcctaaaaatcattacaggaaagatactgtgctgcttttcgatggacagaacagcagcgaagcaagaatttcaggcaaagggcaaactgtagattagatcaaatcaagcaaataaaggacatacaagttcagtgctcgtacgttgctacggtttttgatttatgcttgagtatgtatagaatataaaacacaaagacatgtgtgttctattggctaggtgtgtgaatgtggggtttagagccaacaaccatggttcgaatccacatttatgcataattttagcttttttaccatttaaatgtgggagaagggagaggtgaaggaaaggggtgacacacgatgatggtggaaattgatgttttatagtagcagagaatgacatactagttaggtgctcgtacgttgctacggtttcgatttatgttcgagtatagagtataaaacacaaagacatgtgtgtaaatgaggtttggatagagattggcgttttatagcagtagagatatagagtcacgcagagatgagactttaattctaacagttcagtgaatcaactcctcactccccccccccccccccaacccccaaaaaaaacgttccatataattgatatactactggaagattatgaaagcaaaaaaatagtagcaccttattgctaacaaaaagtaattcatctccatgctcatctttccatgatgtcacatgcccaccatacaagtacacctacaagcaatgaaatatattgttattgaaagatcaaatgtttgtagtaggtttcaagaagaagacaaaacataaaaagagatcagaagtgcatatacaggatacaaaacaacagataatttcatgtgaactttgtataatcgtgtttcattgctgtcctttcccatgtctatgtatggaaaccatgttgctaattgtttagacaaataatagagcccacagtaacaacttttttgatagtccaagttcaaatatgagtatgatacaatctgtatcaaaattctgagggaatatatcaggttattacaatcggtttctcataaaaaaaaaccttatgcaatggcattttaagtgtgtggttacttagcctcatatacctttatgttattcattagaagtttcgactcgccaaatatagaatggctgtgcttgtaagttaatatagtcaaccagatggtgcaagtaaaagcaagagcaacagaaaaatatctcaggttgtgatgccttgttggtacttgtatgtactagtatatttgtatggaaacaagtcccgggtaataatgatggtcgctggtcagagtggcttagcccgagcggagaacactccctggctctctgtaattcaagtccctggcggaaacaccgtaacagatgaaactctgcttatcgtgtgaatctaggatcgtcattgctcagcaactgtttgcggggagacaaaatgggtcgaaactgaatccatgggacagatctggaccacagcatcagcacactggcctggcgcaccctgtcactcacaggaagccgcagaggcagcttcgctacgagtctacgacgaagccaatctgat

SEQ ID NO: 201925 - DNA, 4363 bp, Zea Mays
cagtgagtcagcgacgtataggggaaacgaatcgccgcagccgcgtgggatgcgatcgccttctttcgcccaatcctgcgtgcgtgccgccgccgccgtggacgggcagacggctggacgcattcgccaggcgccagctcgttcggtctttcctctctgcctgaatcgccagatcgctatctcactgatcgccacgacggcacacagttctgttcctgaatcgctgctactgctagcctgctgctggacgcctgaactggacaggctgtgttccaaattccaatactaacggttgatcttgatatattttaagtctgaattttcccaaactatcttactccgggaccaaataattatgaaattgactctactttgaaacaaatagaagatataatgcaatactttgagacatatagaactgaggggttttcgtctagcttgatcattgccaaaggtattggagataaaatgggtgtggaggcttcatttcctgtaaagcgtcgtgcaataagaaagaaagaatttgatgaaagtaattgtcaagaggaaattcttgaagctgagagggcttttgaagtgaaatattttttggttatggttgacatggcgatcacttctttgaagaccagatttgaagaactcatgatatttaaagatatatttggatttttactgagctcaaacaccctgaagttgttaaatgataatgaacttgaagagtgttgcattaaatttgctaagactttctcccatgatggttcatctaatgttgaggtacatgatcttatttctgaattgaagattatgaaattcactttgccagatggagtattgtctgctaaagagatttttgagcatgtcatagaggtgaattgctatcctaatgtctccattgcatatcgaatcttatttactgtgcatgtgactgttgcatctgccgaaagaagcttttcaaagctgaaattgttgaaaaactatttgagatcaacaatgactcaagaaaggttgaatcatttggcgactttatgcatcgagaagaaattattagatgagattgatatcaacactattattgatgactttgtatcgcaaaatgttagaagaaacttgtcaacttgatatcaagtacaacttcaagccatgccgtaatgccaaacaaattgcttctgtgataaagaacaaatggcaatgacgattggctgaagtattggtcccatcacaaaatactcgtggttgagaaaaaaatgacaaggggttccaaacaactgtaacgaagaatatatgaaacctcgtgaacttcattcttgaattatttcaatgataataatctatttcagtagcaagcaaaaggaaagatgagcattcacaagaccagcatcaggaaggcctcctttcctcacaacaaatgttcttttcttctcatgatcaataatggcaattttcgatggtgtgcccagatatattctgtccagctgtaaaaagtgcaaacgttttgttgagtaataatgagaaagaaagtggacaaatgataaataaaatgctttgtcgacgcacttcggattcaaaaacaattgcatcgccttgttcagtggaacgagctctatcttgtaagttgtctaggtaatccagagtttccaatccttctactcgcacctcactgtattagcatggaatcacgtaaacaattctgtacttaagaacgctaattacaaaatcaaagataattatggtttaataccagagtttggtcaaacgaattgggactggggataaacatgctgccacaagattacttcaaaaactatgctggcaaattgaatatttcaaagatgatgaccataacttgaaacaacatacctgatatcagaaatcttgaagtatgtgtggtatgcaaaagtgaaagagaatggcttcccgtctgcattagtgtttcttatacgtgaagttagcatcaaatcaccaccaggactaagtgcaaccctcaggcggtattcaaaaactgcaaatacaatatatctgtaaaacatacagatagccacgcttgccttctaatgcaacaaacatactaagaaatataacaaagataagtctttcaggtgtcctacagtagcattaaatcaatacaagtgacaataagctcacctatgaggccagatcttcaaatcatcttcagtaggtttgaggatcaagtcaatataagcgctattggaggttggcactggaaatggtggaggatcatcatcaacactccatgtcctattccttgcaaatccatgtggttccagattcccaaagttggagaactacataagtggaattaagattcctgcaaaagaagatacagagaagccaaggctattggaacgacaatggcatacctgcggaaagcatattggtattcctccacgtatagcttttggaggcttgaaaatagcctgatataatagcaatagtagcactcaaaagtcaagcggccaagacaaaatgcaactcaaactcgagcgaatcctcccccccaattcaaatattattgaatttaaagaagcacaaaagagcaccagtaacattcacattattttgacaacacctactgataaagagagaaaggtgcacgcgaaacactgacagtgaaggttagtgtagatattattttgcttactgaagtaaatgatcaactgtaactcaaggaataacttgatggctacagaaattatttccctacaaatgaactaaacaagtagtatactacatttcacaatggcgatgtttttgttagcatgcatgcaaaaatcctaaaaatcattacaggaaagatactgtgctgcttttcgatggacagaacagcagcgaagcaagaatttcaggcaaagggcaaactgtagattagatcaaatcaagcaaataaaggacatacaagttcagtgctcgtacgttgctacggtttttgatttatgcttgagtatgtatagaatataaaacacaaagacatgtgtgttctattggctaggtgtgtgaatgtggggtttagagccaacaaccatggttcgaatccacatttatgcataattttagcttttttaccatttaaatgtgggagaagggagaggtgaaggaaaggggtgacacacgatgatggtggaaattgatgttttatagtagcagagaatgacatactagttaggtgctcgtacgttgctacggtttcgatttatgttcgagtatagagtataaaacacaaagacatgtgtgtaaatgaggtttggatagagattggcgttttatagcagtagagatatagagtcacgcagagatgagactttaattctaacagttcagtgaatcaactcctcactccccccccccccccccaacccccaaaaaaaacgttccatataattgatatactactggaagattatgaaagcaaaaaaatagtagcaccttattgctaacaaaaagtaattcatctccatgctcatctttccatgatgtcacatgcccaccatacaagtacacctacaagcaatgaaatatattgttattgaaagatcaaatgtttgtagtaggtttcaagaagaagacaaaacataaaaagagatcagaagtgcatatacaggatacaaaacaacagataatttcatgtgaactttgtataatcgtgtttcattgctgtcctttcccatgtctatgtatggaaaccatgttgctaattgtttagacaaataatagagcccacagtaacaacttttttgatagtccaagttcaaatatgagtatgatacaatctgtatcaaaattctgagggaatatatcaggttattacaatcggtttctcataaaaaaaaaccttatgcaatggcattttaagtgtgtggttacttagcctcatatacctttatgttattcattagaagtttcgactcgccaaatatagaatggctgtgcttgtaagttaatatagtcaaccagatggtgcaagtaaaagcaagagcaacagaaaaatatctcaggttgtgatgccttgttggtacttgtatgtactagtatatttgtatggaaacaagtcccgggtaataatgatggtcgctggtcagagtggcttagcccgagcggagaacactccctggctctctgtaattcaagtccctggcggaaacaccgtaacagatgaaactctgcttatcgtgtgaatctaggatcgtcattgctcagcaactgtttgcggggagacaaaatgggtcgaaactgaatccatgggacagatctggaccacagcatcagcacactggcctggcgcaccctgtcactcacaggaagccgcagaggcagcttcgctacgagtctacgacgaagccaatctgat

SEQ ID NO: 201926 - DNA, 825 bp, Zea Mays
catgtttatccccagtcccaattcgtttgaccaaactctgtgaggtgcgagtagaaggattggaaactctggattacctagacaacttacaagatagagctcgttccactgaacaaggcgatgcaattgtttttgaatccgaactggacagaatatatctgggcacaccatcgaaaattgccattattgatcatgagaagaaaagaacatttgttgtgaggaaaggaggccttcctgatgctgttgtttggaacccctgggataaaaaagcaaaggctatgtcagattttggggatgatgaatataaacgaatggtatgcgtggaggcggctgctattgaaaagactgtcactctgaagcctggtgaagagtggactggaaagttggaactttctgctgtgccatctagctattacagtggtcagctagaccctgaccgtgtgattcaggattccactgtcccggaggactccatcagctagtccttattctatttttgcaggtagagcattgtatcattatgcataagagatgctggcaacaagggctgtccacatgtttcttccattctgttcaaatcttcggtgtttttttattccgaatgcatatccgaaccaaggaatgtgaaattggtttccgctttttgaggatctatgtagcataatggataagtcggtgtttcgtaccctatttagggatgcttgaagcaagaaacatcttcatgggttgtaaaataaaagaaaaattatctttatatttgatcaattcttttgccttaaaacgtataataagttctatactggagaaaagaaaaaaaaaatatgg

SEQ ID NO: 201927 - DNA, 1595 bp, Zea Mays
cctgaagctgaagcaaagcaaaagcaacgaggagtggagaaaaaaaaaaaagaggcgccgcagcgaggtcgaggtgattattatttaggcacaaggggcgctgtccggaaattccccaaatcgacctgggctggacccagccgcgccccgtctgcctcctgcttctctctccgcttccgcttcctgcgcctccaggctccacttctccgctcggcagtcggcactggaaggacagcatgtcggtctcggcgtcgtcaccggcggcggcggcgggcgatgagaagcaggaggcggcgcccgtcaggcgctgcaagggcgtcaacgacctcgacaaggtcgttctccgcgaggtccggggcagctccgcagaggtgtacttgtatggtgggcatgtgacatcatggaaagatgagcatggagatgaattactttttgttagcaataaggctattttcaagcctccaaaagctatacgtggaggaataccaatatgctttccgcagttctccaactttgggaatctggaaccacatggatttgcaaggaataggacatggagtgttgatgatgatcctccaccatttccagtgccaacctccaatagcgcttatattgacttgatcctcaaacctactgaagatgatttgaagatctggcctcatagtttttgaataccgcctgagggttgcacttagtcctggtggtgatttgatgctaacttcacgtataagaaacactaatgcagacgggaagccattctctttcacttttgcataccacacatacttcaagatttctgatatcagctggacagaatatatctgggcacaccatcgaaaattgccattattgatcatgagaagaaaagaacatttgttgtgaggaaaggaggccttcctgatgctggtcttgtgaatgctcatctttccttttgcttgctactgaaatagattattatcattgaaataattcaagaatgaagttcacgaggtttcatatattcttcgttacagttgtttggaacccctgggataaaaaagcaaaggctatgtcagattttggggatgatgaatataaacgaatggtatgcgtggaggcggctgctattgaaaagactgtcactctgaagcctggtgaagagtggactggaaagttggaactttctgctgtgccatctagctattacagtggtcagctagaccctgaccgtgtgattcaggattccactgtcccggaggactccatcagctagtccttattctatttttgcaggtagagcattgtatcattatgcataagagatgctggcaacaagggctgtccacatgtttcttccattctgttcaaatcttcggtgtttttttattccgaatgcatatccgaaccaaggaatgtgaaattggtttccgctttttgaggatctatgtagcataatggataagtcggtgtttcgtaccctatttagggatgcttgaagcaagaaacatcttcatgggttgtaaaataaaagaaaaattatctttatatttgatcaattcttttgccttaaaacgtataataagttctatactggagaaaagaaaaaaaaaatatgg

SEQ ID NO: 201928 - DNA, 1562 bp, Zea Mays
aaaagcctgaagctgaagcaaagcaaaagcaacgaggagtggagaaaaaaaaaaaagaggcgccgcagcgaggtcgaggtgattattatttaggcacaaggggcgctgtccggaaattccccaaatcgacctgggctggacccagccgcgccccgtctgcctcctgcttctctctccgcttccgcttcctgcgcctccaggctccacttctccgctcggcagtcggcactggaaggacagcatgtcggtctcggcgtcgtcaccggcggcggcggcgggcgatgagaagcaggaggcggcgcccgtcaggcgctgcaagggcgtcaacgacctcgacaaggtcgttctccgcgaggtccggggcagctccgcagaggtgtacttgtatggtgggcatgtgacatcatggaaagatgagcatggagatgaattactttttgttagcaataaggaatcttaattccacttatgtagttctccaactttgggaatctggaaccacatggatttgcaaggaataggacatggagtgttgatgatgatcctccaccatttccagtgccaacctccaatagcgcttatattgacttgatcctcaaacctactgaagatgatttgaagatctggcctcatagtttttgaataccgcctgagggttgcacttagtcctggtggtgatttgatgctaacttcacgtataagaaacactaatgcagacgggaagccattctctttcacttttgcataccacacatacttcaagatttctgatatcagtgaggtgcgagtagaaggattggaaactctggattacctagacaacttacaagatagagctcgttccactgaacaaggcgatgcaattgtttttgaatccgaactggacagaatatatctgggcacaccatcgaaaattgccattattgatcatgagaagaaaagaacatttgttgtgaggaaaggaggccttcctgatgctgttgtttggaacccctgggataaaaaagcaaaggctatgtcagattttggggatgatgaatataaacgaatggtatgcgtggaggcggctgctattgaaaagactgtcactctgaagcctggtgaagagtggactggaaagttggaactttctgctgtgccatctagctattacagtggtcagctagaccctgaccgtgtgattcaggattccactgtcccggaggactccatcagctagtccttattctatttttgcaggtagagcattgtatcattatgcataagagatgctggcaacaagggctgtccacatgtttcttccattctgttcaaatcttcggtgtttttttattccgaatgcatatccgaaccaaggaatgtgaaattggtttccgctttttgaggatctatgtagcataatggataagtcggtgtttcgtaccctatttagggatgcttgaagcaagaaacatcttcatgggttgtaaaataaaagaaaaattatctttatatttgatcaattcttttgccttaaaacgtataataagttctatactggagaaaagaaaaaaaaaatatgg

SEQ ID NO: 201929 - DNA, 4693 bp, Zea Mays
cgcctttgcatctcctaaaacgtaccctgaccctcacggcttccctcgtctttgccctcgcctccctggtagcggcggccgcttgccccgctatgaccaccgccgccccgccgccgctgctaatggcacaccgcgaaggtggagacgtccccatctccctgttccttgacaccgatcttggcacccatctcgccctgctcgtcgccccggacaccgacatccgtggcctcaagtcgcaggtggctgtggaacacgctgtcgccttccccgacctcggccccgtcaccgtgaagtccttccaggtccggcggaagggtgtactgtatcgcctctctgattcaatgacagtgatgagtgccttcaccaaaatcaaaggtgggtgctttcttcatgtcaatatggcagaggctacagcagccacacactgctgccaagatgcgccagcaactgacactagaagattgaatggtgttagtcttggaatttatgaaaagaaccatgttcaggagctgcctgcagtggcaccagatgttgcttgtgatatgctccctagaggccttgaaggttgtaatgatgatgccgtgctgaatactgttcaaacacatgatgtgttgccaaattgtaccttggtgccatcctcatcacagctaaatactgaagtaccgaagaacaatgcagtgggtctggccagttatactgaagcaggaattgctcaagttattgacaaagcaaagagttacagtggccagataaaacatgctaatcaaactgaaggtgcttatattatttccacatcaaaggcatgtgttgataaatctttaaatgagagtaatatgtcacatgctgtggaggagctacatgcaagtcgagaccatggggttggtgatgatgtttctgataaaaagcaagtcatggtagaggagcaactgctggaagagatacaagcaaaggataatctttcacaagcaaaggagcacaaaaaatgtaggactagttcttttgacacatcatgtatggatctactggaaacaggcactacttctcttgtggaatctttaaacacttctaatcatcaagaagtccatgacaccttacatgaggagtccattcagctagaaaatccaagcactgttggaaagaagaagaaaaggaaaaggcgtcaattgtccccttcaaaatctgcttctgctcaagagacaacagaaccgtcagctacagcagttgatttattaatacccacaggtgacaaagcatataatgctgaattgactagcaaaggtgaaactgtagttgaagcatctggtttgcctctttcatcatatgaacataatgatggaaaccaggggggcaaaagtgttaagtttgtgagcgatgatcaagcatctactgatttaatctctgaacaagagaagtttgatcatgctctcaagggatgtagggatcctttaattgcagatgacatttattctacaggtgaaaatgtagctattgaaggaaagactacaaaaggaagttgtgcccctttaaatggaggggacaggcatgaagaaataaaacacctcaatgagggatgtcataatgcaggtgtacctgaaacaagcaacatggagaaagatggcaaaagtacagatgtctctgacaagaggcaaacaagtcaaaatacctcgcaagtgaagaagcgcaagaaatcaaaggttggttctgttgacatgccttccgtggatgcttctggtgaaaaagatcatcggtatagtgaaaatgcgaccaaacaagatacagcttctactaaaagggagattgtccacgaaccttctatgcaacagatgtcaaacattgtgcatcagggggattcaaatgtaatagaaaatccaagtggtgatggaaagaaaaagaaaaaaagaagacaccattcagaatccttaaagggtatgaatcctagtcaagatctgaccaaatcttctggatttgtaacaaacgaaagctcgatacaatgcacaggtgctgctccaataaatgcaaagcaaacaaacttagtcattatagaaggagaaacagttactgggcacaggaagcttagtgaaaatctagatgtagcggcaacacatgttgttgatgaggtattggcagatctaagatctaaagacggcttaagtaaggatctggatgaaaatctattaccaggacaaactcacctaggcagcaatcagaatggaatagaagttcctgaatccattgctgttaaagttggtagtactactgcagcattacctccgaaatatcctgcaacagttcactctgcttctcctgttaactcacctagacaaaggaagtctaaggggaaaaaattgaaagtgctatccaccatggctgactcttctcatcaatcaagtggtgtacccgaagaagatgctaatagaaaattaaaagagtctgattctttgaggtttgctgataaaacaagtgatcatgaggatatagtaactgcaaatgtggttgctcaagctgatgaaaaacgcaaagccactaagcgtcaaagaaagaaaggttctgtaaagcaggtacttgatacattggacttgaaggaagtgaatgacacagaagaaaatttggttcagggaggttctgtagttgacactcccttgagcactgctgggaacgtagagcagaaagactggtcttctgagactttgagtcctaaagaacaagaaactaattgttctactcatgggctggatagtcacacagctaaggacagccaggatgagtatgtaactgacaccattgggacccatgataatgaaaatgctgcaggaaccccagccttgcatgtagttcagaaagatgccatggccctcaaatccgccagccctaattctcaaaaggagcaggaaacatctttgaactctgaactacaaagtcaggattgtcctctggaacatggttttagtgcagatttggtgaactccaggactgaaaagggagtcaggactacaagttctgctagtgctgttaaatctgattacaacaccatgtttcatcctgctaatggtagaatcaatgtccttgatcattttagccgcagcaatttgaatgatggttcatcaattgtcgcagaaagtaagcaaaacaatgaagatggaagtttaagggaagtgaagaataaaaagaagaaacgaaagcaaggtactggtagcgttgaaccaaatgatgttatagaatctcttccctcagagatagctagcttaactggtcattttggtaccagcaaagctgttgtgtcatctgttgcaacagaaaacatgaatggaggaaatgagaatgtgaataaaggcaaggagaagaagagaaagggcaaatctaatatggaagtacctactgctggaaaggaccatcctaattgtgatactcaattcattgatattggtacccaagaatcacttatttctattgtacaaaaagaaaggacaggtcaagacaatggaaaagagagcaacagtaaagctactcagaatgccagtataatgcaacatgaaccagaagatgccacttggaatcgtagccctgagaagaatcaccaccagagtgttgatgatgatcagaacaagttgctcactgaaaaggatcatgcacatataaataaagaagtgagaaaattcactcctcaaacaaaggcccatgctaagattagaaagcctgatgggtctactatcaaggaaaaggtggctccaaatcctaaacctgtaaccaaccttgtgaaggatttttccatgagcccacgagcatcaagtgacagcacagagggcatgccacaaagtgctaaccgatatagagttgcagtccggaaagtaccaagtaaaaggtatgaagagaccagtggaaactccaataaggcgagtaggaaagtaggctctggtgcaatattcaatgactctatcagcgaaggttctggtgatgaattggacaccaagactgtcatggaaagatcacctaataagtcatctacatctgctgattcaggtatttcatctgcagcctctggtgaaagcgaggttcctgatgatgatggcaccgtatcactatctcagaagagtttcaaaggtctgcacattagctccatcctccgtggctcccgtagctacaagaaggcactaaagaggcaaatggagctgctagacgacgacaccattgtgcctgatagccagcccgcggatggcctttggggctgaacatggttatcgtcaagagaagcgccgaccctgcttcatccttttttgccattgtccacctgatacgctggtgggctttataagttgtctaaaacacatgcccgaatgcgtgatgtcgctgatggcattgccatacgccacacgcagttcccttattttgtcgggcttaagctgtgatctgcctgaggatgaatcgatgatgttcatgatacagcttaccagctatatatatgtgttaatgtatgtaagaatgatacgcacgcttagtctctcacccatgagccatgggtccgttgagtcctgactgaccatcgccagaagttgtggtttgtgacaggaaattccatccttctggcttatctgttgtgtattttgcgtagctgcagttttattttttttccctctccagccgttttgatcagctgggctgggcaaggcccttgctatgcatgtacagcaaagaggct

SEQ ID NO: 201930 - DNA, 1117 bp, Zea Mays
ctgccattctctttcgcccactcgggcacgtacggcaaccaggaaattgcctgatgaccaagcaattctgcaaccgctggcagatcagacccgaatcgcgagcagcgatctgtacgtcgtccccgttcgcacgcctagcgcgatggcgcacccgatgtacggctccgggccactcagatccaggaacgcggcgaactcggacgaaatccagctgcggatcgacccggtgcacggggacctcgacgaggagatcgacgggctgcaatccagggtccgcatgctcaaagggtggcttcgtactgtttaaggccttgctgttgcaagctctgctctattacaggtggcccaggagataaattctgaagccaagtcccagaatgattttcttcatgaactgcaaatgaccctcgcaaaagctcaggctggagtgaagaacaacatgcggaggttgaacaagagcatcatccagcagggctcaaaccatgttctccatgttgttctctttgcactgttttgcttcttcattgtctacctcttgtcaaagttctctagaagataattatgtcttcggtgggcaaatctagaataccatgatttgtatgtagtctaaagggaaagcaaaatgctattgtacttttatttggccttgtatcctcggtctatttgtcgaaagttgaaacaaatgagaaaaggggaaattagtacctctaagggctagtttggaaactcaaatccccttcgggattgaaggggattggagaggaaattaatttatttccacctcaatcttctccaatatcgaaggggatatgaggttcccaaagtagccctgagggttgatttggtgacaagtgaattgaaggggatccatgtgaggaaatcacttgctattcaccgttgggtgtttcgttgagtgtatgcaacgagttgagcatggatgaaaactggcatatactgggatgaaaaggacaaatgttaaccacatcattcagaacaattgcatagcttgtatgtgaatccattccagttttttttataagattatgttccattgtaactgtctggggtggttttgtgtcccacctatatatgggcttatcattgccgccttgagttc

SEQ ID NO: 201931 - DNA, 631 bp, Zea Mays
caccaatctccttccccgaattcgggcacggaacacatccatccctcgctctctctcgcgcgcgcgctcgtgctccttcgtgctgctcgccccgcccccgccgccctgccctccccaccgtcgtcaccggcgtggggggaacgacatgactacttccaggcgccttgcggacaggaagacagccaagttccagaagaacatcacgaggcggggttccgtgccggaaaccgccgtcaagaaggggaaggggaacggctacgctgccggccccgtagtgctcggcttcttcgtcttcgtcgtcattgggtcatatcatcaggaccgcgaccagtggcggcatggcttgagaacccgtccccggtgcagagcagagagatctgtttgtcgtttgtacatgcatgcgtccagctagaatcgagtttaatttcgaactgaaccgtaatgcagaaccatgtatgtaaataaagtgctattaaatgggtaactggatatagtgctatatatatacagtgttggaatacaaatacctttttttccccttacgcgcggcctgtacgtgtgccagttttgctcgactgtgtttggcttgtgatgacgacgacggctgaagtttcatatgggatttgagtcg

SEQ ID NO: 201932 - DNA, 2485 bp, Zea Mays
tttgggctttcatgggttgtgacttagtgctgtggtagtagttggggatgaggagctgcacctggtggcaatgccgaccaaatcagggaaggtgccatgcttttggtgctgctcagcacgctcggggctctatgcagcgtccgttggcatgctcaacttgcgctgtcttgccattgtgtttgatcttgatgagacccttattgttgctaacacaatgaagtccttcgaggatcggatcgagatgctctcccgcagaatggatgtcgaagatgatcctatcagaatagcagggatgtctgcagaaatcaaacgatatattgaggacaaagagcttctcaaagaattcattgacatggatacagttacggacaatggcaaaatagttggaacccagaaagaggaggttcaacctatgtctggtggtcaggagcgtgttttccgtccagttatcagactgcctgacaggaatgcaattttgactcgcatcaatccagagaatcgtgataccagtgtttttgtaaagctaagacctgcttgggaagaattgaggagttacctaactgcaaagggacgaaaaagatttgaggtttatgtatgtacaatggctgagagagattatgctcttgaaatgtggagacttcttgatccagaaggcaacttaataagtccacaacagctctcagaacgcgtaaattgtgtaaagtcaggttccaaaaagtccctgcagaatgttttccgagacagaagatgccatccaaagatggccatggtaattgatgaccgacttaatgtttgggatgataaagatcaacacagagttcatgtcgtccctgcatatattccatactatgctccacaagcggagatggccaatgctgttccagttctatgtgttgcaaggaatgttgcttgcaatgttcgtggtgggtttttcagagagtttgatgagaatctattgaggaaagtgttcgaactatactatgaaaatgggttattggatcttccatatgctccagatgttggtgactatttagtctgcgaggataccagttttgtaccaggcaacaaagatcaggctcctatacctgagggcatgaggggaactgaagtagagaagagattaaatgggcagtcatatcggtgggagcaaagggaaggacaacaaatgccatcttcaatccgttcaccagatgacgagggaatgcctatccgaggtactggaggagttaggaatatccagccaaatgggggctcgctagcaataaccccctcggtatatgtcacagtgttgcaagaaattgggcggctgtgcgactccaaggtattctggcatgttattgttttagcttgtatttgttttcctatttggccttgaattaatcccaaactctccttagtacaggtggaatttagatctactgtaagcagtgtcagaagtatgctattttctgtagaggttctgtttaataatgaaaaaattggaataggcgtcggaaaaacaagagatgaagctcaagttcaagctgctgagaaagctctccaaaatttggagaacagttatttgtcatctggtgctccagttgctggagttcctaagaaagattcaaggaagtcccctgggaggagtggtaatggctttctggaggatgctacttgttcagataacgatatctctatgcgagaaccttctggaagtgcattgaaattggatcattcaaataatgtggatacattgtcgtctattatgagtcttattagagaacattgcttggaggaccaacatgtagtatttcgagatgaagtccagaattctagcccagccaggaatgaagaatatcatttccaggttgaactagcaggattgattctcgggaggggcgttggttcggacagagaggccgcgaagcttctggctgcagaagaggcactgaagaccttgaaatcaaccactgacccacaaattaagaagtatctgagacctgtaagatgcaatggctgattcccttccacgttctgagctccgcaaccaaatgagctttagctcatttcaccgttacagatgtcattgatttagcagaagtgcatcaccctttctgtgagtatggttgacatctcacctcgagcacatgatgtgtgccaaacacatgtcttgttctggaaatcctggctttgaaggtggtaacatagagagcggacatggtgctttatgcattcttttgaccatcatacaagtatagatgttatgtcttgtttaggatagtggcatagttggctgtaaacaagcaggagagtagatgcggatctaaaattcttgttttgaaggttatgctgactcattaacagttatggatcgttaaaaattgaatgcctgtaccagttgtcatgtttacatgtctgttataaagtgctaaatcctttacaaacttatttcaactacaaataaattcaagtgctcgtatttgttgagttatacattcacatctat

SEQ ID NO: 201933 - DNA, 3062 bp, Zea Mays
gttcagagttcaatctcacagcaccaagcaaaaaggaagcagattaagggcagccgagcgagcagaggttgtcaattacgtgccttaatgagtcactggaagcagccgtcgaaactcgccatgcttgtagtactgctgctgctgctatgtcatgcagtggacagagtccattgctcgacgcatcataacaacagccaagattttcattcgctgcttgagttccacaagggcatcaccagtgatccgcacggagccttgagcaattggaaccccagcatacacttctgccattggcatggtgtgaactgcagttccactcgaccatatcgagtcacggagctcaatctcaacggccaaagcttggctggccaaatcagctcctctcttggaaacctgaccttccttcagacccttgatcttagcaacaatagcttcattggccccctacctcttcttaacaagctccgaaacctggacgtactttttctgggaagcaaccttttggaggatgttattcctgattggcttacaaactgttctaacttagtccaactagatctctctgaaaacaatctcaccggtcatattccttcaaacatagacattctaaaaaagctagaatatataggcctttactataataatctcaccggtgtcatcccaccaaccttgggaaacatctccacactagatgtagttgatctttcaatgaatcaactaagtggaagcattcctgatgatgtttggaaaatatcgaacataacacagttatttctacaacaaaataatctatcaggcggaatcctagatactctctctaaattatcttctcttgtgatattaaacttgcacaccaatatgttgggaggcacattgccatcaaacattggtgatgtgctccctaatctgcaagaactatacttaggaaagaataattttgtgggtacaattccaaattccctaggtaatccttcgagtcttaaaatcatagatctatcaataaactattttaggggcaaaattccgaactcttttggaaatctttcacatttgcagtctctaaaccttgaggtaaacatgcttggatcaagggatagtgaaggcttgcaattctttgatgccctcgcaaattgtagatctctcgttacactttcagtgtccaataatcagctacatggtcctataccaaactcgattgctaatctgtccactagtcttggacaactagtgatgggttggaacagcctatcaggaacaattcccccaaccattggaaaacttagtggcttatatagattatcactacaaaacaataatcttacaggtaccattgaggaatggatcggaaagatgacaaatctacaatttttaacactacagtcaaacaacttcatagggaaaattccaccttcaattggcaatcttacacagttgatagatatcttctctgtagccaaaaacaatttatctggttttgtaccatctaacttctggaatcttaaaatatcgaagttggaccttagccataacaatttccaagggagcatacctgttcaatttagtaacttagaactcatctggctaaatctttcatcaaacaaatttagtggtgaaattcctggaactttaggacaacttgaacaaatacagaccattcaaatggaccaaaacattcttactggaaacattccgcccatatttagtcgactatatagcttgaacttgctcaatctttcccataacaatttatctggccccatgccaacttttctaagtggtctaaatcttagtaaactagatctatcctacaacaattttcaaggacaaataccaagaactggtgtattcaataatcccacaattgtttcactagatggcaatccagaattgtgtggaggagccatggatttgcatatgcctccgtgccatgatacttcaaaaagagtaggtagatcaaacttattgatcaaaatattgatcccaatttttgggttcatgtcactcgtattgctggcctactttttactcctagagaagaggacgtcaagaagagaatctagattagagctatcatattgtgagcattttgagacagttacttataacgacttagctcaagcaacacgggacttctcagaatccaacctaattgggagaggaagctatggttcggtgtaccgagggaagctaaaggaaagcaaaatcgaagtggcagtaaaggtttttgaccttaagatgagaggagcagaaagaagcttcttgtcagaatgtgaagcattgagaagcattcaacaccgaaatcttcttcccatcataactgcttgctcaacagtagataatgtaggaaatgttttcaaagctttaatttatgagttcatgcctaatgggagcctggacgcatggctacatcacaaaggagatgaggagaccgcaaaatgtcttggcttgactcagagaataagcatagctatcaatatagctgacgcattggattatttgcaccatgattgtggacgaccaactgtccattgcgacttgaaacccagcaatatccttctagatgatgacatgaatgctcttttgggagattttggaatttcgcgcttctatcatgattctcagtcaaaatgggcaggttcaattagttcaattggtgtaaagggaacaattggatatattcctccaggtacggaggaggtggccatgcatcaacgtctggggatgtttatagttttgggatagtgttgctggagattttgacgagcaaaaggccaacagatcctctgttcaaggatggccaggacatcatcagctttgtggagaataactttccggatcaagtctttcaagtcattgactctcacctcctagatgaatgcaggaactcaattcaaggaaataatttggtaccagaaaatgagatctaccaatgcttggttgaccttctgcaattagcactttcgtgccttcgttcattaccatctgaacgatcaaacatgaagcaagtagccagcagaatgcatgcaatccaaacatcatatcttcggtggaagaagaagtaa

SEQ ID NO: 201934 - DNA, 3689 bp, Zea Mays
agctaatttgggggaagaatgtcttcaaagtggcggtcactgcagcatcggcaccgatatatatgatgatcaacctactaccacttcagaaagagaggagaagaatgcaaaaccagggagtaatggcaaaccagccgaacaagttgttatggttggttgctggcttgctatgaaggagtttcacgctattgtggcattgcaggtcagtttactttttggaaccatcatcaggaagataccattgcctggctgttctcattcagcttcatctcagaatggcttgcctgacagtattgaagagacaagtatatctgaagaaattcttgatgtggggcagttaaagatgatgggtgaccattttttacaggttcttcttaaaatgaagcataacggtgcaatagataaaacaagggctgggtttactgccctttgcaaccggcttctttgctcaaatgattcaaggctgtgcaaaatgacagagtcatggatggtgctactaatggataggacaattgctaaagggcaaactgtggatgatttgataaggaggagtgcaggaattcctgctgcatttatcgccctgttcctggcagagccagaaggaacaccaaagaaactacttccaagggcattagaatggctgatagagtttgctaagaactctttagctaatttccagaaagactccaaccagaggtctggagtaatgaaagagctgttggaatcacagtcagaaactacaagtgtatattctaatggtaacctatctaaaggtcgagatgagggtgttgttcccactgtgcatgtgttcaatgtgcttaaagctgctttcaatgatgcaaatctggcaaccgacacttcgggtttcagtgctgaagcaacaatagttgctatacgagcattttcatctccctactgggaagtgcgcaatgcagcttgccttgcgtatactgcactagttcgtcgcatggttgggtttctgaatgtgcagaagcgtgaatcagcacgacgatctttaactggccttgaattcttccacaggtatccagcccttcatcctttcctttctagtgaactgcaaaccacaactgaacaactagctgatggagtgtccagcaatttggagtcacacattacaaaagcaatacaccctagcctgtgtccgattcttattcttttatcaagacttaagccttcacctataagctgtggaactgatgattctttggacccttttttgcttttgcctttcatccaaagatgtgctacccagagtaactaccgggtccgtatccttgcatcaagggcattaacttgtttggtatctaacgagagattgcagtacgttattagtgatatactggataatttacctcgtggaagtcacaaagcaatggctcacagtgttcagcatactgatcctgccatatcagctaatatgggaaaagcaaatgtacttctgctgtctaagtcattcaattcaatacatggccttttgctgcagctggcttctcttctggataacaactttagaggtttgacagacggtagcatgaaggatcagattattggcctattactggaggttctttcaagatgctcttggcttggctgcacgaaattatgctcatgccctatcgtaattacatcttacttgcgggtattggatctcatgcttgatgttgcaaggacagggaaaagcagacatactgaagtcattcaggcattgctgctagagttaacttcccagtgcttgagcaacacagcatcaacccagtacgcattccatgatccaacccgtattgaactaaaacaacaagcaactgaatcatttttgagctgtgttggtctttctaagaaaaccgatgaaactaacgatgatgatgtgcagttgcaaatactcggtgaaccaactttagagatgcctagagtggattactcccttcatgaagtacacaaggagatcctgtcatgtctcactgatccttcatatgatgttagaattacggtgctgaagaggattctttggctcacaaaatcaatcagacatggttatgcagataacattttgcaccagtgggcaggagttaatctgcagcctgctttaatggaacggttgtttgtggaagaacaccctaagtgcctttattataatctgaagatcatcttttcatggaacatggaattcccattcaacaatggagaagattctagcacacttttgtccttgtgggataggttagttcatttaaacagcaccatgtcacatgcaaaaacgagagaaatagttctatgttgcatgggtatgtgcatgaaattgttcactaaacaatctaggggtggtatttcaatggattgtcttaagaccagtgagatctctgcatcctttgtcagaatcaatgaaggggatggattatctgatgccatgcttagattaaacttgtttgtcacacttgtcaagaaccaaagtgaaccatcagaaagcatgaatgctcgacgggctgctgctgaggcaattgttgcttctggtcttcttgaagaagcaagctacgttgcttcatctgtgtccaacatgtactctccttcagaatttgatgaagaccataccaaagagaaatgcatggaagatagcgtttttgaatttgttagtctttatacatgcaagatacttgacttgtggtttgtatgtattcagttgctggaggatgaggatgcatatctgaggcaaaaacttgcgaaggatattcagaaaataatcgctaagggttcagctaataccttctgtgatgattccacaccactacaagttgatagagtcattgaattaagcttggactatttaacttctttgtttggcctctggctgaaatacgttgaattcttgttaaggatagtcttgggcactggaaacgctctgaactcccgtggcgatttggtccgtcagatatttgataaagaaattgataaccaccatgaggagaagctattgatatgtcaaatctgctgttcaaacattcagaaacttctgaattcaaaatgccagatggaagcaggagcagagactaaactgttcctgcagaattggagggagatatttctaaagcagctcacatcgctgactggtggctatattgagaaagaggggaagaacgattggattggcggcataggtaaccacaaggacgtgttcatatcagtgtatgcagtcctactcggtttatacgcgctcacgcagtctggctctctggatcaattggaggaccactgtgcagtttatttgcaggaatttgcaaaccttgaaaggtctatcacaccattcctcaagaacccgttgatttctaatctttacgctctggtaaaattgtcacacgagaggttcatatcatcagataagcctgaggaccaagtgggtgattcaggatcaagttttgacccatattttcttatcagatgattttcgctaatgtactagtaattcttcattgttattcctccgttgtaagactcaatactaattgcttttttatacaaattaccatactatagattctttacttgatgccccttctctgtgtatcagtgcattttaagtgccttgggttttctagcactcaaaaaatgtatgacaaggttgtgactaacgtccgaacaactgataatgatataaatatttttccgattaacatagg

SEQ ID NO: 201935 - DNA, 7037 bp, Zea Mays
agcgagggggaagagagagaatcgcaggaccaaaccctaaacccccgctcccgcctcctctcgctgctgcagcttgccgggagctcacgcggcctttgcttctcgcttctttcgctggccacctgatcccggttgttcttcgctgggctcccgagccgctgcactcgctgggtgctgccgcctgccaggaggagcggcacggccgtctacaggattaaaggggagggaaggtttgtggtttaagttcccggaggaagacttgtggcggaactgtactgacttcagattgaagtcaaggagctaatttgggggaagaatgtcttcaaagtggcggtcactgcagcatcggcaccggtacacctacacctccattgtgttcccgaagcattaccttgaggccctaactctcgtgccagctgagatctcctcatccaatttctttgtccgattgagcaacttgatttccctgacctccacttactcccaagttgttgtggtcaaggatcttgcctcggcatatgtgcagtttctgtccactacagggactcctgatgaagcagtgctcgctgccacaaagctttatttggagatcctctttcttgagaattccctccctctccaccggacactcatatcagtgcttgccaagtgcaagaaattctccacagtgatcagtgggtgttttgccttgctctgtgaggagtatggtggctctggtagtaaggcaaagaagagatttatggtatctcgagcagccttgtcgcttattgggtacccaaagttgggatttttggatgaggcagtagagaggtgtgcagagatcatggcactggatgttgttgatgggcttgatggagtgacaaaagacattggtgaagggtcacggccatctccagtcgtgatggagcagtgccaggaggccatgtcttgcatgtactacttgctgcagaggtacccgtataagtttattggccttgacaaggcgtcaagtgtcttcaagagtgctgtcaggacaatactatctgttcttaagtcatctgccttttcaagggattgcctggtggcctctggagtaagcttctgtgcggcaattcaggttttcatgagcacagaggagatttcctggttcatttctcaaggtctatttggcatctatgcaaatcatgaagatagaaaaaatcagtctgtgcacaatgtattttcggactttgatctgtgtgaacaaatcagagacctttcagtgttgagtagactttgtctactaagagggattttgacatctattccaaggacagtactcaacatgcaccaacttcattccagtggacctttatggactgttttatatgatggaattttacctgagctttgcaagcattgtgagaacccagttgatagccacttcaatttccatgctcttacagtgacacaaatatgtttgcagcagataaagacatcggtttcatctgatatcaccgacttctctggggactataagcctttttcaagagatgttgtcaaccgtatattgggaatcatatggcgcaacctggaagatcctttgagtcagacagtaaaacaggtgcatttgatctttgatctcctattagatattgaactatgtattgcatcagaagaccgtgaacataacaacaacttgttcctttgcaatgttgcaaatgatttacttcgcttaggtccacgatgcaaagggagatatgtccctttagcttctttgacaaagcgattgggtgccaaatctcttctaacattgaaatcaaatctgctttcagaaacagcttatgcgtacatagatgatgatgtttgttgtgctgtcaccacatttttaaaatccttcctggagactttaagaggtgaatgttggaatgacgatggtgttgagctaggatatgatgccttcagagctttgtgcttgcctcctttcatgcggggacttgtatctggaaattcaaaactacgttctaacttaaatacttatgctttacctgctctaattgaagttgatgcagagagcatattcacaatgcttggattcatctccattggccctagcacaaatgaaactaaactagatgttgttttgaaaaatgaccagtgtatagctgcactggtttctctgcttaaggtctcacggaatctggctcttgttgaaggggacattgatttagatcctgatgaattgtcacagattcagcagatggatagtaagggtgctgcagttatatctgttaaagggattaaagttacagttccttttaattggtttgctttggcactgacacacagtgatgaaagtctccgtatagatgcagctgaatccctctttctaaatccaaagacatcaagtcttccatcctccttggaactgagcttgctcaaagaagctgttccgttgaatatgcgttgtagctcaacggcatttcaaatgaaatggacaagtttatttcggaagttttttgctagggtgcgaactgcacttgacagacaggtaaaacaggggtcttggattccatcattaacgtctagtgttaaaggggctggctctattgatacttctaaggccactgttgtcaagagggctgaagatctcttccaattcatgaagtggctgagttcctttctgtttaattcttgttacccctctggcccttatgaaaggaaaacaattgcaatggagctcattcttacactactagatgtatggcctatttgccgctctgaagggaaaattgatctttatccttacaatgatagcataatattgccagactcaacaatttcatttgttgggtctataattgatagttgggacagattaagggaaaactcttttcgcattctactgcagttcccaacaccgcttcctgggatttccttgagtacatccataaatgatgttatcagatgggcaaaaaaacttgttctaagcccacgtgtccgggaaagtgatgctggtgctttaaccttccgccttatatttaggaagtatgttttgcagcttggatgtattcttgtattttctaaagaaagtgattgccttgaatgttatacacaatctatgaatggagatacagaagttactagtcaaaacccagttgcacagtatatatcttcactcattcaatggctctgtattgttgtcgaagagggtgagagggatctctctgaagcatgtaagaagagctttgttcatggagttcttcttactctgcgctacacatttgatgagatggattggaactctgaggtagtacaatcatgtatttctgaaatgaggtacctggtagaaaaactgcttcaactcataatgcgtgtaacttcggtggccctatgggtggtttcttcagacgcattgtctctgccatatgacatggatgacatgattgatgatggttccttcctctcagatatatatgatgatcaacctactaccacttcagaaagagaggagaagaatgcaaaaccagggagtaatggcaaaccagccgaacaagttgttatggttggttgctggcttgctatgaaggaggtcagtttactttttggaaccatcatcaggaagataccattgcctggctgttctcattcagcttcatctcagaatggcttgcctgacagtattgaagagacaagtatatctgaagaaattcttgatgtggggcagttaaagatgatgggtgaccattttttacaggttcttcttaaaatgaagcataacggtgcaatagataaaacaagggctgggtttactgccctttgcaaccggcttctttgctcaaatgattcaaggctgtgcaaaatgacagagtcatggatggtgctactaatggataggacaattgctaaagggcaaactgtggatgatttgataaggaggagtgcaggaattcctgctgcatttatcgccctgttcctggcagagccagaaggaacaccaaagaaactacttccaagggcattagaatggctgatagagtttgctaagaactctttagctaatttccagaaagactccaaccagaggtctggagtaatgaaagagctgttggaatcacagtcagaaactacaagtgtatattctaatggtaacctatctaaaggtcgagatgagggtgttgttcccactgtgcatgtgttcaatgtgcttaaagctgctttcaatgatgcaaatctggcaaccgacacttcgggtttcagtgctgaagcaacaatagttgctatacgagcattttcatctccctactgggaagtgcgcaatgcagcttgccttgcgtatactgcactagttcgtcgcatggttgggtttctgaatgtgcagaagcgtgaatcagcacgacgatctttaactggccttgaattcttccacaggtatccagcccttcatcctttcctttctagtgaactgcaaaccacaactgaacaactagctgatggagtgtccagcaatttggagtcacacattacaaaagcaatacaccctagcctgtgtccgattcttattcttttatcaagacttaagccttcacctataagctgtggaactgatgattctttggacccttttttgcttttgcctttcatccaaagatgtgctacccagagtaactaccgggtccgtatccttgcatcaagggcattaacttgtttggtatctaacgagagattgcagtacgttattagtgatatactggataatttacctcgtggaagtcacaaagcaatggctcacagtgttcagcatactgatcctgccatatcagctaatatgggaaaagcaaatgtacttctgctgtctaagtcattcaattcaatacatggccttttgctgcagctggcttctcttctggataacaactttagaggtttgacagacggtagcatgaaggatcagattattggcctattactggaggttctttcaagatgctcttggcttggctgcacgaaattatgctcatgccctatcgtaattacatcttacttgcgggtattggatctcatgcttgatgttgcaaggacagggaaaagcagacatactgaagtcattcaggcattgctgctagagttaacttcccagtgcttgagcaacacagcatcaacccagtacgcattccatgatccaacccgtattgaactaaaacaacaagcaactgaatcatttttgagctgtgttggtctttctaagaaaaccgatgaaactaacgatgatgatgtgcagttgcaaatactcggtgaaccaactttagagatgcctagagtggattactcccttcatgaagtacacaaggagatcctgtcatgtctcactgatccttcatatgatgttagaattacggtgctgaagaggattctttggctcacaaaatcaatcagacatggttatgcagataacattttgcaccagtgggcaggagttaatctgcagcctgctttaatggaacggttgtttgtggaagaacaccctaagtgcctttattataatctgaagatcatcttttcatggaacatggaattcccattcaacaatggagaagattctagcacacttttgtccttgtgggataggttagttcatttaaacagcaccatgtcacatgcaaaaacgagagaaatagttctatgttgcatgggtatgtgcatgaaattgttcactaaacaatctaggggtggtatttcaatggattgtcttaagaccagtgagatctctgcatcctttgtcagaatcaatgaaggggatggattatctgatgccatgcttagattaaacttgtttgtcacacttgtcaagaaccaaagtgaaccatcagaaagcatgaatgctcgacgggctgctgctgaggcaattgttgcttctggtcttcttgaagaagcaagctacgttgcttcatctgtgtccaacatgtactctccttcagaatttgatgaagaccataccaaagagaaatgcatggaagatagcgtttttgaatttgttagtctttatacatgcaagatacttgacttgtggtttgtatgtattcagttgctggaggatgaggatgcatatctgaggcaaaaacttgcgaaggatattcagaaaataatcgctaagggttcagctaataccttctgtgatgattccacaccactacaagttgatagagtcattgaattaagcttggactatttaacttctttgtttggcctctggctgaaatacgttgaattcttgttaaggatagtcttgggcactggaaacgctctgaactcccgtggcgatttggtccgtcagatatttgataaagaaattgataaccaccatgaggagaagctattgatatgtcaaatctgctgttcaaacattcagaaacttctgaattcaaaatgccagatggaagcaggagcagagactaaactgttcctgcagaattggagggagatatttctaaagcagctcacatcgctgactggtggctatattgagaaagaggggaagaacgattggattggcggcataggtaaccacaaggacgtgttcatatcagtgtatgcagtcctactcggtttatacgcgctcacgcagtctggctctctggatcaattggaggaccactgtgcagtttatttgcaggaatttgcaaaccttgaaaggtctatcacaccattcctcaagaacccgttgatttctaatctttacgctctggtaaaattgtcacacgagaggttcatatcatcagataagcctgaggaccaagtgggtgattcaggatcaagttttgacccatattttcttatcagatgattttcgctaatgtactagtaattcttcattgttattcctccgttgtaagactcaatactaattgcttttttatacaaattaccatactatagattctttacttgatgccccttctctgtgtatcagtgcattttaagtgccttgggttttctagcactcaaaaaatgtatgacaaggttgtgactaacgtccgaacaactgataatgatataaatatttttccgattaacatagg

SEQ ID NO: 201936 - DNA, 7031 bp, Zea Mays
agcgagggggaagagagagaatcgcaggaccaaaccctaaacccccgctcccgcctcctctcgctgctgcagcttgccgggagctcacgcggcctttgcttctcgcttctttcgctggccacctgatcccggttgttcttcgctgggctcccgagccgctgcactcgctgggtgctgccgcctgccaggaggagcggcacggccgtctacaggattaaagggagggaaggtttgtggtttaagttcccggaggaagacttgtggcggaactgtactgacttcagattgaagtcaaggagctaatttgggggaagaatgtcttcaaagtggcggtcactgcagcatcggcaccggtacacctacacctccattgtgttcccgaagcattaccttgaggccctaactctcgtgccagctgagatctcctcatccaatttctttgtccgattgagcaacttgatttccctgacctccacttactcccaagttgttgtggtcaaggatcttgcctcggcatatgtgcagtttctgtccactacagggactcctgatgaagcagtgctcgctgccacaaagctttatttggagatcctctttcttgagaattccctccctctccaccggacactcatatcagtgcttgccaagtgcaagaaattctccacagtgatcagtgggtgttttgccttgctctgtgaggagtatggtggctctggtagtaaggcaaagaagagatttatggtatctcgagcagccttgtcgcttattgggtacccaaagttgggatttttggatgaggcagtagagaggtgtgcagagatcatggcactggatgttgttgatgggcttgatggagtgacaaaagacattggtgaagggtcacggccatctccagtcgtgatggagcagtgccaggaggccatgtcttgcatgtactacttgctgcagaggtacccgtataagtttattggccttgacaaggcgtcaagtgtcttcaagagtgctgtcaggacaatactatctgttcttaagtcatctgccttttcaagggattgcctggtggcctctggagtaagcttctgtgcggcaattcaggttttcatgagcacagaggagatttcctggttcatttctcaaggtctatttggcatctatgcaaatcatgaagatagaaaaaatcagtctgtgcacaatgtattttcggactttgatctgtgtgaacaaatcagagacctttcagtgttgagtagactttgtctactaagagggattttgacatctattccaaggacagtactcaacatgcaccaacttcattccagtggacctttatggactgttttatatgatggaattttacctgagctttgcaagcattgtgagaacccagttgatagccacttcaatttccatgctcttacagtgacacaaatatgtttgcagcagataaagacatcggtttcatctgatatcaccgacttctctggggactataagcctttttcaagagatgttgtcaaccgtatattgggaatcatatggcgcaacctggaagatcctttgagtcagacagtaaaacaggtgcatttgatctttgatctcctattagatattgaactatgtattgcatcagaagaccgtgaacataacaacaacttgttcctttgcaatgttgcaaatgatttacttcgcttaggtccacgatgcaaagggagatatgtccctttagcttctttgacaaagcgattgggtgccaaatctcttctaacattgaaatcaaatctgctttcagaaacagcttatgcgtacatagatgatgatgtttgttgtgctgtcaccacatttttaaaatccttcctggagactttaagaggtgaatgttggaatgacgatggtgttgagctaggatatgatgccttcagagctttgtgcttgcctcctttcatgcggggacttgtatctggaaattcaaaactacgttctaacttaaatacttatgctttacctgctctaattgaagttgatgcagagagcatattcacaatgcttggattcatctccattggccctagcacaaatgaaactaaactagatgttgttttgaaaaatgaccagtgtatagctgcactggtttctctgcttaaggtctcacggaatctggctcttgttgaaggggacattgatttagatcctgatgaattgtcacagattcagcagatggatagtaagggtgctgcagttatatctgttaaagggattaaagttacagttccttttaattggtttgctttggcactgacacacagtgatgaaagtctccgtatagatgcagctgaatccctctttctaaatccaaagacatcaagtcttccatcctccttggaactgagcttgctcaaagaagctgttccgttgaatatgcgttgtagctcaacggcatttcaaatgaaatggacaagtttatttcggaagttttttgctagggtgcgaactgcacttgacagacaggtaaaacaggggtcttggattccatcattaacgtctagtgttaaaggggctggctctattgatacttctaaggccactgttgtcaagagggctgaagatctcttccaattcatgaagtggctgagttcctttctgtttaattcttgttacccctctggcccttatgaaaggaaaacaattgcaatggagctcattcttacactactagatgtatggcctatttgccgctctgaagggaaaattgatctttatccttacaatgatagcataatattgccagactcaacaatttcatttgttgggtctataattgatagttgggacagattaagggaaaactcttttcgcattctactgcagttcccaacaccgcttcctgggatttccttgagtacatccataaatgatgttatcagatgggcaaaaaaacttgttctaagcccacgtgtccgggaaagtgatgctggtgctttaaccttccgccttatatttaggaagtatgttttgcagcttggatgtattcttgtattttctaaagaaagtgattgccttgaatgttatacacaatctatgaatggagatacagaagttactagtcaaaacccagttgcacagtatatatcttcactcattcaatggctctgtattgttgtcgaagagggtgagagggatctctctgaagcatgtaagaagagctttgttcatggagttcttcttactctgcgctacacatttgatgagatggattggaactctgaggtagtacaatcatgtatttctgaaatgaggtacctggtagaaaaactgcttcaactcataatgcgtgtaacttcggtggccctatgggtggtttcttcagacgcattgtctctgccatatgacatggatgacatgattgatgatggttccttcctctcagatatatatgatgatcaacctactaccacttcagaaagagaggagaagaatgcaaaaccagggagtaatggcaaaccagccgaacaagttgttatggttggttgctggcttgctatgaaggagtttactttttggaaccatcatcaggaagataccattgcctggctgttctcattcagcttcatctcagaatggcttgcctgacagtattgaagagacaagtatatctgaagaaattcttgatgtggggcagttaaagatgatgggtgaccattttttacaggttcttcttaaaatgaagcataacggtgcaatagataaaacaagggctgggtttactgccctttgcaaccggcttctttgctcaaatgattcaaggctgtgcaaaatgacagagtcatggatggtgctactaatggataggacaattgctaaagggcaaactgtggatgatttgataaggaggagtgcaggaattcctgctgcatttatcgccctgttcctggcagagccagaaggaacaccaaagaaactacttccaagggcattagaatggctgatagagtttgctaagaactctttagctaatttccagaaagactccaaccagaggtctggagtaatgaaagagctgttggaatcacagtcagaaactacaagtgtatattctaatggtaacctatctaaaggtcgagatgagggtgttgttcccactgtgcatgtgttcaatgtgcttaaagctgctttcaatgatgcaaatctggcaaccgacacttcgggtttcagtgctgaagcaacaatagttgctatacgagcattttcatctccctactgggaagtgcgcaatgcagcttgccttgcgtatactgcactagttcgtcgcatggttgggtttctgaatgtgcagaagcgtgaatcagcacgacgatctttaactggccttgaattcttccacaggtatccagcccttcatcctttcctttctagtgaactgcaaaccacaactgaacaactagctgatggagtgtccagcaatttggagtcacacattacaaaagcaatacaccctagcctgtgtccgattcttattcttttatcaagacttaagccttcacctataagctgtggaactgatgattctttggacccttttttgcttttgcctttcatccaaagatgtgctacccagagtaactaccgggtccgtatccttgcatcaagggcattaacttgtttggtatctaacgagagattgcagtacgttattagtgatatactggataatttacctcgtggaagtcacaaagcaatggctcacagtgttcagcatactgatcctgccatatcagctaatatgggaaaagcaaatgtacttctgctgtctaagtcattcaattcaatacatggccttttgctgcagctggcttctcttctggataacaactttagaggtttgacagacggtagcatgaaggatcagattattggcctattactggaggttctttcaagatgctcttggcttggctgcacgaaattatgctcatgccctatcgtaattacatcttacttgcgggtattggatctcatgcttgatgttgcaaggacagggaaaagcagacatactgaagtcattcaggcattgctgctagagttaacttcccagtgcttgagcaacacagcatcaacccagtacgcattccatgatccaacccgtattgaactaaaacaacaagcaactgaatcatttttgagctgtgttggtctttctaagaaaaccgatgaaactaacgatgatgatgtgcagttgcaaatactcggtgaaccaactttagagatgcctagagtggattactcccttcatgaagtacacaaggagatcctgtcatgtctcactgatccttcatatgatgttagaattacggtgctgaagaggattctttggctcacaaaatcaatcagacatggttatgcagataacattttgcaccagtgggcaggagttaatctgcagcctgctttaatggaacggttgtttgtggaagaacaccctaagtgcctttattataatctgaagatcatcttttcatggaacatggaattcccattcaacaatggagaagattctagcacacttttgtccttgtgggataggttagttcatttaaacagcaccatgtcacatgcaaaaacgagagaaatagttctatgttgcatgggtatgtgcatgaaattgttcactaaacaatctaggggtggtatttcaatggattgtcttaagaccagtgagatctctgcatcctttgtcagaatcaatgaaggggatggattatctgatgccatgcttagattaaacttgtttgtcacacttgtcaagaaccaaagtgaaccatcagaaagcatgaatgctcgacgggctgctgctgaggcaattgttgcttctggtcttcttgaagaagcaagctacgttgcttcatctgtgtccaacatgtactctccttcagaatttgatgaagaccataccaaagagaaatgcatggaagatagcgtttttgaatttgttagtctttatacatgcaagatacttgacttgtggtttgtatgtattcagttgctggaggatgaggatgcatatctgaggcaaaaacttgcgaaggatattcagaaaataatcgctaagggttcagctaataccttctgtgatgattccacaccactacaagttgatagagtcattgaattaagcttggactatttaacttctttgtttggcctctggctgaaatacgttgaattcttgttaaggatagtcttgggcactggaaacgctctgaactcccgtggcgatttggtccgtcagatatttgataaagaaattgataaccaccatgaggagaagctattgatatgtcaaatctgctgttcaaacattcagaaacttctgaattcaaaatgccagatggaagcaggagcagagactaaactgttcctgcagaattggagggagatatttctaaagcagctcacatcgctgactggtggctatattgagaaagaggggaagaacgattggattggcggcataggtaaccacaaggacgtgttcatatcagtgtatgcagtcctactcggtttatacgcgctcacgcagtctggctctctggatcaattggaggaccactgtgcagtttatttgcaggaatttgcaaaccttgaaaggtctatcacaccattcctcaagaacccgttgatttctaatctttacgctctggtaaaattgtcacacgagaggttcatatcatcagataagcctgaggaccaagtgggtgattcaggatcaagttttgacccatattttcttatcagatgattttcgctaatgtactagtaattcttcattgttattcctccgttgtaagactcaatactaattgcttttttatacaaattaccatactatagattctttacttgatgccccttctctgtgtatcagtgcattttaagtgccttgggttttctagcactcaaaaaatgtatgacaaggttgtgactaacgtccgaacaactgataatgatataaatatttttccgattaacatagg

SEQ ID NO: 201937 - DNA, 2822 bp, Zea Mays
ctgacaccgacgtcgtcctccccgcaggccgcaggtcggcaggcggtcgcctccagggtccaggctctctcccgctcacggcagcgccgtccttcgacacccccctccccgctctagttctggcctgctgaggactggaggtccatccatccggactttgttgatttcttctgttggcattgtggtgttcagctcaaaatgaaaggagtgcttccgattaagggggcatcaggccgtgaaaagaaagcgcctaaggagctcgagagcgtcttgaaccgatatttcgggtattcgggatttcgaggaaaacaactcgaagctatagaagctgttctatcagggagagattgcttttgtttgatgccaactggtggtggaaagtccatgtgctatcagattccagctctggtgaaaacaggcattgttcttgtcatttcacccttgatagaatttacaggagaaccaggttgccagcttgaaaaataaaggggttccagctgaatttctctcttcaacacaggcatctcacactaaacaaaggatacatgaagaccttgatactggtaatccttctttaaagttgctatatgtgactcctgaacttgttgcaacatcaagctttatggcaaagctaaagaagctatacaacagaggtcttcttggtcttgttgcaattgatgaggctcactgtatttcaagttggggccacgatttcagacctagctaccgaaaactttcatcattgaggaagcagttcccagatatccctttgttagctttaactgcaactgctgtaccgaaggtccagaaagatgtggtatcatcattgtgcttgcaaaatccagtaattcttagagcttcatttaatcgacccaatatattctatgaagttcgttacaaggatcttcttgatgatgtttactctgatatatcaaatttgctgaaatcaagcgggaatgtttgctcaattatatattgccttgaacgggcagcttgtgatgatctaagcatgcatttgtcacagcagggtgtctcttgtgctgcttatcatgctggcctaaatagtaaagtgcgaagttctgttctcgatgactggctttcatcgagaactcaagttgttgttgcaactgtagcatttgggtagggtattgatagacaagatgtccgtattgtttgccacttcaacttgcctaagtcaatggaatccttctaccaggagtcaggtcgagctggtcgtgatcaacgaccttcaaggagtgttttgtattacggattagatgaccggaggagaatggaattcattttgagaaaccccaaaactaagaaatcacagccgtcttcctcttcaaatgagctttctgagaaggctctagctgacttcagtcagattattgactactgtgaaatttctagctgccggcggaaaaagatcattgagagctttggagagaaagtacaaccaactttatgccaacgctcatgcgatgcttgcaaacacccaaatttagtgttgtctcgtctggaggaactccgtcgtgtgcccaactgtcgctttaataagatctctccagtgtttcaaagctcagttaaagaagcacacttggacacagaattctggaatcgtgaagatgaggcgagcttatcagctgaagacatatctgattctgatgatgggaatgaggtagtgagtaatatagccatttcaaaggttccggcaaaagctggtctggatgcaaaatttaaagcactggagcgtgctgaaaatgcttattaccaaggcaaaggtcaggcgaagcagcagggtggcggccttgctgacaagaaaagcatctctgagacgctaagagatgcatgccgaaaaagattgttggatgctcttggacaagcaaagttgcgactcgggaatattccgtgcggagacgaggcttctgctacacaccttgaaacagagtgcttcaaaaaatatgtgaaggcgggcaagacgttctacaactcacagatagccgccacagttcggtggctgtcatctgcaacactcagtcagatgcgtgaccgcctcgacactctttatcgaccgaaccaaagatgatggtgcgtcaggctgccccgacattgtcccagagtcacctccagcatctcctgaaatcgtcgtcggcgcaaggtcaggagaaaccagtaacgacaaaccgcagcatatttgtgagttgaagagttcagatgagtctgcaaagggtgctgcatcatcgactgggaacatggtgctccccgccataccgacgttcagagaattcttgagccaaaaaggaagggatcgggcgaagtgctattcaaattctaatgcgacgaaccagccatctggtattcgtaggaagtttagtggtcaccttgataaggaagaagccagcaagaggatgaaatcatgaatatctgtcgggcaacttgattttttttctgccttttcgttgtcactaatcaaacattgcaaatctacgttgtagtgaaacgttcctgaatcagaatctccatgatgattttcttattatatctagtttgtacagtgaaaaggggtgttctacgcttctcgtgcaacatgaaggatctgcctcccaatccctatccaccctctataggttagtcatctcatgtggacacagccagaagggaagcggtaaacttaagcaagtatatacacatgtcggacctataacaccctatttgatcagctcttacaacggtcaactacacctgacgcaccctatttgatccgaggaatccttctcaagctccgcgatcagctgctcaatgtttcttctgtatatagg

SEQ ID NO: 201938 - DNA, 1750 bp, Zea Mays
cacgagcgagcgagcgacgcagaggaggtttttaaaagcgccgcgtgccaagtgggtgcgggactgcgaggagttggactcggctattaaaaccacgagtgggaagttttcttcttcgtgacctcccgctcgctgcgccagccaacccaccacccatccgtttctcgttctccggcccctgcctgactcccctcctcccccccttaacaatggcagtacaggcgcagtacccatccaatctcctcttccacgacagaggtgagccggacaggaagaaggcgatggacatgcccaagccgccgcagctcgccggagtctcgccggcggcggtctacttctccggcggtggagcgagtgggaataatcggaggaagcgagccagggaggccatggcgccgccgccggcggtcaaggaggattacgtcaatctgttcgcactccagcagcagcagcagcagcagcagcagcagtcgatgccgttcgccaacatggcgctcttccagaaccagaacagagtctcgtcgtcgccgtccccggccgcgacggcgctcgtgtccaccggcctccgcctggcattcgacgagcagcagcaacatctgctacagcagcaggagagcaagcagacgaatgccttgcgctattcgtcgccgccgtcgctgttcgcctctgtctccgacgagctcgccgcgcaggcgaagcagcatgaagaggaggtcgaccggttcgtccgcgagcaggtatcttgggcccccgcgacccgcctgttcccatcgccgagtccgtttctttggtcccaatcctgacgatgtcccgcgccggtccgtctttggtcagggcgagcagctcaggcgggcggtggccgatcggctgcggcgccacaaccgggcgattctggtcaaggccgaccagtccgcggcgcgcaggctccgcgagaaggcggcggaggcggagcgcgaggcgcggcgcggcgccgagctggaggagcgtctggcgcgcctccgcggcgaggcggcggcgtggcaggccaaggcgctctccgagcaggccgccgcggtcgccctgcacgcgcagctgcagcaggccgcggccgcggcgcgggcgtcggtcgaggagctcaccgccgccgccgccgcgggcgacgccggcccggcggagtcgtcggcgtcggcgttcgtggaccctcgccgcgccgggccgccgccagaccacgcgtgcctcgcctgccgcctcaggccggcctccgtggtgctcctcccctgcaggcacctgtccctctgcggcgagtgcttcgccgccggcgacgccgacgccgccatgccgtgccccgtgtgcctgtgcgtgcggacggggagcgtggaggccatcctctgctgagctttccccgcctctcatcatcgatcatccggccgtccacctcgtgagccgattggcatggcaggcgagcggattaacaagtgatcgcaaccgccgtgccactcgtgacgttgcccgtctgatgcgacgcgaggcgaggccggcgtgaggaggaggaaccgacgaacggaagcgcgcgctcccgcgcgcggtgcggggcagttaattgcggggcgcacggtggagccctgggagaatagatgcgtaccccccctgccccacccgtcggtggcagcggcagccttcatgttgggaagcggatctgaggtggcacggacgagcgggcgcgtgatctgcctgtctgtcagtcagccagcctgccacgaggaacggccgg

SEQ ID NO: 201939 - DNA, 1939 bp, Zea Mays
aaggaagcaatcgagagcggcaaaattacagatttctccgactacgactgcctgcgccgccgccagccccttgcgttgagcaatatcctcgtcctcccgagagcgatccccgtcgcccctgtccgcggccgccgaggcgccgactcgccggcgcggcgccgtcttccgccactgcgccctaccgcccaggacgaagctccagctccggcccaccgtctccctgccggcactgccgcgccgagggcccgagctcctcctcgccccatgcccccgcggccgccctgcccagctccgccccgcgcgttcgcggctctgcgcccccgccaggccgagcttcgcacgttcgccgtccgcgccttcggcttccgcagttcgcacagctgacagcagtccattcaccgtccgcgcctccggtcaccgcacagtacgacgcgcttccgaggaggttagagcattggctgctatggcgccgcctcacgtcaccaggaagaagggaaagggcgccggcggcaagaccgacctgcgtcccgaccgtaagcagttcaaaaggcaccacaaggaggatgcagcagctgagcagggggatggcaacggagagccgggttctgacctagaggataatattagtaatacatgtcttgaaattgctaatggaactgaagcaaatgctaaaaagagtgataaacagttaaagaaggaagcaagaaaacaaagggaactagaaatcagtgctatggaggaaagggctttgcaggaagatataccacaaactccagatgattttgagaagttggttaggagctccccaaatagtagttttatctggataaagtatatggcaactttgttagatcttgcagatgttaagaaagcacgtgcagtagctgagagagctttaaaaacaataatccccagagaagaagaagagaaactaaatgtttgggtagcatatttcaatctggaaaatgaatacggtagtccaagggaggatgctgtgaaaaaggtattccaaagagccttgcaatattgtgatcccaaaaagctgcacttggctcttcttgcgatgtacgagaggaccgaacagtatgagcttgcagatgaacttctagacagaataaccaaaaggttcaaaacttcctgcaagatatggttatgccgcattcagtttgccctcaagcaaggcaaggatgttgagtacatcaaagccattgtaaaccgtgcacttctaagtttgccacacagaaagcgcataaaattcctctcacaaactgctattctagaattcaaatgtggggtgcctgaagaaggaagatccagatttgaactaatattgcgggagtacccaaaaagaacagacctttggagtgtttatctagaccaagaaatccgccttggtgacgtagaagttatacgggcattgtttgagaggagggtggcttgtctgaccctacctccaaaaaagatgcagttcttgttcaagaagtatcttaacttcgagaagtcactgggtaaagacaacgaaagaattcagcttgtgcaacagaaggcaatcgaatatgttcagagttcactgccgtcacaagacaactcttgaactacatggagacttaataagcccacaaacaatcattaggaaatgccagtcgtactgtagatgtgatctctttgatgacattattgtgaaaaggtcaatgtaaaatgtgggctattcaaaattttgtttgaaaccgttatataagttatgaggcattaagtctagtatgtcatgtttcacccaatttttttgaaaggatctatcctaagccggatctggttcgaatattgaccttttctatctgtggtattgactgttgaggcacaattgaatgggtaactgtctgtgctactcctagcttagaaagcacaaaatactagaatatctgtctgcgcttaatccctt

SEQ ID NO: 201940 - DNA, 2553 bp, Zea Mays
ccgcacccgcaaagcacagcagcacacccaccgcggctccagaggcggaccccatcggcaaccggctctgtccggaaagcccccaagcgcaaccgcttcttcccggaaagggcaaaaaggaaacgcgcctcgtccggtcggacggaagcccttcttcccctccccatccgccgccactgccccgcgagattcggcgagaattaaaggcaccatatcctgcctcctctctcgtctccctatttctctctcactccccacctcccgcgcattccgcaccgataggtaggctcacccggactcgtctcccgctcccccctcccttttcccaaaaccctagcgggtttcgacctcccaggccaatcagatcgaccgctgccgcgcgcaattgttgagccatcgaggtttgacttcatactgccctgccccaaaggatcaagatcgcatcaccagtggaagcctcgggggctgctaagtaacgttatctgactggctgactgcgccattgataaccttgggttacaactgcacaggaggctgcgacccacaggccatccggggctcattgcagctgacgaagcccctgcagactactccccgacaatatggcgacagcgacaatggcaaccgccgcgggggccgcggcactgctttactacacactgaaccgccgcctgcagacagagaggctgaataaggaaggggagtgcagcgatagcagggatgtgacacccagggccgcacagggttctcccagcaggagccgtgtatcgcggagggacgtccgcgcccctgccacctggcttgagactatctcgacgctgtcagagacgctgcggttcacgtattcagagacccttgggaagtggccgatcggcgaccttgccttcgggatcagtttcctcctcaagagacagggaaacttatctgtagcaagcatatacgctggaaatgatagtgtggagctcaaaggagctgaagtaattgctgatttaaagtatcttctcaatttgctgacactttgctggcatttctccaaaaagccattcccgttgtttttggaggcgactggctacactacggaggatgttcttatgcaagaacctaaagcaggaattttgaagccagctttcaccattttgcttgatagagacaaaaagtctatacttctattaattaggggaactcatatactaggatatgctcattttgggatggttgccgctgctaggtggattgcaaagctctcagggccttgtctggcacaagcattgcagatgtacccagacttcaaaataaaggttgttggacattcactgggaggtggtacagctgctctgttgacatacgttctgagggaacagaaggagtttgcctctactacttgtctggcatttgctccagctgcatgtatgacatggaaactggcagagtcaggagtgcattttatcactacagtcatcaatggagctgatctggttccaacattttctgctgcgtcagtagatgatcttcgttcagaggttacagcgtcagcttggctaaatgatctccgccaccaaattgaacaaaccagaatcctaagcactttttatcgttctgcgtcagccttgggatcccggcttccatctatggcaaatgctaaagcaagagtagctggtgctggcgccatcttaagacctgtatctactgggacgcaggttgtaatgaggagagctcgcagtgtagcacaggcagcatggacaagaccagcactgcaactgtcctcatggacttgtattgggccaagacggcgaaataatatatctacctcaactgtcacatcagaggaaataatagcatctacaggcggtggatctgaatccacttcattgttgactgaaaccactgcggaaaccacagagacagttacatcagaagctgtatcagaagtggttcagagttctgtttctgtggcggtcgatgctgttgacttggtagatgacaagggagatagcgatgatgacatcgtcgatcaccatggggacgaggacaggatgactgatgtggagctgtggcagcaacttgaaagtgagttgtaccggaagagggagggagaagaggatgacatagccgaagagatggctgaaagtacaattgctgaggaggtgggtggcgtggctgaagatgtgctcagcgagacaaaggaagtgcataggttctaccctcctggaaaaatcatgcacatattattctccagcagggaagaagcagatcgtggagaggagcctgaggatgatgttacggatggggaggcacaaagcagcatagggatcttcttgacgccaagatctctgtacggcaagctgaggctttcgaaaatgatgatcaatgaccattacatgcctatatacagaagaaacattgagcagctgatcgcggagcttgagaaggattcctcggatcaaatagggtgcgtcaggtgtagttgaccgttgtaagagctgatcaaatagggtgttataggtccgacatgtgtatatacttgcttaagtttaccgcttcccttctggctgt

SEQ ID NO: 201941 - DNA, 2341 bp, Zea Mays
caagcgcaaccgcttcttcccggaaagggcaaaaaggaaacgcgcctcgtccggtcggacggaagcccttcttcccctccccatccgccgccactgccccgcgagattcggcgagaattaaaggcaccatatcctgcctcctctctcgtctccctatttctctctcactccccacctcccgcgcattccgcaccgataggtaggctcacccggactcgtctcccgctcccccctcccttttcccaaaaccctagcgggtttcgacctcccaggccaatcagatcgaccgctgccgcgcgcaattgttgagccatcgaggaggctgcgacccacaggccatccggggctcattgcagctgacgaagcccctgcagactactccccgacaatatggcgacagcgacaatggcaaccgccgcgggggccgcggcactgctttactacacactgaaccgccgcctgcagacagagaggctgaataaggaaggggagtgcagcgatagcagggatgtgacacccagggccgcacagggttctcccagcaggagccgtgtatcgcggagggacgtccgcgcccctgccacctggcttgagactatctcgacgctgtcagagacgctgcggttcacgtattcagagacccttgggaagtggccgatcggcgaccttgccttcgggatcagtttcctcctcaagagacagggaaacttatctgtagcaagcatatacgctggaaatgatagtgtggagctcaaaggagctgaagtaattgctgatttaaagtatcttctcaatttgctgacactttgctggcatttctccaaaaagccattcccgttgtttttggaggcgactggctacactacggaggatgttcttatgcaagaacctaaagcaggaattttgaagccagctttcaccattttgcttgatagagacaaaaagtctatacttctattaattaggggaactcatatactaggatatgctcattttgggatggttgccgctgctaggtggattgcaaagctctcagggccttgtctggcacaagcattgcagatgtacccagacttcaaaataaaggttgttggacattcactgggaggtggtacagctgctctgttgacatacgttctgagggaacagaaggagtttgcctctactacttgtctggcatttgctccagctgcatgtatgacatggaaactggcagagtcaggagtgcattttatcactacagtcatcaatggagctgatctggttccaacattttctgctgcgtcagtagatgatcttcgttcagaggttacagcgtcagcttggctaaatgatctccgccaccaaattgaacaaaccagaatcctaagcactttttatcgttctgcgtcagccttgggatcccggcttccatctatggcaaatgctaaagcaagagtagctggtgctggcgccatcttaagacctgtatctactgggacgcaggttgtaatgaggagagctcgcagtgtagcacaggcagcatggacaagaccagcactgcaactgtcctcatggacttgtattgggccaagacggcgaaataatatatctacctcaactgtcacatcagaggaaataatagcatctacaggcggtggatctgaatccacttcattgttgactgaaaccactgcggaaaccacagagacagttacatcagaagctgtatcagaagtggttcagagttctgtttctgtggcggtcgatgctgttgacttggtagatgacaagggagatagcgatgatgacatcgtcgatcaccatggggacgaggacaggatgactgatgtggagctgtggcagcaacttgaaagtgagttgtaccggaagagggagggagaagaggatgacatagccgaagagatggctgaaagtacaattgctgaggaggtgggtggcgtggctgaagatgtgctcagcgagacaaaggaagtgcataggttctaccctcctggaaaaatcatgcacatattattctccagcagggaagaagcagatcgtggagaggagcctgaggatgatgttacggatggggaggcacaaagcagcatagggatcttcttgacgccaagatctctgtacggcaagctgaggctttcgaaaatgatgatcaatgaccattacatgcctatatacagaagaaacattgagcagctgatcgcggagcttgagaaggattcctcggatcaaatagggtgcgtcaggtgtagttgaccgttgtaagagctgatcaaatagggtgttataggtccgacatgtgtatatacttgcttaagtttaccgcttcccttctggctgt

SEQ ID NO: 201942 - DNA, 450 bp, Zea Mays
tttatttttttgtttgcgtacagtaatcttgaatcgaattgccaaaccgcaaggctgaactacaagacagtacaagaacgaagttacacggcgttctggcacggcaccctaaaccaccgagaaattaactagcagcagtgttcactggtgagtagacgggatggctaacagttaaaacagtgcatcagcgaggcaagagacgaaacccacgggtaacagtaggagaaaagaagaaaaagagaaggcgtcgtcaggaacagcaacacgccagcaatggtcagatcaggcgagcgcgagcagggcacgaaccagctccctctctcgtttctcactagctcttggcgaggtggtgcttcttgccgccgtctccgcccttgccgccaccgccgccgccgccgccggacctcttgctcgcgtgcgccgggagcgagctcgtggtgctcgtcttcg

SEQ ID NO: 201943 - DNA, 2647 bp, Zea Mays
agaagatccaccgaactaccgaaacttccgcctcgcagcgcgcccgcgcgtcgccgttgcctctagcggtctagccctctactactcacccgacctcccgcgcgacgccgaacctgcgagccataacgccacccaccgcctcgccgcgcagatctctggggcttatccctacccccgggctgtgattctcccgcctcctcaccgatgcggacgccggcgatgctccggtgggccgcggcgctcgcggtcctgctcgccgtcgccgcgccggccgccgggttctacctccccggcgtcgccccgaccgacttcgccaagggtggtccgcttccagtgaaggtgaataagttgacatctatcaagactcaactcccgtatacatattactcccttccattctgcaagccagatgccatagttgacagtgccgaaaatctcggggaggttcttcgtggcgatcgcattgagaactctccttatgtgttcaaaatgcgagagcccaagatgtgtcagattgtctgcaaagcaaagatcactgagaaagaagccaaggagctgaaggaaaagatagaggaagaataccgagtgaacatgatcctggacaacctcccgctagttgttcctgttaataggcaagataagaacagtattgcttatcaaggtggatatcatgttggtctcaaaggcgtgtattctggaactaagaatgagaaatacttcatccacaaccatttgtcatttacggtgaagtatcacagggatgataattcagaactttccagaatagtgggatttgaggtcaacccactcagtgtcaagcatcagattgatgataaatggaatggtgtagacactcgcttgagcacttgtgatcctcatgcaagcaaatttgtcataaactctgattctcctcaggaagttgaagctgacaaggaaatcatattcacatatgatgttcattttgaggagagtgagatcaagtgggcatcacgttgggacacctacctgttgatgactgatgatcagattcattggttttctattgtgaactctctcatgatcgtgctttttctatctggcatggttgccatgataatgcttcgcactctctacagagacatctctagatacaatcagcttgaaactcaagaagaagcgcaagaggaaacaggctggaagcttgttcatggggacgtattccgtcctccaacccactctgacttgctctgtgtttgtgttggcactggcgtccaattctttggcatgctcctagttacaatgatcttcgctgtgttgggtttcctttctccatcaaaccggggaggactgatgactgcaatgcttcttgtctgggtcttgatggggctgcttgctggctattcttcttcacgcctctacaagatgttgaaaggttcagagtggaagaagatcaccctgcaaacggctttcctgtttccaggggttgcatttgttattttcttcatcttgaatgctcttatatggggggagaagtcatctggtgctgtccctttcaccacaatgtttgcactggtcctcctctggtttggcatctcggtacccctcgtctttgttgggagttatcttgggttcaagaaacctgccatggaacctccagtcaagacaagcaagattccacggcagatccccgagcaggcttggtacatgaatccgcttttcactattctgattggtggcgtccttccatttggagcagttttcattgagcttttcttcatcctcacctccatctggctgcaccagttctactacatcttcggcttcctcttcctcgtgtttgtgatccttgtcatcacctgcgccgagatcgcagtcgtgctctgctatttccagctctgcagcgaggactacatgtggtggtggaggtcctaccttacctcaggatcctccgcgctgtacctcttcctgtacgctgctttctacttcttcacgaaactgcagatcactaagctggtgtctggcatcttgtacttcggctacatgtttctcgcctcctatgccttctttgtgctgactggcacaattggcttctgcgcctgcttctggttcactaggttgatttactcgtcagtgaagatcgattaggtgccaatatatgacagaatagcacgtgtttcagtgatggagacaagagaactgtaccattgatgtggattgggaattaccccccttcttttagggttttcagggaaaaaagtttcttcttaggatttagtttatgaattattatggtttgttgtcagattatacactttagggcttgttcgttttggtgataatccacatgtattgggtgggattgagctggtttaaatccataacaagtcaaaatccaccccaatcccactcaatacactccaatacacatgtaatatcaataaccgaacaagcccttagtggtttggaactgagaaaaaatataagggtaaacacattgcgaagaggctgtacctttttgacatttttttgtgcggctctatataaattcaattcattatgaccggtatgcttgtactggtgaattactgtaaggctccagggccagcatgaaataccctcatggcagctggctagaatgtaacctcagtttcttagaaatcagagttgg

SEQ ID NO: 201944 - DNA, 1104 bp, Zea Mays
actatatcgacgaacagaacaactttctccttcttccgcgctgtcgccgtcctcctctcaccccaatctgctcggactctgatcgcagcggacgcgcatccaaccagctcggattctacctctctcccggggaaaggatggagttcgggaggaagcccttgagccttgtggagctctgcgtgcggaaggccatcgacaacctccgctacatgggcagcgtcgacggcgtcgagatggatctgctcaagcgcatcctgccgcactgcacgatggagcagctcacccgcgtagagaacagcaccgagatggatcttagcttggtaactgatccgctgtggaggcgattctaccagcgagaattcggtcaggagcatacgagcaaagtcatcgcaaggctgaaggagcttgggcaaaaaacgccgtacacatggagggagctcttcgcggcgaaaaaagagaaacagaaggaagttgaggataagatgcttgacaaattcacaaagaagtttcaggcagagagagctgagaaacaaagcaagcaaatcaaactctgtacaaaggtgcctccaagcagcaaaaggagtttctttggagtgtatccagttccagctacaagagccctatactgaagaaggctaggatagaggttaacagtcgagcaagattgcagtctgctatgcaaaagaatacttttgcgaggtcatctcagccaataaggacgacctctgttagtggacagccagtgagaacaactaccattcataggcccaattcaaccgtcaccatcaccaaaccgatgggaaaaagcaggcaaattcagaacagcaggcccaaattctaggaaacggtttgctgcgatatcgcaatttcaactccagagctcatatgtcctctgaagaaagcgcctcctttgtacaaaaggagtagcacaccgtactcatttttttttttggcaaaggagagacgtgccaattgtaacgtaaaaggcgttaccaatgtttgtaacaaacgatttcttgtattaaagaaaaaagggtttgtttcttggtttctctctttattatcatgcaaatggttaatgaattatagaaaataccaggcaaa

SEQ ID NO: 201945 - DNA, 1154 bp, Zea Mays
ctccatttctcaccccgcccacctcttccgtcctcccgttcccgtcccgcacacagactctttctctctcctcccctctctcgtcctctctctctcgtccgatctgcatctgcttttctcccccttgtctgtctctctcctgtccgtggcgtgcgcaaagatttgattttttttttctcggggaggagccggagtccgagcaggagtggcggcgggagggaggagatcctgatctgttgtcgcagcggggaggggaggaccggaggaggaagatggctgcgcaggagcaggagcaggagcaggagaagcagcaggcgaagacgagcaccacgagctcgctcccctccagcagcgagcgctcctccagctccgctcgcaacaacctcacggaaggaggggcggagagcgacgaggagatacggcgggtgccggagatgggcggcgcgtcggcgtcggcctcgtcgggcgccggcgcggacgagcgtcccaagggggaggacggcaagcaggggcaggtggcggcgggggcgcagcctccggcgggcgggaagaagcgcgggcgcacggcgggggacaaggagcagaaccggctgaagcggctgctgcggaaccgcgtgtccgcgcagcaggcgcgggagcggaagaaggcgtacctgacggagctggaggcgaaggccaagggcctggagctccgcaatgcggagctggagcagcgggtgtccacgctccagaacgagaacaacacgctccgccagattctgaagaacacgacggcgcacgcgagcaagaggtccggcggcggcggcggcggtggcggcaagggcggagacggcggcaagaagcaccacctcgccaagagctagtgagaaacgagagagggagctgccttgcggtttggcaattcgattcaagattactgtacgctgccagctcttggagagaaaaaaagaagttttcggtgcatgtaaataaccatgcgcgggaaagaaaaacgtgataacaatcacacgacgtcaagcggcgagggtctgaattaaggtcatggttgtttacctctagtagattatataatacaacttaaataaagtaacgatctgtttaaaacctccttattatgttcattagtggattatataatttaaacagggactaag

SEQ ID NO: 201946 - DNA, 1559 bp, Zea Mays
caccctttctctatattttatgcacagggccactgcagactgcactcacactcactgtatgtgctgatgcttatctgagggagggattcgtctcgtctcgtctcgctctctcccctttatatgtacctgtgtgctccatgcctgtgtgcttttgcaatgcggctgctacactgaaagcagctggccggcatggtggagaaggcgtcgatcgaggacgtgatgaaggtgctgatggcgtcgcggaagcaggacctgcaccagctgtggaccacgtgctcccacctcgtggccaagtccgggctcccccctgaggtgctggacaagcacctccccatcgacgtggtggccaagatcgtggagctccgcctcaagtcctcgatgtcccgccgctcgccgttcctcgcgcaccaccacccgcaccaccacccggcggcgggcggcatggaggcctcgtccgcggccgacatcgacgagcaccacaagatccgccgcatgcgccgcgcgctcgactcctccgacgtggagctggtgaagctgatggtgatgggcgaagggctgaacctggacgaggcgctcgcgctgcactacgccgtggagaactgcagccgggaggtggtgaaggcgctgctggagctcggcgccgccgacgtgaaccacccggccggccccgccgggaagacgccgctgcacgtcgccgccgagatggtgtgcccggacatggtcgccgtgctgctagaccaccacgccgaccccaacgtgcgcaccgtggagggcgtgacgccgctggacatcctccgcacgctcacctccgacttcctgttcaagggcgccgtgccggggctggcgcacgtggagcccaacaagctccggctctgcctcgagctggtgcagtcggcggccatggtcatgtcccgcgaggacgcgcacacggcggtcaaccccgcggccgcgcccatgtacggcgagccttccggaggcggcgccgtgtacagcgcgagcggcaccagctcgagcatggtgaacctcagcctggacaacaggatggtgtatctgaacctagggatggacgcgcagttcggcaagatggacgacggcggcgacggtgatgacggcgggggcagagggcaagggggcccgccttctttgttctccccgcatggctaccattgacacaagctggccggagcggctgctgctctacgactatctctccttgtaagctttagaactaattaattacatgttgttattcatatccacattacaggagatgatgatgatggtgagataatccgtttggccctctatcatcctctgagccttttaattagcagagccgattagagagagatcacgcaaatgcatgcatgcagagtgatgcatcgtcatcacaagagtatgcatggatcttggtgagttgcctactccagttgttgtagcatgcggcgccgggggggcgttgtctgggacattttaagaggtaaaactgttcttttgttggtgggtcatcttgtgcattataatggtgaggcatccagaagaaaggttgacttgacagt

SEQ ID NO: 201947 - DNA, 2891 bp, Zea Mays
gagacttattttataaacttgatctcacaaactttctcttatttggtctctgtatgatggaattatgtcattttataatctctgttcattcagtcaatcgttgtgaactctcttctaatcgctcacttcattggctgtgttgtaccaagacatatttgcatggagtaaacaataacatcagttagccaaatcaaaaaatatattatacagagaggggagacaatcaataaaaaaatcttgaaatttttttgatggatagtttacgtgggtattgttgtaagccgtcacaacgcacgggcaaccgactagtattcacatcaaggacagctaatattttgaccaaaatctcaaggtacctgaacactgaagtagcatactattagcagtccggtgagtgaagctactgatactgaagacgcgggagaagaaaagacgcgtccagtcgtaggcgtcgtccgaacaagcgtgttcatgggccagagtgtgccaaatgagttctagctttaggcgagtcggccaaatgagtgtgggctccgtcccagggtagtataagtactatgagtctgtaataatcaggacaagaagaatttgggtaaaggaatacatctatcgccatcttcctgtcattctctcccacacgctactctcttctctgatcttctctccctcgaatcccagtagcatccagtagctaacatctgatatcagactagcgcaatccgggatcgtcatccgcgttcgattgctgtggtcggaatggaatccgcgatgcatcatattctggaagctttgggtcagatggaggagcgattgacggcaacgctggaaggcagatgcggcgcactcgagcaacgcaacacaacggccatggcgcatctgaggcgcggctgcgtcgggctgggcgatggcgcgtgcgcgtcagtggccacggccatggacaacttctccttcgactcgttcaagggccccaccactaccaccacctccgccgccgccgcgctacagtacgacaacgacgagctggtcctcgatgcagggcctattttcggtgaggaacctatcttcgatggagagtcgtctccgtccacgaggttcgactcgccctcgccgttcaacccgtactacttcacgctgccgcagacgccagctgagctggtggacgagccaaaccacaacgaggcaagtcctctgtctctcgtccacgacgactgggtcgacctcttcctccagaccggctcctgccccgagtgctcgcgatactgcctcctcctggaccacatggccctcggctacttcccctactctgagctcgccgccgtgcccaccaagtgttcaatgctggtcctcaaccgtggcaccgacgaagggggcaaccttcaattgcaacattccaccacctcacagctgcttaacagcgggtacctgttcgacatccggccggacctggtgaagggcgactctgtcgtgctgccactggaattcgcttccgccgtagagggtcgcgtgttgctgacgacgtggtggccacaggatgcggcgctccagcatgaggcggttggggtgtttctcactcactccaactggaactcctcccaagagagcctctgcgcgggggtgcccatgccgagcgttcgtgctccagcaggtgttgttcagtgctcgtcaacagggccacccgtgttcacgctcatcaacagggccaccggcctcgccatcaagcactcgctcggccagttccatcccatgctggtcccttacaacccggagtacctggataggaccctgacatcaagtttatcacacatgcttccatatgcaaagacattttcagctgctgatggacgtttgccccaatggcgcgcttctgagtatgatgttgaatcaagtttctctagtgatgccatcctaaaggtcagtgcggctgctgaaacagtcgagaaagtttaccaggggcaattggttggtccaaccacatttgcagcaaagttgcagccttatctttggagttttaatcaggtgaaagagaacatcctcttccagcacatcaacgttgcctgtggctactaccctgttggaaaggggtttgtgctggtagctgacaacttgggtgatggcctctttgctgtcagcaatgagtttcactcagtcatcgtcgtatcccagaatattgtggaccatatccggccaaggtttttcactgctaatctcaccaatgcaacctcaattgatgatgcgattgtttggttctgttctgcaaccaatgccacacatgctgtttcgaaactttaccaccgtgaggcgacgaaccagaggttgaaggtggcagaggcggccatgaggagccaggacaagaacgccatcatggcagacagctggtacctcccgcagaacgtcggggagctgtgggatccatggagctggaggaggaggtcgatcaccgcggcgctcgagcaggcggcggcgaacgagactatcgacagggcctgcgagatttcagatttgcacttgaactctttttttttaaaaattttgaattggcacgccgggacgcagaagaagactgtagagagatacgtacgcagtctcctaccacgacgatgaccatgacgcccggcacgcgcagagggcatcccacgaacacggagtacacgtcgatcatggccagcgtgcagctccaggggatgaccagccccatgatcgtcaccaggaagctgtttagcagccagcgtcacacacacaggattaggacgaccgcccgaccacacgttcgatcagcctgacggccttcagcgctggcgctgtggctgaaataccaaaacagatggcgcggatgcaacagagagaaggcacgtaccagaaggcggtgtagctgaagaactcgacaccgaccg

SEQ ID NO: 201948 - DNA, 2007 bp, Zea Mays
ttgtgtctcgcaacgtttgctctcgagtctagggtgtcttgtaatgccgccactcgtcttcttgggcgtgcatgcgtcttcttgggtgcagagttatcgcaaggtgggcgccaaacgctgggcaggcactggagaaactggagggacacgctggagggcgtcctacaatccactgctgggaagcagggctccggagggattcagagctgcatccgagctgcgctcagatttagtggttgccctcccacagaacatgggaacttagctcacgacggaggagcaggcagagatgaccctgttggagctgtacattctgaagagaatagtggtgccttggttcagttagaagacggaacagctgcacctttggaagccaacaaaacgatgtgccataatgctctctttgacattctgatctccgagaagtttgcgatgctgtgtgatctgctagctgcaacattccatgtcagtaagcctgacgatgtgattggtttgcaaataattgatgccaagatgagaaatggggattatgcacagaaccatgcgctgcttgaccatgatatcaagcagatatggaagaagtttgaacacgttggccaagaaatggctggtctggcaagcagtctctcagtgatttcacaagcttctcaccaaaagcaggcttctggtgtttcagaaattgatgtggctgaacacaagatagaagaaacaagcctggttggtgttgcccgcaaagccctaagggagttgactccccagtgcgattctggctattctacgataccaaaacgagctgggaggtctggatcggatggaatttgcaaggattgtggcagaaaggcagacagcaaaggaagaattatctgtgacagatgtgaagctgcgtaccatgtttcgtgtctgaagcttgccatcgatgaagaggccccagcaaaatggtactgtcccagctgcgttgagccagacgtagctttgaagcataaaaaccatggcaggtcacatgaaggctgtgatgtatgcgagtggctcgtggtgaagccagaagagcctgctgaagatgttagcgagcctgaactggcggtcaaaacgcaggagagctcagtgtcaagcatgggcgaagacagcgaaccagacctctcaacgactgctctagcgaacttgtgcaagaactgtggcacatgcgaagacgaggacaggaagttcatggtatgcgggcatggtttatgttctttcaagttctaccatgtcctgtgcctgaaagagagacagattgcaagcgagaagcagaagaatctaaagtgctggtactgcccgtcttgcctgtgcagacggtgcttcaaggacaaggatgatgagaaaatagtactgtgcgatggctgcgacgaggcttatcacatctactgcatggacccgccgtgcgagtctgtcccgagaggtaaatggttctgcacgcggtgtagcgcgcggaggtcagtgcaagggatgcagaggtatgagaagtcgatcctggagaaagtcaagcgtgctcctggtgccaatgggccgaaggtgcaggcatctgctggtccagaaaaataggcagcagtgtggatgatgtttcacaggccatactagggtagaagaaagggaaggatacttttgttcctctgagggagggggtatacattgctctggtagctttgaagaatcgatggatgggttgtgtatacgtggggggaaggaagatgccccgttggctgctgatgttgattcactgtgctgccatttcgtttttggaattcttgagtgtcgctcggcttgttgttgtgctgttatgttgtgtctgatggtaagtggcatcgcttatcgatgatatgtacatgcctgtaactcgttttcttttatttgttggacattgtgtgtgtgtgtgtgtgtgtttgaattgtgatgacctagagaacgctggtgtcaatcaatgcagcgtaccttgtttgcgcctaaatttggtagacaaaagaggagattacc

SEQ ID NO: 201949 - DNA, 544 bp, Zea Mays
agagcgctcgacgcctgccaactgaactcaacatcaacggtgaatagtgggtaggagtcaacgcccgcaacctgaagattgtcacactactgcgacagccaggtggtgtacggtgctgtcgataatcggatgtctagaagctgaaagctgctgccgcgacttcgacgtcttgtacgggaccacttcgacggtttcggatgaggcgacctgtatttcttcgcataatgaatgctgttgaggaacatgacaactattttgtgcagaagaggaatgctgctggtgtgctaggtctatcttctcttcaaaaggttgttgcggctttccgtatgttagcttatggagttccggctgacgctttggacgaatacattcgtattggtgagagtaccgctctggaagctttgcgaaagtttgtagtagctgttgttgaggtattcggaccagagtacatgagattgcctaacgaacaggatacagctaggttgcttgcaattggagcaagcagaggatttccaggtctcctatatttgcaaggcttgctgag

SEQ ID NO: 201950 - DNA, 759 bp, Zea Mays
tgccaactgaactcaacatcaacggtgaatagtgggtaggagtcaacgcccgcaacctgaagattgtcacactactgcgacagccaggtggtgtacggtgctgtcgataatcggatgtctagaagctgaaagctgctgccgcgacttcgacgtcttgtacgggaccacttcgacgttaatcatccgggacgaattggttctgttgaggggcacgcggtagtgcatcgtgacagactgttacaccatgctcttctttacaaagactatttctcagataatcctacgttcaattcaaagacttttagacggaggtttcggatgaggcgacctgtatttcttcgcataatgaatgctgttgaggaacatgacaactattttgtgcagaagaggaatgctgctggtgtgctaggtctatcttctcttcaaaaggttgttgcggctttccgtatgttagcttatggagttccggctgacgctttggacgaatacattcgtattggtgagagtaccgctctggaagctttgcgaaagtttgtagtagctgttgttgaggtattcggaccagagtacatgagattgcctaacgaacaggatacagctaggttgcttgcaattggagcaagcagaggatttccaggtatgctcggatccatagattgtatgcattggagctggaaaaattgtcctaccgcatggcacgggatgtacaggggacataaaaaggagcccacaattatactcgaagcagttgcatctaaa

SEQ ID NO: 201951 - DNA, 3306 bp, Zea Mays
cagctccacctttttcatcaatcgaactaacagcctgcaaccaaacagtactgcctctcggcggctagctagaaatgacgacgacgacgacgacgaccacgaggcattggctggaatcccagttcccaccgtcccgtccatggttccgtcgtccatccagccagcaacacctcatgtgcgaacccggttcagcggaatcgccatctccaaattctcgatccgccgcgtgcgctgcctgcggatatctccctgtccgtgtcccgctcccgccttgcttgctgctccaccaccgcactgtaggtgctgcctgcctgcctcctcctgaattattcttattcgttcgctattaattattagccaccgctatatccttcccttcctcgtcttcctcctcggagtcggagaggtccgtccatctcgatccgcggcaagtctgaacggacgactccgaagcttacttgccagagagccgccgtttaggtggcggcgatccttccgtggttccttctcggttctgcctgcctgctgctgcttcttcttcttctggcggggccgaatcgagagcgtgtccgccggaatctctcagtcatcaggcaggctgcagcctacggcggtcgattctactgggattctacactactcgctcaagagtcgagactgcatgcggctccaagggaaattaattaagatgaggtcttttccccacctgctgctgatcctggcgctcctcttggtcctggagaatgtccgggcgcaacccaagccacttctcatcaactgcggctcgggttcaagcgccgacgtcgacggcaggacgtgggtcggggacgcccatcccgacggcggcgccggcttcacggtcacattggcaggagccactgccacccgagctcgaaaacctgtcgacgaaggaggaggaggaggggacgccgcgtacggggagctctacaggaccgctcgcgtcttcaacgcgtcgtccgcctacaggttcagcgtcgccgccgggagctacttcctccggctccacttcagccggctcttcagcagcaacctcagcggcgacgccaccgccaaggaagcggtcttcgacgtcacggccaatggcctgaggctgctgtccaggttcagcgtcgccggggagatctactggaggaactccaggaccaactccaccagcgatgtcgccgtcaaggagtacctcctcaacgtcaccgccgcgaggccgctggaggtcgagttcgcgcctgacgccgggtcgttcgccttcgtcaacgccatggaggttgtccccgtccccggcaactcgatcttcggttcggtcaacaaggtgggcggggtggggctgaagggccccttcagcctcggagagagcggggtcgagaccatgtacagggtgtgcgtgggaggcggcaagatcgagaggaaggaggacgacccgcgcctgtggaggaggtgggattccgacgagcgctacatcttctccatgaacgccgctcacagcatccggaacacgtccagcatcagctacgtgtcgcgcgacggcgccgactcggtccccgcgccgctgcggctgtacgagacggccagggtgacggaggagaccttcgtggtggacaggaagttcaacgtgtcctggcggttcggcgtggaccccggcttcgagtacctggtcaggctgcacttctgcgagctggagtacgggagcgcggagcagcgcaggttcaagatctacatcaacggcaagaccgccgcggagaactacgacgtggtcgccaaggccgggggcaagaacaaggcgttccacgaggacttccttgacgacgacgacgccgcccccgcgtcggagaccgacacgctctgggttcagctgggctccgagtcctccgcgaccagctccgcggctagcgacgcgctcctgaacggcatggagatcttcaaggtcagccggaacggaaaccttgggcatccgacggttaggatcgggggcgtgagtggtggcctggaggacgacagacgaaagcggagccccaggtgggtgctggtcggcgctgctgcgggtgtggtgatcttcgtctcggtcgctgctgctgtttacctctgtttctatctgcaccggaagaaaaacacaaacacttcagctgctaataagaaaacgaagacgaagacgaaggacgacaaccttccggctacgacgacggcccccggtcttcgcgcagctggaacatttggcagctgcaggatgggccggcggttcagcatcgcggagatcaaagcggccaccatggacttcgacgagtccctggtgatcggagtcggaggcttcggcaaggtgtacaggggcgagacggacacgggcactccggtggcggtgaagcgggggcacgcagagtctcagcagggggcgaaggagttcgagacggagatcgagatgctgtcgaggctgcggcaccggcacctcgtctccctgatcgggtactgcgacgagcaggacgagatgatcctggtctacgagcacatggcgaacggcacgctgcgaagccacctctacgggagcgagagcgagagcgaccacctccccgctctgacgtggaggcagaggctggagatctgcatcggcgcggcgcgggggctgcactacctccacacggggctggaccggggcggcgtcatccacagggacgtgaagaccaccaacatcctgctggacggcagccttcgtggcgaaggtggcggacttcggcatctcgaagcacggcccgccgctggaccgcacccacgtcagcaccgccgtgaagggcagcttcgggtacctggacccggagtacttcatgaggcagcagctgacgcagagctccgacgtgtactcgttcggcgtcgtcctgctggaggtcctctgcgcccggcccgtcatcaacccggccctgccgagggaccaggtcaacctcccccgagtgggctctggagcggaagaggcggggcctgctcgagaccgtggtcgaccgtcggctggacggaggctacgacctggagtccgtcaggcagttggctgaggtcgccgagaagtgcgtcgcggatgagggacgggaccggccttccatcggtcaggtcctgtggcacctcgagaccgctctgcagctgcaccaagcgcatctgcagagctcatcagcctcagctgctgcgggtgatctggagccctctgatggcgcgtctgctagcaacagcatcaggcgcgccgaagaggcagcagaaaccgctggtcaagaacaggtaccacaggatgaggcgcatgaaggatgctgtgacgag

SEQ ID NO: 201952 - DNA, 801 bp, Zea Mays
tatgatttgtctgagctgctcatggcaagtaccagaaaactctgtttttgtgatgggagataaccgaaacaacagctacgattcacatgtgtggggccctcttccagcaaaaaacatattggggagatcaatttttcggtattggcctcctggtcgaatagggggtactaccaagggttgcttcagccctgaattaagccctggagcaaagccagaatcacttactgatgtcaaatcgacaaagtaggagattgagaagttagttttggtggtgcctgatgtgcaggggaagcttcggttattcttcgtggtagaatgtcacagaggaatcctgtgttgtgtggcaggtagttctattagaacccagagagcggaagacaatttgattctcattgagtcattgggattgggattggattggccagaaggcacagaaaccattttgtctcagggtttcttgtccttttgccttgctgtatacgtacgtattagggaaacttgataccatgatggctgacctagttaagctgcaaaaaagtatggttccactgttgaaatctagagtctggaacatgatgaaatccgcgtacagcatgacgcgcaagtacatcctgtaaatggagaacgtgtctattcaatgtgccgttgaacaacgcagagaaactacccggattacttacgctaccgcagaaaaagatggattatgttagattgcaattgcaggcgtacaattcagcctttttttaaacatttggttgtttttttcgggtgtcttcgttaagtgtttggaatagatctgtg

SEQ ID NO: 201953 - DNA, 2194 bp, Zea Mays
ctaccttccagtcttctcccctccctccagttcattcccatttcccaacccaaaccagcggctggcacggacgccggcgagccgcgcggcccggaggaccactgcctcctgcatatagccggcttccgcggccatgtcatccgtacacttctttcctgcctcctcccagaccccggtccccgcctgccttctcaaaacctctccaaagtcacccctcccgtgcccccgcacccttgccaccacctctctccagagtgttggcggcaattgcaatgcgtggcaccgcccgcacctacggctgcagcggagggtccgcacccctgcagcaccgtccgacgcgccgcctgtgggccccgatggcgggagcgggggcggcggcgcggggggagggagtggaggggaggatgaggaggaggagggggagaagaagaagggactgttgcccgagtggatgaacttgacaacagaggacgccaagacggtgctggccgcggtagctatctcgctcgctttccgaaccttcgtcgccgagccgcgcttcatcccctcgctctccatgttccccaccttcgacgtcggtgaccgcatcgtcgccgagaaggttacttactactttaggaagccatgtgttaatgatataataattttcaaaagccctccagtgctgcaggaggttgggtatactgataatgatgttttcattaaaagagtagttgccagggagggagatgttgttgaggttcatgaaggaaaactcgttgtgaatggtgagggtagaaatgaagaattcattcttgagccaccttcttatgacatgaatcctgtggtatgatttgtctgagctgctcatgggtaacatgtgaaattcctgtatacatgacttttatatgtttatgtttttctctgatatttatatacatgacttttatatgtttatgtttttctctgatatttatgtatgtagtatgaatgattctctatctcgcgacactttgtatgaccaacaaatggaagatacaatgattatgtttagttagacaacggactcccactcccagaagtcgcaggctcgcagcagtggctgcatcgttgtttggtagatgaatttataggttctgcaacctgcttttaatccatttcatgaaaaaatgcattttgagtggctcagtaccatgctatgccaaattatggataagagtaaactgatatattctgaatcatattaaccaacgaaaatagagttgcatctttcttgagagcacccacccaattgaatgcatatgcagcaacatgcacagataaaatgttttataaatatggtttcttctgctcggtagaatgtatttttcaaatccttgtaaaaaaagaatgttaattttcatgttttgtcttttgttttcttaaccatcttgatgcagcaagtaccagaaaactctgtttttgtgatgggagataaccgaaacaacagctacgattcacatgtgtggggccctcttccagcaaaaaacatattggggagatcaatttttcggtattggcctcctggtcgaatagggggtactaccaagggttgcttcagccctgaattaagccctggagcaaagccagaatcacttactgatgtcaaatcgacaaagtaggagattgagaagttagttttggtggtgcctgatgtgcaggggaagcttcggttattcttcgtggtagaatgtcacagaggaatcctgtgttgtgtggcaggtagttctattagaacccagagagcggaagacaatttgattctcattgagtcattgggattgggattggattggccagaaggcacagaaaccattttgtctcagggtttcttgtccttttgccttgctgtatacgtacgtattagggaaacttgataccatgatggctgacctagttaagctgcaaaaaagtatggttccactgttgaaatctagagtctggaacatgatgaaatccgcgtacagcatgacgcgcaagtacatcctgtaaatggagaacgtgtctattcaatgtgccgttgaacaacgcagagaaactacccggattacttacgctaccgcagaaaaagatggattatgttagattgcaattgcaggcgtacaattcagcctttttttaaacatttggttgtttttttcgggtgtcttcgttaagtgtttggaatagatctgtg

SEQ ID NO: 201954 - DNA, 2653 bp, Zea Mays
cctcgtcagcatctacctcacaccaaaacaaactcatccctgaatcccgcaaacaccatagcagatctccgtgttgctcgcgtccattggatgcgctcgggttgctggggttcgacctccctataaagcaaggcaccgtgatttcccctagcatcccacctagccgggacctgagaacgaagagagagcgaggaggatccgccgcgagctcctctgcatctcaccggtaatcagccaatcattgaggccaagaaggggggttcgctagggagtgcacggacactggatcaaggaagacaaacagaagattcaataatttctagccgaacttgggtttcgtcaccggtccgtcccgcggcatggcgaaatcgccgccgcggccatctcatgtgcacaccgctgcgccacccatggagagctactagggatctttgccattggttctgggtcctgcggctacctttctggggtcgaatgggacctcgagtggtggatgattgctcgccggaatcctaggggtatcaccggccgcaccacgccgttgccaggcttccccacgtctacgccacagatcgcaaatgcatgtgtaatgttcaaggccgaagaccccaaggataagaagttttcatacctgcattgctggaaaatcttgaaggacaagcccaagtggatggataggcggaaggaaattggaagtgcaaaaaaatcagccactaagaaacagaagacaacgacaaattcttctccagcatcaattgcaaatgcaattgtcgtagatgcccctcttgggggtgctgatcatgatgaaccatcatgcagacccgacggtaagaagaaggagaaacaaaagctacgacaacgtacgtccatggaagttgtagactatctaattgcaaagaagaaagattctgaccttgaaaaggacttgaagaaagaggagaggtgcaataaagcctttgctctacaagaagaaaggatgaaattggacaaagaaaagtttgcgttccaaagacagctcgaagaagacagaataattggtttggaccttagcaccatgaactataaacaacggcagtattatgaagatcgtcagaacgagattcttgcaagacgtttcaatatctagaattttctagttttagttaagtatgctttgtcaacaaacttgttttagttcaacatttcatctaagtaccatcttgttcaagtttcagtttgtaatggtttaaaggtcatgaatcaacttccataagcatgtaataaattaatggcttcatagtccaagatgatttttgctgctagatttttctattcgcagaatttcctttcccttttgcttgacaggggacatcgcatggtactcaaaaagggactgaattttttcaagtttcgtgtagtggactgaataaaagtttggctaaatctgctccatgtcctagaatgttgcaagagcagcatgagttaattgatcagaatgacagtggcccaatttccatgtgtactcttatctcagttttcaaaaactggtttataaaaaaaaattggagtggctgtttggaagccagtttcctttcccttttgcttgacaggggacatcgcatggtactcaaaaagggactgaattttttcaagtttcgtgtagtggactgaataaaagtttggctaaatctgctccatgtcctagaatgttgcaagagcagcatgagttaatcgatcagaatgacagtggcccaatttccatgtgtactcttatctcagttttcaaaaaccggtttataaaaaaaattggagtggctgtttggaagcgagtttctagaaactggtttgtaacttcttaaaattgaaaatgacaagctcatgtgtgacgattcagatcagatgcaaatgcttgtctgaattctgaaaaaggctctgcattactattgaaaagtcattcttaagaacattgccagtcatgaatatattcctatgagtgtggtgatctatttgtcttgattctgaaaaaaaggctctccaaacaggtgaactcactgccatcactatgattatcctggtaagagctgtaatcatcaatatcactgtcatcatctagtccactgaagtggtagtcgatgtgctgcttctcagcagcagctgctttgacacaaggctctccacacaggtgaactcactgccatcactatgattatcctggtaagatagttgtagtcggtaccaattttatatcactcagaatggttcatctagtcaaacaatgctttgacataaagtagataaaaataaataaagagcacattaaactcaactgaaactccaaacaatgcttcatctagtcaaacaatgctttgacataaagtagataaaaataaataaagagcacattaatcaattttatataactcagaatggttttgccacaagtgctcgatcaggtctgccttaagctgatagtgggtttccttgttcttgatatttttgtatttttgaatgaatgcatcgagttcaggtgaagaattgtgcgacactgtcaccctttgtcccatgtcgtcgtagttgcaaagatattgtcccatatcgtcgaagttgtaaacttgttctcctccatactcatcacgttcgtcttcaacaatcatattatgcagtatgatgcaag

SEQ ID NO: 201955 - DNA, 2517 bp, Zea Mays
gatgaagttgagatacctccatttgcgttatgttgacatggtaccatggattctgggtattacacaaatctcctagttaatggtattgaagaatctcaagcaactcgtggtgatgtaagaatacagcatggtcgtgcaacagccaagagttctcagggtagaagcaaaaattttagagatgaggaggacattcttcttgtgtcagcttggctgaatgtgggcatggatcctattcaaggagttgatcaaacacatggcacactatggagaaggatacatgaatatttcaatgcaaacaagaagtttgactcaaatcgttctgaagtatctttaatgaatcgttggtccggtatacaacatgatgtgaatctgttttgtggatgtctgtctagggttgaggctaggaatcatagtggttggtcaattgatgacaagatcgcaaatgcatgtgtaatgttcaaggccgaagaccccaaggataagaagttttcatacctgcattgctggaaaatcttgaaggacaagcccaagtggatggataggcggaaggaaattggaagtgcaaaaaaatcagccactaagaaacagaagacaacgacaaattcttctccagcatcaattgcaaatgcaattgtcgtagatgcccctcttgggggtgctgatcatgatgaaccatcatgcagacccgacggtaagaagaaggagaaacaaaagctacgacaacgtacgtccatggaagttgtagactatctaattgcaaagaagaaagattctgaccttgaaaaggacttgaagaaagaggagaggtgcaataaagcctttgctctacaagaagaaaggatgaaattggacaaagaaaagtttgcgttccaaagacagctcgaagaagacagaataattggtttggaccttagcaccatgaactataaacaacggcagtattatgaagatcgtcagaacgagattcttgcaagacgtttcaatatctagaattttctagttttagttaagtatgctttgtcaacaaacttgttttagttcaacatttcatctaagtaccatcttgttcaagtttcagtttgtaatggtttaaaggtcatgaatcaacttccataagcatgtaataaattaatggcttcatagtccaagatgatttttgctgctagatttttctattcgcagaatttcctttcccttttgcttgacaggggacatcgcatggtactcaaaaagggactgaattttttcaagtttcgtgtagtggactgaataaaagtttggctaaatctgctccatgtcctagaatgttgcaagagcagcatgagttaattgatcagaatgacagtggcccaatttccatgtgtactcttatctcagttttcaaaaactggtttataaaaaaaaattggagtggctgtttggaagccagtttcctttcccttttgcttgacaggggacatcgcatggtactcaaaaagggactgaattttttcaagtttcgtgtagtggactgaataaaagtttggctaaatctgctccatgtcctagaatgttgcaagagcagcatgagttaatcgatcagaatgacagtggcccaatttccatgtgtactcttatctcagttttcaaaaaccggtttataaaaaaaattggagtggctgtttggaagcgagtttctagaaactggtttgtaacttcttaaaattgaaaatgacaagctcatgtgtgacgattcagatcagatgcaaatgcttgtctgaattctgaaaaaggctctgcattactattgaaaagtcattcttaagaacattgccagtcatgaatatattcctatgagtgtggtgatctatttgtcttgattctgaaaaaaaggctctccaaacaggtgaactcactgccatcactatgattatcctggtaagagctgtaatcatcaatatcactgtcatcatctagtccactgaagtggtagtcgatgtgctgcttctcagcagcagctgctttgacacaaggctctccacacaggtgaactcactgccatcactatgattatcctggtaagatagttgtagtcggtaccaattttatatcactcagaatggttcatctagtcaaacaatgctttgacataaagtagataaaaataaataaagagcacattaaactcaactgaaactccaaacaatgcttcatctagtcaaacaatgctttgacataaagtagataaaaataaataaagagcacattaatcaattttatataactcagaatggttttgccacaagtgctcgatcaggtctgccttaagctgatagtgggtttccttgttcttgatatttttgtatttttgaatgaatgcatcgagttcaggtgaagaattgtgcgacactgtcaccctttgtcccatgtcgtcgtagttgcaaagatattgtcccatatcgtcgaagttgtaaacttgttctcctccatactcatcacgttcgtcttcaacaatcatattatgcagtatgatgcaag

SEQ ID NO: 201956 - DNA, 1758 bp, Zea Mays
gacggcccgctggccttagatgtattgggcccactggcctcacaggtcatatccggcccatgtggtaagactcgaaagctcgaagcgaagcctccctgactacagagaaccggaggactgaggaggaggaggagacgtcacgcctgcgcggctgcgcccaccatggacgaggaggagttccggcgcatgctcgacctcttcccggtcgtccgctcccgagactactgctgcgtaaacctcctcctcctcctcctcctccagccctcgtacccctctcctttttccgtctgcctgtgccgctaagtcccgggctctgatttggggacctcccgaagttccatggagccgcgatctgtggcttggaagcgtagaactcgattgggaattcggggtagcatagaacaatctgcctttctaccggttccagtgatcggatctcctgttgccacacacatttgctggtatagtgcagctccgggtttcgaaatcaacttgatgtttgtttgcagaagtggttgcggtagaggcccatgtagcctttgggggatatataaaaagatgatggcacattagcatcctttgacggaatttacgttactccttttgaaggatgcagtactacaaacaacgaagaaagaaaaacatatccatgttccctgaacagactagtttttctccccttcttttgggtaaaggggactgcccattttctccctttattaacgaagaaaggccctgtagaatgggaaggatacatatcctaatagaccttcccgacaattgctgggaatgcttctaaaacggggttccaggtttagtctattgctcccagcccctcaaaataagcaggctaatattagtcttatactgagcaggctgctgttggcctcttaaagtggggcaaatattagtgacaaactttcaggtagagcgtgacaaagtcgtcgtcatctctgtattgacctacacatagtcctgcaatgtcatgaatgtctgtttctatttgagtccaaggtttgtggttgcgagagtattaaatgggggcatggccgaaggggacagtggctgcgcatttatctaaatagaaaagcgggttgaaccagaacaaagagcaatgtgtttgatatggaatcataaggaatcgtattagatgtccctttgcagaagtaaccgaataaacatgtccgatcttggaacatccagcagaggaaccagacagcgatcacgagttcaggaggcaactaagggcgataataaggactcgtccggtggacgagatatgtttatgcagaaattgaagatggctgcggagaataagattggagcgacaaaggcagagttcttctgcaagacattcgaagaagttcatgagaaacttgttcacagagagctgaatttggatgctgctaagaagttcctgagcgcatatgagagctgatgatgaacaataggtagatgctgttgagcgcatactgataccgcctgattggttcaccgatcgcccgtagccagctcgtatgcagccaggctgtccagagactgttatttgggccgtagaagtggatgcactcaaaataaatgttgcgtttactcgtgcagcctcacgtcttttacgtgcatgcaattaaacatatgctcaataaaatcaatgcatgtgatggtttagaataagaatatgggggcaaccaatcatgatcggactgatattgttatcgatgaacatgtaccaatctaatagcacaccacacacatagcggg

SEQ ID NO: 201957 - DNA, 2858 bp, Zea Mays
agcaaactttgcctgccattcactcgcacgtacccgtcggaccacgcgtggtggccggcacattcctcctcgcccggcccttatcctctgcccaactgcaacaggagagaagcgatgcgatattcctgttctgtaacagatcgaattctccagcatcttcagttgtgcggttgagctgagtggtcagataatccatccattccttttacgttgcatacatgtccaggttgagcttccacatgttctttattaacagtcacgatcagcgtggagcagcgtgtggttacgtgcaccagtttagcttagcagctgaagaaaagcaacgagacatggggaggatgagtgtgcgacgcgaggtcaaaagcagcaataaccatggcgagcagaaagaaagcatttcgcggaaaagaaagaatcaccccgtcgtccctgcagtctgcaggtgcggtagcggtgccccgtctccatccatcgcaaagcccccgggctttcgatcccgtcccctgcttttgttcccgcccgccagattccttccaacatcccggctgcactgcactgcaccacgactccacgagctgaggtgaaaagcaagcgagaaacgcgccgccccggggaggaggcgaggggtgagtcgggtcgggtgtgccgtgcgcgcgcgtatgggaatggcatgatcgtccggcggcgcgtggactccgtggatggataacggggacaggtcgggcgctggcgcgggcgccgtcggcagcgccggcagcctcggtctccgcgtcgggcaggcggtcttctcgtcggcgtcgctgctgttcatgtcggtcggtgtcgagttcttcagctacaccgccttctgcttcctggtgacgatcatggggctggtcatcccctggagctgcacgctggccatgatcgacgtgtactccgtgttcgtgggatgccctctgcgcgtgccgggcgtcatggtcatcgtcgtggccctgtcgatagtctcgttcgccgccgcctgctcgagcgccgcggtgatcgacctcctcctccagctccatggatcccacagctccccgacgttctgcgggaggtaccagctgtctgccatgatggcgttcttgtcctggctcctcatggccgcctctgccaccttcaacctctggttcgtcgcctcacggtggtaaagctgcagcaggccacttttttttttgtttcgtagatagcgcacataatttggctttggagagcgtatgtgttagctactggatgctactgggattcgagggagagaagatcagagaagagagtagcgtgtgggagagtgggagagaatgacaggaagatggcgatagatgtattcctttacccaaattcttcttgtcctgattattacagactcagtacttatactaccctgggacgcagcccatactcatttggtacactctggccatgaacacgcttgttcggacgacgcatacgactggacgcgtcttttcttctcccgcgtcttcagtatcagtagcttcactcaccggactgctaacattccctaccgcttgaaatgcggcttgcccccaagccgctgatagtgtagacaatgattgatgactctacttcagctttcagggattagcactgattaccccatagtttgggtgagtgagagacaagggcagtactgatgctggccttacaggagaaactcagcagccttgagttgttggttgggtacctttagaagctatgtctcccaatctgagaagatgacctggtgtgaaatgagcaaagattgtgtgagtaatactgaactggtgcccttttgtcaagaccgtagccaatatcatcaacagcactggccttctcgttagccaagagcaggctattgacactcgtgagccatgagttgcaaatcaagagaaggttagcaccgtcttgaccaccattttctttagatggacaaaaagaatgctccacggctaaatcactcaagtctgctcctgcaatgatattcttttcaagatcaaccagaagcatgacatccttttcttaagcacgacttgaatattgcaggatgggtccattcacggccagtgatttaatccaccacacccaagctgcataacagtaaaaagatggccatggcataggtctgacttgaacaccatcaccgaggagcaccgactgcacatgtggtggccatggttgcttgtacgacacgacatcccacccacactcggatggataccagatgttgcactgtgtaatcgtgtcctgtatcgtaaactgcataggtggcggccatggtggctttatatgcattagatccaaagcaaaaaaataataattctcagacactttcgaaacagcatgtgtggcattggttgcagaacagaaccaaacaatcgcatcatcaattgaggttgcattggtgagattagcagtgaaaaaccttggccggatatggtccacaatattctgggatacgacgatgactgagtgaaactcattgctgacagcaaagaggccatcacccaagttgtcagctaccagcacaaacccctttccaacagggtagtagccacaggcaacgttgatgtgctggaagaggatgttctctttcacctgattaaaactccaaagataaggctgcaactttgctgcaaatgtggttggaccaaccaattgcccctggtaaactttctcgactgtttcagcagccgcactgacctttaggatggcatcactagagaaacttgattcaacatcatactcagaagcgcgccattggggcaaacgtccatcagcagctgaaaatgtctttgcatatggaagcatgtgtgataaacttgatgtcagggtcctatccaggt

SEQ ID NO: 201958 - DNA, 1421 bp, Zea Mays
tcgccagttggtcgtccttgttccttggcaaaaaggaccttgattctgtcgttggcgataccatggatgtgtcctacgagaagtgtgctgatccgtcgaactcggacctgcctagcgctgttgttgatgctgagcgatacgacgatggcggctccgaacacctgggatctgctgtagtagagggagctactggaaacgaagggaattcggggaccgaaagttccgagcagactggtgatgagcgcgctggaggaggtgaaggctctcctgttgatgtcgaaaacagcgctgataaacaagagagccaggagacgacggttccgatggaagaaacagaaacgagcgacggcacctcgatcacgtcgatggaggatgccctggaaccgaaccgtcatcacgatctcccgtcggagcctgaggatgtgggcaaccacactcctgatcctgatcagtccagcggcaagaactccaaaggaaacagtagcgtgttccagagcgcaaggagggtgctggcttcaaccaataagaaaactccatctgcaactgcacggaagccactgcagttgactaacagaggtaaccaggatgacgcgaaatcgtcggctggaaaggccgccacggttccatcaggcccggttttccgctgtactgaacgggccgagaagcgcagagaagtatgtgacgctgggcaggaggaagacggcctcgacctccatggagacgtccaactcgtcgtcggagagcgagggcacgaggccgtgctgccgcgccagccgcgacggcctcgacagcagctgcagatgcggcggcaggagcaggccgcaggccgcgaacgccaagccggccgccgggcccaagaagccgccgccgcagcagcagcagccgaaacaccgcgcccacaagatcgccggcgagggcgccatcaacatcgccgtgcactagccgccgccgccgcttcttgaaacttctttccggtcgcatgcatgcaggacgatggcgatggcgtgcggattttccttctaagttatgagagtgctttgtcggcttgtggatttggtgtagataataatataagttatggtgacgacgaacgaacaggggctgctgccacgagtgaggccggtcagtcagacagaggtggtggtgtttattgcttgcttgcttgtttgtctgtttgtttgtttatttatgctaatcttatttatttaatctgctgtcgaggatggcctgcgcattgccactgtgcagcgctgcttgttttttcgtcttcttaatttatggggagtggtaagagagacttgagcgctggatgtaacgtgtacaaacgaaaacgaaggcttgctggtggtggtgatggaggattttatctgaactatgctcactcgctgcatttctattgagttcttcaagagcttgctaaa

SEQ ID NO: 201959 - DNA, 1109 bp, Zea Mays
ggaacgctggtccacggggatcggagcccggtagcaacaggcataaagcaccagcaggcagcaggcctaggagggccccggcccgggggtgcgctgtgtccacgtggcgttcaccatttcggcagaatccgatggcgcgcgctcctcattggccggcgctcaatccatccaaccgccgccgagatttccttcccgcgggcggatcaaaacttgtggctgccccgtgccgcggcgccgctattaataaaaaatctgacgacgtcctccttctcctgctcccttcaacggacttgaccactaaaagctaagcacacccccggccatggcgctcgcgtccacctccgccaccgcgcccgctgccgtgctcaagaccccggcgccatcgcgcccttctccttcggctcgctgctgggcacgcagctgctgctcatggggtgggtggagtcgaagcggtgggtggacttcttcaacccggactcgcagtccgtcgagtgggccacgccctggtcccgcactgccgagaacttcgccaacttcaccggcgaccagggctacccgggcggcaagttcttcgacccgctcggcctcgccggcaccgtcaaggacggcgtctacgtccccgacgtcgagaagctcgagcggcttaagctggccgagatcaagcacgcccgcatcgccatgcttgccatgctcgttttctacttcgaggccggacagggcaagacgccgctcggcgcgcttggcctatgatctgcatgctgccgcccacgacgtgtgtcgtatcatcagtcatcctgtttctcgattgcgagcgtcgtggtacggctgcatcggatcagacgcatccaacaaaatgggggagttttttttttgttcttcttcttccgtgtatgtaccatgtagtgtatagtagtctggatcgattcatgggaccaattaaggcagaatgagtgagcgagggacatttcgttacattaatctctcattccgccttgctgaattactatcgtctttcagaaacatggcgatattcctccgaagaccaattcatgaatcactagaaattcaaagttaacacggtaagatctagatgactaaataaagataaa

SEQ ID NO: 201960 - DNA, 1047 bp, Zea Mays
agagatcagaaagaggccagaggcccaaccttatatccagtgtctcgtgtgtttcttctgtcgtgcttaagggaagggagacgagttctctacatcttcttgtgcctctactgctgacgggagggaagggagcggatctggtgatccgtggtaacgtatctcttgatattggatcgcacaaattggaagaccaacatgctgacagctctcttggttccttacattttcttcaccctgcctaatgtgctgttttctctgatcagaggagaggtggggaaatggattgcgattattgctgttattctgcgtctattctttccacgacacttcccagattggttagagcttcctggttccatcatcctgctcacagtggtcgcccctagcctgttcgcggacagcttcaggggagacctcgttggtgtcttcatatgccttgtgatcggatgctacctgctccaagaacacatcaaggcgtcaggtggattcaggaacgccttcaggaagggcaatggtgtgtccaactccatcggcatcctcctgctcttcatctaccctgtctgggccggtgtgctgcaagtcctgtaggcaccattgcctcagtgtttcccctgtgcggtccagctccgttcccgttcgtgcccgtgcaaatgttccctctatggtgatccgtgatcctgtgtcacgagtaggtgatgtttttatgtgtgcttgagttgatcggttgggcatgttgccatgttggtggacagttttgtttatctcatttgttgtagttcgatgtcagcatttggttcgttcgagtacataaacgccaataaaatcagtagccgtggcttgatgtagattgagatgttggtcatattatctcgtgtaaatccctgcgtctcttctgttatagtgttatgcaagctagaggacgcatgtttatatgtcaactaattattttctatatcaacagcatcatccggtgttatttctgaatatggtgccaactagtgacaaaaccgtgaaacatcaaccggccggagttgagaacgatctggg

SEQ ID NO: 201961 - DNA, 2290 bp, Zea Mays
cttttttagaaactcgtcaccgtccaccattgcgatttgctagcctcggcgcgtccagaccgcgacggcattggcatgaggggaggaggagccggagagaagctccaccacaaggaggccaatgccgcgcacggcgccggcgccggcgccgcggggaagggggccaaggcttgtttcgtcaacggcctcctcctctacgtcgtcctgccggtgctggtcttgtacttcgtcatcatcgccgcctcgcagttctacaaccctcggtgctcgccggagggcaaagccatggcgacgcatttcgttgtggctaacaagcccaacgcgtcgttgaacggatcgactcctccaccagcgactctggcgtcgtccaagacgaggccgacggcagaagaagcgcccaccgggctgcgccatatcgtgttcggcatcggcgcgtcggcgtcgctgtgggagagccggaaggagtacatcaagctgtggtggcggccggggcggatgcgcgggttcgtgtggatggacaagcccgtgggggagttctactccaagagctcccgcacggggctcccggcgatcatggtgagctcggacacgtccaagttcccctacacccacggcgcgggcagccggtcggcgctccggatctcgcgcatcgtgtccgagacgttccggctggggctccccggcgtgcggtggttcgtgatgggcgacgacgacacggtgttcctgccggagaacctggtgcacgtgctgtcccagtacgaccaccggcagccgtactacatcgggtcgccgtcggagagccacatccagaacctgatcttctcgtacggcatggcgttcggcggcggcgggttcgccatcagccgcgcgctggcggaggagctggcgaagatgcaggacgggtgcctgcaccggtacccggcgctgtacggcagcgacgaccgcatccacgcgtgcatgtcggagctgggcgtgccgctgacgcgccacccggggttccaccagtgcgacctgtggggcgacgtgctgggcctgctgggcgcgcaccccgtggcgccgctggtgacgctgcaccacctggacttcctggagccggtgttcccggcgacgccgtcgcgggccggggcgctgcgcaggctgttcgacgggcccgtgcggctggactcggcggcggtggcgcagcagtcggtgtgctacgaccacgcgcggcagtggacggtgtccgtgtcgtgggggttcgcggtgatggtggtgcgcggggtgctgtcgccgcgggagatggagacgccgatgcgcagcttcctcaactggtacaagcgcgccgactacacggcctactcgttcaacacgcggcccgtggcgcggcagccgtgccagaagccgcacgtgtactacatgcgcgggagccggatggaccggcgccggaacctgaccgtgacggagtacgagcggcaccgggcgaagcaccccggctgccggtggcgcatcgccgaccccgccgcgctgctcgacagcatcgtcgtgctcaagaagcccgaccccgacctctggaagaggtcgcctaggaggaactgctgcagggtggtgtcgtcgccgaagcaggggaagaaccggtcgatgaccatcgacgtaggtgtttgcagtgaaggcgagttcgccaaggtttaactaatccatagggggacggattgtttgattgattaggagagggaaagaggaattgacggcggcagaagaggtcccggaacaaacagcagggagagctaaaataggctattagtcactagtcacagcgtatccagcagcaggtcgatcgtgtctgaaacgctctctgtctccgtgtacgtgtcgacgcatctggcgagtgcgccgttttgagttgactgcaatctgtagtaacttggtgcgtggtttagtcttagtgtgccggattgctgggatggtttgtgtttaagtagcaaccagcttgtggaatgaaaactctatacgaagcagttatatggcgaattcgatttcatgtgctgatgcaatgtgttcggtaactcaatggcggcatcttcagtttggtgattcggtggaggctcgggtcaaatttagttctaaatcctcttgggatctctatctttcccaggctgatcaatctcaaggagtattatttaaataagatatttagttatttatagaatatttagttattatagaatattttttgtaaaatggatttgcccccttccctccaaactattccttagagatactttaggagccagaaaaccggagtatgttgaag

SEQ ID NO: 201962 - DNA, 918 bp, Zea Mays
ccgattccttcttcagtcttctttagattcatcagtgttgccttcttcaccgtagcagatctagtaacgctgacattgtggtcccagagtggtgccttggcagacctgaccagctagcaaataggcccagccaactccgatcgcaccagcacctgcaccactgcaccagccgcccgcaacccgcaaagctgcttcccggactagctagggtttcgtgtacgccgcttgatctagtcctctctcccggcacgcgagggcgcagcgttgatggcggcggcaccggcggacgctaaggcggaggccgccaagatggacctcctcgaggacgatgacgagttcgaagagttcgagatcgaccaagaatgggatgaccaggaagaaggcaacgaagccgtccagcagtgggaggatgattgggatgacgatgacgtgaacgatgatttctcgctgcagcttaaggaagagctggacggaagcaacggccagaagagctgaagtattatttctctactttatataaatgatttttatatggcagctacttttggaaccgttgatgtgctttggatgtgaaagtttttggacatcagtcggcaatttgacagcactgtacgtgttagttgtcgttaggatatgtctctagccgaaacgctagaatccgccacaatgtctacgccccaactgtttctcttaaaagagtgccgcaactgtttttgtacctacgcccgacctcgttctttagcagtaatccaacagttctgtatatccactcctaaaacctccgagctaccaaatgaggattgcttgcgtatctttcccttacaatcacggtttagtggatgaaaaccgatcttcccgtgcgataacactttggttcacggtgaatgataacgtttaaccatgtttgtaagtccaacc

SEQ ID NO: 201963 - DNA, 4079 bp, Zea Mays
gtgcttcgcgcgtgcggctgatagaggaaagaaacccgaaacccttgtggtcgtctcggcacccctctccgcttcgaaacccccgacgcgaaggaagctagggaaccctcgcgagtcgcgttgcctcgcccccgtccccttcagctggcccgccgccgcctcgaatccgccctggctcggagggcctcgcgcccccacggatcggattctcgaggttggtggatttggggctagggtttggggattgactacaatcgtggggttgtttggcgtaatttgaggagcaatgtacaacatggttaggaagtggacctgaggaggacggagggatggtggcgatggagggtaagggggacgcgtcagtgacgccggtgaggactagtgaccggctgcggcagcgtccaaagtactatgctcgtggctatatgtactacaatccagccatgaggaagaaggttaagtctaagaagcgaactgctgcatcacagattgctaagaaactgcttcgcaagccagctgcacggccaccacctgccgattgtgttgcagcaaatttgcgccgttcaacgagaaagcgaaggatttctgtaaatctggagggctatgatacagatagttccagtatggaagatgacgatcttatgagacctagatatcgatcttcaaagagtaaggggggaaacaatgctgcacataatgaagtgtcagctagaccaaagcgccagaagttgtctaactccatacctcgtcgtgaaggtttacggcctagaagatctttgcgaggacaaagactgcatccataccatgaatctgaggatgaccaggaaagctctgatgaacaaggtgcagaagatcaaagagaaaatggcaatgagattgaagaggatgttggtgatgaggaggaggttgatggaggtgatgaagctgaaggagatggagatgacgaagatggtgaggaagagcaagaaggaaggaggagatatgatttaagggaacgttcagaggttcgtagaccatcccctcgtaaggaaggaaagcacagaccacaatctcctcgtagagtactagttcacggaattggtccaaagaacagcaagtatttaaaaaaaggtgggtcgcgcatgcataagcgccctcgtttctctttgccagatgattcagatgattcccttcttgtggatgagccggacgagggcccatccatgccatggatgcgcagtgggaggggaagtatgccatggttgatgggtgggttggacatgcatagtccagcagcatggggcctgagtgttggagcatctggttggggtcatcagggtgacacttctacttcactcatgcctggggtgcaaactgctggaccaagttctaagggaggagccgacattcaacctctgcaggttgacgagaatgtgagctttaaagatataggtggactttcggagtacattgatgctctaaaggaaatggttttctttccattattgtatccagatttttttgcaaactatcacatcactcctcccagaggtgttctgctttgtggcccaccaggcacaggaaaaacattgattgcccgtgccttagcctgtgctgcctctaaagctggccagaaggtcagtttttatatgcgcaaaggagctgatgttcttagtaaatgggtgggtgaggctgaaaggcagctaaagttactttttgaggaagctcaaaagaatcagccgtcaattatattttttgatgaaatagatggcctggcacctgtgaggtctagcaagcaagagcagattcacaattcaattgtttcgacattgcttgctttgatggatggccttgattcacgtgggcaagttgttttgattggagcaactaacagaattgatgccattgatggagcattgcgtagacctggccgatttgatcgtgagttttattttcctttacctggctatgaggctcgagcagaaatactggatattcatacaaggaaatggaaggatcctccaccgaaggaactaaagatggaacttgctgctagctgtgtgggctattgtggagctgatttgaaggcattatgtacagaagcagctattagagcatttagagagaagtatcctcaggtctacactagtgatgacaagtttgtcattgatgttgattcggtcagtgtcgagaagtaccactttttggaagctatgtctacaataactcctgctgctcacaggggatctattgtgcattcaaggccactttcaacaattttagcaagttctctgctctctcctatggatcttccatccctcttgtttatagacctcgccttttgatatgtggtggtgaaagtgtcggactggatcatgtgggaccagctgttttgcatgagcttgagaagttctctgttcactctttgggactgccgtctcttctctctgatccaagtgcgaagacacctgaagaagctcttgtgcatatctttggggaagccaagagaacaaccccgtccattctatacatacctcagttccatctttggtgggatacggcacacgaacaactaagggctgtgttgttgactctgttgaacgagttgccctccaaccttccagttttattgcttggaacatcatcagtggtttttactgaccttgaagaagagtgtgcttccatattctcttctcgcaatgtgtatcaagtggatcaaccaagttttgacgatagattgaggtacttcagtatattgtttgagtcattgctctctttccaaatggaagaatcaagaaacaagtcaaagaaacagaagtctgctattgaccttcccaaagccccgaaagaagtggagggccctaaggtttctgagctaaaggctagggcagaagctgagcagcatgctgttcgtcgaatgaggatgtgcctccgagatatctgtaatcgcattttgtacaacaaaaggttcaatgtatttcacttcccagtattagaagatgaggtgcctgactatcgatcaataatccacaagcctatggatatggctactgtcttgcagcgggtggactctggacagtaccttaccagggcagcatttataaaggatattgatcttattgtctcaaacgcaaagacttacaacggggatgactacaatggatctaggattgtcagtagagcatgtgaactcagagatgtggtccaaggcatgttgtcacaaatggacccatctttggtgtccttctgtgataaaattgcttcacaaggggggccactgcaggctgtggatgatgaagatagagctattcttcaagcagcacctgttgctcagctggtttctggtactagaataagtgcaaggcttcgaaatgtacagcctgaagtaaacctgtcacaaagttatgaagtgctaaggcggcaaaagaaaagtgcagaaaatgaacaaagcatgactagagatgaaaagtctcctgaagatgtagatttgtcgaagccaactgacgcagaagaagctgcaaaagaaccagagtcaaatggcactacgaaagaagccaacgattcaccagccaaagaaccagaagtatctacttcccctgaacccatggagagtgacaacggcaaaattgccgcggctactggcgacgacttgttagaacagctagaagccctgaagcaacgcttcatggaactcactgcaagctatggcgtgccgcagctcgagaggctgtattccaagataatgaaaggagcaatagagttgacaagtaaagaaagcaacgaggatcataggcggttagtagttaggtatttgtggacattcgttgagaacagcaacaatttttaacctggcgccaataagattcttgttttccttgtacatcctctttggaacgaaacaatagtagccgttcatcttgggagttgtccccgttccatgccttgtaacaaatcttccaaatgctctagtgtcagtgacacagttttgccatgaaatgatgtagcaagtgaacccttcctagatttgtacctcagtttgatgaatttatgaggtggaattccctcttaatgcataacatgtgttaccatgcttgttatct

SEQ ID NO: 201964 - DNA, 4060 bp, Zea Mays
ccgaaacccttgtggtcgtctcggcacccctctccgcttcgaaacccccgacgcgaaggaagctagggaaccctcgcgagtcgcgttgcctcgcccccgtccccttcagctggcccgccgccgcctcgaatccgccctggctcggagggcctcgcgcccccacggatcggattctcgaggttggtggatttggggctagggtttggggattgactacaatcgtggggttgtttggcgtaatttgaggagcaatgtacaacatggttaggaagtggacctgaggaggacggagggatggtggcgatggagggtaagggggacgcgtcagtgacgccggtgaggactagtgaccggctgcggcagcgtccaaagtactatgctcgtggctatatgtactacaatccagccatgaggaagaaggttaagtctaagaagcgaactgctgcatcacagattgctaagaaactgcttcgcaagccagctgcacggccaccacctgccgattgtgttgcagcaaatttgcgccgttcaacgagaaagcgaaggatttctgtaaatctggagggctatgatacagatagttccagtatggaagatgacgatcttatgagacctagatatcgatcttcaaagagtaaggggggaaacaatgctgcacataatgaagtgtcagctagaccaaagcgccagaagttgtctaactccatacctcgtcgtgaaggtttacggcctagaagatctttgcgaggacaaagactgcatccataccatgaatctgaggatgaccaggaaagctctgatgaacaaggtgcagaagatcaaagagaaaatggcaatgagattgaagaggatgttggtgatgaggaggaggttgatggaggtgatgaagctgaaggagatggagatgacgaagatggtgaggaagagcaagaaggaaggaggagatatgatttaagggaacgttcagaggttcgtagaccatcccctcgtaaggaaggaaagcacagaccacaatctcctcgtagagtactagttcacggaattggtccaaagaacagcaagtatttaaaaaaaggtgggtcgcgcatgcataagcgccctcgtttctctttgccagatgattcagatgattcccttcttgtggatgagccggacgagggcccatccatgccatggatgcgcagtgggaggggaagtatgccatggttgatgggtgggttggacatgcatagtccagcagcatggggcctgagtgttggagcatctggttggggtcatcagggtgacacttctacttcactcatgcctggggtgcaaactgctggaccaagttctaagggaggagccgacattcaacctctgcaggttgacgagaatgtgagctttaaagatataggtggactttcggagtacattgatgctctaaaggaaatggttttctttccattattgtatccagatttttttgcaaactatcacatcactcctcccagaggtgttctgctttgtggcccaccaggcacaggaaaaacattgattgcccgtgccttagcctgtgctgcctctaaagctggccagaaggtcagtttttatatgcgcaaaggagctgatgttcttagtaaatgggtgggtgaggctgaaaggcagctaaagttactttttgaggaagctcaaaagaatcagccgtcaattatattttttgatgaaatagatggcctggcacctgtgaggtctagcaagcaagagcagattcacaattcaattgtttcgacattgcttgctttgatggatggccttgattcacgtgggcaagttgttttgattggagcaactaacagaattgatgccattgatggagcattgcgtagacctggccgatttgatcgtgagttttattttcctttacctggctatgaggctcgagcagaaatactggatattcatacaaggaaatggaaggatcctccaccgaaggaactaaagatggaacttgctgctagctgtgtgggctattgtggagctgatttgaaggcattatgtacagaagcagctattagagcatttagagagaagtatcctcaggtctacactagtgatgacaagtttgtcattgatgttgattcggtcagtgtcgagaagtaccactttttggaagctatgtctacaataactcctgctgctcacaggggatctattgtgcattcaaggccactttcaacagttatcgctccatgtctgaagagtcatcttgagaaaataatggaacatatttctgatattttccctttcctttcatccatagattttagcaagttctctgctctctcctatggatcttccatccctcttgtttatagacctcgccttttgatatgtggtggtgaaagtgtcggactggatcatgtgggaccagctgttttgcatgagcttgagaagttctctgttcactctttgggactgccgtctcttctctctgatccaagtgcgaagacacctgaagaagctcttgtgcatatctttggggaagccaagagaacaaccccgtccattctatacatacctcagttccatctttggtgggatacggcacacgaacaactaagggctgtgttgttgactctgttgaacgagttgccctccaaccttccagttttattgcttggaacatcatcagtggtttttactgaccttgaagaagagtgtgcttccatattctcttctcgcaatgtgtatcaagtggatcaaccaagttttgacgatagattgaggtacttcagtatattgtttgagtcattgctctctttccaaatggaagaatcaagaaacaagtcaaagaaacagaagtctgctattgaccttcccaaagccccgaaagaagtggagggccctaaggtttctgagctaaaggctagggcagaagctgagcagcatgctgttcgtcgaatgaggatgtgcctccgagatatctgtaatcgcattttgtacaacaaaaggttcaatgtatttcacttcccagtattagaagatgaggtgcctgactatcgatcaataatccacaagcctatggatatggctactgtcttgcagcgggtggactctggacagtaccttaccagggcagcatttataaaggatattgatcttattgtctcaaacgcaaaggtccaaggcatgttgtcacaaatggacccatctttggtgtccttctgtgataaaattgcttcacaaggggggccactgcaggctgtggatgatgaagatagagctattcttcaagcagcacctgttgctcagctggtttctggtactagaataagtgcaaggcttcgaaatgtacagcctgaagtaaacctgtcacaaagttatgaagtgctaaggcggcaaaagaaaagtgcagaaaatgaacaaagcatgactagagatgaaaagtctcctgaagatgtagatttgtcgaagccaactgacgcagaagaagctgcaaaagaaccagagtcaaatggcactacgaaagaagccaacgattcaccagccaaagaaccagaagtatctacttcccctgaacccatggagagtgacaacggcaaaattgccgcggctactggcgacgacttgttagaacagctagaagccctgaagcaacgcttcatggaactcactgcaagctatggcgtgccgcagctcgagaggctgtattccaagataatgaaaggagcaatagagttgacaagtaaagaaagcaacgaggatcataggcggttagtagttaggtatttgtggacattcgttgagaacagcaacaatttttaacctggcgccaataagattcttgttttccttgtacatcctctttggaacgaaacaatagtagccgttcatcttgggagttgtccccgttccatgccttgtaacaaatcttccaaatgctctagtgtcagtgacacagttttgccatgaaatgatgtagcaagtgaacccttcctagatttgtacctcagtttgatgaatttatgaggtggaattccctcttaatgcataacatgtgttaccatgcttgttatct

SEQ ID NO: 201965 - DNA, 1321 bp, Zea Mays
atccgatcaatcaacgtgacatgatctgcagacgctcgcctgcccaccaaatcggcaaatcctggcgtacaggaggacgacccaacccaagcggcacacaagatccaagaggatgccgccgccgccgccgctcgtgctgctggcgaagccgctgttcccgaacttcgcggcggcgctggagggccggtaccgcctcgtcctggccggggacgccgacgcggccacggcggcggaggcccgggtcctgctcgtgccggggctcgtggccgtgacagccgagctcgtcgaccggctcccggcgctggagctcgtggccgcgacctccgtcgggctggaccacgtggacctccgtgcctgccgccgccgcgggctcgccgtcaccaacgccggcgcggccttctccgtcgactccgccgactacgccgtcggcctcgtcgtcgccgtgctgcgcagggtcgccgccgccgaggcgcatctccggcgcggcgggtgggctaccgatggcgagtacccgctcaccaccaaggtgagcggcaagcgggtggggatcgtggggctcggcagcatcggctcgctggtggcgcggcgcctggccgccatggggtgccgcgtcgcctaccactcccgcgcgccgaagccgtcgtgctcgtgcccctacgccttcttccccacggcgcgcgccctggccttggccagcgacgtgctggtgctgtcgtgcgcgctcacggaggagacgcggcgcgtggtgggccgcgaggtgctggaggcgctgggacagggcggcgtgctggtcaacgtcggccgcggcggcctggtcgacgagccggagctggtgcggtgcctgcgggagggcgtcatcggcggcgcggggctggacgtgttcgaggacgagcccgacgtgcccgcggagctcctcgccatggacaacgtcgtgctgtcgccccacagggccgtgctcacgccggagtccatgcgcgggttgctggatgtcgtcgcgggaaacctcgacgccttcttcgccggcaggccgctgctcagccccgtgtcgctgtgaattctgaaccacatgtaggatagatacgtcaagtcgtcaagttccattccatccaagaagcatcaaccagacaaccagtgtgtgagactcaccacgaacaatacggaagaacactcagaattggtagggtggttcgggtttcttactttctgttccaagttcatcatccaaaagccaaatttcaaaatgacaacagttcgtcttttatacttgctactggaaaaccaaaacgaattggaatatattacagccagttggctccaccat

SEQ ID NO: 201966 - DNA, 4619 bp, Zea Mays
cgtttcgcccaggagcgacaggcgcgggcgccacggagtgtgtgtgagagagagatagagagagagggagatgcgagaggaggtgaggagctcgtcgggggcggtggcagaaacgccgatggccgtcgcccggtcctcgtcgccgccgcacaccccggtagccagttccgtcggtgcctcgtcacctgctatgcaaactaatgttgcaagcatagattggttgggtggcaaacaagcttccagagttgactcgtcgtcgcaagttgctgcacatgcttatcacccttcccatagttttgatgcagctggcactgctatggattctgcaccatcatgcagaccatgggaacgtggagacttacttcgtcgactggcaacatttaagccttcaacttgggcttctaaaccgaaggctgctagttctttggcctgtgctcagagaggttgggtgaatgttgacatggacaaaattgaatgcgagtcatgtggcacacatctaatcttcaatgcattgacatcctggtcccctgttgaagttgcaaatgctggagaatcctttgccgagcagcttgatgcagcacaccagaatagttgtccctggagaggcaataactgtgctgacagcttggtccagcttcaccttacacaatcagctcttattggaggttttaaagaccgctgtgatgggcttttacagtttacctctcttcctgtgattgcaccatctgcaattgagaacatgaagcttacaaggagtgtacaaattgatcatctgttgtcccaatcaattacctttttatctggtattctgggctgcagagcagagagtacagcaggaattgatatccaccaagatttctcttgtagctactctcaagcacaaaagctcataagcctgtgtggatgggagcctaggtggcttccaaatgttcaagactgtgaagaaaattcaacgcattcagctaaaaatttaccctcagttggacctgacgaacggttatatccccattttgttgaacataacaaaaattcattttctgcatcagccaagaaagataaggggaaaggcaaattgcccgttggagattctggatgcagcatgaggtcaccgttgttagattgtaacctgtgtggagctacagtcaggatgcgggactttagacctgtattatgtccttctcgtttcagtccaaataacattgttgtgcctggaacaggcagaaagctaacactgacacatggagttagtgctgccagtggtatcaatgagtgggttactgatggggtggaaagaggtcaagatgaagggcgtgatgaagcagcaacaaatgagggaaaaccactatcacttgttggagtagacctaaacctaacaatggctggaggattaccgtcacctcaatctgccatgcctgctatgtcagagcggtttaataatggaggaatgggaagggatctgatgattggacagcctacaggcagtgaagtaggtgattgtgaaacctcatatgaatctcggggtccgagttcaaggaagcgtaaccttgaggaaggtgggagcacagctgacaatccacaagataggctgcagcatgctgatagcatacaaggaaatttcattgatcgtgatggtgaggaagttgatgatgctgcacaggattcagatgtcccgaataagaagtcccgtgggttcgatctgtttgatgcctatcgtccttcctctggagctggtcccagtagaaatttgtcctttggccctcatgaggatgctggtatgttcagtcactcaagagcaattgacctggcagctgttgagcgtccgactgctagggattcactgagagcatcttctgttattgcaatgcatactattcatacttccgaggaagattctatggagagtgttgagtattacccaggtgatggtaatgatatcgatatgccttcttctagtacacaaaggaacattgaaatgaatgatgccttggatcttaactatagcaaccaagcacagcaaagtgctaatgcacatgctggtgctggaagcgatgcaagagaaattggaggaagcagtacaaatgaaggggaggaggtcattaatgctgaaacagttcccccttttggaagggatcaacttagtttaggaattagtggtggtagtgttggcatgggggctagtcatgaggctgaaattcatggaaatgctggttctctgcacagaactgagagtgttgtaggtgatgctgaacctattgccgagcttactgagacaatgggtcagactggtgaatcagctccaggacctggattaatggatgaatttgtacctgaggtagaccgagatgaacctcatggagacagccaagatacggtgtcccggtcagttggccaagccgacagtggatcgaaaatatatggctataccaaagctgattctgttgaaagtggagaaaagataggtcatgccaccggtaatggaagcagcatgcgtccttctctttcttgcaacgcagggatgtgtgctggttttgatctgtctaaagatgatgtgacacatactggcaaaatactaactactgatgatgcattaatggggttagattatgatcctggaaatggattaggagctactaatggagaaaatgactatgaatcgggtctgctggaatttgatcctgttaagcatcacaatacttactgcccatgggtgaacgggaatgttgcagcggcttgctgcaacaacattggctccagctcaagtagttcagcgccctctggttggcagctaacaatagatgcagtcgacacgtaccaatcacttggtcaagcccaaaatcaaataatgcaatctgattctgcagcttcattatatatgcaggatgaccaaataactcataaccgcaaggtagggagacggccttctgtgagcagaagctttgggaagtgctgatcggaactcctgtagctcaagtgtttcctagacagaaacagcattacagaagttccagattggtgtaacaggagaaacaaaataatgatagtctcagtagattgttatcaccccgtgggtgtgagcttatagctgttttatgttgttgcatattgatacatcatatatatgtgtatttatattccgaaagggtttattcaacagtctttcatttgacagtaacattttcaagcgaactaggtacattattatggtgagattatgtaaacttcatattcatatatttatcgccgttcttgttgcgtccatgtacctcatctaatgatatggttgtgttcagatttttcttcttctgtttctttgtatctggctgactgtttcttcgcgcggggtgctatctgagaggccatcgccctcgtcaaatctcagcagccaatgagcaccacccagagtgccaggtcgtcagcaacgaccagataaagaagtggatgagatgccacttcacttcactccacccctgcttgtattgtatcctcgtcttttcccttctctccgtctatttccaagctttctccagatcaaatcagaaaggggaagggaagaacggcccagcaatgccgctctgcagcttctacgcctccacctccgttcccgtcgtcaagccccagcagtccgtcgcctcgtccaagccccccaccacggcggtggcctccgtggcgacaactgtgccgatgcgcagtgcagcgacggtgacgccagccgtggccacaacaacgagcctagcgctgtctctgcacctgccggagctgccgtcgcaggtgaaggacaagatcctgagcctggagctgatgggcgtggactatgggcgcgcgctggagcagaacccggcgctccgcgacgcggcgccggagtccatccacgcggtggtgtcgttcctccagtcccgcgggctccagttcaaggacctgggccgcgtcttcggcatgtgcccgtccgtgctgaccgccagcgtccgcgccgacctccgccccgtgttcgccttcctctccgcggacctgggcgtgccggagtcggcgcaccggcgcgtggtgatcaagtgcccgcgcgtgctggcctgcagcgtccgcgaccagctccgccccgcgctcatctacctccgccgcctgggcttccgggacagccgcgcgctggcgctgcaggacccgatcctcctcgtctccagcgtggagcgcaccctggcgccgaagctggagtacctggccgggctcggcatgtcccgcgacgacgcggtcgccatggtgctgcgctgcccggcgctcttcaccttcagcatcgagcggaactaccggcccaagttcgagtacctggtggacgccatgggcggcggcgtcgaggacgtcaaggccttcccgcagtacttcgccttcagcctcgagaagcggatcgcgccgcgccaccgcgccgcggaggacgccggcgtcgcgctgccgcttccggacatgctcaaggccaccgacgaggagttcagggagatgctcgacaaggagcgggagctgcacgagcaggcagcgacgacggactgatcgatcggggggctagtacagcggtttgcacctgatccgactctccgaagcatccaaccgccgtcttcgtggcgatcgagtgtcct

SEQ ID NO: 201967 - DNA, 4970 bp, Zea Mays
cgtttcgcccaggagcgacaggcgcgggcgccacggagtgtgtgtgagagagagatagagagagagggagatgcgagaggaggtgaggagctcgtcgggggcggtggcagaaacgccgatggccgtcgcccggtcctcgtcgccgccgcacaccccggtagccagttccgtcggtgcctcgtcacctgctatgcaaactaatgttgcaagcatagattggttgggtggcaaacaagcttccagagttgactcgtcgtcgcaagttgctgcacatgcttatcacccttcccatagttttgatgcagctggcactgctatggattctgcaccatcatgcagaccatgggaacgtggagacttacttcgtcgactggcaacatttaagccttcaacttgggcttctaaaccgaagttctttggcctgtgctcagagaggttgggtgaatgttgacatggacaaaattgaatgcgagtcatgtggcacacatctaatcttcaatgcattgacatcctggtcccctgttgaagttgcaaatgctggagaatcctttgccgagcagcttgatgcagcacaccagaatagttgtccctggagaggcaataactgtgctgacagcttggtccagcttcaccttacacaatcagctcttattggaggttttaaagaccgctgtgatgggcttttacagtttacctctcttcctgtgattgcaccatctgcaattgagaacatgaagcttacaaggagtgtacaaattgatcatctgttgtcccaatcaattacctttttatctggtattctgggctgcagagcagagagtacagcaggaattgatatccaccaagatttctcttgtagctactctcaagcacaaaagctcataagcctgtgtggatgggagcctaggtggcttccaaatgttcaagactgtgaagaaaattcaacgcattcagctaaaaatttaccctcagttggacctgacgaacggttatatccccattttgttgaacataacaaaaattcattttctgcatcagccaagaaagataaggggaaaggcaaattgcccgttggagattctggatgcagcatgaggtcaccgttgttagattgtaacctgtgtggagctacagtcaggatgcgggactttagacctgtattatgtccttctcgtttcagtccaaataacattgttgtgcctggaacaggcagaaagctaacactgacacatggagttagtgctgccagtggtatcaatgagtgggttactgatggggtggaaagaggtcaagatgaagggcgtgatgaagcagcaacaaatgagggaaaaccactatcacttgttggagtagacctaaacctaacaatggctggaggattaccgtcacctcaatctgccatgcctgctatgtcagagcggtttaataatggaggaatgggaagggatctgatgattggacagcctacaggcagtgaagtaggtgattgtgaaacctcatatgaatctcggggtccgagttcaaggaagcgtaaccttgaggaaggtgggagcacagctgacaatccacaagataggctgcagcatgctgatagcatacaaggaaatttcattgatcgtgatggtgaggaagttgatgatgctgcacaggattcagatgtcccgaataagaagtcccgtgggttcgatctgtttgatgcctatcgtccttcctctggagctggtcccagtagaaatttgtcctttggccctcatgaggatgctggtatgttcagtcactcaagagcaattgacctggcagctgttgagcgtccgactgctagggattcactgagagcatcttctgttattgcaatgcatactattcatacttccgaggaagattctatggagagtgttgagtattacccaggtgatggtaatgatatcgatatgccttcttctagtacacaaaggaacattgaaatgaatgatgccttggatcttaactatagcaaccaagcacagcaaagtgctaatgcacatgctggtgctggaagcgatgcaagagaaattggaggaagcagtacaaatgaaggggaggaggtcattaatgctgaaacagttcccccttttggaagggatcaacttagtttaggaattagtggtggtagtgttggcatgggggctagtcatgaggctgaaattcatggaaatgctggttctctgcacagaactgagagtgttgtaggtgatgctgaacctattgccgagcttactgagacaatgggtcagactggtgaatcagctccaggacctggattaatggatgaatttgtacctgaggtagaccgagatgaacctcatggagacagccaagatacggtgtcccggtcagttggccaagccgacagtggatcgaaaatatatggctataccaaagctgattctgttgaaagtggagaaaagataggtcatgccaccggtaatggaagcagcatgcgtccttctctttcttgcaacgcagggatgtgtgctggttttgatctgtctaaagatgatgtgacacatactggcaaaatactaactactgatgatgcattaatggggttagattatgatcctggaaatggattaggagctactaatggagaaaatgactatgaatcgggtctgctggaatttgatcctgttaagcatcacaatacttactgcccatgggtgaacgggaatgttgcagcggcttgctgcaacaacattggctccagctcaagtagttcagcgccctctggttggcagctaacaatagatgcagtcgacacgtaccaatcacttggtcaagcccaaaatcaaataatgcaatctgattctgcagcttcattatatatgcaggatgaccaaataactcataaccgcaaggtagggagacggccttctgtgagcagaagctttgggaagtgctgatcggaactcctgtagctcaagtgtttcctagacagaaacagcattacagaagttccagattggtgtaacaggagaaacaaaataatgatagtctcagtagattgttatcaccccgtgggtgtgagcttatagctgttttatgttgttgcatattgatacatcatatatatgtgtatttatattccgaaagggtttattcaacagtctttcatttgacagtaacattttcaagcgaactaggtacattattatggtgagattatgtaaacttcatattcatatatttatcgccgttcttgttgcgtccatgtacctcatctaatgatatggttgtgttcagatttttcttcttctgtttctttgtatctggctgactgtttcttcgcgcggggtgctatctgagaggccatcgccctcgtcaaatctcagcagccaatgagcaccacccagagtgccaggtcgtcagcaacgaccagataaagaagtggatgagatgccacttcacttcactccacccctgcttgtattgtatcctcgtcttttcccttctctccgtctatttccaagctttctccagatcaaatcagaaaggggaagggaagaacggcccagcaatgccgctctgcagcttctacgcctccacctccgttcccgtcgtcaagccccagcagtccgtcgcctcgtccaagccccccaccacggcggtggcctccgtggcgacaactgtgccgatgcgcagtgcagcgacggtgacgccagccgtggccacaacaacgagcctagcgctgtctctgcacctgccggagctgccgtcgcaggtgaaggacaagatcctgagcctggagctgatgggcgtggactatgggcgcgcgctggagcagaacccggcgctccgcgacgcggcgccggagtccatccacgcggtggtgtcgttcctccagtcccgcgggctccagttcaaggacctgggccgcgtcttcggcatgtgcccgtccgtgctgaccgccagcgtccgcgccgacctccgccccgtgttcgccttcctctccgcggacctgggcgtgccggagtcggcgcaccggcgcgtggtgatcaagtgcccgcgcgtgctggcctgcagcgtccgcgaccagctccgccccgcgctcatctacctccgccgcctgggcttccgggacagccgcgcgctggcgctgcaggacccgatcctcctcgtctccagcgtggagcgcaccctggcgccgaagctggagtacctggccgggctcggcatgtcccgcgacgacgcggtcgccatggtgctgcgctgcccggcgctcttcaccttcagcatcgagcggaactaccggcccaagttcgagtacctggtggacgccatgggcggcggcgtcgaggacgtcaaggccttcccgcagtacttcgccttcagcctcgagaagcggatcgcgccgcgccaccgcgccgcggaggacgccggcgtcgcgctgccgcttccggacatgctcaaggccaccgacgaggagttcagggagatgctcgacaaggagcgggagctgcacgagcaggcagcgacgacggactgatcgatcggggggctagtacagcggtttgcacctgatccgactctccgaagcatccaaccgccgtcttcgtggcgatcgagtgtcctggccatgacggtagccagcacatgtagtcatttgatttgagtaattagtagcctgtacatatatgcattgacattatttgctatagtcacgattcgtagctcatgagagaatatgcctgttctttctccattccaagtgaataagcacagagctggaagtcgtgtcttgtacacacgtgtaatgaatgaatgtaccaagttcattagatattatttgctctgagctgcacgcttgcgcaacacgtcttgtctcgtgtggttgtaattaatggtgtcaaaagctatggttgaaatccaaaggacaagcaaacaaatgctaatggagcatctccagtagacaaaaaaaagtttttcaagtc

SEQ ID NO: 201968 - DNA, 2360 bp, Zea Mays
cgactgagggaatcgctcaccttgaggttggggctgacgagggccatgaccgcagttctagcaagggatggataactccattgcagcattgctccgcctcctcggaggtcgtaggctcgcagcagcagttgaagccgcaattccccgctcccctgtccccattcacagctgaggagatcggacggttagcttgaggttttctcgttctttgatccatctcagccgttgatttccatataggacgggggaaatgcctccgtgatcggtttaagttctttcgctgcggagatggcagcggcggcggggccgtacaaagagatgctggaagtggtgaacgcgtgcgcggcccggatccggtggcgccttcgtccagcttccaagcgccgcctcctcaacggctgtgctgtggttgttgatgaacaaacctagttgttgccagatatcctgtttctctgcactgggttgcggcctgtggtactggtcgactatggtggcacaatgcctcagctacaagaaaatctttgtggcctgctatatcatgcccggcaggaaacaagcatattgaatccactccgcgtgatgattattggagatatgctttacttgatccatgttaaaggacttgcggaacatgcatcaccaaacgcaaggtcgcagcaagggctagctttcgtggacctagagaaaagatgttgcaatctgcttacaaccatagaagagaatgacactgtgctggagcttgtatccatacaagatcaattcacagccaaatttcctctagatctgtctgatgttcgacctggaataacaaagcaaatgtcaggaaatccacagagtactgttgttgcagagtgcactgacaatcacgttgaggacaggaccctattggtcgttgatctgagtagcttcctcgagaacacccagattgccttgccttctctgaatgggtggcttttaggttatccggtaacatatttgttccgcaatgcaagttctgaggcagcgatacagaacctctcaaggcagtctctgcatatctaccgagtatatgtgtgcggaagttatcggtcagctggcgaacgaagagaagaggaactgatgagtttttcagttccatgtggcgcgagcacgaagcgtgatgaagaagtatgggctagatcgttcatagctcgcatgaatgagaagctcaggcgatgcagccaagtctgggcatccataaggctagaagtcgaggttttccagagccagtcgcaggtcattgtgttgtagttgagatcagtatggctgttattacgggctgatggcataaactccttatacaaagcgacgtgtctcagaagtatcactgccctgggccaaataaacgagttggatacaagtcatgcatgcagaggccggaggtatccgtatgtgactggtaattcagtcattgccttgaaatacaaggatggtgtgatcatggcatgtgacactggagcctcttatggatcaactttgagatacaagagtgtggaacgcattaaggcagttggcaagcatagcatcattggagcaagcggagagttcagtgacttccaggagattttgcgctatttggatgaactaactctgtctgatcatatgtgggatgatggaaactcgctgggccccaaagagatccacagctatttgacaagagtgatgtacaaccggcgcaacaagtttgatcctctctggaactcacttgtacttggtggggtgaaaaagggtccaaagggtgatgagaagtatcttgggatggttaacatgattggtacccacttcgaggaaaaccatgtcgctactggatttggaaatcatatggcaatcccgatactccgtgctgaatggcgcgatgatatgacttttgaagaagctgttaagctggttgagaagtgcttggtggtcttgctgtaccgagacagatcatctatcaacaaattccagattgccaagatcacaagtgaaggatcaaccatctacccaccatattccttgaagacctactggggcttcactcacttcgaaaacccagcccagggcgctgtgggatcatggtagatttatgctctgcatgccgcgtatcatgccatgaacttaggggagagcaatctgtgctgctgaaatcaaaacccttgtgaacgtttgttctgaacataactggaactctgcatttgcttgtatgacatgcgtatggttcaggaagtttaattccaatatttggtcactaaaaatggattgtgcggttgtgttctcagatgccgtttttgtgttgattgtgctatgtggagaacttggaatgctaactctgttttttttttactgtgtcattcttttgcttt

SEQ ID NO: 201969 - DNA, 1900 bp, Zea Mays
tctgctccttcctctcccgcggtatgactcctctgtttggtgagatccggccttccctagtggatctccccatggcgcggctgccctgcggcatggtttctccctcccagcagtggtgtgggcgtgtggcagccatgtggcgtggctcctccctgtggcactgatccttcctctctgcagcacggctccttcctccctgcagcatgcctccccctcccatggcggcatggctctccaccgctgctttgatccggccttccttggacccggctggtctccctccggatctgccatcggcaaggtgggccttgaatccctaaatctgggaatttgtccaaaattaagtattctgtgcattgaggccccaaatatgtctataatggagctgaagggttgtggtgtgctttccgaggcttccatcaattgccctcgcttgacatctttagatgcctctttctgcaggcagcttgtggatgattcactgacttgtatgaccggggcatgtcctctgattgaacatcttatcctgtcatcatgcctatccattggcatcgatggattgtcttcattgcattgccttcataagttgaccttgcttgacctgtcttatacatttttgatcaacttgaagcctatttttgacagttgtccacagtgaaggtgttaaaactttcagcttgcaagtacctcagtgactcatcattggatgccctttacagagagggtgctcttccattgcttgttgagctagatctgtcctactcacccatcgaacagaatgcaatagaaggtcttcttgcttgttgtagtaatttggttaatgtgaacttcaacggatgtacaaattttcaagaattggtgtgcgaatctggggatagcggttctgtggatatgccagttgactcttgtccacctagttcaccaatcaagaatgaagagatcagtgagcaacctggccgtctgcttgaagttctcaattgtactgggtgccctaatattaagaaagttgttattcctttgatagcaaacttttcacatttgtccaaaattaatcttaatctttcaaccaacttgaaggaagtggatttgacatgctccaatcttttaacgttaaacttgagcaattgtagctcactggaggtgctgaagcttgattgcccaagattgaccaacctccaacttttggcatgcaccatgttgcaagaggaggaattagaatctgcaatatccctttgttgtgcgttggaggtccttaatgtgcattcttgtccaaagatcaatgctctggattttggccgactccgtttggtttatcccagtctgaagcgcatccagagcagcctcatttcataatgcggaggctactaccatattaaggagtgcaattcatgcaataagcctctgttcaggtttgatgaaagaagcaagtcgggaaaagctctccttgatgctctttgtacatattacccaagcattgccggtatattgcaagccaggggcaacgtggtcctatttatccagtccattcatggttctgtaataagtactttttttttgcaaatttgttttgttgccggagatagcaaaatatctgttcatgtctgtttgtctttgttccttggagtgtaccaatggagctatcagatgtatatgctggtttatatgcatcaataatcttgttttgatctaggatcttggaatcgctttgctaatgcgatctggggtgtagttttgtacaactttaattgttcgcagattttagcgagtgttatgaagcttaactgatctggggtgtagttttgtacgactatgtttaatttttcgcagattttagcgcagtgttatgaagcttaaccaaggctatgcaaggcagatgatgcacgcacaatcttagctagag

SEQ ID NO: 201970 - DNA, 1801 bp, Zea Mays
aaacacccctaaattacgattattgttacggaagaggtgctcctctctctatctcccccacgatctccgttccttcccctccccgatctccccaatccgaccagaccggcaggcaccttcgactcgagcggagcaggcgaggcagagatggcgctgcgacgggcgctcctcagatcggtcaacttctcccccgacagcaagatcatttagcacccaggctgccactacgtcaagcacaccacagcctccacctccaccaccccctccagagaagactcactttggtggtctcaaagatgaggatcgcatttttcaccaacctctatggtctgcatgacccttttctgaaaggcgcggtgaagagaggtgactggtataggaccaaggatttggtgattaagggggcagactggatagttaatgaaatgaagaaatcaggtcttcggggtcgtggaggtgcaggttttccctctggtctgaaatggtcctttatgcccaaggtttctgatggacgcccttcttatcttgttgttaatgctgatgagagtgagcctggaacttgcaaagatagagaaatcatgcgccaagacccccacaagcttctggaaggatgccttattgctggagttggaatgagggcatcagctgcttacatctacattcgaggtgaatacgtgaatgagcgtctcaacctcgagaaagctcggcaggaagcatatgcagctggacttctcggtaagaatgcttgtggatctggttatgattttgatgtgcatattcattttggtgctggtgcgtacatctgtggtgaagagactgccctattagagagccttgaagggaagcagggcaaacctaggctgaagccacctttcccagccaatgctgggctttacggctgccccacaactgtgaccaatgttgaaactgtggctgtatccccaacaattcttaggcgtggtccagaatggttcgcaagctttgggcgcaagaacaactccggaaccaaactctactgcatctcaggtcatgtgaacaagccttgcaccgtggaagaggaaatgagcatacctctgaaggagttgctcgagaggcactgtggaggtgtgagaggaggatgggacaacctgcttgcagtaattcccggcggttcatccgttccccttttaccaaagcacatatgtgacgatgtgttgatggactacgacgcgctgaaggctgtgcagtctggattgggtaccgcagctgtcatcgtgatggacaaatctacggacgttgtcgacgcgattgccaggctgtcctacttctacaaacacgagagctgtgggcagtgcacgccctgccgagagggcacgccctggctctggatgatcatggagaggctcaaggttggtgacgcgaagctagaggaaatcgacatgcttcaggaggtcacgaagcaaatcgaagggcatactatctgtgccctcggggacgctgcggcgtggcctgtgcagggacttatcaggcacttcaggccggagttggagaggaggatccgcgagcgagctgaaagggagctgttggcggcttctgcatgatgtgccagccgcatgtactagttttctgatttctttctaccgaaataatacaaactgatggagctcctttctgtgtaagcaaatgctagcattcctgatttctttgaaccgtttatgtggatgtttatttgatgcactcaagcatctgacggattttgatggactaggtacaccttttcatagtagaaacaaacttgagggttgtaccgtgtgtatacctg

SEQ ID NO: 201971 - DNA, 1837 bp, Zea Mays
gcagtggctcaacaattgtattggaagaagaaattatgggaggttttttattctaatgtcaaccgcccttatcttgcttatcttacaatcagcaactggagtattggtgctagtgctatgctttgttgagcgaaaggaattctgtctgcaaattgtttcaaagcttggaagcagcttctctgtagtgccttttgttattgtggtggcatcatgtaccatcctagccatggtcgcttcactacctattgcccaacttctttttttccacattcttctgataaagaagggaatcagtacctatgactacatcattgcgctgagagagcaagaacaagatgatttgagtgggcagcagagtccacagatgtctcgtgtaagctcgtacactggactcagcagtactagttcctttggtccacttcgtcgtggttcatggtgcactccaccaaggctgtttcttgaggatcagttcgatgttattccatcggaggctgcttcttcgcataattctgctatgaagagaaaagaagacgagggaaagaggaagaagggctcaggggctgtgcaaataagcccatgggcattagctcgtcttaatgctgaagaagtctcgagggttgctgcagaggcacggaagaagtccaaagttttattaccaatcagaaaagatgactattcgcgagaccacgaaacagatagtagctacggaggcatgagcaatggcaggattgatctaggcaccgatagcaagaggagaacgaacagaagaggaagacagcccagtgatctctctctcaaacctgttgcaaagatatctacagatgttattgattctaccagcagggacatggccccagaagcactgtccaacttagcaccattgcaacttgaggcactgagcgccttccatcccagtagggctgcatcctgtgtgaatgctggtgggtcatctccagatagcagcttggattcgcctgacctgcatctgtaccgagtctcagctgtctcctcgtctggagctgaagacttacaactgacagctctcactgctccaggaagcactccacagcaagggatccaactgtcgaggtcgaccagcgatgggtacgaagcgtcagggggtgaagacagcgaccgcattccgtcacggatagtgcaccgctcgtcgaactgggcaagcatcatcctcaactctgaccagagtgcgtcctcatctggcattcttgtgccaaagaacagactgtcctgacttcatgtgaatgaagattgtaaatgatcagccaagaaccggagattccagtatctggccttctctgttgtcaatatcagattttttcgcagggatggttggatactgcgcaaatcattgtttttttagtctcggaatcgctaggtaggcagtgtctgaatttcttcctagggggttccgggttcaggtgcttgcaattttgctgccagacgacaatgaactgatttgtttagaggttagtaccttggatcgaatgcctgattggttggtgattgttcttgaggttgactggtcggagccgacaatccccccagtaacaaaatgtttcctccagtataaccaaaatgccgctaggcaaccaaattccacaacaattaaatatatatactagttacaccattttgaaagaatgctacacatatcaccagctcttgaatcgctgccaaaactcaggtctgatcgagatgttagatacttcagcttctcagttaggctcttggcgggaatttctgttgtagagtcagtggttagcgtgagccagggacctgtcctgcgctgcgcagtgtccaatgtgagtgcgtgtcatcg

SEQ ID NO: 201972 - DNA, 963 bp, Zea Mays
tgcactgtctctatcctctcccatccacctccctccgcacactccgccgcctcaccttctccccctctccctccccgccgccgcggtccccgccgccacgctgtggcccttcttcgacgccgtctgctccgacaccgccatcaccttcggctcgctcgtcgcgctccacgagtacctttgagaattcgtcgttcttgtttcttacaagtggtgatggtggtagtggtctggtctctatgtgagcattggtctagagtatcgtgaagctatgcggctcttctttcatgttcaagatgaagttcatgaagcttggatcgaatctggatacctttaatgatgatggcaatgaaatcagatgatcgatcgcttcttttaatttggcttttaccttgtttctttaatgttgcctttgaatccttgtgttgttcttagaatctgactgatttttatttatttcaattataaatggtatgatctgactaagaaattcctagacgcattctccctgattgctgttactgttgatggatactagatgattatataatatgtggtaaagttttcccaataagctcagttgtgcagatcgtttgtttcttcttcttagttagagtgaaattatttactttatgaataactagatccatataggatatagtgatgttatttaggatggagggattcttatcgctctttggtgcttctccctataatcagtgctgaataactagatccatagtgctgataaatttttggtgcttctccctataatcagtaatagcatactaaaagtacctttgaactagaaaccttatgatattatttttccacaataaattcttggtgctactccctgtatatcagaggttataatcactcctgagcacaacgaagaagggatttacacgatcagattctacattcagcgaagctttctttcttaacatgttgctattgtgtcca

SEQ ID NO: 201973 - DNA, 2254 bp, Zea Mays
ctctatcctctcccatccacctccctccgcacactccgccgcctcaccttctccccctctccctccccgccgccgcggtccccgccgccacgctgtggcccttcttcgacgccgtctgctccgacaccgccatcaccttcggctcgctcgtcgcgctccacgagtacctttgagaattcgtcgtccaggtagtaccattgtatcattgcactggattaaatcgatgctattcagtcctatatccccgaaggagacgccttgaagttgatagccggacagttcatcaggtagacaagtcaaatcagtgctgcataatatacttgcctcttctgaagtaagcaaaatattttagtataagacaggataattatcgatcataaatacatatgcatgcttataatataatttcagttgatagtagcgattgtttgcaatagattttatcgaaaaacagaccattcagtagttatagattctctaatatgtcagccaaatgaactaagaattctgtccagatgaaaataaaagattaaagatgttctcaaagacaaataaaatatgttcgttgggtcattcactgaaaagttttctgctcccaaagccagctatggtgtgacaaaaaatatagcaagtaaatagactccactctgcagcgctataaaatcagaagacaagatgatacgacccaacatgtaatcttgtttgttgcaggtctttactacgactgcaactttgaagtttggtattcatataatcaataggctcaacagtatgtcccttgtaaatggtaggatcagagtgcttctgctatgtcatcttcgacacttcctggtgtttgcaacaaacaaagtgcttctatgctgtgcagttcttgtttcttacaagtggtgatggtggtagtggtctggtctctatgtgagcattggtctagagtatcgtgaagctatgcggctcttctttcatgttcaagatgaagttcatgaagcttggatcgaatctggatacctttaatgatgatggcaatgaaatcagatgatcgatcgcttcttttaatttggcttttaccttgtttctttaatgttgcctttgaatccttgtgttgttcttagaatctgactgatttttatttatttcaattataaatggtatgatctgactaagaaattcctagacgcattctccctgattgctgttactgttgatggatactagatgattatataatatgtggtaaagttttcccaataagctcagttgtgcagatcgtttgtttcttcttcttagttagagtgaaattatttactttatgaataactagatccatataggatatagtgatgttatttaggatggagggattcttatcgctctttggtgcttctccctataatcagtgctgaataactagatccatagtgctgataaatttttggtgcttctccctataatcagtaatagcatactaaaagtacctttgaactagaaaccttatgatattatttttccacaataaattcttggtgctactccctgtatatcagaggttataatcactcctgagcacaacgaagaagggatttacacgatcagattctacattcagcgaagatgcaggctatctcctgctaatgttgctgccgaagaaatgaacttcttacttttatgtagaggcaacacttactaatatgatgctcgaatttgcaatgaatgatgtgtgtgtgtgctattttcggaccactggtatttaaaactgacaaccatgaaattttggtacacatgaatcccaagcaatttgtgtaacatatggctaaacaaaacattgatgcttgatttgtgatccagctgattttgatgtcaatttattatacatgtatatatctttgcaataacttcttatgtatatggttatattgcaaatactattgtctctttactgtctcctgatagggcgcccgaatgggtgcctcctcttctagttatcttagttctgagagttccctttgacccgggaacaggatctggatgtcgcctagaggggggtgaataggcgaataaaacttattactttaaaacttaaattcttactctactcgaagacttaatacgcagtggagtgagaagactcttcgagtaggttgcagcggaatcggagatcctgtctcaaaatgtcctgcacttcaaataaaacttataccacggataagtattgaagtgcagatataatatcgagtaagacagagagtcaggatacaat

SEQ ID NO: 201974 - DNA, 2118 bp, Zea Mays
atcctctcccatccacctccctccgcacactccgccgcctcaccttctccccctctccctccccgccgccgcggtccccgccgccacgctgtggcccttcttcgacgccgtctgctccgacaccgccatcaccttcggctcgctcgtcgcgctccacgagtacctttgagaattcgtcgtcctatatccccgaaggagacgccttgaagttgatagccggacagttcatcaggtagacaagtcaaatcagtgctgcataatatacttgcctcttctgaagtaagcaaaatattttagtataagacaggataattatcgatcataaatacatatgcatgcttataatataatttcagttgatagtagcgattgtttgcaatagattttatcgaaaaacagaccattcagtagttatagattctctaatatgtcagccaaatgaactaagaattctgtccagatgaaaataaaagattaaagatgttctcaaagacaaataaaatatgttcgttgggtcattcactgaaaagttttctgctcccaaagccagctatggtgtgacaaaaaatatagcaagtaaatagactccactctgcagcgctataaaatcagaagacaagatgatacgacccaacatgtaatcttgtttgttgcaggtctttactacgactgcaactttgaagtttggtattcatataatcaataggctcaacagtatgtcccttgtaaatgttcttgtttcttacaagtggtgatggtggtagtggtctggtctctatgtgagcattggtctagagtatcgtgaagctatgcggctcttctttcatgttcaagatgaagttcatgaagcttggatcgaatctggatacctttaatgatgatggcaatgaaatcagatgatcgatcgcttcttttaatttggcttttaccttgtttctttaatgttgcctttgaatccttgtgttgttcttagaatctgactgatttttatttatttcaattataaatggtatgatctgactaagaaattcctagacgcattctccctgattgctgttactgttgatggatactagatgattatataatatgtggtaaagttttcccaataagctcagttgtgcagatcgtttgtttcttcttcttagttagagtgaaattatttactttatgaataactagatccatataggatatagtgatgttatttaggatggagggattcttatcgctctttggtgcttctccctataatcagtgctgaataactagatccatagtgctgataaatttttggtgcttctccctataatcagtaatagcatactaaaagtacctttgaactagaaaccttatgatattatttttccacaataaattcttggtgctactccctgtatatcagaggttataatcactcctgagcacaacgaagaagggatttacacgatcagattctacattcagcgaagatgcaggctatctcctgctaatgttgctgccgaagaaatgaacttcttacttttatgtagaggcaacacttactaatatgatgctcgaatttgcaatgaatgatgtgtgtgtgtgctattttcggaccactggtatttaaaactgacaaccatgaaattttggtacacatgaatcccaagcaatttgtgtaacatatggctaaacaaaacattgatgcttgatttgtgatccagctgattttgatgtcaatttattatacatgtatatatctttgcaataacttcttatgtatatggttatattgcaaatactattgtctctttactgtctcctgatagggcgcccgaatgggtgcctcctcttctagttatcttagttctgagagttccctttgacccgggaacaggatctggatgtcgcctagaggggggtgaataggcgaataaaacttattactttaaaacttaaattcttactctactcgaagacttaatacgcagtggagtgagaagactcttcgagtaggttgcagcggaatcggagatcctgtctcaaaatgtcctgcacttcaaataaaacttataccacggataagtattgaagtgcagatataatatcgagtaagacagagagtcaggatacaat

SEQ ID NO: 201975 - DNA, 5942 bp, Zea Mays
cgcctcacctcacctctccacctgccgtcgtcttcctttcgttcctagacacgctagacttggctttggccataccttggactccccttccctctcctctccccgtctcccggcgtgcgtgcgtactacttactgcttgtccaatcgccgcgaccagagctcccgcgcacgctactggagaggattccagcgcccgtcgagcaacaggactctagcgcccgacccgacaaacgacagatagtagctactgcctccctacaccgtctcggcatctccgggggcacggcacgggaacggaggagcggagaaatccatccgccgaaccgcttgctttgcttggcaggcaccccgtacaattgggggttccggttcgaggaacgctcgggggggcgtgtgtgcggccgccttcgctcctcatccagaccacttgattacgccgcgctccctacgacaggaggtgcccaggccgaggtccttcgccggcgacgagcaccaaccagccaattccagagcaaccaaccgcaagggcatgtgacaaactgccgcctgcggtgccttcgccccaggcaatgtgctccgacatggatcagcgcgaccaccacgcaaccagggaggctgcaccagaggctaatggttaccatcacagcccccatggtgtggaccagagtcaggttgtggatgctgataagcatataaaccatcattccacagacgacaatgctccctccagcgcttcaggccacagacatggtggtatcagccgtcatgcatccacatcttctgttgatgaccgctccatcaagtctggtgacgattctgatggggccgagagtaccaatggcagaagcagtaacacggagatctcgtttctagaaaatgataccgtctggataccacctcaagcggcagataaggaggatgaggcccagagttttgctacaagcattgcttatgacgacgacgatgacgattatagtgatgggataaagtggggccagtcaagtttcccatcccctggtaagcagcatgacgccggcactagcaatcatagggaggtacgagaaaaagcgatgctagaagctatgaatggccagctgaagatacttgtcagtcggtttctcgcatctgttggcattccgtcttcgaacgaggaggctagcgatagctggcttgacattgtcacctccctgtcatgggaagcagcgctacttatcaaacctgatggtagcatgggaaaggaaatggaccctggctcttacatcaaagtcaaatgcatagcatctggtactcgccggcaaagtgaggtgatcaaagggttagtattcaagaagaacgctgctcataagcacatgccgacaaattgccacaatcctaggcttctacttgtcaaaggagtccttgggcattctgatgtcggtttgtcgtcgtttaattcaatgggtcaggaaaaggacctgttggagagagctatcggtaaaataatggagatatgcagtcccaatgttgttctggtcgagaaaactgtttcacgaaacattcaagaacttcttctgaaagaaggtgtcactctaatttttgatttgaaactcaaccggctacaaagaattgcgcgctgtactggctctcccataatatcgttttcagaagttttggataaaccgaagctgaagcaatgtgactactttcatatcggaaaatttaccgaggagcacaacaatgccagtgagggtggaaagatgacatctaaaacattaatgttcttggaaggctttccatgtccactcggttgcacgatcttgctaaaaggagcaaacagtgaagaattgaagaaggtcaaacaagtaatgcattttacagtctttgcagcatatcacttgatccttgaaacatctttctttgaagatcaaagggtttttctgaatgatagtactacaaaagaaacttctgctactgctacagaagggacttatggtgttgctgctcttagtgggcctattcctaactttccttcacatgatgattctccggcacttagactgttccatgccacttctaatagctatgctgatgtgaacaaacctttgatatctccaagaaatgtggataaattcagtgcagtatccagcagctcttcaaatgaccttgaacaaggtgcaaatgtcaggtccaataatgccgagaggttaacattaccagtccaagggccactaaggaaattgttcgctgacatgttatgtcaccagaatatttacttacccgttacatcattgcaagaggcaaatgataacaggaaggaagtcagggttgaatccagtcaagaaactgttagtaatggtttccataggccaaagacaggagagtctgtgatttccattgaaaatggggagtccataaatgatgcccagacacaagaaattactcaagcaataatgccaactggttcttctgtaagtgataaggatgcagaatcacctgttatgggagacaatggggcacatagtactacaagtatcattatcaaagagaagcatgctgacggcgatcaagctgatgatgcacttgattctcacagcatactgattttgatgtctagccagtgcacagaaaagcaggttatctgtgaacaaagccatttaacccgtataaaatactatgggagttttgatgtgtccttggggcgatatttgcaagacattctacagaatcagaaactgagttgctcttcatgtggagagcctccagagtcgcacatgtactcctacacgcaccgcaatggaaatttgaccgttctagtgaaacgtctggtgcccaaacactatttgcctggcgaatctgaaggaaaaatatggatgtggactagatgctcaagatgtgatcatgaacatggggtatccaaaccaactccaagagtactaatatcagctgaagcacgcaacctctcgtttgggaaatttctggagctcagtttttcaagccactctgcagcaagaaggttatctatatgtggacatctggtcaacagggattgcttgcgtttttttgggctgggctctaaagttgctatgttccggtactcacctgttgaaatttacactacctgcaaaccacaacctactctccaattcgtcaaccccatcagacaggattggtttgaaggacaaaggagaaatgttcatgctaaaagtatggcacttttctctggggttgcaagatttctacagaacttgaagaatgaacatcctgatgcaataacattagcagtcaattgtggcctcacactccctgttaaggacttcactgaactagaagagttgttgataaaagaaaaggcccagtttgagagttctttggacaaggccactgacgaaaatgggaaaccattcgggtctgtgcatggagtattgaatataaattggtactatcaggatcttctacttaagctttacatttgggaccgccgtctatatcaactattctattgcaaatctgtccaactagaaagttgttctaattacaagaatcctgctggtactgttgatgggaactgtgatgataactttggtgttgataagaaaatcggtgaaattacatctgatgaaattacggcagctttgggggtatccagtaccatggagtctgcaagtaacaaacttgatcatcaatcaggtgacaccacagcactcttacttcataaaagccaggaagctgggcactcggaatttccttgcaatggaggtagtaaagctgaagaatcttctattgctcatggtcaaataaaggtagatggcacaacagaaaccacaaatgatccttgttttgaaatatccaatgatatggaggtccaggccaatcttacagtagcagatccaatacccatggaacaggagcgttgtagcactccccaacaattcaaatatccttattgggatgacagggagaggtggatttggaattcattttctgagtctcaaatggcttacagggatgacattgaaattggatatttgggcaaatttgaactcattaacaattatttgccacattatctttctcccttgtttgaacaacatgatgattcatactctccgcagttcgcggtaggtccaggtagtaatattttgtgcataatggaagatgagatatccagcataatagctcgtgctcttgccatatctgatgaacgccaccatttgatagatttaaaattcgagaacggaatggattattccaaaggagagtatgctaaagcaatagagaaatcttttagttttctgtctgaaagttctttcagctcatcaccatggtcatctacagattctgaagcaagcttatcgtctctgtcttcattttcatctgatgacttttctggttatgatagctcatctttattgtccccaatgcatccagaaatgactgtgaatgggaaagtaactctcaaagacaaatattcagttactgttgtatatgacaatcaattctttgcactccgaaaaaagtgttgcccatccgagcttgcatatattacttctttaagccgctgcaagaagtggaatgctcaaggtggaaagagcaaggcctattttgcaaagacgacggatgacaggttcatcattaagcaaatcaagaaaacagagtttgagtcatttattaaatttgcacctgattactttaagcatgtttaccattctctggacactggaagccaaacttgtctcgccaaaatattaggaatctatcaggttaagcaaattaagcatggtaaagaggtaaagattgacttgatggtgatggaaaatcttctctttggccacaatatttcacgaatttatgacctcaaaggtgctacattttcgcgacgcatcactgactcaaatgatcatgatactgtttacctggatcaaaattatgttgaggacatggggttttctccaatctatattggtggaagaacaaagcatcttttgcagcgtgcaatctggaatgacacggcttttctcacttcggtgaatgtcatggactattctctacttgtgggagtggacaaagagaagcatgaacttgtgtttggcatcattgattatctgaggcaatatacttgggacaaacaactggagacatgggtgaagacttctctggtagtacccaaaaatgttttaccaactgtaatttcccccaaggaatacaaaaaaaggtttaggaagttcatggcgaagtactttctgtcagttccagacacatggagtcctgataatccgtctaagccatgcaaatcccttggtcagagcaatcgcaagttggcggaagtccagaatggtgataacctgtcagagcacccaaatgaagttgaggggtgtgcctaatcatgtgcaggatttcctggcagttttgttgaatcctatcatgttgttgtttggctatatttcactttgtaaaatggtgtacatagaaggacctcactgttgatttatccaaaagtttgcggtttttaggcaaattgttgggcaagtgaggtccacaggacgtgtacctatgttcattgttaatttcacaattattatagtgaaattaagaattcatatgatcatttttttggacctaccacttgtgagactgaagcagtctattcttcacttatgactaactgtccaagaccaagatagacatttcctacctctattgaaattaggtcaatttgagtattatgttgtactgtgtacccccactgtactgctgggatatgtaaaaggttccgtataaatgtctgctcccctgaccttgtttgttgcacgcagcacaatacatattttgtgtttgatggatgtccagtttctgtattgctgcccacttgcacttttttttggttctgcacaatgtacaaccttttcagatctcctggtatagaacatattgcaagctattttctttcgtaaaccgagttacat

SEQ ID NO: 201976 - DNA, 4840 bp, Zea Mays
cctcacctcacctctccacctgccgtcgtcttcctttcgttcctagacacgctagacttggctttggccataccttggactccccttccctctcctctccccgtctcccggcgtgcgtgcgtactacttactgcttgtccaatcgccgcgaccagagctcccgcgcacgctactggagaggattccagcgcccgtcgagcaacaggactctagcgcccgacccgacaaacgacagatagtagctactgcctccctacaccgtctcggcatctccgggggcacggcacgggaacggaggagcggagaaatccatccgccgaaccgcttgctttgcttggcaggcaccccgtacaattgggggttccggttcgaggaacgctcgggggggcgtgtgtgcggccgccttcgctcctcatccagaccacttgattacgccgcgctccctacgacaggaggtgcccaggccgaggtccttcgccggcgacgagcaccaaccagccaattccagagcaaccaaccgcaagggcatgtgacaaactgccgcctgcggtgccttcgccccaggcaatgtgctccgacatggatcagcgcgaccaccacgcaaccagatcttgctaaaaggagcaaacagtgaagaattgaagaaggtcaaacaagtaatgcattttacagtctttgcagcatatcacttgatccttgaaacatctttctttgaagatcaaagggtttttctgaatgatagtactacaaaagaaacttctgctactgctacagaagggacttatggtgttgctgctcttagtgggcctattcctaactttccttcacatgatgattctccggcacttagactgttccatgccacttctaatagctatgctgatgtgaacaaacctttgatatctccaagaaatgtggataaattcagtgcagtatccagcagctcttcaaatgaccttgaacaaggtgcaaatgtcaggtccaataatgccgagaggttaacattaccagtccaagggccactaaggaaattgttcgctgacatgttatgtcaccagaatatttacttacccgttacatcattgcaagaggcaaatgataacaggaaggaagtcagggttgaatccagtcaagaaactgttagtaatggtttccataggccaaagacaggagagtctgtgatttccattgaaaatggggagtccataaatgatgcccagacacaagaaattactcaagcaataatgccaactggttcttctgtaagtgataaggatgcagaatcacctgttatgggagacaatggggcacatagtactacaagtatcattatcaaagagaagcatgctgacggcgatcaagctgatgatgcacttgattctcacagcatactgattttgatgtctagccagtgcacagaaaagcaggttatctgtgaacaaagccatttaacccgtataaaatactatgggagttttgatgtgtccttggggcgatatttgcaagacattctacagaatcagcagaaactgagttgctcttcatgtggagagcctccagagtcgcacatgtactcctacacgcaccgcaatggaaatttgaccgttctagtgaaacgtctggtgcccaaacactatttgcctggcgaatctgaaggaaaaatatggatgtggactagatgctcaagatgtgatcatgaacatggggtatccaaaccaactccaagagtactaatatcagctgaagcacgcaacctctcgtttgggaaatttctggagctcagtttttcaagccactctgcagcaagaaggttatctatatgtggacatctggtcaacagggattgcttgcgtttttttgggctgggctctaaagttgctatgttccggtactcacctgttgaaatttacactacctgcaaaccacaacctactctccaattcgtcaaccccatcagacaggattggtttgaaggacaaaggagaaatgttcatgctaaaagtatggcacttttctctggggttgcaagatttctacagaacttgaagaatgaacatcctgatgcaataacattagcagtcaattgtggcctcacactccctgttaaggacttcactgaactagaagagttgttgataaaagaaaaggcccagtttgagagttctttggacaaggccactgacgaaaatgggaaaccattcgggtctgtgcatggagtattgaatataaattggtactatcaggatcttctacttaagctttacatttgggaccgccgtctatatcaactattctattgcaaatctgtccaactagaaagttgttctaattacaagaatcctgctggtactgttgatgggaactgtgatgataactttggtgttgataagaaaatcggtgaaattacatctgatgaaattacggcagctttgggggtatccagtaccatggagtctgcaagtaacaaacttgatcatcaatcaggtgacaccacagcactcttacttcataaaagccaggaagctgggcactcggaatttccttgcaatggaggtagtaaagctgaagaatcttctattgctcatggtcaaataaaggtagatggcacaacagaaaccacaaatgatccttgttttgaaatatccaatgatatggaggtccaggccaatcttacagtagcagatccaatacccatggaacaggagcgttgtagcactccccaacaattcaaatatccttattgggatgacagggagaggtggatttggaattcattttctgagtctcaaatggcttacagggatgacattgaaattggatatttgggcaaatttgaactcattaacaattatttgccacattatctttctcccttgtttgaacaacatgatgattcatactctccgcagttcgcggtaggtccaggtagtaatattttgtgcataatggaagatgagatatccagcataatagctcgtgctcttgccatatctgatgaacgccaccatttgatagatttaaaattcgagaacggaatggattattccaaaggagagtatgctaaagcaatagagaaatcttttagttttctgtctgaaagttctttcagctcatcaccatggtcatctacagattctgaagcaagcttatcgtctctgtcttcattttcatctgatgacttttctggttatgatagctcatctttattgtccccaatgcatccagaaatgactgtgaatgggaaagtaactctcaaagacaaatattcagttactgttgtatatgacaatcaattctttgcactccgaaaaaagtgttgcccatccgagcttgcatatattacttctttaagccgctgcaagaagtggaatgctcaaggtggaaagagcaaggcctattttgcaaagacgacggatgacaggttcatcattaagcaaatcaagaaaacagagtttgagtcatttattaaatttgcacctgattactttaagcatgtttaccattctctggacactggaagccaaacttgtctcgccaaaatattaggaatctatcaggtaattatatcacgagctcgagttggattcgtttcgttttactgttttctttcccatgtggactaacttgcctgtttcaggttaagcaaattaagcatggtaaagaggtaaagattgacttgatggtgatggaaaatcttctctttggccacaatatttcacgaatttatgacctcaaaggtgctacattttcgcgacgcatcactgactcaaatgatcatgatactgtttacctggatcaaaattatgttgaggacatggggttttctccaatctatattggtggaagaacaaagcatcttttgcagcgtgcaatctggaatgacacggcttttctcacttcggtgaatgtcatggactattctctacttgtgggagtggacaaagagaagcatgaacttgtgtttggcatcattgattatctgaggcaatatacttgggacaaacaactggagacatgggtgaagacttctctggtagtacccaaaaatgttttaccaactgtaatttcccccaaggaatacaaaaaaaggtttaggaagttcatggcgaagtactttctgtcagttccagacacatggagtcctgataatccgtctaagccatgcaaatcccttggtcagagcaatcgcaagttggcggaagtccagaatggtgataacctgtcagagcacccaaatgaagttgaggggtgtgcctaatcatgtgcaggatttcctggcagttttgttgaatcctatcatgttgttgtttggctatatttcactttgtaaaatggtgtacatagaaggacctcactgttgatttatccaaaagtttgcggtttttaggcaaattgttgggcaagtgaggtccacaggacgtgtacctatgttcattgttaatttcacaattattatagtgaaattaagaattcatatgatcatttttttggacctaccacttgtgagactgaagcagtctattcttcacttatgactaactgtccaagaccaagatagacatttcctacctctattgaaattaggtcaatttgagtattatgttgtactgtgtacccccactgtactgctgggatatgtaaaaggttccgtataaatgtctgctcccctgaccttgtttgttgcacgcagcacaatacatattttgtgtttgatggatgtccagtttctgtattgctgcccacttgcacttttttttggttctgcacaatgtacaaccttttcagatctcctggtatagaacatattgcaagctattttctttcgtaaaccgagttacat

SEQ ID NO: 201977 - DNA, 5849 bp, Zea Mays
cctcacctcacctctccacctgccgtcgtcttcctttcgttcctagacacgctagacttggctttggccataccttggactccccttccctctcctctccccgtctcccggcgtgcgtgcgtactacttactgcttgtccaatcgccgcgaccagagctcccgcgcacgctactggagaggattccagcgcccgtcgagcaacaggactctagcgcccgacccgacaaacgacagatagtagctactgcctccctacaccgtctcggcatctccgggggcacggcacgggaacggaggagcggagaaatccatccgccgaaccgcttgctttgcttggcaggcaccccgtacaattgggggttccggttcgaggaacgctcgggggggcgtgtgtgcggccgccttcgctcctcatccagaccacttgattacgccgcgctccctacgacaggaggtgcccaggccgaggtccttcgccggcgacgagcaccaaccagagcaaccaaccgcaagggcatgtgacaaactgccgcctgcggtgccttcgccccaggcaatgtgctccgacatggatcagcgcgaccaccacgcaaccagggaggctgcaccagaggctaatggttaccatcacagcccccatggtgtggaccagagtcaggttgtggatgctgataagcatataaaccatcattccacagacgacaatgctccctccagcgcttcaggccacagacatggtggtatcagccgtcatgcatccacatcttctgttgatgaccgctccatcaagtctggtgacgattctgatggggccgagagtaccaatggcagaagcagtaacacggagatctcgtttctagaaaatgataccgtctggataccacctcaagcggcagataaggaggatgaggcccagagttttgctacaagcattgcttatgacgacgacgatgacgattatagtgatgggataaagtggggccagtcaagtttcccatcccctggtaagcagcatgacgccggcactagcaatcatagggaggtacgagaaaaagcgatgctagaagctatgaatggccagctgaagatacttgtcagtcggtttctcgcatctgttggcattccgtcttcgaacgaggaggctagcgatagctggcttgacattgtcacctccctgtcatgggaagcagcgctacttatcaaacctgatggtagcatgggaaaggaaatggaccctggctcttacatcaaagtcaaatgcatagcatctggtactcgccggcaaagtgaggtgatcaaagggttagtattcaagaagaacgctgctcataagcacatgccgacaaattgccacaatcctaggcttctacttgtcaaaggagtccttgggcattctgatgtcggtttgtcgtcgtttaattcaatgggtcaggaaaaggacctgttggagagagctatcggtaaaataatggagatatgcagtcccaatgttgttctggtcgagaaaactgtttcacgaaacattcaagaacttcttctgaaagaagaagttttggataaaccgaagctgaagcaatgtgactactttcatatcggaaaatttaccgaggagcacaacaatgccagtgagggtggaaagatgacatctaaaacattaatgttcttggaaggctttccatgtccactcggttgcacgatcttgctaaaaggagcaaacagtgaagaattgaagaaggtcaaacaagtaatgcattttacagtctttgcagcatatcacttgatccttgaaacatctttctttgaagatcaaagggtttttctgaatgatagtactacaaaagaaacttctgctactgctacagaagggacttatggtgttgctgctcttagtgggcctattcctaactttccttcacatgatgattctccggcacttagactgttccatgccacttctaatagctatgctgatgtgaacaaacctttgatatctccaagaaatgtggataaattcagtgcagtatccagcagctcttcaaatgaccttgaacaaggtgcaaatgtcaggtccaataatgccgagaggttaacattaccagtccaagggccactaaggaaattgttcgctgacatgttatgtcaccagaatatttacttacccgttacatcattgcaagaggcaaatgataacaggaaggaagtcagggttgaatccagtcaagaaactgttagtaatggtttccataggccaaagacaggagagtctgtgatttccattgaaaatggggagtccataaatgatgcccagacacaagaaattactcaagcaataatgccaactggttcttctgtaagtgataaggatgcagaatcacctgttatgggagacaatggggcacatagtactacaagtatcattatcaaagagaagcatgctgacggcgatcaagctgatgatgcacttgattctcacagcatactgattttgatgtctagccagtgcacagaaaagcaggttatctgtgaacaaagccatttaacccgtataaaatactatgggagttttgatgtgtccttggggcgatatttgcaagacattctacagaatcagcagaaactgagttgctcttcatgtggagagcctccagagtcgcacatgtactcctacacgcaccgcaatggaaatttgaccgttctagtgaaacgtctggtgcccaaacactatttgcctggcgaatctgaaggaaaaatatggatgtggactagatgctcaagatgtgatcatgaacatggggtatccaaaccaactccaagagtactaatatcagctgaagcacgcaacctctcgtttgggaaatttctggagctcagtttttcaagccactctgcagcaagaaggttatctatatgtggacatctggtcaacagggattgcttgcgtttttttgggctgggctctaaagttgctatgttccggtactcacctgttgaaatttacactacctgcaaaccacaacctactctccaattcgtcaaccccatcagacaggattggtttgaaggacaaaggagaaatgttcatgctaaaagtatggcacttttctctggggttgcaagatttctacagaacttgaagaatgaacatcctgatgcaataacattagcagtcaattgtggcctcacactccctgttaaggacttcactgaactagaagagttgttgataaaagaaaaggcccagtttgagagttctttggacaaggccactgacgaaaatgggaaaccattcgggtctgtgcatggagtattgaatataaattggtactatcaggatcttctacttaagctttacatttgggaccgccgtctatatcaactattctattgcaaatctgtccaactagaaagttgttctaattacaagaatcctgctggtactgttgatgggaactgtgatgataactttggtgttgataagaaaatcggtgaaattacatctgatgaaattacggcagctttgggggtatccagtaccatggagtctgcaagtaacaaacttgatcatcaatcaggtgacaccacagcactcttacttcataaaagccaggaagctgggcactcggaatttccttgcaatggaggtagtaaagctgaagaatcttctattgctcatggtcaaataaaggtagatggcacaacagaaaccacaaatgatccttgttttgaaatatccaatgatatggaggtccaggccaatcttacagtagcagatccaatacccatggaacaggagcgttgtagcactccccaacaattcaaatatccttattgggatgacagggagaggtggatttggaattcattttctgagtctcaaatggcttacagggatgacattgaaattggatatttgggcaaatttgaactcattaacaattatttgccacattatctttctcccttgtttgaacaacatgatgattcatactctccgcagttcgcggtaggtccaggtagtaatattttgtgcataatggaagatgagatatccagcataatagctcgtgctcttgccatatctgatgaacgccaccatttgatagatttaaaattcgagaacggaatggattattccaaaggagagtatgctaaagcaatagagaaatcttttagttttctgtctgaaagttctttcagctcatcaccatggtcatctacagattctgaagcaagcttatcgtctctgtcttcattttcatctgatgacttttctggttatgatagctcatctttattgtccccaatgcatccagaaatgactgtgaatgggaaagtaactctcaaagacaaatattcagttactgttgtatatgacaatcaattctttgcactccgaaaaaagtgttgcccatccgagcttgcatatattacttctttaagccgctgcaagaagtggaatgctcaaggtggaaagagcaaggcctattttgcaaagacgacggatgacaggttcatcattaagcaaatcaagaaaacagagtttgagtcatttattaaatttgcacctgattactttaagcatgtttaccattctctggacactggaagccaaacttgtctcgccaaaatattaggaatctatcaggttaagcaaattaagcatggtaaagaggtaaagattgacttgatggtgatggaaaatcttctctttggccacaatatttcacgaatttatgacctcaaaggtgctacattttcgcgacgcatcactgactcaaatgatcatgatactgtttacctggatcaaaattatgttgaggacatggggttttctccaatctatattggtggaagaacaaagcatcttttgcagcgtgcaatctggaatgacacggcttttctcacttcggtgaatgtcatggactattctctacttgtgggagtggacaaagagaagcatgaacttgtgtttggcatcattgattatctgaggcaatatacttgggacaaacaactggagacatgggtgaagacttctctggtagtacccaaaaatgttttaccaactgtaatttcccccaaggaatacaaaaaaaggtttaggaagttcatggcgaagtactttctgtcagttccagacacatggagtcctgataatccgtctaagccatgcaaatcccttggtcagagcaatcgcaagttggcggaagtccagaatggtgataacctgtcagagcacccaaatgaagttgaggggtgtgcctaatcatgtgcaggatttcctggcagttttgttgaatcctatcatgttgttgtttggctatatttcactttgtaaaatggtgtacatagaaggacctcactgttgatttatccaaaagtttgcggtttttaggcaaattgttgggcaagtgaggtccacaggacgtgtacctatgttcattgttaatttcacaattattatagtgaaattaagaattcatatgatcatttttttggacctaccacttgtgagactgaagcagtctattcttcacttatgactaactgtccaagaccaagatagacatttcctacctctattgaaattaggtcaatttgagtattatgttgtactgtgtacccccactgtactgctgggatatgtaaaaggttccgtataaatgtctgctcccctgaccttgtttgttgcacgcagcacaatacatattttgtgtttgatggatgtccagtttctgtattgctgcccacttgcacttttttttggttctgcacaatgtacaaccttttcagatctcctggtatagaacatattgcaagctattttctttcgtaaaccgagttacat

SEQ ID NO: 201978 - DNA, 5859 bp, Zea Mays
cctcacctcacctctccacctgccgtcgtcttcctttcgttcctagacacgctagacttggctttggccataccttggactccccttccctctcctctccccgtctcccggcgtgcgtgcgtactacttactgcttgtccaatcgccgcgaccagagctcccgcgcacgctactggagaggattccagcgcccgtcgagcaacaggactctagcgcccgacccgacaaacgacagatagtagctactgcctccctacaccgtctcggcatctccgggggcacggcacgggaacggaggagcggagaaatccatccgccgaaccgcttgctttgcttggcaggcaccccgtacaattgggggttccggttcgaggaacgctcgggggggcgtgtgtgcggccgccttcgctcctcatccagaccacttgattacgccgcgctccctacgacaggaggtgcccaggccgaggtccttcgccggcgacgagcaccaaccagccaattccagagcaaccaaccgcaagggcatgtgacaaactgccgcctgcggtgccttcgccccaggcaatgtgctccgacatggatcagcgcgaccaccacgcaaccagggaggctgcaccagaggctaatggttaccatcacagcccccatggtgtggaccagagtcaggttgtggatgctgataagcatataaaccatcattccacagacgacaatgctccctccagcgcttcaggccacagacatggtggtatcagccgtcatgcatccacatcttctgttgatgaccgctccatcaagtctggtgacgattctgatggggccgagagtaccaatggcagaagcagtaacacggagatctcgtttctagaaaatgataccgtctggataccacctcaagcggcagataaggaggatgaggcccagagttttgctacaagcattgcttatgacgacgacgatgacgattatagtgatgggataaagtggggccagtcaagtttcccatcccctggtaagcagcatgacgccggcactagcaatcatagggaggtacgagaaaaagcgatgctagaagctatgaatggccagctgaagatacttgtcagtcggtttctcgcatctgttggcattccgtcttcgaacgaggaggctagcgatagctggcttgacattgtcacctccctgtcatgggaagcagcgctacttatcaaacctgatggtagcatgggaaaggaaatggaccctggctcttacatcaaagtcaaatgcatagcatctggtactcgccggcaaagtgaggtgatcaaagggttagtattcaagaagaacgctgctcataagcacatgccgacaaattgccacaatcctaggcttctacttgtcaaaggagtccttgggcattctgatgtcggtttgtcgtcgtttaattcaatgggtcaggaaaaggacctgttggagagagctatcggtaaaataatggagatatgcagtcccaatgttgttctggtcgagaaaactgtttcacgaaacattcaagaacttcttctgaaagaagaagttttggataaaccgaagctgaagcaatgtgactactttcatatcggaaaatttaccgaggagcacaacaatgccagtgagggtggaaagatgacatctaaaacattaatgttcttggaaggctttccatgtccactcggttgcacgatcttgctaaaaggagcaaacagtgaagaattgaagaaggtcaaacaagtaatgcattttacagtctttgcagcatatcacttgatccttgaaacatctttctttgaagatcaaagggtttttctgaatgatagtactacaaaagaaacttctgctactgctacagaagggacttatggtgttgctgctcttagtgggcctattcctaactttccttcacatgatgattctccggcacttagactgttccatgccacttctaatagctatgctgatgtgaacaaacctttgatatctccaagaaatgtggataaattcagtgcagtatccagcagctcttcaaatgaccttgaacaaggtgcaaatgtcaggtccaataatgccgagaggttaacattaccagtccaagggccactaaggaaattgttcgctgacatgttatgtcaccagaatatttacttacccgttacatcattgcaagaggcaaatgataacaggaaggaagtcagggttgaatccagtcaagaaactgttagtaatggtttccataggccaaagacaggagagtctgtgatttccattgaaaatggggagtccataaatgatgcccagacacaagaaattactcaagcaataatgccaactggttcttctgtaagtgataaggatgcagaatcacctgttatgggagacaatggggcacatagtactacaagtatcattatcaaagagaagcatgctgacggcgatcaagctgatgatgcacttgattctcacagcatactgattttgatgtctagccagtgcacagaaaagcaggttatctgtgaacaaagccatttaacccgtataaaatactatgggagttttgatgtgtccttggggcgatatttgcaagacattctacagaatcagcagaaactgagttgctcttcatgtggagagcctccagagtcgcacatgtactcctacacgcaccgcaatggaaatttgaccgttctagtgaaacgtctggtgcccaaacactatttgcctggcgaatctgaaggaaaaatatggatgtggactagatgctcaagatgtgatcatgaacatggggtatccaaaccaactccaagagtactaatatcagctgaagcacgcaacctctcgtttgggaaatttctggagctcagtttttcaagccactctgcagcaagaaggttatctatatgtggacatctggtcaacagggattgcttgcgtttttttgggctgggctctaaagttgctatgttccggtactcacctgttgaaatttacactacctgcaaaccacaacctactctccaattcgtcaaccccatcagacaggattggtttgaaggacaaaggagaaatgttcatgctaaaagtatggcacttttctctggggttgcaagatttctacagaacttgaagaatgaacatcctgatgcaataacattagcagtcaattgtggcctcacactccctgttaaggacttcactgaactagaagagttgttgataaaagaaaaggcccagtttgagagttctttggacaaggccactgacgaaaatgggaaaccattcgggtctgtgcatggagtattgaatataaattggtactatcaggatcttctacttaagctttacatttgggaccgccgtctatatcaactattctattgcaaatctgtccaactagaaagttgttctaattacaagaatcctgctggtactgttgatgggaactgtgatgataactttggtgttgataagaaaatcggtgaaattacatctgatgaaattacggcagctttgggggtatccagtaccatggagtctgcaagtaacaaacttgatcatcaatcaggtgacaccacagcactcttacttcataaaagccaggaagctgggcactcggaatttccttgcaatggaggtagtaaagctgaagaatcttctattgctcatggtcaaataaaggtagatggcacaacagaaaccacaaatgatccttgttttgaaatatccaatgatatggaggtccaggccaatcttacagtagcagatccaatacccatggaacaggagcgttgtagcactccccaacaattcaaatatccttattgggatgacagggagaggtggatttggaattcattttctgagtctcaaatggcttacagggatgacattgaaattggatatttgggcaaatttgaactcattaacaattatttgccacattatctttctcccttgtttgaacaacatgatgattcatactctccgcagttcgcggtaggtccaggtagtaatattttgtgcataatggaagatgagatatccagcataatagctcgtgctcttgccatatctgatgaacgccaccatttgatagatttaaaattcgagaacggaatggattattccaaaggagagtatgctaaagcaatagagaaatcttttagttttctgtctgaaagttctttcagctcatcaccatggtcatctacagattctgaagcaagcttatcgtctctgtcttcattttcatctgatgacttttctggttatgatagctcatctttattgtccccaatgcatccagaaatgactgtgaatgggaaagtaactctcaaagacaaatattcagttactgttgtatatgacaatcaattctttgcactccgaaaaaagtgttgcccatccgagcttgcatatattacttctttaagccgctgcaagaagtggaatgctcaaggtggaaagagcaaggcctattttgcaaagacgacggatgacaggttcatcattaagcaaatcaagaaaacagagtttgagtcatttattaaatttgcacctgattactttaagcatgtttaccattctctggacactggaagccaaacttgtctcgccaaaatattaggaatctatcaggttaagcaaattaagcatggtaaagaggtaaagattgacttgatggtgatggaaaatcttctctttggccacaatatttcacgaatttatgacctcaaaggtgctacattttcgcgacgcatcactgactcaaatgatcatgatactgtttacctggatcaaaattatgttgaggacatggggttttctccaatctatattggtggaagaacaaagcatcttttgcagcgtgcaatctggaatgacacggcttttctcacttcggtgaatgtcatggactattctctacttgtgggagtggacaaagagaagcatgaacttgtgtttggcatcattgattatctgaggcaatatacttgggacaaacaactggagacatgggtgaagacttctctggtagtacccaaaaatgttttaccaactgtaatttcccccaaggaatacaaaaaaaggtttaggaagttcatggcgaagtactttctgtcagttccagacacatggagtcctgataatccgtctaagccatgcaaatcccttggtcagagcaatcgcaagttggcggaagtccagaatggtgataacctgtcagagcacccaaatgaagttgaggggtgtgcctaatcatgtgcaggatttcctggcagttttgttgaatcctatcatgttgttgtttggctatatttcactttgtaaaatggtgtacatagaaggacctcactgttgatttatccaaaagtttgcggtttttaggcaaattgttgggcaagtgaggtccacaggacgtgtacctatgttcattgttaatttcacaattattatagtgaaattaagaattcatatgatcatttttttggacctaccacttgtgagactgaagcagtctattcttcacttatgactaactgtccaagaccaagatagacatttcctacctctattgaaattaggtcaatttgagtattatgttgtactgtgtacccccactgtactgctgggatatgtaaaaggttccgtataaatgtctgctcccctgaccttgtttgttgcacgcagcacaatacatattttgtgtttgatggatgtccagtttctgtattgctgcccacttgcacttttttttggttctgcacaatgtacaaccttttcagatctcctggtatagaacatattgcaagctattttctttcgtaaaccgagttacat

SEQ ID NO: 201979 - DNA, 1331 bp, Zea Mays
tccactccgctccatcctcactccctcccgatgccttccacttccctcgccgtccccaccggcgccgtcggcgtcgccggctctcgccgctatccattcatcagcaaccgatcagcctcaagcgccccgcgcctccgccgcgcgccccggctcgtcatggtctccgcctcggcgtctctcgaggccctcatctttgattgcgacggcgtcatactggagtcagagcacctccaccgccaggcctacaacgacgcgttcgcgaacttcggggtgcgctgcccgccgggctccgccgacctgctgtactgggacgaggccttctacgacaacctacagaaccgcatcggcggagggaagcccaagatgcggtggtactttggggaaaatgggtggcctccttcaaagatctttgagacaccaccttcgactgactctgataaggagaagctggttgatataattcaggattggaaaacagagagatacaaagaaataataaactctggaactgtgaagcctagacctggtgtcttgcagttgatggatgaagtaaaggatgcgggtatcaagcttgctgtttgctctgcagcaactaaaagttcagtcataatgtgccttgaaaaccttattggacttgagcgatttaatggcctggattgcttccttgctggtgatgatgttaaactaaagaagcctgatccaacaatatatataacagcatcagagaaattaggtgtggaaagcaagaactgccttgtggttgaggatagtgtcattggattacaggtaagtcttcagatatgtatctgattaaccacactaatcctgttaactatgagatccatttactttttaataggctgcaaaaggagcaggaatgtcatgtataataacatatacaccttcaactgctagccaagcttgaggacctcaagctattactccagaaaactcttgttactggatagcaaagtgtcttgttttccccaaagaatacattgaaaattttcttgatgcatgataatccacgctattattccctggatgttgaacagttggtgatgagtgttgaacagtagatgaatccaaacatacatcttgttgaacagttggtgctggatggtggaaggcatgattactcagatagataattaatgcaactagaaagatagatagttacgattgttaaaacttttgttgtgaagagtgatacaattgttgtgtatcgaaaaacaattttatcttacattttggagagaaaaattattatctcggggtgcccctcacatcgtgttttacaactgaaattgagaagttcatatgtgataaag

SEQ ID NO: 201980 - DNA, 1072 bp, Zea Mays
cacacttcaggacatgaattcaagagggcaagggcaactcctaccggtctggcagacttaagtggagtccctggaggcgctggccttcgttctggattcgacccatcaagaggcaatgcatacgatggctctcatgttgccaatttcagctcttcaaaaactgggacccatgatgcatcaaggggtgccactggctttgactctctcaagggttctgggtatgatgcttcaaaggcgcatgtaactggacaggcgtcagctacagcggctcatgggggcattgctggttactacgggtccaatcaggcagcacatgcgtggggacaatctgcatcgccctacggatctgtacaggtgccaccatcctacgcatctgggtcaaacacatcctatggcgcagcagcagcagcagcagtgcgtccctatggttcagctcaggcgcaaccatcatatggacaaacgcaggcaccatctgcgtatgggcacacacagctaccatcatcctacagtctagcacaggcgcagtctcccttcaccgctgcgcaggggtcctcgccctatgggttggctgcgcagcctccagcctatggatctgggcgagcaggctccaatgctggcagttacgaagctcctcaaggacgtaaataagttcgcgccaaatttgcatacttggccacttgcgaaagagagctttgttacaccgagtccaaatcctttctgttgctacttaaaccttgtttaactgtgatgtcagaggaacctgttacagccgataaaacgattctctgtaaacgtattatcgtgaccgatgatgccgatgcatttttttgttcagtagagtaggccatttgggaacgcagatttgagttgtgcgatattggttctatatctggcttcactggttggttcattcataacgttaaattatgtttgtttaagttcaaccgtaatcagataccacactaaaaattgctaacagcgtattcgatctttttattgctgatacatctttttattgtcgatactcgagtgtaaatcattatcatttaagttaccaaacagtatccaagtt

SEQ ID NO: 201981 - DNA, 1071 bp, Zea Mays
cttccaatggggctaagcttccttttgaggctatttttgtgtcgcataaggattctgcaagtaatccaacaatcgttgttcttcatggtggaccacactcagtttatccatcaagttattccaaatccttggcttttcttttttcgcagggatataatcttcttgttgtgaactacaggggttcattaggctttggggaagaagcactgcaatcccttcctggcaatattggttctcaggatgtcaatgatgtattgacggcattggaccttgttataaagagaggactaatagatccatccagagttgccgtagttggaggttcacatggaggtttcctgacaacacatttgattggccaggctccagacacatttgttgcagcagctgctcgaaacccagtatgtaacttatcattgatggtgggtacctctgacatccctgattggtgctttgtcgagatttatggaaaagaagggaaaaagtacttctcagagtctccttcagtagacgatctttgtcaattccaccagaagtcaccaatttcacatattgcaaaggtcaagacaccaacactctttcttcttggagcgcaagatctcagagttcctgtttctaatggcctgcagtacgcaagggctttgaaggagaggggaatcgaaacgaaaactattgtcttcccagaagatatccatggaattgacaagcctcagtctgatttcgaaagcttcctcaacataggggtttggttcaagaagcacatgggcaaataaacattagtgcttcccattacattcatgatttactttttcattgttactaaatgcctgtaaccgggtcaaagtatacatgatttgcctgtccaatctggtgtttgccaagatggaataattcttgaagacatatagaagcccgtgtttattctagtgtggattctggaataccaactgtagctagtttatataataatcttctaataaatgatgcttatgtgttaatgtgaaacggtgcgtgcttttgaattgtattcagaaaaaaaatggcccagctgaccagctcactgttgtttag

SEQ ID NO: 201982 - DNA, 968 bp, Zea Mays
tccttatttgtgaattgattatttttcaaagcaacagaaatggtccatccccagcaaaatgatacaacgaacactccgggtatgttacctgtggaacctgcagaagaaccaatatatgttaatgcaaaacaataccatgcaatccttaggaggaggcaaacacgtgctaaattggaggcccagaacaagatggtgaaaaatcggaagccatatcttcatgagtcccgacatcgtcatgccatgaaacgggctcgtggatcaggaggacggttcctcaacacaaagcagctccaggagcagaaccagcagtatcaggcatcgagtggttcattgtgctcaaagatcattgccaacagcataatctcccaaagtggccccacctgcacgccctcttctggcactgcaggtgcttcaacagccggccaggaccgcagctgcttgccctcagttggcttccgccccacgacaaacttcagtgaccaaggtcgaggaggcttgaagctggccgtgatcggcatgcagcagcgtgtttccaccataaggtgaagagaagtgggcacaacaccattcccaggcacactgcctgtggcaactcatccttggctcttggaactttgaatatgcaatcgacatgtagcttgagatcctcagaataaaccaaaccttcagttatatgcaagccttttttgaggttgctgttgctgtacctgagaactgtggttaggttatgagtttgttcctcaaaactgacccatacatgacatgctaccttgtgctgagtttctgagacaaagccatcgaaacatgatcttgtggttcagtactttgctgccattagtgtctgataaactagctccccagtttgcagtttctctgaattccagcatgtctagcctcagccaacgttttgcatttgatgtgacgatgacataccatacacatttgtgcattcatctatgttctcaaag

SEQ ID NO: 201983 - DNA, 968 bp, Zea Mays
tcactcttaatttttcagtttctgtcttcctggccacattctgtccatccccagcaaaatgatacaacgaacactccgggtatgttacctgtggaacctgcagaagaaccaatatatgttaatgcaaaacaataccatgcaatccttaggaggaggcaaacacgtgctaaattggaggcccagaacaagatggtgaaaaatcggaagccatatcttcatgagtcccgacatcgtcatgccatgaaacgggctcgtggatcaggaggacggttcctcaacacaaagcagctccaggagcagaaccagcagtatcaggcatcgagtggttcattgtgctcaaagatcattgccaacagcataatctcccaaagtggccccacctgcacgccctcttctggcactgcaggtgcttcaacagccggccaggaccgcagctgcttgccctcagttggcttccgccccacgacaaacttcagtgaccaaggtcgaggaggcttgaagctggccgtgatcggcatgcagcagcgtgtttccaccataaggtgaagagaagtgggcacaacaccattcccaggcacactgcctgtggcaactcatccttggctcttggaactttgaatatgcaatcgacatgtagcttgagatcctcagaataaaccaaaccttcagttatatgcaagccttttttgaggttgctgttgctgtacctgagaactgtggttaggttatgagtttgttcctcaaaactgacccatacatgacatgctaccttgtgctgagtttctgagacaaagccatcgaaacatgatcttgtggttcagtactttgctgccattagtgtctgataaactagctccccagtttgcagtttctctgaattccagcatgtctagcctcagccaacgttttgcatttgatgtgacgatgacataccatacacatttgtgcattcatctatgttctcaaag

SEQ ID NO: 201984 - DNA, 1821 bp, Zea Mays
gtgggaatctgcaatcccttttctattctagctaggattagatggcttgaatctaaattgtgcagactctggtgattataactgtctgataaagggtcatcttgagggtgcggatatgcatgttagaacttcaggggagtgtcgagtcaggcttatcagtgcctaaacttgttgatacgagctaaaagtttgctgaagcatctttcctgtgaggacctgacaactgacatgcacaaaattagtgggataaaatgctgatccactcttggtaaaaacaaaggttctctatagtgttttccagtgtccaaacatctgagatgggaaaaaataacttgccattgatgataatgagataatccactgaaagcagataccacttggcactctgcctggaatagatgtcaatctgtaactgatagagttaatttttaggtaccagatcatctgatttctcagaagcaaaatgttgtttggagctcagtgacaccatcttgtaatgcctgtgattttacgggaaatggaggatcattctgtccatcccatgtctaagtctaaccatggctccttgtcaggaaatggttatgagatgaaacattcaggccataaagtttgcgatagggattcatcatcggagtctgatcggtctcaccaagaagcatcagcagcaagtgaaagcagtccaaatgaacacacatcaactcaatcagacaatgatgaagatcatgggaaagataatcaggacacaatgaagccagtattgtccttggggaaggaaggctctgcctttttggccccaaaattacattacagcccatcttttgcttgtattccttatacttctgatgcttattatagtgcggttggggtcttgacaggatatcctccacatgccattgtccatccccagcaaaatgatacaacgaacactccgggtatgttacctgtggaacctgcagaagaaccaatatatgttaatgcaaaacaataccatgcaatccttaggaggaggcaaacacgtgctaaattggaggcccagaacaagatggtgaaaaatcggaagccatatcttcatgagtcccgacatcgtcatgccatgaaacgggctcgtggatcaggaggacggttcctcaacacaaagcagctccaggagcagaaccagcagtatcaggcatcgagtggttcattgtgctcaaagatcattgccaacagcataatctcccaaagtggccccacctgcacgccctcttctggcactgcaggtgcttcaacagccggccaggaccgcagctgcttgccctcagttggcttccgccccacgacaaacttcagtgaccaaggtcgaggaggcttgaagctggccgtgatcggcatgcagcagcgtgtttccaccataaggtgaagagaagtgggcacaacaccattcccaggcacactgcctgtggcaactcatccttggctcttggaactttgaatatgcaatcgacatgtagcttgagatcctcagaataaaccaaaccttcagttatatgcaagccttttttgaggttgctgttgctgtacctgagaactgtggttaggttatgagtttgttcctcaaaactgacccatacatgacatgctaccttgtgctgagtttctgagacaaagccatcgaaacatgatcttgtggttcagtactttgctgccattagtgtctgataaactagctccccagtttgcagtttctctgaattccagcatgtctagcctcagccaacgttttgcatttgatgtgacgatgacataccatacacatttgtgcattcatctatgttctcaaag

SEQ ID NO: 201985 - DNA, 1214 bp, Zea Mays
gtttgcgatagggattcatcatcggagtctgatcggtctcaccaagaagcatcagcagcaagtgaaagcagtccaaatgaacacacatcaactcaatcagacaatgatgaagatcatgggaaagataatcaggacacaatgaagccagtattgtccttggggaaggaaggctctgcctttttggccccaaaattacattacagcccatcttttgcttgtattccttatacttctgatgcttattatagtgcggttggggtcttgacaggatatcctccacatgccattgtccatccccagcaaaatgatacaacgaacactccgggtatgttacctgtggaacctgcagaagaaccaatatatgttaatgcaaaacaataccatgcaatccttaggaggaggcaaacacgtgctaaattggaggcccagaacaagatggtgaaaaatcggaagccatatcttcatgagtcccgacatcgtcatgccatgaaacgggctcgtggatcaggaggacggttcctcaacacaaagcagctccaggagcagaaccagcagtatcaggcatcgagtggttcattgtgctcaaagatcattgccaacagcataatctcccaaagtggccccacctgcacgccctcttctggcactgcaggtgcttcaacagccggccaggaccgcagctgcttgccctcagttggcttccgccccacgacaaacttcagtgaccaaggtcgaggaggcttgaagctggccgtgatcggcatgcagcagcgtgtttccaccataaggtgaagagaagtgggcacaacaccattcccaggcacactgcctgtggcaactcatccttggctcttggaactttgaatatgcaatcgacatgtagcttgagatcctcagaataaaccaaaccttcagttatatgcaagccttttttgaggttgctgttgctgtacctgagaactgtggttaggttatgagtttgttcctcaaaactgacccatacatgacatgctaccttgtgctgagtttctgagacaaagccatcgaaacatgatcttgtggttcagtactttgctgccattagtgtctgataaactagctccccagtttgcagtttctctgaattccagcatgtctagcctcagccaacgttttgcatttgatgtgacgatgacataccatacacatttgtgcattcatctatgttctcaaag

SEQ ID NO: 201986 - DNA, 1212 bp, Zea Mays
gatacagagggattcatcatcggagtctgatcggtctcaccaagaagcatcagcagcaagtgaaagcagtccaaatgaacacacatcaactcaatcagacaatgatgaagatcatgggaaagataatcaggacacaatgaagccagtattgtccttggggaaggaaggctctgcctttttggccccaaaattacattacagcccatcttttgcttgtattccttatacttctgatgcttattatagtgcggttggggtcttgacaggatatcctccacatgccattgtccatccccagcaaaatgatacaacgaacactccgggtatgttacctgtggaacctgcagaagaaccaatatatgttaatgcaaaacaataccatgcaatccttaggaggaggcaaacacgtgctaaattggaggcccagaacaagatggtgaaaaatcggaagccatatcttcatgagtcccgacatcgtcatgccatgaaacgggctcgtggatcaggaggacggttcctcaacacaaagcagctccaggagcagaaccagcagtatcaggcatcgagtggttcattgtgctcaaagatcattgccaacagcataatctcccaaagtggccccacctgcacgccctcttctggcactgcaggtgcttcaacagccggccaggaccgcagctgcttgccctcagttggcttccgccccacgacaaacttcagtgaccaaggtcgaggaggcttgaagctggccgtgatcggcatgcagcagcgtgtttccaccataaggtgaagagaagtgggcacaacaccattcccaggcacactgcctgtggcaactcatccttggctcttggaactttgaatatgcaatcgacatgtagcttgagatcctcagaataaaccaaaccttcagttatatgcaagccttttttgaggttgctgttgctgtacctgagaactgtggttaggttatgagtttgttcctcaaaactgacccatacatgacatgctaccttgtgctgagtttctgagacaaagccatcgaaacatgatcttgtggttcagtactttgctgccattagtgtctgataaactagctccccagtttgcagtttctctgaattccagcatgtctagcctcagccaacgttttgcatttgatgtgacgatgacataccatacacatttgtgcattcatctatgttctcaaag

SEQ ID NO: 201987 - DNA, 1505 bp, Zea Mays
ccgagcagcggagggggcggcaaaacatttcttgtttgtttattgcgccgaaaaaactaacagacccagaaaaggacagaaagaggctgcacagtaggcgcgtatatttggcagcaggagcggcctcgtcgtgccccgtatcactcctcagttgcttcgacgtatttctctctctatctatacgattccgaagaaggtagagagagaaactcgaaggggagaggacagaagagggagatacagggctccttgtcaggaaatggttatgagatgaaacattcaggccataaagtttgcgatagggattcatcatcggagtctgatcggtctcaccaagaagcatcagcagcaagtgaaagcagtccaaatgaacacacatcaactcaatcagacaatgatgaagatcatgggaaagataatcaggacacaatgaagccagtattgtccttggggaaggaaggctctgcctttttggccccaaaattacattacagcccatcttttgcttgtattccttatacttctgatgcttattatagtgcggttggggtcttgacaggatatcctccacatgccattgtccatccccagcaaaatgatacaacgaacactccgggtatgttacctgtggaacctgcagaagaaccaatatatgttaatgcaaaacaataccatgcaatccttaggaggaggcaaacacgtgctaaattggaggcccagaacaagatggtgaaaaatcggaagccatatcttcatgagtcccgacatcgtcatgccatgaaacgggctcgtggatcaggaggacggttcctcaacacaaagcagctccaggagcagaaccagcagtatcaggcatcgagtggttcattgtgctcaaagatcattgccaacagcataatctcccaaagtggccccacctgcacgccctcttctggcactgcaggtgcttcaacagccggccaggaccgcagctgcttgccctcagttggcttccgccccacgacaaacttcagtgaccaaggtcgaggaggcttgaagctggccgtgatcggcatgcagcagcgtgtttccaccataaggtgaagagaagtgggcacaacaccattcccaggcacactgcctgtggcaactcatccttggctcttggaactttgaatatgcaatcgacatgtagcttgagatcctcagaataaaccaaaccttcagttatatgcaagccttttttgaggttgctgttgctgtacctgagaactgtggttaggttatgagtttgttcctcaaaactgacccatacatgacatgctaccttgtgctgagtttctgagacaaagccatcgaaacatgatcttgtggttcagtactttgctgccattagtgtctgataaactagctccccagtttgcagtttctctgaattccagcatgtctagcctcagccaacgttttgcatttgatgtgacgatgacataccatacacatttgtgcattcatctatgttctcaaag

SEQ ID NO: 201988 - DNA, 2085 bp, Zea Mays
ccgagcagcggagggggcggcaaaacatttcttgtttgtttattgcgccgaaaaaactaacagacccagaaaaggacagaaagaggctgcacagtaggcgcgtatatttggcagcaggagcggcctcgtcgtgccccgtatcactcctcagttgcttcgacgtatttctctctctatctatacgattccgaagaaggtagagagagaaactcgaaggggagaggacagaagagggagatacaggtacactgcccctgacccctcctcgattggtcagttctgttcttgagcgcactgccaccacagattggacggcttgtctgctctccgttcccggagtggcgtcgtgctcactctgctgggttgctttgccttatagtcttgctctgcggtttgatttgcttcatctttttttttcttcaatcttgtcactcctaaggtttcccccctctggttttcttgattccccgcttgggaatttgtgaagtttaacaggatttttttggctgagttcgcatgtttctgttcttggccatgcccatgctatgcttgcttggataagctttggcttcagcctagctcgcattgcacgatgcgttgttcctacttcctagaatccgatcgcaagtcctatgagctgaccactatttcgtggattgcccggggcgtgggctgctgatggtttcggcaatttgggtaccagatcatctgatttctcagaagcaaaatgttgtttggagctcagtgacaccatcttgtaatgcctgtgattttacgggaaatggaggatcattctgtccatcccatgtctaagtctaaccatggctccttgtcaggaaatggttatgagatgaaacattcaggccataaagtttgcgatagggattcatcatcggagtctgatcggtctcaccaagaagcatcagcagcaagtgaaagcagtccaaatgaacacacatcaactcaatcagacaatgatgaagatcatgggaaagataatcaggacacaatgaagccagtattgtccttggggaaggaaggctctgcctttttggccccaaaattacattacagcccatcttttgcttgtattccttatacttctgatgcttattatagtgcggttggggtcttgacaggatatcctccacatgccattgtccatccccagcaaaatgatacaacgaacactccgggtatgttacctgtggaacctgcagaagaaccaatatatgttaatgcaaaacaataccatgcaatccttaggaggaggcaaacacgtgctaaattggaggcccagaacaagatggtgaaaaatcggaagccatatcttcatgagtcccgacatcgtcatgccatgaaacgggctcgtggatcaggaggacggttcctcaacacaaagcagctccaggagcagaaccagcagtatcaggcatcgagtggttcattgtgctcaaagatcattgccaacagcataatctcccaaagtggccccacctgcacgccctcttctggcactgcaggtgcttcaacagccggccaggaccgcagctgcttgccctcagttggcttccgccccacgacaaacttcagtgaccaaggtcgaggaggcttgaagctggccgtgatcggcatgcagcagcgtgtttccaccataaggtgaagagaagtgggcacaacaccattcccaggcacactgcctgtggcaactcatccttggctcttggaactttgaatatgcaatcgacatgtagcttgagatcctcagaataaaccaaaccttcagttatatgcaagccttttttgaggttgctgttgctgtacctgagaactgtggttaggttatgagtttgttcctcaaaactgacccatacatgacatgctaccttgtgctgagtttctgagacaaagccatcgaaacatgatcttgtggttcagtactttgctgccattagtgtctgataaactagctccccagtttgcagtttctctgaattccagcatgtctagcctcagccaacgttttgcatttgatgtgacgatgacataccatacacatttgtgcattcatctatgttctcaaag

SEQ ID NO: 201989 - DNA, 1682 bp, Zea Mays
ctgggttcttggtgcacctaccaatattcaaggcgggtgacgtgtgagcaccgagcagcggagggggcggcaaaacatttcttgtttgtttattgcgccgaaaaaactaacagacccagaaaaggacagaaagaggctgcacagtaggcgcgtatatttggcagcaggagcggcctcgtcgtgccccgtatcactcctcagttgcttcgacgtatttctctctctatctatacgattccgaagaaggtagagagagaaactcgaaggggagaggacagaagagggagatacaggtaccagatcatctgatttctcagaagcaaaatgttgtttggagctcagtgacaccatcttgtaatgcctgtgattttacgggaaatggaggatcattctgtccatcccatgtctaagtctaaccatggctccttgtcaggaaatggttatgagatgaaacattcaggccataaagtttgcgatagggattcatcatcggagtctgatcggtctcaccaagaagcatcagcagcaagtgaaagcagtccaaatgaacacacatcaactcaatcagacaatgatgaagatcatgggaaagataatcaggacacaatgaagccagtattgtccttggggaaggaaggctctgcctttttggccccaaaattacattacagcccatcttttgcttgtattccttatacttctgatgcttattatagtgcggttggggtcttgacaggatatcctccacatgccattgtccatccccagcaaaatgatacaacgaacactccgggtatgttacctgtggaacctgcagaagaaccaatatatgttaatgcaaaacaataccatgcaatccttaggaggaggcaaacacgtgctaaattggaggcccagaacaagatggtgaaaaatcggaagccatatcttcatgagtcccgacatcgtcatgccatgaaacgggctcgtggatcaggaggacggttcctcaacacaaagcagctccaggagcagaaccagcagtatcaggcatcgagtggttcattgtgctcaaagatcattgccaacagcataatctcccaaagtggccccacctgcacgccctcttctggcactgcaggtgcttcaacagccggccaggaccgcagctgcttgccctcagttggcttccgccccacgacaaacttcagtgaccaaggtcgaggaggcttgaagctggccgtgatcggcatgcagcagcgtgtttccaccataaggtgaagagaagtgggcacaacaccattcccaggcacactgcctgtggcaactcatccttggctcttggaactttgaatatgcaatcgacatgtagcttgagatcctcagaataaaccaaaccttcagttatatgcaagccttttttgaggttgctgttgctgtacctgagaactgtggttaggttatgagtttgttcctcaaaactgacccatacatgacatgctaccttgtgctgagtttctgagacaaagccatcgaaacatgatcttgtggttcagtactttgctgccattagtgtctgataaactagctccccagtttgcagtttctctgaattccagcatgtctagcctcagccaacgttttgcatttgatgtgacgatgacataccatacacatttgtgcattcatctatgttctcaaag

SEQ ID NO: 201990 - DNA, 2505 bp, Zea Mays
aacgaaccccacatgtgcgtgatgacccgagacccgaccatgtgattgtctggtagaaatagaaatataaacgcgccccacccggagacctgcacctgcacctgcctgcctccgtctcctcctccttcagttgttgccaccgcccttccctcccttcctctccgcgtcgctcgccgtcccatctttggcctggacacctggcctgcccccccttcgcggacgcgccgggtcgccggccgaatccgccctcccgccgctgccaacgtcgatctgcgcccgcccgcccgcccgccaagtgagattcaaaggtaggacgacgggggggtcgagttcttgtcggtttcattcctggccgccgacttcacatgtcaacaaccccaaggagcagaagccagggtagtaggaccactaggccgtggatcttgtcagggatggactttgctggttccagacggaagcctaatctcacggggaagattgccgtggctgctgccctcacggtcatgtgcataatcgtgttgaaacagtcccctagtttcagcggtaccagcgtggtacgtgcttgaatctctccacaacaactacccatgtcactgccgcttgctgttgagttggcacgacctgtcattattccttcttccagacgacttaagtactctgcttagtttccatggaacatcaacgcgacgctttaatgtttgctgttgtgacttactgctatgtttatgctgttgtgccaggttcatttctgatacatttacgctattatgccagggttattttactgatacatatatgcatcgttcgttcttgatagtcacaaactcacaattccggcacggttgtacagttccagcaatttcctggaagctgttcaaatcatttgcctgcagttctttattactagtttctttaattcttttcggctggaggcatttgttgaagcactcacatttcctgcagttctctcgccatgaaactggggtgacccatgtgttagtaacagggggtgctgggtatattggctcacatgctactcttcgtctccttagtgacaagtaccgagttaccattgtggataacctatccagagggaacattggagctgttagagttcttcaacggttatttccagaacccggaaggcttcaatttatttatgctgatttaggcgatgccaaagctgtatccttcctctgaagtttaataacctagtgtcccccttccccttacatttctgtgttgatgagatttgttttgcacttaaccgataatcaggtgaacaaaatattttcggagaacgcatttgatgctgttatgcactttgctgctgttgcttatgttggtgagagcacaatggagccactcaggtactaccacaacataacgtcaaacacattgacagttcttgaggcaatggcagcacataatgtaaatactctgatttactcgagtacgtgtgcaacctatggtgaacctgatacaatgccgattgtagaaacaactcctcagaatcctatcaatccatatggtaaggcaaagaagatggcggaggacatcatcttagattttacaaaatcaaagaagcaatcaaatatggctgtcatgatcttaagatacttcaacgtgattggatcagacccagagggacggctaggagaagctccaaggccagagctacgcgagcatggacggatatccggtgcttgctttgatgcagctttgggaatcattccagggctaaaggttcgtggaaccgattactccactgcagatggaacttgcgttagagactacatcgatgtcacagatcttgtagatgctcacgtaaaagctcttggtaaagctcagccaggcaaagttggaatctacaatgtcggaacaggccaaggtagatcagtgactgagtttgtagaagcttgcaagaaggcaacaggagcttctatcaaggtcgaatatcttgcacgtagacccggagattatgccgaggtatacagcgatccgtcgaaaatccacatggaactcaactggacagcccagtacactgatcttggccaaagcctcgcccaggcgtggaaatggcagaaagcgcacccgaacggatatggaccagcctgattcagagttcaaagattgagagagactcgtcacgcagatccaaagggtccatgtgcagtcatgtagccttcagacagttggttcttcatcaccatagaaagatagcaaagagcaacagaagagtcctgattcttttattgcagcgctcgaagaaggaaaaaatatcacagagaaccccctacctgctccttgattagtttcaaatatatatatataggtcctcgttgacattttaatataatttgatgtgtgctgaggcgctatataataacacaaacgaaattttgttgtagacagggtagatcgatctcgtgtatcaacttttgtggtggtagaatgaaaggatataaataagttgatgtaagtttttgtttccaaacttgtttg

SEQ ID NO: 201991 - DNA, 1915 bp, Zea Mays
cgccggctcgaatcgtccccttccaccaccaatccttctctccaattgctcaacaagaagcggaagaaggcgctgtttgacgctctggagaaggttaaatcggagctgatgactctggggttcatatcgctgctgctgaccgtgacgggaaggtacatcgcgcgcatctgcatcccggagggagccgcaaacaccatgctgccctgccgcctgtccggtcactcggtggcggaagagcccaagggccatggccgacggcacctatctgaagatccaaccaaccttttttcctgccgcaaaggcatggtgtcgcttgtttcagccgacggcatgcatcagctgcacattttcgtgttcttcttggccgtcttccatgttaccttcagtttcttcacaatgtccttgggtagagcaaagactcgtatatggaaggtgtgggaaaaggaaacttgctcccctcagtataattatttaaatgacccctcaaagttcaggcttacgcaccaaacatcttttgtgaggcaacatgcaagttgttggagcaaaagcacaatcacgctctattttgtgagcttctttaggcagttcttcagatccgtccgtaagacagactactttactttgcgacatggattcatttcagctcatttatctccggggactaggttcaattttcgaaagtacattaaaaggtccttggaggatgatttcaagacagttgttggcattagtccaccactatgggcttctgctttggctgtcatgctgttcaatgttcatggatggcacaacttattctggttctctgcaattccccttgtagttattctagcagttggaacaaagctgcaggctataattgctatgatggctattgaaattgcagagaggcatacagttatccaaggcatgccggtggtaaaactaagtgatgatcatttctggttcgggaagcctcgtttggttctccacctcattcatttcgcatcatttcagaacgcatttgaaattacatatttcttttggatctggtacgaatttggcctgaggtcctgcttccatgacaactttgagtttatcattgcaagagtctgccttggggctatcgtccagtttatgtgcagctacatcacccttccactctatgcccttgtttctcagatgggttcagaaatgaagcgaacaattttcgacgagcagacagcgaaggccctgaagaaatggcacaaggccgtggggaagcgggtgagtggcagcggctgcacgaggtgccggtccggcacctccaccggtacaagaccatcgcgcacgtcggcggcgtgaggagcccgttgtcggacccggactacagcgacacggacgacaccgagccgctgtcgttgcagactaggcacctgataccgccggcgaagcagcggagcctcgacaccgagcgcgcggaggtgcgcgtgaacgtcgtagagacagcggcggcgccaagcgacgtcctccaagacagcttctcgttcccaaggctgcttcctcctcgccatgtgccggacaagtaaagtggccagcagtctgcttagtactacagactgtcctatatagagatagtagaatagtagtttcaagttataagtcgatttggctagttatacaacttttgttatttatttagataaaggctatgtctatatagcaaaagttgtaaaactagaaaaatcaaaatgatttataatttgaattgtagtagtatagtagattagtagtcgaatctaacatgcatgagagcattttcttagtacagctgcctgtaagtgatgcctgggtcgatgacttggaatgtctgtcttctggggctaattcagggtttaaagcctatagcctggtacgtagcaaagcctgcataataaaatatcaaaacgagttaaag

SEQ ID NO: 201992 - DNA, 1634 bp, Zea Mays
aagaaaaacacacggacttcagcagttgcagtgccggctgcctccctctcgcgtgcgctcgccctgtgcctctcgcgtgcggaagctaggcaaaccgccggcgccctagctaggtgcccaggccatcgtcggtcccttcgccaagccatcgtcggggtctcggggattagcacccgcacccacaagatggccacaccgaacggtccttctgcttctccgatggtgtaccctgtctacctttctggggtatttccccagcaaggcggggatgatcaggctcaaggtccagggatatatgccatacaacagaaccagttagcagcggcgatgggaatgggttgctatgctccaaccacactcattcccctcacttacaatatcccaacagaaagcattggtgctcctgctggtgaagagaatgtacaggatgctaggcagcaaaatgtacctcaaagacaagttgttgtgaggaggtttcacttcgcttttcagcttgacttgaccctgatcttcctactagctgcagtggtgtttctcttagccaggaaggctcaaaacaaaggctatttcttctcatactgtttgcatcattcgatttactttgtaagtactttgctcaaatcgtctccaaaatacttaatgctatttcacagtttattcttcattacttgtatagcctatatatggtgctgctagataacctcatgcttctgtatcctgcagatatcaaaccggagctattataccttttgttagatggcttcagcgggcgggaggtgcagctgctcatccaccacaggctcctgctcgggccgagaaccgtgctgctctgcctgcccagaatgatggcaatgagcagcccaatgaccctgcaaaccctgaccaagctgcagagaaccgtgaacaagatgctgcagctggtaacgagaatccacaagaggcagaggtagaaggcaatcggcgtaattggctggaaggtgtcttgaaagagatccagctggttgttgtagggtttgttgcatcgcttcttcctggttttcagcacaatgactaggcctcatcttgtcactgtggaataagctatgtgcagtgatttggttatggtgacataggggaagtaattatatgaagctgctcaaagctttctgtttatattgtttcaagttcaaagacttattgaaccaatcctatcatacttccagcaatacttgcagctcacatgtaaagagtagcctggcaccccatcaaatgagctatgatttgagtttctgaaatatgggatgcctacacctgaatacagaatcagcccctgttgtaagatgtctgaaacatgaaggatgtgaacgttttttcggggctgaaaccttgaataatgtgagtcgcgtcaagaaggatgctccctttatacttaagagtactagcagagcagaaaaataatgtcagagtgagatacaccaattattatttttctcggttgattttgtcagtattcttcagttactcgtcgttgaatcagctcaatataagtgtgcaaacaagcgttcagcacaaagaactgtgtttcttttgttcgaaggatagtgatacgctctgaagtattacatcataattagatttaaaaaatctctaatcag

SEQ ID NO: 201993 - DNA, 1222 bp, Zea Mays
ggcggagatacgggctgcattaaacgtacagaagggccaaactgaaaaataagaaaaacacacggacttcagcagttgcagtgccggctgcctccctctcgcgtgcgctcgccctgtgcctctcgcgtgcggaagctaggcaaaccgccggcgccctagctaggtgcccaggccatcgtcggtcccttcgccaagccatcgtcggggtctcggggattagcacccgcacccacaagatggccacaccgaacggtccttctgcttctccgatggtgtaccctgtctacctttctggggtatttccccagcaaggcggggatgatcaggctcaaggtccagggatatatgccatacaacagaaccagtgcagctgctcatccaccacaggctcctgctcgggccgagaaccgtgctgctctgcctgcccagaatgatggcaatgagcagcccaatgaccctgcaaaccctgaccaagctgcagagaaccgtgaacaagatgctgcagctggtaacgagaatccacaagaggcagaggtagaaggcaatcggcgtaattggctggaaggtgtcttgaaagagatccagctggttgttgtagggtttgttgcatcgcttcttcctggttttcagcacaatgactaggcctcatcttgtcactgtggaataagctatgtgcagtgatttggttatggtgacataggggaagtaattatatgaagctgctcaaagctttctgtttatattgtttcaagttcaaagacttattgaaccaatcctatcatacttccagcaatacttgcagctcacatgtaaagagtagcctggcaccccatcaaatgagctatgatttgagtttctgaaatatgggatgcctacacctgaatacagaatcagcccctgttgtaagatgtctgaaacatgaaggatgtgaacgttttttcggggctgaaaccttgaataatgtgagtcgcgtcaagaaggatgctccctttatacttaagagtactagcagagcagaaaaataatgtcagagtgagatacaccaattattatttttctcggttgattttgtcagtattcttcagttactcgtcgttgaatcagctcaatataagtgtgcaaacaagcgttcagcacaaagaactgtgtttcttttgttcgaaggatagtgatacgctctgaagtattacatcataattagatttaaaaaatctctaatcag

SEQ ID NO: 201994 - DNA, 597 bp, Zea Mays
aagaaaaacacacggacttcagcagttgcagtgccggctgcctccctctcgcgtgcgctcgccctgtgcctctcgcgtgcggaagctaggcaaaccgccggcgccctagctaggtgcccaggccatcgtcggtcccttcgccaagccatcgtcggggtctcggggattagcacccgcacccacaagatggccacaccgaacggtccttctgcttctccgatggtgtaccctgtctacctttctggggtatttccccagcaaggcggggatgatcaggctcaaggtccagggatatatgccatacaacagaaccagttagcagcggcgatgggaatgggttgctatgctccaaccacactcattcccctcacttacaatatcccaaccattggtgctcctgctggtgaagagaatgtacaggatgctaggcagcaaaatgtacctcaaagacaagttgttgtgaggaggtttcacttcgcttttcagcttgacttgaccctgatcttcctactagctgcagtggtgtttctcttagccaggaaggctcaaaacaaaggctatttcttctcatactgtttgcatcattcgatttacttt

SEQ ID NO: 201995 - DNA, 1516 bp, Zea Mays
ggtgccaattaagagcatcatgcgtaactctaagccgccgagcaaactggccatgctcatggtgttattgtttctgctttgttacggagttgagaaagtccattgctcgacggttcatgaaaacaaccaagattttcactctctgctcgatttcaagaagggcatcacccacgatccaaatggagccatgaacgattggatcaacaacacccacttctgccgatggaaagtccttgagaagaagacttcaagaagagcacatcagtcacaactttcttttggtgagcattttgagaaagttacttacaatgatctagcgcaagcaacaagggacttctcagaatccaacctgattggaaaaggaagctatggcacggtgtacagtgggaaattgaaggaatcaaagacggaagtggctgtcaaggtttttgaccttgagatgcaaggtgcagagagaagcttcttggcagagtgtgaagcattgagaagtattcagcaccggaatcttcttcccatcataactgcatgctcaactgtagatacggcgggcaatgttttcaaggcattaatttatgagcttatgccaaatgggaacttggataaatggatacatcacaaaggcgacgaggcagttccaaagcgccgtctaagcttaactcaaagaattgcagttgtcgttagtgtagctgatgcattggattacttacaccacgactgcggaaggcccactgtccattgtgacttgaagaagcttaactcaaagaattgcagttgtcgttcaattagttcgatcggtattaagggcacaattggctatatccctccagaatacggaggtggtggccatgtttcgacgtccggtgatgtttatagttttggtatagtgttgttggagattttgaccggtaaaaggccgacagatcctatgttcaccgggggactagacatcatcagcttcgtggagaacagttttccggatcaaatatttcaagttattgatccgcatcttgtggaagaccgccagaagataaatcagccaaatgaagtagcaaacaatgaaatgtaccaatgcctggtggctctgctgcaagtagcactttcttgcacgcgctcattaccatctgaacggtccaatatgaagcaggtagcaagcaaactgcaagcaatcaaggcggcacaacttggaggcaaatccaagtgagattagatgtactccctcgacgagcagcgtaaaccggaatacgagatgactagaaatgtactctagtctagcatacaagtgttgtttaccttgtatatgcatctatggttcaatatggttataccgtcaagcaactacaacatgatatgtaatatctagtatttacacattgaaagcatcgaactatgtatggtttgaaatagttatttactttgtttagatttcttgaattatgtagttcattatttaattgtgagaaaatttaatgagtttatcctctcatacgtgttataatatttattaagctaattgaat

SEQ ID NO: 201996 - DNA, 3257 bp, Zea Mays
ggcggtgccaattaagagcatcatgcgtaactctaagccgccgagcaaactggccatgctcatggtgttattgtttctgctttgttacggagttgagaaagtccattgctcgacggttcatgaaaacaaccaagattttcactctctgctcgatttcaagaagggcatcacccacgatccaaatggagccatgaacgattggatcaacaacacccacttctgccgatggaaaggtgtgaagtgcaccttaacaccgccatatcgcgtcacggagctcaacctctctcacaacaacttagctggccaaatctcctcctctcttggaaacctgaccaaccttaatttgctggctctaccaaataatagatttggtggaccaataccccttcttgacaggctccaaaacctaaattacctatccctggacaacaactccttaaatggtgtgattcctgaatcacttgcaaactgcttcaacttaaacaaactaggtctctctaataataacctcaccggtgttatccctcctaacataggttctcttaccaagctacaagttcttctccttcatagaaataagctttccggggtcatcccatcaagcctcagcaacatcacaaatttaattgcaatatctctttcagaaaatcaattgaacggatccattcccattgaattatggcaaatgccacagctaacgtctttgtaccttcatgataattatctattcggtgaaatcccacaaactctctctaatgtatcttctcttcatatgctatccttggcgtacaatatgttgagcaacactttgccatctaacttcggccatgccctccataatctaaaatggttgtacttggaaggcaacttgtttgaaggacatattccagattccctaggcaatgtttcaggtctattacatttggatatatcttctaatcatttcactggcaaaatccctagcatatttggaaaactttcagggctgtcttttctaaacctcgaggaaaatatgtttgaagcgagtgatagtacaggctgggaattctttgctgacctagcaacatgtagttacctgtcggagttttcattggctagcaataatctgcagggtgctataccaaattccatcgctaacatgtccaccaacctcaaaaggcttctgatgagtgataaccacctatccggaatagtcccctcaagcattggaaaatttaatggtttaattgaactcgatcttggtggaaacaattttaccggtacaattgaggattggatcccaaagttgacgagcctacaaaacttatatctcaatgacaacaactttgatggtataatcccaccttaattctattagtaaccttactcaattggcacttttggatgtttcaaataataaattcactggttcaataccacctagcatgggaaccatttaacctctattcaatttgaccctaagcaacaacaatttcagagggagaatacctgccgagttttgggaccttaaacaattagtcttccttgatgtttcatcgaacaaatttagtggggaaattcctcaaagtttgggccagtgccaaaatctaggcaccattgaaatggaccaaaatattcttacaggaaacatcccgacctccttcagtaatctatatagcttgaccttgctaaatctttcccataacagtttctcaggtcgcttgccagattatctaaatgacctaaagcttctcaataaaattgacctgtcttacaataatttccaaggagagataccaaaagctagtatattcgataacgctacagttgtttcactggatggcaatccaggattgtgtggaggaaccatggatttgcatatgccttcatgccctactgtttctagaagagcgacgatcataagctatttgattaagatattgatcccaatatttgggttcatgtccctcctattacttgtctactttttagtccttgagaagaagacttcaagaagagcacatcagtcacaactttcttttggtgagcattttgagaaagttacttacaatgatctagcgcaagcaacaagggacttctcagaatccaacctgattggaaaaggaagctatggcacggtgtacagtgggaaattgaaggaatcaaagacggaagtggctgtcaaggtttttgaccttgagatgcaaggtgcagagagaagcttcttggcagagtgtgaagcattgagaagtattcagcaccggaatcttcttcccatcataactgcatgctcaactgtagatacggcgggcaatgttttcaaggcattaatttatgagcttatgccaaatgggaacttggataaatggatacatcacaaaggcgacgaggcagttccaaagcgccgtctaagcttaactcaaagaattgcagttgtcgttagtgtagctgatgcattggattacttacaccacgactgcggaaggcccactgtccattgtgacttgaagaagcttaactcaaagaattgcagttgtcgttcaattagttcgatcggtattaagggcacaattggctatatccctccagaatacggaggtggtggccatgtttcgacgtccggtgatgtttatagttttggtatagtgttgttggagattttgaccggtaaaaggccgacagatcctatgttcaccgggggactagacatcatcagcttcgtggagaacagttttccggatcaaatatttcaagttattgatccgcatcttgtggaagaccgccagaagataaatcagccaaatgaagtagcaaacaatgaaatgtaccaatgcctggtggctctgctgcaagtagcactttcttgcacgcgctcattaccatctgaacggtccaatatgaagcaggtagcaagcaaactgcaagcaatcaaggcggcacaacttggaggcaaatccaagtgagattagatgtactccctcgacgagcagcgtaaaccggaatacgagatgactagaaatgtactctagtctagcatacaagtgttgtttaccttgtatatgcatctatggttcaatatggttataccgtcaagcaactacaacatgatatgtaatatctagtatttacacattgaaagcatcgaactatgtatggtttgaaatagttatttactttgtttagatttcttgaattatgtagttcattatttaattgtgagaaaatttaatgagtttatcctctcatacgtgttataatatttattaagctaattgaat

SEQ ID NO: 201997 - DNA, 3406 bp, Zea Mays
ggcggtcaagctaaggcgtcctacgtgaagtgtgtaaactgtttttaaatccctgggggcgcctcgtctgcccacagagcatccaacttaaagttacaactcccactagcaagcaaaacaaagcagttcaaaaggacttctggcagagcagaggtgccaattaagagcatcatgcgtaactctaagccgccgagcaaactggccatgctcatggtgttattgtttctgctttgttacggagttgagaaagtccattgctcgacggttcatgaaaacaaccaagattttcactctctgctcgatttcaagaagggcatcacccacgatccaaatggagccatgaacgattggatcaacaacacccacttctgccgatggaaaggtgtgaagtgcaccttaacaccgccatatcgcgtcacggagctcaacctctctcacaacaacttagctggccaaatctcctcctctcttggaaacctgaccaaccttaatttgctggctctaccaaataatagatttggtggaccaataccccttcttgacaggctccaaaacctaaattacctatccctggacaacaactccttaaatggtgtgattcctgaatcacttgcaaactgcttcaacttaaacaaactaggtctctctaataataacctcaccggtgttatccctcctaacataggttctcttaccaagctacaagttcttctccttcatagaaataagctttccggggtcatcccatcaagcctcagcaacatcacaaatttaattgcaatatctctttcagaaaatcaattgaacggatccattcccattgaattatggcaaatgccacagctaacgtctttgtaccttcatgataattatctattcggtgaaatcccacaaactctctctaatgtatcttctcttcatatgctatccttggcgtacaatatgttgagcaacactttgccatctaacttcggccatgccctccataatctaaaatggttgtacttggaaggcaacttgtttgaaggacatattccagattccctaggcaatgtttcaggtctattacatttggatatatcttctaatcatttcactggcaaaatccctagcatatttggaaaactttcagggctgtcttttctaaacctcgaggaaaatatgtttgaagcgagtgatagtacaggctgggaattctttgctgacctagcaacatgtagttacctgtcggagttttcattggctagcaataatctgcagggtgctataccaaattccatcgctaacatgtccaccaacctcaaaaggcttctgatgagtgataaccacctatccggaatagtcccctcaagcattggaaaatttaatggtttaattgaactcgatcttggtggaaacaattttaccggtacaattgaggattggatcccaaagttgacgagcctacaaaacttatatctcaatgacaacaactttgatggtataatcccaccttaattctattagtaaccttactcaattggcacttttggatgtttcaaataataaattcactggttcaataccacctagcatgggaaccatttaacctctattcaatttgaccctaagcaacaacaatttcagagggagaatacctgccgagttttgggaccttaaacaattagtcttccttgatgtttcatcgaacaaatttagtggggaaattcctcaaagtttgggccagtgccaaaatctaggcaccattgaaatggaccaaaatattcttacaggaaacatcccgacctccttcagtaatctatatagcttgaccttgctaaatctttcccataacagtttctcaggtcgcttgccagattatctaaatgacctaaagcttctcaataaaattgacctgtcttacaataatttccaaggagagataccaaaagctagtatattcgataacgctacagttgtttcactggatggcaatccaggattgtgtggaggaaccatggatttgcatatgccttcatgccctactgtttctagaagagcgacgatcataagctatttgattaagatattgatcccaatatttgggttcatgtccctcctattacttgtctactttttagtccttgagaagaagacttcaagaagagcacatcagtcacaactttcttttggtgagcattttgagaaagttacttacaatgatctagcgcaagcaacaagggacttctcagaatccaacctgattggaaaaggaagctatggcacggtgtacagtgggaaattgaaggaatcaaagacggaagtggctgtcaaggtttttgaccttgagatgcaaggtgcagagagaagcttcttggcagagtgtgaagcattgagaagtattcagcaccggaatcttcttcccatcataactgcatgctcaactgtagatacggcgggcaatgttttcaaggcattaatttatgagcttatgccaaatgggaacttggataaatggatacatcacaaaggcgacgaggcagttccaaagcgccgtctaagcttaactcaaagaattgcagttgtcgttagtgtagctgatgcattggattacttacaccacgactgcggaaggcccactgtccattgtgacttgaagaagcttaactcaaagaattgcagttgtcgttcaattagttcgatcggtattaagggcacaattggctatatccctccagaatacggaggtggtggccatgtttcgacgtccggtgatgtttatagttttggtatagtgttgttggagattttgaccggtaaaaggccgacagatcctatgttcaccgggggactagacatcatcagcttcgtggagaacagttttccggatcaaatatttcaagttattgatccgcatcttgtggaagaccgccagaagataaatcagccaaatgaagtagcaaacaatgaaatgtaccaatgcctggtggctctgctgcaagtagcactttcttgcacgcgctcattaccatctgaacggtccaatatgaagcaggtagcaagcaaactgcaagcaatcaaggcggcacaacttggaggcaaatccaagtgagattagatgtactccctcgacgagcagcgtaaaccggaatacgagatgactagaaatgtactctagtctagcatacaagtgttgtttaccttgtatatgcatctatggttcaatatggttataccgtcaagcaactacaacatgatatgtaatatctagtatttacacattgaaagcatcgaactatgtatggtttgaaatagttatttactttgtttagatttcttgaattatgtagttcattatttaattgtgagaaaatttaatgagtttatcctctcatacgtgttataatatttattaagctaattgaat

SEQ ID NO: 201998 - DNA, 1679 bp, Zea Mays
cacgtaccaccgcatcttgggcttccctccgccgatgcggttctgtaggttgtcgtagaaggcctcgtcccagtacagcaggtcggcggagcccggcgggcagcgcaccccgaagttcgcgaacgcgtcgttgtaggcctggcggtggaggtgctctgactccagtatgacgccgtcgcaatcaaagatgagggcctcgagagacgccgaggcggagaccatgacgagccggggcgcgcggcggaggcgcggggcgcttgaggctgatcggttgctgatgaatggatagcggcgagagccggcgacgccgacggcgccggtggggacggcgagggaagtggaaggcatcgggagggagtgaggatggagcggagtggagtaggcgccaacggcaacggtcgcttatctagctgactagctcttctcagggaatataccatccacagaaaaaaagcgccccgcctcatcccgagatcagaatcagaggccacgcggcgatggcgatggcgatgccgatggcagtggcgcgggtgaccagcctcgcctgcgccccccgacaggcgcagcatcgccgccgccatagccttgccccgccgtgcgcctcgggtgcggtggaggtgcgggtctgcacgaaccgcacgtgcgcgcggcagggtgggcgcgaggtcctggctgcgctcgcgggactcgcgccgccggcggtcgacgtggcctcctgcgggtgcctcgggcgctgcggcgccgggcccaacgttgcggcgtccgtccctgggagcgccgcggtgttcggccacgtgggcacggcggcgcgaggcgcgcagctactggagcacctcctcggccccgcggaattcgatgcggccctagggctcaccgcgctggccacgagggagaaggcggaggctgccctcgagaagggaaacgcggacgaagcggaagcccttctcaccgaggttattgggttcaatgcttgtggtggtctgcatttggtgtacatgagcaggtctaaggcgagattggaaattggggatatccctggtgcacttggggatgctgaggaagcaataagaatagctcccagatttcctcaggctcacttattgcgaggcgacgcactttttgcaatgggtgaatattctgtcgcggaagatgcctatgcagatgccttggatcttgatccatctattcgccggtccaagtctttcagggctcgcgtggaaaggctacgagagaagcttgttagtgccaataatccgtagttcattttgaagctctctctccatcagaagttcgatccacaagtaacgtagatatgttcttggtgaaggtaataatgctcacacactttgcaagccactggtcaggaattgattgttgccacagcttggaggatccaacagttcatatgaatgtagggcactgttgtttttcccacctgaacggctgaactacactatgatctacaaacttagaatagtctagtgtattttattgtatgtttatgccctacaatgtaagctactgacttccaaaccatgctagtatgtattgagatttgagagtcattctcatttcagaaaattgtatggctgcactctctgttgatatgatcttggcattctcatttggttagcatttatttgttcattgataaatgagaaatttggaatacctccagg

SEQ ID NO: 201999 - DNA, 530 bp, Zea Mays
aatttgtcaatttccttagcagtgctcttatcctttttgggtcttgttcctcgggcgaagttactgctatcacttggcagcaccttctttctggcgtttgggcccctgattcttgtcaccgtctcccttttcgctgttttatacgtgtactttggaccgagttttgtacacgatgcaagcaagacgccggtgtcgccgccaccgtacattgatccatacgagctactggaggacgagaggctcagccggccctccccagatgtgttctgaacatgaacagtgcaagaaccagtgcataattgattacaagaaatagtcatacatagcccaaaacttatcttttttactagacgtatagttgtaaatgcaactataaccatagagtgttataatcacttaatcagaagttttagcacgtagtattccatccatcgatttcagatctgaaacagttaaggtgtttggtttctagggctaaattttagtcctacattttattccattttagtctctaaattgtcaaatacgaa

SEQ ID NO: 202000 - DNA, 555 bp, Zea Mays
gccccgccccccgctttctctctctctcgcgcgcgccccatggacaaagttggcctttcctgagggtcttgttcctcgggcgaagttactgctatcacttggcagcaccttctttctggcgtttgggcccctgattcttgtcaccgtctcccttttcgctgttttatacgtgtactttggaccgagttttgtacacgatgcaagcaagacgccggtgtcgccgccaccgtacattgatccatacgagctactggaggacgagaggctcagccggccctccccagatgtgttctgaacatgaacagtgcaagaaccagtgcataattgattacaagaaatagtcatacatagcccaaaacttatcttttttactagacgtatagttgtaaatgcaactataaccatagagtgttataatcacttaatcagaagttttagcacgtagtattccatccatcgatttcagatctgaaacagttaaggtgtttggtttctagggctaaattttagtcctacattttattccattttagtctctaaattgtcaaatacgaa

SEQ ID NO: 202001 - DNA, 430 bp, Zea Mays
gtaagaatgaccagaacatatcgaacatatcatcccttggagaaagcttggatggtgtgaagggatccttcagctactcatgaaggaatgagaagaaaaaggttctgttagtctgctgtaaattttatttacaatcttgaacagacatgcatctttttagataatggaattgtaattccagactttgctttttctcaaagcatcaccggtgcatcatcttatattaaacttacaaatgcaaattaaacattggattcatttgttggccacaccaatatttcgtgcatatgaatatcacaaagttacaattcgttgaaataataattttagccaacacttgcagcaccaattgagggattttttaagggggcaactgagggagttttttaacggaccaaccgtggaaatttgtaaatagtctaaaaagaac

SEQ ID NO: 202002 - DNA, 3210 bp, Zea Mays
ggtagttttggtcggtatccttttattttctatgtgaccccgtgtactaaaatcgtggctaaatattttttaatgtattgtctatactctatacttacgagaagccgaaatgtaccccccacggccggcggcgcgtttgccaccgtccagttccatgtcggccaccgtgttctttctgcccgcaaatccaagctcgacggctagtcccgctaacactctccggcaacttacgccggcttccacctccggaaagctccacttcgcggcgttcccgctccgcctcccccgccatgcctgcgcaaggacctatcgctccgccgcattcgggaggggatcgcctgtggccgggcgtagagagaaggactactacgccacgctgaacatccgccgcgactccacgctccaggagatcaagtctgcctaccggattcttgcccgcaagtaccatcctgatatgaataagagtcctgaagcagaagaaaagttcaaggagatcagtgctgcatatgaggttctatctgatcaagacaaaagatcattatatgatcgctttggagaagaggggctcagcggtgactacagaaatggagatattggcacacatgggattgatccatatgaactcttcaatgctttctttggtagttccgacaaactttttggggatagtatggggtctgggggatttcattatagtgcagaagcaaaggacaatagggcacttaacatcagctataatctgctcctttcttttgaagagtccatcctcggaggcaaacgtgaaatcaatgtttttcgccatgaaacatgtggcacctgccatggaactggagctaaatgtagcaatgacattacagaatgcacccgatgcagaggtcaaggcaggttgatgaaaactcaaaggacaccttttggtatagtttctcagatatcttcatgcttaaattgtgaaggcagcgggaaggtaattactgaacattgcacagaatgttacggttcgggcagagtccaaattgaacgcattatcaaagtagatatacctggaggtattgatgatggctccaccattcgaattagtggtggaggtaatgttgataagcaaaggggtgcaagtggtgacctgtatatatttgttcgcgttaataaaaaacaaggcatccacagagatggtctcaatctgtactcagatgcttcagttgattatactgatgtgattttaggtaccacagtgaaggttgaaacaatagaaggactcaaggatcttcacattcctcctggcacccagcctggagagaacttaaaattttctcagctgggagttcccgacattaagaagcctaatgtcagaggagatcactacttcatgataaagtggccaggaacgtttgctagttgaagagcttgctgcactaaagaaagctcagaatatctcagttccagaacctacaaagatagaaaattttcgggagagaaaccatcatccatctgcaaagagaagatcattctggggacgtgtctggaattttttcagggatgataaaggtgataaaagatttgcttcaatcagtgtgcaacctattatcccaggatggaattcttgccgaggaactgatacggctgtccccttgctattaaaaggattcctcatgaccgcaatattcttatttgtaatcagaagtaaactcaggtacactgggaagcgcattgaccgtccaactcaagctgaaatacctgttgagccagagtgaatttctgtcgtcttcatttctgaacgtttgcgacatcacagttttgatgatgatcataaatacgtaactttgccgcgcaaagcttcgtcctgggaaaagaatccggctttgcttgcagtgtatggtatccagacgcagcagtacaggttaacagaatatgggttgcttctcattagtcatttcttgattcattattccaatatgtagaagacacctgcagcaattccgagttttgacgaaagccacatgaaagacatgaagaaacatggccgtaggctaatgtacactgtatgtatcttgtctgcacaaagttttgtaaccatcccggcttgatatcgtttaacgattttgttgcaacataattcataagcactgaatttatgcaaacaacagttctgacgcgagacgaattggaataatcacaattcacaaacacaacaatgctcctattcacaaaaaaaatgctcctatccatacagttcaaatgcctctgtcatgttcaaatggaaacgattcgtttcgctttgagacgaagcagttcaaatgcctctgccgtgttcaaatgaaaacgattcatttcgctttgagacgaagtagttcaaatgcctctgccatgttcgatcgatttccagaccgagacaagcgccgcagcccgcagcagaaggctcgcgacatcagctcgagccagctgacgggatccacacggtgccatgtcttcccggcggccgtcgcatccgtcccaccggaatccacggcgattcccgtccgcctgctatcttctagtactcacccttgccctcctcgtcgtctccgccgccgccaagtcctcccgccgccccatctccgacaacgagatccggcagaagaaggaggcctgctacaccgacgtcgagaacgggctgtggggatgggtgtgcaggtactcgccgacggagaaggagaactgcgtgctgcgctgcctctcgccggagtgctacgacctcatatacggcggggatccgcttgaggaaggggagttggactatgttcgaagccaggagtacaagtattgtatgcacaaatcatcccttggagaaagcttggatggtgtgaagggatccttcagctactcatgaaggaatgagaagaaaaaggttctgttagtctgctgtaaattttatttacaatcttgaacagacatgcatctttttagataatggaattgtaattccagactttgctttttctcaaagcatcaccggtgcatcatcttatattaaacttacaaatgcaaattaaacattggattcatttgttggccacaccaatatttcgtgcatatgaatatcacaaagttacaattcgttgaaataataattttagccaacacttgcagcaccaattgagggattttttaagggggcaactgagggagttttttaacggaccaaccgtggaaatttgtaaatagtctaaaaagaac

SEQ ID NO: 202003 - DNA, 3065 bp, Zea Mays
gagaagccgaaatgtaccccccacggccggcggcgcgtttgccaccgtccagttccatgtcggccaccgtgttctttctgcccgcaaatccaagctcgacggctagtcccgctaacactctccggcaacttacgccggcttccacctccggaaagctccacttcgcggcgttcccgctccgcctcccccgccatgcctgcgcaaggacctatcgctccgccgcattcgggaggggatcgcctgtggccgggcgtagagagaaggactactacgccacgctgaacatccgccgcgactccacgctccaggagatcaagtctgcctaccggattcttgcccgcaagtaccatcctgatatgaataagagtcctgaagcagaagaaaagttcaaggagatcagtgctgcatatgaggttctatctgatcaagacaaaagatcattatatgatcgctttggagaagaggggctcagcggtgactacagaaatggagatattggcacacatgggattgatccatatgaactcttcaatgctttctttggtagttccgacaaactttttggggatagtatggggtctgggggatttcattatagtgcagaagcaaaggacaatagggcacttaacatcagagtccatcctcggaggcaaacgtgaaatcaatgtttttcgccatgaaacatgtggcacctgccatggaactggagctaaatgtagcaatgacattacagaatgcacccgatgcagaggtcaaggcaggttgatgaaaactcaaaggacaccttttggtatagtttctcagaattacatgttatgcatttctatcttattgtgcaggggtgcaagtggtgacctgtatatatttgttcgcgttaataaaaaacaaggcatccacagagatggtctcaatctgtactcagatgcttcagttgattatactgatgtgattttaggtaccacagtgaaggttgaaacaatagaaggactcaaggatcttcacattcctcctggcacccagcctggagagaacttaaaattttctcagctgggagttcccgacattaagaagcctaatgtcagaggagatcactacttcatgataaaggtgaaaatcccgaagagtatcagtggccaggaacgtttgctagttgaagagcttgctgcactaaagaaagctcagaatatctcagttccagaacctacaaagatagaaaattttcgggagagaaaccatcatccatctgcaaagagaagatcattctggggacgtgtctggaattttttcagggatgataaaggtgataaaagatttgcttcaatcagtgtgcaacctattatcccaggatggaattcttgccgaggaactgatacggctgtccccttgctattaaaaggattcctcatgaccgcaatattcttatttgtaatcagaagtaaactcaggtacactgggaagcgcattgaccgtccaactcaagctgaaatacctgttgagccagagtgaatttctgtcgtcttcatttctgaacgtttgcgacatcacagttttgatgatgatcataaatacgtaactttgccgcgcaaagcttcgtcctgggaaaagaatccggctttgcttgcagtgtatggtatccagacgcagcagtacaggttaacagaatatgggttgcttctcattagtcatttcttgattcattattccaatatgtagaagacacctgcagcaattccgagttttgacgaaagccacatgaaagacatgaagaaacatggccgtaggctaatgtacactgtatgtatcttgtctgcacaaagttttgtaaccatcccggcttgatatcgtttaacgattttgttgcaacataattcataagcactgaatttatgcaaacaacagttctgacgcgagacgaattggaataatcacaattcacaaacacaacaatgctcctattcacaaaaaaaatgctcctatccatacagttcaaatgcctctgtcatgttcaaatggaaacgattcgtttcgctttgagacgaagcagttcaaatgcctctgccgtgttcaaatgaaaacgattcatttcgctttgagacgaagtagttcaaatgcctctgccatgttcgatcgatttccagaccgagacaagcgccgcagcccgcagcagaaggctcgcgacatcagctcgagccagctgacgggatccacacggtgccatgtcttcccggcggccgtcgcatccgtcccaccggaatccacggcgattcccgtccgcctgctatcttctagtactcacccttgccctcctcgtcgtctccgccgccgccaagtcctcccgccgccccatctccgtacgtctccccgcctgacccgaccctgccatctctcctccgcccgcctctctagtctctatccatcccatcgcgcttaccgaactccgtggcgcaggacaacgagatccggcagaagaaggaggcctgctacaccgacgtcgagaacgggctgtggggatgggtgtgcaggtactcgccgacggagaaggagaactgcgtgctgcgctgcctctcgccggagtgctacgacctcatatacggcggggatccgcttgaggaaggggagttggactatgttcgaagccaggagtacaagtattgtatgcacaaatcatcccttggagaaagcttggatggtgtgaagggatccttcagctactcatgaaggaatgagaagaaaaaggttctgttagtctgctgtaaattttatttacaatcttgaacagacatgcatctttttagataatggaattgtaattccagactttgctttttctcaaagcatcaccggtgcatcatcttatattaaacttacaaatgcaaattaaacattggattcatttgttggccacaccaatatttcgtgcatatgaatatcacaaagttacaattcgttgaaataataattttagccaacacttgcagcaccaattgagggattttttaagggggcaactgagggagttttttaacggaccaaccgtggaaatttgtaaatagtctaaaaagaac

SEQ ID NO: 202004 - DNA, 731 bp, Zea Mays
ttctatgtcctttgtgatctcatccatcaccaacacaaagtggccaggaacgtttgctagttgaagagcttgctgcactaaagaaagctcagaatatctcagttccagaacctacaaagatagaaaattttcgggagagaaaccatcatccatctgcaaagagaagatcattctggggacgtgtctggaattttttcagggatgataaaggtgataaaagatttgcttcaatcagtgtgcaacctattatcccaggatggaattcttgccgaggaactgatacggctgtccccttgctattaaaaggattcctcatgaccgcaatattcttatttgtaatcagaagtaaactcagcttcgtcctgggaaaagaatccggctttgcttgcagtgtatggtatccagacgcagcagtacagaagacacctgcagcaattccgagttttgacgaaagccacatgaaagacatgaagaaacatggccgtaggctaatgtacactgacaacgagatccggcagaagaaggaggcctgctacaccgacgtcgagaagtactcgccgacggagaaggagaactgcgtgctgcgctgcctctcgccggagtgctacgacctcatatacggcggggatccgcttgaggaaggggagttggactatgttcgaagccaggagtacaagtattgtatgcacaaattgaaggatcatattgtcgttaaggttgtcaagtcgtag

SEQ ID NO: 202005 - DNA, 471 bp, Zea Mays
aaggcaagcggatttcattctagttctagcgctttgtcttgctggcggtcgtgctcgtgcacctagctaatggaccctgtgccattagccggttgggtctttgtggtagaggacttccgctttggcaggaggcccagcccgactagggttctgtccaccttccagagccctagctccggcgtctctagcgatccccaaaacccactccgccgcatttctgccgacttggccggattggtcgcttattgagatggctacgccacttatagcgggacttgcaattgcagcaactgcccttgctggccgatatggcgtccaagcttggcaagcttataaggcaaggcctatagttccaaggatgcggaaattctatgaaggtggctttcaacctacaatgaaccgaagggaagctgcattaatccttggtgtcagatattcaatcagttgttcttcattccagcatactgaatc

SEQ ID NO: 202006 - DNA, 455 bp, Zea Mays
aaggcaagcggatttcattctagttctagcgctttgtcttgctggcggtcgtgctcgtgcacctagctaatggaccctgtgccattagccggttgggtctttgtggtagaggacttccgctttggcaggaggcccagcccgactagggttctgtccaccttccagagccctagctccggcgtctctagcgatccccaaaacccactccgccgcatttctgccgacttggccggattggtcgcttattgagatggctacgccacttatagcgggacttgcaattgcagcaactgcccttgctggccgatatggcgtccaagcttggcaagcttataaggcaaggcctatagttccaaggatgcggaaattctatgaaggtggctttcaacctacaatgaaccgaagggaagctgcattaatccttggtgtcagcttataattattgatgtttccag

SEQ ID NO: 202007 - DNA, 736 bp, Zea Mays
gttcgttcatggttgcataaggctacgccacttatagcgggacttgcaattgcagcaactgcccttgctggccgatatggcgtccaagcttggcaagcttataaggcaaggcctatagttccaaggatgcggaaattctatgaaggtggctttcaacctacaatgaaccgaagggaagctgcattaatccttggtgtcagggaaactgccaacgcagagaaggtaaaagaggcgcacaagagggttatggtcgccaaccatccagatgctggtggaagtcattaccttgcgtcaaagattaatgaggcgaaggatgtgttgtcagggaaaacaaaaggaggtgggtcggccttctgattgtagaattaagaatgcactctctgctagaaggataattttgtgcctctaaatttagcattagaagatactgtagaccgcagtttagtcttggtattgcgaaaatttctgggcaaagcatattgggccttctgtgaagtagttatccagtgcttattatttattaatactctcagctgtgcctgcttctataaagatatacatgatgaaggttacatcacaacatgtttcttcacaactaagtctcatgtcgtgggatcttcattgctcttcgttagattctgctgctgttgaatctttttttcttcagcagtttttagagtaaatgttggcatatccatgtgccacagcattatctgggactcgaagcattcagagg

SEQ ID NO: 202008 - DNA, 723 bp, Zea Mays
catgaatagctacgccacttatagcgggacttgcaattgcagcaactgcccttgctggccgatatggcgtccaagcttggcaagcttataaggcaaggcctatagttccaaggatgcggaaattctatgaaggtggctttcaacctacaatgaaccgaagggaagctgcattaatccttggtgtcagggaaactgccaacgcagagaaggtaaaagaggcgcacaagagggttatggtcgccaaccatccagatgctggtggaagtcattaccttgcgtcaaagattaatgaggcgaaggatgtgttgtcagggaaaacaaaaggaggtgggtcggccttctgattgtagaattaagaatgcactctctgctagaaggataattttgtgcctctaaatttagcattagaagatactgtagaccgcagtttagtcttggtattgcgaaaatttctgggcaaagcatattgggccttctgtgaagtagttatccagtgcttattatttattaatactctcagctgtgcctgcttctataaagatatacatgatgaaggttacatcacaacatgtttcttcacaactaagtctcatgtcgtgggatcttcattgctcttcgttagattctgctgctgttgaatctttttttcttcagcagtttttagagtaaatgttggcatatccatgtgccacagcattatctgggactcgaagcattcagagg

SEQ ID NO: 202009 - DNA, 766 bp, Zea Mays
aagttttagcgcctgccctcagtccagctcgccagcagctctctgccctcctccctcaagccctagccgagtttttccatggtgccctggatgccagcccctttactcgctgcccctgcattcctgctcgccctgcccccagccatggacaccgtcgggccacccgttcctatctcccctcaccctcatcctctggctgctgccccttcctattcctggtggttgagtcttcttccatggacgccaatagcagcagcccactccttttgttctccatggatgaaagcccaagcatctgcccctcccctaggttttttacaatcgcagcagcacgtcgaacctttgcaaccccggtgagaccagctgcttgcgctatgtttattccccaccaattcctatatttgattatttactgtatatgtttgtgtgtttgtggtggaggtaaatcctaggaaatttagatgagaagaaagctatagcgaggcgcttgccaagtgcttggtgaatcgcctcaaccggatgtggttgtcgatctcgcggagtcgagtcgagtttagtcatggtacgttcattgatcacgtaatgtggaggacaacaactggaataatctcaagatgggactgatgaatgaacccaaagctaaatgatctgatcgtgctggaatgggaggtgctcgccaagcgagtatcatctaacaacactgacttagtgtttatcccaggcaagccccggtgcatttgccaccctcttgttgttataaaacttt

SEQ ID NO: 202010 - DNA, 731 bp, Zea Mays
aagttttagcgcctgccctcagtccagctcgccagcagctctctgccctcctccctcaagccctagccgagtttttccatggtgccctggatgccagcccctttactcgctgcccctgcattcctgctcgccctgcccccagccatggacaccgtcgggccacccgttcctatctcccctcaccctcatcctctggctgctgccccttcctattcctggtggttgagtcttcttccatggacgccaatagcagcagcccactccttttgttctccatggatgaaagcccaagcatctgcccctcccctaggttttttacaatcgcagcagcacgtcgaacctttgcaaccccggtgagaccagctgcttgcgctatgtttattccccaccaattcctatatttgattatttactgtatatgtttgtgtgtttgtggtggaggtaaatcctaggaaatttagatgagaagaaagctatagcgaggcgcttgccaagtgcttggtgaatcgcctcaaccggatgtggttgtcgatctcgcggagtcgagtcgagtttagtcatggtacgttcattgatcacgtaatgtggaggacaacaactggaataatctcaagatgggactgatgaatgaacccaaagctaaatgatctgatcgtgctggaatgggaggtgctcgccaagcgagtatcatctaacaacactgacttagtgtttatcccaggcaagccccg

SEQ ID NO: 202011 - DNA, 1024 bp, Zea Mays
gccgtatgttgcatggcgatggcgttcaatgcagaccgtcgaccctctcaccaacggccgtcaattcagcaccgctggtccgccttccccatccccatcccccgccaccggcggcggccgttattcagcaccgccttcctccggcgaccgccgcgccgccgttccctggtctaggttctcgcctcttagcaaccagagcgcgcgcctaaatgaatgcggtggcggaggaggacagggcggcggagctggccggcccgctccgggacctcctcccgcctgtggacttctgctgcgcgtacggctccacgctccttcacgcacgccccgacgggacgtccatggtcgattacatcatcggcgtcgctgaccccctccagtggcactccgagaacctggaaaggaaccccgcgcactactcccgctggatggccggcttcggtgcaggcgccatcactggactggcggatcatgttggggtcggggtgtacttcaacccatttgtggaatggagagacaagaggataaaatatggggtggtaaggatgagggacctggcaatggatgtcttgacctgggacaggttctacctcagtggtcggctgcagaaaccggtccatgttcttgttgacaactgggatataaggaaggtcaactcaattaacctagaaatggcaacttcagcttctctactccttttaccagcggagttcacggagtacgacctatatgctcaaatctgcagtctatcatatatgggtgatttgagaatgctgtttgcggaagacaaagataaggtgaagaagattgttgagggtagttttcagtcgttccaattgatgtacagccccctcttgcaagagtatattgctgaaggcctattgaagacatcatcccatggacaatataaaactttccggcaggattgcggtccatgtacaacaaatgaactgttctctgttcttccgtggacgatccaaagccaaatgcaaggaaggcacacattgcacggaaaaggagatgcaat

SEQ ID NO: 202012 - DNA, 917 bp, Zea Mays
atcttccatgctatatctagctgtactgggatgaaaaagttctcttttttatataataatgatgactagtaacctctcagtcagtgtttgtaaggctctttagattctttacattcaactttaacaaggaaaaagcctgtacataaccccagtggccctcaaataaatttgtagatggaaacttatatatactccattacattgttttgcaatggacgagaaggttaatagtcttgagcttcttgctgatcaggtgaaaaagatgctcagcataagggaaagctaactagcaaatggaagccgaccaccaaaggcacactgaaaagaacttacagagtacgatcaacggatgaaggaaggcgggtcctcaaggagatcgcttcagttctgtcccaagatgaccattttgtggatgcctcgtctcacaagggttgccaagttaggagggaaagtgctcatggcgaaagtgtttgctgctacaacgtgagagcgttgttcgatgagcttccaactcctcacctgcttctggagattacacctttccctgctggacaacttaccgacaacgactaccgaaaggcggagaggcttgagatggtgctgaggctcagcgcttctatttaaaaaactggggactggtttttcaatttcccctagtactttctttgcccaagttgtaaattgtcttcctgtgggcctgtaaattgacgcagttggctaagaactacttgcaaaacacaagttctggttgattaatttgagcttaagaacctgatatgatatacacttgggcgtttccctgaactgtatcaaatgcttctcactgtttccttttccttgagtaaggaaaatagggatgggcatggattgatccattgatctacttcgcttaagtaacagatttttccatttgtcaa

SEQ ID NO: 202013 - DNA, 1679 bp, Zea Mays
catcgaagtcaactgtccgttgcaattgcaaaccaaaccagattcctctccatcgcactccgcctccctccgcctcccttggatcacctccccgtccccaacccaacgaggcaacgagtccccaacgccacccaaagtccagttcacccacacgcgcgctcaccggccgcctagcgcgctctgccccccacggaaatctgcagcgaatagaaaggatttccatcctttccaatcccttccaattctttacggcgtccctcaatccccctataggatccaggttgacccgcattgcccgagccagtcggtttccgtttttggaatttttgtttccacgtgctgccgccgccgctcctaggttcttgttacaagcgtggaagacggcgagctatatggcgtgcaatcgcggcgtgaaggagcaggaggaccccagcgcggcgtctgcagccccagctccggcggctgtggctagggcgagggcggcgcggcctccgaggccaaggagccgcaaggggctcggcgtgcggcacctgctgaagccctgccgattccttgcagctgtccagagggcgaatgccagggtgagggaagcgggggaggcgaccctcgtggcagcgcttgcggcggcccaaaaggagagcgagagggagaacgaggtggtggccgatgtatgcggcgggtggaagagtgaggatggaagtttaaattgtggatactcaagcattagaggcagaagggtaaacatggaagacttctatgacataaaatcttctagagttgatgataagcaaataaatttttttggagtatttgatggtcatggaggtacccatgctgctgggtatttgaaacaacacttgtttgaaaacctcctaaaacatccagcattcattggtgatactaagtctgcaatgagtcagtcctataaaaaaactgacgcagatttcttggatactgaaggcaatattcatgttggggttgggtcgactgcatcaacagcagttttgattggcaaccatctgtatgtggccaatgttggtgattcaagggctgtactatcaaaggcaggcaaagctattgcactctctgatgaccataaaccaaacagaagtgatgagcagaaacggattgaggatgctggaggagttgttgtttggtctggaacatggagagtaggtggtatacttgcaatgtctagggcatttggcaatcgtttgttgaagcagttcgttgttgcagaccctgagattcaggatctagaaatagatggtgatacggagtttcttattttggccagtgatgggctctgggatgtggtgccaaatgagcatgctgttgcatttgtgaaggacgaggatagccctgaggctgcagcccggaagcttacggagatcgccttcaggcgtgggagcaccgacaacatcacatgcattgttgtagaattttgccacgataagatggttgatggttctcccccgtcaaccaataagagttgacttcatcattcgtgttttaattatcccagatttgctaccatgatgctgcgcctctcgaacctgttgtttggatgcccagcactgtttcgtgcacgctggaccctgactccctgagcacccaggtcaatattatacttcattttcgattttggctgatattacttcatttttgatcttccctat

SEQ ID NO: 202014 - DNA, 1358 bp, Zea Mays
catcgaagtcaactgtccgttgcaattgcaaaccaaaccagattcctctccatcgcactccgcctccctccgcctcccttggatcacctccccgtccccaacccaacgaggcaacgagtccccaacgccacccaaagtccagttcacccacacgcgcgctcaccggccgcctagcgcgctctgccccccacggaaatctgcagcgaatagaaaggatttccatcctttccaatcccttccaattctttacggcgtccctcaatccccctataggatccagtgaggatggaagtttaaattgtggatactcaagcattagaggcagaagggtaaacatggaagacttctatgacataaaatcttctagagttgatgataagcaaataaatttttttggagtatttgatggtcatggaggtacccatgctgctgggtatttgaaacaacacttgtttgaaaacctcctaaaacatccagcattcattggtgatactaagtctgcaatgagtcagtcctataaaaaaactgacgcagatttcttggatactgaaggcaatattcatgttggggttgggtcgactgcatcaacagcagttttgattggcaaccatctgtatgtggccaatgttggtgattcaagggctgtactatcaaaggcaggcaaagctattgcactctctgatgaccataaaccaaacagaagtgatgagcagaaacggattgaggatgctggaggagttgttgtttggtctggaacatggagagtaggtggtatacttgcaatgtctagggcatttggcaatcgtttgttgaagcagttcgttgttgcagaccctgagattcaggatctagaaatagatggtgatacggagtttcttattttggccagtgatgggctctgggatgtggtgccaaatgagcatgctgttgcatttgtgaaggacgaggatagccctgaggctgcagcccggaagcttacggagatcgccttcaggcgtgggagcaccgacaacatcacatgcattgttgtagaattttgccacgataagatggttgatggttctcccccgtcaaccaataagagttgacttcatcattcgtgttttaattatcccagatttgctaccatgatgctgcgcctctcgaagtatggtctcatcattggttgtctattatgttcgtttatagtcctgccatgctgattttgtttgcttcggcgcccccaattggttagcctgttgtttggatgcccagcactgtttcgtgcacgctggaccctgactccctgagcacccaggtcaatattatacttcattttcgattttggctgatattacttcatttttgatcttccctat

SEQ ID NO: 202015 - DNA, 840 bp, Zea Mays
gcggccgcacatcacagggggagtggttgaagaggtggttgacatttcaaattgggagaaaaaagtttgtggcaagaaacggaagttacaaagctttagagatgaggagtactacataagttcagtacctcaaaaccatcatttggaagctgggctgtcggtgagggacaatgaaggatttgttgaaaataggttggatgctgctgttcttgatttagttgatgatgaagcttctggtatgcaagcgcagaaaactcgatatcactggatgaaggtgatcagtcaagccatgtttggtagtgaagggcgacgtccagagagtaagaacaaggtgacacagtatggactcgatatgactgagcaacaatatcttgagcattcgattccatggatagctgccaatgatgctgcttggcgtgcgttatgtcattattgggcttcacctccacctatacctacatctccatctaccgaacatcagacccctccagctaccttgccgacgcatgaacaagaggacgggttagactttgtcgaaaccctcttcaatagtggaggtattgaccatcactcttcactgtaacccgatggtgatcggcgaccatgagcttccatgttattgcgttctgatacttgatacttttattatgactatgtatgagatattgtcttttattagtactggatgatgatatgtgtcttattatgactatggatgagacttttgtgatgtaattgatgagactatggatgagacttttgtgatgtaattgatgagactatggatttaaatattgttatgtgattgtgtgtgagatgttttatgtgaaaatatgttgt

SEQ ID NO: 202016 - DNA, 963 bp, Zea Mays
ggccgcctctcccgcccccgaccgcgccccgccctgcccccgtggagcccgccccggccgccaccgcgatcgcctctctcgcccccggtagcacctgcccccgaggagcccgccccggccgctgccatgaactaacaaatacctatgcttgcgctcagaagtacaagaaggaggagacagccacgtttgcgctctatggttgaagaggtggttgacatttcaaattgggagaaaaaagaagtttgtggcaagaaacggaagttacaaagctttagagatgaggagtactacataagttcagtacctcaaaaccatgttggatgctgctgttcttgatttagttgatgatgaagcttctggtatgcaagcgcagaaaactcgatatcactggatgaaggtgatcagtcaagccatgtttggtagtgaagggcgacgtccagagagtaagaacaaggtgacacagtatggactcgatatgactgagcaacaatatcttgagcattcgattccatggatagctgccaatgatgctgcttggcgtgcgttatgtcattattgggcttcacctccacctatacctacatctccatctaccgaacatcagacccctccagctaccttgccgacgcatgaacaagaggacgggttagactttgtcgaaaccctcttcaatagtggaggtattgaccatcactcttcactgtaacccgatggtgatcggcgaccatgagcttccatgttattgcgttctgatacttgatacttttattatgactatgtatgagatattgtcttttattagtactggatgatgatatgtgtcttattatgactatggatgagacttttgtgatgtaattgatgagactatggatgagacttttgtgatgtaattgatgagactatggatttaaatattgttatgtgattgtgtgtgagatgttttatgtgaaaatatgttgt

SEQ ID NO: 202017 - DNA, 1013 bp, Zea Mays
ggccgcctctcccgcccccgaccgcgccccgccctgcccccgtggagcccgccccggccgccaccgcgatcgcctctctcgcccccggtagcacctgcccccgaggagcccgccccggccgctgccatgaactaacaaatacctatgcttgcgctcagaagtacaagaaggaggagacagccacgtttgcgctctatggttgaagaggtggttgacatttcaaattgggagaaaaaagtttgtggcaagaaacggaagttacaaagctttagagatgaggagtactacataagttcagtacctcaaaaccatcatttggaagctgggctgtcggtgagggacaatgaaggatttgttgaaaataggttggatgctgctgttcttgatttagttgatgatgaagcttctggtatgcaagcgcagaaaactcgatatcactggatgaaggtgatcagtcaagccatgtttggtagtgaagggcgacgtccagagagtaagaacaaggtgacacagtatggactcgatatgactgagcaacaatatcttgagcattcgattccatggatagctgccaatgatgctgcttggcgtgcgttatgtcattattgggcttcacctccacctatacctacatctccatctaccgaacatcagacccctccagctaccttgccgacgcatgaacaagaggacgggttagactttgtcgaaaccctcttcaatagtggaggtattgaccatcactcttcactgtaacccgatggtgatcggcgaccatgagcttccatgttattgcgttctgatacttgatacttttattatgactatgtatgagatattgtcttttattagtactggatgatgatatgtgtcttattatgactatggatgagacttttgtgatgtaattgatgagactatggatgagacttttgtgatgtaattgatgagactatggatttaaatattgttatgtgattgtgtgtgagatgttttatgtgaaaatatgttgt

SEQ ID NO: 202018 - DNA, 786 bp, Zea Mays
aaaaaaaaaagtttgtggcaagaaacggaagttacaaagctttagagatgaggagtactacataagttcagtacctcaaaaccatcatttggaagctgggctgtcggtgagggacaatgaaggatttgttgaaaataggttggatgctgctgttcttgatttagttgatgatgaagcttctggtatgcaagcgcagaaaactcgatatcactggatgaaggtgatcagtcaagccatgtttggtagtgaagggcgacgtccagagagtaagaacaaggtgacacagtatggactcgatatgactgagcaacaatatcttgagcattcgattccatggatagctgccaatgatgctgcttggcgtgcgttatgtcattattgggcttcacctccacctatacctacatctccatctaccgaacatcagacccctccagctaccttgccgacgcatgaacaagaggacgggttagactttgtcgaaaccctcttcaatagtggaggtattgaccatcactcttcactgtaacccgatggtgatcggcgaccatgagcttccatgttattgcgttctgatacttgatacttttattatgactatgtatgagatattgtcttttattagtactggatgatgatatgtgtcttattatgactatggatgagacttttgtgatgtaattgatgagactatggatgagacttttgtgatgtaattgatgagactatggatttaaatattgttatgtgattgtgtgtgagatgttttatgtgaaaatatgttgt

SEQ ID NO: 202019 - DNA, 876 bp, Zea Mays
aaaaaaaaaaaaaaaaaaaagtacaagaaggaggagacagccacgtttgcgctctatggttgaagaggtggttgacatttcaaattgggagaaaaaagaagtttgtggcaagaaacggaagttacaaagctttagagatgaggagtactacataagttcagtacctcaaaaccatcatttggaagctgggctgtcggtgagggacaatgaaggatttgttgaaaataggttggatgctgctgttcttgatttagttgatgatgaagcttctggtatgcaagcgcagaaaactcgatatcactggatgaaggtgatcagtcaagccatgtttggtagtgaagggcgacgtccagagagtaagaacaaggtgacacagtatggactcgatatgactgagcaacaatatcttgagcattcgattccatggatagctgccaatgatgctgcttggcgtgcgttatgtcattattgggcttcacctccacctatacctacatctccatctaccgaacatcagacccctccagctaccttgccgacgcatgaacaagaggacgggttagactttgtcgaaaccctcttcaatagtggaggtattgaccatcactcttcactgtaacccgatggtgatcggcgaccatgagcttccatgttattgcgttctgatacttgatacttttattatgactatgtatgagatattgtcttttattagtactggatgatgatatgtgtcttattatgactatggatgagacttttgtgatgtaattgatgagactatggatgagacttttgtgatgtaattgatgagactatggatttaaatattgttatgtgattgtgtgtgagatgttttatgtgaaaatatgttgt

SEQ ID NO: 202020 - DNA, 838 bp, Zea Mays
tacctgaaaaccctagggtgcgcactccgatcctgccctctaataacagcagcagcagcagccgccatggaagccagcagcaagaagctccaggcgttcatcctcacgctgctgctggggttttggagtgagctagcatccagttcatcggtcgtttgaagagagatcgacatgagaggatgtcgtctgcttcgtcgttccaagctgaagaaggcacgccggaggaggaagagagtaacaacggccgggtcgatcagctaacgatggatcgatcatttttttccccatatttattgtgttgcgtctgctgtagtttctaattttctagatgtgctttcggtttggtctgtagaccctgcagcttgatttggttaagtttgatttgatgcaagggaaatgggtggcggttgattgctaataattcccgttgatatttgtcatgcgtacgtgaacttgataacaaaatgcatgatgtcttctctttgcgtgatttcgagttgattgtcatcaccatggcactcgatcgtgctctttggcagtgttaacgtagtctgttatattatgctgactaatctttcccatcatggaggtataattgtgaccgtcgtggagtacatctaaggtgccgtttggttcacgaaaatgtaatgtaaataataatggtaacgattcacagtcgaataccggcgttaacaaatttgaataagacggtatccattttttttgaaaggaagcggcaaaagacttgcctcttcattgtattagattaagaagaataagataatccacaggaccgaagacacaccgaaaaaagagaaaaatacaaaaacacaaaaaa

SEQ ID NO: 202021 - DNA, 544 bp, Zea Mays
gtcgtcccctgggccataaaattcgtgcgccatggccttctatcccattccttcgccgttcctcagtcgtcgatttccagagagagagaaaggatgtccttctgccaggaacttggcggctccgcctcgggctcacgactgcgtgctactcggtgaaattaaaggggctagggtgtgtcgtcgaggttcgttgtccacgagtgtggtttgcggtggtcggaaaagcacgaggttactggggatttctcgccggaggtcatttccgtcgcgacgtcgaggacagccttgcgcccaccgtctcctttggttggaagagatccaggtgacggaagccatactcgctttcggcctcctccagcagcgctgcgaagacgaggtgctcgaggtggcctattgactgctggtgtgcatcagcaccgtcaacctttcgtgcatcccccagttcgtgtaccggtactttggccgcggcagagtcgacatctggtgaacccccatgccccacgagatatatgaggccttggaattgaggaatggtggatctgat

SEQ ID NO: 202022 - DNA, 785 bp, Zea Mays
caggcgcccttctcccctatccgcgagctaagctttcaacagaccacgtggatctcgcgtccgccaacaaactccatctagagattgcagagaccgtcgtcccctgggccataaaattcgtgcgccatggccttctatcccattccttcgccgttcctcagtcgtcgatttccagagagagagaaaggatgtccttctgccaggaacttggcggctccgcctcgggctcacgactgcgtgctactcggtgaaattaaaggggctagggtgtgtcgtcgaggttcgttgtccacgagtgtggtttgcggtggtcggaaaagcacgaggttactggggatttctcgccggaggtcatttccgtcgcgacgtcgaggacagccttgcgcccaccgtctcctttgcaatgaggttacgagtcacttgaagaccaaccttgtacctggaatctcaagtctaaggcaagttgtgcccttgatcacttttctttacccaataatgttcatgttaatcactgtgacatgctcaggttaatttgatgggacataattggtttccctagacttgtttattccacaccttgtttaccattgaacttttgggtagttttgctattgctctgcattatgatcattgttccagttatactgttgttttagttattgttcgtgacaagatcattgtgttaattggaacatggagcttaacttgagatatccgtgctaccacaagggtggaatgggacgtccttcgctgactaattaggaaagctagtggagtactacctt

SEQ ID NO: 202023 - DNA, 1878 bp, Zea Mays
aactaattttagcggttaactactagttagctactgaagattccaaaaccaaccccccatccacgccgcgatgctccgccgccgccgggcaccgctcctcctggccgccgccgccgcgggcgccgcgctggctgccacctctccctccggcgaaaatggtcgaagcgtcgcctccgcgctccaccaaggcatcgctcgctcctcccgttccgtctacacgattggttttgtgatggcagattacaagtattcgctgaggggtctggatgctggatcggcggattaccgtgttaagctctccaaggttcatctgcggtcagcaaaaaaactacttaaactatgtgaagtgaatggagggttttatgtcaaagctggtcaatatgtatcttcactaagacaagtgccaaaggagtactcatcaactctctcctgcctgcaagaccaggcaactccatccaagtttcaagatattaaagcagtaatagagcagaactttggcaaggaattgtatgacatgttcatcgaggtcgattgcataacaatcaagatgtagctgtcaaggtttttcctgattataaatttgacagaatactaattgaatttgagaaatccatgacaatggagcttgattttacgcgggaggctaagaattctgagagaacagccagctgcttcaggaaaaatagtgttgttaaagtgccttatgtgttctggcaacttacaaccagggaggttttgacgatggagttttgttatggacacaaggttaacgacttggacttcctgcggaaaacagatattagccctacaaaggtagctaaggctttgattgaactctttggtgaaatgatatttgtacatggttttgttcacggtgatccacatcctggaaatatattagtttctcctgaaggccatgggaaattttcactagttctgttggatcatggaatttatagagaattggaccaaaagttcagattggactattgtcggctatggaaagcactgatattgttggattcaaacaaaattctggaattaggcgaacagtttggcgttggcaaatatgcgaagtactttcctgtaatattcacagggagaactatagaaagcaagtcagctcttggcacacaaatgtctggtgaagagcagaggcgtctgaaggaggacttaaactctcttgggatggatgatatatcttcatttatggaatccttgccaccggacttctatgtcatactacgaacagacggactattgaggtccattttagggaatcttggggcaccacgccatgttcggcttctcacttatgcaagatgtgctatacacggtcttgagaagcagcacaaaatggagtctggtgcaatcagacgtatgttcttgaatgtcaaaacaaatgtcagctatctccgtctgagagtgattattgaaatagcggtattattagctaaagcaaatggtgccaagcagaaagtcgtgaacaaactcagacagatgttacaggagaccagtcaaggttttcaccgccgtatgtgatgcccagaagtcagcgacgtggtgaaattaaggctacgagaaaggtgggggaagttggaagtacgtcaggactccggagtagaatcataactgtgattgttctgtttcaacttgtaaattggaggttgtattgtgtcaaggagtccaatcataactgtgagtgctctgttgtaacttgtaaattctacttctacgtcgagtctgcgctcgagagtccaggtgttttttttttgttggaccaagtacgcatcccaaaataagtctacatcccaaaattcgaggagtcaaacaaatcttaatttgaagtttgcctaaatttataaaattggtattaac

SEQ ID NO: 202024 - DNA, 2236 bp, Zea Mays
aagagcacacgcaggcaggttagccttgatttcggcagtccaacgacactttccctccctcccagttcgttgaggatccgagagttctgggtccgagcggctgactctgcgagctgcgatgcatcgacgagtggccatgcgacccgaccggcccttctcccacccacgcaccctaaaacctggacacctcctcctctctctcctctagaacgcgcgcaagaacacacgtaggagaaactggaccggcgcgcaccaaccccgaaccacataactaggacgaggcgaaggattgtcatccaagccgcgtgatctttaattcgccgccgcacgcccttgtcatggaaggtggcggctgggctgtcggaggccacgcacttggcgccgcccaagaaccgcgggggcagcagcagcatcgggaggaggagaaggcagccggagctgccgccgagaggaagggcgctggcgccggcggcggcggcggcatgaagttccgcgtgcgcgcgcgggcgccgcacggtgtcggggcgctgctgctcatcggcggagcggccgtcgtcggggccgccgtcctcgcgtggcgccgctcacgccacggcaacaagggtggctccgtggaccagcctgatcgccggctgccaggaaagtagagggtttggatggcggaattgtcgaggatgggaaggttcagggtggctcattggtgcagaagcttagtcagtctaatgagatcttgagcgtgggcaacacagatattggatccggtagattggatggcaacgcgtcagaggaaagccatcagattcacaaggatggtgaaatcactgcagatcaatcggagagcaagcatgacgggaaaattgatgagaattcaggtatcaatcctgccgaggtccaaatgcacgatcaggagagcaagcatgaagagaaaaacgatgagaattcaggcagcaatcctgtcgaggttcacaaacacgatctggacaaagaacatgtcgaagaagttgaccagaagtcaagcagcaaccatgttgagatcagtgcgcatgatatgtgtgaggacaatgaacatgttgagaaaattgatcacgttgaaagaatcgatcagaattcgagcagggaccctgtcaaagccatcatgcaggaaatgatcaaagtttgtttggtcagtggaagcgtggagaaggtggaggaagaggactcaagcaagaaggacttggagaaagagatagccccaaaagataataaagatatggaggcctctgatggaagcaagctcggcgtcaacggtccagaaactggaggtgctgttgcagacactgaagaagatgatactgttgcagagacagaagatgttgttacagacactgaagatactgttacagacaccgaagatgctcttgcagaaacagaagcagagaaaggtgaaagagcaatcgcggacaagggtgagctcgagcaggacgaaaagaaagatctggtagcactccctgaacttgccagctcaccagcactgtcatcgttggttaagccaacagtagtgaagaaagagctggactttccgagacccaacgaaacggggatgaagacagagcaagattacactaacggtgagctgagggagcacaatgacctggtcagcaaagtgcagggagaaggtggcgtcgcgacgaccatggagtccaggagctctgctctgatgatcattctcgctctgatattcgcgctggccacgggaataacgatcgtcgtgcgcctctactccccttcccgagcaacgaaactccagatggatctgccataagcctgcaatcggtcatcaagtacgatttctgaggctgcaaagttccattgggatttttcgtggcctcgtacgcgcgcgcgcatgaacggcgaagttaggagctgctggagtgtgtgcaagtacaagataggaagagaagtctaccatggtcatgaacgaattcatatggccattgtgcagcacgatctgtctgtgctggagaagttacacgtgtggtgccagctaccaaaagaaagaaccgaggtccgagagcagtagagtaggtttcttccggctgaggagcgcttgtttttcttttttcttcttttaaaagaaatatatattattttgcaagccatgttagtgctgatagtctatggaaatgcctaaaccatgttgaagttcgtgcttggttttgtttgatttgatcgcctgtctcgtcaaccttttaattta

SEQ ID NO: 202025 - DNA, 2231 bp, Zea Mays
aagagcacacgcaggcaggttagccttgatttcggcagtccaacgacactttccctccctcccagttcgttgaggatccgagagttctgggtccgagcggctgactctgcgagctgcgatgcatcgacgagtggccatgcgacccgaccggcccttctcccacccacgcaccctaaaacctggacacctcctcctctctctcctctagaacgcgcgcaagaacacacgtaggagaaactggaccggcgcgcaccaaccccgaaccacataactaggacgaggcgaaggattgtcatccaagccgcgtgatctttaattcgccgccgcacgcccttgtcatggaaggtggcggctgggctgtcggaggccacgcacttggcgccgcccaagaaccgcgggggcagcagcagcatcgggaggaggagaaggcagccggagctgccgccgagaggaagggcgctggcgccggcggcggcggcggcatgaagttccgcgtgcgcgcgcgggcgccgcacggtgtcggggcgctgctgctcatcggcggagcggccgtcgtcggggccgccgtcctcgcgtggcgccgctcacgccacggcaacaagggtggctccgtggaccagcctgatcgccggctgccagcgaaagtagagggtttggatggcggaattgtcgaggatgggaagggtggctcattggtgcagaagcttagtcagtctaatgagatcttgagcgtgggcaacacagatattggatccggtagattggatggcaacgcgtcagaggaaagccatcagattcacaaggatggtgaaatcactgcagatcaatcggagagcaagcatgacgggaaaattgatgagaattcaggtatcaatcctgccgaggtccaaatgcacgatcaggagagcaagcatgaagagaaaaacgatgagaattcaggcagcaatcctgtcgaggttcacaaacacgatctggacaaagaacatgtcgaagaagttgaccagaagtcaagcagcaaccatgttgagatcagtgcgcatgatatgtgtgaggacaatgaacatgttgagaaaattgatcacgttgaaagaatcgatcagaattcgagcagggaccctgtcaaagccatcatgcaggaaatgatcaaagtttgtttggtcagtggaagcgtggagaaggtggaggaagaggactcaagcaagaaggacttggagaaagagatagccccaaaagataataaagatatggaggcctctgatggaagcaagctcggcgtcaacggtccagaaactggaggtgctgttgcagacactgaagaagatgatactgttgcagagacagaagatgttgttacagacactgaagatactgttacagacaccgaagatgctcttgcagaaacagaagcagagaaaggtgaaagagcaatcgcggacaagggtgagctcgagcaggacgaaaagaaagatctggtagcactccctgaacttgccagctcaccagcactgtcatcgttggttaagccaacagtagtgaagaaagagctggactttccgagacccaacgaaacggggatgaagacagagcaagattacactaacggtgagctgagggagcacaatgacctggtcagcaaagtgcagggagaaggtggcgtcgcgacgaccatggagtccaggagctctgctctgatgatcattctcgctctgatattcgcgctggccacgggaataacgatcgtcgtgcgcctctactccccttcccgagcaacgaaactccagatggatctgccataagcctgcaatcggtcatcaagtacgatttctgaggctgcaaagttccattgggatttttcgtggcctcgtacgcgcgcgcgcatgaacggcgaagttaggagctgctggagtgtgtgcaagtacaagataggaagagaagtctaccatggtcatgaacgaattcatatggccattgtgcagcacgatctgtctgtgctggagaagttacacgtgtggtgccagctaccaaaagaaagaaccgaggtccgagagcagtagagtaggtttcttccggctgaggagcgcttgtttttcttttttcttcttttaaaagaaatatatattattttgcaagccatgttagtgctgatagtctatggaaatgcctaaaccatgttgaagttcgtgcttggttttgtttgatttgatcgcctgtctcgtcaaccttttaattta

SEQ ID NO: 202026 - DNA, 2213 bp, Zea Mays
aagagcacacgcaggcaggttagccttgatttcggcagtccaacgacactttccctccctcccagttcgttgaggatccgagagttctgggtccgagcggctgactctgcgagctgcgatgcatcgacgagtggccatgcgacccgaccggcccttctcccacccacgcaccctaaaacctggacacctcctcctctctctcctctagaacgcgcgcaagaacacacgtaggagaaactggaccggcgcgcaccaaccccgaaccacataactaggacgaggcgaaggattgtcatccaagccgcgtgatctttaattcgccgccgcacgcccttgtcatggaaggtggcggctgggctgtcggaggccacgcacttggcgccgcccaagaaccgcgggggcagcagcagcatcgggaggaggagaaggcagccggagctgccgccgagaggaagggcgctggcgccggcggcggcggcggcatgaagttccgcgtgcgcgcgcgggcgccgcacggtgtcggggcgctgctgctcatcggcggagcggccgtcgtcggggccgccgtcctcgcgtggcgccgctcacgccacggcaacaagggtggctccgtggaccagcctgatcgccggctgccagcgaaagtagagggtttggatggcggaattgtcgaggatgggaagaagcttagtcagtctaatgagatcttgagcgtgggcaacacagatattggatccggtagattggatggcaacgcgtcagaggaaagccatcagattcacaaggatggtgaaatcactgcagatcaatcggagagcaagcatgacgggaaaattgatgagaattcaggtatcaatcctgccgaggtccaaatgcacgatcaggagagcaagcatgaagagaaaaacgatgagaattcaggcagcaatcctgtcgaggttcacaaacacgatctggacaaagaacatgtcgaagaagttgaccagaagtcaagcagcaaccatgttgagatcagtgcgcatgatatgtgtgaggacaatgaacatgttgagaaaattgatcacgttgaaagaatcgatcagaattcgagcagggaccctgtcaaagccatcatgcaggaaatgatcaaagtttgtttggtcagtggaagcgtggagaaggtggaggaagaggactcaagcaagaaggacttggagaaagagatagccccaaaagataataaagatatggaggcctctgatggaagcaagctcggcgtcaacggtccagaaactggaggtgctgttgcagacactgaagaagatgatactgttgcagagacagaagatgttgttacagacactgaagatactgttacagacaccgaagatgctcttgcagaaacagaagcagagaaaggtgaaagagcaatcgcggacaagggtgagctcgagcaggacgaaaagaaagatctggtagcactccctgaacttgccagctcaccagcactgtcatcgttggttaagccaacagtagtgaagaaagagctggactttccgagacccaacgaaacggggatgaagacagagcaagattacactaacggtgagctgagggagcacaatgacctggtcagcaaagtgcagggagaaggtggcgtcgcgacgaccatggagtccaggagctctgctctgatgatcattctcgctctgatattcgcgctggccacgggaataacgatcgtcgtgcgcctctactccccttcccgagcaacgaaactccagatggatctgccataagcctgcaatcggtcatcaagtacgatttctgaggctgcaaagttccattgggatttttcgtggcctcgtacgcgcgcgcgcatgaacggcgaagttaggagctgctggagtgtgtgcaagtacaagataggaagagaagtctaccatggtcatgaacgaattcatatggccattgtgcagcacgatctgtctgtgctggagaagttacacgtgtggtgccagctaccaaaagaaagaaccgaggtccgagagcagtagagtaggtttcttccggctgaggagcgcttgtttttcttttttcttcttttaaaagaaatatatattattttgcaagccatgttagtgctgatagtctatggaaatgcctaaaccatgttgaagttcgtgcttggttttgtttgatttgatcgcctgtctcgtcaaccttttaattta

SEQ ID NO: 202027 - DNA, 2444 bp, Zea Mays
aagagcacacgcaggcaggttagccttgatttcggcagtccaacgacactttccctccctcccagttcgttgaggatccgagagttctgggtccgagcggctgactctgcgagctgcgatgcatcgacgagtggccatgcgacccgaccggcccttctcccacccacgcaccctaaaacctggacacctcctcctctctctcctctagaacgcgcgcaagaacacacgtaggagaaactggaccggcgcgcaccaaccccgaaccacataactaggacgaggcgaaggattgtcatccaagccgcgtgatctttaattcgccgccgcacgcccttgtcatggaaggtggcggctgggctgtcggaggccacgcacttggcgccgcccaagaaccgcgggggcagcagcagcatcgggaggaggagaaggcagccggagctgccgccgagaggaagggcgctggcgccggcggcggcggcggcatgaagttccgcgtgcgcgcgcgggcgccgcacggtgtcggggcgctgctgctcatcggcggagcggccgtcgtcggggccgccgtcctcgcgtggcgccgctcacgccacggcaacaagggtggctccgtggaccagcctgatcgccggctgccagcgaaagtagagggtttggatggcggaattgtcgaggatgggaaggtgaggagtcatctgtcgcattcattgatggaaagtgaatctttttacatgcaaaaaaaattggttcgaatttgtaggttcagggtggctcattggtgcagaagcttagtcagtctaatgagatcttgagcgtgggcaacacagatattggatccggatggcaacgcgtcagaggaaagccatcagattcacaaggatggtgaaatcactgcagatcaatcggagagcaagcatgacgggaaaattgatgagaattcaggtatcaatcctgccgaggtccaaatgcacgatcaggagagcaagcatgaagagaaaaacgatgagaattcaggcagcaatcctgtcgaggttcacaaacacgatctggacaaagaacatgtcgaagaagttgaccagaagtcaagcagcaaccatgttgagatcagtgcgcatgatatgtgtgaggacaatgaacatgttgagaaaattgatcacgttgaaagaatcgatcagaattcgagcagggaccctgtcaaagccatcatgcaggaaatgatcaaagtttgtttggtcagtggaagcgtggagaaggtggaggaagaggactcaagcaagaaggacttggagaaagagatagccccaaaagataataaagatatggaggcctctgatggaagcaagctcggcgtcaacggtccaggtatcatcctcagcaagcataatgatgagtgtggtggtggtgcccaagaggctgaatcgatggagaacacgccgacggcacagctgatgatgcatcaagaccaactcttagatgacatggttactgatactgttacagaaactggaggtgctgttgcagacactgaagaagatgatactgttgcagagacagaagatgttgttacagacactgaagatactgttacagacaccgaagatgctcttgcagaaacagaagcagagaaaggtgaaagagcaatcgcggacaagggtgagctcgagcaggacgaaaagaaagatctggtagcactccctgaacttgccagctcaccagcactgtcatcgttggttaagccaacagtagtgaagaaagagctggactttccgagacccaacgaaacggggatgaagacagagcaagattacactaacggtgagctgagggagcacaatgacctggtcagcaaagtgcagggagaaggtggcgtcgcgacgaccatggagtccaggagctctgctctgatgatcattctcgctctgatattcgcgctggccacgggaataacgatcgtcgtgcgcctctactccccttcccgagcaacgaaactccagatggatctgccataagcctgcaatcggtcatcaagtacgatttctgaggctgcaaagttccattgggatttttcgtggcctcgtacgcgcgcgcgcatgaacggcgaagttaggagctgctggagtgtgtgcaagtacaagataggaagagaagtctaccatggtcatgaacgaattcatatggccattgtgcagcacgatctgtctgtgctggagaagttacacgtgtggtgccagctaccaaaagaaagaaccgaggtccgagagcagtagagtaggtttcttccggctgaggagcgcttgtttttcttttttcttcttttaaaagaaatatatattattttgcaagccatgttagtgctgatagtctatggaaatgcctaaaccatgttgaagttcgtgcttggttttgtttgatttgatcgcctgtctcgtcaaccttttaattta

SEQ ID NO: 202028 - DNA, 4877 bp, Zea Mays
tctagagatgagctacgtcttgtctatggtgtttctgagcgtacagaaagcgatggtgcagctaatttaattcagaagttgagagctataaactatgctctgggtgaactaggacagtggtgtgcttacaaggttgcactgtcattcttgacagcactacagaatgatgaaagggccaactatcaggttgatgttaagtttcaagagtcatacttgagaaaggtagttgatttgttacactgccagttgactgaaggggctgcaatgaaaagtgacagtaatgatgttgaaatgcataattctgaaaaccccaagccaaatgaacttgaggagggagagctacctgacagtcatgctgtttctgtaggtgaacatgtagatgaagtcattggtgccgcagtggccgatggaaaagttaccccaagggtgcaagctttgataaaaatacttctcaagtatcagcacactgaggattttcgtgctatcatatttgtagagcgagtggttacagcattagtcctccctaaggtctttgcagaacttccatcgttgggctttatacggtgtgcaagcttgataggtcataacaataaccaggagatgcggtcgtgccaaatgcaggatacaatcacaaaatttcgtgatggccgtgttacactgttagttgcaactagtgttgcagaggaaggacttgatattaggcagtgcaatgttgtcattcgctttgaccttgcaaagactgttttggcctacattcagtctcggggtcgtgctagaaagcctggatctgactacatattgatgcttgaaaggttgaatcaacaggtgccgttgtcagtctgaactctgcagttggactcgtacatttttactgctcacagctgccgagtgacagatactctattcttcgaccggaatttattatgcaaaagcatgagaaaccagggggttcaacagaatattcttgcaaacttcaactcccttgtaatgccccattcgagaaacttgaaggtcctatatgcagttcaatacgcctggcccaacaagctgtttgtttagctgcttgtaagaagctacatgagatgggtgccttcacagatatgcttttacctgacagaggaagtggggaaggagaaaagactgaacaaaatgatgaaggtgatccactgcctggaacagcacgccatagagagttctttcctgaaggggttgctgaaattctacatggagaatggattttatctggaagagatggttaccaaagttcacagtttattaagttatatttgtattctgtgaactgtgtaaacattgggacttcaaaggaccctttcgttacacaactttcaaattttgctcttatttttggcaatgagctggatgcagaggttttatcgacgacgatggatctctttgttgctaggacaataataacaaaggcatctctcgtattccgtggaccaattgaaattacagaaagtcagctgatcctgcttaagagctttcatgttaggctcatgagcattgtacttgatgttgatgttgatccctcaacaactccttgggatccagcaaaagcatacctctttgttcctgtgggagctgagaaatgtatggatcttttaagagagatagattggactctagttaatagcattgtgaattctgatgcctggaacaaccctcttcagagggcacgcccagatgtctatctaggcacgaacgaaaggacacttggaggggataggagggaatatgggttcgggaagttgcgccatggaactgcatttggacagaaagcccaccctacgtatggtatcagaggagccatcgctgaattcgatgttgtcaaagcgtctggattagttcctggtcgtggatggggacattttaatgattatcaaaataaaggcaagttgttcatggcagattcatgttgggatgccaaagatcttgctggaatggttgtaactgccgcccactcaggaaaaaggttctatgtggacagtatttgctataatatgaatgcagaaaattctttccctaggaaagagggctatctgggtcccttggaatacagctcgtttgctgattactacaagcagaagtatggtgtggagttagtttataagaaacaacctcttatacgggcacgcggtgtttcatactgcaaaaatctactttctcctagatttgagcattctgaagctagcaatggagagttctcagagaatcttgacaagacatactatgtatatttaccacccgaattgtgccttgtgcatcctctccccggatcacttgttcgtggagctcagaggttaccctcaataatgagaagggtggagagcatgcttcttgcaattcaactgaaggacataattgggtatccagttcctgcaaataagatattagaagccttgactgctgcgtcatgccaggagacattctgctatgaaagagcagagctgctgggtgatgcatacttgaaatgggttgtgagtagattccttttcctaaaatatcctcaaaagcatgagggacagctcacaaggatgcggcagcagatggttagcaacatgatcctgtatcaatacgccctgaataaaaacctccaatcttatatccaagcagatcgatttgctccatcaagatgggcagctccaggagtgttacctgtatttgatgaagaaacgagagattctgaaccatccatctttgatgaggaatttactcctagcagtgagttacaaaagaacttgtatgatgactatgatggcgatagcatgcaagaagacggtgaaattgagggagattctagctgctatcgtgttctatcaagcaaaacattagcagatgttgtggaagcacttattggtgtctattatgtagctggagggaaaattgctacaaaccatctgatgaaatggatcggtattaatgcagagttggatcctcaagagatcccatcttcgaagccatataacatacctgagagcataattaaaagcatcaattttgacacattagagggtgcattgggtatcaagtttcagaataaaggcttacttgttgaagctataacacatgcatcaagaccatcatcaggtgtttcctgttaccagcgcctggaatttgttggtgatgctgtattggaccatctcattacgaagcacttattttttacttatacggacctacctccaggccgcttgactgacttgagagctgcagctgttaataatgagaactttgcaagggttgcagttaaacataagctacatgtacatcttcgccatggatcatctgcattggagacacagattcgagagtttgtgaaggatgtccaggaggagctttcgaaaccaggtttcaattcttttggccttggggattgtaaggctccaaaggttctcggagacatttttgagtctattgctggcgcaatattccttgatagtgggtgtgctacctccgtagtctggaaggtttttcagcctctgcttgatccaatggtgacgccggacacccttccgatgcaccctgtaagggagctccaagagcgctgccagcagcaagccgaaggattagaatacaaagcatcccgtacaggcaatgtagctacagttgaagtcttggttgatggcatacagattggtgtagctcagaacccacagaagaagatggcacaaaagttggcggctagaaatgcacttgttgtcttgaaagagaaggaaaccgcagcaaagaaagacactgaaaaggatggcgagaagaaaaacggttctcagttcactaggcagactctgaacgacatctgcttgagaaggcaatggccgatgccacagtacaggtgtataaacgagggtggccctgcccatgccaaaagatttgtttatgcggtaagggtaaatacatctgacagtggatggactgacgagtgcattggagagccaatgccgagtgtgaaaaaggccaaggactctgcagctgttcttctgctcgagctgctgaatcgaaattaccgtggcaagcctgatggaaaataatctttggtgatgttctgtggtggtaggtagacgtggaagcatccatcattctgattatacccccatgcagtgcttttcagcaaagcaaattaatggcctttgttgatgttcttggtggcggtattggtgatatggaggcattcaatgcaagcataagcagagctatggggagtgggattagaggattattattagttttgtctgaggtgactactaggtattttactggcgaggtactgaggtcacaactcacaaatagcagttgcaaattgcaatagaggaaatgatgataggttgatataggatattggaggcctcttattcatcgattgtataagatgtttacagaacagtgcattgatccattaaatttatattgattgatatttttatagtggatgcgcctgcagctgggaactcggggttctctatcttggcctcgccgaccaaatatcacgtacgtcgacgtccgcgaacagtatatatatggtaggcttggcgggcgtgatccccttgcgcatggtacagagcaagacgctgagctggatattctgataatcccgtatactccaacagaaactacagaatggaatcaagttgtacctgcgtttctgctgctcaaaaattgcgagatggaccatggacgtgtgttgtttggcaacaacgacgcaaccagcacggacaagaaggggggacatgcagtctctcgaaacctgtcctatacaattagaaagaaaaaaaagagggaaaataaaaggaaaagaacgcgagggcagggccggccggtcggtcggtgcctgcgccgcacttttgtcatgtgcctagcac

SEQ ID NO: 202029 - DNA, 4848 bp, Zea Mays
tctagagatgagctacgtcttgtctatggtgtttctgagcgtacagaaagcgatggtgcagctaatttaattcagaagttgagagctataaactatgctctgggtgaactaggacagtggtgtgcttacaaggttgcactgtcattcttgacagcactacagaatgatgaaagggccaactatcaggttgatgttaagtttcaagagtcatacttgagaaaggtagttgatttgttacactgccagttgactgaaggggctgcaatgaaaagtgacagtaatgatgttgaaatgcataattctgaaaaccccaagccaaatgaacttgaggagggagagctacctgacagtcatgctgtttctgtaggtgaacatgtagatgaagtcattggtgccgcagtggccgatggaaaagttaccccaagggtgcaagctttgataaaaatacttctcaagtatcagcacactgaggattttcgtgctatcatatttgtagagcgagtggttacagcattagtcctccctaaggtctttgcagaacttccatcgttgggctttatacggtgtgcaagcttgataggtcataacaataaccaggagatgcggtcgtgccaaatgcaggatacaatcacaaaatttcgtgatggccgtgttacactgttagttgcaactagtgttgcagaggaaggacttgatattaggcagtgcaatgttgtcattcgctttgaccttgcaaagactgttttggcctacattcagtctcggggtcgtgctagaaagcctggatctgactacatattgatgcttgaaagaggaaatatgtctcatgaagctttcttgagaaatgctcggaatagtgaagagacattgagaaaagaagctattgagagaactgatctcagtcatctcgatggcacttctatgctaagccctgttgatatatcacctgattctatgtatcaggttgaatcaacaggtgccgttgtcagtctgaactctgcagttggactcgtacatttttactgctcacagctgccgagtgacagatactctattcttcgaccggaatttattatgcaaaagcatgagaaaccagggggttcaacagaatattcttgcaaacttcaactcccttgtaatgccccattcgagaaacttgaaggtcctatatgcagttcaatacgcctggcccaacaagctgtttgtttagctgcttgtaagaagctacatgagatgggtgccttcacagatatgcttttacctgacagaggaagtggggaaggagaaaagactgaacaaaatgatgaaggtgatccactgcctggaacagcacgccatagagagttctttcctgaaggggttgctgaaattctacatggagaatggattttatctggaagagatggttaccaaagttcacagtttattaagttatatttgtattctgtgaactgtgtaaacattgggacttcaaaggaccctttcgttacacaactttcaaattttgctcttatttttggcaatgagctggatgcagaggttttatcgacgacgatggatctctttgttgctaggacaataataacaaaggcatctctcgtattccgtggaccaattgaaattacagaaagtcagctgatcctgcttaagagctttcatgttaggctcatgagcattgtacttgatgttgatgttgatccctcaacaactccttgggatccagcaaaagcatacctctttgttcctgtgggagctgagaaatgtatggatcttttaagagagatagattggactctagttaatagcattgtgaattctgatgcctggaacaaccctcttcagagggcacgcccagatgtctatctaggcacgaacgaaaggacacttggaggggataggagggaatatgggttcgggaagttgcgccatggaactgcatttggacagaaagcccaccctacgtatggtatcagaggagccatcgctgaattcgatgttgtcaaagcgtctggattagttcctggtcgtggatggggacattttaatgattatcaaaataaaggcaagttgttcatggcagattcatgttgggatgccaaagatcttgctggaatggttgtaactgccgcccactcaggaaaaaggttctatgtggacagtatttgctataatatgaatgcagaaaattctttccctaggaaagagggctatctgggtcccttggaatacagctcgtttgctgattactacaagcagaagtatggtgtggagttagtttataagaaacaacctcttatacgggcacgcggtgtttcatactgcaaaaatctactttctcctagatttgagcattctgaagctagcaatggagagttctcagagaatcttgacaagacatactatgtatatttaccacccgaattgtgccttgtgcatcctctccccggatcacttgttcgtggagctcagaggttaccctcaataatgagaagggtggagagcatgcttcttgcaattcaactgaaggacataattgggtatccagttcctgcaaataagatattagaagccttgactgctgcgtcatgccaggagacattctgctatgaaagagcagagctgctgggtgatgcatacttgaaatgggttgtgagtagattccttttcctaaaatatcctcaaaagcatgagggacagctcacaaggatgcggcagcagatggttagcaacatgatcctgtatcaatacgccctgaataaaaacctccaatcttatatccaagcagatcgatttgctccatcaagatgggcagctccaggagtgttacctgtatttgatgaagaaacgagagattctgaaccatccatctttgatgaggaatttactcctagcagtgagttacaaaagaacttgtatgatgactatgatggcgatagcatgcaagaagacggtgaaattgagggagattctagctgctatcgtgttctatcaagcaaaacattagcagatgttgtggaagcacttattggtgtctattatgtagctggagggaaaattgctacaaaccatctgatgaaatggatcggtattaatgcagagttggatcctcaagagatcccatcttcgaagccatataacatacctgagagcataattaaaagcatcaattttgacacattagagggtgcattgggtatcaagtttcagaataaaggcttacttgttgaagctataacacatgcatcaagaccatcatcaggtgtttcctgttaccagcgcctggaatttgttggtgatgctgtattggaccatctcattacgaagcacttattttttacttatacggacctacctccaggccgcttgactgacttgagagctgcagctgttaataatgagaactttgcaagggttgcagttaaacataagctacatgtacatcttcgccatggatcatctgcattggagacacagattcgagagtttgtgaaggatgtccaggaggagctttcgaaaccaggtttcaattcttttggccttggggattgtaaggctccaaaggttctcggagacatttttgagtctattgctggcgcaatattccttgatagtgggtgtgctacctccgtagtctggaaggtttttcagcctctgcttgatccaatggtgacgccggacacccttccgatgcaccctgtaagggagctccaagagcgctgccagcagcaagccgaaggattagaatacaaagcatcccgtacaggcaatgtagctacagttgaagtcttggttgatggcatacagattggtgtagctcagaacccacagaagaagatggcacaaaagttggcggctagaaatgcacttgttgtcttgaaagagaaggaaaccgcagcaaagaaagacactgaaaaggatggcgagaagaaaaacggttctcagttcactaggcagactctgaacgacatctgcttgagaaggcaatggccgatgccacagtacaggtgtataaacgagggtggccctgcccatgccaaaagatttgtttatgcggtaagggtaaatacatctgacagtggatggactgacgagtgcattggagagccaatgccgagtgtgaaaaaggccaaggactctgcagctgttcttctgctcgagctgctgaatcgaaattaccgtggcaagcctgatggaaaataatctttggtgatgttctgtggtggtaggtagacgtggaagcatccatcattctgattatacccccatgcagtgcttttcagcaaagcaaattaatggcctttgttgatgttcttggtggcggtattggtgatatggaggcattcaatgcaagcataagcagagctatggggagtgggattagaggattattattagttttgtctgaggtgactactaggatgcgcctgcagctgggaactcggggttctctatcttggcctcgccgaccaaatatcacgtacgtcgacgtccgcgaacagtatatatatggtaggcttggcgggcgtgatccccttgcgcatggtacagagcaagacgctgagctggatattctgataatcccgtatactccaacagaaactacagaatggaatcaagttgtacctgcgtttctgctgctcaaaaattgcgagatggaccatggacgtgtgttgtttggcaacaacgacgcaaccagcacggacaagaaggggggacatgcagtctctcgaaacctgtcctatacaattagaaagaaaaaaaagagggaaaataaaaggaaaagaacgcgagggcagggccggccggtcggtcggtgcctgcgccgcacttttgtcatgtgcctagcac

SEQ ID NO: 202030 - DNA, 4868 bp, Zea Mays
gtctagagatgagctacgtcttgtctatggtgtttctgagcgtacagaaagcgatggtgcagctaatttaattcagaagttgagagctataaactatgctctgggtgaactaggacagtggtgtgcttacaaggttgcactgtcattcttgacagcactacagaatgatgaaagggccaactatcaggttgatgttaagtttcaagagtcatacttgagaaaggtagttgatttgttacactgccagttgactgaaggggctgcaatgaaaagtgacagtaatgatgttgaaatgcataattctgaaaaccccaagccaaatgaacttgaggagggagagctacctgacagtcatgctgtttctgtaggtgaacatgtagatgaagtcattggtgccgcagtggccgatggaaaagttaccccaagggtgcaagctttgataaaaatacttctcaagtatcagcacactgaggattttcgtgctatcatatttgtagagcgagtggttacagcattagtcctccctaagaacttccatcgttgggctttatacggtgtgcaagcttgataggtcataacaataaccaggagatgcggtcgtgccaaatgcaggatacaatcacaaaatttcgtgatggccgtgttacactgttagttgcaactagtgttgcagaggaaggacttgatattaggcagtgcaatgttgtcattcgctttgaccttgcaaagactgttttggcctacattcagtctcggggtcgtgctagaaagcctggatctgactacatattgatgcttgaaaggttgaatcaacaggtgccgttgtcagtctgaactctgcagttggactcgtacatttttactgctcacagctgccgagtgacagatactctattcttcgaccggaatttattatgcaaaagcatgagaaaccagggggttcaacagaatattcttgcaaacttcaactcccttgtaatgccccattcgagaaacttgaaggtcctatatgcagttcaatacgcctggcccaacaagctgtttgtttagctgcttgtaagaagctacatgagatgggtgccttcacagatatgcttttacctgacagaggaagtggggaaggagaaaagactgaacaaaatgatgaaggtgatccactgcctggaacagcacgccatagagagttctttcctgaaggggttgctgaaattctacatggagaatggattttatctggaagagatggttaccaaagttcacagtttattaagttatatttgtattctgtgaactgtgtaaacattgggacttcaaaggaccctttcgttacacaactttcaaattttgctcttatttttggcaatgagctggatgcagaggttttatcgacgacgatggatctctttgttgctaggacaataataacaaaggcatctctcgtattccgtggaccaattgaaattacagaaagtcagctgatcctgcttaagagctttcatgttaggctcatgagcattgtacttgatgttgatgttgatccctcaacaactccttgggatccagcaaaagcatacctctttgttcctgtgggagctgagaaatgtatggatcttttaagagagatagattggactctagttaatagcattgtgaattctgatgcctggaacaaccctcttcagagggcacgcccagatgtctatctaggcacgaacgaaaggacacttggaggggataggagggaatatgggttcgggaagttgcgccatggaactgcatttggacagaaagcccaccctacgtatggtatcagaggagccatcgctgaattcgatgttgtcaaagcgtctggattagttcctggtcgtggatggggacattttaatgattatcaaaataaaggcaagttgttcatggcagattcatgttgggatgccaaagatcttgctggaatggttgtaactgccgcccactcaggaaaaaggttctatgtggacagtatttgctataatatgaatgcagaaaattctttccctaggaaagagggctatctgggtcccttggaatacagctcgtttgctgattactacaagcagaagtatggtgtggagttagtttataagaaacaacctcttatacgggcacgcggtgtttcatactgcaaaaatctactttctcctagatttgagcattctgaagctagcaatggagagttctcagagaatcttgacaagacatactatgtatatttaccacccgaattgtgccttgtgcatcctctccccggatcacttgttcgtggagctcagaggttaccctcaataatgagaagggtggagagcatgcttcttgcaattcaactgaaggacataattgggtatccagttcctgcaaataagatattagaagccttgactgctgcgtcatgccaggagacattctgctatgaaagagcagagctgctgggtgatgcatacttgaaatgggttgtgagtagattccttttcctaaaatatcctcaaaagcatgagggacagctcacaaggatgcggcagcagatggttagcaacatgatcctgtatcaatacgccctgaataaaaacctccaatcttatatccaagcagatcgatttgctccatcaagatgggcagctccaggagtgttacctgtatttgatgaagaaacgagagattctgaaccatccatctttgatgaggaatttactcctagcagtgagttacaaaagaacttgtatgatgactatgatggcgatagcatgcaagaagacggtgaaattgagggagattctagctgctatcgtgttctatcaagcaaaacattagcagatgttgtggaagcacttattggtgtctattatgtagctggagggaaaattgctacaaaccatctgatgaaatggatcggtattaatgcagagttggatcctcaagagatcccatcttcgaagccatataacatacctgagagcataattaaaagcatcaattttgacacattagagggtgcattgggtatcaagtttcagaataaaggcttacttgttgaagctataacacatgcatcaagaccatcatcaggtgtttcctgttaccagcgcctggaatttgttggtgatgctgtattggaccatctcattacgaagcacttattttttacttatacggacctacctccaggccgcttgactgacttgagagctgcagctgttaataatgagaactttgcaagggttgcagttaaacataagctacatgtacatcttcgccatggatcatctgcattggagacacagattcgagagtttgtgaaggatgtccaggaggagctttcgaaaccaggtttcaattcttttggccttggggattgtaaggctccaaaggttctcggagacatttttgagtctattgctggcgcaatattccttgatagtgggtgtgctacctccgtagtctggaaggtttttcagcctctgcttgatccaatggtgacgccggacacccttccgatgcaccctgtaagggagctccaagagcgctgccagcagcaagccgaaggattagaatacaaagcatcccgtacaggcaatgtagctacagttgaagtcttggttgatggcatacagattggtgtagctcagaacccacagaagaagatggcacaaaagttggcggctagaaatgcacttgttgtcttgaaagagaaggaaaccgcagcaaagaaagacactgaaaaggatggcgagaagaaaaacggttctcagttcactaggcagactctgaacgacatctgcttgagaaggcaatggccgatgccacagtacaggtgtataaacgagggtggccctgcccatgccaaaagatttgtttatgcggtaagggtaaatacatctgacagtggatggactgacgagtgcattggagagccaatgccgagtgtgaaaaaggccaaggactctgcagctgttcttctgctcgagctgctgaatcgaaattaccgtggcaagcctgatggaaaataatctttggtgatgttctgtggtggtaggtagacgtggaagcatccatcattctgattatacccccatgcagtgcttttcagcaaagcaaattaatggcctttgttgatgttcttggtggcggtattggtgatatggaggcattcaatgcaagcataagcagagctatggggagtgggattagaggattattattagttttgtctgaggtgactactaggtattttactggcgaggtactgaggtcacaactcacaaatagcagttgcaaattgcaatagaggaaatgatgataggttgatataggatattggaggcctcttattcatcgattgtataagatgtttacagaacagtgcattgatccattaaatttatattgattgatatttttatagtggatgcgcctgcagctgggaactcggggttctctatcttggcctcgccgaccaaatatcacgtacgtcgacgtccgcgaacagtatatatatggtaggcttggcgggcgtgatccccttgcgcatggtacagagcaagacgctgagctggatattctgataatcccgtatactccaacagaaactacagaatggaatcaagttgtacctgcgtttctgctgctcaaaaattgcgagatggaccatggacgtgtgttgtttggcaacaacgacgcaaccagcacggacaagaaggggggacatgcagtctctcgaaacctgtcctatacaattagaaagaaaaaaaagagggaaaataaaaggaaaagaacgcgagggcagggccggccggtcggtcggtgcctgcgccgcacttttgtcatgtgcctagcac

SEQ ID NO: 202031 - DNA, 1426 bp, Zea Mays
gcaatgatagttcttaccttgaccaaggagccaagtcttggagtcaatattatgctgccatgcacattgcaataaatgctgtcattaccgaactaaagcagtttctgagagcaagcgtcacaatcgccatggaagctgggagaatggatcagccttgcatggcttctatcaatagccagcctttcgtggctgatactgagccagtgaagaaagccagtggggacatgcctgcggcgccgacaggaagcgggtgcttcgactgcaacatctgccttgattttgcagcagaaccagtggttaccctctgtggtcatctctactgctggccttgcatctacgagtggctgcgccctggggtggagtcaaccgccagcgacaacggcagttcggcaaggcggcaatgccctgtatgcaaggcaacactctcaccggacacccttgtgccgctatacggccgcggagggagctcaaagaagtcactggatggcatggccatcccgcgccgccccatggtacaccgggaggctgtcgagcaacagaatgcacggagccatgtcaatgaccagcactaccaccagagcacgggagacagccctcagcaccagccattgatgcaggcgcaccaccatcccgtcccccctgggttcgacttcatataccctccagcgccggtagggcgtggtttgatccactcgactgccggaggggtgctcggagggatggcagaggttgtgctcccgtgggtgctccgtggccagctgccagccagcttgcactacacgagcccataccatgttgcggcacagaacgtgaaccccaggctgaggcggcaacagatggaaatagagaggtccctgcaccagatctggttcttcctctttgtgtttgtgctgctgtgcctgctcttgttctgagacagaggactgttctatatgcctctctgtagatattgaagagggggagagagggatactaatggatgatgcgtatagtagacagggtaatggtctgtatcgacaagcatgctgatatagagttgtaatatgatgagacatgggaggtgaaatgtatatttcattcttctcgtcataacgtcagcggtttcctgatctatcgctgttggcctgttaggtaggttgcctacctgacatgtcttcatgtcagggccttcgatttgctcatttgcatatgtaaatcgaaaatgatgttttggctaccaatgtctgcgtcctcttcaatccctgttccgaaattgatacggcaattttgtagccaggacctcaggtgcacaacagcacaagtgcattttccttctatatgtgattacatgcatctgacgctgatccgggccattatatgtatgtggtatattgatcggagccaatatagattggcgtgaaagctaacagggaagagaaaaaaaaac

SEQ ID NO: 202032 - DNA, 568 bp, Zea Mays
tttctctccatttgggtttcttgacaaggtatgaccgtgtacgaggagtggagattggcaacaaagatataaagcttgaatacttggaagaggcatttacaacttcaaactggatagtgcgcatatacaaggtgaaacccccaaagaacaggtcctgaggcgtcatcgctagtgaagtggttggagagctattacctcagacaagtacatattgtcaaaaaatctgaatctgagtggcctcaggagagggcggggtcgttgttatgggcacctgctttggcgagagtgactattagcagccatagcatcagttcagctcgaagtcaagaacatctttcccctcattcggtttaggtgtaatcggtgaggaaccaattgtggcaacagcgagtaatttttaattgttgagcatccatggccgaactattaaagtttttgtaggcgcaatgacatatttgaatagaaacttgtctttgatcaatccaaggcaatggattttttcggcactaaacacaaaatatgaactgttaatctgttctctctattattatatgttttcatggtccaa

SEQ ID NO: 202033 - DNA, 779 bp, Zea Mays
ggcgcccgccgctagcaagcccgaacgagcctggtcgttctcctccccgtcctaataatcagggaaaggctcgccgcgaggctccgcccctatcgcgcgccgccagcgacagagaatgcttgcggtcccggtggcgaggatggccggccgcgggggcagggcaggggccggggcaggaacgccatcgatctggggcgcccccggcatcgcagcttctctcgcctcctaggaaatcacggagcttccgaacagatcccattgttcagtatctgtgtaaaaagaaataacagcagagccttttatcctaagaaagttgggctgtcccggtggcgaggatggccggccgcgggggcagggcaggggcaggaacgccatccatttggggcacccccggcatcgcaacttctctcgcctcctaggaaatcacggagcttccgaacagggctcctacacgatctacatgaagattgtcggggatgacaacgaggagctgagctgcatctcgtttgggttcagcatcagcttcgtcgcgtccgagcctgggcatgagaggcagccagcccatggatgattctgatgaggacgagactgatgattccgatgaggacgagacagatgaaaccaattgccttttaatggtctatgttatcattcaaaattgtcttatgttgacactatgtatatatgctattcacaataatagagccattcatactgttgggcgccttggatgaactatcttttcttcaacaaagatggagctcatgcagattgattta

SEQ ID NO: 202034 - DNA, 834 bp, Zea Mays
gcaagagcgagccaggcagcggcgcccgccgctagcaagcccgaacgagcctggtcgttctcctccccgtcctaataatcagggaaaggctcgccgcgaggctccgcccctatcgcgcgccgccagcgacagagaatgcttgcggtcccggtggcgaggatggccggccgcgggggcagggcaggggccggggcaggaacgccatcgatctggggcgcccccggcatcgcagcttctctcgcctcctaggaaatcacggagcttccgaacagcatttgttacaacccgatgcactggtctcctgaagatcccattgttcagtatctgtgtaaaaagaaataacagcagagccttttatcctaagaaagttgggctgtcccggtggcgaggatggccggccgcgggggcagggcaggggcaggaacgccatccatttggggcacccccggcatcgcaacttctctcgcctcctaggaaatcacggagcttccgaacagggctcctacacgatctacatgaagattgtcggggatgacaacgaggagctgagctgcatctcgtttgggttcagcatcagcttcgtcgcgtccgagcctgggcatgagaggcagccagcccatggatgattctgatgaggacgagactgatgattccgatgaggacgagacagatgaaaccaattgccttttaatggtctatgttatcattcaaaattgtcttatgttgacactatgtatatatgctattcacaataatagagccattcatactgttgggcgccttggatgaactatcttttcttcaacaaagatggagctcatgcagattgattta

SEQ ID NO: 202035 - DNA, 1084 bp, Zea Mays
gcaagagcgagccaggcagcggcgcccgccgctagcaagcccgaacgagcctggtcgttctcctccccgtcctaataatcagggaaaggctcgccgcgaggctccgcccctatcgcgcgccgccagcgacagagaatgcttgcggtcccggtggcgaggatggccggccgcgggggcagggcaggggccggggcaggaacgccatcgatctggggcgcccccggcatcgcagcttctctcgcctcctaggaaatcacggagcttccgaacagattatgttacgagagattttggagtcaattctgtaatgcctcataagtataaagggatgtgtgatgtggtctacgggtggactggaagggtgtgacatcccatccagcatttgttaaagtcttcctcagcatatgaacggaccaatgatatcctctttctcagatttatgctacctgcggactggatttctctttcaggatctataggattgaacagaaccactgaacactgataatctctcttccttagcatttgttacaacccgatgcactggtctcctgaagatcccattgttcagtatctgtgtaaaaagaaataacagcagagccttttatcctaagaaagttgggctgtcccggtggcgaggatggccggccgcgggggcagggcaggggcaggaacgccatccatttggggcacccccggcatcgcaacttctctcgcctcctaggaaatcacggagcttccgaacagggctcctacacgatctacatgaagattgtcggggatgacaacgaggagctgagctgcatctcgtttgggttcagcatcagcttcgtcgcgtccgagcctgggcatgagaggcagccagcccatggatgattctgatgaggacgagactgatgattccgatgaggacgagacagatgaaaccaattgccttttaatggtctatgttatcattcaaaattgtcttatgttgacactatgtatatatgctattcacaataatagagccattcatactgttgggcgccttggatgaactatcttttcttcaacaaagatggagctcatgcagattgattta

SEQ ID NO: 202036 - DNA, 886 bp, Zea Mays
gcaagagcgagccaggcagcggcgcccgccgctagcaagcccgaacgagcctggtcgttctcctccccgtcctaataatcagggaaaggctcgccgcgaggctccgcccctatcgcgcgccgccagcgacagagaatgcttgcggtcccggtggcgaggatggccggccgcgggggcagggcaggggccggggcaggaacgccatcgatctggggcgcccccggcatcgcagcttctctcgcctcctaggaaatcacggagcttccgaacaggatctataggattgaacagaaccactgaacactgataatctctcttccttagcatttgttacaacccgatgcactggtctcctgaagatcccattgttcagtatctgtgtaaaaagaaataacagcagagccttttatcctaagaaagttgggctgtcccggtggcgaggatggccggccgcgggggcagggcaggggcaggaacgccatccatttggggcacccccggcatcgcaacttctctcgcctcctaggaaatcacggagcttccgaacagggctcctacacgatctacatgaagattgtcggggatgacaacgaggagctgagctgcatctcgtttgggttcagcatcagcttcgtcgcgtccgagcctgggcatgagaggcagccagcccatggatgattctgatgaggacgagactgatgattccgatgaggacgagacagatgaaaccaattgccttttaatggtctatgttatcattcaaaattgtcttatgttgacactatgtatatatgctattcacaataatagagccattcatactgttgggcgccttggatgaactatcttttcttcaacaaagatggagctcatgcagattgattta

SEQ ID NO: 202037 - DNA, 933 bp, Zea Mays
ctcctccatcgcagcaagagcgagccaggcagcggcgcccgccgctagcaagcccgaacgagcctggtcgttctcctccccgtcctaataatcagggaaaggctcgccgcgaggctccgcccctatcgcgcgccgccagcgacagagaatgcttgcggtcccggtggcgaggatggccggccgcgggggcagggcaggggccggggcaggaacgccatcgatctggggcgcccccggcatcgcagcttctctcgcctcctaggaaatcacggagcttccgaacaatttatgctacctgcggactggatttctctttcaggatctataggattgaacagaaccactgaacactgataatctctcttccttagcatttgttacaacccgatgcactggtctcctgaagatcccattgttcagtatctgtgtaaaaagaaataacagcagagccttttatcctaagaaagttgggctgtcccggtggcgaggatggccggccgcgggggcagggcaggggcaggaacgccatccatttggggcacccccggcatcgcaacttctctcgcctcctaggaaatcacggagcttccgaacagggctcctacacgatctacatgaagattgtcggggatgacaacgaggagctgagctgcatctcgtttgggttcagcatcagcttcgtcgcgtccgagcctgggcatgagaggcagccagcccatggatgattctgatgaggacgagactgatgattccgatgaggacgagacagatgaaaccaattgccttttaatggtctatgttatcattcaaaattgtcttatgttgacactatgtatatatgctattcacaataatagagccattcatactgttgggcgccttggatgaactatcttttcttcaacaaagatggagctcatgcagattgattta

SEQ ID NO: 202038 - DNA, 973 bp, Zea Mays
ccatgggcgtcgcaggctcgctgcccttcggtggaggcgaccgtccacaccaaaccagtctgcgccgcgtcccattttgccttccatcgtggccggtgaggggccacaagcgttgcccccctccggtgaacgcgacggtgggttccactccaccgccggggccagcatccgttctaacccggtcgcgcttcgtccacacgctacgtcgtcaccgagaagagcccgtgctcgccttcgtcaccgagaagaggtcgatctgtcgcagctctggtgggcccttgcatccacgtaggaccatgttcagctattgtgagagaggatatatgcaaggcagggcgtggtcacgtgctctgcatcgccgacctctcccgcacgtctcggcactgtcgaggatgggagtcggcgctgtgatcggccagagatttgtaccttcatgcctttaacgtctgcttccccgtcctccccatccactattcgcatttgggggctttgcaatttctccatctctgtgttcctcagtccgtcccccttggtttggggctaccggctaccgctgtccaccgaactcatggggttgcctgatttgctgccggtgccgttcgtgacatagatcttgtgctggcctcgtgggcgcagggctcctacacgatctacatgaagattgtcggggatgacaacgaggagctgagctgcatctcgtttgggttcagcatcagcttcgtcgcgtccgagcctgggcatgagaggcagccagcccatggatgattctgatgaggacgagactgatgattccgatgaggacgagacagatgaaaccaattgccttttaatggtctatgttatcattcaaaattgtcttatgttgacactatgtatatatgctattcacaataatagagccattcatactgttgggcgccttggatgaactatcttttcttcaacaaagatggagctcatgcagattgattta

SEQ ID NO: 202039 - DNA, 2002 bp, Zea Mays
ctggctgctctcggaccttggacgacacgtcgacaccagtgcagcagccaccaaagatccggcccgcccgcgccgcacgagaccgccgcccgcgccgcacgagagtcatgacgacgccgcggcggcacgctgatccgtcgccctcgccctcgccctcttccccgccgcagcttctctcccgcctccgctccggggcctccagtttcctggcgcggcagtacagcacggggaagggaggcgataacaccggtccttcgaagccgaaaggtggtggctcctccgcgccaaggcacctcaggccaggattcgtggatccttcatcatggaaacattttgactcaagggctgttggcattaaaccgggtgctatacatacagatgcatgggcggttttaaaaaagctcagacgtgaaggttttcaagcttaccttgttggtggctgtgtgagagatttgctactcaaaagggtacctaaagattttgacgtgattaccactgcaagtctcgaacagcttaagaaaaatatattcaggagatctaggattgtaggcaaacgctttccaatatgtcttcttaaaatgcgtgactctgtaattgagatttcgagctttcgaacagttgctaattatgggaatagaagtgaagtggtagattatgtggcagagttgaatggctctgacgttagggatattcttcgctggaaggattctatgagaagagacttcacaataaatggtcttttctttaacccgatgaactgcaaaatttatgattacgtgaatggagtaagggatatgagaaaaaacaaagtgtgtacagtgattcctgctcacatttctttcatggaggaccctgaattgctgctcgccttggtttccagttttccagtgaaacttctaatgcgatacgtgatttttcttcatctataaataatatcgataaggcaaggctgatgatggaaatgaattatataatgtcttatggagcagcagcaccttctgttaggttgcttagaaaatatggactacttgatattttgctgcctttccagtcagcatatttgtctgagcagatgaaaggtggttcaagtgacagacatctgatgcttatgaaattactgtctaatcttgataggttactctctgcggaccgaccatgccatagctctttgtggctggcgttgttggcatttcacagtacattggttatatatccacaagacaccttggtaataagagcttttgctgcagtgttgtatttcggaacatgggaaacaacagtcaaatttctgagagaagaagttggagctgaagttccatttgccccagagacaatggggccttctcggaccaaactggattgtcttaaggaacaaacgtcacatctagcatcactagtcaattcttcagtagatatattgacatgtcctcatgatctggagcaatcgctagccagattctcggaacctctgcaattttcaggagtggtagtcgcatctaacaatgataggaaaaagttgtcggccgtatttgagggccttgcttctgacctacattcatatgatgggagaagagggatgcgtgggattgattactcgtcgctgaaacttggggatcttgccgaggtccgatttgttctcggtaaagtgatcatggacacaatgtacgacaagttaccatgcgaatctactgaggatgagggcgctgctgcagatgttgctggtggaagcctacctccattgtccgcattgttttaatcgtagtgaagcatagggttcactcaacaaactaggcagcccttttctggttttagtcagtgctgcaaagcaatcgagttgttcagaattttcttgtgttgcaagatgaccacaacgacaactgtagacgtatttcagaatttttatcaaggaactcgaatgtgcagttgtagctaaactcccatgaatcctttcggtgaacatagggcgtgcacttatcaatctctttgctagggaaaactttag

SEQ ID NO: 202040 - DNA, 3471 bp, Zea Mays
caccactccacgaccaaactagcccacgacaccagctgctgagctgaccagcacgtacacctcccgcctccaacctataacaccaccgctgccgcgacgtggcatcagccgcccgtcgataactaaccgcgcagcggcggacgacgagagcacaggcatgagagcctacgcggcgaccccggccgccgtggccacgctgccgtcggccgcgccgccgctcacacccgacgccgctgccgtgctgtcccgcgccgcggccgacgcgtccaggcgccgccacgcgcacaccacgccgctccacgcggcggccgcgctgctgtccggccccgcgccgctgctccgtgacgcctgcgtcgcgggcctcgcgtccccgcacccgctccgctgccgcgctctcgacctctgcttctccgtcgccctcgaccgcctccccacgtccacggagctccagcaccacgaaggcggcgccttccaccacgcatccgccgcgcctccgctctccaacgcgctcgccgcggcgctcaagcgcgcctacgcgcaccaccgccgcatcgggagcggcggcgtcgagaccgacgaccaccgcgtcggggtgccgcacctcgtgctcgccatcctcgacgacccgtccgtggcgcgcgtcatgcgcgaggcgtccttctcaagcacggccgtcaaggccgccatgctcaggtccctctccgacccggcggcacccgacgccgccgcgtacgtcagcgccagggtcatgcaccggcaggcctcccaccgggaggaggaggtggccaaggtggtggaagtgctgaagagggccaagaagcgcaacccggtgctggtcggcgacacggtggacgtggacgccgtggtgcaagaggtggtcacgctgatacagaggcagcggctcggcaacgcgcgcgtcatctccttccccaaggagttcggcgacctggtcgacatggacagggcgcggctcaccgccaaggtcaaggagctcggcgaagcggtgagatccgcatcggccagcgccggcgtcgtggtcaacctcggcaacctgcagtggctcgtcgaggaaagatgcgcggctcctcggggcgagcaacaacaagagaagaggagggacgtggtgctcgacacggcgcgagccgccgtggccgagatggcgcgcgttctgaacctgtccggcgaaggggagcaccgcgtgtgggtgatcggcacggctacgtgtgcaacgtacctgaaatgccaggtgtatcacccggcgctggagagcgagtgggacctccaggccgtgcccatcacgcccaggcctccaccgccgccgccgccgccgcttgggctctcgccgaggggcatcctgagtagctctgtggaggtgctgtcaacggcgatgacgtccccaatgcaacgggcaccgagcctttgcagcgcttgcgcagagggctacgagcgcgagcgcgccgagatggcttcatccgagcgtgctccctgtccggccgagcagccgatgtcgcagtggctgcagatcggcacgccgagcagcggacgcccggccgaccgcgcgcaggagaaggcgcgggaggctgacgagctgcgacgccggtggcgcgaccggtgcgcgcagctgcactcgcatggccggccgccgctggtcacttgctcagagtggaacggggccagcattcttgccagcatgcaggcggcgccgccggtggtaccggtacggccattggtgcagcgtagggttgccgtggacacggatctcgcgcttgggctggcggcggccaggccggcgtgtgaaacggacgacaagctgctcgtgagacggctcacggaagcggtgagatggcagcccgaggctgctgccgctgtggccagtacgatcgcgaaggccaggtccagcgaatccaggcggcgccgcactacggccggtgtcgacgcgtggatcgtctttgctgggcctgacgtggccgggaagaggagcatggccgaggcgctgtccaagtccgtgttcggcacgggggccgtcaccctgcgcctcggctggccccaagccggcgatgacggcggcgagtccgtcgtgtcgtgccgcggccagacggcgctggaccgcatggcggaggcgatacgggcgaacccgttccgcgtcgtcgtgctggacggcgtcgaccacgcggacagcgtcgtccacgcctccatcctacgcgcggtcgagtcgggccggctctcggactcgcacggccgcgacgtcgccctcggcaacaacatattcgtcgtgatttcgcaatggtcgccgccgttgccagagccggagcacctgaggaagtcgcaagaagccgaaccctttcttcctgactcgcaatggaacctggagcacgggatgaccgccggcgggaagaagcgcaggccggagcagcagctcgaaggagaccggcgcacaaaggcgcgcaaacactcggcacgggagccgcttcccctggacttgaacctgtccatgtccgatgaccataccgacgccgtagacgacagcggcggcgagggatcacggaactcgtccagtgacctgaccgtggagcacgagcaggagtacgtgcagcccgctcactccggcagatgctcggcggcgccactgaccgtgtccgaactcatcaaagctgtggacggagtggtcgtgttcaagccaccggtgagcttggagccactgaagcggagcgtctccgacttggtggtgccggcggcgaagttgggggaaatcacggtcggcgggtggcctgttcacgtcgacgacggcttgctgggcaggctagccgcccgggcagctggagcggcggcggcgggcacgcccatggaggcgtggacgaccggcgaggtgctgtgccctagcagcatgcggcagttcaaacgtagcttgagcagcaacgacgttgacggggcgacggtggaaggcagccgccggagaaaggacggcgagatgttcccgatgccggtgacggtcgacggcaactgattatgaagctgcgcacactccgacgacggcttccatctttattcgctggtcatcaagatatgatcaagcacggtgtacattagtacattcatgtaaattttccagcaatcggtttttttgttttcggtcggagaggagtaacgatcataaaactaaactagctagagacaggacaagggactaggcaggcactagtagtagctagctcctttcccccattttgcctttattacgtgctatttcacggagacgggagatcatgacgaattcttcggttgcttggcggcaatctaccatgattcacttgtgccgcctgcatgcacgcagctcaacatggaattaagcaggtgatcctaccaaggatcgaacattactacatttccaagaatgatgctggccatgcgtactaccgtgttacacacacagcatggccagtaattgacactaatcattatttaatcataaag

SEQ ID NO: 202041 - DNA, 1737 bp, Zea Mays
gcgtccaccacccttaccgtgcccccgctccagccccgcccgcgccgtcttcctccctgcaatcccgccaccgcccgcgcgtcgtcctttcccttcaatctcgccctcgcccgcgccgtcccttccctgcatcccgtccccgtccgtgagccccctccacacgctcccgtccgcgaccccagatcccgtgactgccgccgtgtcttcgcccctagctccatcatcccgtcgtgtcccgccgtgccatcctccgctccgcgaccaccgcctctgctcccctcgtgcccagcgccgcgtccgcgaaccagcacccctcactctctctcccgcccggctctcctcgcccaactctctctcccgcaatcccacggcctcgccccaaatcgccgccccggctctcggtcctcgcccaagctctccatggaaggagatcgaggaatccgcgtccgctgcgcccggctctctctgcgtccgtagtctccctggaaggcgattcctcgatccgcgtctgctcgcttcggctcctccgttcccaaacctcctcaaccagcatctctagggttttcgcagccaccgcccatggctgccactccggaccgcgtcaatgccgaccttcatcgtcgcctcgccgtcgacactccaccgccgccccagggaggaatcgtccaggcactaagcacaaggaacagatggaatgggtactccatggattaccaaggaaaaaacaagctggtttttagcctaactgatccgaaatcatgcacagcacaaggaacagattgatatcctaaagaacaggatccaagaagaagagaagaatggaagtggaaagacatggcttggcactagggatgggagttcccggttggacttgatagctcatcagcatggtgtggttctaattttaagtgagcgtctccactcggtaactgctcaattcgatcgtcttcggtccatgcgttttcaagatgctattaacagagctatgccaaggaagaatcagaagagaccagaaaaaaaacctgctgaaccgtccaagtccagtcttgttctaaaatctgatgtatcaaagattgtagatcaggaagcgtccacagcacctatgagagttcaagaacaactactggatgatgaaacaaaagccctccaggtggagttgacaagtcttcttgatgctgtccaagaaacggagacaaagatgatagaaatgtcagcacttaaccatcttatgtcaacacatgttctacaacaagctcaacaaatccagtatttgtatgaccaggctgttgaagctacgaataacgtggagcgtgggaacaaggagctatcccaggcgatccagcgcaacagcagcagtagaacctttctcctcctcttcttctttgttctcactttctcggttctttttcttgactggtacaacaactgagttagcatatgaagacattgtatgctgttcatgggaaatggttaaattatgaaagctggtctgtcttgaagtccaaaccttttaggtagtctgttactttctaagagtagtgatcaagctgctgttcatctgaatacgccgggatttgtcatttcatttctgacgtgcaagctacagaagcgatgggattgtagagaggacagacagtggtcagggcatcaggccatttccagtcagttgtcaacagcgtcgtcgtcatccagagtaccttaagcattgaagtcgatattttctttgctcttgcgaaa

SEQ ID NO: 202042 - DNA, 1843 bp, Zea Mays
caatgttgttagatctattaatgcgatgttctctgtcttatttttatcctacaagtcatttcgagatatgtggttgctgatcagatgcgggcaatgtcaattttattattggaattgttaacttgacactcattcaccttctggactgaaaaccaagacagtactgcatctatttagttaaacatatattacttggctgctaacacaactaagagaaatactgaaaatcaatccttcagtctatccttccataggattttaatttgtgcatgatagagagttttacatgtcagaaatttatagatgtcagagagttcattgcagttcatctccttcactgcatcttgcatattttttctctctttcagctggttacagtaacaaggaaccaccattttgatgcaaaggtaagcatctgcattttactcgagttacatgtcactgctaccccttaatcccggggtgcctttgatttgcgacatccaggagcagatgcgacaggatcacaagtaggaggagctgcgacgatgctgtagcgagagacatgggtgccgaggtcgttgtgctgcggtggtggcaggacaggaaggaaacgaaaaagcaggagccagggttgttcaacaacgtgaccgagtcgctgaggcgaggaagagtaaggtgaaggcactcgtcgacgcctttgagactgacagagcgtcatctcgctgcaggaaaccagcaagcctgctgctgctccagctatgaaacttgagagcatcagggagctcgagaggttcatagtgaagcataggagggattatgtggacctgcatcgcattaccgagcaagagagggataacattgagcatgaaattggtgtttttgtaaaagcatgcaaggaacagattgatatcctaaagaacaggatccaagaagaagagaagaatggaagtggaaagacatggcttggcactagggatgggagttcccggttggacttgatagctcatcagcatggtgtggttctaattttaagtgagcgtctccactcggtaactgctcaattcgatcgtcttcggtccatgcgttttcaagatgctattaacagagctatgccaaggaagaatcagaagagaccagaaaaaaaacctgctgaaccgtccaagtccagtcttgttctaaaatctgatgtatcaaagattgtagatcaggaagcgtccacagcacctatgagagttcaagaacaactactggatgatgaaacaaaagccctccaggtggagttgacaagtcttcttgatgctgtccaagaaacggagacaaagatgatagaaatgtcagcacttaaccatcttatgtcaacacatgttctacaacaagctcaacaaatccagtatttgtatgaccaggctgttgaagctacgaataacgtggagcgtgggaacaaggagctatcccaggcgatccagcgcaacagcagcagtagaacctttctcctcctcttcttctttgttctcactttctcggttctttttcttgactggtacaacaactgagttagcatatgaagacattgtatgctgttcatgggaaatggttaaattatgaaagctggtctgtcttgaagtccaaaccttttaggtagtctgttactttctaagagtagtgatcaagctgctgttcatctgaatacgccgggatttgtcatttcatttctgacgtgcaagctacagaagcgatgggattgtagagaggacagacagtggtcagggcatcaggccatttccagtcagttgtcaacagcgtcgtcgtcatccagagtaccttaagcattgaagtcgatattttctttgctcttgcgaaa

SEQ ID NO: 202043 - DNA, 1738 bp, Zea Mays
caatgttgttagatctattaatgcgatgttctctgtcttatttttatcctacaagtcatttcgagatatgtggttgctgatcagatgcgggcaatgtcaattttattattggaattgttaacttgacactcattcaccttctggactgaaaaccaagacagtactgcatctatttagttaaacatatattacttggctgctaacacaactaagagaaatactgaaaatcaatccttcagtctatccttccataggattttaatttgtgcatgatagagagttttacatgtcagaaatttatagatgtcagagagttcattgcagttcatctccttcactgcatcttgcatattttttctctctttcagctggttacagtaacaaggaaccaccattttgatgcaaaggtaagcatctgcattttactcgagttacatgtcactgctaccccttaatcccggggtgcctttgatttgcgacatccaggagcagatgcgacaggatcacaagtaggaggagctgcgacgatgctgtagcgagagacatgggtgccgaggtcgttgtgctgcggtggtggcaggacaggaaggaaacgaaaaagcaggagccagggttgttcaacaacgtgaccgagtcgctgaggcgaggaagagtaaggtgaaggcactcgtcgacgcctttgagactgacagagcgtcatctcgctgcaggaaaccagcaagcctgctgctgctccagctatgaaaattggtgtttttgtaaaagcatgcaaggaacagattgatatcctaaagaacaggatccaagaagaagagaagaatggaagtggaaagacatggcttggcactagggatgggagttcccggttggacttgatagctcatcagcatggtgtggttctaattttaagtgagcgtctccactcggtaactgctcaattcgatcgtcttcggtccatgcgttttcaagatgctattaacagagctatgccaaggaagaatcagaagagaccagaaaaaaaacctgctgaaccgtccaagtccagtcttgttctaaaatctgatgtatcaaagattgtagatcaggaagcgtccacagcacctatgagagttcaagaacaactactggatgatgaaacaaaagccctccaggtggagttgacaagtcttcttgatgctgtccaagaaacggagacaaagatgatagaaatgtcagcacttaaccatcttatgtcaacacatgttctacaacaagctcaacaaatccagtatttgtatgaccaggctgttgaagctacgaataacgtggagcgtgggaacaaggagctatcccaggcgatccagcgcaacagcagcagtagaacctttctcctcctcttcttctttgttctcactttctcggttctttttcttgactggtacaacaactgagttagcatatgaagacattgtatgctgttcatgggaaatggttaaattatgaaagctggtctgtcttgaagtccaaaccttttaggtagtctgttactttctaagagtagtgatcaagctgctgttcatctgaatacgccgggatttgtcatttcatttctgacgtgcaagctacagaagcgatgggattgtagagaggacagacagtggtcagggcatcaggccatttccagtcagttgtcaacagcgtcgtcgtcatccagagtaccttaagcattgaagtcgatattttctttgctcttgcgaaa

SEQ ID NO: 202044 - DNA, 682 bp, Zea Mays
tcaccgtcaacgcgtccttcctcgtcgaacccgtcgccacacgtcttcacacctcaggcatggctcaacagtttcaggcattgccaaatagcagtgttctccactgttggcgcgttcggatcgcggtgcgatgcgtgctagaaatgtttgtgtggcttctgtggacttgttcagccaaaacagcgcagttgctactgctgcgagagaggatgggatacaatgtgtgacgctcctcacctacctcgccgccgcacagatctacaggacgaataggtctcggcactatcgtgttatggtcctcgataatgctcaccattccacacccgcaggggtctcctgttctgctgctgatggcgtgcgtgacctagatctggcgaaggcgtccgtggatacagtgatctgggtacttgctgcttgggggaattttgtcgcaacttggaggagaacaatcgccattttgcgttttcgatcgtcggtgactttgtgtgcctatacgcttgatctgttacgggacaatttttcaccagtgttatgtgacgttcttccatactatgcgatatatagagctatgcctgattctccatgcgtgcgtgttgcgagatgccacgaagcgaagcgcccaaggcatagtgcaattgcacagggttagtcctcacaaatttgatgccttgtttatgcatgc

SEQ ID NO: 202045 - DNA, 1492 bp, Zea Mays
atgtccgtttcgctttcccgtcgccaggttcggttgctcagccaccagtccgactcccctccatcaggaacccatcccctgctgctaccggtgacgggcttgtacaagcgagaaggaattatctgccgaccatttttcaccacactgctgggcattaaggatatgaaggccgtcccacttcctcgcccgagggcagccacgagaaggcgcgcgtggatgctcgccgttgcagcttttatcttcgtcgcactagtctgggcttatctgtatcctcccccgcgttacacctctcctgtgagagattggcttcctggtaggctccctgcggaaccagccagggaattcactgatgaggagagggcctcgcgtgttgttttcagacagatcttaacaacacctcctgttcgatctaagaactcaaaaatagctttcatgttcttgactccggggacactgccatttgaaaggttgtgggaaaagttctttgaggtaacttggggtacaatttctatggttgatgctgagaggaggttgctggcaaatgctctacaagacatggacaatcagcattttattttgctatctgatagttgtgtacctttgcacaattttgactatgtatatgactacctgatgggtgcaaatctcagttttattgactgcttttatgatcctggaccgcatggaaattttagatattcaaagaatatgttacctgaggtcacagaggctgattttaggaagggttcacagtggttctcagttaagcgccaacatgcgttgatgatcattgcagatagtctttactataccaagttcaagcttcattgcagacctgggatggaagatggtcgcaactgctatgctgatgaacattatttgccaacagtattccatatgatggacccagatggaattgctaattggtctgtaacccatgttgactggtctgaagggaagtggcacccgaaagcttacagggcaaaggatgtcactttcgagcttctgaagaatataacatcaattgacataagtcaccatgtcactagtgatagcaagaaagtggttacagagaaggcctgcctatggaatgaaacaaagagaccatgctacctgtttgcgagaaagttctaccctgagtccataaacaatctcttgaccttgttcgcgaattatacacttatttgagcttctaggtggcgcttagaggctacacaggaaacattttgttatacaaaaccttgtacattggatagcaacagagtaggacattaattaacagaatagcaatagctattggtgaggagaaggctttcgctgcagcaacacagtggcttcagatttatcacgacaggccattggtactcctttagcctcgttactttcatagtttgtcctctccacatatttttagctgcggttttaccatgtacatcaagcttatttggacaatgaatggtcattaaatggaaaatcagagatcatggtctta

SEQ ID NO: 202046 - DNA, 2618 bp, Zea Mays
aaaagaggccagaggcccaaccctacatcttgtgtctcttgtgtttcactgccgtgcttctgggaagggatacgggtcttccacgacttctcgcgcctaatatgctgacgggagggaagagtgcggatctggtgatccgtggtaacgtagttctcaacacgttatcagcacgctctacctcgacgttactgtaagatcagatctgcatcaactctccgtcaagtcggcaggtctttggcctagccgaactctcctacgcgagaggcttcgattcccctctacacattcgagcgacctgcgcgcgctctgcacgctctccaccacgctgcggtccggcgccggcgaggacgagatcgagcgcatccgccgcgagttcgatgacgccaagcgcaactacctcagcattcccgccgccatcaaggacatgcccaagatgaatccgcaaggcatttacgtcaacaagaacgtcaagctggacgacctccaggtctacggcttcgactacgactacacgctgtcgcactactccgagcacctgcaatgccttatctacgatcttgccaaaaggcacttggtcaatgagttgaagtatccggagagttgcttgcagtacgagtatgaccgcaccttccccatcaggggtttgtactatgacagacttaaagggtgcctactcaagcttgatttcttcggctctattgaaccagatggttgcttctttgggcggcaaaggctgagtttgagtgagataaaagagctctatggcacacggcatattggcagagatcaagctcgtcatcttgttgggctgatggatgtcttctgttttagtgaggcatgtctgattgccgatattgttcaacactttatagatgcaaaactggagtttgatccatcttacatatatgaggatgttaatcaatcgattcagcatgttcacagaagtggtttaattcacaggcaaattctttccgagcctgagaaatttctgataaaaaaaagccaggtgttccgtttcttgaagatgctgaaagagaaagggaaaaagctatttcttcttactaattcgcctttctactttgtagatggagggatgcgttatttgctagaggaccaacattttgatggaaattcctggagggaactgtttgatgttgtgattgcgcaggcaaataaaccaactttctataactcagatcacccattcagggtgtatgacactcaaaaggacaccttaacttttactgcagttgacaagtttctgccagatcaagtatactatcatggctgtttgaaatcatttctacagatcacaaaatggaaaggctcagaggtgatatattttggtgaccatcttttgagtgacttgagaggaccttcaaaagctggttggcgaacagctgctgtaattcgagaacttgaggatgaaatagaaatccaaaacggtgacagctaccgattccaacaggcaaaattgagtataatacatgatctacttgggaaagtccatgcagctgttgttagcaccgagaaaggccaagtctataaagcattgctcaatgagttgaatgcagaaagacgtcaatgccgatctgggatgcgagatttgttcaatacctcttttggtgcaacatttcttacagacacgggaagggaatcatcattttcctatcacattcatcaatatgccgatatttacacgagcaagcttgagaacttcttatcatatgcccctgaatcttggcttcatccacctcatgacataaagatcatgccacacaatgcgaaggtcccagcgagccttttcagtacctcctagttcatcctttctctatttcggtggagaaccaagccgtagtacccccacctatggtttctgtgcgtgaccacgtgacaggattgtggactgctgctgcattcgcttgcgttatactataactgaagcaccatatgatgcatcaatccagcagaccagcaagttagcattctctagaattgccatggaattatcagtcatgtgagtagttaaccgactcatttgcctgtatgacgaagcctctgttttccgtttaaaataaaaaaaggaagcatctgagaggccgcatacttgtgttcccatgaaaccctaccaacctgtaatggccgccaataaaacagtcacacgcaacccatctcgtttccccattttattcgcattctgctacactctttgctgcactcatgttacactgaactcgcctggtggcatctgacaagttttttgggatgagcagaagataatttgggttcgggcaacggataaattataaaatgcttatttgtccttgtctggaacaggaaggctatcttcaattctattgtttatggtcctagagactggatggagttccagttcttgctttgcatgaatgtggagatctggaatgtcaagaataatggcaattagtgcactcatatgaacacagaaaacataatattctgattcttcactgacgaagattttgttaaaaactatccagtttgcttatccacgctgaaccacttgcaaattgcggcatttggaattctatgttgtgttgacactaaaattcacaacagaaatgagtgaattcgtagtt

SEQ ID NO: 202047 - DNA, 2688 bp, Zea Mays
ccagaggcccaaccctacatcttgtgtctcttgtgtttcactgccgtgcttctgggaagggatacgggtcttccacgacttctcgcgcctaatatgctgacgggagggaagagtgcggatctggtgatccgtggtaacgtagttctcaacacgttatcagcacgctctacctcgacgttactgtaagatcagatctgcatcaactctccgtcaagtcggcaggtctttggcctagccgaactctcctacgcgagaggcttcgattcccctctacacattcgagcgacctgcgcgcgctctgcacgctctccaccacgctgcggtccggcgccggcgaggacgagatcgagcgcatccgccgcgagttcgatgacgccaagcgcaactacctcagcattcccgccgccatcaaggacatgcccaagatgaatccgcaaggcatttacgtcaacaagaacgtcaagctggacgacctccaggtctacggcttcgactacgactacacgctgtcgcactactccgagcacctgcaatgccttatctacgatcttgccaaaaggcacttggtcaatgagttgaagtatccggagagttgcttgcagtacgagtatgaccgcaccttccccatcaggggtttgtactatgacagacttaaagggtgcctactcaagcttgatttcttcggctctattgaaccagatggttgcttctttgggcggcaaaggctgagtttgagtgagataaaagagctctatggcacacggcatattggcagagatcaagctcgtcatcttgttgggctgatggatgtcttctgttttagtgaggcatgtctgattgccgatattgttcaacactttatagatgcaaaactggagtttgatccatcttacatatatgaggatgttaatcaatcgattcagcatgttcacagaagtggtttaattcacaggcaaattctttccgagcctgagaaatttctgataaaaaaaagccaggtgttccgtttcttgaagatgctgaaagagaaagggaaaaagctatttcttcttactaattcgcctttctactttgtagatggagggatgcgttatttgctagaggaccaacattttgatggaaattcctggagggaactgtttgatgttgtgattgcgcaggcaaataaaccaactttctataactcagatcacccattcagggtgtatgacactcaaaaggacaccttaacttttactgcagttgacaagtttctgccagatcaagtatactatcatggctgtttgaaatcatttctacagatcacaaaatggaaaggctcagaggtgatatattttggtgaccatcttttgagtgacttgagaggaccttcaaaagctggttggcgaacagctgctgtaattcgagaacttgaggatgaaatagaaatccaaaacggtgacagctaccgattccaacagattgggactgtgagagggaactgttcatgccgcactgttgatcggtacaatttgaaaggcacagtcggggcctgtttggcaaaattgagtataatacatgatctacttgggaaagtccatgcagctgttgttagcaccgagaaaggccaagtctataaagcattgctcaatgagttgaatgcagaaagacgtcaatgccgatctgggatgcgagatttgttcaatacctcttttggtgcaacatttcttacagacacgggaagggaatcatcattttcctatcacattcatcaatatgccgatatttacacgagcaagcttgagaacttcttatcatatgcccctgaatcttggcttcatccacctcatgacataaagatcatgccacacaatgcgaaggtcccagcgagccttttcagtacctcctagttcatcctttctctatttcggtggagaaccaagccgtagtacccccacctatggtttctgtgcgtgaccacgtgacaggattgtggactgctgctgcattcgcttgcgttatactataactgaagcaccatatgatgcatcaatccagcagaccagcaagttagcattctctagaattgccatggaattatcagtcatgtgagtagttaaccgactcatttgcctgtatgacgaagcctctgttttccgtttaaaataaaaaaaggaagcatctgagaggccgcatacttgtgttcccatgaaaccctaccaacctgtaatggccgccaataaaacagtcacacgcaacccatctcgtttccccattttattcgcattctgctacactctttgctgcactcatgttacactgaactcgcctggtggcatctgacaagttttttgggatgagcagaagataatttgggttcgggcaacggataaattataaaatgcttatttgtccttgtctggaacaggaaggctatcttcaattctattgtttatggtcctagagactggatggagttccagttcttgctttgcatgaatgtggagatctggaatgtcaagaataatggcaattagtgcactcatatgaacacagaaaacataatattctgattcttcactgacgaagattttgttaaaaactatccagtttgcttatccacgctgaaccacttgcaaattgcggcatttggaattctatgttgtgttgacactaaaattcacaacagaaatgagtgaattcgtagtt

SEQ ID NO: 202048 - DNA, 1740 bp, Zea Mays
cacaaggctcttgcctcctgctgagtttgagtgagataaaagagctctatggcacacggcatattggcagagatcaagctcgtcatcttgttgggctgatggatgtcttctgttttagtgagagccaggtgttccgtttcttgaagatgctgaaagagaaagggaaaaagctatttcttcttactaattcgcctttctactttgtagatggagggatgcgttatttgctagaggaccaacattttgatggaaattcctggagggaactgtttgatgttgtgattgcgcaggcaaataaaccaactttctataactcagatcacccattcagggtgtatgacactcaaaaggacaccttaacttttactgcagttgacaagtttctgccagatcaagtatactatcatggctgtttgaaatcatttctacagatcacaaaatggaaaggctcagaggtgatatattttggtgaccatcttttgagtgacttgagaggaccttcaaaagctggttggcgaacagctgctgtaattcgagaacttgaggatgaaatagaaatccaaaacggtgacagctaccgattccaacaggcaaaattgagtataatacatgatctacttgggaaagtccatgcagctgttgttagcaccgagaaaggccaagtctataaagcattgctcaatgagttgaatgcagaaagacgtcaatgccgatctgggatgcgagatttgttcaatacctcttttggtgcaacatttcttacagacacgggaagggaatcatcattttcctatcacattcatcaatatgccgatatttacacgagcaagcttgagaacttcttatcatatgcccctgaatcttggcttcatccacctcatgacataaagatcatgccacacaatgcgaaggtcccagcgagccttttcagtacctcctagttcatcctttctctatttcggtggagaaccaagccgtagtacccccacctatggtttctgtgcgtgaccacgtgacaggattgtggactgctgctgcattcgcttgcgttatactataactgaagcaccatatgatgcatcaatccagcagaccagcaagttagcattctctagaattgccatggaattatcagtcatgtgagtagttaaccgactcatttgcctgtatgacgaagcctctgttttccgtttaaaataaaaaaaggaagcatctgagaggccgcatacttgtgttcccatgaaaccctaccaacctgtaatggccgccaataaaacagtcacacgcaacccatctcgtttccccattttattcgcattctgctacactctttgctgcactcatgttacactgaactcgcctggtggcatctgacaagttttttgggatgagcagaagataatttgggttcgggcaacggataaattataaaatgcttatttgtccttgtctggaacaggaaggctatcttcaattctattgtttatggtcctagagactggatggagttccagttcttgctttgcatgaatgtggagatctggaatgtcaagaataatggcaattagtgcactcatatgaacacagaaaacataatattctgattcttcactgacgaagattttgttaaaaactatccagtttgcttatccacgctgaaccacttgcaaattgcggcatttggaattctatgttgtgttgacactaaaattcacaacagaaatgagtgaattcgtagtt

SEQ ID NO: 202049 - DNA, 1799 bp, Zea Mays
ggccataaggacccaggcatgtctgattgccgatattgttcaacactttatagatgcaaaactggagtttgatccatcttacatatatgaggatgttaatcaatcgattcagcatgttcacagaagtggtttaattcacaggcaaattctttccgagcctgagaaatttctgataaaaaaaagccaggtgttccgtttcttgaagatgctgaaagagaaagggaaaaagctatttcttcttactaattcgcctttctactttgtagatggagggatgcgttatttgctagaggaccaacattttgatggaaattcctggagggaactgtttgatgttgtgattgcgcaggcaaataaaccaactttctataactcagatcacccattcagggtgtatgacactcaaaaggacaccttaacttttactgcagttgacaagtttctgccagatcaagtatactatcatggctgtttgaaatcatttctacagatcacaaaatggaaaggctcagaggtgatatattttggtgaccatcttttgagtgacttgagaggaccttcaaaagctggttggcgaacagctgctgtaattcgagaacttgaggatgaaatagaaatccaaaacggtgacagctaccgattccaacaggcaaaattgagtataatacatgatctacttgggaaagtccatgcagctgttgttagcaccgagaaaggccaagtctataaagcattgctcaatgagttgaatgcagaaagacgtcaatgccgatctgggatgcgagatttgttcaatacctcttttggtgcaacatttcttacagacacgggaagggaatcatcattttcctatcacattcatcaatatgccgatatttacacgagcaagcttgagaacttcttatcatatgcccctgaatcttggcttcatccacctcatgacataaagatcatgccacacaatgcgaaggtcccagcgagccttttcagtacctcctagttcatcctttctctatttcggtggagaaccaagccgtagtacccccacctatggtttctgtgcgtgaccacgtgacaggattgtggactgctgctgcattcgcttgcgttatactataactgaagcaccatatgatgcatcaatccagcagaccagcaagttagcattctctagaattgccatggaattatcagtcatgtgagtagttaaccgactcatttgcctgtatgacgaagcctctgttttccgtttaaaataaaaaaaggaagcatctgagaggccgcatacttgtgttcccatgaaaccctaccaacctgtaatggccgccaataaaacagtcacacgcaacccatctcgtttccccattttattcgcattctgctacactctttgctgcactcatgttacactgaactcgcctggtggcatctgacaagttttttgggatgagcagaagataatttgggttcgggcaacggataaattataaaatgcttatttgtccttgtctggaacaggaaggctatcttcaattctattgtttatggtcctagagactggatggagttccagttcttgctttgcatgaatgtggagatctggaatgtcaagaataatggcaattagtgcactcatatgaacacagaaaacataatattctgattcttcactgacgaagattttgttaaaaactatccagtttgcttatccacgctgaaccacttgcaaattgcggcatttggaattctatgttgtgttgacactaaaattcacaacagaaatgagtgaattcgtagtt

SEQ ID NO: 202050 - DNA, 2364 bp, Zea Mays
cttatatgcatgtcaactagaccaccatattattgccaagcatgtctgattgccgatattgttcaacactttatagatgcaaaactggagtttgatccatcttacatatatgaggatgttaatcaatcgattcagcatgttcacagaagtggtttaattcacaggcaaattctttccgagcctgagaaatttctgataaaaaaaagccaggtgttccgtttcttgaagatgctgaaagagaaagggaaaaagctatttcttcttactaattcgcctttctactttgtagatggagggatgcgttatttgctagaggttttgtttctaaatctaaatctgcttgtatgttttgtccatattgttgagcatccaaaggcaagatttttaaccagaaccaatttctatttggtttatgaaatacatatatgttttttgatataacctttttttcttattttctgagttctgtcttgaccttgtatatcttttctttgagcgttaccttttggtttgagaatatgaaatcatgttttaacttgacacatgccagccactccatgcattggccttgagcccttgacacatattcttgatgcttaaagtgaacatttagaatgtacataatgcttccttcctttgtttctagcattcattaaagtttgttgtatactactacaacacaggggagaggtatggagtacaaatgaaattctttatattattaattttatgtctttcttgtaaattttttggtgagttattccaaatagaatgtagcatgtcagcgtaatatgaaaaatatttttgcttactcaaatattctctgcattgactattttcacaatttggttgggcaggaccaacattttgatggaaattcctggagggaactgtttgatgttgtgattgcgcaggcaaataaaccaactttctataactcagatcacccattcagggtgtatgacactcaaaaggacaccttaacttttactgcagttgacaagtttctgccagatcaagtatactatcatggctgtttgaaatcatttctacagatcacaaaatggaaaggctcagaggtgatatattttggtgaccatcttttgagtgacttgagaggaccttcaaaagctggttggcgaacagctgctgtaattcgagaacttgaggatgaaatagaaatccaaaacggtgacagctaccgattccaacaggcaaaattgagtataatacatgatctacttgggaaagtccatgcagctgttgttagcaccgagaaaggccaagtctataaagcattgctcaatgagttgaatgcagaaagacgtcaatgccgatctgggatgcgagatttgttcaatacctcttttggtgcaacatttcttacagacacgggaagggaatcatcattttcctatcacattcatcaatatgccgatatttacacgagcaagcttgagaacttcttatcatatgcccctgaatcttggcttcatccacctcatgacataaagatcatgccacacaatgcgaaggtcccagcgagccttttcagtacctcctagttcatcctttctctatttcggtggagaaccaagccgtagtacccccacctatggtttctgtgcgtgaccacgtgacaggattgtggactgctgctgcattcgcttgcgttatactataactgaagcaccatatgatgcatcaatccagcagaccagcaagttagcattctctagaattgccatggaattatcagtcatgtgagtagttaaccgactcatttgcctgtatgacgaagcctctgttttccgtttaaaataaaaaaaggaagcatctgagaggccgcatacttgtgttcccatgaaaccctaccaacctgtaatggccgccaataaaacagtcacacgcaacccatctcgtttccccattttattcgcattctgctacactctttgctgcactcatgttacactgaactcgcctggtggcatctgacaagttttttgggatgagcagaagataatttgggttcgggcaacggataaattataaaatgcttatttgtccttgtctggaacaggaaggctatcttcaattctattgtttatggtcctagagactggatggagttccagttcttgctttgcatgaatgtggagatctggaatgtcaagaataatggcaattagtgcactcatatgaacacagaaaacataatattctgattcttcactgacgaagattttgttaaaaactatccagtttgcttatccacgctgaaccacttgcaaattgcggcatttggaattctatgttgtgttgacactaaaattcacaacagaaatgagtgaattcgtagtt

SEQ ID NO: 202051 - DNA, 2761 bp, Zea Mays
tgcttccttcctttgtttctagcattcattaaagtttgttgtatactactacaacacaggggagaggaccaacattttgatggaaattcctggagggaactgtttgatgttgtgattgcgcaggcaaataaaccaactttctataactcagatcacccattcagggtgtatgacactcaaaaggacaccttaacttttactgcagttgacaagtttctgccagatcaagtatactatcatggctgtttgaaatcatttctacagatcacaaaatggaaaggctcagaggtgatatattttggtgaccatcttttgagtgacttgagaggaccttcaaaagctggttggcgaacagctgctgtaattcgagaacttgaggatgaaatagaaatccaaaacggtgacagctaccgattccaacaggtgtgcactatatcatctgcttgtcgtgtttattgtatcctaatactttatttttatcctccttacacttaactggtacttctaacgaaagttcacccagattagtttgtattccagttccttatttcttgttgttttggatgagcctttagaacttttactaccaataactctgaaatgtttttgagatatgttgttgtccaaaaagacaagaattatgatctagaggtgctaacaaatatttctctcaagattgggactgtgagagggaactgttcatgccgcactgttgatcggtacaatttgaaaggcacagtcggggcctgtttggtaacaatgtttctcaaaaccatgattttacgatactatactttgcaattgtcatgacactaccatactttacgatactatgcttcaagaatactagctattgtttggatataacattgtaaaccatgatatttagacaaaagttagccatgttatgaaaactttaggttggagtagagttgccaatactctaaaaataccatggtatctaaaataccatagttttgaaaatgcagttttcaggaatgcagtcaaacagctcatggcataaaatactacggtatttctgtaaaccatggtattgtctagaaactacaaaaatactttactttcaaacaggctagcaggttttggttcaggcgactcacttatggggtgtttggtttgaggaatgagttagtccatcatcttctcactcattactatttttgtttggttcgtggaatggaatgagttgatccatttccacctcattcctcataattagttagtactaatatgaggaatggttattccactaaatttgagtaatgaacccatgatgaactacctcaatttggttggagtgattcctcgaaccaaacacccacttagtctttaggcacttcttgctgctgttattcttttgtggagtgctatgcgacacgggttggtaaatcccctggtatgcaaaatccaaaacatgacatgggcaatcagtcgcaccacaaattgatctacagatacaccgatggcatttaccttttgtatctgatagatattatttgattcctcttatcacatttgcagtttgttagttcatgaaattttcatccacatggatgctgaacaatttactcggtgtatcttgcattgcaggcaaaattgagtataatacatgatctacttgggaaagtccatgcagctgttgttagcaccgagaaaggccaagtctataaagcattgctcaatgagttgaatgcagaaagacgtcaatgccgatctgggatgcgagatttgttcaatacctcttttggtgcaacatttcttacagacacgggaagggaatcatcattttcctatcacattcatcaatatgccgatatttacacgagcaagcttgagaacttcttatcatatgcccctgaatcttggcttcatccacctcatgacataaagatcatgccacacaatgcgaaggtcccagcgagccttttcagtacctcctagttcatcctttctctatttcggtggagaaccaagccgtagtacccccacctatggtttctgtgcgtgaccacgtgacaggattgtggactgctgctgcattcgcttgcgttatactataactgaagcaccatatgatgcatcaatccagcagaccagcaagttagcattctctagaattgccatggaattatcagtcatgtgagtagttaaccgactcatttgcctgtatgacgaagcctctgttttccgtttaaaataaaaaaaggaagcatctgagaggccgcatacttgtgttcccatgaaaccctaccaacctgtaatggccgccaataaaacagtcacacgcaacccatctcgtttccccattttattcgcattctgctacactctttgctgcactcatgttacactgaactcgcctggtggcatctgacaagttttttgggatgagcagaagataatttgggttcgggcaacggataaattataaaatgcttatttgtccttgtctggaacaggaaggctatcttcaattctattgtttatggtcctagagactggatggagttccagttcttgctttgcatgaatgtggagatctggaatgtcaagaataatggcaattagtgcactcatatgaacacagaaaacataatattctgattcttcactgacgaagattttgttaaaaactatccagtttgcttatccacgctgaaccacttgcaaattgcggcatttggaattctatgttgtgttgacactaaaattcacaacagaaatgagtgaattcgtagtt

SEQ ID NO: 202052 - DNA, 1476 bp, Zea Mays
gaaaatattactttggatgcttcttgctaagatattattgttattgtttttgcactgatgcatctgtggtgtatgacactcaaaaggacaccttaacttttactgcagttgacaagtttctgccagatcaagtatactatcatggctgtttgaaatcatttctacagatcacaaaatggaaaggctcagaggtgatatattttggtgaccatcttttgagtgacttgagaggaccttcaaaagctggttggcgaacagctgctgtaattcgagaacttgaggatgaaatagaaatccaaaacggtgacagctaccgattccaacaggcaaaattgagtataatacatgatctacttgggaaagtccatgcagctgttgttagcaccgagaaaggccaagtctataaagcattgctcaatgagttgaatgcagaaagacgtcaatgccgatctgggatgcgagatttgttcaatacctcttttggtgcaacatttcttacagacacgggaagggaatcatcattttcctatcacattcatcaatatgccgatatttacacgagcaagcttgagaacttcttatcatatgcccctgaatcttggcttcatccacctcatgacataaagatcatgccacacaatgcgaaggtcccagcgagccttttcagtacctcctagttcatcctttctctatttcggtggagaaccaagccgtagtacccccacctatggtttctgtgcgtgaccacgtgacaggattgtggactgctgctgcattcgcttgcgttatactataactgaagcaccatatgatgcatcaatccagcagaccagcaagttagcattctctagaattgccatggaattatcagtcatgtgagtagttaaccgactcatttgcctgtatgacgaagcctctgttttccgtttaaaataaaaaaaggaagcatctgagaggccgcatacttgtgttcccatgaaaccctaccaacctgtaatggccgccaataaaacagtcacacgcaacccatctcgtttccccattttattcgcattctgctacactctttgctgcactcatgttacactgaactcgcctggtggcatctgacaagttttttgggatgagcagaagataatttgggttcgggcaacggataaattataaaatgcttatttgtccttgtctggaacaggaaggctatcttcaattctattgtttatggtcctagagactggatggagttccagttcttgctttgcatgaatgtggagatctggaatgtcaagaataatggcaattagtgcactcatatgaacacagaaaacataatattctgattcttcactgacgaagattttgttaaaaactatccagtttgcttatccacgctgaaccacttgcaaattgcggcatttggaattctatgttgtgttgacactaaaattcacaacagaaatgagtgaattcgtagtt

SEQ ID NO: 202053 - DNA, 1158 bp, Zea Mays
tttgtttggcaaaattgagtataatacatgatctacttgggaaagtccatgcagctgttgttagcaccgagaaaggccaagtctataaagcattgctcaatgagttgaatgcagaaagacgtcaatgccgatctgggatgcgagatttgttcaatacctcttttggtgcaacatttcttacagacacgggaagggaatcatcattttcctatcacattcatcaatatgccgatatttacacgagcaagcttgagaacttcttatcatatgcccctgaatcttggcttcatccacctcatgacataaagatcatgccacacaatgcgaaggtcccagcgagccttttcagtacctcctagttcatcctttctctatttcggtggagaaccaagccgtagtacccccacctatggtttctgtgcgtgaccacgtgacaggattgtggactgctgctgcattcgcttgcgttatactataactgaagcaccatatgatgcatcaatccagcagaccagcaagttagcattctctagaattgccatggaattatcagtcatgtgagtagttaaccgactcatttgcctgtatgacgaagcctctgttttccgtttaaaataaaaaaaggaagcatctgagaggccgcatacttgtgttcccatgaaaccctaccaacctgtaatggccgccaataaaacagtcacacgcaacccatctcgtttccccattttattcgcattctgctacactctttgctgcactcatgttacactgaactcgcctggtggcatctgacaagttttttgggatgagcagaagataatttgggttcgggcaacggataaattataaaatgcttatttgtccttgtctggaacaggaaggctatcttcaattctattgtttatggtcctagagactggatggagttccagttcttgctttgcatgaatgtggagatctggaatgtcaagaataatggcaattagtgcactcatatgaacacagaaaacataatattctgattcttcactgacgaagattttgttaaaaactatccagtttgcttatccacgctgaaccacttgcaaattgcggcatttggaattctatgttgtgttgacactaaaattcacaacagaaatgagtgaattcgtagtt

SEQ ID NO: 202054 - DNA, 2603 bp, Zea Mays
gagaaggagagcgcaacggaaagcaacccaaggtctctccttttccgccacacaggactcacgcgctcttcaatcgctcgctccgtttctacctcctctcgccttccttccttccttcgatcccgctttgtttgtcgtcatcgcccgcccccgaagctccgacctttcccccactttcccttggcgtctacggccttgtccggtgtagaaaacaacgggtttcgtttgtgttgttttgctgcggtttttgtccgctcctgggagttcaatccctgctccatctcttaagagcactcctcccctcccactcagtgtgctttgctgttcactttggattccgcggctttgtttcgggttcttgattaggaaggttcggttcctggtttgggaaggtcccccttccgaggcgaggaatttggtgcgggttgatgcgtcttgccaggaatccgcgatgcaatgataggttgttgaagccgaggtgaatctttgacctgcagaatttcctagctgaagtcccaccgcttctcgatcagccgggcgccatgggcctctgcctgggcaagtcggcagcggtccaggagccggcggtggcggaagacaacagcgtagccgatggcgcggcggcgggctgcggcgatgggccgcccgtgaaggcgcctcggacgcccaagcagcccaagttctccttctacctgccgagcccgctccagccctccagctacaagggctcgccggccaactccagcgccgcgtccacgccggcgcgcggcgggttcaagcgcccattcccgccgccgtcgcctgccaagcacatccgtgcgctgctggcgcggcgccacggctcggtcaagcctaacgaggcgtccatccccgaaggcggcgagctggacctggggctggacaagagcttcggctactccaggcacttcgcggccaagtacgaccttggccgggaggtggggcgcggccactttggcttcacctgcgctgccaagtgcaagaagggcgagctcaagggggaggacgtcgccgtcaaggtccttcccaaggccaagatgactactgctattgccattgaagatgtcagacgagaagtcagaatattgagttctttggcaggccacattaacctagtgcaattttatgatgcttttgaggatgaagaaaatgtatatgttgttatggaattatgcaaaggaggtgaactgctggacagaattttggctagaggtggcaaatattctgagggcgatgctaaggttattattcaccaaattctaagtgttgcttcattttgtcatcttcagggtgttgttcaccgggatctgaaaccagaggatgagaattctgccttgaaagtcatagactttggtttgtctgactttgttaaaccagatgacagacttaatgacattgttggaagtgcatattatgttgctcctgaagttctccatcgatcttatggcacagaggctgatatgtggagcattggagtaattgcatatattttgctttgtggaagccgccctttctgggcacgaactgagtcaggaatttttcgagctgtcctaaaagcagagcctagttttgatgaaattccatggcctaccctttctgctgaggcgaaagactttgtaagaaggctactcaataaggattaccgtaagcggatgactgctgcacaagccctctgccatccatggatccgtggcacacaggaagttaagattaatctagacatgataatctacaggcttatgagggcttacataagttcatcttctctacggaaatctgcattgagggctcttgcaaaggcactgacgacagatcaactcttctacctaagagagcagtttacattattaggtccaaacaagagtggccatatatcattgcaaaatatgaagacggccttgattaaaaattcctcgggtgcaatgaatgattctaggattcttgactttgttaactcaatatgcaatatccaatatggcatgattgattttgaagagttctctgctgcggccattagtgtatatcaaatggagggcctggagacctgggaagaacatgctcaacaagcatatgaattgtttgacaaggagggcaaccgaccaattgtgattgaagaacttgcatcggaacttggacttggcccttcgatctcacttcatgttgttctcaaagattggatcagacattcagatggaaacctcagtttcctcgggttcataaaactactgcatggagtttcttcacgcgcaatcaccaaagtataagataaccatttgcatcgagcaatccctgatctctggctagtgcatgccatggctggttgtagaagttgcatgaaaccaatacaaagattaacagatcatcttagcgcaataggtactctcagtaggtgtatatttgccctgcttttcgcaacatggatcgacattgtcctcaagatgttgagaggaatgtacagatttgatttgggaagaatggaaaccctgaaggatttgaggctgttattttgtttgttagttccagtaatgcaggcattgccttcatttgtgttgtgcacctatgccgcttaatgctccatttacata

SEQ ID NO: 202055 - DNA, 2897 bp, Zea Mays
ggagccagctcagaaaggagttggggttgggggcggggcggggcggggggcagacgaggagccgagccaagacaagccaaaccggcaacaggccaacagccaaaccattgcagtgcagtgcgcagcccatcatttcttccttccatgtcacagagaaaaaagaggcaagaatccaaagcacacattcccatcacaccacaccacgcttccagtgccacggcaggcacgcacagcctcccaggccatgccccgcctctctcgtgcttttctagcagtcgcagtcacagtaggacaaggacttgtccagttcagtggcttcagcgtccacaagcgcgttaagcactctcctcccctccccacctcgcaagcttgctcacttctgtcagctaagctaccccgtccccgtggcgactgggggacatcgtttccgtctccgggctcggcagccgcaatgctggcgcagctgctgctcgtgcacctcctcctcctccccgccgcgtcctcggccgaccaccaccgccattaccggggcagaagggcgctgcacgagccgctgttccctctggagagcacgcccacgctgccgccgccaccgcccgcgccgttcttcccgttcctaccaggcgccgcggcgccgccgacgccggtggcgccgccggaggttggctccgcctccacgccagccgacaccggcgcgggtgacgcgtcgtcgtcgccgcacccgacggcgccggccaacatttcgtccctggcaccgctgcccgtctcccacggcgcgccgctccgggccttcctctcatcccaccgcctcctcaccgtcctcgtcctggtcgtcgccgttgctgcggccgtgctcacggccgcgctcgtttacatcctcgcccgccgccagcgtcgtcactcacccaaggaggaagctgcagtgtacgcaaagccctcctctcttgcaccggccaaccccgtgccctacgacggtggcgaccagcatggccggggctcgacggccaccgtctccagcgccagctcgccggagctcaggccgatgccgcctttgccccggcagttccagcagacgcagatgaacttgtcgtcgtgttcaaaatccgttcttgacgccggagcaggaggtaagcgtccttcagagggtgctcctcctcctcctcctccaccacctcctccaccactgctgcctccaatgccaccggtgaaagacaagggcggcgccacagcagctactgctcctccggcgccgccgcctcctctgccgcgagccggcaacggcagcggctggttgcctcggcggcactccgagcgcccagcgaccacggtgatcagggcctcggcgagcgcagttcacccagaagagtctccagggcgcgcgccgtcagagaaaccagcggacgcggacgcggacgcggacgctctgccgaagctgaagccgttgcactgggacaaggtgcgcgcgagctctggccgaccgacggtgtgggatcagctgaaggcgagctctttccgagtgaacgaagagatgattgagacgttgttcgtctcaaattcgacatggagatcctccaagagtggaatcaaggcgccaaattccagttcgtgcagccaggagaacaaggtcctcgacccgaagaaatcacaaaacatcgcgataatgctgagggcgctcaatgcgaccaaggaagaagtgtgcagagcactcctagatgggcaggcagagagccttggatctgagctcttggagatgctgctgaagatggcgcctagcagggaagaggagatcaagttgaaagaatgcagggaggacgctgtgtcaaagcttggccctgctgaaagcttcctcaaggcggtgctcgcgatcccattcgctttcaagagagtggaagcgatgctgtacatcaccaacttcgatttagaggttgactacctcaagacctcctacaaaactcttgaggcagcatgcgaagagctacagggcagcaggttgttccacaagatactagacgcggtcctgaagacgggcaaccgcatgaacaccggcacgaaccgtgggaacgcccacgccttcaagctggacgcgctcctcaagctagtcgacgtgaagggcgtcgacggcaagacgaccctcctgcacttcgtcgtcgaagaaatcatcaggtccgaaggagccaacattttagccaccggccagacatctggtcaggcaggcgccctcgcagatgacctgcagtgcaggaaggtaggtctgaagatcgtggcgagccttggcggcgagctcagcagcgtgaagaaggcggcagcgatggactccagcacgctgggtagctgcgtctccaaactgtcctccggagccgggaggatcagcgaggtcctgcacttgagctcagcatcagaagacggctgcaagtgcaagaggttccgcgcctccatcgggacgttgtgaaggtgaacgagcgggcagcggccggtgggtggtcgcggcgggtggggattgggaacacgcacgctcctccggtgtttggcgcggtgcggtcccggtccaccacctcctcctcctcgtcggaggagagctcggcgccctagccgtcgggatgcaatgcagcactgattgtctgagcaggaatctgcatcctgcagtctagaagaagagcagtgcagcctcagacgtagtaggaccataatatactaaatattttgtacctggagaaggtagtttgtagagtaaagtaaagcctatgattcagcatgatgaacatcgtcctcccattagcctaccaaaggtgaaaacgggcattgtacatgattgtgcatgctgagaattattgttggatgatagctttttaacaactgatgatcaagctcggtctcacgatagaaactagatagtagta

SEQ ID NO: 202056 - DNA, 2714 bp, Zea Mays
tgcttcatcatattttctttgtactctagtggtgaaatactttttgaaataattatgtgatactgtaatatgggctttgcagtctactggagcaactggaatctattgagcaatctttgaatgagtctggcttagaagctctctcatcctttctgaaaaccaaaaagaatttagaccaactggaagatgcaaaagatttggatgaaaatggcggcgttcacgttttgctgaagaccttgctgtcattatcttatctaagatcaattctaatgaagggtctggaaagtggccttagaaatgatgctccagatagtgctattgcaatgcgacaaaagtggcgtctttgtgaaattgggcttgaggattattcgtttgtattgttaagtagatacatcaatgctcttgaagctttaggtggatcagcttcacttgcagagggtcttcctacaaatacaagtctatgggatgatgcccttgatgcccttatcattggcataaatcaagtttgcttttcaggttggaaaccaaatgagtgttctgcaatagtgaatgagcttctttcttggaagcagaaaggtctatctgaatttgaaggcaatgaggatggaaagtatatttgggcactgagactcaaagccactcttgatagaacaggaagactaacagaagaatactctgaagcacttctttcaatattccctgaaaaagtcaaggttcttgggaaagcccttggaatacccgagaacagtgtcagaacatacactgaggctgaaattcgtgctagtgttatttttcaggtctcgaaactttgcactgtacttttaaaagcaactcgagcagttcttgggtcgtctgtgtgggatgttcttgttcctggagtggcccatggagccttgatacaggttgaaagaatagctcctggatcattgccgtcatccatgaaagaacctgtcgtgctagttgtaaacaaggcagatggagatgaagaggtcaaagctgctggggataacatagtgggcgttgttcttctacaagaattacctcacctatcacatcttggtgttagagctcgtcaagagaaagttgtatttgtaacttgtgaagacgatgacacgattaaaaacatgaggttacttgagggaaaacatgtcaggttgggtgcatcatccaataatgttgatctttcagttgtatcaaacaaagatgactgtgctgccatgtcttcagagccatccgctggaggagatctatttgcacagcaattctcactattgactacagacaagaagttagaattgtctgagggaccttcacttcagcaaaagagctatacttccgtagcaaatggtatgtctggtgtgctcgagctttcagaggcatcgattgaatcatctggtgcaaaagctgctgcatgtggaactctttcggttctttcctcaatgtcaaataaagtttacaatgaccaaggaactccagcagcattcagagttcctgcaggtgctgtgattccttttggatccatggaggacgccttgaagaaaagtggatcactcaaatcctacactaatcttctagagaggatcgaaacagctcaaattgaaaatggtgaacttgatagcctatcctcgaagcttcaagcaactgtttcacttctttctccatcggaagaaatcattgaatctttgaagaaaacatttgatcagaatgttcgactaattgtgagatctactgctaatgtggaggatttggctggaatgtctgctgctggactctatgaatcaattcctaatgtcagtctctctgaccctagatcctttggagctgcggttggacaggtttgggcatcattatacacaaggagagcaatccttagccgtcgagcagccggtgtacctcagagagacgcaaagatggcggttctcgtgcaggaaatgctgcagccagatctctcttttgtgcttcatacaattagcccagttgaccatgatcccaaattagtagaggctgaggttgcccctggtcttggagaaaccctcgcttctggtacccgtggcactccatggagactctcatgtcacaagcttgatggcaaagtcacaactctagcttttgcgaatttcagtgaagagcttatggtgctcaactctggccctaccgatggtgaaatgagtcgtaggaccgtagactacagcaagaagccgttatctgttgatgcaacctttagggagcagtttggtcagcgccttgccgccattggacagtatctggaacagaagtttggaagtgcccaagatgtggaaggttgcctggttggccccgatatatttatagttcagagcaggccacaaccacaataaacaaaaagttttgtgtggttacctggctagctgaataaaaatggatactggctgaagaaatatatggacttcgtagcacgcgtagcagtgatcgagtcttttttaatatgctatctcagcttcttggccgcttctgcccaccagaattggattctcgtaaacaaccgcccggcggccgaagcgattgtgggggagcagcctttcaaccgcagccgagaagcggctaagaggccgtggccgatggaagcggaaaggattcttcggagaacgttagtttgtgttcggtttgatttttgaccttggcttttttcccttaaaagctactaaaagccaaactaatataaaccagctttttat

SEQ ID NO: 202057 - DNA, 2689 bp, Zea Mays
ttttctttgtactctagtggtgaaatactttttgaaataattatgtgatactgtaatatgggctttgcagtctactggagcaactggaatctattgagcaatctttgaatgagtctggcttagaagctctctcatcctttctgaaaaccaaaaagaatttagaccaactggaagatgcaaaagatttggatgaaaatggcggcgttcacgttttgctgaagaccttgctgtcattatcttatctaagatcaattctaatgaagggtctggaaagtggccttagaaatgatgctccagatagtgctattgcaatgcgacaaaagtggcgtctttgtgaaattgggcttgaggattattcgtttgtattgttaagtagatacatcaatgctcttgaagctttaggtggatcagcttcacttgcagagggtcttcctacaaatacaagtctatgggatgatgcccttgatgcccttatcattggcataaatcaagtttgcttttcaggttggaaaccaaatgagtgttctgcaatagtgaatgagcttctttcttggaagcagaaaggtctatctgaatttgaaggcaatgaggatggaaagtatatttgggcactgagactcaaagccactcttgatagaacaggaagactaacagaagaatactctgaagcacttctttcaatattccctgaaaaagtcaaggttcttgggaaagcccttggaatacccgagaacagtgtcagaacatacactgaggctgaaattcgtgctaggtctcgaaactttgcactgtacttttaaaagcaactcgagcagttcttgggtcgtctgtgtgggatgttcttgttcctggagtggcccatggagccttgatacaggttgaaagaatagctcctggatcattgccgtcatccatgaaagaacctgtcgtgctagttgtaaacaaggcagatggagatgaagaggtcaaagctgctggggataacatagtgggcgttgttcttctacaagaattacctcacctatcacatcttggtgttagagctcgtcaagagaaagttgtatttgtaacttgtgaagacgatgacacgattaaaaacatgaggttacttgagggaaaacatgtcaggttgggtgcatcatccaataatgttgatctttcagttgtatcaaacaaagatgactgtgctgccatgtcttcagagccatccgctggaggagatctatttgcacagcaattctcactattgactacagacaagaagttagaattgtctgagggaccttcacttcagcaaaagagctatacttccgtagcaaatggtatgtctggtgtgctcgagctttcagaggcatcgattgaatcatctggtgcaaaagctgctgcatgtggaactctttcggttctttcctcaatgtcaaataaagtttacaatgaccaaggaactccagcagcattcagagttcctgcaggtgctgtgattccttttggatccatggaggacgccttgaagaaaagtggatcactcaaatcctacactaatcttctagagaggatcgaaacagctcaaattgaaaatggtgaacttgatagcctatcctcgaagcttcaagcaactgtttcacttctttctccatcggaagaaatcattgaatctttgaagaaaacatttgatcagaatgttcgactaattgtgagatctactgctaatgtggaggatttggctggaatgtctgctgctggactctatgaatcaattcctaatgtcagtctctctgaccctagatcctttggagctgcggttggacaggtttgggcatcattatacacaaggagagcaatccttagccgtcgagcagccggtgtacctcagagagacgcaaagatggcggttctcgtgcaggaaatgctgcagccagatctctcttttgtgcttcatacaattagcccagttgaccatgatcccaaattagtagaggctgaggttgcccctggtcttggagaaaccctcgcttctggtacccgtggcactccatggagactctcatgtcacaagcttgatggcaaagtcacaactctagcttttgcgaatttcagtgaagagcttatggtgctcaactctggccctaccgatggtgaaatgagtcgtaggaccgtagactacagcaagaagccgttatctgttgatgcaacctttagggagcagtttggtcagcgccttgccgccattggacagtatctggaacagaagtttggaagtgcccaagatgtggaaggttgcctggttggccccgatatatttatagttcagagcaggccacaaccacaataaacaaaaagttttgtgtggttacctggctagctgaataaaaatggatactggctgaagaaatatatggacttcgtagcacgcgtagcagtgatcgagtcttttttaatatgctatctcagcttcttggccgcttctgcccaccagaattggattctcgtaaacaaccgcccggcggccgaagcgattgtgggggagcagcctttcaaccgcagccgagaagcggctaagaggccgtggccgatggaagcggaaaggattcttcggagaacgttagtttgtgttcggtttgatttttgaccttggcttttttcccttaaaagctactaaaagccaaactaatataaaccagctttttat

SEQ ID NO: 202058 - DNA, 829 bp, Zea Mays
aaagcccaaccccgaacaggtagatttccctcaaagaaacaaaaaaaataaaacaaagataaatcattggggttgggggattgcaattgcaagttgccgctgtgcggttgcggtcgctcccctcccgactctggccagcagcagcgacggtgccggcagtcgattactccacgcggcggaggcggcggtagcccatcctttcccgttttctgatccagtcctactgataccgcgcacagcacgcctgctctattaaagaatgttttgcttgaggggctactggtcgccttcactagctccagtgagggaagggcctgttcgacatcatataaagttcaattctgtagtggtttgtggtgctaggggaccgagaccgagatatccccgtgtgtggaaaactcgtaagaaaattgggactatttccaagtcgcagaagcttgtcgaatgtattaaaggtctgtctaatgtaaaggaggaagtttatggggcacttgactcatttgttgcatgggaactggagtttcccttgatagtagtaaagaaggcactgaagaaacttgaggacgaaaaggaatggaaacgaataattcaggtcattaaatggatgttcaacaaaggtcaagggaagacaatgggaagctattacaccttgttgaatgctttgatcgaggatggacggattgaggaagcagaagagttatttggaatggtgttctcacgatatatggagggtttgcctcgtacatttttcatgagaatgatttctttctattacagcgtggaagcgtatgataagatgtttgagaaaaggctttgctcaacagaaaca

SEQ ID NO: 202059 - DNA, 1881 bp, Zea Mays
aaagcccaaccccgaacaggtagatttccctcaaagaaacaaaaaaaataaaacaaagataaatcattggggttgggggattgcaattgcaagttgccgctgtgcggttgcggtcgctcccctcccgactctggccagcagcagcgacggtgccggcagtcgattactccacgcggcggaggcggcggtagcccatcctttcccgttttctgatccagtcctactgataccgcgcacagcacgcctgctctattaaaggtacggcgtgaagatgagggttctcttggtctcgtgaaggcgacgctcttgtctgctaactacatattatagaatgttttgcttgaggggctactggtcgccttcactagctccagtgagggaagggcctgttcgacatcatataaagttcaattctgtagtggtttgtggtgctaggggaccgagaccgagatatccccgtgtgtggaaaactcgtaagaaaattgggactatttccaagtcgcagaagcttgtcgaatgtattaaaggtctgtctaatgtaaaggaggaagtttatggggcacttgactcatttgttgcatgggaactggagtttcccttgatagtagtaaagaaggcactgaagaaacttgaggacgaaaaggaatggaaacgaataattcaggtcattaaatggatgttcaacaaaggtcaagggaagacaatgggaagctattacaccttgttgaatgctttgatcgaggatggacggattgaggaagcagaagagttatttggaatggtgttctcacgatatatggagggtttgcctcgtacatttttcatgagaatgatttctttctattacagcgtggaagcgtatgataagatgtttgagatttttgctgatatggaggaactaggcgtaagacctgatggttctattatcaggatgctaggtgatgtatttcagaagttagagatgatggacaaatatgaaaagttaaaaaagaaatacccaccaccgaaatgggattatcgacacatcaaaggcaagcgcataagaatcagagtttatcctgatagcaaccctgaagtggcggcaaaaggagaccctgacactgatgagctcgaagagttagaaagcacacaccttaataacgaattggatgaagcagcaagctcaggcctcgacaggagtgtattggacgatgcagcttctggagaccttgaatatatgtagaacccatgtcgtcatacttccaagacatgggcatcgctatcttctgaagtattttactacctagaatgagtagaaactacatgccaggctttgccatcagcagtcttttcaagacatcatggtggtttcaccgcgatatgtgttcttcagagtttggttacctgattcacttgcataaggctcatgcctttttgaatgcttccagccaggttaaaaacatagcgatggcattaggacctgtagtatctgagtgctttcgtgaacatatatggttgattgttgaaggcaatgtcctggacatcagacagggcagtagccattactatggtcctgtttggcacagctactgcttgttgaaaaagcagcttatctgagaagctgatgaaaagcagcttctgcttgttggctgcttttagtgtattctgagaagcagctgaactaataagctgctgtagaagctggctgtttggcaggacttctgcttaaatttgcgaagaagctgaaaataagctgaaaataagctgtgccaaacagggcctatatcatccggtatggtcctttgttcggcatggaaaggcgccatattttcaggcatgaaagactctattgtgtatttaacccagttaatatccgtctcttcagttgtctttaaagctgat

SEQ ID NO: 202060 - DNA, 1933 bp, Zea Mays
aaagcccaaccccgaacaggtagatttccctcaaagaaacaaaaaaaataaaacaaagataaatcattggggttgggggattgcaattgcaagttgccgctgtgcggttgcggtcgctcccctcccgactctggccagcagcagcgacggtgccggcagtcgattactccacgcggcggaggcggcggtagcccatcctttcccgttttctgatccagtcctactgataccgcgcacagcacgcctgctctattaaaggtacggcgtgaagatgagggttctcttggtctcgtgaaggcgacgctcttgtctgctaactacatattatagaatgttttgcttgaggggctactggtcgccttcactagctccagtgagggaagggcctgttcgacatcatataaagttcaattctgtagtggtttgtggtgctaggggaccgagaccgagatatccccgtgtgtggaaaactcgtaagaaaattgggactatttccaagtcgcagaagcttgtcgaatgtattaaaggtctgtctaatgtaaaggaggaagtttatggggcacttgactcatttgttgcatgggaactggagtttcccttgatagtagtaaagaaggcactgaagaaacttgaggacgaaaaggaatggaaacgaataattcaggtcattaaatggatgttcaacaaaggtcaagggaagacaatgggaagctattacaccttgttgaatgctttgatcgaggatggacggattgaggaagcagaagagttatttggaatggtgttctcacgatatatggagggtttgcctcgtacatttttcatgagaatgatttctttctattacagcgtggaagcgtatgataagatgtttgagatttttgctgatatggaggaactaggcgtaagacctgatggttctattatcaggatgctaggtgatgtatttcagaagttagagatgatggacaaatatgaaaagttaaaaaagaaatacccaccaccgaaatgggattatcgacacatcaaaggcaagcgcataagaatcagagtttatcctgatagcaaccctgaagtggcggcaaaaggagaccctgacactgatgagctcgaagagttagaaagcacacaccttaataacgaattggatgaagcagcaagctcaggcctcgacaggagtgtattggacgatgcagcttctggagaccttgaatatatgtagaacccatgtcgtcatacttccaagacatctctgttttggtttgacatcccagaacccatgtcgtcatacttccaagacatgggcatcgctatcttctgaagtattttactacctagaatgagtagaaactacatgccaggctttgccatcagcagtcttttcaagacatcatggtggtttcaccgcgatatgtgttcttcagagtttggttacctgattcacttgcataaggctcatgcctttttgaatgcttccagccaggttaaaaacatagcgatggcattaggacctgtagtatctgagtgctttcgtgaacatatatggttgattgttgaaggcaatgtcctggacatcagacagggcagtagccattactatggtcctgtttggcacagctactgcttgttgaaaaagcagcttatctgagaagctgatgaaaagcagcttctgcttgttggctgcttttagtgtattctgagaagcagctgaactaataagctgctgtagaagctggctgtttggcaggacttctgcttaaatttgcgaagaagctgaaaataagctgaaaataagctgtgccaaacagggcctatatcatccggtatggtcctttgttcggcatggaaaggcgccatattttcaggcatgaaagactctattgtgtatttaacccagttaatatccgtctcttcagttgtctttaaagctgat

SEQ ID NO: 202061 - DNA, 1579 bp, Zea Mays
acaacccgatcgcccacgcaaacctctcgacagaccacagctcgatcaaaccgcgaatgaaaaaaccacaaaaaatctcccaattctcgcaaccccaagccggccagcccccacgatctcgaatcccgatgctctcagcatctatcaactcccgagcggtcgtcaccagcgcatgagctttctccgctcgctggcgaactccttctcctcgctgctcttctcgtcggggggcgagacggcgcccatggacgcggcggggtcggcgccgtcgccggcggcggtggtgagggagcgcgtggcggtgaagctccggggctacttcgacctcgccaaggaggagatggacaaggccgtgcgcgccgaggagtgggggctccccgacgacgccaccgcgcactaccgcaacgcgatgcgcgtcatgctcgaggcccaggccgcgcgcgtccctgatgccgtctcctccaggtgcgcccgcgttctcttcctcgcgcccgtcgcggctagggcttctggaatgattcgtgactgactagtgggtggtgccctgcggagcttgagaggcttgcagcgagagggggcaggtcagggtgtaccaggagaagatcgccaagtggcaggcgcaggtcgaggagcggctcagagtgcttggtcagagaagtgctgaaggtgccactgctgcagtagtgcctaagaaggttgtcatggtgcaatggtctacttgttaggctatgttgaggtgggggtgaggcgtcctcttgtgctcctggggagctactaataaacctcaagagttggatgatgctgttcttcgaagactggtgaaaagaatatatgtgccactacctgatccaaactctttttatgtttggcacggtagccaacctggaactgatccctggcagaccatgatttcgaaagattagttgtggagaccgaagggtattctggaagtgacctgagagccgtgtgcgaagaagctgcaatgatgccaataagagagctcgggccacagagtattcttgctattaaagcaaatcagttgcgacctttgaagtacgaggatttcaagaacgcgatggcggtgatcaggccaagcttgcagaagagcaaatgggacgagcttgagaaatggaacgaggaatttggttcgagctgacggcggctcgcactgcctgtgcctgatgatgatcaagcggtcctatttccatctgtatatatgatttatgtctcccacgctgtggctcacaacacaaggggtcacaccatgcgcccattgatgcgtcctcgttgggctaggcagcacaacatcgacagaagcagaatgtaaaggtatacttctggcaacggcctatacagccattgagggctagtttgaaacaccgttcaagggattttcatttttcaaagggaaattagctcattttcccttgtaaaaatgaaatttttttaggaaaatggtgttcccaaactagccctaagtattgctgttgcccaagttaaacaaaaaaacgtgtctattattgggctctgtttgtttaccctctaaattatattatccagcttaaataagttaagagat

SEQ ID NO: 202062 - DNA, 2431 bp, Zea Mays
acaacccgatcgcccacgcaaacctctcgacagaccacagctcgatcaaaccgcgaatgaaaaaaccacaaaaaatctcccaattctcgcaaccccaagccggccagcccccacgatctcgaatcccgatgctctcagcatctatcaactcccgagcggtcgtcaccagcgcatgagctttctccgctcgctggcgaactccttctcctcgctgctcttctcgtcggggggcgagacggcgcccatggacgcggcggggtcggcgccgtcgccggcggcggtggtgagggagcgcgtggcggtgaagctccggggctacttcgacctcgccaaggaggagatggacaaggccgtgcgcgccgaggagtgggggctccccgacgacgccaccgcgcactaccgcaacgcgatgcgcgtcatgctcgaggcccaggccgcgcgcgtccctgatgccgtctcctccaggtgcgcccgcgttctcttcctcgcgcccgtcgcggctagggcttctggaatgattcgtgactgactagtgggtggtgccctgcggagcttgagaggcttgcagcgagagggggcaggtcagggtgtaccaggagaagatcgccaagtggcaggcgcaggtcgaggagcggctcagagtgcttggtcagagaagtgctgaaggtgccactgctgcagtagtgcctaagaaggtaatagtttgtggacttctagctgcatgtgggtgtgttatctggaattccgtgttatcttgtatcggacttttgtttcatagcttaaatatttgttaccttctgaattttgatgccttcatctaggttctttcactgtttggcatgtacgcttatataatgtaatgtgacgtacctagattgttttgagtgcaattaaaacaggtctgtactatatgatttttttctcattgcctaactaaccctatattcggtgataggttgtcatggtgcaatggtctacttgttaggctatgttgaggtgggggtgaggcgtcctcttgtgctcctggggtacaagttttttcagttttcaaatagttacaagtattttggatttgattcagttctgctattttggatttgatatccagtatttggcagctacttcaatttcaatgtaatgattcttaagttcaactcctattatttggcttcaattacttaagtaaccttgggtaggatatgtaggaattttgcttcgtttttttgcttcttggggtgtcagttctgtggtctgtcatttttgaaacagttttgagccttattgggcaggagttgtcatcactaaattagtctaattaatatgccactttaccttctcagattttggcggccacattttctcatgtttacttttttagtaaagaaaaaggagcatggaaactaatgattgttctttgcattaccacaatatgacctttatttttgtcatctttttatagggtctgattttaaaagagaactctcggttagctgtgtacactgtgagctactaataaacctcaagagttggatgatgctgttcttcgaagactggtgaaaagaatatatgtgccactacctgatccaaacgtacggaggctacttctgaaaaatcagctcaaaggacaagcattcaaattgtcgagtaagtgctccagggtttctctgtataactacttgattgtggtggttgtatatgtagcacagtctttttatgtttggcacggtagccaacctggaactgatccctggcagaccatgatttcgaaagattagttgtggagaccgaagggtattctggaagtgacctgagagccgtgtgcgaagaagctgcaatgatgccaataagagagctcgggccacagagtattcttgctattaaagcaaatcagttgcgacctttgaagtacgaggatttcaagaacgcgatggcggtgatcaggccaagcttgcagaagagcaaatgggacgagcttgagaaatggaacgaggaatttggttcgagctgacggcggctcgcactgcctgtgcctgatgatgatcaagcggtcctatttccatctgtatatatgatttatgtctcccacgctgtggctcacaacacaaggggtcacaccatgcgcccattgatgcgtcctcgttgggctaggcagcacaacatcgacagaagcagaatgtaaaggtatacttctggcaacggcctatacagccattgagggctagtttgaaacaccgttcaagggattttcatttttcaaagggaaattagctcattttcccttgtaaaaatgaaatttttttaggaaaatggtgttcccaaactagccctaagtattgctgttgcccaagttaaacaaaaaaacgtgtctattattgggctctgtttgtttaccctctaaattatattatccagcttaaataagttaagagat

SEQ ID NO: 202063 - DNA, 2200 bp, Zea Mays
acaacccgatcgcccacgcaaacctctcgacagaccacagctcgatcaaaccgcgaatgaaaaaaccacaaaaaatctcccaattctcgcaaccccaagccggccagcccccacgatctcgaatcccgatgctctcagcatctatcaactcccgagcggtcgtcaccagcgcatgagctttctccgctcgctggcgaactccttctcctcgctgctcttctcgtcggggggcgagacggcgcccatggacgcggcggggtcggcgccgtcgccggcggcggtggtgagggagcgcgtggcggtgaagctccggggctacttcgacctcgccaaggaggagatggacaaggccgtgcgcgccgaggagtgggggctccccgacgacgccaccgcgcactaccgcaacgcgatgcgcgtcatgctcgaggcccaggccgcgcgcgtccctgatgccgtctcctccaggtgcgcccgcgttctcttcctcgcgcccgtcgcggctagggcttctggaatgattcgtgactgactagtgggtggtgccctgcggagcttgagaggcttgcagcgagagggggcaggtcagggtgtaccaggagaagatcgccaagtggcaggcgcaggtcgaggagcggctcagagtgcttggtcagagaagtgctgaaggtgccactgctgcagtagtgcctaagaaggttgtcatggtgcaatggtctacttgttaggctatgttgaggtgggggtgaggcgtcctcttgtgctcctggggtacaagttttttcagttttcaaatagttacaagtattttggatttgattcagttctgctattttggatttgatatccagtatttggcagctacttcaatttcaatgtaatgattcttaagttcaactcctattatttggcttcaattacttaagtaaccttgggtaggatatgtaggaattttgcttcgtttttttgcttcttggggtgtcagttctgtggtctgtcatttttgaaacagttttgagccttattgggcaggagttgtcatcactaaattagtctaattaatatgccactttaccttctcagattttggcggccacattttctcatgtttacttttttagtaaagaaaaaggagcatggaaactaatgattgttctttgcattaccacaatatgacctttatttttgtcatctttttatagggtctgattttaaaagagaactctcggttagctgtgtacactgtgtatggattctttttgacatgacattatttatatacaggattacaagtgttttttatgctgaattatcttttcttgttttatctatgttttgttgatgtcaattctctgtccaggagctactaataaacctcaagagttggatgatgctgttcttcgaagactggtgaaaagaatatatgtgccactacctgatccaaacgtacggaggctacttctgaaaaatcagctcaaaggacaagcattcaaattgtcgaccaacctggaactgatccctggcagaccatgatttcgaaagattagttgtggagaccgaagggtattctggaagtgacctgagagccgtgtgcgaagaagctgcaatgatgccaataagagagctcgggccacagagtattcttgctattaaagcaaatcagttgcgacctttgaagtacgaggatttcaagaacgcgatggcggtgatcaggccaagcttgcagaagagcaaatgggacgagcttgagaaatggaacgaggaatttggttcgagctgacggcggctcgcactgcctgtgcctgatgatgatcaagcggtcctatttccatctgtatatatgatttatgtctcccacgctgtggctcacaacacaaggggtcacaccatgcgcccattgatgcgtcctcgttgggctaggcagcacaacatcgacagaagcagaatgtaaaggtatacttctggcaacggcctatacagccattgagggctagtttgaaacaccgttcaagggattttcatttttcaaagggaaattagctcattttcccttgtaaaaatgaaatttttttaggaaaatggtgttcccaaactagccctaagtattgctgttgcccaagttaaacaaaaaaacgtgtctattattgggctctgtttgtttaccctctaaattatattatccagcttaaataagttaagagat

SEQ ID NO: 202064 - DNA, 1740 bp, Zea Mays
acaacccgatcgcccacgcaaacctctcgacagaccacagctcgatcaaaccgcgaatgaaaaaaccacaaaaaatctcccaattctcgcaaccccaagccggccagcccccacgatctcgaatcccgatgctctcagcatctatcaactcccgagcggtcgtcaccagcgcatgagctttctccgctcgctggcgaactccttctcctcgctgctcttctcgtcggggggcgagacggcgcccatggacgcggcggggtcggcgccgtcgccggcggcggtggtgagggagcgcgtggcggtgaagctccggggctacttcgacctcgccaaggaggagatggacaaggccgtgcgcgccgaggagtgggggctccccgacgacgccaccgcgcactaccgcaacgcgatgcgcgtcatgctcgaggcccaggccgcgcgcgtccctgatgccgtctcctccaggtgcgcccgcgttctcttcctcgcgcccgtcgcggctagggcttctggaatgattcgtgactgactagtgggtggtgccctgcggagcttgagaggcttgcagcgagagggggcaggtcagggtgtaccaggagaagatcgccaagtggcaggcgcaggtcgaggagcggctcagagtgcttggtcagagaagtgctgaaggtgccactgctgcagtagtgcctaagaaggttgtcatggtgcaatggtctacttgttaggctatgttgaggtgggggtgaggcgtcctcttgtgctcctgggggtctgattttaaaagagaactctcggttagctgtgtacactgtgagctactaataaacctcaagagttggatgatgctgttcttcgaagactggtgaaaagaatatatgtgccactacctgatccaaacgtacggaggctacttctgaaaaatcagctcaaaggacaagcattcaaattgtcgagtaagtgctccagggtttctctgtataactacttgattgtggtggttgtatatgtagcacagtctttttatgtttggcacggtagccaacctggaactgatccctggcagaccatgatttcgaaagattagttgtggagaccgaagggtattctggaagtgacctgagagccgtgtgcgaagaagctgcaatgatgccaataagagagctcgggccacagagtattcttgctattaaagcaaatcagttgcgacctttgaagtacgaggatttcaagaacgcgatggcggtgatcaggccaagcttgcagaagagcaaatgggacgagcttgagaaatggaacgaggaatttggttcgagctgacggcggctcgcactgcctgtgcctgatgatgatcaagcggtcctatttccatctgtatatatgatttatgtctcccacgctgtggctcacaacacaaggggtcacaccatgcgcccattgatgcgtcctcgttgggctaggcagcacaacatcgacagaagcagaatgtaaaggtatacttctggcaacggcctatacagccattgagggctagtttgaaacaccgttcaagggattttcatttttcaaagggaaattagctcattttcccttgtaaaaatgaaatttttttaggaaaatggtgttcccaaactagccctaagtattgctgttgcccaagttaaacaaaaaaacgtgtctattattgggctctgtttgtttaccctctaaattatattatccagcttaaataagttaagagat

SEQ ID NO: 202065 - DNA, 5040 bp, Zea Mays
acaacccgatcgcccacgcaaacctctcgacagaccacagctcgatcaaaccgcgaatgaaaaaaccacaaaaaatctcccaattctcgcaaccccaagccggccagcccccacgatctcgaatcccgatgctctcagcatctatcaactcccgagcggtcgtcaccagcgcatgagctttctccgctcgctggcgaactccttctcctcgctgctcttctcgtcggggggcgagacggcgcccatggacgcggcggggtcggcgccgtcgccggcggcggtggtgagggagcgcgtggcggtgaagctccggggctacttcgacctcgccaaggaggagatggacaaggccgtgcgcgccgaggagtgggggctccccgacgacgccaccgcgcactaccgcaacgcgatgcgcgtcatgctcgaggcccaggccgcgcgcgtccctgatgccgtctcctccagaggcttgcagcgagagggggcaggtcagggtgtaccaggagaagatcgccaagtggcaggcgcaggtcgaggagcggctcagagtgcttggtcagagaagtgctgaaggtgccactgctgcagtagtgcctaagaaggagctactaataaacctcaagagttggatgatgctgttcttcgaagactggtgaaaagaatatatgtgccactacctgatccaaacgtacggaggctacttctgaaaaatcagctcaaaggacaagcattcaaattgtcgagtaagtgctccagggtttctctgtataactacttgattgtggtggttgtatatgtagcacagtctttttatgtttggcacggtagccaacctggaactgatccctggcagaccatgatttcgaaagattagttgtggagaccgaagggtattctggaagtgacctgagagccgtgtgcgaagaagctgcaatgatgccaataagagagctcgggccacagagtattcttgctattaaagcaaatcagttgcgacctttgaagtacgaggatttcaagaacgcgatggcggtgatcaggccaagcttgcagaagagcaaatgggacgagcttgagaaatggaacgaggaatttggttcgagctgacggcggctcgcactgcctgtgcctgatgatgatcaagcggtcctatttccatctgtatatatgatttatgtctcccacgctgtggctcacaacacaaggggtcacaccatgcgcccattgatgcgtcctcgttgggctaggcagcacaacatcgacagaagcagaatgtaaagttccgcaatggatgttggaatggttaagcgacttttacgttatcctaaaggttctgatccatatgtggctggtgtagagaggtttattgaatttgcatataaagataagcccgaaggcaacaagatttattgcccatgtcagtcatgcgtgcacactactgttcagtcaaaagatgagatgtatggtcatttggtgtgcaatgggattcttgacaattatgatcaatgggattttcatggcgatccttcagtgcatattagtggtctagataaaaaaacacaaagcgatgaaaggcatgttaacattgggcaaatgattgaagatgccattgggcatatatatgatgacgcacctatggtagatggagatgcaccagtgatcggacccaattcagaagttgaacagttttacaaacgggtcgaagaatcaaaaaagcctttatgggaaggttgtgaactcacagaggtaaccttatttgtgttgttgtttaatgtgaaatcctcaaacaaatggtcagataaatcttttggtgatcttcttgaggttctgcatatggctattcctaatggaaaggacttgccaaagaatttttatgaggctaagaaagtaatttctaaatttggactgggatatgaaactattgatgcatgtcgaaataattgccaattgtaccggaaggacaaaaaatgatgatttttgcacaacctgtaaggcttcaaggtggaaggataaggaacccaattgcatactaacaaagaaggaaaggaagaaagaaactccttgcaaagtactacgatacttccctattaaagataggctcaaaagaatgtttatgtgtagagaaacaacacctctcctaagatggcatgacgaggagcgcatcaaggatggtttgctacgacatccagctgatgctccagtgtggaagaggtttgacgaaaagtttccacaatttgcatcagattctcgtaatattcgttttgcattggctactgatgggtttaatccatttgggaagatgagctctatgcatagttgttggcctgttgttttggtagtctataacctcccgccatggctttgcatgaaagatcacaatattatgttgtccttgatgattcctggtcctaaaagcccaggatatcgaattcatgtgttctttgagccacttttggaggaccttaaggatcttttccaaactggtatatccacatatgatgcatcgagaaatgagagttttactttgcaaggagccgtgcttatgaacataagtgatctacctggtttaggaatgcttgcttctcatatggttcatgggaaatttgcatgcccaccatgtggtgaaaatgtatggacgaaacaactgaagaatggtcgtaaatcatgtttcctaggtcatcgcaaatatattgatcttgatcatccgtaccgtttcgacgcaagttcctttgatggaatgatagagcttggcaaggagccttcaacttattatggtcgtccaattttgcatgagatcactgcacttggtaatttcaaggactcaaaaacttataagtcagtaagtagtttgttctctttgccttactgggatgataatattcttagatacaaccttgatgtgatgcatatagagaaaaatgtgttcgataatttgtatgacacaatatcgggtttagaagggaagacaaaagataacctccaagctcgtttagatcttgtagacatgaacatcagagcggacctacaccctcaagtaaaagattcgggaaagttatacctgccaccagcaagatttggtatgtctaaaagtgagagacgagtattttgtgatgttattagaaacataaatgttccagatggttattgcagaaatatctcaaaacgtgttaacgttgcgaaaggaaaaatcattggcctcaaaacacatgactgtcatgttctaatgcaacagttcatgcccattgctttgaggggaaatcttccagatgatataacagcggttgtatttgagttgtctgcttattttcgaggaatatgttcgaaagttcttaatgttgaagagttggatcgtttagattagtccattaaaatcaccttatgcaaattggagacaaattttccaccaggttttttacagttatggttcatttagttgtacatctagcaactgaatgcaagatggctggaccagttaattatcgttggatgttttttattgagaggtacctagggaaattaaaatcatttgttcgcaacagagcctatccagaagcctcaatggcaaattcttttttggcagatgagtgtatggtgttttgttctagatacatagaaggtttctcgacaaagctaaataaatcatcaaggaatgatgatagtttggatcagattgactcaaacttacatggtcacaagtcgtcgttgtttcctccagtaggcaaaccattgggaaaaccatcaaatttaattttaactaacatagagaaattgcaagctcatagatatgtactattcaactgtgatgctgtgaatccgtatcttaagtaggtgaattcttgctcctttatacatgccatatggaattggatatattgtcatgaaaattatttttgcagggaacatgcttcttatttgaaaagaaagagacgtgatcgacgcccaactgttaaagaaattgaaaatttacaaaacagatatttttccaattggtttagagaacatatcatgcagaaggaggaaaatgatggtagtgacaacatcgacgaggatattagatggttggctcgaggaccactagagattgcacgaaggcatagagcctttaacattcgtgggttcagatttcgtgccaaacggtttgataaggcgactcaaaatagcggagttgttgttactgcaaagacatctagttattcatcggcaggtgatagcaaccccatacttggagatattatgtactatggtaggattattgatatcatagagttagactactacgggagattttcaatggtactatttaaatgtgaatgggttgatgtcactcgaggcaaaggagtaaaaacagataagtttggcttgccactagttaatttctcgcatcaaattcacaaaggtgataggattgagcatgaaccctttgtatttgccaatcaagttgaccaagtgttctatatagatgaccatactaacctaggatggttagttgtgttgaagatgaaacctagagatgtatttgacattggggaggattggaatgaagttcaatgtgaaccttttcatgtcagtatgcttggtgacctttttgataaagctcatgacagacattcatggactagaagagatatggagggaattactgtagaaggggcaaataaaggccataatccaagtagtgatgccggagatgagccataaaataaaaagtatgttcacaatcacaatttgacaatggaggatgagagaaggctgtttgcaattagtacaaatagaacattgttcattgtgtcagttatgtgcttgtaactttgtgcttgggaaaatttctgaacggcatggtctgaactatggtctgaaattgggcttgttagtctgtaactatgtgtttgaactatggtctgaaaattgtctgaactatgtgttcactgggagcaagcccgccaggttttactgacaaacatacagcaagccggcttctgagaaactgaactatattacacacaagtaaatggtgctactttgctatctgagaaactgaaa

SEQ ID NO: 202066 - DNA, 1195 bp, Zea Mays
ggaattttgcttcgtttttttgcttcttggggtgtcagttctgtggtctgtcatttttgaaacagttttgagccttattgggcaggagttgtcatcactaaattagtctaattaatatgccactttaccttctcagattttggcggccacattttctcatgtttacttttttagtaaagaaaaaggagcatggaaactaatgattgttctttgcattaccacaatatgacctttatttttgtcatctttttatagggtctgattttaaaagagaactctcggttagctgtgtacactgtgtatggattctttttgacatgacattatttatatacaggattacaagtgttttttatgctgaattatcttttcttgttttatctatgttttgttgatgtcaattctctgtccaggagctactaataaacctcaagagttggatgatgctgttcttcgaagactggtgaaaagaatatatgtgccactacctgatccaaacgtacggaggctacttctgaaaaatcagctcaaaggacaagcattcaaattgtcgaggtattctggaagtgacctgagagccgtgtgcgaagaagctgcaatgatgccaataagagagctcgggccacagagtattcttgctattaaagcaaatcagttgcgacctttgaagtacgaggatttcaagaacgcgatggcggtgatcaggccaagcttgcagaagagcaaatgggacgagcttgagaaatggaacgaggaatttggttcgagctgacggcggctcgcactgcctgtgcctgatgatgatcaagcggtcctatttccatctgtatatatgatttatgtctcccacgctgtggctcacaacacaaggggtcacaccatgcgcccattgatgcgtcctcgttgggctaggcagcacaacatcgacagaagcagaatgtaaaggtatacttctggcaacggcctatacagccattgagggctagtttgaaacaccgttcaagggattttcatttttcaaagggaaattagctcattttcccttgtaaaaatgaaatttttttaggaaaatggtgttcccaaactagccctaagtattgctgttgcccaagttaaacaaaaaaacgtgtctattattgggctctgtttgtttaccctctaaattatattatccagcttaaataagttaagagat

SEQ ID NO: 202067 - DNA, 551 bp, Zea Mays
gtcgccctctcttcttcaccatcgcctcgctcgcctcctccgtcgtcgagccagcccttctccgtatccgtcgccatcacccccggatctgcctcccccatgaccgacgaccaacgagagcggcgtgagacggctttaggcgacgaaggcggcccacaccatgtcagccaacgacgcacagcggtggaagcacgcgatgggagctgacgacgcccttcctcggacggtatgcctacccccaatcaggtcatcgtcggcctcctgcagctgtccctccatcacctccttcaaggtttaggcgctccaccacctcagtccgggtgcactgtcttgccctcgactccagtgcctgtcacctcctcctgggccttggcgttaccgtggcccctcgcacagagaaccctcggtccaacaagcatctaggcgtctttggtagtggtctgtcaacaacttacaagttacagatgatgcaatatgtaaagataggcttcagcatatgagacaacatagagattagaatttctacatgtgtaaagtcagcaaggactctg

SEQ ID NO: 202068 - DNA, 1173 bp, Zea Mays
ggatcaagctgtccagcccggattaaacaagtagtgatccgtgacctcccctcctccggcctcctgtcgccggcgtccgtcgctcgttgtcgagcccccgggagcaaaggcttccgccgcctgcgttccggatggagaatcccttcagcgtgaaggtgctgcaggtattcacaggtttcggcgtaggatgcggcgtcggcatcggcgtcggacgacccatctacctaggtatgatacctgggcttcagcaagttatgagtgctacaaggggagcaacagatgctttttctggtgtcacaagctaaggacggctggattaaagaacatcgaagcagggattggctgtggagttggtataggccatggttttggaataggaattgcattaaagccacgggtgcttcatggaattcagtcatctgttggggaaattatgtctaaatggacatcaaagctaaaagatacccctgagacgccgtcttcgtcaaatcctatggttcattctttgtctagcaatgaacaaactcacaacagcatgtcgatggatctagaggctaaggatgcagaaagtaatttgaaccaaacttcaagttatgaaatgtcaaaagtgcaatctactcagccggaagcattgactgtaagtcgaaccaaaaaggtcattgccaattttctacaggatccactgttccagaatgatacaaaggtggacttcagagatgcccctggaaatttgcatggaatggatagtgtacttcagttggtactgaagcaccaaaaggttattgaggaactgcaggaggaaaacgaaaatctgcgtcagattctgatagaggaacttaagatttcaccaaccaaattacaaataggtcataaaaatggagtgaaggcctactatccatgctcggactgctttgaatgtcgccgcagaagtcggagaacaaccagatagcagtgggcattgccgttctttggttgagcaaaattttggtcgtttgttcagtagcttacagctgttgattttattagaacgatatcctctttgagaacctgcagatgagctctgattgttcagtacaactgtcattactggttttcattagctgtgtggaggcaggggagcactggctggagcgtttgcacccccccccccccccccccccccaaaaaaaaaaa

SEQ ID NO: 202069 - DNA, 1212 bp, Zea Mays
ggatcaagctgtccagcccggattaaacaagtagtgatccgtgacctcccctcctccggcctcctgtcgccggcgtccgtcgctcgttgtcgagcccccgggagcaaaggcttccgccgcctgcgttccggatggagaatcccttcagcgtgaaggtgctgcaggtatgatacctgggcttcagcaagttatgagtgctacaaggggagcaacagatgctttttctggtgtcacaaggcatgtcaattccgcgctaaggacggctggattaaagaacatcgaagcagggattggctgtggagttggtataggccatggttttggaataggaattgcattaaagccacgggtgcttcatggaattcagtcatctgttggggtacaaatatgaactgtagtttgccccaaattttctctctttcatttttcagtgcattaacattgatagtattagtttcccccctaggaaattatgtctaaatggacatcaaagctaaaagatacccctgagacgccgtcttcgtcaaatcctatggttcattctttgtctagcaatgaacaaactcacaacagcatgtcgatggatctagaggctaaggatgcagaaagtaatttgaaccaaacttcaagttatgaaatgtcaaaagtgcaatctactcagccggaagcattgactgtaagtcgaaccaaaaaggtcattgccaattttctacaggatccactgttccagaatgatacaaaggtggacttcagagatgcccctggaaatttgcatggaatggatagtgtacttcagttggtactgaagcaccaaaaggttattgaggaactgcaggaggaaaacgaaaatctgcgtcagattctgatagaggaacttaagatttcaccaaccaaattacaaataggtcataaaaatggagtgaaggcctactatccatgctcggactgctttgaatgtcgccgcagaagtcggagaacaaccagatagcagtgggcattgccgttctttggttgagcaaaattttggtcgtttgttcagtagcttacagctgttgattttattagaacgatatcctctttgagaacctgcagatgagctctgattgttcagtacaactgtcattactggttttcattagctgtgtggaggcaggggagcactggctggagcgtttgcacccccccccccccccccccccccaaaaaaaaaaa

SEQ ID NO: 202070 - DNA, 964 bp, Zea Mays
ggatcaagctgtccagcccggattaaacaagtagtgatccgtgacctcccctcctccggcctcctgtcgccggcgtccgtcgctcgttgtcgagcccccgggagcaaaggcttccgccgcctgcgttccggatggagaatcccttcagcgtgaaggtgctgcaggtattcacaggtttcggcgtaggatgcggcgtcggcatcggcgtcggacgacccatctacctaggtatgatacctgggcttcagcaagttatgagtgctacaaggggagcaacagatgctttttctggtgtcacaaggcatgtcaattccgcgctaaggacggctggattaaagaacatcgaagcagggattggctgtggagttggtataggccatggttttggaataggaattgcattaaagccacgggtgcttcatggaattcagtcatctgttggggatccactgttccagaatgatacaaaggtggacttcagagatgccgtacgcacgaaaacattcttaaatcctggaaatttgcatggaatggatagtgtacttcagttggtactgaagcaccaaaaggttattgaggaactgcaggaggaaaacgaaaatctgcgtcagattctgatagaggaacttaagatttcaccaaccaaattacaaataggtcataaaaatggagtgaaggcctactatccatgctcggactgctttgaatgtcgccgcagaagtcggagaacaaccagatagcagtgggcattgccgttctttggttgagcaaaattttggtcgtttgttcagtagcttacagctgttgattttattagaacgatatcctctttgagaacctgcagatgagctctgattgttcagtacaactgtcattactggttttcattagctgtgtggaggcaggggagcactggctggagcgtttgcacccccccccccccccccccccccaaaaaaaaaaa

SEQ ID NO: 202071 - DNA, 1213 bp, Zea Mays
ggatcaagctgtccagcccggattaaacaagtagtgatccgtgacctcccctcctccggcctcctgtcgccggcgtccgtcgctcgttgtcgagcccccgggagcaaaggcttccgccgcctgcgttccggatggagaatcccttcagcgtgaaggtgctgcaggtattcacaggtttcggcgtaggatgcggcgtcggcatcggcgtcggacgacccatctacctaggtatgatacctgggcttcagcaagttatgagtgctacaaggggagcaacagatgctttttctggtgtcacaaggcatgtcaattccgcgctaaggacggctggattaaagaacatcgaagcagggattggctgtggagttggtataggccatggttttggaataggaattgcattaaagccacgggtgcttcatggaattcagtcatctgttggggaaattatgtctaaatggacatcaaagctaaaagatacccctgagacgccgtcttcgtcaaatcctatggttcattctttgtctagcaatgaacaaactcacaacagcatgtcgatggatctagaggctaaggatgcagaaagtaatttgaaccaaacttcaagttatgaaatgtcaaaagtgcaatctactcagccggaagcattgactgtaagtcgaaccaaaaaggtcattgccaattttctacaggatccactgttccagaatgatacaaaggtggacttcagagatgccgtacgcacgaaaacattcttaaatcctggaaatttgcatggaatggatagtgtacttcagttggtactgaagcaccaaaaggttattgaggaactgcaggaggaaaacgaaaatctgcgtcagattctgatagaggaacttaagatttcaccaaccaaattacaaataggtcataaaaatggagtgaaggcctactatccatgctcggactgctttgaatgtcgccgcagaagtcggagaacaaccagatagcagtgggcattgccgttctttggttgagcaaaattttggtcgtttgttcagtagcttacagctgttgattttattagaacgatatcctctttgagaacctgcagatgagctctgattgttcagtacaactgtcattactggttttcattagctgtgtggaggcaggggagcactggctggagcgtttgcacccccccccccccccccccccccaaaaaaaaaaa

SEQ ID NO: 202072 - DNA, 1041 bp, Zea Mays
atataatccccgacctgctaaaaatgtatgttacgagtgatgatgttgtggaagttaagggcaaagtggcgtgtgagataagttcagctgatgagcttacattgacagagcttatgtttagtggtgctctgaaggatgctacagtagagcaggtggtggcactgctctcttgctttgtttggcaggagaagctccaggatgctccgaagccaagagaggagctcgatttgctcttctaccagctgcaggagacagcaagaagggttgctaaccttcagcttgaatgcaagatccagatcgatgtggaaagttttgtgaattctttccgacccgacataatggaagcggtgtattcatgggccagagggtcgaagttctaccaaatcatggagatgacccaagtgttcgaaggaagcctgatcagggccatcaggaggctggaggaggttctgcagcagctgattctggcatccaagtccattggggaaacggagttagaagcaaaactcgaggaggcggtcaacaagatcaagagggacatagtgtttgcagcatctttatacttgtagtgtcttggatgtctggttttatgtcaggggctaggtcaaaagctcatagggatttaaattaatcttaaattgctgttcatgttgagtgttgttggcatgatgaagctgtctgatttgctgttagcggtgacatggcagtgaaagttttgttaggtttcttcaccgtgtagggtctatttgacattcaagaattttgtaggaagcaatacaattctggcagacctcacattaacagccttagcatgtacgatagatagctatttatctcatctgtcaggaatagcccagagatactgcgtgtttgtggagtataagcagtgtaagttaagtgatcgtgcttgtgtttgtaagtgcagttcaaagcaagtcggccgatggagatgtccctggatgaaaacttgtagtatttgtcttgcactcttgcttgtttgaatgttattggccggctgatggtcacgtgcatgcatgcgtg

SEQ ID NO: 202073 - DNA, 1461 bp, Zea Mays
aggacctctattttatggagtggatgttatgcatctccaattgtcaaccacttgcaataagaggcctgaggattctgattacacggttgatgtccttaccagatgttctgtaactaaggacaacagtggtaagaaaacaatgaagattgatggactaagcagcatacggatgtacatacctaaggatcttatacctgtagaagttcgagaaaacaccttgaggaaagttgaagaagtccttttaaggtttgctaaagatggtgtgcctctattggatccagaagaagatatgaaagtacaatcgaaatcatttcggaaagctaccagacgaatagaagctcttgagagcttgtttgagaagcacgatatccgtaactctccacatatccagcaaaagctgaaagtctttcatgctaagcaagaactatcagccaaaataaagtccataaagaaaacaatgcggtcttccaccgctttagctttcaaggatgaactcaaggcccggaaacgtgttcttcgcaggctgggagcttatgtttagtggtgctctgaaggatgctacagtagagcaggtggtggcactgctctcttgctttgtttggcaggagaagctccaggatgctccgaagccaagagaggagctcgatttgctcttctaccagctgcaggagacagcaagaagggttgctaaccttcagcttgaatgcaagatccagatcgatgtggaaagttttgtgaattctttccgacccgacataatggaagcggtgtattcatgggccagagggtcgaagttctaccaaatcatggagatgacccaagtgttcgaaggaagcctgatcagggccatcaggaggctggaggaggttctgcagcagctgattctggcatccaagtccattggggaaacggagttagaagcaaaactcgaggaggcggtcaacaagatcaagagggacatagtgtttgcagcatctttatacttgtagtgtcttggatgtctggttttatgtcaggggctaggtcaaaagctcatagggatttaaattaatcttaaattgctgttcatgttgagtgttgttggcatgatgaagctgtctgatttgctgttagcggtgacatggcagtgaaagttttgttaggtttcttcaccgtgtagggtctatttgacattcaagaattttgtaggaagcaatacaattctggcagacctcacattaacagccttagcatgtacgatagatagctatttatctcatctgtcaggaatagcccagagatactgcgtgtttgtggagtataagcagtgtaagttaagtgatcgtgcttgtgtttgtaagtgcagttcaaagcaagtcggccgatggagatgtccctggatgaaaacttgtagtatttgtcttgcactcttgcttgtttgaatgttattggccggctgatggtcacgtgcatgcatgcgtg

SEQ ID NO: 202074 - DNA, 1585 bp, Zea Mays
gtttgacactgtgcagagtgaagtttgagataggggatgagataggggagctgctggagacaaccttaggacctctattttatggagtggatgttatgcatctccaattgtcaaccacttgcaataagaggcctgaggattctgattacacggttgatgtccttaccagatgttctgtaactaaggacaacagtggtaagaaaacaatgaaggttgttcctctgaaagcgcgtggagaaccagttgtagtttcattgtcactttcacagattgatggactaagcagcatacggatgtacatacctaaggatcttatacctgtagaagttcgagaaaacaccttgaggaaagttgaagaagtccttttaaggtttgctaaagatggtgtgcctctattggatccagaagaagatatgaaagtacaatcgaaatcatttcggaaagctaccagacgaatagaagctcttgagagcttgtttgagaagcacgatatccgtaactctccacatatccagcaaaagctgaaagtctttcatgctaagcaagaactatcagccaaaataaagtccataaagaaaacaatgcggtcttccaccgctttagctttcaaggatgaactcaaggcccggaaacgtgttcttcgcaggctgggagcttatgtttagtggtgctctgaaggatgctacagtagagcaggtggtggcactgctctcttgctttgtttggcaggagaagctccaggatgctccgaagccaagagaggagctcgatttgctcttctaccagctgcaggagacagcaagaagggttgctaaccttcagcttgaatgcaagatccagatcgatgtggaaagttttgtgaattctttccgacccgacataatggaagcggtgtattcatgggccagagggtcgaagttctaccaaatcatggagatgacccaagtgttcgaaggaagcctgatcagggccatcaggaggctggaggaggttctgcagcagctgattctggcatccaagtccattggggaaacggagttagaagcaaaactcgaggaggcggtcaacaagatcaagagggacatagtgtttgcagcatctttatacttgtagtgtcttggatgtctggttttatgtcaggggctaggtcaaaagctcatagggatttaaattaatcttaaattgctgttcatgttgagtgttgttggcatgatgaagctgtctgatttgctgttagcggtgacatggcagtgaaagttttgttaggtttcttcaccgtgtagggtctatttgacattcaagaattttgtaggaagcaatacaattctggcagacctcacattaacagccttagcatgtacgatagatagctatttatctcatctgtcaggaatagcccagagatactgcgtgtttgtggagtataagcagtgtaagttaagtgatcgtgcttgtgtttgtaagtgcagttcaaagcaagtcggccgatggagatgtccctggatgaaaacttgtagtatttgtcttgcactcttgcttgtttgaatgttattggccggctgatggtcacgtgcatgcatgcgtg

SEQ ID NO: 202075 - DNA, 3466 bp, Zea Mays
tcccggcccttcctttccttctcgcgcgcgaccaaataactcctcactaaaaccctagggctcccggccgccactgcctacgccgtcgccatggagaccctcaagcgcaaggccgtggacagccccggagacgcctaccaggcctcttctctcaagccgccgctcgccgccgccgccgtggagcctcgcgctccgaccaccctcgcggccgccgaaccagtcgcttgcgtgcacgacgtctcctaccccgagggctacgacccatccgcctctacgtcccgcgccattgccggcggagctgatgcctctgagccagcaaagaagtttcctttccagctcgaccccttccaggccgaggccatacgctgcctcgacaatggtgaatccgtcatggtttcagctcatacgtcagcgggaaagacagtagtcgcgttgtatgcaatagcgatgtctttgcgcaaccaacagcgggtcatttatacatctccaatcaaggcactgagcaaccaaaagtacagggagttcaaagaagagttctctgatgttggtctcatgactggggatgtcacaattgagccgaatgcctcctgtctggtcatgaccacagaaatttggcggagcatgcaatacaagggatctgaggtcatgagggaagttgcctgggttatatttgatgaggtgcattacatgcgggatagagagagaggagtggtttgggaggagagtatagtgatggctcccaagaattcacgctttgtcttcctctcggcaactgtacctaatgccaaggagttcgctgattgggtagctaaggtacataagcaaccctgtcatatagtatacaccgactatagacctacacctcttcagcactatgtatttccttctggaggggacggattataccttgtagtggatgagaagggcaagttcagagaggacagttttcagaaagcattgaacgcccttgtccctgctagcgacagtgccaagaagaaggaaaatgggaagcggcagaaatttaccatggcaggtacatctagtgaggaaagtgacatattcaagatggtgaagatgataattcagcgccaatatgatcctgtaatactttttagctttagcaaaagggaatgcgaatttcttgctatgcagatggctaagatggacttgaatgaggatgatgagaaggcaaacatcgaaacaattttttggagtgctatggatatgctttctgatgatgacaaaaagcttcctcaggtttcaaacatgctccccttactgaaacgcggcattggcgtgcatcattctggtctgttgcctattttaaaggaagtcattgagatactctttcaggagggcctcatcaagaaacattcagtattggtttgaacatgcctgcaaagactgttgtgtttaccaatgtgcgaaaatttgacggagaccgattcagatggttgtcgagtggagagtacatccaaatgagtggccgtgctggtcgtcgaggtattgatctgcgtggtatctgtatactgatggtagacgagaaaatggaaccttcaactgccaaaatgatgctgaaaggaagtgcagatagtttgaacagtgcctttcatctgagctacaatatgctgttaaatcaaatgcgatctgaggatggggatccagaaaagctcctccggcattcattttatcaatttcaggctgaccgttctcttcctgatcttgagaagcaaatcaaggaactggaatcagagagaaattccatggtaattgaggaagcggagagcttgaaggattattacgatctcttacagcagcacaggagtttaaagaaggatgtccatgatattgttctctctcccaaacatgtgctgcctttcttgcaacctggaaggcttgtccgcattgaatatagtacagatgagccagctaacttttccattgatgaaaatgtcacatggggaattataattaacttcgaaaaagtgaagtcacatggtgaagataagaggcctgaggattctgattacacggttgatgtccttaccagatgttctgtaactaaggacaacagtggtaagaaaacaatgaaggttgttcctctgaaagcgcgtggagaaccagttgtagtttcattgtcactttcacagattgatggactaagcagcatacggatgtacatacctaaggatcttatacctgtagaagttcgagaaaacaccttgaggaaagttgaagaagtccttttaaggtttgctaaagatggtgtgcctctattggatccagaagaagatatgaaagtacaatcgaaatcatttcggaaagctaccagacgaatagaagctcttgagagcttgtttgagaagcacgatatccgtaactctccacatatccagcaaaagctgaaagtctttcatgctaagcaagaactatcagccaaaataaagtccataaagaaaacaatgcggtcttccaccgctttagctttcaaggatgaactcaaggcccggaaacgtgttcttcgcaggctgggagcttatgtttagtggtgctctgaaggatgctacagtagagcaggtggtggcactgctctcttgctttgtttggcaggagaagctccaggatgctccgaagccaagagaggagctcgatttgctcttctaccagctgcaggagacagcaagaagggttgctaaccttcagcttgaatgcaagatccagatcgatgtggaaagttttgtgaattctttccgacccgacataatggaagcggtgtattcatgggccagagggtcgaagttctaccaaatcatggagatgacccaagtgttcgaaggaagcctgatcagggccatcaggaggctggaggaggttctgcagcagctgattctggcatccaagtccattggggaaacggagttagaagcaaaactcgaggaggcggtcaacaagatcaagagggacatagtgtttgcagcatctttatacttgtagtgtcttggatgtctggttttatgtcaggggctaggtcaaaagctcatagggatttaaattaatcttaaattgctgttcatgttgagtgttgttggcatgatgaagctgtctgatttgctgttagcggtgacatggcagtgaaagttttgttaggtttcttcaccgtgtagggtctatttgacattcaagaattttgtaggaagcaatacaattctggcagacctcacattaacagccttagcatgtacgatagatagctatttatctcatctgtcaggaatagcccagagatactgcgtgtttgtggagtataagcagtgtaagttaagtgatcgtgcttgtgtttgtaagtgcagttcaaagcaagtcggccgatggagatgtccctggatgaaaacttgtagtatttgtcttgcactcttgcttgtttgaatgttattggccggctgatggtcacgtgcatgcatgcgtg

SEQ ID NO: 202076 - DNA, 938 bp, Zea Mays
cctttgaacttggctggctgttccaggtgcccaaacctgcactatttcagccttcctagcacctgtatgacttacgatcagttctgcaaggcgataggtggacttcaatcgcttaaaggcatggcagtggacgagagtctgattaattatgatgtcctcctgcatgtgcaccagtgctgcccagactttgtggagctgaaggtgtctgcactgtacgtggatgaagagatggcctcagtcatctgcaactctcttcctcgtctgaagaagttggagataccaagttgtgacatgtcttccgctgcgattataaggttccttgattgcctagagcagctcgagcacctggacatctcaggttacgagacatcagccatctcaagcccggttcttgagaaagcttcgcggctcaaggtcttcctctggaactcgaaatttgagcttggggagttcatggactgctccaattgtggagaacacaacattaaccctcaagaaccctgcaagtgcatgatggagcacaaggtcatggactggctggctggaccttcataagcttcctgaaccaaaggcgtctcttcttgtgtcttgttaaatcatgacgttttcctggctgtaaaattccaacctctgtcaaagttggtgtctgagctgtatgcacaaggaaatatgctacttcaaatgtttagcgcgccttagagaggtctgcaaccttttaatgtaacaaattgttgtatcaagtgttaatggaacctcttctttacaccaatgagccgatacgaaacatctgtgcctattttgaagcgatttcacctcggagtcaaaccttgttgtgtggtgagtttttgcttcggctatgcgaagattaatccatttctttttttagaggacaggaggggggcctactgaaaattttatttaaattaaaaagaaaacaa

SEQ ID NO: 202077 - DNA, 2376 bp, Zea Mays
cggaactttgcgatttcatccaaaaagagcagaacactacgagactacctccttctctccaagtcgttgtcttcttcggttcttcctagcgtctccccgttcttctctccgtagtagctaacagtatagtgtggcctcgcatggagactttccctcctcgctggccccgcatctggcccggattaaccgccttgggctccctccccagattgccccacccaccgtcagcctcgtcaggtatgtctcgtgttccctaaccttgacgcttctcccttctcggcgcctgcttcgttggttgccttcagcggacgccgccgattcggctctcctgttcggcgccctccccagattgccccacccaccgtcagcctcgtcaggtatgtctagtgttccctaaccttgacgcttctcccttctcggcgcctgcttcgttggttgccttcagcggacgccgccgattcggctctcctgttcggcgccgtgtcttgcgacagacaatgctacattctggagtacatggattagatgggtgttgtgcactgcttttatatggatctaatgattgtggccttgaacgttctcgccaggcatatctcatgtttttacatggattagataagtacatgaatctttatttaggcctgtttggttactttagtctagggactaaagtttagtactccatatccagcttgatttgagggactaaaagtatccataacgcattaaatgactcgtaagaaaccaaaatgcctctcatcattctctggcattagagcatctgaaataaatgagagccaaaagtggaattaatatggtttagtcccttttatcacccctttaagggactagagactaaagcagtttaatccttgttttagtcctactatttggcaatttatagactaaatgagactaaaatggagggactaatctttagtccttggaaccaaacaggcccttaacccgaaggtaattgagattgcgaagaagatgaaagaggagagggtcaagttgtttacttcagaatattttgcttacagatgatacgactagatcaaatcagttgcattgtgagttgtgacatgttggcaggatgtcagtttcccttttaacctggctcttgtttgcttcctgtgtaatttgtgtatatccctgtgatgaacattttagtaatctgggtgctcattcaattggcgcgccctcctcatcactcttagatggggaggttgaaggaacccatatcgatgatgtatacaccgttgagatgtttgcttctcgtgtaatttgtgtatatccccgtgatgaacattttagtaatttgagtgctcattcagttggtgctccctcctcatcacgcaaataggtactgaagcccatatgactatgcagatctaggacagaatgtttgcaataaatactgacatggatatctagctttggctttgaaagatgtagggatcttttgttaaattgatttacctagggtcctgctacaagagcttacctgttacctcgttatatctttgtgagattacagcaaaagtatccaatttctacatattttactgctacacagatttgtctgtctgtttggtcatggatatggttcggttttactgctgtaaaaagggattaaaaaatctgcaacctgatttcaatttttattttttatttgcatcacgatgaaatggtagggtcctcccaggacaaaccatgctccggagacagaggcggcagagctggggcaggagcagagccatcacagaaattcttgtctccagtccattaaaaatccatgcataagcagccgcgagaggtctcagacagataagatggtcgacggcatggacttcgaggagctctgcagcgacttcgaatgcataagcagcccctacgtggagtccataatgaggcaggtcgcgcgggacatctttgagcttcgcgaggataaccgcgcattcagctgctacgccgtccccgtgaagtatgaggctccttcctgatgataatttataatgataaatcgaggaaactccaataagtttccttcctttttttcctttcgtttttctcccttctctgatttttcagtgtggagggactggacttccgacaaaggaaatcacaacattgtatatgattgacttgtaatatgttagtaaatatgtctgtacgttatgacaagagatataacttgttttagggctagtttggtaacttcatttttttcaaggaattttttcatttttccgagggaaattagttcattttttacaggaaaaatgtaaatcccttgagaaaaatgagttgccaaactagctcttatctagataatttgtagctcaaaattttacatccaacaaacaaggtgta

SEQ ID NO: 202078 - DNA, 3169 bp, Zea Mays
cagaacactacgagactacctccttctctccaagtcgttgtcttcttcggttcttcctagcgtctccccgttcttctctccgtagtagctaacagtatagtgtggcctcgcatggagactttccctcctcgctggccccgcatctggcccggattaaccgccttgggctccctccccagattgccccacccaccgtcagcctcgtcaggtatgtctcgtgttccctaaccttgacgcttctcccttctcggcgcctgcttcgttggttgccttcagcggacgccgccgattcggctctcctgttcggcgccctccccagattgccccacccaccgtcagcctcgtcaggtatgtctagtgttccctaaccttgacgcttctcccttctcggcgcctgcttcgttggttgccttcagcggacgccgccgattcggctctcctgttcggcgccgtgtcttgcgacagacaatgctacattctggagtacatggattagatgggtgttgtgcactgcttttatatggatctaatgattgtggccttgaacgttctcgccaggcatatctcatgtttttacatggattagataagtacatgaatctttatttaggcctgtttggttactttagtctagggactaaagtttagtactccatatccagcttgatttgagggactaaaagtatccataacgcattaaatgactcgtaagaaaccaaaatgcctctcatcattctctggcattagagcatctgaaataaatgagagccaaaagtggaattaatatggtttagtcccttttatcacccctttaagggactagagactaaagcagtttaatccttgttttagtcctactatttggcaatttatagactaaatgagactaaaatggagggactaatctttagtccttggaaccaaacaggcccttaacccgaaggtaattgagattgcgaagaagatgaaagaggagagggtcaagttgtttacttcagaatattttgcttacagatgatacgactagatcaaatcagttgcattgtgagttgtgacatgttggcaggatgtcagtttcccttttaacctggctcttgtttgcttcctgtgtaatttgtgtatatccctgtgatgaacattttagtaatctgggtgctcattcaattggcgcgccctcctcatcactcttagatggggaggttgaaggaacccatatcgatgatgtatacaccgttgagatgtttgcttctcgtgtaatttgtgtatatccccgtgatgaacattttagtaatttgagtgctcattcagttggtgctccctcctcatcacgcaaataggtactgaagcccatatgactatgcagatctaggacagaatgtttgcaataaatactgacatggatatctagctttggctttgaaagatgtagggatcttttgttaaattgatttacctagggtcctgctacaagagcttacctgttacctcgttatatctttgtgagattacagcaaaagtatccaatttctacatattttactgctacacagatttgtctgtctgtttggtcatggatatggttcggttttactgctgtaaaaagggattaaaaaatctgcaacctgatttcaatttttattttttatttgcatcacgatgaaatggtagggtcctcccaggacaaaccatgctccggagacagaggcggcagagctggggcaggagcagagccatcacagaaattcttgtctccaggtatgttgaagtttcaacaacttggtttataaattaacatgattttaaaaaatcacagtgactcctcttgcagattttgtaaaatgtttttttctctactgcactgcctatcatttgctgcaatttgaggattataacattctagacacactaaaatctatcatctatcataaacagtagctatttccccctctgttctttgtgtctctgattgtgtggtaccagctactttggcatacatttgttttttgctttaatcttctgttcagcttctaattcagaaatctttacttcagataaccagaatacttcagcttccatagttccacttacacagttgtaacaatctagcctgtaatggcttgtaacagtacagtgagttgggagttgggacacctctgatgtttagagctccaatggtcctgtgggagggatatatttttgttttcatattgtttagccatggggtgccagggtctacgttctaccttggtttggttctctccttttctcctatctgtcaacacatagtcgtctattacttataaaaaaccacattttcccattttgatccctttatgaacaatgctggaaatcaaattctattcattttggaaaataattacatatttattcgtcgtagctatattccattgttttattaggtgctcaaaaattgtgttgaccggacacatgctattttggcctatgtgctatccattgctatgttttatcggtagggttttccatgcttagataacttcctaatttctcattttttgtaaataaataaatacttggagattcttggtcaaaggaatgttggacacctgctagccaatgtgcagccgcgagaggtctcagacagataagatggtcgacggcatggacttcgaggagctctgcagcgacttcgaatgcataagcagcccctacgtggagtccataatgaggcaggtcgcgcgggacatctttgagcttcgcgaggataaccgcgcattcagctgctacgccgtccccgtgaagtatgaggctccttcctgatgataatttataatgataaatcgaggaaactccaataagtttccttcctttttttcctttcgtttttctcccttctctgatttttcagtgtggagggactggacttccgacaaaggaaatcacaacattgtatatgattgacttgtaatatgttagtaaatatgtctgtacgttatgacaagagatataacttgttttagggctagtttggtaacttcatttttttcaaggaattttttcatttttccgagggaaattagttcattttttacaggaaaaatgtaaatcccttgagaaaaatgagttgccaaactagctcttatctagataatttgtagctcaaaattttacatccaacaaacaaggtgta

SEQ ID NO: 202079 - DNA, 1799 bp, Zea Mays
cagaacactacgagactacctccttctctccaagtcgttgtcttcttcggttcttcctagcgtctccccgttcttctctccgtagtagctaacagtatagtgtggcctcgcatggagactttccctcctcgctggccccgcatctggcccggattaaccgccttgggctccctccccagattgccccacccaccgtcagcctcgtcagggtcctcccaggacaaaccatgctccggagacagaggcggcagagctggggcaggagcagagccatcacagaaattcttgtctccaggtatgttgaagtttcaacaacttggtttataaattaacatgattttaaaaaatcacagtgactcctcttgcagattttgtaaaatgtttttttctctactgcactgcctatcatttgctgcaatttgaggattataacattctagacacactaaaatctatcatctatcataaacagtagctatttccccctctgttctttgtgtctctgattgtgtggtaccagctactttggcatacatttgttttttgctttaatcttctgttcagcttctaattcagaaatctttacttcagataaccagaatacttcagcttccatagttccacttacacagttgtaacaatctagcctgtaatggcttgtaacagtacagtgagttgggagttgggacacctctgatgtttagagctccaatggtcctgtgggagggatatatttttgttttcatattgtttagccatggggtgccagggtctacgttctaccttggtttggttctctccttttctcctatctgtcaacacatagtcgtctattacttataaaaaaccacattttcccattttgatccctttatgaacaatgctggaaatcaaattctattcattttggaaaataattacatatttattcgtcgtagctatattccattgttttattaggtgctcaaaaattgtgttgaccggacacatgctattttggcctatgtgctatccattgctatgttttatcggtagggttttccatgcttagataacttcctaatttctcattttttgtaaataaataaatacttggagattcttggtcaaaggaatgttggacacctgctagccaatgtgcaggtaacaggaacctgaacaaaatggccttgcagtcttttttttttgactgtgtatatctttttcatgtggagtccattaaaaatccatgcataagcagccgcgagaggtctcagacagataagatggtcgacggcatggacttcgaggagctctgcagcgacttcgaatgcataagcagcccctacgtggagtccataatgaggcaggtcgcgcgggacatctttgagcttcgcgaggataaccgcgcattcagctgctacgccgtccccgtgaagctccttcctgatgataatttataatgataaatcgaggaaactccaataagtttccttcctttttttcctttcgtttttctcccttctctgatttttcagtgtggagggactggacttccgacaaaggaaatcacaacattgtatatgattgacttgtaatatgttagtaaatatgtctgtacgttatgacaagagatataacttgttttagggctagtttggtaacttcatttttttcaaggaattttttcatttttccgagggaaattagttcattttttacaggaaaaatgtaaatcccttgagaaaaatgagttgccaaactagctcttatctagataatttgtagctcaaaattttacatccaacaaacaaggtgta

SEQ ID NO: 202080 - DNA, 1786 bp, Zea Mays
cagaacactacgagactacctccttctctccaagtcgttgtcttcttcggttcttcctagcgtctccccgttcttctctccgtagtagctaacagtatagtgtggcctcgcatggagactttccctcctcgctggccccgcatctggcccggattaaccgccttgggctccctccccagattgccccacccaccgtcagcctcgtcaggtatgtctcgtgttccctaaccttgacgcttctcccttctcggcgcctgcttcgttggttgccttcagcggacgccgccgattcggctctcctgttcggcgccctccccagattgccccacccaccgtcagcctcgtcaggtatgtctagtgttccctaaccttgacgcttctcccttctcggcgcctgcttcgttggttgccttcagcggacgccgccgattcggctctcctgttcggcgccgtgtcttgcgacagacaatgctacattctggagtacatggattagatgggtgttgtgcactgcttttatatggatctaatgattgtggccttgaacgttctcgccaggcatatctcatgtttttacatggattagataagtacatgaatctttatttaggcctgtttggttactttagtctagggactaaagtttagtactccatatccagcttgatttgagggactaaaagtatccataacgcattaaatgactcgtaagaaaccaaaatgcctctcatcattctctggcattagagcatctgaaataaatgagagccaaaagtggaattaatatggtttagtcccttttatcacccctttaagggactagagactaaagcagtttaatccttgttttagtcctactatttggcaatttatagactaaatgagactaaaatggagggactaatctttagtccttggaaccaaacaggcccttaacccgaaggtaattgagattgcgaagaagatgaaagaggagagggtcaagttgtttacttcagaatattttgcttacagatgatacgactagatcaaatcagttgcattgtgagttgtgacatgttggcaggatgtcagtttcccttttaacctggctcttgtttgcttcctgtgtaatttgtgtatatccctgtgatgaacattttagtaatctgggtgctcattcaattggcgcgccctcctcatcactcttagatggggaggttgaaggaacccatatcgatgatgtatacaccgttgagatgtttgcttctcgtgtaatttgtgtatatccccgtgatgaacattttagtaatttgagtgctcattcagttggtgctccctcctcatcacgcaaataggtactgaagcccatatgactatgcagatctaggacagaatgtttgcaataaatactgacatggatatctagctttggctttgaaagatgtagggatcttttgttaaattgatttacctagggtcctgctacaagagcttacctgttacctcgttatatctttgtgagattacagcaaaagtatccaatttctacatattttactgctacacagatttgtctgtctgtttggtcatggatatggttcggttttactgctgtaaaaagggattaaaaaatctgcaacctgatttcaatttttattttttatttgcatcacgatgaaatggtagggtcctcccaggacaaaccatgctccggagacagaggcggcagagctggggcaggagcagagccatcacagaaattcttgtctccaggaatgttggacacctgctagccaatgtgcag

SEQ ID NO: 202081 - DNA, 3293 bp, Zea Mays
gcaagcgagagaagaacacagctccaggccaaaacctcgccgcctcgccggcctccgcctcaattccatgcctcgccaatcagatccacgctcctcgccctctactatggactccggcggggggtcctcagcggacatggagctggcctggcaccttctcaccgtgctcatccgcctcggccgtcccgccgccgcctcggaactcaccgccgccgctaccgtcgcagcgccctccatctcgacgcgcgtcgtcaagcagatgtgttgcttacctaggtcaccactatggatctctgacgacggcgtcgtgacgccctccgagacggctatcctggcgtttctgaggttcatggggtgggatatcccggggcctaaggtgagcctgtggccttcggaggtgaggcggtggtcgggaaaggtgtccattaggtatgagcgtaagcggcaagggtcggatgcaaggtgcttcagcgcgaagaggcgccgactactggcatcggccgcagatttggtggaacaaacggagcaccagtcgtggcagctggttgcgcagacctgtactacggctgctactggagaggtacatttggaggttatgcaaaagttgcaggataggcttcccagtctcggcacatttctcggtgatcttcagcacaaacttgaccagcctcttagaggtgacgatgacttggctattgggaacatgtctttagcactggtgccaacaggtttttcagattgcccttgttctgtcaatcttcctccactggatgctgagaaattgagaaacatcaatatggaagttgatggtagaagcaacaagattagtgaatctgaaacagtttccttacttaacaatagagtagaggatagtgatgatctacaaaaagagtgtgcccttcccatggccagtcatgatgttttagttggagaatgcaaaaatggggctgatgaatatctaaatcctgtttgcaaaagtcctggcagtccgatagatcataatatgaaaacggctactagtattgaagcatttgatatgattctcaaccaagcagatgctctacaatacaattgcctaaatgatgggcatcatcagaatgccccaagttgtgttcagaaaaaaaatccacttcgtgctagtgcatatgcagaagtttgcactgataagacagcacaaattttgttccagccttctgtggttaacaaagttggatctatagcacctcaaatgatgataaatgttcaatctgaaacattaccacaagaaactacaaggcaagatggcatgaacatgaagcacctgaatattgttcctgaaaatagagatatcagatatctaaatcatggagagcagtccttgaacaaggcggaggtcaatgtatctaagaatgggcgggataagttgactgtgaagcagaaagagaagtgcaagaaaaatgaacagccaaaagaagataaggacaacacagcaaagactcaaaagggtcatgtagcaccaaaaccacttcctgctttcaagggttttgtcatagaagaggaggaagggtctggaggttatgggactgtttatagggctcagaggacaaaagatggaaaaacattcgctataaaatgtcctcacccaaatgctcattcacatcatgttaataatgaactaaagatactggagcgttttggaggcaaaaattgtgtgattaaatatgaatgctctttgaaaagtggtgatctagactgttttgttctagaacatgttgagcatgacagaccagagattttgaaaaaagacataaccttgcttgagctgcagtggtatggacactgtcttttcagagctcttgcaagcttacataaacagggggtagtgcatagagatgtcaaacctggaaacttccttttctgtcgcaaactgaagaaggggtatcttattgactttaacctggcaaatgatcttcaccaaaaattcttgaaaaactgtaaatctgatgcaacttcaagtgggaaggataccacatctcaatccctatcaactatttccccagtagttcatgtcaaagaaccagttgctgactcaaagcagcctcttcctttgaagaggaaaagatctagtagaagcccagtggatagtgcacgtgcacctatggtcgacagtaaaagtaggcatggtaaccaaactgcagatgtatctggtataacatctgccaaggatcctacgagcactaaaacatcattagataggttaaagcagccaatgccttacaaagggcgaaaagaactaatgaacttcttacatgagaccatgcaaagtccaaacaaaagtactatgcctactcctgtttcccaaaggaagagggtcgctgctccttttggtagtgtggatcgaaagctctttatactgacgccaatgcccctgcgttctggtggcagtgctgttgctggtgctggcatgttcaacaacaaaggacatggaaaacatcgaagagaaggtccatgtgttggaactaaaggttctccttaggtccttccaccagggctgtaaagttgatgtctggtcggctggggtgacgctcttgtacttgataattggcagaacaccttttggtggagatcctgaacagaacatcaaggaaatagcgaagctgaaaggaagtgaagaactatgggaagtagcgaagttgcacaactgcgaatcttcgtacccatcagatctctttgacgtcaaatttcctttgtgctcggtggatctaagggaatggtgtgcagccaacacacgcaggccagatttactcgagatgatacctgactcctttttcaatcttgtggagaagtgtttggccgtcaaccccaggtgcaggctctcatcagaggacgcgctcatgcacgagttctttgctccatgccgcgataacttcaggaagctcaggatgctgaggaggtcagctggttctgatgcagcatgttcatcgtctcaccaggacacaacacttggagcaagacagtcataggtcgttccaccgtacatacttattgacaccagaaagctgattgtgatcatctagtttattacagacatgacaatagccaaatcgtgttcccgtcttgatgtaagtaaacacttgtactaaatacgtactaaaccgttggtcggaaccaagatatattatttttgtcatgcaacgggagggacgaagagtccccacctgatatattacgtaggacagtgtcaaagaggtacaaataaggcatgtgtagagtacaaagtttgccaggaaggccctaaacttggaacattagag

SEQ ID NO: 202082 - DNA, 1501 bp, Zea Mays
gttgcatttggggacggcggctatgcgttgcgagcgcctgagagatcctgtgtttagctctaccgccgggaatgacagtcctcttgctcttgcacaagcccacgaaactcgagaaaaactgaaagccacacactctgagttagctgaggagagggccattgagatcgtcatcataaagaccacaggagacatgatcttggacaaaccccttgcagacattggaggcaagggtttattcaccaaggagatagatgatgcgctcttgcagggaaggattgatatcgctgttcactctatgaaagatgttccaacatatctacctgaaggcacaatattgccctgtaacctaccacgagaagatgtcagagacgcattcatatgtttgactgcaaattcgcttgcagagcttcctgctggcagtgttattggaagtgcttctctgcggagacaatctcagattctctacagatatccatcactgaaagtagttaacttcagaggaaacgttcagacacggttaaggaaactcaaggagggagatgtctctgctacattgttggcactggctggattaaggcggctaaatatggcagaaaatgcaactgctgtactatcagtggaagaaatgcttccagcagttgcccaaggtgctattggaatagcttgccgaagcaatgatgacaaaatgatggagtatctatcagcgttgaaccatgaagataccagattagctgttgcatgtgaaagagaatttttggcagttcttgatggtaactgccgaactccaattgcagcctatgcttaccgtgacaatgatgggaattgctcattccgcggtctattgtcttccccagatggatctaaagtatttgagacaacaagaagtggaccgtactcttttgacgacatggttgagatgggcaaagatgctggtcatgagctgaaggcaaaggctgggcctggcttctttgatagcttgcaatgaaaagaatgagcggccatgagcaatttcaattgtcactcttttgggtagaaacagagggcccaagtagagtgttgagaggtttgtttttgtttattctttctcctactagttctgctagagaagggtgtacctggtgtagtggtgagctgagtcatcaggtcgcgggttcgaagcatccagtctccgtatttgtgggagaaggtttgtctcggtttatctcttttccgctactcatatgggagaaatgtgggagcctcagtctgctcttttttttttccatactagttctgctagtgccttgtactatcactcgtattgagcagccccattcagctttataaaaatacagtaaaaacaaagaagctggtatggattaaagaacgaacaagttgattaatgtgatgtttactccggatctagatataaaaatgtgcatatgcatatttcccccacgttgttccaatataacattgtcatccatttttatgttttgtcgagatttggatgttagaaaat

SEQ ID NO: 202083 - DNA, 1500 bp, Zea Mays
agcagttgcatttggggacggcggctatgcgttgcgagcgcctgagagatcctgtgtttagctctaccgccgggaattcctcttgctcttgcacaagcccacgaaactcgagaaaaactgaaagccacacactctgagttagctgaggagagggccattgagatcgtcatcataaagaccacaggagacatgatcttggacaaaccccttgcagacattggaggcaagggtttattcaccaaggagatagatgatgcgctcttgcagggaaggattgatatcgctgttcactctatgaaagatgttccaacatatctacctgaaggcacaatattgccctgtaacctaccacgagaagatgtcagagacgcattcatatgtttgactgcaaattcgcttgcagagcttcctgctggcagtgttattggaagtgcttctctgcggagacaatctcagattctctacagatatccatcactgaaagtagttaacttcagaggaaacgttcagacacggttaaggaaactcaaggagggagatgtctctgctacattgttggcactggctggattaaggcggctaaatatggcagaaaatgcaactgctgtactatcagtggaagaaatgcttccagcagttgcccaaggtgctattggaatagcttgccgaagcaatgatgacaaaatgatggagtatctatcagcgttgaaccatgaagataccagattagctgttgcatgtgaaagagaatttttggcagttcttgatggtaactgccgaactccaattgcagcctatgcttaccgtgacaatgatgggaattgctcattccgcggtctattgtcttccccagatggatctaaagtatttgagacaacaagaagtggaccgtactcttttgacgacatggttgagatgggcaaagatgctggtcatgagctgaaggcaaaggctgggcctggcttctttgatagcttgcaatgaaaagaatgagcggccatgagcaatttcaattgtcactcttttgggtagaaacagagggcccaagtagagtgttgagaggtttgtttttgtttattctttctcctactagttctgctagagaagggtgtacctggtgtagtggtgagctgagtcatcaggtcgcgggttcgaagcatccagtctccgtatttgtgggagaaggtttgtctcggtttatctcttttccgctactcatatgggagaaatgtgggagcctcagtctgctcttttttttttccatactagttctgctagtgccttgtactatcactcgtattgagcagccccattcagctttataaaaatacagtaaaaacaaagaagctggtatggattaaagaacgaacaagttgattaatgtgatgtttactccggatctagatataaaaatgtgcatatgcatatttcccccacgttgttccaatataacattgtcatccatttttatgttttgtcgagatttggatgttagaaaat

SEQ ID NO: 202084 - DNA, 2449 bp, Zea Mays
ctctttcctcacgcaacttatccactactcacgctactaccccttccctaggccacgtccaacagcctcccccaatccgtcctttggcttcgctggcgacgacggaggctggtgatggcaggaattggtgagcgctccaattcggggattggtggaggctggtgcgcgctaaggcaggaattggcggcggccggtgtgcgccagttcgaggaatcggctgcagctcacagaggacgcacggcgtgtgtttccttgccgtcgcagacatggcaaggggtatgagaaagtgcatcattcaaagccaagaagagtatttggtagaggagcctattggggaaacaagtcatcggccacgagatgcagcatatgaccaccatccttctactagagaacgccaaaaaagaaagcgacaatgataatgagttcaatgacctaggtcaaactaatgaagcaataagtcgtggtccgaacaaacttaaacatgtttggaaccttcaaaaaggaaaacgaattgtagttaactgtaacgagctcgaccaacctattggagaggaggcaggagtcttaggaaaattccttgacatggttgctaggaatggctgcttatgtagcttaagcttcaaagattggagattactgataggaaagaaggacaggaacaatgaacaaaaaaacaagcaagatgtactaaagcaagtaaagatgagattcttataccctgcccgcatggaaaagtggatacttcgaactattggtgagagatggagacaacacaagtccaatctaaaatccttacattttgatgcgcataggagcaaggaaaataatctaaaaaatgttccaaaaggcgtcttagatgatcaatgggtcactcttgtgaataattggtttacaacaaaatcacaggatatcagtgaggcaaataggataaactgcgcaaaaaggaaggcgacccatacatcaggaacaaagagttttgctcggaacagggaagatatgagggaacaagatccagaaaagaaatacccccatagggctgtattgtatatcaatacacacaagagtaacatcacaaagaacacaaacccacatgtggttgcattgaaggaactattagtgcaacaaccaagtttagctgacactagtcatggaaaggttgcatggaaaggaaatgcgcttagccaaattttaggagaagagaagcctggccatatccatggtcttggccttgttccgaatctagatcaagtgtttggtggatcaacttcaaggcatctaaaacatcttaatttaacctctttggatgcaacatcaagtgaagatgtagtatctcttcgacttcaagtggaaaaacttatagatcgtgtccagaagcaagatgatactatactaaatttgcaaaataccttggaactgcaaaaaagtcaccatgaatgtctagatgaacctttgtcggcatcaaaagatgttcagccgactacgaatcaaaaagttaatcttcttgatgaactgaatagcacaatggcggatgaaatcgaacatgatgggtacgaggagctacaggcccagtgcaaaaaatctaaaattcaagaaaagagcaagccaccaatgccacgaggaggactccaaggtggtagagtttcttcatcgttaaatgtaaaaaatagcagtaatgcagccaaggtgatgaaccaggacattgctcgaaattcctctaatcatgaaccatacaagaacaagggatctctagaaaattatttgccaagtactaaagacgatcaatctacatcagaacgaaaacgagtatatggtcaatttcaaagtgaggaattttggacacttgacgaaaatcacgaatcaagccactacgaggagacacattacaacctagtaggatttcaacaggactgaaggtacaataattggttgtgatccaaagcaaaaagttggaggagatccattgggcaaagaattttggaaggtttgtctcggtcttgtacttgtgcgtgatgaaccactaatacggccctacaacaatttcgtggttctaggagacatagacaacaaccctatagcatggccttcaagctgtatagaaaaggcagctctttaatgtcaaccattgaacaacaacagatctacatgagggctatgactttgattcttctttaaattgtcgttattagtgatgagagtgatgagtctactgagtccggtttatgagtcaacctttgtttgtttcatactatcatagaaaaatgtcaattcacacattgtgtaatgaattaagttgttgatgatattttataatggtactactatttttaatatagtctgattccagattatttgccatgtgtgagccaataatagtttggaaattgataatgtgccatgcacatgatttgcatatttgttttgatccaaataaaaaataattataaatagt

SEQ ID NO: 202085 - DNA, 994 bp, Zea Mays
cccaaaaagcccacgaactttcgacggttccttcctccctccctcccgctccaaccaaggcctacatatacgcccgcccaccacgcccccgaaaccatcaacccaacacggcgtccccgtcccgagtcaccaccgacccaagcaaaaccgcacgcaccctgccagcggccccccaactcccaacccaacccctactccagctagctcgcggcggcggccagcggccatggccttccggctgagcaacaacctgatcggggtcctaaacttcgtcaccttcctgctctccgtcccgatcctgggcgcgggcatctggctgggccaccgcgccgacggcaccgagtgcgagcgctacctctcggcgcccgtcatcgcgctgggggccttcctcctcgccgtctccctggcgggcctcgtcggcgcctgctgccgcgtcacctggctgctctgggcctacctcctcgccatgttcgtcctcatcctcgtcctcttctgcttcaccgtcttcgccttcgtcgtcaccaacaggggcgccggcgaggccgtctccggccgcggatacaaggagtaccgcctcggggactactccaactggctgcagaagcgcgtcgagaacaccaggaactgggaccggatcaggagctgcctccaggactccaaggtctgcaagagcctgcaggacaagaacgagaccgtcgcccagttcatgagttccagcctctcccccatcgagtggttgagaattgtgatgtgacattggaagccaatccgccagtgccaaacgcaaaaaacttatctagggcgacagtgatggttacttgcacgattgtgcatacacatatagggtttatttggaatacataatagactcgattaattaaaattttattttttctaataaattttacttatcgattagtctctattttatttgctagaccatagttagctaatacttaggctttttatttggcttccaagacttgacctaaat

SEQ ID NO: 202086 - DNA, 1311 bp, Zea Mays
caaagttttgttttttctgatctctgagaaaatggcgagaagtgcgagagctaggaggcatgtggctcatcggatcaagtccacccatcccattccttcataccgatggaaggcaaaggcaatgaaaaaatccaaccgaaagcaagtgttgccagccttgcaaaagatggactgggaagatgccaattgctctgtgtgcatggaatacccacataatgctgtgctcatcctctgttcatcccacgataagggctgccgtccttacatgtgtggaactagctaccgccactcgaattgcttggatcagttcaagaaagcatacaccaagggggcattgcttgaggaagttcctgcaaatagcgttggcactgatctggattcagcgccattggatgcagaaaaaatcgagtccattgaccttgcatgtccattgtgtcgtggcaaggtgaaagggtggacagtggtagaaccagctcgaagctacctcaatggaaaaaagagaacatgcatgcaagacggttgctcattcgtggggacctacaaggagctccgcaagcatgtcaagttggaacaccctcttgcaaagccaagggaagttgatcctgtccttgagcaaaaatggagattgctcgagattgaaagagagcgacaagatgcactcagtacgatcactgcaacaatgggcagagctgttgttcttggtgattatgtgctagacttggaggatggagtggatttggaggatgttgacagcgatgttgatgttgatgatgaccgtgggacagataacactcgaaggatgctactttttattatgcggcaagttgctcaacatcatcaacaccaaaggcttcataatgtgaccggtgcatctgagaatgtcgaggacaactatgtggtgaacaatggtgccaatggaaccactccatactcctatcccttggaaggggaggacgagaatgatatggttttggccggaggtagaagcaccgatgtgctcagaccagagaggaggcgccgtcgacgccgcaggaaccgtggaaggttgtttttaggtgctaattgagaggacaggtggtctggtggggtttaaccacctgaggagtacatacacaaatgcttccctggtgcctgacattcatcaatttcggcctcaatttacttgttcatgatcacgtaccaagtagttatgttaacatcagctcattgcttgccatcaatgtatgttctctcacatttctttgctgaaaaggaaaatgccgcatccatatcttgcggtttgtgtagagcttctatttctgtcaattgctc

SEQ ID NO: 202087 - DNA, 1716 bp, Zea Mays
atatgctttgtatctatttattgggttcctgttggtagggcaacgcttggacgcattataaatgttattggtgagcctattgatgagaagggagatataacaacaaaccacttcctccctattcatcgtgaagccccagccttcgtcgagcaagctacagagcagcaaattcttgttactggaatcaaggtcgtggatcttcttgcaccttaccaaagaggtggtaaaattggtctctttggtggtgcaggggtgggaaaaactgtccttatcatggagctgattaacaacgttgccaaggcccatggtggtttctctgtctttgctggtgttggagaacgtactcgtgagggtaatgacttgtacagagaaatgattgagagtggtgtcattaagcttgacgataagcagagtgagagcaagtgcgctcttgtctacggtcaaatgaacgagccacctggtgcccgtgctcgtgttgggctgactggtttgactgttgctgagcatttccgtgatgctgaaggacaggatgtgcttctcttcatcgacaacattttccgtttcactcaggcaaactctgaggtgtctgctctgcttgggcgtattccatctgctgtgggataccaacccactcttgctactgatcttggaggactgcaggagcggattactaccacaaagaagggttctattacatctgttcaagctatttatgtgcctgctgatgacttgacagatcctgctcctgctaccacctttgcccatcttgatgctactactgtgttgtcacgtcagatttctgagcttggtatttaccctgccgtggatcctctggattccacatccagaatgttgtccccccatgttctgggtgaggaccactacaacactgctcgtggtgttcagaaggttcttcagaattacaagaatctccaagatattattgccattctgggaatggatgagctcagtgaagatgacaagttgacagttgctcgtgctaggaagattcagcggttccttagccagcctttccatgttgctgaagttttcacgggtgcacctggaaagtacgttgagctgaaggagagtgttaaaagtttccagggcgttttggatggcaagtatgatgaccttccagaacagtcattctacatggttggaggaatagaggaggtcatcgccaaggcagagaagattgccaaggaatctgcatcataaggggtctacaggcaacgcaaaattaacttttggaggtcaacgtgatgtgctttttatcctgtgttatcaagaacttacgtgcaggagaccctgccctgcagaaggatgtttctctcctccgtccccccaccccacaccccaaaataaggattcgcagtgacattttaatttggtttactgccctttgaggaagaattaccttttttgatgaggtgaaactataaccttgttaattctcaaacaaatactcttctcccatgttcatagccattatgaggtcgcctgttcaatttatttttctgagccgaatagccgcttctacagttcgttatctgtgtatagtctagttttgtgatccgtttccaactccagtgtttggttggtaggacgataacggatgaaatgtgtttggttctttgggacaaaggggcagaatgtgtttggttcatggggtgataagcccccaccaaggccttgtgcggttgtacagaaatt

SEQ ID NO: 202088 - DNA, 1717 bp, Zea Mays
ctcgaaataacttgttacaactgctgttcctgttggtagggcaacgcttggacgcattataaatgttattggtgagcctattgatgagaagggagatataacaacaaaccacttcctccctattcatcgtgaagccccagccttcgtcgagcaagctacagagcagcaaattcttgttactggaatcaaggtcgtggatcttcttgcaccttaccaaagaggtggtaaaattggtctctttggtggtgcaggggtgggaaaaactgtccttatcatggagctgattaacaacgttgccaaggcccatggtggtttctctgtctttgctggtgttggagaacgtactcgtgagggtaatgacttgtacagagaaatgattgagagtggtgtcattaagcttgacgataagcagagtgagagcaagtgcgctcttgtctacggtcaaatgaacgagccacctggtgcccgtgctcgtgttgggctgactggtttgactgttgctgagcatttccgtgatgctgaaggacaggatgtgcttctcttcatcgacaacattttccgtttcactcaggcaaactctgaggtgtctgctctgcttgggcgtattccatctgctgtgggataccaacccactcttgctactgatcttggaggactgcaggagcggattactaccacaaagaagggttctattacatctgttcaagctatttatgtgcctgctgatgacttgacagatcctgctcctgctaccacctttgcccatcttgatgctactactgtgttgtcacgtcagatttctgagcttggtatttaccctgccgtggatcctctggattccacatccagaatgttgtccccccatgttctgggtgaggaccactacaacactgctcgtggtgttcagaaggttcttcagaattacaagaatctccaagatattattgccattctgggaatggatgagctcagtgaagatgacaagttgacagttgctcgtgctaggaagattcagcggttccttagccagcctttccatgttgctgaagttttcacgggtgcacctggaaagtacgttgagctgaaggagagtgttaaaagtttccagggcgttttggatggcaagtatgatgaccttccagaacagtcattctacatggttggaggaatagaggaggtcatcgccaaggcagagaagattgccaaggaatctgcatcataaggggtctacaggcaacgcaaaattaacttttggaggtcaacgtgatgtgctttttatcctgtgttatcaagaacttacgtgcaggagaccctgccctgcagaaggatgtttctctcctccgtccccccaccccacaccccaaaataaggattcgcagtgacattttaatttggtttactgccctttgaggaagaattaccttttttgatgaggtgaaactataaccttgttaattctcaaacaaatactcttctcccatgttcatagccattatgaggtcgcctgttcaatttatttttctgagccgaatagccgcttctacagttcgttatctgtgtatagtctagttttgtgatccgtttccaactccagtgtttggttggtaggacgataacggatgaaatgtgtttggttctttgggacaaaggggcagaatgtgtttggttcatggggtgataagcccccaccaaggccttgtgcggttgtacagaaatt

SEQ ID NO: 202089 - DNA, 442 bp, Zea Mays
ccaccacatctaatccttcctcccagctggtccctgcggccgctgctgctcgtccctacaagtatatcaaccaacagtgctcacatcatgcactctgtggtgtcttggtagtagttgttggggtagctagctagagagagcagcaggccagcacagcagcatggggaggtcgccgtgctgcgagaaggcgcacacgaacaagggcgcctggaccaaggaggaggaccagcggctcgtcgcctacatcaaggcccacggcgaaggctgctggaggtcgctccccaaggccgcgggcctgctgcgctgcggcaagagctgccgcctccggtggatcaactacctgcgccccgacctcaagcgcggcaacttcacccaggaggaggacgacgtcatcatcaagctccaccaggtcctcggaaacaatggatggaatgaaacgcac

SEQ ID NO: 202090 - DNA, 1549 bp, Zea Mays
ctccgcctccctcgtcgactgcctttggcaaccaccccgccccaaaatctctttctccgctgcgccgcaaacccaccgcttccaccatcgccacccgtcaccccttgctcccatagtccccataccatgcccgacctccacccgccggagcaccaagtcgccggtcaccgcgcctccgccagcaagctgggcccactcatcgacgactctggcctcttctacaagccgctccaggccggcgaccgtggggagcacgaggtcgccttctatgaggcgttctccgcccacgccgccgtcccggcccgcatccgagacaccttcttcccccggttccacggcacgcgactcctccccaccgaggcgcagcccggggagccgcatccgcacctcgtcctcgacgacctcctcgcggggtttgaggcgccctgcgtcgcagacatcaagatcggtgccatcacgtgaccacgagcgttctgctcggattccgcgtctccggcgtccgagtcgtcggccccgagggcgccgtgtggcggacggagcgcccggaggtgaaggctatggacattgtcggcgtccgccgcgtgctccggcgctacgtgtcatccgcttgccgacgaggggatggactgcgcgctcgcggcggcggtgtacggaggaaaaggtggagtcttgtcacagctgcgcgagctcaaggcgtggttcgaggggcagactctgttccacttctactcggcgtcgattcttctgggctatgatgctgctgcagtcgcagcaggcggaggtgggggtggggtaacagtgaagctggtggactttgcccatgtggccgagggtgatggggtgattgaccacaacttcctgggcgggctctgctagctgatcaagtttgtttctgacattgttccagagactcctcagacgcagcctttgggtccttcttaagagaggatcctggcattttcgatttgataacaaaggaagcactttcagctgcaaaaaaagaaagcagcagtgaggatgaagatgacagtagtgaggaaagttcggatgatgagccaacaaaagttgaagaaaagaaggctccaaaagtatcagaaaatattggatctgaggatgaatcttctgaagacaagagtgataaagacagtgaagagcctcaggcatgccatcatttaacacctcagctcgcgagctgaactggctcgctctggctcgctcttttattgagccagaaaaaactctgctcgagcttgttctaagcacagtttctggatcggaggagcatccccgcctaggtctctgcagccatggttcgcggatcgctcggcaagcttgcatcgcgcgccctctccgtcgccgggagatggcagcaccagcagctccgccgcctcaacatccacgagtaccagggcgcggagttgatgggtaaatacgggatcaacgtgcccaggggcgcggcggctgggtccgtacatgaggtcaaggacgccttgaagaacatgttccccagcgagaaagaggtgatgacgccatagcttcctcatcgtct

SEQ ID NO: 202091 - DNA, 2031 bp, Zea Mays
ctccgcctccctcgtcgactgcctttggcaaccaccccgccccaaaatctctttctccgctgcgccgcaaacccaccgcttccaccatcgccacccgtcaccccttgctcccatagtccccataccatgcccgacctccacccgccggagcaccaagtcgccggtcaccgcgcctccgccagcaagctgggcccactcatcgacgactctggcctcttctacaagccgctccaggccggcgaccgtggggagcacgaggtcgccttctatgaggcgttctccgcccacgccgccgtcccggcccgcatccgagacaccttcttcccccggttccacggcacgcgactcctccccaccgaggcgcagcccggggagccgcatccgcacctcgtcctcgacgacctcctcgcggggtttgaggcgccctgcgtcgcagacatcaagatcggtgccatcacgtgaccacgagcgttctgctcggattccgcgtctccggcgtccgagtcgtcggccccgagggcgccgtgtggcggacggagcgcccggaggtgaaggctatggacattgtcggcgtccgccgcgtgctccggcgctacgtgtcatccgcttgccgacgaggggatggactgcgcgctcgcggcggcggtgtacggaggaaaaggtggagtcttgtcacagctgcgcgagctcaaggcgtggttcgaggggcagactctgttccacttctactcggcgtcgattcttctgggctatgatgctgctgcagtcgcagcaggcggaggtgggggtggggtaacagtgaagctggtggactttgcccatgtggccgagggtgatggggtgattgaccacaacttcctgggcgggctctgctagctgatcaagtttgtttctgacattgttccagagactcctcagacgcagcctttgggtccttcttaagagaggatcctggcattttcgatttgataacaaaggaagcactttcagctgcaaaaaaagaaagcagcagtgaggatgaagatgacagtagtgaggaaagttcggatgatgagccaacaaaagttgaagaaaagaaggctccaaaagtatcagaaaatattggatctgaggatgaatcttctgaagacaagagtgataaagacagtgaagagcctcaggcatgccatcatttaacacctcaggcatgccatcatttttgtttcacaactcaaaagtaaaggaaaacagtaaaagtatgcaggcagtatgagggacacacatagtttactgaaactcccttacacagacacatacacaccgtgttcactgaaacattcagatttcactaaactgcaacttctccaaacaaacactatctgcggctcggtcaagtaacgagcctcggctcggctcgctcctctagcgagcctaaaaagtcggctcggttcggcgagccaacgagcctgaccataagcatgaaatcagtctccaaaatataatataaagtctcaaaaataatttaagtgacacgtcttaaattagtaaaataaatatatatcatataatatagaaaataagttaattttgtacagtaatctaaaaaatataaattaatcatctatttagtacctataatatatgttaattaaaatttatataacaaaaatgttgttgtttgagccagctcgcgagctgaactggctcgctctggctcgctcttttattgagccagaaaaaactctgctcgagcttgttctaagcacagtttctggatcggaggagcatccccgcctaggtctctgcagccatggttcgcggatcgctcggcaagcttgcatcgcgcgccctctccgtcgccgggagatggcagcaccagcagctccgccgcctcaacatccacgagtaccagggcgcggagttgatgggtaaatacgggatcaacgtgcccaggggcgcggcggctgggtccgtacatgaggtcaaggacgccttgaagaacatgttccccagcgagaaagaggtgatgacgccatagcttcctcatcgtct

SEQ ID NO: 202092 - DNA, 1525 bp, Zea Mays
ctccgcctccctcgtcgactgcctttggcaaccaccccgccccaaaatctctttctccgctgcgccgcaaacccaccgcttccaccatcgccacccgtcaccccttgctcccatagtccccataccatgcccgacctccacccgccggagcaccaagtcgccggtcaccgcgcctccgccagcaagctgggcccactcatcgacgactctggcctcttctacaagccgctccaggccggcgaccgtggggagcacgaggtcgccttctatgaggcgttctccgcccacgccgccgtcccggcccgcatccgagacaccttcttcccccggttccacggcacgcgactcctccccaccgaggcgcagcccggggagccgcatccgcacctcgtcctcgacgacctcctcgcggggtttgaggcgccctgcgtcgcagacatcaagatcggtgccatcacgtgaccacgagcgttctgctcggattccgcgtctccggcgtccgagtcgtcggccccgagggcgccgtgtggcggacggagcgcccggaggtgaaggctatggacattgtcggcgtccgccgcgtgctccggcgctacgtgtcatccgcttgccgacgaggggatggactgcgcgctcgcggcggcggtgtacggaggaaaaggtggagtcttgtcacagctgcgcgagctcaaggcgtggttcgaggggcagactctgttccacttctactcggcgtcgattcttctgggctatgatgctgctgcagtcgcagcaggcggaggtgggggtggggtaacagtgaagctggtggactttgcccatgtggccgagggtgatggggtgattgaccacaacttcctgggcgggctctgctagctgatcaagtttgtttctgacattgttccagagactcctcagacgcagcctttgggtccttcttaagagaggatcctggcattttcgatttgataacaaaggaagcactttcagctgcaaaaaaagaaagcagcagtgaggatgaagatgacagtagtgaggaaagttcggatgatgagccaacaaaagttgaagaaaagaaggctccaaaagtatcagaaaatattggatctgaggatgaatcttctgaagacaagagtgataaagacagtgaagagcctcagctcgcgagctgaactggctcgctctggctcgctcttttattgagccagaaaaaactctgctcgagcttgttctaagcacagtttctggatcggaggagcatccccgcctaggtctctgcagccatggttcgcggatcgctcggcaagcttgcatcgcgcgccctctccgtcgccgggagatggcagcaccagcagctccgccgcctcaacatccacgagtaccagggcgcggagttgatgggtaaatacgggatcaacgtgcccaggggcgcggcggctgggtccgtacatgaggtcaaggacgccttgaagaacatgttccccagcgagaaagaggtgatgacgccatagcttcctcatcgtct

SEQ ID NO: 202093 - DNA, 338 bp, Zea Mays
attttccttgcaatttctgaactacttacatttgatgtgaatgcagatttgattctagttaactattcaagaagtaggagatgatgagctacttccaaaccactacttgcaagcctcaaagcagggtcgttgtgaacaaacctataccaggtcttgggagcacaagtcagcatccgttatattcacatgctctcagattccacaggctgcaacagaaggtgtacccaaggctacttctcgttgctgctagccacaaaaggcttactcctgtatgtgtcttaagtggaaagggaaatgctggcactgctgatgataattgtcatactccttgaggtgga

SEQ ID NO: 202094 - DNA, 3843 bp, Zea Mays
ctcccccacacaccagtactagcgctctagcgattttccccacttggtttccctcctctttctgcctgtgcttctgtctctcttctgcccttctccaagaaaccggataatccatccatccatccgcgatccgccccgcccacccaaggaaggaaccgatcccgactcgccgcgggctcgaccccccgcgccgacggctacgcgtggcaggcacagcaagcgcgccgcttcgccgacgtccacgccgcctgctctggctgtgggcggaatgcgtcagctgtagaggacggccacggcacctttcagccttttcctcgtctgctcctcctctcggccgggctcagtcggtcggtaacgactcctgctgtgctgtgctccagcctccggcagcgcctgctccgcaaacagttgcctctcctgtgctcacccaagggtcaaggggccagtccatccatccgcccgtccaggaaggaaatcgttcatccccagaagacaaagcgatccacttggataccggataagccctgtcctggcggcgtcgcatcccctctcgattcccgcgacaggtcgcagtgaatgacgacggaaatcagcggcccttgaagcgaagactcccccccgccttcgctgctctccaccgatccgacgaaggcagcgctcgggcactgctgctggttccccttcgcccaattcggtctgacgcagtttctgcggcggcggagtagtagggggcagacggtgattttctgattctctcaccttggctctgtggactaaatgtgacctgcaagagctaaaagtggcagcgattgactttcagatgagtccatttgtgctggccgtggtgagcgttgcattcctcagcttgcggtttttgcaggctcatggaagcgggttgcttctgagctgtggctcgaacagcactgtcgatgctgatgggcggagatggatcggcgacataacccctgaggggaattttaccttgagcagccctgggcttgcggcgtcactggtcgggaagagcagttctgatgagatattcggaccgctttacagctctgcccgtttcttcaacgcggcaacttggtataccattagtgtgctgcctggaagttactgtgtcaggttgcatttcttcccttcgaccttcgggaatttgagcgcgaacaactccgtgtttgatgtcacggcaaatgatttcaagcttgtttcaaaattcaatgcgtcagaggagattgcttggagagcctctgtgagcaattcggtcaccagcgcagttgtcaaggagtactttcttgtagtcggtgctcgtggcctgagtattgagtttgatccaagacctgggtcgtttgcctttgtgaatgcgattgaggtcatgctgaccccagataatttgttcaatgatacagtgagcaaagttggcagtccagtcacgcagcttcctcttggtttgaggggcagaggtgttgagacaatgtaccggctgaacattggaggtcctgcacttaaatcgcccagtgatcagtatctccacaggccatggtacactgacgaagcgttcatgttttctacaaatgctgctcagactgtgtctaatgcttcaagcatagtgtatgtatcaagcaacgagtcgacaattgcgccgattgatgtttacgagaccgcaagaatcatgggcaataacatggttgtggacaagcggttcaacgtgtcgtggcggttctatgtccacccaaactttgattacttagtacgccttcatttctgtgagcttgtctatgacaagcccagccagaggatcttcaagatctacatcaataacaagactgctgctgagagctacgatgtgtatgctagggctgggggaattaacaaagcatatcatgaggacttctttgacaactcgacgcagcaggcagacacactttggcttcagctaggccctgactccatggccagcgcttcaggtgctgatgcacttctgaatggtgtggagatattcaagctcagcaaggattccgacctttcttatgtgcttggtcatattgacacgggcaaccagatggattcttcaaaaggggggaagattaaaggcctatgggaagaacttggtattggctcagcatcttttgttgcggttacaagcgttgttctgttctcatggtgttacataagaaagaaacgaaaagctgtcaacaaggaggcccctcccggctggcatccgttggttctccacgaggctatgaaaagcaccacagacgcccgtgcagccagtaaatcgtcatcggctcggaatgcctctcccattggtcataggatgggaagaaggttcggcattgcggagattagggctgccacgaagaacttcgatgagtccttagtcattggaacgggagggtttggaaaggtctacaaaggtgagattgacgagggcgctacagtggccatcaagcgcgctaacacattgtgtggccagggcctgaaagaattcgagacggagatcgagatgctttccaagcttcggcaccggcaccttgtggcgatgatcggctactgcgaagagcagaaggagatgattctggtctacgaatacatggcgaaggggacactgagaagccatctgtacgggagcagccttcctcctctgacatggaagcaacggatcgacgcgtgcattggcgcggcccgcggcctccactacctccacacaggagcggaccgaggcataatccaccgggacgtgaagaccaccaacattctgctggacgacagtttcgtcgccaagatagccgacttcgggctgtcaagaaccggaccaacgctggaccaaacccatgtcagcaccgcggtgaggggaagcttcggatacctagaccccgagtacttccggaggcagcagctgacgcagaagtccgacgtgtactcgttcggagtggtgctcttcgaagttgcctgcgcgaggccagtgatagaccccacgttgcccaaggaccagatcaacctggcggagtgggcgatgaggtggcagcggcagcggtcgctggaggcgatcctggaccctcgcctggacggcgacttctcgcccgagtccctgaagaagttcggcgagatcgcggagaaatgcctcgccgacgacggcaggagcaggccgtccatgggcgaggtcctgtggcacctcgagtacgtgctgcagctccacgaagcttacaggcggaatgtggtggagtccgaatcgttcgggagcggcgagctggggttcgctgatataccatccttcttcagccttccccacgtcatcagggagggggaggaggaacaccaccaccgatcgaagaagccgtcaagtatcagagaggaactagacacacgtgagaacttctgacttcagcaaaacaaaaacaaaaaaaaatcttgctttgtagccatgatcatgatgtaaagttgtgttacatcgttctctttaggttttttttttttttgcttcttattccattggggcgttctcttgcttgacaagagtagcataatagatttttttttcttctccttgtgtgtgtagattaccaaccccctcatccctcccaacagaaagaagacacagaggtgtcaagagtttccttgacaactgtatgatgcaatctgcatggccaccgttcatgcaccgctgcctgtgtgacctgtataaatggcactgatataattactgcctttgaggttttgatgtagcaaacgggattgagaaaggtggtatggtagtgcagctcgagaatgtgtggtactctgttttgcgcgcgctacggaacggtatgtgtgcgagacatctgttttgcagtgaagtgaacc

SEQ ID NO: 202095 - DNA, 1917 bp, Zea Mays
gacaagaaaggaaacctcgtgcccccttttttattcaagattctggtggtgtggtcaaatgttgttcattagagggaaaaattggaagattggaagtcaatggatgcaaggctatgcaatctcttaagaagattttgcatccaaccagttcaagtaagatcaacacgatatcaacaagtgatatctccgcatcaactgatactctcctggattcctgtattgcccctcatcttttgaaagcttctgtcattagtaatgctgagattcttcaacctggtgctatactatccatgagcgaagtttgggagaaagatgtagccccaaatgctaatgaggcgtcatcagaagttgcaaatatattgccattgatgtggatgcaccctgggaaacatgatatactcctttctgactgtagggaactgtgggactccaggcaaaccataaatcctcctgtgtcagatgaggttctctgtaaggagaagcactctgaacgtataaagtttttctgcttggattcaggaaatgatcaagagcaaacaacacaagagaaggacaacttcattcgatcctgcccggttattcttttgaaacatgccagagaaggaataccttctctagggtggtccatcattctacctttgagttgggtgaaacctttctggctctttctagtatctcatggtgcccatgcaattggcttaagagagagacggtggattgcagcaaagttgagaatgccatgctttccttatgattatccagatagcaaagcgtatgcatcatacatgtccaaagaagctgctggttttgataaagtagttgagcgccgccctgttgccaagagaccaccaagagttcctgtgcctcctttatggcactgtatcatgacttgttttcgtaaagattatgatggcatattgggtgttcttgaagtagacgacttggtgcgggctaacatggtattacctaaaaactcttctgcacattgcgaatctggagacgcagaaccatcgcaagcaaatgttgcatccttgcaacttcatgtgccaagaaccacccaaatgttgagacagtatgtggaagaatttgataggaagtatctgagctcatcatctgacatgaaagtggattctgatgaacccaacctagcttctgataacactgtcggcatgacacggttcgcgagtgaattatgccttacaagggttctgatccgagctttcaaggaaggttcttttgaagagggtgcagttgtttgtgccccattacctgcagaactttcagcttggaaaatcagatcaaaggaagaagaggaagaatgcgtagaaaaatgggagctccagcttcctcagtcccatgttagttcctatttctcgtggtttgatcccagcacgagcagcctccagttgcctacggatggcgtcgcacgggaggcgttcaggtggccgataggctttgtcaccagtggtttcatccatggaagtaacgggcaagacgcagtggcggtcgcattctgcgaggcaaagcttctggcagcgttgaggcgacagcaatggacgcatggaaacttgcagagccgggaggtgtgcgtccttgtcaggaacgcgagatcggctgcctaccgacgagcgctggccaccaccgtcctggagcatcaggaatcagacctagcgtttctgtagtctagtcgggaacctgttgacgttgattttttctctctctctcccttttggagttccatccatcctccactcatccgttgatgaacctaagtaatttactggtgattacagtttatttgtgcgatgcaaaatcattaaacagaagaagtaaatgcatctatctcatttgacggatttcaatgatttactgttacatagtatgaataataataaagcagctcgtccggaaaaatga

SEQ ID NO: 202096 - DNA, 3637 bp, Zea Mays
caggtgcaagatccatccttcagctggagaggatgagataaagcgtgctatatcaggcctaaaagaaaattggacaagtgtctttgttgtgcgcatgtcatatcagttagcccttaagtttttccagcttgctaaggatgagggaatgatgggccagggctatgtctggattacggcatatggtctgacagatatcttcaatgtagttggttatcctgcacttgaagtgatggaaggtgtagttgggatcgagccttatgttccagaaactgtgaaactaaacaaatttagacggagatggcgtgagaaatataggtcggaaaatcctggtacatcaattaatgagcctataacgtctggtctatatgcatatgatacagtatgggcaatagcattagcagcagagcaggccggatttgttaattcagactttgtgctgtccgaaacaaacaacgggtccactgatttcgacaaaataagtgcttataaggctgctgaaaaatttcgtggtgcattcttgaaggttaatttcacaggcattagtgggcaatttgtcattcaggatatgcagttccagttagtatcaacaacttacaaaattatcaatatagctggtcgggagaagagagcagtcggtgtttggactccaggattgaacatgtccaaaattctagaaaagaaagatggtatcagtactatcatatggccaggaggcagtgaaaacacacctagaggatggcttttgccagcaaataaagaactcaaagtaggagtacctgtgaaacctgggtttggcagttttataagatctgaagatggtatcccgaaggggttctgcattgatgtatttgaggaagttatcagtaatctgacttacaaagttcccaagcactatgtggagtttggaaatggagaaggagaaagtaatgggacttatgatgaactcgtgtacaaagtttatcttaaggaatttgatgcggtagtaggtgacataacaattttggccaaccgttctctatatgtggactacactcttccttatactgagtcaggggtacgcatgctggttccagttcgggaccagagacagaagactgcatggacattcctagaacctttaacagctgatctatggtttggaactggatccttcgttgtcttcacaggttttatagtttggtttatcgagcacagaacgaatcaggaattcagaggaccgccagccagtcaaattggatcagtcttctacttctccttctcaacacttgtatttgctcatagggagaggattgtgaacaatttatcaagaattgcagtagttgtttggctttttgtggttctaatattgcagcagagttataccgcaagcttaagctcaattctcacggtagaacagctccaaccaacagtcaccaatttagatgaagttatcagacgaggggattatgttggctacctcaatgattctttcatgcctaaccttttgaaaaggttgaaaattaacgaaacaaaaatgagggccttcagctctcctgaggagtacaatgacgccctatcaaccggaaaagttgccgtcattgttgatgaaataccatacctcaaagtgtttcttgcgaagtattgccacaactacactatggttgggccaacttacaaatttgatggatttggttacgcgttccctcgaggctctccacttacacctgaaatttcaaggggaatactggaactagcatcaaatggcagaatggatgaactggagaaaaagttgtatggtgatacatcgtgcccagacaaagatgactcccaaacttctagcagccttacgttgcatagctttcttgggttgtttatcatcactggggcatcttctttactggctttaattttgcatgtcattataaccctttatgatcatcggagcaattggatcaatggcagtggtcagatatcatggcgtgaattgcttgctattctcgtcaagatctttcatgagcgtgatagcgctaatactccagatgaagaggtgcctggaatggaagatatagatcctgctacagccgagagtccatggagcatgtctaatcacgtcatcgagaacgttgattcagacactgataccggaagcacaccagaaggagaaggaactccaggcagggaagttgcgaatcagggtcctggtccactatcatttgcatacatgcattctgagggggcaatggagtaacatagcattctttcatctcgcgcttccagcaccaagatagaactctttggtcatgtcgcgtactgtacagtgaaattgatttagatgtatcgcctgcctctagtttcatgtttaatacaagtgtgtgttaacatgtaccgctggctgttgtcatgactagttaactaggaaatttaacatagtaatatctttgttgaaagaggtgcctgtgcatcttatagaagtgtggctctgatatagacagtaactattttttcttatctcctgacacttcaccagattcctaaaaacaagccattgctaagaccttgtttgtttccctccagaattatataatccagcttatagaattatataaacacctaatgacctgcttacagattatcataatctaggtatctaaattatataatccacctaataatttgtgttgtttatttatttctttaacttatttaagcagaattatttaatctgtagggtaaacaaacaggaccttaagtaccattgtactatggcgtttttaagtgagcattatttgaacataaaattagactgtccagtttattagtcacctcttgagcaattgatcaaatactgtcaccgagtcaaagctttgttgtcttgttgatggtcactataagatgcatacaatatacaaacgcctaaccaaagaaaagataccattttcatacacaagtgtcaccaggctttactcagtgcaaaactgtataatactaaggtcatgtttgtttatcttctaaattatataatctagattaaataagctgagagacaaacaaacaacacagcttattaggtggatgatataatttaggcacctagattatattatgataatctataagcaactcattatgtgcttatatagttatatatgactccataagctagattatataatcctatagtgtcattgtaaggaaaatggaccccgggtcatttggcttaatagattttggtgtttgatgattaacacaacatgtgaactaatgtattttccaaatgtttgtgtgttgtagttcacaggatgcgaagtggattggattgaggctctgaggatgcaacacctcaaagaagacattataagactcatagaagacattacaaagtaatattgaagacactttatatatgctaagagtccaacacatcaagaagtagaagtgagatacaaagctacaaaacaaaagtgaagttgataaagttgagaggaagggatgactgaattagaagtgtttcacaacatcaaatctattcaaactgacatggcttcaactctgagatgtagacaattttataagctttccaaaaagtccaagatcatcaaaatcggagttcggagctaaaagttatgcccacaatacgaagtcggaattgctgaaaaac

SEQ ID NO: 202097 - DNA, 1806 bp, Zea Mays
ggaccaagaaacagttttacacaaagacccctcctcctcggtgctctcgagtctcgagagtcgagactcaggggacctgatttcctcgtccggccatggcgaccggtggcaagtccgctgcccctcagccacctcccgccgcgtcctcctcctccgaacgcgcgctggagtcagtccacttctcttccggaaaccctcgcatcgaggagacccgcggcgtcgtcgtcctccaccccgacccgcccgcggccgcctcctggtctcatgtcccgttggggaggaagccgcgggtgtgcgtgctcgccgtgcccaaccacatgacctacgccgacttctgccgtttctgcggcgccttcgtccctcacacactcgagatgcgcatcgtcagaactgatggagcagaggaccagtacagcgttcttataaattttgacactcagagctccacagacagcttctataagcacttcaacgggaagcagttctcttcgctggaggggggtgtctgccatgtccgttttgtggaagaggtgcactacactgaattgattgagcatgcacatacctcagttacaaacttggctgagcaacctacatgcccaaacgacttgaccaagatcctggaggtattctcacaacaatctgcaaccattctttccactgctcgtgcatatcaaaatggacagactcctcatgcccggtctgtagatattgtcagcagcaaccagagaaatccatgtgttctatttgcggaacttcggagaatctttggatatgtctaatctgtggccatgttggctgtggaaggtacaagggtggacatgctattgaacactggaaggaaactcaacattgttattcacttgagttagagacacaaaaagtgtgggactatgctggggacaactatgtacatcggcttattcagtcaaaaacagatggaaagctagttgagtacaatttccatggtgatcacacagcagagagcacgtgttcactatgcagtggtgatgccgcaatggatgaagctctactgaacagtaaatttgaagctattgttgaagagtacaatgatctcgtcacatttcaacttgaaaagcaaagaaattactatgagtcacttctactagaagtcaaggaggaaactgagaaagaaatttctgctgctactgagaaagccatgagcacaaaactccaaaagttggaagtaaagtttgacaagtgtatggaagagaaaaaatttcttgatgaagtaaatggcaatcttgtcaagaatcaggagatgtggattgaaactatacgaaaagcacaagcaagggagcaagctgcgctcagattaaaagatgagaagatcgaaaaacttcaggaagagctaagaggtttgatagcccatttcgactgccaaagtgacactgcacaagcttcaaatgcgatctcgagcgatataccagggggcatgattcttccggtagcatcagaatcgtcctcgagcggcggcgttgttggtggcactggaaacggggagcaaaattgagtaaactgcgccctgtataaagcacgtttggatcttagggacctaggtatattcttgcttccaaacccccaccgttgtatgttcagttagggtaatacacacttgttagctgtcacctcactgcccctcgattctactgtcactagccgctagtagtgtggtactagggatgaaaacgatttcatttttttttggtttttcgaaattcgtttccgatttttcgaccgtatttaatggttatggtatttttcgaaaacataattggttatcgg

SEQ ID NO: 202098 - DNA, 1725 bp, Zea Mays
ggaccaagaaacagttttacacaaagacccctcctcctcggtgctctcgagtctcgagagtcgagactcaggggacctgatttcctcgtccggccatggcgaccggtggcaagtccgctgcccctcagccacctcccgccgcgtcctcctcctccgaacgcgcgctggagtcagtccacttctcttccggaaaccctcgcatcgaggagacccgcggcgtcgtcgtcctccaccccgacccgcccgcggccgcctcctggtctcatgtcccgttggggaggaagccgcgggtgtgcgtgctcgccgtgcccaaccacatgacctacgccgacttctgccgtttctgcggcgccttcgtccctcacacactcgagatgcgcatcgtcagaactgatggagcagaggaccagtacagcgttcttataaattttgacactcagagctccacagacagcttctataagcacttcaacgggaagcagttctcttcgctggaggggggtgtctgccatgtccgttttgtggaagaggtgcactacactgaattgattgagcatgcacatacctcagttacaaacttggctgagcaacctacatgcccagtatgtcttgaacgacttgaccaagatcctggaggtattctcacaacaatctgcaaccattctttccactgctcgtgcatatcaaaatggacagactcctcatgcccggtctgtagatattgtcagcagcaaccagagaaatccatgtgttctatttgcggaacttcggagaatctttggatatgtctaatctgtggccatgttggctgtggaaggtacaagggtggacatgctattgaacactggaaggaaactcaacattgttattcacttgagttagagacacaaaaagtgtgggactatgctggggacaactatgtacatcggcttattcagtcaaaaacagatggaaagctagttgagtacaatttccatggtgatcacacagcagagagcacgtgttcactatgcagtggtgatgccgcaatggatgaagctctactgaacagtaaatttgaagctgtaatgtgtttaagtaaagaatttgttatgctaactgttaccaaatagcatcctgacaaacttctataccttgcattacaccattaacttacccctattttagattgttgaagagtacaatgatctcgtcacatttcaacttgaaaagcaaagaaattactatgagtcacttctactagaagtcaaggaggaaactgagaaagaaatttctgctgctactgagaaagccatgagcacaaaactccaaaagttggaagtaaagtttgacaagtgtatggaagagaaaaaatttcttgatgaagtaaatggcaatcttgtcaagaatcaggagatgtggattgaaactatacgaaaagcacaagcaagggagcaagctgcgctcagattaaaagatgagaagatcgaaaaacttcaggaagagaggtttgatagcccatttcgactgccaaagtgacactgcacaagcttcaaatgcgatctcgagcgatataccagggggcatgattcttccggtagcatcagaatcgtcctcgagcggcggcgttgttggtggcactggaaacggggagcaaaattgagtaaactgcgccctgtataaagcacgtttggatcttagggacctagtctttggctgttgagttcattaagggggtgtttgttt

SEQ ID NO: 202099 - DNA, 1640 bp, Zea Mays
ggaccaagaaacagttttacacaaagacccctcctcctcggtgctctcgagtctcgagagtcgagactcaggggacctgatttcctcgtccggccatggcgaccggtggcaagtccgctgcccctcagccacctcccgccgcgtcctcctcctccgaacgcgcgctggagtcagtccacttctcttccggaaaccctcgcatcgaggagacccgcggcgtcgtcgtcctccaccccgacccgcccgcggccgcctcctggtctcatgtcccgttggggaggaagccgcgggtgtgcgtgctcgccgtgcccaaccacatgacctacgccgacttctgccgtttctgcggcgccttcgtccctcacacactcgagatgcgcatcgtcagaactgatggagcagaggaccagtacagcgttcttataaattttgacactcagagctccacagacagcttctataagcacttcaacgggaagcagttctcttcgctggaggggggtgtctgccatgtccgttttgtggaagaggtgcactacactgaattgattgagcatgcacatacctcagttacaaacttggctgagcaacctacatgcccagtatgtcttgaacgacttgaccaagatcctggaggtattctcacaacaatctgcaaccattctttccactgctcgtgcatatcaaaatggacagactcctcatgcccggtctgtagatattgtcagcagcaaccagagaaatccatgtgttctatttgcggaacttcggagaatctttggatatgtctaatctgtggccatgttggctgtggaaggtacaagggtggacatgctattgaacactggaaggaaactcaacattgttattcacttgagttagagacacaaaaagtgtgggactatgctggggacaactatgtacatcggcttattcagtcaaaaacagatggaaagctagttgagtacaatttccatggtgatcacacagcagagagcacgtgttcactatgcagtggtgatgccgcaatggatgaagctctactgaacagtaaatttgaagctgtaatgtgtttaaattgttgaagagtacaatgatctcgtcacatttcaacttgaaaagcaaagaaattactatgagtcacttctactagaagtcaaggaggaaactgagaaagaaatttctgctgctactgagaaagccatgagcacaaaactccaaaagttggaagtaaagtttgacaagtgtatggaagagaaaaaatttcttgatgaagtaaatggcaatcttgtcaagaatcaggagatgtggattgaaactatacgaaaagcacaagcaagggagcaagctgcgctcagattaaaagatgagaagatcgaaaaacttcaggaagagctaagaggtttgatagcccatttcgactgccaaagtgacactgcacaagcttcaaatgcgatctcgagcgatataccagggggcatgattcttccggtagcatcagaatcgtcctcgagcggcggcgttgttggtggcactggaaacggggagcaaaattgagtaaactgcgccctgtataaagcacgtttggatcttagggacctagtctttggctgttgagttcattaagggggtgtttgttt

SEQ ID NO: 202100 - DNA, 1627 bp, Zea Mays
ggaccaagaaacagttttacacaaagacccctcctcctcggtgctctcgagtctcgagagtcgagactcaggggacctgatttcctcgtccggccatggcgaccggtggcaagtccgctgcccctcagccacctcccgccgcgtcctcctcctccgaacgcgcgctggagtcagtccacttctcttccggaaaccctcgcatcgaggagacccgcggcgtcgtcgtcctccaccccgacccgcccgcggccgcctcctggtctcatgtcccgttggggaggaagccgcgggtgtgcgtgctcgccgtgcccaaccacatgacctacgccgacttctgccgtttctgcggcgccttcgtccctcacacactcgagatgcgcatcgtcagaactgatggagcagaggaccagtacagcgttcttataaattttgacactcagagctccacagacagcttctataagcacttcaacgggaagcagttctcttcgctggaggggggtgtctgccatgtccgttttgtggaagaggtgcactacactgaattgattgagcatgcacatacctcagttacaaacttggctgagcaacctacatgcccagtatgtcttgaacgacttgaccaagatcctggaggtattctcacaacaatctgcaaccattctttccactgctcgtgcatatcaaaatggacagactcctcatgcccggtctgtagatattgtcagcagcaaccagagaaatccatgtgttctatttgcggaacttcggagaatctttggatatgtctaatctgtggccatgttggctgtggaaggtacaagggtggacatgctattgaacactggaaggaaactcaacattgttattcacttgagttagagacacaaaaagtgtgggactatgctggggacaactatgtacatcggcttattcagtcaaaaacagatggaaagctagttgagtacaatttccatggtgatcacacagcagagagcacgtgttcactatgcagtggtgatgccgcaatggatgaagctctactgaacagtaaatttgaagctattgttgaagagtacaatgatctcgtcacatttcaacttgaaaagcaaagaaattactatgagtcacttctactagaagtcaaggaggaaactgagaaagaaatttctgctgctactgagaaagccatgagcacaaaactccaaaagttggaagtaaagtttgacaagtgtatggaagagaaaaaatttcttgatgaagtaaatggcaatcttgtcaagaatcaggagatgtggattgaaactatacgaaaagcacaagcaagggagcaagctgcgctcagattaaaagatgagaagatcgaaaaacttcaggaagagctaagaggtttgatagcccatttcgactgccaaagtgacactgcacaagcttcaaatgcgatctcgagcgatataccagggggcatgattcttccggtagcatcagaatcgtcctcgagcggcggcgttgttggtggcactggaaacggggagcaaaattgagtaaactgcgccctgtataaagcacgtttggatcttagggacctagtctttggctgttgagttcattaagggggtgtttgttt

SEQ ID NO: 202101 - DNA, 2688 bp, Zea Mays
tggcaaactaatttgacaagacatattttttagagtcaggagaccactctcacctagccaagtaaattttgattagtacattgtgtacttagggttttcctctgctacaggtagaaggtggatactaaaactaactgatgttgtgtggaacctccttgtaggtgcgaagaagatcgttctgctatgatggtagtagttttattcgtatacctctaaatatttgtataaattttcaaaactgtttcactcttgttgctatcaaaatgatctttttgcaattttttatttttgagatcagttttgtaatagttctgattttgtgtccttatgatgtataaagtggttaagaatattgtaatatttattcatttctttatgatccttataagaacatggatttttgagttcttctaccgaatttaaccttgtcgtttctatgtttaatgtaaaatagttgataagtatatttgagattagttaaattggacaattctatcgccccatttcgtctaaggtttaattttgaacaattttaaatgataatggaaattttgtatttcgattcaagtacggtctaccattgtaccttgtgtccttgtatggttctcattgttttgcaattaaaaacatttggtcaaagatgcggttattgggctaggctccctcggccagtccacgggactagttgggctgaattctcgtatgaggttggttagttttgctcttaatctacgtggattatgtgggattgagtggttttaaattccaaacaaatcaatttactagtttgaaaactctatttttctaaaatatttctatttttctaaaaaaaattaattaattttatttgataaaatagaaatttctttaaaaaaatgaaatttctaaactagtccttataattttttaatctcatccaatggtacagtagtggccgatgtggccggattctcgtcagatcggacttggttcctacaactttttcggcctggccaaccgtgctgtgcaggagagcagtgcagaggagagcgaggaggcgtgcgattgcttgctttgcttccgagtttcgacacgcgtgcccaggaatcggtcggattccccaatcccgtcaccatggccgcgccgccttctccttcgtcccgctccccgtcgagcgaggttgccgtccacagattcagcggcaccttggatgtatcatcatcgccctcaaggaccgagttgttgagcatggtgaagaagcactcacatttgattgggtggacgattattggtgccgaggatgatgcatcagatgtgggaatggatgataaattctggcatgaaatgcttgacctattctttgtgcgtggcaggcaatcaaaaagaagtgaagaggatgaccttgtcttctttgttaataacatgaaattgcatggttatggtttcaatgataacatggaagatccacctcccttttttgtacggagatgggctcccacgcttgaaaagatcagtattaatacagtggaggttgattgggagcgttcattctatttgaatttaatcgctcacacgtcgtacactgtcactgttgcaatatttggaattgaagatcttcgcaaccgtgcagtgaaaaacaaacagttgcctccagtttataaggttacaaaaaatgtatacgcgtctcctagccgtgtaaattttcatcttgacagaagaaaggctgtagaaacactaccggcatatcccaacatctttttctctgtagacgacttcgatgatacttttgatgctgtggttttgtcagatcctgaacactgctattgtgtgattcttaacgcacatgatggggcagcatttcccgaagaaagtgagtgcaagaatcctgtttcaaatacacagcctggaatgagctgtggtagtgcccaagaaaaaccaccaaagagaactctcttctcagcttatgtgggctaccaaaatgttcgtggggcttatgatgatcaaaatttgggagtttcctctcacttgggcatgaccacaataagctcgacagactttttatgaagggcccagaaggacgtggagaggtggaagtagctgtctctggcattgcagatcagagcagtgggaagtcgaagaaagatccaggagatagctttcgagtccttgttcacagagcagcttctgctgcatcaaagctagtgaagcatgcttatgagtcttcatctgctaacagacaaatggatgatgagcttgtccctctgaagtgttgcttgatgtctgtgtctcttccttgggactacattgcccacgatcttttgcacaaggacacacctccgatggatctgtgatagcaattccagatcttcactgccagtcatgggaggaatccaggcgtgatgagatgcaaggtaaagaatcgaagtggaattaggatgtagatgcttttagaccaaatatgtgaagtgtagggtttgtaatgtgcttgtgcacaggttaccatacaatgtaaatacaatgtacatatcatgcatgccttacagaacttgattgtatttcttgaacttgctgttttttccttagcaaataattcttcaatttgcattgatccatagtaggtgctatattcttatctgggatgtagtttgctctgcataggtataactgatacgtaactatgactatttaactagagtggttttgagtgac

SEQ ID NO: 202102 - DNA, 1802 bp, Zea Mays
taaaacaatttattacgacgctgaggcattttctcgtgaaagaaaacgcactcccgactcccgagtgatcccgagtcccgacggccgacgcgcgcttaagggcttacggctaatccggcggctacgaaaggaaacatctaccccgttcaaccgttccatttcttctcccgttccgttcaccccccccgcgagctctatctttcgtggcgcagctcggcagctgggcggccgccccccgccggcgccacgccctaagctacgccaggttcccagttcttcgtccgtccttttgctaggtcttcgttggacacttaaacggcgacgagcaccgccagacgcgctggtgcctggatccggcgggagtgcttcaggttttgacggttcgtctctctcgttgtttccggcggggttatgaaggcggtgggatacagcccctacgacagcagcgggactgatgacgatctccctccagcacaaaatagaggactaagagggcgatctttcagtgggaatgtcgtagcatctgctggggcatttccttacatgagggcaaataatgatctggagagtgaaatacatcgggttgagcaagatgcatatactggtattcttagggcatttaaagtgcaatctgatgcaatatcctgggaaaaggagagcttgattactgaactcaggaaagaactgagggtttctgatgaggagcatagggagctattaaataaagtcaatgaagatgggaccatccgtcgaatgagggagttaagacaggcaggtggatccccaagtggtttgcatcatggcaacatggttttatatggtgcagaacctgggtccactaccaagaggcaaagggcatctcattcgattcctttgcaatcagcaggcctccagtcccctatgatgccctcccactcagtttcatctgcaaaatggggtcctttgcaagcaagaggcacgaaagcgaggacgcccattcctttggcgttaccatctgtggatccaagttcactaataaaccataaagtttatacaaggtggccagaagacaacaacttctatgaggccaccataacacgatataaccctgtgacgggtgagcatggacttgtctatgacatgggcacacaagccgagagttgggaatcagttagactttgtgatatggcacctgaagatataagatggggatttgatggacacctttcaaatcgtgatgtctggagcccttctggccctatgttgatgaggcacatgaccaacaatggtgctatggcaggttcaatcaagggaagagggaggttatcaataaatgagactataaaggactatgctccacctgaaaatggcaccaataggaattttgatcatgtcgacataccaaataccggaagtgttgttatggaggtgaagagggtattgttcaacccaaatatgcctgaaatcgagaaggcaaggaaacttttgaaagatcaggagcagtcattacttgatgcaattgccagacttgatgaagcatctgatagcgataatgggttctcaactacagcaagctcaaaagacagtgtccatgcatggtgcacagaatgagttgctgccacttaaggtcttcatgcagatgctcttctatgagaaagcttgtgtggtgacactatatagtccatcacagcaggctgcagcaagatttggaacctaaatgagagtccccaaactattatagtccatcacaaggtcaagaacctctctagtgagccggacaacaatagtttggagatcaaaatgagagtgacatattagtttat

SEQ ID NO: 202103 - DNA, 1565 bp, Zea Mays
taaaacaatttattacgacgctgaggcattttctcgtgaaagaaaacgcactcccgactcccgagtgatcccgagtcccgacggccgacgcgcgcttaagggcttacggctaatccggcggctacgaaaggaaacatctaccccgttcaaccgttccatttcttctcccgttccgttcaccccccccgcgagctctatctttcgtggcgcagctcggcagctgggcggccgccccccgccggcgccacgccctaagctacgccaggttcccagttcttcgtccgtccttttgctaggtcttcgttggacacttaaacggcgacgagcaccgccagacgcgctggtgcctggatccggcgggagtgcttcaggttttgacggttcgtctctctcgttgtttccggcggggttatgaaggcggtgggatacagcccctacgacagcagcgggactgatgacgatctccctccagcacaaaatagaggactaagagggcgatctttcagtgggaatgtcgtagcatctgctggggcatttccttacatgagggcaaataatgatctggagagtgaaatacatcgggttgagcaagatgcatatactggtattcttagggcatttaaagtgcaatctgatgcaatatcctgggaaaaggagagcttgattactgaactcaggaaagaactgagggtttctgatgaggagcatagggagctattaaataaagtcaatgaagatgggaccatccgtcgaatgagggagttaagacaggcaggtggatccccaagtggtttgcatcatggcaacatggttttatatggtgcagaacctgggtccactaccaagaggcaaagggcatctcattcgattcctttgcaatcagcaggcctccagtcccctatgatgccctcccactcagtttcatctgcaaaatggggtcctttgcaagcaagaggcacgaaagcgaggacgcccattcctttggcgttaccatctgtggatccaagttcactaataaaccataaagtttatacaaggtggccagaagacaacaacttctatgaggccaccataacacgatataaccctgtgacgggtgagcatggacttgtctatgacatgggcacacaagccgagagttgggaatcagttagactttgtgatatggcacctgaagatataagatggggatttgatggacacctttcaaatcgtgatgtctggagcccttctggccctatgttgatgaggcacatgaccaacaatggtgctatggcaggttcaatcaagggaagagggaggttatcaataaatgagactataaaggactatgctccacctgaaaatggcaccaataggaattttgatcatgtcgacataccaaataccggaagtgttgttatggaggtgaagagggtattgttcaacccaaatatgcctgaaatcgagaaggcaaggaaacttttgaaagatcaggagcagtcattacttgatgcaattgccagacttgatgaagcatctgatagcgataatgaattcttggatgaatcatttgagagactgta

SEQ ID NO: 202104 - DNA, 2345 bp, Zea Mays
cacctcttcggcgcctgctccggtccccgcacctccatcgcccccgcccggccccccagtgtcggtcttgttttgaactaggatggttaatggctttgccgctttgggcaacgcgcgggcagtgggcactgctgtaccaggctataccagcatcagcgaagagccggcgttcttgagacttgagagaggagagcgaccgacgacctcgaagcttggcctgcgcggtggtgacgatggatgtcaaatgccggcgtctggaggggaaggtggccgtcgtgacggcgtccacgcaggggatcggcctagccatcgccgagcgcctcggcctggagggcgccgccgccgtcgtctcctcccgcaagcagaacgtggacgaggccgtggaggggctcaaggccaaggggatcaccgtggtgggcgccgtctgccacgtatccgacgcacagcaacgcaagaacatcatcgagacggccgtcaaggtcgcaactgtggaagggggttccagtctttcagggcttgttttgttgtcctcgtatttgctcagtccaaaatagttcattttcagatggattacattgcattgtcagcttcctcttgttgctaagcgatcccatcaggcctccctgcggttaacgttttgctgaaccttggggaagagggggattcctgtcaactctgtttttttcctagtaggatctggctctgttgctcacccgacattacctgcctgccctcgttagtcgccacctcgtattttctctagctgcttgcttaatactagcttcgtgctaaaatagtactctctccgttattttttatttgtcatgtttaatataaaaatgaactaacgagcgacaaatatttaattacggaggtagtagtcgttttagaaaatttgtagattcgtacaattcttgatgcatgtgttttgtatgtgtgtctagatttatcatctatttgaatataaacataaagaataatagctaaaccgactaatattttggaatgtagtacattttttggtgcaacggcattgtccaaactagctaagaaacatgggttcatggttggtaaaacacagacattgatagatacatctttaaactgggtaacagtgagatctatttgtgcataagtgcaaataatgccgctactagagctagaattgtctttttcttaaattatgaactaagacaacctcatttatacaaatatctactggaatttcacttatgagtataacgctcttttatcagtttagtcaatagcttttccaagcttacgaacagtagcgtagtatatatttatcatgtgaaagtgaaagtctcgagccaaaaggccgtgtcatttctcttttatctgttcatcttgtgacattgaggttgatggctagctcaacttgcatttacttcattagtacttcgacacacagtggtcataccttgtcttattcgcttgcatctaaagtgtacctttttcgtatctcaaatcacttgttttgttgatcatgttgtacattattttagtttatgttcatgtcttatatattgaaaagcatttgaggatgtgaggattcgtgtagcagtaatcaactgattatatggttgcagaactttgggcacattgatattcttgtctccaacgctgctgcaaatcctactgtgaatgtcatacttgaaatgaaagaggttgttctcgataagttgtgggatattaacgtcaaggcttctattcttcttattcaggatgctgctccccacctacgggcagggtcatctgtgatccttatttcttcaattgctggttacaatcctgagcaaggattgacaatgtatggtgttacaaagaccgctctctttggtctcacaaaggctcttgctggtgagatgggacccgatattcgtgttaattgtatagcccctggttttgttccgacacggtttgctagtttcttcatagacaacgagaccattaggaaaaagcttaacgagaggactatgcttaagagattgggttccgtggaagatatggcggcagctgccgcattcctggcatctgacgatgcatcattcatcacagctgaaaccattgttgttgctggaggggtgccgtcgagattgtaaatttggctcaagtttgtaccgattgttactaggttggtgacatagcaactatactgtaataatccactctgaaaatgtgggtcgtgctaagttggccaccgttagatctaataattttttaggtgtcttggtatttgtttgagataataatctactcagattatctgtcacttagttcaaattttattggattatataatataaatagataatcccaaacaa

SEQ ID NO: 202105 - DNA, 4809 bp, Zea Mays
ttttttttctgtagcttaagagtgcagtagatagatataagtcgtttagtgggccggaaacctcactgtggcggtgtggcccgccttttgttctacattccagtcccctccggcacactgtgttcttccgttcctctcgcgtggttgtctggtgccgacgactgggccgccgccgcctccgtcctacgctcggtgctgaggccttcgggacttccgccggcgacgcgcaccctccgggttgaaatccctcgagaacaatggggcgcacggttctttcagatgaagaagatgagttcgaggctgacgaggaggatccgcggccctcgcggaggaacagggacgatatggacgagcgcgatgacgacgacgacgacgatgaggacggtcaggatgaatttgagaaggatgacttcatagtggacgacgaggaagaagaagtggaaggagaggaagaggaacagaagagtgatgacgagaggcgaagaaagaaaaagaaaaagaagagggaatcagacgacttcatgctcgatgaggatgactatatgttgctccaggataataacatcactggcatcagtcgcccaaagcctggaaacaagtttaagcgcttgaaaaaggctggaagggaatctgaaatggatgagcactctggtttttcagatggtgatggaacaggcaaaaaacgcagtggcaaggagagggtcgagtacagtttatttggtgatcatcaagatgctgcaccctttgaggaggacttcgaggacgatcagcaggcaggggagggtgaggaggaagttggtgatgatgaagatgaaatggcagatttcattgtggaggaagatgaaattgatgggaatggacaagttgtaaggaggaagaaatttaaaaagaaggtaccacgacaagcagcaggtgtatcatcgtctgctctgcaagaggcccaagacatatttggcgatgttgatgagctgttggcactaagaaaacaagagcttgagagggaggcccttaactctggtgagttaaggggggcgaggcttgaagatgagtttgaaccatttattcttgcagagaagtatatgacatcaaaagatgagcaaataaaagaaaatgatgttcctgagaggatgcagttgtctgaagagttgactgggtatcctccaacggataaaacaacgattgaggaagagagttcatggatacacagccacttaaccggtgatggatttctgtccttttttggcaatgagcacataaacaaggatattgaccagaaggacattgtcaatgtcgtgaccatgttgcatgccaacaaatttgaaattccgttcatcgcaatgtacagaaaagagagctgtccaaccctattaagttttgattctgatgaggataacgaggatattgaatctgatgcacgcaaattgaggtggcataagctgctctgggcggttcaggccttagacagaaagtggctacttcttcagaagcgcaaggttgctttacagttgtattatgagaaaagatttgatgatgagaaacggaggatagatgatgtcacaaggcaagaacttaatagccaactttataattccatcattgaagcactgaaggatgctaaatctgagaaagaggtggaggatgttgatgcaaaattcaatttacattttcctcctggtgaagtagaagaagaaggtcaatttaaacgtcctaaaaggaagtccttgtacagtatctgtcacaaggcagggctatgggaggttgccaaccaatttgggcgcagtgctgagcaattaggccaccatctgactttaactaagatacctgaagcaggcgagcttgagagcggtagacattcacctgaagaggtcgctgcaaatttcacatgtgcaatgtttgaaacatcacaagatgttcttcgtggcgcgagacacatggttatttttaaaattgtagaggatcatccaagggatgttaacgcccaaatggaaaattttagcattgtctatggtgacgagtctgtgcctcgcttgtatgagaactctcgaatatcttcggatcaacttcctggccaatcaggtattgtgaagcgggctgtggcgcttggacgttaccttcagaacccgttggcaatgattgcaacactgtgtggacctgggaaagagatactttcttggaaactgcatgctctggaacagtttctaactcctgatgagaagtatgaaattgttgagcaagtaatggttgatgcaacaaatcagataggttttgatgtcaatcttgctgctagccatgagtggcatttttctactctacaatttattgctggtttgggtccgcgtaaagcttcagctttgcagaaagatctggtaagagagggatccatttttagtcgcaaagagcttgtaaaacctctaggcaggaaagtattcatgaatgcttctggatttttacgtgttcggcggagtggtgcagctgcagccagcgctcaactcattgatctgcttgaggatacaaggatccatcctgaatcatatgtattggcaaaaaatttagctaaggatgtctatgttgaggatgcacaacatgaaataaatgaaatggacgatgaggagcaagagatggctattgagcatgttagagaaaggccaagcatgcttcgaagtcttaaaattgtggaatatataaagagcattacagaagaataccgtaaactggaaactctgcgtgatataaagtttgagctgctgtgcggtttttctgactggaggattccctataccgagccaagcccagacgaggaattctggttgctttctggtgaaactgatgataccatatctgagggaaggattgttcaagttactgttcgcaatatacaagataacaaaataatttgcacctttgattcgggtttgaaagccatagttatggcagacaactattctgatgagggttttgatccagaatcatcacagttacgtgaaggcgatgtattaactggcaaaattcgaaacgtgaataaaaatagattcatggtttacctaacatgcaaggctagcgagatgaggagaaggccattctctagaggtgagcaggatccttactatcatgaacaagacatgacctcacaaactgtagaagataaggctcggaaacaaaaggaacttgcaaagaagcatttcaagccccgaatgattgttcatccccactttcagaacctgacagctgaagaagccatgcagtttttatcagataaagagcatggtgagaagttaatccgaccaagctccaggggaccatcatttttgacacttaccctgaaaatttttgatggcgtttacgcacataaggagatagctgaaagtggaaaggatcataaagatatcacaagtttgcttcgcctggggaaaacactaacaattgataatgaaacttttgaagacctcgatgaggttattgaccgatatgtggacccattggtaggacacctgaagagcatgctgtcgtaccgtaaattcagaaagggtttaaaaaatgaggttgatgagatgttaagggcagagaaagcagagaaccctatgagaatagtatatagttttggcatatctcacgaacatcctggcacctttatattgtcatatattaggagtacaaacccacatcacgagtacattgggttgtacccgaagggcttcaggttcaggaagagagacttcgacaacattgaccgtcttgtgtcgtatttccagaagaatattgacaaaccaccacctgatgctggaccatcaatgcggaatgttgctgcaatggtacctatgaaaaactcagcttggggttctggtggtggtggggatgcaaatggtggttggaggggagatggtagtaatgatagggatcgacctttctctggcagatcaggagggaggtttgattcaaggaatagctctggtggtcgtggacgaggacgggggcgtggccggggtaactttggcgatgacgataatgctggtggaggttggagtggaggaggtggtggtggcaacagtggaaggtggaccgataacattggcacaggtggcagtggtggttcttcctggggtggtggtggcggtggtgatgacagcaaccgtggcggtggaggagggggttggggatcagctggtggtggtgctgacaatgctggtggcggaaatggagcctggggagcagctgctggtggctctgatgacccagggttgggtagcgccaaaaaggtcgtcccagcacaggatggtggaaccggctgggggtcagaaggtggcggcggcggtggtggcggaggctggtaactgggctgtgccctgcgttgtagtccagacaacagctactagatgaaaacagtttcctcgttttaactcctgtcctatcgtactgtggacgggagaaatctggcacttataagtcttgcagctgctgcacgtctgcagatgttgcattgcggacagcgttatgtttcagtgcatgtacataaatccaatatgtctggtcacactttcctgctacgaatttgatcctggtgcttcattgttgaggctatccgcaattaggccagtactctaccccatgttggtaagcttttgtgttgaaagtgtaacacgctacattttgtttccctagcttcacataaccccgcttacaagtgtttcaatgttttggcgacccatatgcctttcggtttgtgggcgtttcgatagagtcaggtctggatttcacaactagcatttatgacagcaaaagccggaaggtggcattcgattgtacttgagtcct

SEQ ID NO: 202106 - DNA, 5305 bp, Zea Mays
ttttttttctgtagcttaagagtgcagtagatagatataagtcgtttagtgggccggaaacctcactgtggcggtgtggcccgccttttgttctacattccagtcccctccggcacactgtgttcttccgttcctctcgcgtggttgtctggtgccgacgactgggccgccgccgcctccgtcctacgctcggtgctgaggccttcgggacttccgccggcgacgcgcaccctccgggttgaaatccctcgagaacaatggggcgcacggttctttcagatgaagaagaagatgagttcgaggctgacgaggaggatccgcggccctcgcggaggaacagggacgatatggacgagcgcgatgacgacgacgacgacgatgaggacggtcaggatgaatttgagaaggatgacttcatagtggacgacgaggaagaagaagtggaaggagaggaagaggaacagaagagtgatgacgagaggcgaagaaagaaaaagaaaaagaagagggaatcagacgacttcatgctcgatgaggatgactatatgttgctccaggataataacatcactggcatcagtcgcccaaagcctggaaacaagtttaagcgcttgaaaaaggctggaagggaatctgaaatggatgagcactctggtttttcagatggtgatggaacaggcaaaaaacgcagtggcaaggagagggtcgagtacagtttatttggtgatcatcaagatgctgcaccctttgaggaggacttcgaggacgatcagcaggcaggggagggtgaggaggaagttggtgatgatgaagatgaaatggcagatttcattgtggaggaagatgaaattgatgggaatggacaagttgtaaggaggaagaaatttaaaaagaaggtaccacgacaagcagcaggtgtatcatcgtctgctctgcaagaggcccaagacatatttggcgatgttgatgagctgttggcactaagaaaacaagagcttgagagggaggcccttaactctggtgagttaaggggggcgaggcttgaagatgagtttgaaccatttattcttgcagagaagtatatgacatcaaaagatgagcaaataaaagaaaatgatgttcctgagaggatgcagttgtctgaagagttgactgggtatcctccaacggataaaacaacgattgaggaagagagttcatggatacacagccacttaaccggtgatggatttctgtccttttttggcaatgagcacataaacaaggatattgaccagaaggacattgtcaatgtcgtgaccatgttgcatgccaacaaatttgaaattccgttcatcgcaatgtacagaaaagagagctgtccaaccctattaagttttgattctgatgaggataacgaggatattgaatctgatgcacgcaaattgaggtggcataagctgctctgggcggttcaggccttagacagaaagtggctacttcttcagaagcgcaaggttgctttacagttgtattatgagaaaagatttgatgatgagaaacggaggatagatgatgtcacaaggcaagaacttaatagccaactttataattccatcattgaagcactgaaggatgctaaatctgagaaagaggtggaggatgttgatgcaaaattcaatttacattttcctcctggtgaagtagaagaagaaggtcaatttaaacgtcctaaaaggaagtccttgtacagtatctgtcacaaggcagggctatgggaggttgccaaccaatttgggcgcagtgctgagcaattaggccaccatctgactttaactaagatacctgaagcaggcgagcttgagagcggtagacattcacctgaagaggtcgctgcaaatttcacatgtgcaatgtttgaaacatcacaagatgttcttcgtggcgcgagacacatggcagcagttgagataggttgtgagccaattgtgagaaagcatgtacgaggcatcttcatgaataaagcagttgtgtcaacaagtcccacatctgagggaaatacaatcatagatccatatcaccaactatcgggtgttaagtggctgagagagaaaccacttagcaagtttgttgatgcacagtggctccttattcagaaagcagaggaagaaaagctcctcaaggttaccgtaaaattgccagaagatgcaaagaaaaaactcatgtctgaagcacgtgagaattatctaagtgattgtgtcagcaagtctgcacaattgtgggatgagcaacggaagatgatactggatgatgctttcttcaattttctccttccatcaatggaaaaggaagctcgatcactgttgatgacaaaagccaaacattggctccatatggaatatgggaaacagttgtggaacaaggttactgttgctccttggaagaagaaagatgcggacaagaaggatgctgacattgatttggatgatgaatcagagttgagagttatggcttgctgctggggtcctgggaagccagcaaccacctttgtaatgttagactcctcaggagagttggttgatgttctgtatgcaggctctatcagtaacaggtctcaaggtgtcgctgagcagcagcggaagaagaacgaccagcagcgagtcttaaagtttatgactgatcatcaaccacatgttgtgtgtgtaggagcatcgaactacaattgcagacaactgaaggatgatctttatgaggttatttttaaaattgtagaggatcatccaagggatgttaacgcccaaatggaaaattttagcattgtctatggtgacgagtctgtgcctcgcttgtatgagaactctcgaatatcttcggatcaacttcctggccaatcaggtattgtgaagcgggctgtggcgcttggacgttaccttcagaacccgttggcaatgattgcaacactgtgtggacctgggaaagagatactttcttggaaactgcatgctctggaacagtttctaactcctgatgagaagtatgaaattgttgagcaagtaatggttgatgcaacaaatcagataggttttgatgtcaatcttgctgctagccatgagtggcatttttctactctacaatttattgctggtttgggtccgcgtaaagcttcagctttgcagaaagatctggtaagagagggatccatttttagtcgcaaagagcttgtaaaacctctaggcaggaaagtattcatgaatgcttctggatttttacgtgttcggcggagtggtgcagctgcagccagcgctcaactcattgatctgcttgaggatacaaggatccatcctgaatcatatgtattggcaaaaaatttagctaaggatgtctatgttgaggatgcacaacatgaaataaatgaaatggacgatgaggagcaagagatggctattgagcatgttagagaaaggccaagcatgcttcgaagtcttaaaattgtggaatatataaagagcattacagaagaataccgtaaactggaaactctgcgtgatataaagtttgagctgctgtgcggtttttctgactggaggattccctataccgagccaagcccagacgaggaattctggttgctttctggtgaaactgatgataccatatctgagggaaggattgttcaagttactgttcgcaatatacaagataacaaaataatttgcacctttgattcgggtttgaaagccatagttatggcagacaactattctgatgagggttttgatccagaatcatcacagttacgtgaaggcgatgtattaactggcaaaattcgaaacgtgaataaaaatagattcatggtttacctaacatgcaaggctagcgagatgaggagaaggccattctctagaggtgagcaggatccttactatcatgaacaagacatgacctcacaaactgtagaagataaggctcggaaacaaaaggaacttgcaaagaagcatttcaagccccgaatgattgttcatccccactttcagaacctgacagctgaagaagccatgcagtttttatcagataaagagcatggtgagaagttaatccgaccaagctccaggggaccatcatttttgacacttaccctgaaaatttttgatggcgtttacgcacataaggagatagctgaaagtggaaaggatcataaagatatcacaagtttgcttcgcctggggaaaacactaacaattgataatgaaacttttgaagacctcgatgaggttattgaccgatatgtggacccattggtaggacacctgaagagcatgctgtcgtaccgtaaattcagaaagggtttaaaaaatgaggttgatgagatgttaagggcagagaaagcagagaaccctatgagaatagtatatagttttggcatatctcacgaacatcctggcacctttatattgtcatatattaggagtacaaacccacatcacgagtacattgggttgtacccgaagggcttcaggttcaggaagagagacttcgacaacattgaccgtcttgtgtcgtatttccagaagaatattgacaaaccaccacctgatgctggaccatcaatgcggaatgttgctgcaatggtacctatgaaaaactcagcttggggttctggtggtggtggggatgcaaatggtggttggaggggagatggtagtaatgatagggatcgacctttctctggcagatcaggagggaggtttgattcaaggaatagctctggtggtcgtcccagcacaggatggtggaaccggctgggggtcagaaggtggcggcggcggtggtggcggaggctggtaactgggctgtgccctgcgttgtagtccagacaacagctactagatgaaaacagtttcctcgttttaactcctgtcctatcgtactgtggacgggagaaatctggcacttataagtcttgcagctgctgcacgtctgcagatgttgcattgcggacagcgttatgtttcagtgcatgtacataaatccaatatgtctggtcacactttcctgctacgaatttgatcctggtgcttcattgttgaggctatccgcaattaggccagtactctaccccatgttggtaagcttttgtgttgaaagtgtaacacgctacattttgtttccctagcttcacataaccccgcttacaagtgtttcaatgttttggcgacccatatgcctttcggtttgtgggcgtttcgatagagtcaggtctggatttcacaactagcatttatgacagcaaaagccggaaggtggcattcgattgtacttgagtcct

SEQ ID NO: 202107 - DNA, 5288 bp, Zea Mays
ttttttttctgtagcttaagagtgcagtagatagatataagtcgtttagtgggccggaaacctcactgtggcggtgtggcccgccttttgttctacattccagtcccctccggcacactgtgttcttccgttcctctcgcgtggttgtctggtgccgacgactgggccgccgccgcctccgtcctacgctcggtgctgaggccttcgggacttccgccggcgacgcgcaccctccgggttgaaatccctcgagaacaatggggcgcacggttctttcagatgaagaagatgagttcgaggctgacgaggaggatccgcggccctcgcggaggaacagggacgatatggacgagcgcgatgacgacgacgacgacgatgaggacggtcaggatgaatttgagaaggatgacttcatagtggacgacgaggaagaagaagtggaaggagaggaagaggaacagaagagtgatgacgagaggcgaagaaagaaaaagaaaaagaagagggaatcagacgacttcatgctcgatgaggatgactatatgttgctccaggataataacatcactggcatcagtcgcccaaagcctggaaacaagtttaagcgcttgaaaaaggctggaagggaatctgaaatggatgagcactctggtttttcagatggtgatggaacaggcaaaaaacgcagtggcaaggagagggtcgagtacagtttatttggtgatcatcaagatgctgcaccctttgaggaggacttcgaggacgatcagcaggcaggggagggtgaggaggaagttggtgatgatgaagatgaaatggcagatttcattgtggaggaagatgaaattgatgggaatggacaagttgtaaggaggaagaaatttaaaaagaaggtaccacgacaagcagcaggtgtatcatcgtctgctctgcaagaggcccaagacatatttggcgatgttgatgagctgttggcactaagaaaacaagagcttgagagggaggcccttaactctggtgagttaaggggggcgaggcttgaagatgagtttgaaccatttattcttgcagagaagtatatgacatcaaaagatgagcaaataaaagaaaatgatgttcctgagaggatgcagttgtctgaagagttgactgggtatcctccaacggataaaacaacgattgaggaagagagttcatggatacacagccacttaaccggtgatggatttctgtccttttttggcaatgagcacataaacaaggatattgaccagaaggacattgtcaatgtcgtgaccatgttgcatgccaacaaatttgaaattccgttcatcgcaatgtacagaaaagagagctgtccaaccctattaagttttgattctgatgaggataacgaggatattgaatctgatgcacgcaaattgaggtggcataagctgctctgggcggttcaggccttagacagaaagtggctacttcttcagaagcgcaaggttgctttacagttgtattatgagaaaagatttgatgatgagaaacggaggatagatgatgtcacaaggcaagaacttaatagccaactttataattccatcattgaagcactgaaggatgctaaatctgagaaagaggtggaggatgttgatgcaaaattcaatttacattttcctcctggtgaagtagaagaagaaggtcaatttaaacgtcctaaaaggaagtccttgtacagtatctgtcacaaggcagggctatgggaggttgccaaccaatttgggcgcagtgctgagcaattaggccaccatctgactttaactaagatacctgaagcaggcgagcttgagagcggtagacattcacctgaagaggtcgctgcaaatttcacatgtgcaatgtttgaaacatcacaagatgttcttcgtggcgcgagacacatggcagcagttgagataggttgtgagccaattgtgagaaagcatgtacgaggcatcttcatgaataaagcagttgtgtcaacaagtcccacatctgagggaaatacaatcatagatccatatcaccaactatcgggtgttaagtggctgagagagaaaccacttagcaagtttgttgatgcacagtggctccttattcagaaagcagaggaagaaaagctcctcaaggttaccgtaaaattgccagaagatgcaaagaaaaaactcatgtctgaagcacgtgagaattatctaagtgattgtgtcagcaagtctgcacaattgtgggatgagcaacggaagatgatactggatgatgctttcttcaattttctccttccatcaatggaaaaggaagctcgatcactgttgatgacaaaagccaaacattggctccatatggaatatgggaaacagttgtggaacaaggttactgttgctccttggaagaagaaagatgcggacaagaaggatgctgacattgatttggatgatgaatcagagttgagagttatggcttgctgctggggtcctgggaagccagcaaccacctttgtaatgttagactcctcaggagagttggttgatgttctgtatgcaggctctatcagtaacaggtctcaaggtgtcgctgagcagcagcggaagaagaacgaccagcagcgagtcttaaagtttatgactgatcatcaaccacatgttgtgtgtgtaggagcatcgaactacaattgcagacaactgaaggatgatctttatgaggttatttttaaaattgtagaggatcatccaagggatgttaacgcccaaatggaaaattttagcattgtctatggtgacgagtctgtgcctcgcttgtatgagaactctcgaatatcttcggatcaacttcctggccaatcaggtattgtgaagcgggctgtggcgcttggacgttaccttcagaacccgttggcaatgattgcaacactgtgtggacctgggaaagagatactttcttggaaactgcatgctctggaacagtttctaactcctgatgagaagtatgaaattgttgagcaagtaatggttgatgcaacaaatcagataggttttgatgtcaatcttgctgctagccatgagtggcatttttctactctacaatttattgctggtttgggtccgcgtaaagcttcagctttgcagaaagatctggtaagagagggatccatttttagtcgcaaagagcttgtaaaacctctaggcaggaaagtattcatgaatgcttctggatttttacgtgttcggcggagtggtgcagctgcagccagcgctcaactcattgatctgcttgaggatacaaggatccatcctgaatcatatgtattggcaaaaaatttagctaaggatgtctatgttgaggatgcacaacatgaaataaatgaaatggacgatgaggagcaagagatggctattgagcatgttagagaaaggccaagcatgcttcgaagtcttaaaattgtggaatatataaagagcattacagaagaataccgtaaactggaaactctgcgtgatataaagtttgagctgctgtgcggtttttctgactggaggattccctataccgagccaagcccagacgaggaattctggttgctttctggtgaaactgatgataccatatctgagggaaggattgttcaagttactgttcgcaatatacaagataacaaaataatttgcacctttgattcgggtttgaaagccatagttatggcagacaactattctgatgagggttttgatccagaatcatcacagttacgtgaaggcgatgtattaactggcaaaattcgaaacgtgaataaaaatagattcatggtttacctaacatgcaaggctagcgagatgaggagaaggccattctctagaggtgagcaggatccttactatcatgaacaagacatgacctcacaaactgtagaagataaggctcggaaacaaaaggaacttgcaaagaagcatttcaagccccgaatgattgttcatccccactttcagaacctgacagctgaagaagccatgcagtttttatcagataaagagcatggtgagaagttaatccgaccaagctccaggggaccatcatttttgacacttaccctgaaaatttttgatggcgtttacgcacataaggagatagctgaaagtggaaaggatcataaagatatcacaagtttgcttcgcctggggaaaacactaacaattgataatgaaacttttgaagacctcgatgaggttattgaccgatatgtggacccattggtaggacacctgaagagcatgctgtcgtaccgtaaattcagaaagggtttaaaaaatgaggttgatgagatgttaagggcagagaaagcagagaaccctatgagaatagtatatagttttggcatatctcacgaacatcctggcacctttatattgtcatatattaggagtacaaacccacatcacgagtacattgggttgtacccgaagggcttcaggttcaggaagagagacttcgacaacattgaccgtcttgtgtcgtatttccagaagaatattgacaaaccaccacctgatgctggaccatcaatgcggaatgttgctgcaatggtacctatgaaaaactcagcttggggttctggtggtggtggggatgcaaatggtggttggaggggagatggtagtaatgatagggatcgacctttctctggcagatcaggagggaggtttgattcaaggaatagctctggtggtcgtggacgaggacgggggcgtggccggggtaactttggcgatgacgataatgctggtaactgggctgtgccctgcgttgtagtccagacaacagctactagatgaaaacagtttcctcgttttaactcctgtcctatcgtactgtggacgggagaaatctggcacttataagtcttgcagctgctgcacgtctgcagatgttgcattgcggacagcgttatgtttcagtgcatgtacataaatccaatatgtctggtcacactttcctgctacgaatttgatcctggtgcttcattgttgaggctatccgcaattaggccagtactctaccccatgttggtaagcttttgtgttgaaagtgtaacacgctacattttgtttccctagcttcacataaccccgcttacaagtgtttcaatgttttggcgacccatatgcctttcggtttgtgggcgtttcgatagagtcaggtctggatttcacaactagcatttatgacagcaaaagccggaaggtggcattcgattgtacttgagtcct

SEQ ID NO: 202108 - DNA, 1879 bp, Zea Mays
tgctcacagttatgctgtcagacagctaaaaaggaaagccacatctgaagaaaatgctgctgctgactcaagcagttgtatcattaccagtccaatgctcactccggtctctgctaaaactgttaaagcttctaaggcaaaggctaagaacagtaaaactgggcctcagacacctacatcaaatgttggttcaccactcaatccaccaacgcctgttggcacatgccgctatgacaattcactaggacttctgacaaaaaagttcattaacttgcttaagcaagctccagatggcattctagatttgaacaatgctgcagaagtactagaggttcaaaagcggcgcatatatgacattaccaatgtccttgaaggcattggactaatagagaagacacttaagaatagaatccgttggaaggccctggatgattcaagtgttcaattagataatggtatctctgctttgcaggcagaagttgaaaatcttagtctgcaggagcaagctctagatgagcgtataagtgacatccgtgaaaaattaaggggcttaactgaagatgaaaataatcaaaggtggctctatgtgactgaagacgatatcaagggattacccagctttcagaatgaaacactaattgcaattaaagcacctcatggtactactcttgaagtaccagatcctgatgaggcaggtgattatctccaaaggagatatagaattgtattaagaagtacgatgggaccaatagatgtttacttagttagtcaatttgatgaaaaatttgaggaactgggtggtgttgcgacacccgccaagcattcaaatgtgcccagacatcaaccagctgaagatttcaatacatcatatgctggacaaagtagcacactaatgggtgtggcacatgatgcacagcacagccagaagattccccaggatcctagtgctttgcatgactttggagggatgacaaggattagtccttcagacgtccatacggattctgattactggctcctaacagagggggatgttagcatgactgatatgtggaaaacagaactgggatgagatggatttcttgtcagaagatgttgtcacccctcgagcccataatcagcagctggtcacagttgatgggccacatatggaggttccaagcacagatccataagatcataatggcctcaacaaaactgacatctgaacacctggagcggtgagtgttgaatgggaaggattctcgtgtgacagtaaatgcttattattgcaacggaagagccggacgatttcatcagggaatgtcacctggagtttagtcagggcatcagttcacaacttcagattggtgcacaccgctgttgtgaagattggcgaggtcagcttggttaacaatttactgcctgattggtaacctgcagctatttagcttagccgacactgctcccggcttctgtgactttggtgttgtgctcattcatccctgctccattggcttgccaagctattatcataccagaccggtggacctccactgaaaaatgctgcacaatgtataaaacatcaggtcaaaacggtgcacagtgcatggggtgttggcgttacaaaaccattgggtgagctatcaatgtaaggcagaaaattctttgtaccgcgttacaaaaccattgggtgagctatcgatgtaaggcagaaaattctttgtacaattgtttgataccccagatcaaagcatagctgttcgattgtaaacaaatgtttctatgcatgtatcagagaggagctcaaattgtttggcatacatttgatccattcacaggttcataccctgttaaacgtaacaacctttgataacgaagaaagatgctctattatgtg

SEQ ID NO: 202109 - DNA, 2086 bp, Zea Mays
tgcgtgcattctgaatgttttcaatgaatcacatatgatgaagatctgattacctcctgtgtctagatttctgaaaatcgcctcatgatctttgcttcgctgctagcgcttttgatatactcttctatgtctttgtgaccaggttatttcaagcttcagttaaatttgtatatataatctatcttacaagcaatgtcagtttgctgtctgcaggtatagagattaatgatgaagagctggcaagatttgttgagcatgtggataaggacaacaatgggattattacttttgaagaatggagagattttcttctactgtaccccaatgaggcgaccattgagaacatttatcatcactgggaaagagtctgccttgttgatataggtgaacaggctgctataccagaaggcataagtaaacatgtcaatgcaagcaaatatcttattgctggagggattgctggtgcagcatctcgtactgcaactgctcctctggatcgcctcaaagtgatcatgcaagtacaaacaacacgtacttcagtcatgcatgcaattaaagatatctggactaaaggtggcatgctgggattttttagagggaatggattgaatgttgtaaaagttgctccagaaagtgcaataagattttatgcctatgaaatgttaaaagaatatattatgaagagaaaaggagaaaataagagtgaagttggtgcttctgaacgtctcattgctggtggtttagcaggtgcagtggctcaaacagcaatttatcctatagagttagtaaagactcgtctacagacttattcaggtgaggttggttatgttcctagaattggtcagctctcaagggatattttggtgcatgaaggtccccgagctttttatagaggtcttgttccatctttgcttggtatcgtaccttatgctggaattgatcttgctgtatatgagactttgaaagatgtgtcgaagacatatatactgaaggacagtgatcctggtcctctagtacagcttggttgtgggacggtctctggagccctaggggcaacatgtgtttaccctttacaggttatcagaacaagactgcaagctcaacaagccaattcagaatctgcctatagaggaatgtctgatgtcttttggagaaccctacatcatgagggtgtttctggattctacaagggaattctaccaaatctccttaaagtggtgcctgctgcaagtattacctatctagtttacgaggcgatgaagaaaaatttgtctcttgattaaattgtggagttgttggtgggaaaaacagccatcattattggcatggctgactgtagagataatgacgacacatgaattttactggttgaatagttcctttttgaagataaagatggtgccttcaatatagaactagaagcaacggtggcattttcctcctaattttgattcagcagaaatgaagtgataattatgagatcatcgagacatccatgcctggcatactgcttacgacaccatcgacaccgagttaactgttcatgaatttccgaaggcttgttttatcccccgtctggggcgagttttgttagtctgtaacacactgggaaactctcctaacttaattgcaatcccttgtgctcctcaacttgactggagctgtgacatttgctgacagccaaaaaaaaaacccggcaaaaagggtgctggtgatacctgtacgtattttccacggcgacttggcataaatcaatgcctagtgaatgtaataatccgcccgttcccgttagtcttacttatggtttccaatgaccctgttgcatatatttgcattgccaaagcaaggtgtgtgtgcataaaaagtgccaaagcagatggcaaacaactcacaaggtgcataaggggtttgtagacaaccgcaaggtgcaaaagctgcttagtgcttcatgaggaacatgagcatgccccccacgttgtacgggtaggttcgtgaaataggagtggtaacggatcatgatttaaatgatttttttacaatttatttgagtctttaattaattttagttcaaaaataaataaaaata

SEQ ID NO: 202110 - DNA, 3408 bp, Zea Mays
ctgctaggtttggcctcagatgatgaccaggatgaattgtcgacagatcctgatgaactgtgatcgaagaaagtgaagatatgagtggcgatgaggaggatatgttccggaacctcctcttgagagctggtttttgtcttacatacaaagataactatactcaaccacaagttatctaagagagaaaattataacagatgctactgcgatagctggattccttactgatctgcgtgtttatctggataacccagcaaaggttaagcgtatgcttcttccaaccaaagtatccaccaagagtggtggaaccaaagatacttcaaagtgtgattcaagctcaagctccacaagcctcattactttgttgatggggattagtgccttgaagcaggctattatagatttgcttctagatataatggttgaatgttgccaaccttcagaagaaagtggttcctcagcaagcactaaagcttttcccgattcaaatggggctagctctccaccagagcttagtgttgaaggtgatctaacagaatatgcatgcagtgatgtgtatgcgagagttgaatctaatagtgatgatattcgggatagtcctgtaatttgtaatgcaggtttggctgcaactgagattgctgtaaataatatagaacattcctgttttcctccagaaacatctgctgctgatttgccagcagatgaaggctccgagcaggcttcctggtcaaaatgtccagagcaatcagaggaattgttagggttgattgttaattcattgagggcattggacagcactgtcccgcatgggtgctgtgaaccaagaaggcggccgcaggctgtccggaagattgcacttgtcctagagaaagctccaaaacagctccagcaagatttgatttcccttgtaccgaagttggtggatggttcggaacactctcttgcagcttgtgccctgttggatcatcttcaaaggccagatgcagagccttcattgagattgccactgccattacttatgttcttaaggcggcatcacagtgtgagcatctttctgtagcggttagagctgttagatggagattgaaagatttgggaactgaagttccacattgtgtgcttgactttttatctaaaacaattcaaacccagctagatgtagctgaagctatattgaaggatattgattctgattgtgagcctgaaaacaattgcctagcatcaacatcaccttctagtacttgttctacagatgggctttcagctgaagggatgtattcttggcaagagcaagctgtgcatggaagaagtcatctatcagatgtttttgcactgatagaaatgttatcaatgcctggattatttgttgaagtcgcacaggttattgagagggctttattgcgagggtcctttggtctacaattagtagccatggtgctggaaagaagacattcttacaggtcaagttcaaagtctgggtctgttgtgaatgattcacagaacaaagaagttctgttagatgggcagtttgaacctttatctgtccaagaaaatgatttcacttcagtccttgcacttggtgaggtattatctctatctacagaaacgaaggttcaagattttgtgcggatgctttatgctatcatatttaagatctatgctgaggatcatcataggtatagaatccttaagggccttgttgaacgagcaacaaatacatcagataactgccgagcagttgacatcgatatggatgtcttggtatttcttgttaaggaggagtatgggatcgcgagacctgttttgaacatgatgtgtgaggttgctgaagttgctcaggctgaccgtgcaaatctttggcaccaaatatgtgctactgaagatgaaaatattcgtcttcgagaggacatggaaatggagcaaacaaatttcaccaatgaaaagattgcactaaaccaacggctaactgagttggaggcaactattggcagtctaaggtctgagctaaaagctgagagggatcgttttactcgtgagaagaaggcattatctgatcagatgcgagagattgagaatcagttggaatgggtgcgatcagagaaagatgatcagattgcaaagctctcctctgaaaagaggaatcttcatgatcggcttaatgacgcagagtcacaactcgccttggtgaaagcacggaaacgtgaagaattaaagaaagtgacaaaggagaaaaatacattagcagaacagctgaagaatgctgaagcttcaaggaaaaggtttgatgatgaattaaaacgttatgcagctgaaacacagactcgtgaagaaattcgaaaatcacttgagaatgaagtgagaaggctgacacagacagtggggcaaacagagggagaaaaaagggaaaaagaagagcaaattactcgttgtgaagcatacattgatgggatggaatccaaactgcaagtttgccagcaatacatccggacacttgaaacgtccctccaagaagaggtggcccggcatgctccactatacggtgtcggcgtcgaatcattgtcgtttaatgagctggaggcactcgcaaacatccacgagcagagtttaaggcagatcaaagctatccagcaaaggaaaggtagcagccatctcttgggtggcaccgccctttctcacatccctgccctattctccccgccgcctccttcagcggcagttggctctccggcctcacggatccccgcatccccaatggcaccaaacggtgcagggatgcacgggaacgggcaccacatgaacagcacgactggcggccgctggttcaacccgagctgagtgataaggtgcaaagattttgtgattcaacgggccacatttgcataggcgtattttgcagccgctgagcaagcccaacgtcaaccccattttgttcctggccttccgtcaggctttcttcttgtacttaggctctcctcaccataagatctaagtggatgtgcagaacacttctggcaatataggcatagtggagttcggaatatagatggcgggggtaggtcttctggtgaggtcggccttacttggtagtgccgtcgtcgtcttgatatcgcatgggcgtggagagcttggtatgaaataatgcatgtaataatcaagtgaaccgatggaaataccaggtacaagtggagggctatgggaatggttgtgcttgttcactttctaaaggcattcaggttcatttgttttagaggagtgttgcggatggtaaagacgaccgagttcgaagcttttattttctttagagttgcatacatagtagtccttgcacatgtcaggggtgtcacttcggtataaacttcgaaagcagaacgtgtttgcatcgcatgcctctaagctcgaaaaaagttc

SEQ ID NO: 202111 - DNA, 3501 bp, Zea Mays
ctgctaggtttggcctcagatgatgaccaggatgaattgtcgacagatcctgatgaactgtgatcgaagaaagtgaagatatgagtggcgatgaggaggatatgttccggaacctcctcttgagagctggtttttgtcttacatacaaagataactatactcaaccacaagttatctaagagagaaaattataacagatgctactgcgatagctggattccttactgatctgcgtgtttatctggataacccagcaaaggttaagcgtatgcttcttccaaccaaagtatccaccaagagtggtggaaccaaagatacttcaaagtgtgattcaagctcaagctccacaagcctcattactttgttgatggggattagtgccttgaagcaggctattatagatttgcttctagatataatggttgaatgttgccaaccttcagaagaaagtggttcctcagcaagcactaaagcttttcccgattcaaatggggctagctctccaccagagcttagtgttgaaggtgatctaacagaatatgcatgcagtgatgtgtatgcgagagttgaatctaatagtgatgatattcgggatagtcctgtaatttgtaatgcaggtttggctgcaactgagattgctgtaaataatatagaacattcctgttttcctccagaaacatctgctgctgatttgccagcagatgaaggctccgagcaggcttcctggagcaatcagaggaattgttagggttgattgttaattcattgagggcattggacagcactgtcccgcatgggtgctgtgaaccaagaaggcggccgcaggctgtccggaagattgcacttgtcctagagaaagctccaaaacagctccagcaagatttgatttcccttgtaccgaagttggtggatggttcggaacactctcttgcagcttgtgccctgttggatcatcttcaaaggccagatgcagagccttcattgagattgccagtttttggtgctctttctgagttagaacttgaaagtgatatctggaaacaagcatctgttcatgcactcgaattattgtctgactcgaacgatgagcctcttgtagctgccattacttatgttcttaaggcggcatcacagtgtgagcatctttctgtagcggttagagctgttagatggagattgaaagatttgggaactgaagttccacattgtgtgcttgactttttatctaaaacaattcaaacccagctagatgtagctgaagctatattgaaggatattgattctgattgtgagcctgaaaacaattgcctagcatcaacatcaccttctagtacttgttctacagatgggctttcagctgaagggatgtattcttggcaagagcaagctgtgcatggaagaagtcatctatcagatgtttttgcactgatagaaatgttatcaatgcctggattatttgttgaagtcgcacaggttattgagagggctttattgcgagggtcctttggtctacaattagtagccatggtgctggaaagaagacattcttacaggtcaagttcaaagtctgggtctgttgtgaatgattcacagaacaaagaagttctgttagatgggcagtttgaacctttatctgtccaagaaaatgatttcacttcagtccttgcacttggtgaggtattatctctatctacagaaacgaaggttcaagattttgtgcggatgctttatgctatcatatttaagatctatgctgaggatcatcataggtatagaatccttaagggccttgttgaacgagcaacaaatacatcagataactgccgagcagttgacatcgatatggatgtcttggtatttcttgttaaggaggagtatgggatcgcgagacctgttttgaacatgatgtgtgaggttgctgaagttgctcaggctgaccgtgcaaatctttggcaccaaatatgtgctactgaagatgaaaatattcgtcttcgagaggacatggaaatggagcaaacaaatttcaccaatgaaaagattgcactaaaccaacggctaactgagttggaggcaactattggcagtctaaggtctgagctaaaagctgagagggatcgttttactcgtgagaagaaggcattatctgatcagatgcgagagattgagaatcagttggaatgggtgcgatcagagaaagatgatcagattgcaaagctctcctctgaaaagaggaatcttcatgatcggcttaatgacgcagagtcacaactcgccttggtgaaagcacggaaacgtgaagaattaaagaaagtgacaaaggagaaaaatacattagcagaacagctgaagaatgctgaagcttcaaggaaaaggtttgatgatgaattaaaacgttatgcagctgaaacacagactcgtgaagaaattcgaaaatcacttgagaatgaagtgagaaggctgacacagacagtggggcaaacagagggagaaaaaagggaaaaagaagagcaaattactcgttgtgaagcatacattgatgggatggaatccaaactgcaagtttgccagcaatacatccggacacttgaaacgtccctccaagaagaggtggcccggcatgctccactatacggtgtcggcgtcgaatcattgtcgtttaatgagctggaggcactcgcaaacatccacgagcagagtttaaggcagatcaaagctatccagcaaaggaaaggtagcagccatctcttgggtggcaccgccctttctcacatccctgccctattctccccgccgcctccttcagcggcagttggctctccggcctcacggatccccgcatccccaatggcaccaaacggtgcagggatgcacgggaacgggcaccacatgaacagcacgactggcggccgctggttcaacccgagctgagtgataaggtgcaaagattttgtgattcaacgggccacatttgcataggcgtattttgcagccgctgagcaagcccaacgtcaaccccattttgttcctggccttccgtcaggctttcttcttgtacttaggctctcctcaccataagatctaagtggatgtgcagaacacttctggcaatataggcatagtggagttcggaatatagatggcgggggtaggtcttctggtgaggtcggccttacttggtagtgccgtcgtcgtcttgatatcgcatgggcgtggagagcttggtatgaaataatgcatgtaataatcaagtgaaccgatggaaataccaggtacaagtggagggctatgggaatggttgtgcttgttcactttctaaaggcattcaggttcatttgttttagaggagtgttgcggatggtaaagacgaccgagttcgaagcttttattttctttagagttgcatacatagtagtccttgcacatgtcaggggtgtcacttcggtataaacttcgaaagcagaacgtgtttgcatcgcatgcctctaagctcgaaaaaagttc

SEQ ID NO: 202112 - DNA, 3162 bp, Zea Mays
ctgctaggtttggcctcagatgatgaccaggatgaattgtcgacagatcctgatgaactgtgatcgaagaaagtgaagatatgagtggcgatgaggaggatatgttccggaacctcctcttgagagctggtttttgtcttacatacaaagataactatactcaaccacaagttatctaagagagaaaattataacagatgctactgcgatagctggattccttactgatctgcgtgtttatctggataacccagcaaaggttaagcgtatgcttcttccaaccaaagtatccaccaagagtggtggaaccaaagatacttcaaagtgtgattcaagctcaagctccacaagcctcattactttgttgatggggattagtgccttgaagcaggctattatagatttgcttctagatataatggttgaatgttgccaaccttcagaagaaagtggttcctcagcaagcactaaagcttttcccgattcaaatggggctagctctccaccagagcttagtgttgaaggtgatctaacagaatatgcatgcagtgatgtgtatgcgagagttgaatctaatagtgatgatattcgggatagtcctgtaatttgtaatgcaggtttggctgcaactgagattgctgtaaataatatagaacattcctgttttcctccagaaacatctgctgctgatttgccagcagatgaaggctccgagcaggcttcctggtcaaaatgtccagagcaatcagaggaattgttagggttgattgttaattcattgagggcattggacagcactgtcccgcatgggtgctgtgaaccaagaaggcggccgcaggctgtccggaagattgcacttgtcctagagaaagctccaaaacagctccagcaagatttgatttcccttgtaccgaagttggtggatggttcggaacactctcttgcagcttgtgccctgttggatcatcttcaaaggccagatgcagagccttcattgagattgccaatgggctttcagctgaagggatgtattcttggcaagagcaagctgtgcatggaagaagtcatctatcagatgtttttgcactgatagaaatgttatcaatgcctggattatttgttgaagtcgcacaggttattgagagggctttattgcgagggtcctttggtctacaattagtagccatggtgctggaaagaagacattcttacaggtcaagttcaaagtctgggtctgttgtgaatgattcacagaacaaagaagttctgttagatgggcagtttgaacctttatctgtccaagaaaatgatttcacttcagtccttgcacttggtgaggtattatctctatctacagaaacgaaggttcaagattttgtgcggatgctttatgctatcatatttaagatctatgctgaggatcatcataggtatagaatccttaagggccttgttgaacgagcaacaaatacatcagataactgccgagcagttgacatcgatatggatgtcttggtatttcttgttaaggaggagtatgggatcgcgagacctgttttgaacatgatgtgtgaggttgctgaagttgctcaggctgaccgtgcaaatctttggcaccaaatatgtgctactgaagatgaaaatattcgtcttcgagaggacatggaaatggagcaaacaaatttcaccaatgaaaagattgcactaaaccaacggctaactgagttggaggcaactattggcagtctaaggtctgagctaaaagctgagagggatcgttttactcgtgagaagaaggcattatctgatcagatgcgagagattgagaatcagttggaatgggtgcgatcagagaaagatgatcagattgcaaagctctcctctgaaaagaggaatcttcatgatcggcttaatgacgcagagtcacaactcgccttggtgaaagcacggaaacgtgaagaattaaagaaagtgacaaaggagaaaaatacattagcagaacagctgaagaatgctgaagcttcaaggaaaaggtttgatgatgaattaaaacgttatgcagctgaaacacagactcgtgaagaaattcgaaaatcacttgagaatgaagtgagaaggctgacacagacagtggggcaaacagagggagaaaaaagggaaaaagaagagcaaattactcgttgtgaagcatacattgatgggatggaatccaaactgcaagtttgccagcaatacatccggacacttgaaacgtccctccaagaagaggtggcccggcatgctccactatacggtgtcggcgtcgaatcattgtcgtttaatgagctggaggcactcgcaaacatccacgagcagagtttaaggcagatcaaagctatccagcaaaggaaaggtagcagccatctcttgggtggcaccgccctttctcacatccctgccctattctccccgccgcctccttcagcggcagttggctctccggcctcacggatccccgcatccccaatggcaccaaacggtgcagggatgcacgggaacgggcaccacatgaacagcacgactggcggccgctggttcaacccgagctgagtgataaggtgcaaagattttgtgattcaacgggccacatttgcataggcgtattttgcagccgctgagcaagcccaacgtcaaccccattttgttcctggccttccgtcaggctttcttcttgtacttaggctctcctcaccataagatctaagtggatgtgcagaacacttctggcaatataggcatagtggagttcggaatatagatggcgggggtaggtcttctggtgaggtcggccttacttggtagtgccgtcgtcgtcttgatatcgcatgggcgtggagagcttggtatgaaataatgcatgtaataatcaagtgaaccgatggaaataccaggtacaagtggagggctatgggaatggttgtgcttgttcactttctaaaggcattcaggttcatttgttttagaggagtgttgcggatggtaaagacgaccgagttcgaagcttttattttctttagagttgcatacatagtagtccttgcacatgtcaggggtgtcacttcggtataaacttcgaaagcagaacgtgtttgcatcgcatgcctctaagctcgaaaaaagttc

SEQ ID NO: 202113 - DNA, 5663 bp, Zea Mays
cccaaccaagccatcgctcctgtcctgcatctccatgagccaaagaccaaggaaaaagaatagggagaaaacacaccccgaaaaacaaaccaaaaatccccaatccatgaagcccaccacttccgccgccgccgccgccgtggcggcggttaccgtcaccaccgatgacccatccccttcgccgtccgactcaacgtcggcgacgttcacggtcgaccgccgtggggacgcttccgcctcctgccggtggacgctcccggacttcccccgcacccgcgcccgcaccttctacagccgatacttcgaggtcggcggcttcgactgccgcctcctcctctacccgcggggcgactcgcaggcgctgccggggtacctctccctctacctacaggtcctcgaccccaaagccccggtgtcgtcgtcgtcatccaccacgaccaccacctcctccaaatgggactgcttcctcagctaccgcctctccgtagtccaccccaccgatccagccaagtcgctgggccgcgattcctggcaccgattctcgtccaagaagcgctcccacggatggtgcgatttcgcgccctcctcctccgcccccttcctcttccagccccacgatgccctcgtcatttctgctgacatatctgtgctgtctgaggcggcctctttctccgatgccgacggtcgttttaactggaaggtgctcaattttggcctcttccgagaaatgatccgcacacagaagatcatgagccctgcattttttcctgcatctgcctctgctggcgggactgactgtgggctccggattagcgtctatcagagcaatgtatctggcgcagagcatttatctgtttgtctggaaagcaaggagcctgttgtgcaggtagcatccgggtcatcggcattggcatcaggtggtacagggagtggtgtgccagatggtgatcgtgggtgctggtgtcttttccgcatttcgatccttaatcagaggtctggtgggagccatatccacaaggactcatatggtcggtttggtgcggacagtgccagtcttggttggggagaatacatcaagatggatgagtttttggctgctgacggcggataccttgtagatggagctgtggtgtttagtgcctcagtgcatgtcataaaggagtcaaactcattcagtcggagcttgccaatggttcctggaatatgtggtgctggtggtgggcgtgctggggctaggaagtcagatggacactttgggaagtttgtgtggaggattgaaagcttcacaagacttaaggagcttctcaaaaagcgcaagatcgcgggtctgtgtatcaaaagcagacggtttcaagttgggaatcgagattgccgtcttattgtttatccacgggggcagtctcaaccgccatgccacctgtcagtgtttctggaagttacagatccccgaaatacaactactgaatggagttgctttgtgagccatcgtctctctgtcatcaaccaaaaagtggaggagaagtcgatcatgaaagagtctcagaatcgttactctaagtcagcgaaagattggggttggcgggaatttgtgacattaactagcctctttgatcaggatgcaggttttcttgtgcaggatactgttgtattttcagccgaggttctcattctgaaggaaacagcaactatgcaagagcttacagatgaagattctgaaacttgcagttcaacttatggatgtcagattgaagctttaccaaagcggccatcattcacatggaaagtggaaaatttcgtgtcttttaaggagattatggagtccagaaagatttttagtaaattttttcaggctgggggctgcgagctgcggataggtgtatatgagtcgtttgatacgatctgcatatacttggagagtgatcagtcatctgggtatgatcctgataagaacttttgggtgcactataaaatggctatagttaaccagaagaattctgcaaaaactgtgtgcaaagaatcttcaatctgcacgaaaacatggaataattcagttctccagtttatgaagacttcggacatggttgacactgacgctggctttcttgtccgggacactgttatttttacttgtgaaatcatagactgctgcccatggtttgatttctctgaccttgaggtttggcctcagatgatgaccaggatgaattgtcgacagatcctgatgaactgtgatcgaagaaagtgaagatatgagtggcgatgaggaggatatgttccggaacctcctcttgagagctggtttttgtcttacatacaaagataactatactcaaccacaagttatctaagagagaaaattataacagatgctactgcgatagctggattccttactgatctgcgtgtttatctggataacccagcaaaggttaagcgtatgcttcttccaaccaaagtatccaccaagagtggtggaaccaaagatacttcaaagtgtgattcaagctcaagctccacaagcctcattactttgttgatggggattagtgccttgaagcaggctattatagatttgcttctagatataatggttgaatgttgccaaccttcagaagaaagtggttcctcagcaagcactaaagcttttcccgattcaaatggggctagctctccaccagagcttagtgttgaaggtgatctaacagaatatgcatgcagtgatgtgtatgcgagagttgaatctaatagtgatgatattcgggatagtcctgtaatttgtaatgcaggtttggctgcaactgagattgctgtaaataatatagaacattcctgttttcctccagaaacatctgctgctgatttgccagcagatgaaggctccgagcaggcttcctggtcaaaatgtccagagcaatcagaggaattgttagggttgattgttaattcattgagggcattggacagcactgtcccgcatgggtgctgtgaaccaagaaggcggccgcaggctgtccggaagattgcacttgtcctagagaaagctccaaaacagctccagcaagatttgatttcccttgtaccgaagttggtggatggttcggaacactctcttgcagcttgtgccctgttggatcatcttcaaaggccagatgcagagccttcattgagattgccagtttttggtgctctttctgagttagaacttgaaagtgatatctggaaacaagcatctgttcatgcactcgaattattgtctgactcgaacgatgagcctcttgtagctgccattacttatgttcttaaggcggcatcacagtgttagagctgttagatggagattgaaagatttgggaactgaagttccacattgtgtgcttgactttttatctaaaacaattcaaacccagctagatgtagctgaagctatattgaaggatattgattctgattgtgagcctgaaaacaattgcctagcatcaacatcaccttctagtacttgttctacagatgggctttcagctgaagggatgtattcttggcaagagcaagctgtgcatggaagaagtcatctatcagatgtttttgcactgatagaaatgttatcaatgcctggattatttgttgaagtcgcacaggttattgagagggctttattgcgagggtcctttggtctacaattagtagccatggtgctggaaagaagacattcttacaggtcaagttcaaagtctgggtctgttgtgaatgattcacagaacaaagaagttctgttagatgggcagtttgaacctttatctgtccaagaaaatgatttcacttcagtccttgcacttggtgaggtattatctctatctacagaaacgaaggttcaagattttgtgcggatgctttatgctatcatatttaagatctatgctgaggatcatcataggtatagaatccttaagggccttgttgaacgagcaacaaatacatcagataactgccgagcagttgacatcgatatggatgtcttggtatttcttgttaaggaggagtatgggatcgcgagacctgttttgaacatgatgtgtgaggttgctgaagttgctcaggctgaccgtgcaaatctttggcaccaaatatgtgctactgaagatgaaaatattcgtcttcgagaggacatggaaatggagcaaacaaatttcaccaatgaaaagattgcactaaaccaacggctaactgagttggaggcaactattggcagtctaaggtctgagctaaaagctgagagggatcgttttactcgtgagaagaaggcattatctgatcagatgcgagagattgagaatcagttggaatgggtgcgatcagagaaagatgatcagattgcaaagctctcctctgaaaagaggaatcttcatgatcggcttaatgacgcagagtcacaactcgccttggtgaaagcacggaaacgtgaagaattaaagaaagtgacaaaggagaaaaatacattagcagaacagctgaagaatgctgaagcttcaaggaaaaggtttgatgatgaattaaaacgttatgcagctgaaacacagactcgtgaagaaattcgaaaatcacttgagaatgaagtgagaaggctgacacagacagtggggcaaacagagggagaaaaaagggaaaaagaagagcaaattactcgttgtgaagcatacattgatgggatggaatccaaactgcaagtttgccagcaatacatccggacacttgaaacgtccctccaagaagaggtggcccggcatgctccactatacggtgtcggcgtcgaatcattgtcgtttaatgagctggaggcactcgcaaacatccacgagcagagtttaaggcagatcaaagctatccagcaaaggaaaggtagcagccatctcttgggtggcaccgccctttctcacatccctgccctattctccccgccgcctccttcagcggcagttggctctccggcctcacggatccccgcatccccaatggcaccaaacggtgcagggatgcacgggaacgggcaccacatgaacagcacgactggcggccgctggttcaacccgagctgagtgataaggtgcaaagattttgtgattcaacgggccacatttgcataggcgtattttgcagccgctgagcaagcccaacgtcaaccccattttgttcctggccttccgtcaggctttcttcttgtacttaggctctcctcaccataagatctaagtggatgtgcagaacacttctggcaatataggcatagtggagttcggaatatagatggcgggggtaggtcttctggtgaggtcggccttacttggtagtgccgtcgtcgtcttgatatcgcatgggcgtggagagcttggtatgaaataatgcatgtaataatcaagtgaaccgatggaaataccaggtacaagtggagggctatgggaatggttgtgcttgttcactttctaaaggcattcaggttcatttgttttagaggagtgttgcggatggtaaagacgaccgagttcgaagcttttattttctttagagttgcatacatagtagtccttgcacatgtcaggggtgtcacttcggtataaacttcgaaagcagaacgtgtttgcatcgcatgcctctaagctcgaaaaaagttc

SEQ ID NO: 202114 - DNA, 5512 bp, Zea Mays
cccaaccaagccatcgctcctgtcctgcatctccatgagccaaagaccaaggaaaaagaatagggagaaaacacaccccgaaaaacaaaccaaaaatccccaatccatgaagcccaccacttccgccgccgccgccgccgtggcggcggttaccgtcaccaccgatgacccatccccttcgccgtccgactcaacgtcggcgacgttcacggtcgaccgccgtggggacgcttccgcctcctgccggtggacgctcccggacttcccccgcacccgcgcccgcaccttctacagccgatacttcgaggtcggcggcttcgactgccgcctcctcctctacccgcggggcgactcgcaggcgctgccggggtacctctccctctacctacaggtcctcgaccccaaagccccggtgtcgtcgtcgtcatccaccacgaccaccacctcctccaaatgggactgcttcctcagctaccgcctctccgtagtccaccccaccgatccagccaagtcgctgggccgcgattcctggcaccgattctcgtccaagaagcgctcccacggatggtgcgatttcgcgccctcctcctccgcccccttcctcttccagccccacgatgccctcgtcatttctgctgacatatctgtgctgtctgaggcggcctctttctccgatgccgacggtcgttttaactggaaggtgctcaattttggcctcttccgagaaatgatccgcacacagaagatcatgagccctgcattttttcctgcatctgcctctgctggcgggactgactgtgggctccggattagcgtctatcagagcaatgtatctggcgcagagcatttatctgtttgtctggaaagcaaggagcctgttgtgcaggtagcatccgggtcatcggcattggcatcaggtggtacagggagtggtgtgccagatggtgatcgtgggtgctggtgtcttttccgcatttcgatccttaatcagaggtctggtgggagccatatccacaaggactcatatggtcggtttggtgcggacagtgccagtcttggttggggagaatacatcaagatggatgagtttttggctgctgacggcggataccttgtagatggagctgtggtgtttagtgcctcagtgcatgtcataaaggagtcaaactcattcagtcggagcttgccaatggttcctggaatatgtggtgctggtggtgggcgtgctggggctaggaagtcagatggacactttgggaagtttgtgtggaggattgaaagcttcacaagacttaaggagcttctcaaaaagcgcaagatcgcgggtctgtgtatcaaaagcagacggtttcaagttgggaatcgagattgccgtcttattgtttatccacgggggcagtctcaaccgccatgccacctgtcagtgtttctggaagttacagatccccgaaatacaactactgaatggagttgctttgtgagccatcgtctctctgtcatcaaccaaaaagtggaggagaagtcgatcatgaaagagtctcagaatcgttactctaagtcagcgaaagattggggttggcgggaatttgtgacattaactagcctctttgatcaggatgcaggttttcttgtgcaggatactgttgtattttcagccgaggttctcattctgaaggaaacagcaactatgcaagagcttacagatgaagattctgaaacttgcagttcaacttatggatgtcagattgaagctttaccaaagcggccatcattcacatggaaagtggaaaatttcgtgtcttttaaggagattatggagtccagaaagatttttagtaaattttttcaggctgggggctgcgagctgcggataggtgtatatgagtcgtttgatacgatctgcatatacttggagagtgatcagtcatctgggtatgatcctgataagaacttttgggtgcactataaaatggctatagttaaccagaagaattctgcaaaaactgtgtgcaaagaatcttcaatctgcacgaaaacatggaataattcagttctccagtttatgaagacttcggacatggttgacactgacgctggctttcttgtccgggacactgttatttttacttgtgaaatcatagactgctgcccatggtttgatttctctgaccttgagatcctgatgaactgtgatcgaagaaagtgaagatatgagtggcgatgaggaggatatgttccggaacctcctcttgagagctggtttttgtcttacatacaaagataactatactcaaccacaagttatctaagagagaaaattataacagatgctactgcgatagctggattccttactgatctgcgtgtttatctggataacccagcaaaggttaagcgtatgcttcttccaaccaaagtatccaccaagagtggtggaaccaaagatacttcaaagtgtgattcaagctcaagctccacaagcctcattactttgttgatggggattagtgccttgaagcaggctattatagatttgcttctagatataatggttgaatgttgccaaccttcagaagaaagtggttcctcagcaagcactaaagcttttcccgattcaaatggggctagctctccaccagagcttagtgttgaaggtgatctaacagaatatgcatgcagtgatgtgtatgcgagagttgaatctaatagtgatgatattcgggatagtcctgtaatttgtaatgcaggtttggctgcaactgagattgctgtaaataatatagaacattcctgttttcctccagaaacatctgctgctgatttgccagcagatgaaggctccgagcaggcttcctggtcaaaatgtccagagcaatcagaggaattgttagggttgattgttaattcattgagggcattggacagcactgtcccgcatgggtgctgtgaaccaagaaggcggccgcaggctgtccggaagattgcacttgtcctagagaaagctccaaaacagctccagcaagatttgatttcccttgtaccgaagttggtggatggttcggaacactctcttgcagcttgtgccctgttggatcatcttcaaaggccagatgcagagccttcattgagattgccagtttttggtgctctttctgagttagaacttgaaagtgatatctggaaacaagcatctgttcatgcactcgaattattgtctgactcgaacgatgagcctcttgtagctgccattacttatgttcttaaggcggcatcacagtgtgagcatctttctgtagcggttagagctgttagatggagattgaaagatttgggaactgaagttccacattgtgtgcttgactttttatctaaaacaattcaaacccagctagatgtagctgaagctatattgaaggatattgattctgattgtgagcctgaaaacaattgcctagcatcaacatcaccttctagtacttgttctacagatgggctttcagctgaagggatgtattcttggcaagagcaagctgtgcatggaagaagtcatctatcagatgtttttgcactgatagaaatgttatcaatgcctggattatttgttgaagtcgcacaggttattgagagggctttattgcgagggtcctttggtctacaattagtagccatggtgctggaaagaagacattcttacaggtcaagttcaaagtctgggtctgttgtgaatgattcacagaacaaagaagttctgttagatgggcagtttgaacctttatctgtccaagaaaatgatttcacttcagtccttgcacttggtgaggtattatctctatctacagaaacgaaggttcaagattttgtgcggatgctttatgctatcatatttaagatctatgctgaggatcatcataggtatagaatccttaagggccttgttgaacgagcaacaaatacatcagataactgccgagcagttgacatcgatatggatgtcttggtatttcttgttaaggaggagtatgggatcgcgagacctgttttgaacatgatgtgtgaggttgctgaagttgctcaggctgaccgtgcaaatctttggcaccaaatatgtgctactgaagatgaaaatattcgtcttcgagaggacatggaaatggagcaaacaaatttcaccaatgaaaagattgcactaaaccaacggctaactgagttggaggcaactattggcagtctaaggtctgagctaaaagctgagagggatcgttttactcgtgagaagaaggcattatctgatcagatgcgagagattgagaatcagttggaatgggtgcgatcagagaaagatgatcagattgcaaagctctcctctgaaaagaggaatcttcatgatcggcttaatgacgcagagtcacaactcgccttggtgaaagcacggaaacgtgaagaattaaagaaagtgacaaaggagaaaaatacattagcagaacagctgaagaatgctgaagcttcaaggaaaaggtttgatgatgaattaaaacgttatgcagctgaaacacagactcgtgaagaaattcgaaaatcacttgagaatgaagtgagaaggctgacacagacagtggggcaaacagagggagaaaaaagggaaaaagaagagcaaattactcgttgtgaagcatacattgatgggatggaatccaaactgcaagtttgccagcaatacatccggacacttgaaacgtccctccaagaagaggtggcccggcatgctccactatacggtgtcggcgtcgaatcattgtcgtttaatgagctggaggcactcgcaaacatccacgagcagagtttaaggcagatcaaagctatccagcaaaggaaagggatgcacgggaacgggcaccacatgaacagcacgactggcggccgctggttcaacccgagctgagtgataaggtgcaaagattttgtgattcaacgggccacatttgcataggcgtattttgcagccgctgagcaagcccaacgtcaaccccattttgttcctggccttccgtcaggctttcttcttgtacttaggctctcctcaccataagatctaagtggatgtgcagaacacttctggcaatataggcatagtggagttcggaatatagatggcgggggtaggtcttctggtgaggtcggccttacttggtagtgccgtcgtcgtcttgatatcgcatgggcgtggagagcttggtatgaaataatgcatgtaataatcaagtgaaccgatggaaataccaggtacaagtggagggctatgggaatggttgtgcttgttcactttctaaaggcattcaggttcatttgttttagaggagtgttgcggatggtaaagacgaccgagttcgaagcttttattttctttagagttgcatacatagtagtccttgcacatgtcaggggtgtcacttcggtataaacttcgaaagcagaacgtgtttgcatcgcatgcctctaagctcgaaaaaagttc

SEQ ID NO: 202115 - DNA, 346 bp, Zea Mays
ctgagagcctagccttctgagttctgagatggggggcagtcaagagggatgggatataccccgagccccagccaaggaccataactttcttccctctccagcaatgggaaagactcattgccagttgatcttcctaagccgattgaaaatgaaaaaactgtggaagttgcacactccaatgtgaagccattcagtgtgcatccactacccttggcaaagacttctgatgtgctcataaaatcctcaaatggttctgatgattcaaaggaagagaaaacccagtactatccaggtctatacttcatccttattctgtattattggcatttcttcactttatgtccag

SEQ ID NO: 202116 - DNA, 450 bp, Zea Mays
cgagcgagcaggtgtgggcgtggcgtgggggaggcgccgaggcggtcgggcccgtagataagagtcgtctcacctcgtcgtcgcagcctcgcatcgcacgagaggagaaggagaggggaagggctagagagagaaacaaaggtggtagtagatgtggcatttgaagtatggttagcttgaggcgacgccgactattgggtctttgttctgggaaagactcattgccagttgatcttcctaagccgattgaaaatgaaaaaactgtggaagttgcacactccaatgtgaagccattcagtgtgcatccactacccttggcaaagacttctgatgtgctcataaaatcctcaaatggttctgatgattcaaaggaagagaaaacccagtactatccaggtctatacttcatccttattctgtattattggcatttcttcactttatgtccag

SEQ ID NO: 202117 - DNA, 464 bp, Zea Mays
tagggagagagagaaaccaccagaggcgagcgagcaggtgtgggcgtggcgtgggggaggcgccgaggcggtcgggcccgtagataagagtcgtctcacctcgtcgtcgcagcctcgcatcgcacgagaggagaaggagaggggaagggctagagagagaaacaaaggtggcatttgaagtatggttagcttgaggcgacgccgactattgggtctttgttctgggaaagactcattgccagttgatcttcctaagccgattgaaaatgaaaaaactgtggaagttgcacactccaatgtgaagccattcagtgtgcatccactacccttggcaaagacttctgatgtgctcataaaatcctcaaatggttctgatgattcaaaggaagagaaaacccagtactatccaggtctatacttcatccttattctgtattattggcatttcttcactttatgtccag

SEQ ID NO: 202118 - DNA, 3133 bp, Zea Mays
acagctcagctgctcaacctcagccaactcagatgttcccgttgcacgattcgaacggcggcgaatcgcaaaaaattgggagggagaggtcgagtgcgaacgcctcctcctcgccgccaccgccaccgccgccgccaccaccacaaccggcgtctcgtctcccccagcgccccgacgatggcggaggacgcaccgcctgcagcccctgtgatgacgccggaggaagtgcaggctgagaccgagctgcggatgcgcgacataggccagcgctttggtgctatcccagaggaccccgacgagctgctccggttactcgaagaagccgaaatctggttgtccagggtggatcaatctccgcccgagagcatgtacaatgctcttcgccccaccatggctgttttgattacaaatgagctactggagcaccctgatcccaacgtgaaggttgctctcacctcttgcttaacagaagttaccaggattactgcgccagaggccccctatgatgatgatgttatgaaggacgtgtttaagagagtcgtagagacttttgctgagttggatgatatgaacagcccctcctttgcaaggagggtttcgatccttgattctgttgcaagggttcgttgttgtgttctgatgttggatcttgacttggaccatatgatactggacatgttccgccatttttttaaaactgcctccaccaagcattcagaacaagtcacccactgtatggaaattataatgatgtttgtaattcaggagagcgatgatgtccatgctgaactggcatcattccttcttcagaaccttacaaaagaagcacaagaaactctcccggcatcttttggacttgcagagagggtactaggcctatgcagggacaagctcaaaccagtgtttcatgagttacttaaggccactctcttggatgaatacagcaatgttgttacgatgttgttccaagatgcttcagatgctggagagaacaatgtcgatgcatcaggaaaagacatggcagctgaaggtaaactttctgaaaagtctgtttctgatgagtcacgacaggaaacttcaaaggtagaccgaaatgtcaattgcctaggccaagaaggtactagcccaagtagtactccaacaactgccattagcaatggtggtgctccgattgacaatgtcaagtctccagatgaaccagattcttcaaaacagaagcaagaactgacttctggtgacgaacagacaccagattcttctaaacagaagcaagaactgacttctggtgatgagcagacaccaaattcttctaaacagaagccagaactgacttttcttgacaagcagaccaaaagttctgagcaattggtatcttgtgatgtagaagtacaagaaccagtgactgttggaactgaaaagctatctgatatcaattcaaagaaagatcacaagcttggttcttccaccggatctgagatgactgaacaacccaaggttgttaaagacaatgagagtctagtagcatctgagttatccccagagacaaatgatggtgataaaaagcagctaacagagtctggcaatataactgctgacgaatcatcaaaaccaatcgatactaaacctgcttctgttaaaccaaagaggggccgacctccagcagcaaagtctcaggagaaaaagcctgttggaaagaaacaggcatcaaacctaaaatctccaaaacttgatcctgtcactgattctgtagggagagctaccaggcaactgaataatgatgttgcaaagtcttcatcaactaaggctgttgatggagaatctgggaagaagcaacataaaaccagtatgaaatttcagaaagaagatgccgcctctgataaagacaccgatgatgatattagtttgaaggaaatggtgtccccaacaaggattgataaatcaaaaggccaacaagaagatagagggacgtcatcaaaaaggaaacgtctgctggaagctcaagatacccctgtatcgaagaaaaacaaaatgcttgacaaaaaccttattggctcaagaattaaagtttggtggccagatgacaaaatgttttatgcgggtgttgttgaatcattcgatgcctcgtcaaagaagcacaaggtttcgtatgatgatggtgatgttgaggtactagctcttaagaaggaaagatgggagttcattgctgaggaacaaggcgctgatcctgatgtggcatctaatatgccacgtggcaggaaagctaaagggagctcggttcaacaaatggagggaaaaacaggaacacctcaaagtgatgttaagaattctcccaagaagagagggcgcccaaaaggtgtgcgctccagcaataatatgccaaatgctgatagctctgtgactccagccagactgaagggaaaaagtgtcgagaaggatactgaagagacacctaagactggcagtaactctaagaaggaaggtgcaaaaccctctcgatctactggaaaggctaaggattctgttgtcaaggcaagcagcaaggatgaggctgatagcaccgacaactcaaaggatgctgctgccagtgaagacaaggattcaaaagatgaagtgaaatccagtgaagctatcgatggatccaagacaaatggcctttcaaccaaaaggaagccagatgagaatgaaggtgagtcatcagaggaggagaaggcgtctactaaaactactaccagaaagaagcgcagaagaaagagccgcaactagttgcccagaagctatgcagctcatcatctaagtggcgttccgcccttgcagtctcaagtctcaaagatgttggcatgaggcatgccatgtactgtacgctttatattcactggaccggttaccagcttagcgctttggtagttggccattatgagtcagctcgtagttatagcagtcttaaactctcaataggagctgtaatgtttggtcttactttttttttgtttctccttgccaacggctgtgcctctggcaaaaatggatttgattcttgcttgggttcaagcttttgtgttaaaacgtgatgcagtttgagttatctgctggcaaacagaaatacgttcctcttatgaagcgaatcttgcaaaag

SEQ ID NO: 202119 - DNA, 900 bp, Zea Mays
tccacctacactgggtttctggattcgcatgatgaatgtggagaagctcaagaagatggcgggtgctgtgcgcactggaggaaagggcagcatgcgcaggaagaagaaggcagtccacaagaccgcaaccaccgatgacaagcggcttcagagcacgttgaaaagaattggagtgaacactattcctggtattgaggaggtcaacatcttcaaggatgatattgttatccaattccagaaccctaaagtgcaagcatccattcctgcaaatacatgggtagtcagtggagtaccccagacaaaaagtctacaagaccttctgccaacaattatcaaccaactgggccctgataacctggagaacctcaagaggcttgctgagcatttccagaagcaggtacctggtgccgaagccagcgccagtgcagctgcacaggatgatgacgatgtccctgagcttgtcccaggagagacatttgaggaggctgcggaggtgaaggaggtgcctgaagcggaaccggaagagaagaaagagtcgtaattttgttgcgtgtcatatccattgtttgtgaagggtcgttatgtgttaccatacaccatgggagagacctggtcatctatgaaccccctgatgttcctcattcgtttacatgtcctccagtttttcagtttcttatttacctgggttttggtccaaacctgacaactcagcatttggtttggcgtcaattgtgcttcaggttccaaaaaaaacattactgcagtatgattatgttgagggtgtaggccagaccggcacatattttcatcgagccagagtttcagccaatgtttgttttctcggttggcgtccacagcagttccatatacagaccaaattttgcaaaagcaaaaaagata

SEQ ID NO: 202120 - DNA, 792 bp, Zea Mays
agacgctcctatgctatcaccattttagaatatatggtgttgtgcggaaagaaatctggtaccgccctgacatgtacttctaccgtgacatgctatacatgctagcgaggaacaagaaaattaatgaaacaaggcaggtatgggcggatctcaagtctgaagacgtgctatttgatcagcacacttatggcgacattgtgagggccttctgtgatgctgatttgattgaccttgcaatggaaatctatgatgacatgaggagctcccccgaccctcctctatcattgccgttccgtgttatcctgaaagggttggttccataccctgaactgagggagaagataaagcaggattttctggagcttttcccagatatgattgtgtatgatccaccagataccttatctgatatagatgaagaattcaagttttgatgaatgtacgccttcatccggattcagtgcttctgagttacattccctgcactgcaggcaaacctccatttctcgttcttttggtgggctagatcaattgtaaatgtagctgtctcgatctgcccagtagctgtggtaccaccaattttaacctcttgatgaaccatttttgttaatctatgctttggagaattgtctgcttccgtctgtgtctcgtcctactttgaatcaccttgttctgaagtttggtactgctgctgtgcactgagatttgtgttccgttgatccctgctatataatcatttgtacacttcaaagagaatcatttgtaggtcttagttagcctttaaggtcacat

SEQ ID NO: 202121 - DNA, 1235 bp, Zea Mays
caacatttcgattagcgaatcgctttctccacgaactcacgaatgcgttggccgctgggagaaggagcagttccgctctctcgtttgggtggacgacgaggaagaggaggccaacgcccacagcaacaggcgaccagcccgcgaagacgtggcaccaggataggtgctcctgtcctgagcttcaaatccgcaccccgcggccaagctgttacttgcgctgcggccttagcatgaggtggccgctggcgatctcgactcgccgccgccccctcctccttttcatccttctcgtcgtcctctacacgattcctgggacattttcatcgagatttgccagatgtgagggaggtgcacacgctatatacctttaagggtgaagaatcatggcagagcttccagaaaagaaatgcaagcgatgtggtttgtatgaggaggacacaattacacctgatgatgtctttgatgaatgggagatgtgttcgagtgatttcaagggtgggaaatacacccggtttaaggaaggccagttcaatgcaacattcctatgtccaaactgcactgcctcaactggacatggaaaccgtgaacctagtgaagatttggaaactaagaagacatctgttgtggtcatcataatagttagtgttcttgcatcagtccttctcaccattgccttgttcgggggctacaagtactggcagaagaagaagcgggagcaagaccaggcgcgattcctcaaactctttgaagagggagatgaccttgaagatgaactgggccttaccaatgaactctaaaacagtgctacagtcttacttcctatgttttcagatgtagtttccacgtatgatgtataggatgtttggttttcactgattttattgtgtatagcatccagtagtttatagagaaatgattccaacaaaactatgattcggttgaatatctgcacggaccgttcggtcgtgcagggctttgcctacgagacttgtggcaggcttagtgcgattccggactgttcggcgtaaggtgccggacgggccgttggaggacggttcggccgtgtccagagccgatgtaccatacagtgaggatggtgatatcattttccccggatatgagtttatcgacataccataatatggttgggactgagaagtcctatttgttgccgatgtttttaacgcaattattttagtgcccaatttatgtgacaaaaaaatcaggtgtatgac

SEQ ID NO: 202122 - DNA, 1388 bp, Zea Mays
agtatatcaatgtgggcagcctaaaccctatcttccgtcacccgcacagccgccgaggtggcttccatctcgctcgtgcgtcgatctcactgagcccccgccgttcttctctccacttcctgcgttctccagccgccgtcttcgctgataggctacgccgcctgctggcctgcgcgcgccgcagcctaaccctgtgtgcaccctgttcctaaccctgcgtgtggccgccgccgactggcttgcgtgcgcccgcgcctccgcctaaccctgctagcttgcgcgcccaacgccagaagccagatgccctgagcccaccgccggctgtctgtgcacgcaagtgaacccatccggctacctgggcacgccatccgacctccctgcgaacctctgtatcggccgtattcctcaagaacacagggcaaacaataagttctggagacagcaaaaccttaagggctactctccatttagtggttatggagtctcccaggaagcataaggccagtgccgtgccagtcaaggagaaagtgaagttagaagatggaaatgatttgttagtcaagcgcagaaagactgaattttcagggtccattgtccaaccagaacgggaaattgaagtctttgacccggagaacaaagtgcctgatggtctcccagttgaatattctactgacaaggatcccatggatgcgctcactagttgtgcagtacagaactttggtcaagcgaaaggtaacacatcagcaagttcgagactgccaaaaatatgcaaggcagctggctggaaagaaccatcatttgactttgaagaacaaggacctccgcataacagaatattcacatgcaaggtgaccgtccacttggatggactggtcaacaccattatggagtgtttcagcgaccccaaacctaagaagaaagctgcacgggagaacgccgcacaaggggcattatggtgccttgagcgctctggttatgtcaagtcatcttcagatgttcctgacctgtgcggccatcagcccttctgctagccagatctacccttgtaggagtattaatgttggtagacgggtgcagcttgttgctgtggcacagtggttatccatgcactgatgccatgatactcttgagaagttgagtcccttatgaatcttgagccggctgtgttggctcgtgtacctagtctctagctcgtttggttacatgcccaacgcctgcacttgtactgtgtaaatactgaactccggcgatcagtgcaatcaaactggagctcctagtcgagctctgtcttgcaattcgatgtccggccttctcatgttggatgttaaacaggagccacggaatccgttaatcatggggcgagtatgccatgtaaagatagacaggag

SEQ ID NO: 202123 - DNA, 1105 bp, Zea Mays
atcaatgtgggcagcctaaaccctatcttccgtcacccgcacagccgccgaggtggcttccatctcgctcgtgcgtcgatctcactgagcccccgccgttcttctctccacttcctgcgttctccagccgccgtcttcgctgataggctacgccgcctgctggcctgcgcgcgccgcagcctaaccctgtgtgcaccctgttcctaaccctgcgtgtggccgccgccgactggcttgcgtgcgcccgcgcctccgcctaaccctgctagcttgcgcgcccaacgccagaagccagatgccctgagcccaccgccggctgtctgtgcacgcaagtgaacccatccggctacctgggcacgccatccgacctccctgcgaacctctgtatcggccgtattcctcaagaacacagggcaaacaataagttctggagacagcaaaaccttaaggtaacacatcagcaagttcgagactgccaaaaatatgcaaggcagctggctggaaagaaccatcatttgactttgaagaacaaggacctccgcataacagaatattcacatgcaaggtgaccgtccacttggatggactggtcaacaccattatggagtgtttcagcgaccccaaacctaagaagaaagctgcacgggagaacgccgcacaaggggcattatggtgccttgagcgctctggttatgtcaagtcatcttcagatgttcctgacctgtgcggccatcagcccttctgctagccagatctacccttgtaggagtattaatgttggtagacgggtgcagcttgttgctgtggcacagtggttatccatgcactgatgccatgatactcttgagaagttgagtcccttatgaatcttgagccggctgtgttggctcgtgtacctagtctctagctcgtttggttacatgcccaacgcctgcacttgtactgtgtaaatactgaactccggcgatcagtgcaatcaaactggagctcctagtcgagctctgtcttgcaattcgatgtccggccttctcatgttggatgttaaacaggagccacggaatccgttaatcatggggcgagtatgccatgtaaagatagacaggag

SEQ ID NO: 202124 - DNA, 2031 bp, Zea Mays
gaagctggagccgcagccatctgaagctctagcaaacgttgacattgatgcgataaatggtaataataaagaaacttcaaaggcagcgaagcatttaatcaaacttttcccaaataaagtgatactcgaggcaccacaagatgaaatggagctttcacggtggaaccagatgttaaaccgagatattgaagtccttaaaggaaatgcaaacatttcaaaaatgcgttcttttctaacaagggttggtttggaatgcactgatcttgaggcgatattggtcaaggatcgcgttcttacaaatgagtgtattgataaaataattggttttgctttgagccatcaacttaagaactgtacaaatccagacccccctttgagtaatgtgcagtttgttctatccagcgaaagccttaagcatggtattgacatgttggaaagtatccagtctggctcgaagagcagcactaaaaggaaatcactgaagatgttatccctccacatgaaatcggtgttacctttgaggacattggagctttagaaagtgtcaaagatactctgaaggagttagtgatgcttcctttgcaaagacctgaactttttaaccgaggacaacttatgaagccgtgtaaaggaattttactttttggcccacctggtactggaaagacaatgcttgctaaggctgtggcaactgaggctggtgctaatttcataaacatatcgatgtcaagcatctcttcaaagtggcttggtgaaggagaaaaattcgtgaaagctgttttttcactggcaagtaaaattgctccaagtgtaatttttgtggacgaggttgatggcatgctgggaaggcgggagaaccctggagaacatgaagccatgcgtaagatgaaaaatgagtttatggtgaactgggatggtctgagaacaaaggagaaagaacgtgtattagtacttgctgcaactaacaggccatttgatcttgatgaggctgttattaggcggcttccaaggaggttgatggtgaatttgccagatgcatcaaataggagaaagattcttagtgtaatactagccaaggaagatttggcagacgatgttgatctagaagctatagctaacttgacagaagggtactcgggtagtgatctcaagaatctttgtgttactgctgctcatcgtcctattagggagattcttgaaaaggagaagaaggagagagcttcagcagaaacagaaaataggccattgcctctgtcgcacactagcaatgatgtccgtgcattaagaataagtgatttcatacatgcgcatgaacaggtgtgtgcaagtgtttcctcagattccagtaacatgaacgagcttgtgcaatggaatgatctctatggagaaggcgggtcaaggaaaaagacaacgctaagctacttcatgtagctgatgttgcaagtatatcgggagaagtgccctggcacaaagcagaaatggttggaggcagttgggggtgtgtatcgggtgcagttggaaaagagctaggttcacctgccatccatccattgagagaattgatggctcaggtggagcggaatggagtagtatacacattggttgctgcctccactctgggccatgtatcatgcatctggacatgacggatggtctggcttgcagttgtcctaacaacagttttgagtgcaacatatcactgtctgggaaagaaaagaaaagaaaatataccatttgtgttgttcccactccacaggaagcacggcgacgacatcgcccaacaacccttttccatcgtttcttaaaaaataattcattatttaggttgtaaacatttagagcctgtgcaagtgtacagtatgagcatcaggagtattaacctagtgttgatgtctatacctaatctaatttattgattagaatcatttaacatgaaatacatgattattttgtatcttcgtgccttcgttaggttgataatggtcgaattaaaactaaccttgtggttatgatctctgttcacatcgtgta

SEQ ID NO: 202125 - DNA, 2152 bp, Zea Mays
ctgaagcaaaaaaatagtggctttgtgtgttcgctggctcctagttcattttgaaagatcctcactacagtatacgaagaagctggagccgcagccatctgaagctctagcaaacgttgacattgatgcgataaatggtaataataaagaaacttcaaaggcagcgaagcatttaatcaaacttttcccaaataaagtgatactcgaggcaccacaagatgaaatggagctttcacggtggaaccagatgttaaaccgagatattgaagtccttaaaggaaatgcaaacatttcaaaaatgcgttcttttctaacaagggttggtttggaatgcactgatcttgaggcgatattggtcaaggatcgcgttcttacaaatgagtgtattgataaaataattggttttgctttgagccatcaacttaagaactgtacaaatccagacccccctttgagtaatgtgcagtttgttctatccagcgaaagccttaagcatggtattgacatgttggaaagtatccagtctggctcgaagagcagcactaaaaggaaatcactgaaggatattgctacggaaaatgagtttgaaaagaggcttcttgcagatgttatccctccacatgaaatcggtgttacctttgaggacattggagctttagaaagtgtcaaagatactctgaaggagttagtgatgcttcctttgcaaagacctgaactttttaaccgaggacaacttatgaagccgtgtaaaggaattttactttttggcccacctggtactggaaagacaatgcttgctaaggctgtggcaactgaggctggtgctaatttcataaacatatcgatgtcaagcatctcttcaaagtggcttggtgaaggagaaaaattcgtgaaagctgttttttcactggcaagtaaaattgctccaagtgtaatttttgtggacgaggttgatggcatgctgggaaggcgggagaaccctggagaacatgaagccatgcgtaagatgaaaaatgagtttatggtgaactgggatggtctgagaacaaaggagaaagaacgtgtattagtacttgctgcaactaacaggccatttgatcttgatgaggctgttattaggcggcttccaaggaggttgatggtgaatttgccagatgcatcaaataggagaaagattcttagtgtaatactagccaaggaagatttggcagacgatgttgatctagaagctatagctaacttgacagaagggtactcgggtagtgatctcaagaatctttgtgttactgctgctcatcgtcctattagggagattcttgaaaaggagaagaaggagagagcttcagcagaaacagaaaataggccattgcctctgtcgcacactagcaatgatgtccgtgcattaagaataagtgatttcatacatgcgcatgaacaggtgtgtgcaagtgtttcctcagattccagtaacatgaacgagcttgtgcaatggaatgatctctatggagaaggcgggtcaaggaaaaagacaacgctaagctacttcatgtagctgatgttgcaagtatatcgggagaagtgccctggcacaaagcagaaatggttggaggcagttgggggtgtgtatcgggtgcagttggaaaagagctaggttcacctgccatccatccattgagagaattgatggctcaggtggagcggaatggagtagtatacacattggttgctgcctccactctgggccatgtatcatgcatctggacatgacggatggtctggcttgcagttgtcctaacaacagttttgagtgcaacatatcactgtctgggaaagaaaagaaaagaaaatataccatttgtgttgttcccactccacaggaagcacggcgacgacatcgcccaacaacccttttccatcgtttcttaaaaaataattcattatttaggttgtaaacatttagagcctgtgcaagtgtacagtatgagcatcaggagtattaacctagtgttgatgtctatacctaatctaatttattgattagaatcatttaacatgaaatacatgattattttgtatcttcgtgccttcgttaggttgataatggtcgaattaaaactaaccttgtggttatgatctctgttcacatcgtgta

SEQ ID NO: 202126 - DNA, 3956 bp, Zea Mays
cccttcgcccctttctctctctctctctctcgcgtgttctcgcgtcgccgtcgccgctggtgcgagatggtcgagacgaggcggagcgccgccgcgaagcgcccggcggcgggggaagaggataagggggcgccggcatcgcctgcatcggctcccgcggagaacgcgggggcgggtccgagggcgggtgacgatgtcgcgtcgtcgcagcccccgaagcgagccaaggttgggtgcacggaggcggacaccgagaagccgttggtggcgccggcagaagtcggcaccgttgcgggcccactgcccaacacggctggtctgcaggcgctgaccggcgccatggacaagctggaggccctcttgaggcccaaggagggtcagtccaatccggccgggcataagcggggcactaacgataaagatataacggcgaagataaagagagccatggatttatcggaggatttatcagcaaagataaagaaaaccaaggataatgtggctgggatattgaataagccacaggcggcagccaccagcaggcgtcaggagccctggtgcagactaatttcacaatataccatgcaccctaccctttctatttatggtgcgcttttcactatcggtcatggagcacatcatgatttcagactgggcgaatcatccactgcctcacctgtttgtagactgaagcaggctaagcgaggtgcactccttgaagtctttgaatccaaagttgtccgtgtcaatgggaaatctttggacaaggctgccaaggttaccttaaatggaggagatgaaattatcttccgttcaccagtgaggcatgcttatatatttgagcaacttcatcaggagaaatcaagcactccagcattatcctccacttgcagtagtatccagcaggggcagtgctcacatttcaaagatattcagggtcatttatcatctaaagggcacaaagtcccaaccatttactttggaagaggtcggtcttcattgttgcctagtggttcatcagcagatccactcctgcttaatttatgtaaaacgatggagggccagagccagcatagctccgaagataatatatcatctggtcggtttcagctaataaaggaggatttgataaatgcaacggttgacgcgagtgacatttttgagtcatttgatagttgcccatattatctaagtgatcataccaaatgtgccctcatgtcatcagcatatgtacatttacactgcaaagactacttgaagtttacaaaagatatatcttctcttagtcaacgagtgctgctatctggcccaacaggaactgacatctatcaagaatatctggtgaaggcacttgcaaagaattttggtgctagattgctcactgtagattcttccatgctgtttggtgggcaaacttccaaggagccggagacatacaaaaagggtgatagagtgaggtatattggttcggtacagtcgacaggcgttattcttgatggacagagccccccagattttggttcacagggtgaaatatttcttcctttcgaagaaaatagatcatcgaaggttggtgtaaggtttgataaaaaaattctgggaggaaacgatcttggaggcaattgcgaagttgaccatggtttgttttgtccagttgattctttatgcctcgacattccaggatgggaggttacatccaaacatccattagatgtgatatttgagtttatctctgaagaaattcggcatggcccttttatcctttttctgaaggacacggagaaaatttgtggcaataatgattactatcatggtctgaaaagcaagctaaaacatttcccagctggtgcttttataattggatctcaaatccagcctgccaatcgcaaagagaaggcaaagggtagttctccttttctttcgaagttcccatacagccaaactatacttgacctcgcattacaggacattgatgcgataaatggtaataataaagaaacttcaaaggcagcgaagcatttaatcaaacttttcccaaataaagtgatactcgaggcaccacaagatgaaatggagctttcacggtggaaccagatgttaaaccgagatattgaagtccttaaaggaaatgcaaacatttcaaaaatgcgttcttttctaacaagggttggtttggaatgcactgatcttgaggcgatattggtcaaggatcgcgttcttacaaatgagtgtattgataaaataattggttttgctttgagccatcaacttaagaactgtacaaatccagacccccctttgagtaatgtgcagtttgttctatccagcgaaagccttaagcatggtattgacatgttggaaagtatccagtctggctcgaagagcagcactaaaaggaaatcactgaagatgttatccctccacatgaaatcggtgttacctttgaggacattggagctttagaaagtgtcaaagatactctgaaggagttagtgatgcttcctttgcaaagacctgaactttttaaccgaggacaacttatgaagccgtgtaaaggaattttactttttggcccacctggtactggaaagacaatgcttgctaaggctgtggcaactgaggctggtgctaatttcataaacatatcgatgtcaagcatctcttcaaagtggcttggtgaaggagaaaaattcgtgaaagctgttttttcactggcaagtaaaattgctccaagtgtaatttttgtggacgaggttgatggcatgctgggaaggcgggagaaccctggagaacatgaagccatgcgtaagatgaaaaatgagtttatggtgaactgggatggtctgagaacaaaggagaaagaacgtgtattagtacttgctgcaactaacaggccatttgatcttgatgaggctgttattaggcggcttccaaggaggttgatggtgaatttgccagatgcatcaaataggagaaagattcttagtgtaatactagccaaggaagatttggcagacgatgttgatctagaagctatagctaacttgacagaagggtactcgggtagtgatctcaagaatctttgtgttactgctgctcatcgtcctattagggagattcttgaaaaggagaagaaggagagagcttcagcagaaacagaaaataggccattgcctctgtcgcacactagcaatgatgtccgtgcattaagaataagtgatttcatacatgcgcatgaacaggtgtgtgcaagtgtttcctcagattccagtaacatgaacgagcttgtgcaatggaatgatctctatggagaaggcgggtcaaggaaaaagacaacgctaagctacttcatgtagctgatgttgcaagtatatcgggagaagtgccctggcacaaagcagaaatggttggaggcagttgggggtgtgtatcgggtgcagttggaaaagagctaggttcacctgccatccatccattgagagaattgatggctcaggtggagcggaatggagtagtatacacattggttgctgcctccactctgggccatgtatcatgcatctggacatgacggatggtctggcttgcagttgtcctaacaacagttttgagtgcaacatatcactgtctgggaaagaaaagaaaagaaaatataccatttgtgttgttcccactccacaggaagcacggcgacgacatcgcccaacaacccttttccatcgtttcttaaaaaataattcattatttaggttgtaaacatttagagcctgtgcaagtgtacagtatgagcatcaggagtattaacctagtgttgatgtctatacctaatctaatttattgattagaatcatttaacatgaaatacatgattattttgtatcttcgtgccttcgttaggttgataatggtcgaattaaaactaaccttgtggttatgatctctgttcacatcgtgta

SEQ ID NO: 202127 - DNA, 4743 bp, Zea Mays
cccttcgcccctttctctctctctctctctcgcgtgttctcgcgtcgccgtcgccgctggtgcgagatggtcgagacgaggcggagcgccgccgcgaagcgcccggcggcgggggaagaggataagggggcgccggcatcgcctgcatcggctcccgcggagaacgcgggggcgggtccgagggcgggtgacgatgtcgcgtcgtcgcagcccccgaagcgagccaaggttgggtgcacggaggcggacaccgagaagccgttggtggcgccggcagaagtcggcaccgttgcgggcccactgcccaacacggctggtctgcaggcgctgaccggcgccatggacaagctggaggccctcttgaggcccaaggagggtcagtccaatccggccgggcataagcggggcactaacgataaagatataacggcgaagataaagagagccatggatttatcggaggatttatcagcaaagataaagaaaaccaaggataatgtggctgggatattgaataagccacaggcggcagccaccagcaggcgtcaggagccctggtgcagactaatttcacaatataccatgcaccctaccctttctatttatggtgcgcttttcactatcggtcatggagcacatcatgatttcagactgggcgaatcatccactgcctcacctgtttgtagactgaagcaggctaagcgaggtgcactccttgaagtctttgaatccaaagttgtccgtgtcaatgggaaatctttggacaaggctgccaaggttaccttaaatggaggagatgaaattatcttccgttcaccagtgaggcatgcttatatatttgagcaacttcatcaggagaaatcaagcactccagcattatcctccacttgcagtagtatccagcaggggcagtgctcacatttcaaagatattcagggtcatttatcatctaaagggcacaaagtcccaaccatttactttggaagaggtcggtcttcattgttgcctagtggttcatcagcagatccactcctgcttaatttatgtaaaacgatggagggccagagccagcatagctccgaagataatatatcatctggtcggtttcagctaataaaggaggatttgataaatgcaacggttgacgcgagtgacatttttgagtcatttgatagttgcccatattatctaagtgatcataccaaatgtgccctcatgtcatcagcatatgtacatttacactgcaaagactacttgaagtttacaaaagatatatcttctcttagtcaacgagtgctgctatctggcccaacaggaactgacatctatcaagaatatctggtgaaggcacttgcaaagaattttggtgctagattgctcactgtagattcttccatgctgtttggtgggcaaacttccaaggagccggagacatacaaaaagggtgatagagtgaggtatattggttcggtacagtcgacaggcgttattcttgatggacagagccccccagattttggttcacagggtgaaatatttcttcctttcgaagaaaatagatcatcgaaggttggtgtaaggtttgataaaaaaattctgggaggaaacgatcttggaggcaattgcgaagttgaccatggtttgttttgtccagttgattctttatgcctcgacattccaggatgggaggttacatccaaacatccattagatgtgatatttgagtttatctctgaagaaattcggcatggcccttttatcctttttctgaaggacacggagaaaatttgtggcaataatgattactatcatggtctgaaaagcaagctaaaacatttcccagctggtgcttttataattggatctcaaatccagcctgccaatcgcaaagagaaggcaaagggtagttctccttttctttcgaagttcccatacagccaaactatacttgacctcgcattacaggcctgtctggtactgctctggctctagctctggctccggcgtctccttgctatagtgcgtggaggagccggggccgctgaagcaaaaaaatagtggctttgtgtgttcgctggctcctagttcattttgaaagatcctcactacagtatacgaagaagctggagccgcagccatctgaagctctagcaaacgttgtaaggtttctgatggaccatctactaccaatttatttatgatcttatgagcatttatagcttgtatatatattgtatggtcaaactgactagtctggattttgaattatgaccagaatgacatgaccatttgttggcatgctgtcataatagttttacaaatacgaggcctggtttttgttcccaggcaagggccgcaaggctgctttgccaggcatgattccctggcattctatttcggtcgcttggggttgagatcacattgcctggctggcaagctgcctgaccgggcacgatccaaaaagccccaaattgcggtgttacatgcacagaactacataaagtttcatttatgtcatacccagatatccatttttgtactcccagcttacggtttatcttcttatgtctcaatttgtcttccactatgacttccattattatactacgggagggcgtctgcagtcttgttatttgtactaatcatatgttgtctagtttctactttgttggcgaattccatattataacctaatctatggaaatgcaggacattgatgcgataaatggtaataataaagaaacttcaaaggcagcgaagcatttaatcaaacttttcccaaataaagtgatactcgaggcaccacaagatgaaatggagctttcacggtggaaccagatgttaaaccgagatattgaagtccttaaaggaaatgcaaacatttcaaaaatgcgttcttttctaacaagggttggtttggaatgcactgatcttgaggcgatattggtcaaggatcgcgttcttacaaatgagtgtattgataaaataattggttttgctttgagccatcaacttaagaactgtacaaatccagacccccctttgagtaatgtgcagtttgttctatccagcgaaagccttaagcatggtattgacatgttggaaagtatccagtctggctcgaagagcagcactaaaaggaaatcactgaaggatattgctacggaaaatgagtttgaaaagaggcttcttgcagatgttatccctccacatgaaatcggtgttacctttgaggacattggagctttagaaagtgtcaaagatactctgaaggagttagtgatgcttcctttgcaaagacctgaactttttaaccgaggacaacttatgaagccgtgtaaaggaattttactttttggcccacctggtactggaaagacaatgcttgctaaggctgtggcaactgaggctggtgctaatttcataaacatatcgatgtcaagcatctcttcaaagtggcttggtgaaggagaaaaattcgtgaaagctgttttttcactggcaagtaaaattgctccaagtgtaatttttgtggacgaggttgatggcatgctgggaaggcgggagaaccctggagaacatgaagccatgcgtaagatgaaaaatgagtttatggtgaactgggatggtctgagaacaaaggagaaagaacgtgtattagtacttgctgcaactaacaggccatttgatcttgatgaggctgttattaggcggcttccaaggaggttgatggtgaatttgccagatgcatcaaataggagaaagattcttagtgtaatactagccaaggaagatttggcagacgatgttgatctagaagctatagctaacttgacagaagggtactcgggtagtgatctcaagaatctttgtgttactgctgctcatcgtcctattagggagattcttgaaaaggagaagaaggagagagcttcagcagaaacagaaaataggccattgcctctgtcgcacactagcaatgatgtccgtgcattaagaataagtgatttcatacatgcgcatgaacaggtgtgtgcaagtgtttcctcagattccagtaacatgaacgagcttgtgcaatggaatgatctctatggagaaggcgggtcaaggaaaaagacaacgctaagctacttcatgtagctgatgttgcaagtatatcgggagaagtgccctggcacaaagcagaaatggttggaggcagttgggggtgtgtatcgggtgcagttggaaaagagctaggttcacctgccatccatccattgagagaattgatggctcaggtggagcggaatggagtagtatacacattggttgctgcctccactctgggccatgtatcatgcatctggacatgacggatggtctggcttgcagttgtcctaacaacagttttgagtgcaacatatcactgtctgggaaagaaaagaaaagaaaatataccatttgtgttgttcccactccacaggaagcacggcgacgacatcgcccaacaacccttttccatcgtttcttaaaaaataattcattatttaggttgtaaacatttagagcctgtgcaagtgtacagtatgagcatcaggagtattaacctagtgttgatgtctatacctaatctaatttattgattagaatcatttaacatgaaatacatgattattttgtatcttcgtgccttcgttaggttgataatggtcgaattaaaactaaccttgtggttatgatctctgttcacatcgtgta

SEQ ID NO: 202128 - DNA, 3971 bp, Zea Mays
cttccccttcgcccctttctctctctctctctctcgcgtgttctcgcgtcgccgtcgccgctggtgcgagatggtcgagacgaggcggagcgccgccgcgaagcgcccggcggcgggggaagaggataagggggcgccggcatcgcctgcatcggctcccgcggagaacgcgggggcgggtccgagggcgggtgacgatgtcgcgtcgtcgcagcccccgaagcgagccaaggttgggtgcacggaggcggacaccgagaagccgttggtggcgccggcagaagtcggcaccgttgcgggcccactgcccaacacggctggtctgcaggcgctgaccggcgccatggacaagctggaggccctcttgaggcccaaggagggtcagtccaatccggccgggcataagcggggcactaacgataaagatataacggcgaagataaagagagccatggatttatcggaggatttatcagcaaagataaagaaaaccaaggataatgtggctgggatattgaataagccacaggcggcagccaccagcaggcgtcaggagccctggtgcagactaatttcacaatataccatgcaccctaccctttctatttatggtgcgcttttcactatcggtcatggagcacatcatgatttcagactgggcgaatcatccactgcctcacctgtttgtagactgaagcaggctaagcgaggtgcactccttgaagtctttgaatccaaagttgtccgtgtcaatgggaaatctttggacaaggctgccaaggttaccttaaatggaggagatgaaattatcttccgttcaccagtgaggcatgcttatatatttgagcaacttcatcaggagaaatcaagcactccagcattatcctccacttgcagtagtatccagcaggggcagtgctcacatttcaaagatattcagggtcatttatcatctaaagggcacaaagtcccaaccatttactttggaagaggtcggtcttcattgttgcctagtggttcatcagcagatccactcctgcttaatttatgtaaaacgatggagggccagagccagcatagctccgaagataatatatcatctggtcggtttcagctaataaaggaggatttgataaatgcaacggttgacgcgagtgacatttttgagtcatttgatagttgcccatattatctaagcatatgtacatttacactgcaaagactacttgaagtttacaaaagatatatcttctcttagtcaacgagtgctgctatctggcccaacaggaactgacatctatcaagaatatctggtgaaggcacttgcaaagaattttggtgctagattgctcactgtagattcttccatgctgtttggtgggcaaacttccaaggagccggagacatacaaaaagggtgatagagtgaggtatattggttcggtacagtcgacaggcgttattcttgatggacagagccccccagattttggttcacagggtgaaatatttcttcctttcgaagaaaatagatcatcgaaggttggtgtaaggtttgataaaaaaattctgggaggaaacgatcttggaggcaattgcgaagttgaccatggtttgttttgtccagttgattctttatgcctcgacattccaggatgggaggttacatccaaacatccattagatgtgatatttgagtttatctctgaagaaattcggcatggcccttttatcctttttctgaaggacacggagaaaatttgtggcaataatgattactatcatggtctgaaaagcaagctaaaacatttcccagctggtgcttttataattggatctcaaatccagcctgccaatcgcaaagagaaggcaaagggtagttctccttttctttcgaagttcccatacagccaaactatacttgacctcgcattacaggacattgatgcgataaatggtaataataaagaaacttcaaaggcagcgaagcatttaatcaaacttttcccaaataaagtgatactcgaggcaccacaagatgaaatggagctttcacggtggaaccagatgttaaaccgagatattgaagtccttaaaggaaatgcaaacatttcaaaaatgcgttcttttctaacaagggttggtttggaatgcactgatcttgaggcgatattggtcaaggatcgcgttcttacaaatgagtgtattgataaaataattggttttgctttgagccatcaacttaagaactgtacaaatccagacccccctttgagtaatgtgcagtttgttctatccagcgaaagccttaagcatggtattgacatgttggaaagtatccagtctggctcgaagagcagcactaaaaggaaatcactgaaggatattgctacggaaaatgagtttgaaaagaggcttcttgcagatgttatccctccacatgaaatcggtgttacctttgaggacattggagctttagaaagtgtcaaagatactctgaaggagttagtgatgcttcctttgcaaagacctgaactttttaaccgaggacaacttatgaagccgtgtaaaggaattttactttttggcccacctggtactggaaagacaatgcttgctaaggctgtggcaactgaggctggtgctaatttcataaacatatcgatgtcaagcatctcttcaaagtggcttggtgaaggagaaaaattcgtgaaagctgttttttcactggcaagtaaaattgctccaagtgtaatttttgtggacgaggttgatggcatgctgggaaggcgggagaaccctggagaacatgaagccatgcgtaagatgaaaaatgagtttatggtgaactgggatggtctgagaacaaaggagaaagaacgtgtattagtacttgctgcaactaacaggccatttgatcttgatgaggctgttattaggcggcttccaaggaggttgatggtgaatttgccagatgcatcaaataggagaaagattcttagtgtaatactagccaaggaagatttggcagacgatgttgatctagaagctatagctaacttgacagaagggtactcgggtagtgatctcaagaatctttgtgttactgctgctcatcgtcctattagggagattcttgaaaaggagaagaaggagagagcttcagcagaaacagaaaataggccattgcctctgtcgcacactagcaatgatgtccgtgcattaagaataagtgatttcatacatgcgcatgaacaggtgtgtgcaagtgtttcctcagattccagtaacatgaacgagcttgtgcaatggaatgatctctatggagaaggcgggtcaaggaaaaagacaacgctaagctacttcatgtagctgatgttgcaagtatatcgggagaagtgccctggcacaaagcagaaatggttggaggcagttgggggtgtgtatcgggtgcagttggaaaagagctaggttcacctgccatccatccattgagagaattgatggctcaggtggagcggaatggagtagtatacacattggttgctgcctccactctgggccatgtatcatgcatctggacatgacggatggtctggcttgcagttgtcctaacaacagttttgagtgcaacatatcactgtctgggaaagaaaagaaaagaaaatataccatttgtgttgttcccactccacaggaagcacggcgacgacatcgcccaacaacccttttccatcgtttcttaaaaaataattcattatttaggttgtaaacatttagagcctgtgcaagtgtacagtatgagcatcaggagtattaacctagtgttgatgtctatacctaatctaatttattgattagaatcatttaacatgaaatacatgattattttgtatcttcgtgccttcgttaggttgataatggtcgaattaaaactaaccttgtggttatgatctctgttcacatcgtgta

SEQ ID NO: 202129 - DNA, 3816 bp, Zea Mays
aagaatccttcggttttgtattctactccgcttcctttcgtcttccccttcgcccctttctctctctctctctctcgcgtgttctcgcgtcgccgtcgccgctggtgcgagatggtcgagacgaggcggagcgccgccgcgaagcgcccggcggcgggggaagaggataagggggcgccggcatcgcctgcatcggctcccgcggagaacgcgggggcgggtccgagggcgggtgacgatgtcgcgtcgtcgcagcccccgaagcgagccaaggttgggtgcacggaggcggacaccgagaagccgttggtggcgccggcagaagtcggcaccgttgcgggcccactgcccaacacggctggtctgcaggcgctgaccggcgccatggacaagctggaggccctcttgaggcccaaggagggtcagtccaatccggccgggcataagcggggcactaacgataaagatataacggcgaagataaagagagccatggatttatcggaggatttatcagcaaagataaagaaaaccaaggataatgtggctgggatattgaataagccacaggcggcagccaccagcaggcgtcaggagccctggtgcagactaatttcacaatataccatgcaccctaccctttctatttatggtgcgcttttcactatcggtcatggagcacatcatgatttcagactgggcgaatcatccactgcctcacctgtttgtagactgaagcaggctaagcgaggtgcactccttgaagtctttgaatccaaagttgtccgtgtcaatgggaaatctttggacaaggctgccaaggttaccttaaatggaggagatgaaattatcttccgttcaccagtgaggcatgcttatatatttgagcaacttcatcaggagaaatcaagcactccagcattatcctccacttgcagtagtatccagcaggggcagtgctcacatttcaaagatattcagggtcatttatcatctaaagggcacaaagtcccaaccatttactttggaagaggtcggtcttcattgttgcctagtggttcatcagcagatccactcctgcttaatttatgtaaaacgatggagggccagagccagcatagctccgaagataatatatcatctggtcggtttcagctaataaaggaggatttgataaatgcaacggttgacgcgagtgacatttttgagtcatttgatagttgcccatattatctaagtgatcataccaaatgtgccctcatgtcatcagcatatgtacatttacactgcaaagactacttgaagtttacaaaagatatatcttctcttagtcaacgagtgctgctatctggcccaacaggaactgacatctatcaagaatatctggtgaaggcacttgcaaagaattttggtgctagattgctcactgtagattcttccatgctgtttggtgggcaaacttccaaggagccggagacatacaaaaagggtgatagagtgaggtatattggttcggtacagtcgacaggcgttattcttgatggacagagccccccagattttggttcacagggtgaaatatttcttcctttcgaagaaaatagatcatcgaaggttggtgtaaggtttgataaaaaaattctgggaggaaacgatcttggaggcaattgcgaagttgaccatggtttgttttgtccagttgattctttatgcctcgacattccaggatgggaggttacatccaaacatccattagatgtgatatttgagtttatctctgaagaaattcggcatggcccttttatcctttttctgaaggacacggagaaaatttgtggcaataatgattactatcatggtctgaaaagcaagctaaaacatttcccagctggtgcttttataattggatctcaaatccagcctgccaatcgcaaagagaaggcaaagggtagttctccttttctttcgaagttcccatacagccaaactatacttgacctcgcattacaggacattgatgcgataaatggtaataataaagaaacttcaaaggcagcgaagcatttaatcaaacttttcccaaataaagtgatactcgaggcaccacaagatgaaatggagctttcacggtggaaccagatgttaaaccgagatattgaagtccttaaaggaaatgcaaacatttcaaaaatgcgttcttttctaacaagggttggtttggaatgcactgatcttgaggcgatattggtcaaggatcgcgttcttacaaatgagtgtattgataaaataattggttttgctttgagccatcaacttaagaactgtacaaatccagacccccctttgagtaatgtgcagtttgttctatccagcgaaagccttaagcatggtattgacatgttggaaagtatccagtctggctcgaagagcagcactaaaaggaaatcactgaagatgttatccctccacatgaaatcggtgttacctttgaggacattggagctttagaaagtgtcaaagatactctgaaggagttagtgatgcttcctttgcaaagacctgaactttttaaccgaggacaacttatgaagccgtgtaaaggaattttactttttggcccacctggtactggaaagacaatgcttgctaaggctgtggcaactgaggctggtgctaatttcataaacatatcgatgtcaagcatctcttcaaagtggcttggtgaaggagaaaaattcgtgaaagctgttttttcactggcaagtaaaattgctccaagtgtaatttttgtggacgaggttgatggtgaatttgccagatgcatcaaataggagaaagattcttagtgtaatactagccaaggaagatttggcagacgatgttgatctagaagctatagctaacttgacagaagggtactcgggtagtgatctcaagaatctttgtgttactgctgctcatcgtcctattagggagattcttgaaaaggagaagaaggagagagcttcagcagaaacagaaaataggccattgcctctgtcgcacactagcaatgatgtccgtgcattaagaataagtgatttcatacatgcgcatgaacaggtgtgtgcaagtgtttcctcagattccagtaacatgaacgagcttgtgcaatggaatgatctctatggagaaggcgggtcaaggaaaaagacaacgctaagctacttcatgtagctgatgttgcaagtatatcgggagaagtgccctggcacaaagcagaaatggttggaggcagttgggggtgtgtatcgggtgcagttggaaaagagctaggttcacctgccatccatccattgagagaattgatggctcaggtggagcggaatggagtagtatacacattggttgctgcctccactctgggccatgtatcatgcatctggacatgacggatggtctggcttgcagttgtcctaacaacagttttgagtgcaacatatcactgtctgggaaagaaaagaaaagaaaatataccatttgtgttgttcccactccacaggaagcacggcgacgacatcgcccaacaacccttttccatcgtttcttaaaaaataattcattatttaggttgtaaacatttagagcctgtgcaagtgtacagtatgagcatcaggagtattaacctagtgttgatgtctatacctaatctaatttattgattagaatcatttaacatgaaatacatgattattttgtatcttcgtgccttcgttaggttgataatggtcgaattaaaactaaccttgtggttatgatctctgttcacatcgtgta

SEQ ID NO: 202130 - DNA, 4030 bp, Zea Mays
tactaatccaaagaatccttcggttttgtattctactccgcttcctttcgtcttccccttcgcccctttctctctctctctctctcgcgtgttctcgcgtcgccgtcgccgctggtgcgagatggtcgagacgaggcggagcgccgccgcgaagcgcccggcggcgggggaagaggataagggggcgccggcatcgcctgcatcggctcccgcggagaacgcgggggcgggtccgagggcgggtgacgatgtcgcgtcgtcgcagcccccgaagcgagccaaggttgggtgcacggaggcggacaccgagaagccgttggtggcgccggcagaagtcggcaccgttgcgggcccactgcccaacacggctggtctgcaggcgctgaccggcgccatggacaagctggaggccctcttgaggcccaaggagggtcagtccaatccggccgggcataagcggggcactaacgataaagatataacggcgaagataaagagagccatggatttatcggaggatttatcagcaaagataaagaaaaccaaggataatgtggctgggatattgaataagccacaggcggcagccaccagcaggcgtcaggagccctggtgcagactaatttcacaatataccatgcaccctaccctttctatttatggtgcgcttttcactatcggtcatggagcacatcatgatttcagactgggcgaatcatccactgcctcacctgtttgtagactgaagcaggctaagcgaggtgcactccttgaagtctttgaatccaaagttgtccgtgtcaatgggaaatctttggacaaggctgccaaggttaccttaaatggaggagatgaaattatcttccgttcaccagtgaggcatgcttatatatttgagcaacttcatcaggagaaatcaagcactccagcattatcctccacttgcagtagtatccagcaggggcagtgctcacatttcaaagatattcagggtcatttatcatctaaagggcacaaagtcccaaccatttactttggaagaggttcatcagcagatccactcctgcttaatttatgtaaaacgatggagggccagagccagcatagctccgaagataatatatcatctggtcggtttcagctaataaaggaggatttgataaatgcaacggttgacgcgagtgacatttttgagtcatttgatagttgcccatattatctaagtgatcataccaaatgtgccctcatgtcatcagcatatgtacatttacactgcaaagactacttgaagtttacaaaagatatatcttctcttagtcaacgagtgctgctatctggcccaacaggaactgacatctatcaagaatatctggtgaaggcacttgcaaagaattttggtgctagattgctcactgtagattcttccatgctgtttggtgggcaaacttccaaggagccggagacatacaaaaagggtgatagagtgaggtatattggttcggtacagtcgacaggcgttattcttgatggacagagccccccagattttggttcacagggtgaaatatttcttcctttcgaagaaaatagatcatcgaaggttggtgtaaggtttgataaaaaaattctgggaggaaacgatcttggaggcaattgcgaagttgaccatggtttgttttgtccagttgattctttatgcctcgacattccaggatgggaggttacatccaaacatccattagatgtgatatttgagtttatctctgaagaaattcggcatggcccttttatcctttttctgaaggacacggagaaaatttgtggcaataatgattactatcatggtctgaaaagcaagctaaaacatttcccagctggtgcttttataattggatctcaaatccagcctgccaatcgcaaagagaaggcaaagggtagttctccttttctttcgaagttcccatacagccaaactatacttgacctcgcattacaggacattgatgcgataaatggtaataataaagaaacttcaaaggcagcgaagcatttaatcaaacttttcccaaataaagtgatactcgaggcaccacaagatgaaatggagctttcacggtggaaccagatgttaaaccgagatattgaagtccttaaaggaaatgcaaacatttcaaaaatgcgttcttttctaacaagggttggtttggaatgcactgatcttgaggcgatattggtcaaggatcgcgttcttacaaatgagtgtattgataaaataattggttttgctttgagccatcaacttaagaactgtacaaatccagacccccctttgagtaatgtgcagtttgttctatccagcgaaagccttaagcatggtattgacatgttggaaagtatccagtctggctcgaagagcagcactaaaaggaaatcactgaaggatattgctacggaaaatgagtttgaaaagaggcttcttgcagatgttatccctccacatgaaatcggtgttacctttgaggacattggagctttagaaagtgtcaaagatactctgaaggagttagtgatgcttcctttgcaaagacctgaactttttaaccgaggacaacttatgaagccgtgtaaaggaattttactttttggcccacctggtactggaaagacaatgcttgctaaggctgtggcaactgaggctggtgctaatttcataaacatatcgatgtcaagcatctcttcaaagtggcttggtgaaggagaaaaattcgtgaaagctgttttttcactggcaagtaaaattgctccaagtgtaatttttgtggacgaggttgatggcatgctgggaaggcgggagaaccctggagaacatgaagccatgcgtaagatgaaaaatgagtttatggtgaactgggatggtctgagaacaaaggagaaagaacgtgtattagtacttgctgcaactaacaggccatttgatcttgatgaggctgttattaggcggcttccaaggaggttgatggtgaatttgccagatgcatcaaataggagaaagattcttagtgtaatactagccaaggaagatttggcagacgatgttgatctagaagctatagctaacttgacagaagggtactcgggtagtgatctcaagaatctttgtgttactgctgctcatcgtcctattagggagattcttgaaaaggagaagaaggagagagcttcagcagaaacagaaaataggccattgcctctgtcgcacactagcaatgatgtccgtgcattaagaataagtgatttcatacatgcgcatgaacaggtgtgtgcaagtgtttcctcagattccagtaacatgaacgagcttgtgcaatggaatgatctctatggagaaggcgggtcaaggaaaaagacaacgctaagctacttcatgtagctgatgttgcaagtatatcgggagaagtgccctggcacaaagcagaaatggttggaggcagttgggggtgtgtatcgggtgcagttggaaaagagctaggttcacctgccatccatccattgagagaattgatggctcaggtggagcggaatggagtagtatacacattggttgctgcctccactctgggccatgtatcatgcatctggacatgacggatggtctggcttgcagttgtcctaacaacagttttgagtgcaacatatcactgtctgggaaagaaaagaaaagaaaatataccatttgtgttgttcccactccacaggaagcacggcgacgacatcgcccaacaacccttttccatcgtttcttaaaaaataattcattatttaggttgtaaacatttagagcctgtgcaagtgtacagtatgagcatcaggagtattaacctagtgttgatgtctatacctaatctaatttattgattagaatcatttaacatgaaatacatgattattttgtatcttcgtgccttcgttaggttgataatggtcgaattaaaactaaccttgtggttatgatctctgttcacatcgtgta

SEQ ID NO: 202131 - DNA, 4082 bp, Zea Mays
tggtggtcgcggcggccgccttatttttattccgcttcccctactaatgcattactactaatccaaagaatccttcggttttgtattctactccgcttcctttcgtcttccccttcgcccctttctctctctctctctctcgcgtgttctcgcgtcgccgtcgccgctggtgcgagatggtcgagacgaggcggagcgccgccgcgaagcgcccggcggcgggggaagaggataagggggcgccggcatcgcctgcatcggctcccgcggagaacgcgggggcgggtccgagggcgggtgacgatgtcgcgtcgtcgcagcccccgaagcgagccaaggttgggtgcacggaggcggacaccgagaagccgttggtggcgccggcagaagtcggcaccgttgcgggcccactgcccaacacggctggtctgcaggcgctgaccggcgccatggacaagctggaggccctcttgaggcccaaggagggtcagtccaatccggccgggcataagcggggcactaacgataaagatataacggcgaagataaagagagccatggatttatcggaggatttatcagcaaagataaagaaaaccaaggataatgtggctgggatattgaataagccacaggcggcagccaccagcaggcgtcaggagccctggtgcagactaatttcacaatataccatgcaccctaccctttctatttatggtgcgcttttcactatcggtcatggagcacatcatgatttcagactgggcgaatcatccactgcctcacctgtttgtagactgaagcaggctaagcgaggtgcactccttgaagtctttgaatccaaagttgtccgtgtcaatgggaaatctttggacaaggctgccaaggttaccttaaatggaggagatgaaattatcttccgttcaccagtgaggcatgcttatatatttgagcaacttcatcaggagaaatcaagcactccagcattatcctccacttgcagtagtatccagcaggggcagtgctcacatttcaaagatattcagggtcatttatcatctaaagggcacaaagtcccaaccatttactttggaagaggtcggtcttcattgttgcctagtggttcatcagcagatccactcctgcttaatttatgtaaaacgatggagggccagagccagcatagctccgaagataatatatcatctggtcggtttcagctaataaaggaggatttgataaatgcaacggttgacgcgagtgacatttttgagtcatttgatagttgcccatattatctaagtgatcataccaaatgtgccctcatgtcatcagcatatgtacatttacactgcaaagactacttgaagtttacaaaagatatatcttctcttagtcaacgagtgctgctatctggcccaacaggaactgacatctatcaagaatatctggtgaaggcacttgcaaagaattttggtgctagattgctcactgtagattcttccatgctgtttggtgggcaaacttccaaggagccggagacatacaaaaagggtgatagagtgaggtatattggttcggtacagtcgacaggcgttattcttgatggacagagccccccagattttggttcacagggtgaaatatttcttcctttcgaagaaaatagatcatcgaaggttggtgtaaggtttgataaaaaaattctgggaggaaacgatcttggaggcaattgcgaagttgaccatggtttgttttgtccaggatgggaggttacatccaaacatccattagatgtgatatttgagtttatctctgaagaaattcggcatggcccttttatcctttttctgaaggacacggagaaaatttgtggcaataatgattactatcatggtctgaaaagcaagctaaaacatttcccagctggtgcttttataattggatctcaaatccagcctgccaatcgcaaagagaaggcaaagggtagttctccttttctttcgaagttcccatacagccaaactatacttgacctcgcattacaggacattgatgcgataaatggtaataataaagaaacttcaaaggcagcgaagcatttaatcaaacttttcccaaataaagtgatactcgaggcaccacaagatgaaatggagctttcacggtggaaccagatgttaaaccgagatattgaagtccttaaaggaaatgcaaacatttcaaaaatgcgttcttttctaacaagggttggtttggaatgcactgatcttgaggcgatattggtcaaggatcgcgttcttacaaatgagtgtattgataaaataattggttttgctttgagccatcaacttaagaactgtacaaatccagacccccctttgagtaatgtgcagtttgttctatccagcgaaagccttaagcatggtattgacatgttggaaagtatccagtctggctcgaagagcagcactaaaaggaaatcactgaaggatattgctacggaaaatgagtttgaaaagaggcttcttgcagatgttatccctccacatgaaatcggtgttacctttgaggacattggagctttagaaagtgtcaaagatactctgaaggagttagtgatgcttcctttgcaaagacctgaactttttaaccgaggacaacttatgaagccgtgtaaaggaattttactttttggcccacctggtactggaaagacaatgcttgctaaggctgtggcaactgaggctggtgctaatttcataaacatatcgatgtcaagcatctcttcaaagtggcttggtgaaggagaaaaattcgtgaaagctgttttttcactggcaagtaaaattgctccaagtgtaatttttgtggacgaggttgatggcatgctgggaaggcgggagaaccctggagaacatgaagccatgcgtaagatgaaaaatgagtttatggtgaactgggatggtctgagaacaaaggagaaagaacgtgtattagtacttgctgcaactaacaggccatttgatcttgatgaggctgttattaggcggcttccaaggaggttgatggtgaatttgccagatgcatcaaataggagaaagattcttagtgtaatactagccaaggaagatttggcagacgatgttgatctagaagctatagctaacttgacagaagggtactcgggtagtgatctcaagaatctttgtgttactgctgctcatcgtcctattagggagattcttgaaaaggagaagaaggagagagcttcagcagaaacagaaaataggccattgcctctgtcgcacactagcaatgatgtccgtgcattaagaataagtgatttcatacatgcgcatgaacaggtgtgtgcaagtgtttcctcagattccagtaacatgaacgagcttgtgcaatggaatgatctctatggagaaggcgggtcaaggaaaaagacaacgctaagctacttcatgtagctgatgttgcaagtatatcgggagaagtgccctggcacaaagcagaaatggttggaggcagttgggggtgtgtatcgggtgcagttggaaaagagctaggttcacctgccatccatccattgagagaattgatggctcaggtggagcggaatggagtagtatacacattggttgctgcctccactctgggccatgtatcatgcatctggacatgacggatggtctggcttgcagttgtcctaacaacagttttgagtgcaacatatcactgtctgggaaagaaaagaaaagaaaatataccatttgtgttgttcccactccacaggaagcacggcgacgacatcgcccaacaacccttttccatcgtttcttaaaaaataattcattatttaggttgtaaacatttagagcctgtgcaagtgtacagtatgagcatcaggagtattaacctagtgttgatgtctatacctaatctaatttattgattagaatcatttaacatgaaatacatgattattttgtatcttcgtgccttcgttaggttgataatggtcgaattaaaactaaccttgtggttatgatctctgttcacatcgtgta

SEQ ID NO: 202132 - DNA, 809 bp, Zea Mays
actcgagaaacggatccctaatcgctgaaccaaaactacaaaacgaagtgacgatactgccctcgacctctcgaggtatcgagtctcgaccaacccatacgcacctaccctccgccaccgttcccccctccccatctcgcccgccgttctcgtccttgtagatctcctcgcacctcgcccattcgcttcaccaagggtttaagaccggcggcgatggcggcgaagctggcgcagctgcgcacacaggtaacgcgtgcggcggagttcgcctcgaagcacggctgctcctactacaaggaggtaatggagaagaacaagcagtacgtcgttcagccccccaccgtcgagaagtgccaggagctctccaagcagctcttttacacccgcctcgcaagcctaccaggtcgctatgagtcattctggaaggagcttgattgtgtcaagcaggtatggaagaacaggaaggacctcacggtcgaggaccttggcattgcgagtttatttggagttgagctctatgcatggttctgcgtaggcgagattgtcggcagaggtttcaccttgaccggctataaggtctagatgatttccactggtcaagacctgctttataattgatactcttagctgatgcttgtcgaaacgacgacgatggtacctgccttggttcacaattttgtttctttgtaagagtttacctagtgctgaatgccagcaaagacgggcacatcgttgcaacattgcctcaataatttgctcgctcaattgttgattttggtgcatgtaattctttgttggttgcaaattaa

SEQ ID NO: 202133 - DNA, 3205 bp, Zea Mays
tctctgtctgaaagcacagcaagttggtatttggatcaggactcgtagggagcaaaaacggcagcgcattgccaggacagaggtcatcctgaagttctccttaagtcggacacttagaccaggctgacgatgtcagcttccgagttcagaattccataccagcaagtttcttcttcacagcctgttgagaatgtgaatcagtttaagacctgtcgatgtggggagggagacccaaactccacatctgaaactggtgacagcccgccggcctcttgtcctaattgtcaggtccttaagagtggacatttactactttcatctaaaggaattggatggacatcatggaaaaagcgctggtttattcttacaagggcatccctagttttcttcagaagtgaccctaatgtacctccacccagaggagctgaaccgattgttacacttggtggaatcgacttgaatagctctggaagcgttgccgtcaaagaagaaaggaaacttttgacagtgttctttcctgatggtcgtgatggacgaactttcactctgaaggcagaaactacagaagacctaaatgagtggagaaatgcactggagagtgctttagcacaggcacccagcgtagcaaatacaatggggcaaaatccaatattcagcactgatgtagcagcagaacctgctgaagctccagctgaacagtcggaggacagttctgttattggcagacctgcagaatttgcacttgtagatgctgatggtagtccatcatttctggagaaggccctgaagttcattgaagatcatggggtaaaggtagagggcatcctgcgtcagtctgctgatgttgaagaagtcaaacgcagaattcaggattatgaaaaggggaaaaacgagttctctccagaagaggatgctcatgttattggtgactgtattaagtatgttcttagagagatgccatcatctccagttcctgcatcatgttgcactgccctggttaaagcataccgaagtgacaaggcaagaagacttgatgagataagtagggtgatatatgaagttttccctgaaccaaatcgacaattgttgcagaggactcttaagatgatgcaaattgttgagtcacacaaagctgtgaataggatgtctcaatctgctttggcagcttgcatggcaccacttcttctccgacctcttcttcttggagaatgtgacatagacaatgaatttagtatgggaggggacagttcatttcagctacttcaagctgctgcggctgcgaatcatgcacaagctattgttattattatgatggaggaatttgatcagatatttgatgacttggaagaaggttcctgttcttcagatgcttataccgagtctgaggatgatgatgttgataaggaatattccacagataatgacattaatgatgatgatgacggttcttatgattctggtgaagatgacattgaagaagacttggactactctgatgacagtgaacatgacagtaagatcaacactaatgtcaaggatggcaaggttaaaaacaatatctcagaaactgcagaagttgcacaggcaaagggtgcttctcatatggagaccaatagtcaatccaaccagaaacaagaatcatgtggaccaaatggatccaaagatcgtatactaagatcaacttctcgttcatcatcctccagagaaaaatctatggagaaatcatgcagttcggcacacaggggaaaaagaaccttatggggccgtacttcagcaagaaaagacctgtcaacagaggagattgaatgctgcagtgatgatgagtcccttattgagaaacttgagagcaacaaggttgatctccaatcgaaaattgcaaaggaggccaaagaaaatgctattctacagtcaagtctagaaaagcggaaagaagaactacatgagcgccgtttagcacttgaaaaggaagttgaaaatttgagggagcagctgcagaaggagagaagtttgaggacatccttggagtccggggtgatgaatttgcgaagagggcaggtgtccttgccgtcaacaacagacagcaagactaaggctgatcttgaggaggttgcaactgctgaatctgatattataaacttgaagcaagaggtttctgatcttcgtgggcaggtcagtggccagcagctgtgctgtgaatcatgcaacaaaaggctcctaaacacagacaggcttggcggacctgaaagctcatcagtggcagcgtcaccgaccattgggagtgactctgcatctggcatggttaaaaaagaacagaaaacatttcagggtgatatcgagcaatcaaggaagcagacggcacaggattcgccttcttcgacagacaagccaggtcacgaggcggtcgggggcagcagccagagggctcctcaaagaaggcaatcgattgccagggagggccaagatgggtggtcgtcatcatcctctaattcgaagtggaatcttgctcagaaacaatattcaaatagcccattgataagagggcttcatggatccagcagactagaggatttcggtggaagcataccaccagcagcgtcatcggcattagtcaagctgacaaaccggctcaacttcctgaaagaacggagggcgctgctggcaagcgagatgcagagcttggatctgggtcggcccccagcagcagctgctgctccatcagccaagtccccaacaccaaaaggccatgaaaggaagaagagtcgagactgaggaagatgttgtgctcttctgaatgctagttagccttatgattaccagcagtgtagtttgtgtgcatcccattcccttccatagtgctgtctgtctgtacatgtttccacaaattctactgcggatacataatatagatacggctggacaggctgctttgttattgttcaaattgttgctgaattgattcgtcgctcaaagcactttgctgacacatttctgatgttaaaaaaaactcgacctgctgagggtaagacagcctttggagttttgtttaaaaagacctcacacaggtcgagaaaacctctaaaccctacccaactcatacgcagcagcatcaaaacccatatgagaatgaccgcgactgagactaagctttagacctgtactttggcgtgggacaaacgatgggatatttttttaaccacagtctgac

SEQ ID NO: 202134 - DNA, 2873 bp, Zea Mays
acacaatcaaaatcgaatcttggttgcacaactggaataacgcacatcgttttcccccctcaacataggatcgtctctgtctgaaagcacagcaagttggtatttggatcaggactcggtaacacgtgtgcctgtttttttcactttttttttttaatttttggtgtggagcataaagccgatgaccttacaggcactaacattgtaccctgcatctctcagtagggagcaaaaacggcagcgcattgccaggacagaggtttcttcttcacagcctgttgagaatgtgaatcagtttaagacctgtcgatgtggggagggagacccaaactccacatctgaaactggtgacagcccgccggcctcttgtcctaattgtcaggtccttaagagtggacatttactactttcatctaaaggaattggatggacatcatggaaaaagcgctggtttattcttacaagggcatccctagttttcttcagaagtgaccctaatgtacctccacccagaggagctgaaccgattgttacacttggtggaatcgacttgaatagctctggaagcgttgccgtcaaagaagaaaggaaacttttgacagtgttctttcctgatggtcgtgatggacgaactttcactctgaaggcagaaactacagaagacctaaatgagtggagaaatgcactggagagtgctttagcacaggcacccagcgtagcaaatacaatggggcaaaatccaatattcagcactgatgtagcagcagaacctgctgaagctccagctgaacagtcggaggacagttctgttattggcagacctgcagaatttgcacttgtagatgctgatggtagtccatcatttctggagaaggccctgaagttcattgaagatcatggggtaaaggtagagggcatcctgcgtcagtctgctgatgttgaagaagtcaaacgcagaattcaggattatgaaaaggggaaaaacgagttctctccagaagaggatgctcatgttattggtgactgtattaaggacttggaagaaggttcctgttcttcagatgcttataccgagtctgaggatgatgatgttgataaggaatattccacagataatgacattaatgatgatgatgacggttcttatgattctggtgaagatgacattgaagaagacttggactactctgatgacagtgaacatgacagtaagatcaacactaatgtcaaggatggcaaggttaaaaacaatatctcagaaactgcagaagttgcacaggcaaagggtgcttctcatatggagaccaatagtcaatccaaccagaaacaagaatcatgtggaccaaatggatccaaagatcgtatactaagatcaacttctcgttcatcatcctccagagaaaaatctatggagaaatcatgcagttcggcacacaggggaaaaagaaccttatggggccgtacttcagcaagaaaagacctgtcaacagaggagattgaatgctgcagtgatgatgagtcccttattgagaaacttgagagcaacaaggttgatctccaatcgaaaattgcaaaggaggccaaagaaaatgctattctacagtcaagtctagaaaagcggaaagaagaactacatgagcgccgtttagcacttgaaaaggaagttgaaaatttgagggagcagctgcagaaggagagaagtttgaggacatccttggagtccggggtgatgaatttgcgaagagggcaggtgtccttgccgtcaacaacagacagcaagactaaggctgatcttgaggaggttgcaactgctgaatctgatattataaacttgaagcaagaggtttctgatcttcgtgggcaggtcagtggccagcagctgtgctgtgaatcatgcaacaaaaggctcctaaacacagacaggcttggcggacctgaaagctcatcagtggcagcgtcaccgaccattgggagtgactctgcatctggcatgggtgatatcgagcaatcaaggaagcagacggcacaggattcgccttcttcgacagacaagccaggtcacgaggcggtcgggggcagcagccagagggctcctcaaagaaggcaatcgattgccagggagggccaagatgggtggtcgtcatcatcctctaattcgaagtggaatcttgctcagaaacaatattcaaatagcccattgataagagggcttcatggatccagcagactagaggatttcggtggaagcataccaccagcagcgtcatcggcattagtcaagctgacaaaccggctcaacttcctgaaagaacggagggcgctgctggcaagcgagatgcagagcttggatctgggtcggcccccagcagcagctgctgctccatcagccaagtccccaacaccaaaaggccatgaaaggaagaagagtcgagactgaggaagatgttgtgctcttctgaatgctagttagccttatgattaccagcagtgtagtttgtgtgcatcccattcccttccatagtgctgtctgtctgtacatgtttccacaaattctactgcggatacataatatagatacggctggacaggctgctttgttattgttcaaattgttgctgaattgattcgtcgctcaaagcactttgctgacacatttctgatgttaaaaaaaactcgacctgctgagggtaagacagcctttggagttttgtttaaaaagacctcacacaggtcgagaaaacctctaaaccctacccaactcatacgcagcagcatcaaaacccatatgagaatgaccgcgactgagactaagctttagacctgtactttggcgtgggacaaacgatgggatatttttttaaccacagtctgac

SEQ ID NO: 202135 - DNA, 2139 bp, Zea Mays
aggagttacaggactgcgacaaattttaatctcgcacccgtaagtggcgacgaatctcgcggtgcggaggcgcgacagaggcggtgtcgactccgacggactcgcagctaccggtggagacgccccaccggcgcactcctccaacgttcatagtttaagggcttgatttggataattagtcatcaacagaagtgataaaaaatggtggttcttgcagcatcaatcgtttcaaagtcgggaaaagcacttgtttcaagacagtttgttgacatgtctcgcataagaattgaaggattacttgctgcgttcccaaaactggttggaactgggaagcagcacacttatgtcgaaactgaaaatgtgcgatatgtttatcaacctattgaaggtttatatcttctacttatcacaaacaagcagagcaatattcttgaagatctggacactttgaggctcctctccaagctcgtgcctgaatactccccttcattggatgaggagggtatttgtaaaacagcatttgagattatatttgctttcgatgaagccatatctcttgggaacaaggaaaatgtaacagtgcaacaagtcaaacaatattgtgagatggagagccatgaagagaaggcacacaagctgatgatgcaaaccaaaatcaatgaaaccaaggatctcatgaagaagagggctaatgagcttgacaaaatgaggatggaaagaggcaaacttgacaaaggaggatactcatcaatatctggtccacgcgtgattgaaaaaactttcagtgacatgagcatcagtggttctggattaggtggactgagcactgacatggactcatttgctagcaagcccaaaggccgtccatctacagcagctactgcacctggtaaaggttttggtatgaaattaggcaagacacagaagacaaatcaattccttgaatctttgaaagccgaaggagaagtcattttggaggatgtacaaccaagtgcagtttctacaagatcatctgctcttccaagtgaccctgtcacagtaactatagaagagaagctcaatgttgttgttaaaagagatggtggtattaataactttgatgttcaaggaacacttgctcttcaggttctcaatgatactgatgggttcatccaattgcagattgaaagccaagatattcctgggcttagcttcaaaacacacccaaatatcaacaaggatttgtttaacagtcagcaaattttgggagcaaaagatccaaacaggccttttccgagtggtcaaaatgaaactcctctggtgaaatggagaatccaggggatggatgagtcatctttacctctgtcagtcaattgctggccgtctgtatctggaaatgaaacctatgtgaacattgaatatgaagcttctgagatgtttgatctgcacaatgttgtcatatctatacctctgcccgcagttcgggaggctccaagtgtcagacagatagatggagagtggaagttggactcaagaaactctgtgttggaatggtctattctccttattgatcagtcaaatcgcagtggttccatggaatttgttgttcccccagctgatccgtcatcatttttccccatctctgttggattttctgcatcgagtactttcagtgatctgaaggttactggaatccttcctctgaaggaaggcaaccctccgaagttttcccagcgggctcgtttgctcacagctaactatcaagttgtttaatggttgtaccgttgtccgagtgttgatccacttaaatatattcgaatagcatatttttgtgacatggcatgctactggcatgaacttttgcaagtcatgggatggaagatcattttgggttttgaaaacctttactatgtgcttctcattgttagcatgttgcacaaatgctctgatgtgttgctaccagagaaataagtaatgttcttgcctttcgtttgcctgcattttgtacccgttctttccccttgaggataatcttgtaaggacgatgttatcgtctgggcttgtgtaatgtgatctgctggtggaagagcatctccaccggaacccttatcccttctataataactaacaaggtacaaggtcatctccaatagcacctta

SEQ ID NO: 202136 - DNA, 2086 bp, Zea Mays
ataattcacattcagttttttcatttttaaaacgagtgtgacatgaatgctctagatttagcacacctagtacttgtttgagcacgtcgcctaataaaattccccattccaatacacagatctcgcacccgtaagtggcgacgaatctcgcggtgcggaggcgcgacagaggcggtgtcgactccgacggactcgcagctaccggtggagacgccccaccggcgcactcctccaacgttcatagtttaagggcttgatttggataattagtcatcaacagaagtgataaaaaatggtggttcttgcagcatcaatcgtttcaaagtcgggaaaaggtttatatcttctacttatcacaaacaagcagagcaatattcttgaagatctggacactttgaggctcctctccaagctcgtgcctgaatactccccttcattggatgaggagggtatttgtaaaacagcatttgagattatatttgctttcgatgaagccatatctcttgggaacaaggaaaatgtaacagtgcaacaagtcaaacaatattgtgagatggagagccatgaagagaaggcacacaagctgatgatgcaaaccaaaatcaatgaaaccaaggatctcatgaagaagagggctaatgagcttgacaaaatgaggatggaaagaggcaaacttgacaaaggaggatactcatcaatatctggtccacgcgtgattgaaaaaactttcagtgacatgagcatcagtggttctggattaggtggactgagcactgacatggactcatttgctagcaagcccaaaggccgtccatctacagcagctactgcacctggtaaaggttttggtatgaaattaggcaagacacagaagacaaatcaattccttgaatctttgaaagccgaaggagaagtcattttggaggatgtacaaccaagtgcagtttctacaagatcatctgctcttccaagtgaccctgtcacagtaactatagaagagaagctcaatgttgttgttaaaagagatggtggtattaataactttgatgttcaaggaacacttgctcttcaggttctcaatgatactgatgggttcatccaattgcagattgaaagccaagatattcctgggcttagcttcaaaacacacccaaatatcaacaaggatttgtttaacagtcagcaaattttgggagcaaaagatccaaacaggccttttccgagtggtcaaaatgaaactcctctggtgaaatggagaatccaggggatggatgagtcatctttacctctgtcagtcaattgctggccgtctgtatctggaaatgaaacctatgtgaacattgaatatgaagcttctgagatgtttgatctgcacaatgttgtcatatctatacctctgcccgcagttcgggaggctccaagtgtcagacagatagatggagagtggaagttggactcaagaaactctgtgttggaatggtctattctccttattgatcagtcaaatcgcagtggttccatggaatttgttgttcccccagctgatccgtcatcatttttccccatctctgttggattttctgcatcgagtactttcagtgatctgaaggttactggaatccttcctctgaaggaaggcaaccctccgaagttttcccagcgggctcgtttgctcacagctaactatcaagttgtttaatggttgtaccgttgtccgagtgttgatccacttaaatatattcgaatagcatatttttgtgacatggcatgctactggcatgaacttttgcaagtcatgggatggaagatcattttgggttttgaaaacctttactatgtgcttctcattgttagcatgttgcacaaatgctctgatgtgttgctaccagagaaataagtaatgttcttgcctttcgtttgcctgcattttgtacccgttctttccccttgaggataatcttgtaaggacgatgttatcgtctgggcttgtgtaatgtgatctgctggtggaagagcatctccaccggaacccttatcccttctataataactaacaaggtacaaggtcatctccaatagcacctta

SEQ ID NO: 202137 - DNA, 2124 bp, Zea Mays
gcataaaactggcaaggccgccccgtatctccctttaatgcgcaaccgagcacgccaattctggccagatccaggcgtccttccgccgctctgttatgaataatcattttttcgaccaccgcacgtcatggttcatagtttaagggcttgatttggataattagtcatcaacagaagtgataaaaaatggtggttcttgcagcatcaatcgtttcaaagtcgggaaaagcacttgtttcaagacagtttgttgacatgtctcgcataagaattgaaggattacttgctgcgttcccaaaactggttggaactgggaagcagcacacttatgtcgaaactgaaaatgtgcgatatgtttatcaacctattgaaggtttatatcttctacttatcacaaacaagcagagcaatattcttgaagatctggacactttgaggctcctctccaagctcgtgcctgaatactccccttcattggatgaggagggtatttgtaaaacagcatttgagattatatttgctttcgatgaagccatatctcttgggaacaaggaaaatgtaacagtgcaacaagtcaaacaatattgtgagatggagagccatgaagagaaggcacacaagctgatgatgcaaaccaaaatcaatgaaaccaaggatctcatgaagaagagggctaatgagcttgacaaaatgaggatggaaagaggcaaacttgacaaaggaggatactcatcaatatctggtccacgcgtgattgaaaaaactttcagtgacatgagcatcagtggttctggattaggtggactgagcactgacatggactcatttgctagcaagcccaaaggccgtccatctacagcagctactgcacctggtaaaggttttggtatgaaattaggcaagacacagaagacaaatcaattccttgaatctttgaaagccgaaggagaagtcattttggaggatgtacaaccaagtgcagtttctacaagatcatctgctcttccaagtgaccctgtcacagtaactatagaagagaagctcaatgttgttgttaaaagagatggtggtattaataactttgatgttcaaggaacacttgctcttcaggttctcaatgatactgatgggttcatccaattgcagattgaaagccaagatattcctgggcttagcttcaaaacacacccaaatatcaacaaggatttgtttaacagtcagcaaattttgggagcaaaagatccaaacaggccttttccgagtggtcaaaatgaaactcctctggtgaaatggagaatccaggggatggatgagtcatctttacctctgtcagtcaattgctggccgtctgtatctggaaatgaaacctatgtgaacattgaatatgaagcttctgagatgtttgatctgcacaatgttgtcatatctatacctctgcccgcagttcgggaggctccaagtgtcagacagatagatggagagtggaagttggactcaagaaactctgtgttggaatggtctattctccttattgatcagtcaaatcgcagtggttccatggaatttgttgttcccccagctgatccgtcatcatttttccccatctctgttggattttctgcatcgagtactttcagtgatctgaaggttactggaatccttcctctgaaggaaggcaaccctccgaagttttcccagcgggctcgtttgctcacagctaactatcaagttgtttaatggttgtaccgttgtccgagtgttgatccacttaaatatattcgaatagcatatttttgtgacatggcatgctactggcatgaacttttgcaagtcatgggatggaagatcattttgggttttgaaaacctttactatgtgcttctcattgttagcatgttgcacaaatgctctgatgtgttgctaccagagaaataagtaatgttcttgcctttcgtttgcctgcattttgtacccgttctttccccttgaggataatcttgtaaggacgatgttatcgtctgggcttgtgtaatgtgatctgctggtggaagagcatctccaccggaacccttatcccttctataataactaacaaggtacaaggtcatctccaatagcacctta

SEQ ID NO: 202138 - DNA, 1364 bp, Zea Mays
actatacatcgattcgtgatctcggtctttccaaaccaacaggtgttgcctgcccaagtgcccagcctcgcttctccagtcaattctcagcctcgtcctccgcctccgctcccgctctctcctctccttggcctccgcttccgctcctgcctggaggctgcatcaaaccctaccgctccggacctcccggctggccgcgagatgcgacgcctgtccggcccctaatccttctcctcgatactgcccctcgcccgcccgcccgccggcatgggccgctacgggcccttccctgccgccgccggtgatggcgggggctgcctgcccctgccgattgtagcggctgaaggcgcgctggctgtcctggacggcgccattgcgaccgcggccttcgtgcagttagcaaggattcataggcacaaccagctacaaggatggactcggcaaaagatattccattttatgattggtctatcaaacatagtattcctagtatatttcgtgtctaccatcattgctacttgtcagagatggatttgctgggtacatggatgtggatttgttctcatggctagtccacagatattgcttcttgcttctttcctcttgctactgtcattctgggttgacctgtgtcatcagacaaatgatgaagacgaagaagatggaaggagtcagagtcaccatgaagctttactagacagaacaaaagcgaaacctggcattcatcctgttaatatccgtcagaggtgttgcccaggaatacagcttggaagccggcaaaaatttgtgattttggtgcttctactgtcatttgttgttatgcttgcctttgccatcctcatatgggttggtagaggagacaatcctatcgattcttctctactgaaaagggtttatttggatgtattttcagtagtagttattgtacttggtggtgctctggcatgttacggtgcagtgttattctcgaagatgagcaaagttcgttctgaaactgtatcaactgagaagtggaaggttgccagtttagctgctgtctcgctgatctgtttctcgtcttctgctatacttgcacttgtgactaatgttccagtgcttttgtattggtactcaacagatgtggacatcatcaacaatgctgttattttgtttatatattacttcataggctcgtcagtgccatcaggatttgttctatggatcatgagagagatgcctcatcggcaggtagttgaaagatccgtagaatcgagggtggttactttgttcagggaaagaccatcaactacgcaggatccacagtggaggacagctgtcacatcctcaaacaaggatctgctaaatatataaaaacctctctatgt

SEQ ID NO: 202139 - DNA, 2163 bp, Zea Mays
agaagaaggagcaacgatggcatgagcacgagtgcacgaccgaagccgaagaaaccaagccattgctgcgacgccgtgcccccgagtttgatttgatggaagcgaagacgaaccaaaccagcggcgaggacaggccgcagccggcgatggactcgccgagggcggcgcaggcggcgacgcgccgcaagaagatgacgaagcagctgacggggaagcgcgacgacacggcgatgcacgcggcggcgcgcgccgggcagctcgagtccatgcggcagatgatgtccggcaaggacgccgaggagctcggggcgctgctgtccaggcagaaccaggccggggagacgccgctgttcgtggccgccgagtacgggtacgtggccctggtggccgagatgatcaagtaccacgacgtcgccaccgccggcatcaaggcccgcagcggctacgacgcgctccacatcgccgccaagcaaggggatacgtcgtgagggagctgctgcgggcgctgccgcagctgtcgatgacggtggactcctccaacacgacggcgctgaacacggcggcgacgcaggggcacatggacgtggtgaggctcctgctggaggtggacgggagcctggcgctgatcgcgcgcagcaacggcaagacggcgctgcactcggcggcgcggaacggccacgtggaggtggtgcgcgcgctgctggaggcggagcccagcatcgcgctgcgcacggacaagaagggccagaccgcgctgcacatggccgccaagggcaccaggctggacctcgtcgacgcgctcctggccgccgagccggcgctgctcaaccagacggacagcaagggcaacaccgcgctgcacatcgcggcgcgcaaggcgcggcacgagatcatcaggcggctggtcacgatgcccgacacggacgtcagggcgatcaaccggtcccgcgagaccccgctggacacggcggagaagatgggcaacacggacgcggcggaactcctggctgagcacggcgtgcagtcggcgcgcgccattagcccctgcggcggcggcggcggcggcaacaagcaggcgcgcgagctgaagcagcaggtgagcgacatcaagcacgaggtgcactcgcagctggagcagacgcggcagacgcgcgtgcgcatgcagggcatcgccaagcgcatcaacaagctgcacgaggaagggctcaacaacgccatcaactccacgacggtggtggccgtgctgatcgccacggtggcgttcgccgccatcttcacggtgcccggggagtacgtgcaggacccgggcagcctggcgcccgggcacgatctgggcgaggccaacatctcccaccagacggccttcatcatcttcttcgtcttcgactcggtgtcgctcttcatctcgctggccgtggtggtggtgcagacgtcggtcgtggtcatcgagcgcaaggccaagaagcagatgatggcggtgatcaacaagctcatgtgggtggcctgcgtgctcatcagcgtatccttcctggcgctctcgttcgtcgttgtgggccgcaccgagcgctggctggccgtgtccgtcaccatcatgggcgccaccatcctggtcaccaccatcggcaccatgctctactgggtgatcgcgcaccgcatcgaggccaagcggattcgcacaatcaagcgcaacacgctcacccactcccgctccttctcctgctccggcatgtcggagggcgagtgggtcgacgaggatttcaagaggatgtacgcaatctgacgacccacgctacctgcatgtgtttgagatcatctcgtgcaatggccatcgcgttattgtcaacttgccgtgcttcggaccgggctaacattcttcttccgtcactccttagtggcgattgaagtattgtccaaccgaataaacctacctgtgcgccgcctgcgagagagaagtaataagttttgtcttcatagaaaacgaaacaaaagaaaagtgagttttgtcttaatagaaaatgaaaagctagacttactaaaaactcctgcactccgtattacttttagcttgtcgatcaagccgtgcttccgcaacgtctagagtcttaaaaactatttaaaaaatacaagtactcaatcttttcataaatatatgacaccatttaa

SEQ ID NO: 202140 - DNA, 2545 bp, Zea Mays
ctaacatctgcagcgagcgatcatgcaccaacttcgtctcaacacgagcgagctctgaaccagacacccccgcgcggctccgtggtcgtttcttaatttaggcagaagaaaacgagtagacagagagatcctttttttttccttcttcaaaaaacaagtagaaaacagacaaaagaggggggcaaaaaaacaaacgaaccaagaatttcgatcccattcctgctcattcaacttgcgatttatttagcggcggcgatcggccagcccggccccttgtcttcttcctcgcatcatccgcctctgccccctgcggattagtaggggccccatgcctcacatgcacgccgggagcgcgctggaggatgcgccgcagagctcgtcacgccgggctacactgatttgggagaaaccaaaagcaaaaaaaattactccatgtagtagccattgctgcgacgccgtgcccccgagtttgatttgatggaagcgaagacgaaccaaaccagcggcgaggacaggccgcagccggcgatggactcgccgagggcggcgcaggcggcgacgcgccgcaagaagatgacgaagcagctgacggggaagcgcgacgacacggcgatgcacgcggcggcgcgcgccgggcagctcgagtccatgcggcagatgatgtccggcaaggacgccgaggagctcggggcgctgctgtccaggcagaaccaggccggggagacgccgctgttcgtggccgccgagtacgggtacgtggccctggtggccgagatgatcaagtaccacgacgtcgccaccgccggcatcaaggcccgcagcggctacgacgcgctccacatcgccgccaagcaaggggatacgtcgtgagggagctgctgcgggcgctgccgcagctgtcgatgacggtggactcctccaacacgacggcgctgaacacggcggcgacgcaggggcacatggacgtggtgaggctcctgctggaggtggacgggagcctggcgctgatcgcgcgcagcaacggcaagacggcgctgcactcggcggcgcggaacggccacgtggaggtggtgcgcgcgctgctggaggcggagcccagcatcgcgctgcgcacggacaagaagggccagaccgcgctgcacatggccgccaagggcaccaggctggacctcgtcgacgcgctcctggccgccgagccggcgctgctcaaccagacggacagcaagggcaacaccgcgctgcacatcgcggcgcgcaaggcgcggcacgagatcatcaggcggctggtcacgatgcccgacacggacgtcagggcgatcaaccggtcccgcgagaccccgctggacacggcggagaagatgggcaacacggacgcggcggaactcctggctgagcacggcgtgcagtcggcgcgcgccattagcccctgcggcggcggcggcggcggcaacaagcaggcgcgcgagctgaagcagcaggtgagcgacatcaagcacgaggtgcactcgcagctggagcagacgcggcagacgcgcgtgcgcatgcagggcatcgccaagcgcatcaacaagctgcacgaggaagggctcaacaacgccatcaactccacgacggtggtggccgtgctgatcgccacggtggcgttcgccgccatcttcacggtgcccggggagtacgtgcaggacccgggcagcctggcgcccgggcacgatctgggcgaggccaacatctcccaccagacggccttcatcatcttcttcgtcttcgactcggtgtcgctcttcatctcgctggccgtggtggtggtgcagacgtcggtcgtggtcatcgagcgcaaggccaagaagcagatgatggcggtgatcaacaagctcatgtgggtggcctgcgtgctcatcagcgtatccttcctggcgctctcgttcgtcgttgtgggccgcaccgagcgctggctggccgtgtccgtcaccatcatgggcgccaccatcctggtcaccaccatcggcaccatgctctactgggtgatcgcgcaccgcatcgaggccaagcggattcgcacaatcaagcgcaacacgctcacccactcccgctccttctcctgctccggcatgtcggagggcgagtgggtcgacgaggatttcaagaggatgtacgcaatctgacgacccacgctacctgcatgtgtttgagatcatctcgtgcaatggccatcgcgttattgtcaacttgccgtgcttcggaccgggctaacattcttcttccgtcactccttagtggcgattgaagtattgtccaaccgaataaacctacctgtgcgccgcctgcgagagagaagtaataagttttgtcttcatagaaaacgaaacaaaagaaaagtgagttttgtcttaatagaaaatgaaaagctagacttactaaaaactcctgcactccgtattacttttagcttgtcgatcaagccgtgcttccgcaacgtctagagtcttaaaaactatttaaaaaatacaagtactcaatcttttcataaatatatgacaccatttaa

SEQ ID NO: 202141 - DNA, 814 bp, Zea Mays
cctgtggtgcgtcgggcgagatattttttgccaagctggcaggcacatgacacatcgccccagccccaagtccaaagccgcgagaggcaggggcgcagcaaaaccctagccgccttcccgtccttttcctttcataaaccccaagccgcgccgcaatagctcgccccctcgttcgccgcctctcctgctcctaccgcagctctccctcaggtttagtgttcgcaatggcggccttcaacaagcttggtggccttctaaggcacagtgctctggtgagcggtatcactggtggctcttctcctgcagtgttcaatgctgcacggctcatgtctaccaagctatttattggtggtcttgactggggtgttgatgacgtgaaactaagagaagcatttagcagctttggagaggttactgaagcgagggtgatcacagacagggagactgggaggtcaagaggctttggctttgtgaactactccgacagtgatgctgccaaggaagctatttctgcaatggatggcaaggaaattgatgggcggcaggtacgtgtcaacatggctaatgagagacctgctgggaaccgtggtggtggcggctatggtggcagccaaagctatgatgcttgaggggggcaggatcctattaagtgcattatcaaccaagatatttgaaataatgaactttaggacttggtatgacgttttatgttaagcattgtcaggttttgctattcgtgttatgctgaattgttggaactcctagatgcagaatattacgtattggttttggttccttcgagaaaaaaaacaaa

SEQ ID NO: 202142 - DNA, 803 bp, Zea Mays
cctgtggtgcgtcgggcgagatattttttgccaagctggcaggcacatgacacatcgccccagccccaagtccaaagccgcgagaggcaggggcgcagcaaaaccctagccgccttcccgtccttttcctttcataaaccccaagccgcgccgcaatagctcgccccctcgttcgccgcctctcctgctcctaccgcagctctccctcaggtttagtgttcgcaatggcggccttcaacaagcttggtggccttctaaggcacagtgctctggtgagcggtatcactggtggctcttctcctgcagtgttcaatgctgcacggctcatgtctaccaagctatttattggtggtcttgactggggtgttgatgacgtgaaactaagagaagcatttagcagctttggagaggttactgaagcgagggtgatcacagacagggagactgggaggtcaagaggctttggctttgtgaactactccgacagtgatgctgccaaggaagctatttctgcaatggatggcaaggaaattgatgggcggcaggtacgtgtcaacatggctaatgagagacctgctgggaaccgtggtggtggcggctatggtggcagccaaagctatgatgcttgaggggggcaggatcctattaagtgcattatcaaccaagatatttgaaataatgaactttaggacttggtatgacgttttatgttaagcattgtcaggttttgctattcgtgttatgctgaattgttggaactcctagatgcagaatattacgtattggttttggttccaaataaa

SEQ ID NO: 202143 - DNA, 541 bp, Zea Mays
cgggcgagatattttttgccaagctggcaggcacatgacacatcgccccagccccaagtccaaagccgcgagaggcaggggcgcagcaaaaccctagccgccttcccgtccttttcctttcataaaccccaagccgcgccgcaatagctcgccccctcgttcgccgcctctcctgctcctaccgcagctctccctcaggtttagtgttcgcaatggcggccttcaacaagcttggtggccttctaaggcacagtgctctggtgagcggtatcactggtggctcttctcctgcagtgttcaatgctgcacggctcatgtctaccaagctatttattggtggtcttgactggggtgttgatgacgtgaaactaagagaagcatttagcagctttggagaggttactgaagcgagggtgatcacagacagggagactgggaggtcaagaggctttggctttgtgaactactccgacagtgatgctgccaaggaagctatttctgcaatggatggcaagtgtattcacattcatgttacttgcag

SEQ ID NO: 202144 - DNA, 1540 bp, Zea Mays
cctaaccactcgttcctcgtggcctccaccatccccttcgtgggatccgcatccacggccgggccagcctccctcatcatcggcccctactcggtaccgttccttctccccactcccgcctccgcctcctctcgtcgtgttgtctgcggcgagctctacgccccatcccacgccgcgctcgccgagctcgatgccttcgagtctggcaggaaacaagttcttttgcaattcctcaattatacatggttgttcaaatctaacaacaatgactaatgaggacaaaaggatgcaactcctggataaacttaagtacatggagcgagaattggttgcaaccaaagggtgggagagtgcattacaggaacaactactaaaggagttgggtgactataaggggcgtattgtggtcaagtaatgaaaataaacgaacttgaggtacaactcaatagactggttctaggatcagtacagaatcatcaatatcatccgcgaaggaattgataaaagacatggaagggaatttgcatcgattatctgaaagctcaaaaagggagaagaaaaaccttattaagaaactctcatatatgaaagaagacctatccagatctgcttccaaaaataatgttgaggctcgtatgtttatactatcacaatatctatttgtggttgcatgttgactcatctattttaaacatttgaggttcatatgagatcagatagtactgctcaccctagattcttttattatctgtctccgcctagcaaagaaactaacctagaattagagcaaagagattgcataaaggagggagcactggagcagtgacaacagtatagagatcgccaggtctgcttgcctgtctaaagagaggaaggcaacaagagatggacgagaccatgaacaaggtgggtgcttactggctagggtcgctggccaacaatgagatctccttggcaggcgacgaccttgaatcgctctcgaccaacgtcggggatggagcgaaatggctggtgaacaagttaaaggggaagatgcagaagcctctagcggacctgcttagcacaaccttcctatgggcattctcccaagcaagacgaccaaatacgagttcgcgtcgactctgagctgtggtttgattccacgatgtcaggtatgctgggcgagggccgcctcacgcgaaggtggacgagatcaagaccaaggtgctcgtctgggctagggtcaccattgtcaaggccgccgtcgccaaggtcttcactatgaggagatcaagtggtcgcacaaccaggacgcctacgaggtcatcaggggcggcatcaccgtcgacgagttcgctgcacaccgagatggacagatggttgctttcagttgcaggaataaattctacagtcattagctacctgggagatctatgtgcactgtacatcatatgttttgtgctttgctgtgagaatgtgcaacacatggaaggattcagaacgtgtgctcattgcatatgatatatgtctcgtgtcagattttaaatacaaaacatcccaa

SEQ ID NO: 202145 - DNA, 2156 bp, Zea Mays
cacgcccctgcaagtgatcgagcatttcctcccccggccgggacggggctcatccacgctcggggacgggatggatgtcttcttcctctaaccgtacccacggcctcttgccagagaatcatcccatatcttcgtcccgtccgtccatatgcatgatccatcgtctcctaggctagggccggtgatgtttacacgagaggagggggagaggaattctagccagctgcgcatgtgatcgttgtcatgccaaccgtaccgcaagattctccgtccagccgccagaaccaagaaacccttttaaagccaagggagctccagctcccgagtttccccaaacacttcatccaggctccagccatggaggcctcggcagcggtcgagtcgtcggccgccgtgtctgtcttcgaggtagtatccagcaagcagcggcggccgccggacacggcgaagctggtgctgaatagccccagcccgccgagcctgcgggaggagctcgtcggcgtggtcggcaaggcgttccggccgcgcgcccacgccggggccgctgctggcgccggtggccgcccgccgccgcgccgcgcgtgggtcctcacggcgctgcagtgcgtgttcccggtgctgcagtgggggaggagctacaccctcgagtccttcaggagtgacgtcatggccggcctcactcttgccagccttggcatccctcagagcattggatacgccaatctagccaagctggaccctcagtacggtctttacacgagcgtcgtgccaccgctgatctacgctgtgatggggacatcgagggagatcgccatcgggccagtcgccgtcgtctcgctgctgctgtcctcgatgatccagaaggtcgtcgacccggccgccgacccggcgacctacaggtcgctcgtcttcacggtgactttcctcgccggggtcttccaggtctccttcggcctcttcaggctggggtttctcgtggatttcctgtcgcacgctgccatcgtggggttcatgggcggggcggccatcgtgatcgggatgcagcagctcaaggggctgcttggcctcgcccatttcaccaacagcaccgatgttgtttctgtcctcaaggctgtctgctctgcgctacgacatgacccgtggcacccgggcaacttcctcatcggatgctccttcctcatattcatcctcaccacacggttcatcgggaggaggtacaagaagctgttctggctgtcagcgatctcgcctctgctgtcggtcatcctgtccaccgctgcggtctacgcgacaagggctgacaggcacggcgtcaagatcatccagaaggtgcacgcgggcctaaacccaagctccgtgaagcagatacacctcaacgggccgcacacaacggagtgcgccaagatcgccgtcatctgcgcagtcatcgccctcacggaagctatcgccgttggccgatctttcgcctccgtaagagggtacagactcgacggcaacaaggagatgctggccatggggttctccaacgttgctggttctctgtcctcgtgctatgtggcaacaggttcgttctcccgaacggcagtgaacttcagcgcgggggccaggtcgaccgtttcaaacatcgtcatgtccatcaccgtgttcgtcaccctggagctgttcatgaagctcctctactacacgcccatggcggtgctcgcctccatcatcctgtcggctcttccgggactgatcgacatcaaggaggcctgcagcatatggaagatcgacaagatggatttcctcacctgcctcggtgcgtttgttggcgtcctgtttgggtcggtggagattgggcttgcagttgcacttggcatttccttcgcaaagatcatcatacagtcgcttcggcctcaggtggagatccttggcaggctacaagggacagatatcttctgcagcgtcaggcagtaccctgtagcctgcctaactccgactgtactgcctatacgcgtcgacacatccttcctctgcttcatcaacgccacttccgtcaaagaaaggatcacagagtgggtttgggaaggagtggagacctcaaatggaaaagcgagggagaggatacaagcagttgtccttgatatgtcaatacaaaaatatgtatacccatgttc

SEQ ID NO: 202146 - DNA, 1655 bp, Zea Mays
gtgtggtactatggtggtggggcacaatcataatgatccatgtctgtcaacattttggatttatttggagagctacgaccaaacatgtctaggtatttatcaatcgaggaacttgttgctgcgttagttgagcttgaagaaaatgagcgctcagccccagtagaaaaggttgaaaatgaaagacactcggacaatgaatctcataaaagacaggcacgagatgctggtccatctgtgaatggtggaagcgctgcaaatggaattgaggaaaatggcaaggatcatgaaatagcagatagtgagagctattcagatagtggcagcattgatggacgggaagatgaggatatattatctgaggataaatcaaatgatggctcagataatgaaggcgacgatgaagatgatggcattcctgttggttctgatgaagatgaaaatgttgaggttagacagaaagttatgaaggttgatcctaaggagcaagaagactttgatcgagagctcaaagcccttcttcaggagagcttggagtcccgcaaatcagaggcccgttcaaggctccctctgaatatgatggtaccgatgaatgtccttgaaggttcatcaaaagactcgagggccacagaatctgagagtggagaagaaacagtagatgaagagggtggcaatgctgggggtagcagcaaggtgcgcgttaaggtgctaatgaagaaagggcacaaacaacagacgaggcaaatgttaattcccgctgatagttcaatcgttcgaagcacgaagcagcaagaagctgccgagcttgaggagaagcagagcattaagcggaggatccttgaatacaatgaaagggaggaggaagaactgaatggagcatcacaaatggggaactggggtcaaggagctaccaacaccagcagtatcagatcaggtggccggggcagctgggatggttcagcacggggaggtggtcgacaacgacaccacatcgccggttctggtggtttctatcacagttatggcaggagaagatgagtttgtcctgatgggaggtggttggcagaggcgccacactgtgggttcttgtggtttctatcagttgttgcaggagaacagttagctgtgtgagctattttgtcctgagcttttttttggcagggccatgcttctctctatttaaccgcctaacgatcagattaacagggaagaaatttcggggaggttaacacagcttgatggacaattgcttccaccaccctaatctgaaagataagataattctaccactgatgggagatagcaatgccttgaaggagctatttttctggtggcccgaatggcttgagttgcttggtagttatgggcttatggctgtacctggagagcatagataccccggttgctcatgtacatataataataacataatttggcaacgagtgtgagtcgtttggagattgtgtgcgcacttgtatctgagtatggatctgatggtggtacttgcatagtttagatgtgcatactgtttcgacgccatgtgtgtgtatggggcacctgataaaaaaattactgtttgattcccatttagttatgcgtgcaggagttattatgattaggggtggtaatagatgacgatccaaatgttttttcacaat

SEQ ID NO: 202147 - DNA, 2058 bp, Zea Mays
taaaatttgaatatgaatattagaatgaataagctgatggagatagcttatggctcagcacattaatagtcaattttttttcttccccaaaaaagctgttgcctcgttgaggaatattccacatcccctcgtttccggcaaaccgcaatgaagtctctgacccccaccgccgctggctccgccgcagatttttccgactctctgccctccccgatctcccctgcggcggtgccatgccattccagccccggccgccactactacctcgccgtcgaccgcacccagttcaaaatgaggacactcttggagctcctgggggttgtcgcggatcgccgtggtgggctgccgattgcaacatgtgtttcctcccgtgatgagcttgatgccgtctgtgctgccgtcgcaaacctcccctttgtgtcagcgtcacctctggtagttcacaaacacaatttcacctccttagttgtaacttcctctatgcattttcatttgttctattttctctgaaattttttggtggcttggaagcaatatgccttcatctagtatgttttctctgaaaatatatgacgtttatcaccaacataaatatttttatgaacccataaattgttgcacaaggtcctaacaggtatatgatccttactattatgatgttcttacttcacatcaacctccagatattactaatggtcttctatgtacagtatagtgatcaagctgaagcagagcgtgcatctattcttgagaactttcgtcaagaaacaactcagtggaataaaactgctaaagctaccaatattgccgaaagttctaagcttgaaagtactggctctaaaataagcattatagttgcaacagatgcttgcttgcctcaggcagcgatggcagaggcaccccttatggctcgagtgctgataaactatgagcttcccacaaagaaggtgagctttaactatatttctgtgcatatttgttgcttttagtccattttatgcaaaaagcatgaatctgtgtatgctctctttcttatttgctactccctgtgtcccaaattataaggcattttggctattgtatagatatttttactatgtatcttgacatagtgtatatttaagtgtgtagcaaaagcgttaaaacaatgtatctagaaaaaccaaaacatcttatgctccgtttggatgttgatattgaatatgatggaattgaattgagttgaataccaaatcatgcatggtactgaaatgagatgcaattccaattctattgtttggatgtcactgaattgtacgttctaattccacgcaataccgaggggtgaggctttgtattgggagaggatgttctagttatagtctaattctagggaattaggcctctgattccaaatctcaattccacgagcaaccaaacaacagaatttagaaaaactgattctaattcccaattctgtgctccaatatctatatccaaccggggtgttagtattatgtagtttcactggctcttctagttgtgcttttatgatatcttttgtgacctgaagattaaatttgagtttttcaggaagcgtacttaagacgcatgtcaacatgtttggcggcagacggaattgtgattaacatggtcgttggttgtgaggtggttacactcaaggctttagaagagaacagtggtctgcttattgctgagatgccaatacatgtttcagaaatattatgaccgttccagttgtacaacatttcagaagttactgttctgattgcacactaactactcatggtttacttctactttaattttgaattgcttttcatgtttcagaatgttctcaaattatatctctaaagcattagaataatgctcattgcttcttttttcctctgtataagaaatgatagaatatagtcatggttcaacatccagcgacatgtttcttttactctgtgcatcgtatctatgttgatgcttacaagtccatgtatgaaggcaactaaaagtttaacatcaatccattattcttgcttatcactagtcaccataaatagtcag

SEQ ID NO: 202148 - DNA, 1783 bp, Zea Mays
taaaatttgaatatgaatattagaatgaataagctgatggagatagcttatggctcagcacattaatagtcaattttttttcttccccaaaaaagctgttgcctcgttgaggaatattccacatcccctcgtttccggcaaaccgcaatgaagtctctgacccccaccgccgctggctccgccgcagatttttccgactctctgccctccccgatctcccctgcggcggtgccatgccattccagccccggccgccactactacctcgccgtcgaccgcacccagttcaaaatgaggacactcttggagctcctgggggttgtcgcggatcgccgtggtgggctgccgattgcaacatgtgtttcctcccgtgatgagcttgatgccgtctgtgctgccgtcgcaaacctcccctttgtgtcagcgtcacctctgtatagtgatcaagctgaagcagagcgtgcatctattcttgagaactttcgtcaagaaacaactcagtggaataaaactgctaaagctaccaatattgccgaaagttctaagcttgaaagtactggctctaaaataagcattatagttgcaacagatgcttgcttgcctcaggcagcgatggcagaggcaccccttatggctcgagtgctgataaactatgagcttcccacaaagaaggtgagctttaactatatttctgtgcatatttgttgcttttagtccattttatgcaaaaagcatgaatctgtgtatgctctctttcttatttgctactccctgtgtcccaaattataaggcattttggctattgtatagatatttttactatgtatcttgacatagtgtatatttaagtgtgtagcaaaagcgttaaaacaatgtatctagaaaaaccaaaacatcttatgctccgtttggatgttgatattgaatatgatggaattgaattgagttgaataccaaatcatgcatggtactgaaatgagatgcaattccaattctattgtttggatgtcactgaattgtacgttctaattccacgcaataccgaggggtgaggctttgtattgggagaggatgttctagttatagtctaattctagggaattaggcctctgattccaaatctcaattccacgagcaaccaaacaacagaatttagaaaaactgattctaattcccaattctgtgctccaatatctatatccaaccggggtgttagtattatgtagtttcactggctcttctagttgtgcttttatgatatcttttgtgacctgaagattaaatttgagtttttcaggaagcgtacttaagacgcatgtcaacatgtttggcggcagacggaattgtgattaacatggtcgttggttgtgaggtggttacactcaaggctttagaagagaacagtggtctgcttattgctgagatgccaatacatgtttcagaaatattatgaccgttccagttgtacaacatttcagaagttactgttctgattgcacactaactactcatggtttacttctactttaattttgaattgcttttcatgtttcagaatgttctcaaattatatctctaaagcattagaataatgctcattgcttcttttttcctctgtataagaaatgatagaatatagtcatggttcaacatccagcgacatgtttcttttactctgtgcatcgtatctatgttgatgcttacaagtccatgtatgaaggcaactaaaagtttaacatcaatccattattcttgcttatcactagtcaccataaatagtcag

SEQ ID NO: 202149 - DNA, 1266 bp, Zea Mays
gctctgcatgccggcctttagccacttgccgcccctgagtctgcctcccaacgtaattcgctgtcacacacacccaacgctctcccctgagcctgcctcccgatgccacctcccttgtttaccgacccaacgcgtggagttttcaggggattatggaatgcttaacaacaagttttccaagaaatgttggaaaagagtacatctgttcaagcaagttggtgtccggaaaccaatggatccccaaaaggatttgctgctacgtctcttgttcgacaaactccagtcgatgccacaagttcactgatgtggcatgccccatgagcccagttattcgaaaaagactactgatgctgatggaactactaatggtgatgtatctgaaaatctgctttctcgaaagccaagctctgatgagttaaaggctcttttggctgattcggaacgaagtaggcttttgagaagactgagtgaagcaaatcaatataaccgattcctcaagagacagttgcaaataaaggatgatgcagtcgtaaaattcaaaggtgaacttgctgttttggaactagaaatgcaggctctggttggcctagctgaagaggttgctaattttgatgttccgttagggtctaggaagataaacggaaaatatattcaatctcatcttctctccagattagaagctgtccatgataagattatggaacaggtaaagagtgttgacgctttaaagacccaagaaattcctgtctactggattggcatggctgagaatgtgcagatcatgggttcattcgacggatggtcacagggcgaggcgatgtccatggagtattcaggtgactacggaagattctctgcaactctgaagctaagacctggaaggtacgagatcaagtttttggttgatggggaatggagattgtcgcctgaatatcccactgctggagatggactgacgcagaacaacattcttgttgtggagtaatacaacttcctcatctaccatttcaatcatccaaacaatgccgaagtgcacctacatctacatgtcttcttccatctgtaatactatgcttactatgtggacatgtggttgcctcacagaaatcgaataaattagcctatcctggcatatgatcctttcgtatttaaatatatgacgaataaattaacctatcctgaacgtcatatacttaaaaatggagcgaataccagtgctagatcacaatgatttgttcttttctgtgccctagactagaccagatc

SEQ ID NO: 202150 - DNA, 1271 bp, Zea Mays
gctctgcatgccggcctttagccacttgccgcccctgagtctgcctcccaacgtaattcgctgtcacacacacccaacgctctcccctgagcctgcctcccgatgccacctcccttgtttaccgacccaacgcgtggagttttcaggggattatggaatgcttaacaacaagttttccaagaaatgttggaaaagagtacatctgttcaagcaagttggtgtccggaaaccaatggatccccaaaaggatttgctgctacgtctcttgttcgacaaactccagtcgatgccacaagttcactgatgtggcatgccccatgagcccagttattcgaaaaagagcagactactgatgctgatggaactactaatggtgatgtatctgaaaatctgctttctcgaaagccaagctctgatgagttaaaggctcttttggctgattcggaacgaagtaggcttttgagaagactgagtgaagcaaatcaatataaccgattcctcaagagacagttgcaaataaaggatgatgcagtcgtaaaattcaaaggtgaacttgctgttttggaactagaaatgcaggctctggttggcctagctgaagaggttgctaattttgatgttccgttagggtctaggaagataaacggaaaatatattcaatctcatcttctctccagattagaagctgtccatgataagattatggaacaggtaaagagtgttgacgctttaaagacccaagaaattcctgtctactggattggcatggctgagaatgtgcagatcatgggttcattcgacggatggtcacagggcgaggcgatgtccatggagtattcaggtgactacggaagattctctgcaactctgaagctaagacctggaaggtacgagatcaagtttttggttgatggggaatggagattgtcgcctgaatatcccactgctggagatggactgacgcagaacaacattcttgttgtggagtaatacaacttcctcatctaccatttcaatcatccaaacaatgccgaagtgcacctacatctacatgtcttcttccatctgtaatactatgcttactatgtggacatgtggttgcctcacagaaatcgaataaattagcctatcctggcatatgatcctttcgtatttaaatatatgacgaataaattaacctatcctgaacgtcatatacttaaaaatggagcgaataccagtgctagatcacaatgatttgttcttttctgtgccctagactagaccagatc

SEQ ID NO: 202151 - DNA, 2946 bp, Zea Mays
cttcgcccctcaatcaatcacgacgccacagccgcacccccgcgaaccctagctcgcagtcgcaccgcgcgccggacgctgaccaggtgcctgctctatctcctgcggtggccgtcgcgctgccgccgccagacccgatccgtccgaccgtgccaagcgcccccccctccggcgatcgatgcgaggcgccgcgggaggcggctcgggctcgggcaggctcaagggaaccaatggctgcagcggtggcgatgcgagggggaagcagcgacagcggaggatttgacaaggttcccgggatggactcggggaaatacgtgcgctacaccccggagcaagttgaggtgctcgagcggctctacatcgattgccccaagccaagctcctcacggcgccagcaactgctgcgcgagtgtcctatactctccaacattgagccgaagcagatcaaggtctggttccagaaccgaaggtgccgcgataagcagcggaaggagtcttcgcggcttcaggctgtcaacagaaagctgacggcaatgaacaagcttcttatggaagagaatgagcgtcttcagaagcaagtctctcagttggttcatgaaaatgcgcacatgcggcagcagctgcagaacacttcattggccaatgatacaagctgtgaatcaaatgtcactgcccctccaaacgctataagggatgcaagtaacccttctggactccttgcgattgcggaggagaccttcacagagttcctctcaaaggctactgggacagctattgattgggtccagatgcctgggatgaagcctggtccggattcggttggtattgtggccatttcgcatggttgccgtggcgttgctgcccgcgcctgtggtttggtgaatctagaaccaacaaaagtcatagaaatcttgaaagatcgtccctcttggttccgtgattgtcgaagtctggaagtgtttacaatgtttccagctggaaatgggggaacaattgaacttatctacatgcagatgtacgccccaacaactttagttcctgcacgtgacttttggacgttgcgatacacgacaacaatggaagatggcagccttgtggtctgtgagagatccttgactggttctggaggcggtccaaatgcagcttctgcacagcaatttgttagggctgagatgcttccaagtgggtatttagtgcgcccatgcgaaggtggaggttcgattgtgcatatagtggaccatctagatctcgaggcatggagtgttcctgaagtgcttcgaccactatatgagtcttctagagtagttgctcagaaaatgactactgtggcactgcgccaccttagacaaattgctcaagaaacaagtggagaagtagtgtatgccttgggaaggcaacctgcagttctacggacctttagtcaaagactaagcagggggtttaatgatgccattagtggtttcaacgatgatggttggtctgtaatggggggagatggcattgaagacgttgttgttgcttgcaactcaaccaagaaaattaggaataatagcaatgctgggattacatttggagcgcctggaggcattatttgtgcgaaggcatccatgttactgcagagcgtcccaccggcagtactggtccgatttctgagggagcatagatctgaatgggctgattacaatattgatgcgtatttggcttcatcactgaagaccagtgcgtgctcacttcctgggttgcgacccatgagattttctggggggcagatgatcatgccacttgctcacacagtggagaacgaggagattcttgaagttgtccgccttgaaggacaacctcttactcatgatgaagcccttctttcaagggacatccaccttctccagctttgcactggaatagatgagaaatctgtgggttcctccttccagcttgtgtttgcaccaattgatgagcattttccggatgatgctccattgatttcctctggctttcgtgtcataccacttgatatgaaaacagacagtgttgctactatggcccgtcaatatgtgcgtagtgttgtttctgctgtgcaaagggtgtcgatggctatatctccctcccaatctggtctaaatgctgggcagaggatgctttctggcttccctgaagctgccacacttgctagatgggtttgccagagttatcactaccatctaggtgtggaattactcaatcaatcagatgaagctggtgaagcattgttgaaaatgctctggcatcatccagatgctgttctgtgctgctcttttaaggagaaacctatgtttacgtttgcaaacaaggcagggctcgacatgttagaaacatctcttattgcgctgcaagacctgacgctagacaagatcttcgacgagtcaggaaggaaagcaatattctcagatatctcaaaactaatggaacagggctacgcgtacctgccgtcgggcgtgtgcatgtcaggaatgggtcggcatgtctcattcgaccaagctgtagcgtggaaggtgctcggcgaggacagcagcgtccactgcctggcgttctgcttcgtcaactggtccttcgtttgacacgccatcccatggcctgtgtgatgagcaggccaatttttttgtatggtgatcccaatatggggaaaccatcagctgtgacagaaggctttatgttgcatgcactagttgtacgtcttgaatcgagtgtatttatgaagaaattggatactgcgcaaagtctggtgccacttacgtttgactgcctgcccggcaacaggctgtttgtctatctcaccggccaaccgaaacgatgcttattccattcagatgttacttgctgatgttaaggtatggttcaaaccagacagcaacaaaagtcggctgtttccaagtggtggaatggcatagcgacgctacacactcgtat

SEQ ID NO: 202152 - DNA, 3167 bp, Zea Mays
cgacgccacagccgcacccccgcgaaccctagctcgcagtcgcaccgcgcgccggacgctgaccaggtgcctgctctatctcctgcggtggccgtcgcgctgccgccgccagacccgatccgtccgaccgtgccaagcgcccccccctccggcgatcgatgcgaggcgccgcgggaggcggctcgggctcgggcaggctcaagggaaccaatggctgcagcggtggcgatgcgagggggaagcagcgacagcggaggatttgacaaggttcccgggatggactcggggaaatacgtgcgctacaccccggagcaagttgaggtgctcgagcggctctacatcgattgccccaagccaagctcctcacggcgccagcaactgctgcgcgagtgtcctatactctccaacattgagccgaagcagatcaaggtctggttccagaaccgaaggtgccgcgataagcagcggaaggagtcttcgcggcttcaggctgtcaacagaaagctgacggcaatgaacaagcttcttatggaagagaatgagcgtcttcagaagcaagtctctcagttggttcatgaaaatgcgcacatgcggcagcagctgcagaacacttcattggccaatgatacaagctgtgaatcaaatgtcactgcccctccaaacgctataagggatgcaagtaacccttctggactccttgcgattgcggaggagaccttcacagagttcctctcaaaggctactgggacagctattgattgggtccagatgcctgggatgaagcctggtccggattcggttggtattgtggccatttcgcatggttgccgtggcgttgctgcccgcgcctgtggtttggtgaatctagaaccaacaaaagtcatagaaatcttgaaagatcgtccctcttggttccgtgattgtcgaagtctggaagtgtttacaatgtttccagctggaaatgggggaacaattgaacttatctacatgcagatgtacgccccaacaactttagttcctgcacgtgacttttggacgttgcgatacacgacaacaatggaagatggcagccttgtggtctgtgagagatccttgactggttctggaggcggtccaaatgcagcttctgcacagcaatttgttagggctgagatgcttccaagtgggtatttagtgcgcccatgcgaaggtggaggttcgattgtgcatatagtggaccatctagatctcgaggcatggagtgttcctgaagtgcttcgaccactatatgagtcttctagagtagttgctcagaaaatgactactgtggcactgcgccaccttagacaaattgctcaagaaacaagtggagaagtagtgtatgccttgggaaggcaacctgcagttctacggacctttagtcaaagactaagcagggggtttaatgatgccattagtggtttcaacgatgatggttggtctgtaatggggggagatggcattgaagacgttgttgttgcttgcaactcaaccaagaaaattaggaataatagcaatgctgggattacatttggagcgcctggaggcattatttgtgcgaaggcatccatgttactgcagagcgtcccaccggcagtactggtccgatttctgagggagcatagatctgaatgggctgattacaatattgatgcgtatttggcttcatcactgaagaccagtgcgtgctcacttcctgggttgcgacccatgagattttctggggggcagatgatcatgccacttgctcacacagtggagaacgaggagattcttgaagttgtccgccttgaaggacaacctcttactcatgatgaagcccttctttcaagggacatccaccttctccagctttgcactggaatagatgagaaatctgtgggttcctccttccagcttgtgtttgcaccaattgatgagcattttccggatgatgctccattgatttcctctggctttcgtgtcataccacttgatatgaaaacagatggtgtatcctctggtaggacgctagatttggcatctagtcttgatgtgggttctgctgcaccccaagcctcaggggatgcacctccagatgactgtaatttgagatctgtgctgacaatcgcctttcaattcccttatgagatgcaccttcaggacagtgttgctactatggcccgtcaatatgtgcgtagtgttgtttctgctgtgcaaagggtgtcgatggctatatctccctcccaatctggtctaaatgctgggcagaggatgctttctggcttccctgaagctgccacacttgctagatgggtttgccagagttatcactaccatctaggtgtggaattactcaatcaatcagatgaagctggtgaagcattgttgaaaatgctctggcatcatccagatgctgttctgtgctgctcttttaaggtaccagaagagttgtactcaagtccgcaatattccaatcttctaaagcagaggcagatccctttgacaagttaatgcttccacagagaaacctatgtttacgtttgcaaacaaggcagggctcgacatgttagaaacatctcttattgcgctgcaagacctgacgctagacaagatcttcgacgagtcaggaaggaaagcaatattctcagatatctcaaaactaatggaacagggctacgcgtacctgccgtcgggcgtgtgcatgtcaggaatgggtcggcatgtctcattcgaccaagctgtagcgtggaaggtgctcggcgaggacagcagcgtccactgcctggcgttctgcttcgtcaactggtccttcgtttgacacgccatcccatggcctgtgtgatgagcaggccaatttttttgtatggtgatcccaatatggggaaaccatcagctgtgacagaaggctttatgttgcatgcactagttgtacgtcttgaatcgagtgtatttatgaagaaattggatactgcgcaaagtctggtgccacttacgtttgactgcctgcccggcaacaggctgtttgtctatctcaccggccaaccgaaacgatgcttattccattcagatgttacttgctgatgttaaggtatggttcaaaccagacagcaacaaaagtcggctgtttccaagtggtggaatggcatagcgacgctacacactcgtat

SEQ ID NO: 202153 - DNA, 3105 bp, Zea Mays
gaggagcctgtccgctcgctgcgtcgtgcgcctgccttcctctcacggtcggcctcgccgcgcgtttgctttcccgcccacgcagggatcttcgcgagcggggagttgaagcgcgagatttgcgcggctacgattctgcgttgccgagggagcaagggaaccaatggctgcagcggtggcgatgcgagggggaagcagcgacagcggaggatttgacaaggttcccgggatggactcggggaaatacgtgcgctacaccccggagcaagttgaggtgctcgagcggctctacatcgattgccccaagccaagctcctcacggcgccagcaactgctgcgcgagtgtcctatactctccaacattgagccgaagcagatcaaggtctggttccagaaccgaaggtgccgcgataagcagcggaaggagtcttcgcggcttcaggctgtcaacagaaagctgacggcaatgaacaagcttcttatggaagagaatgagcgtcttcagaagcaagtctctcagttggttcatgaaaatgcgcacatgcggcagcagctgcagaacacttcattggccaatgatacaagctgtgaatcaaatgtcactgcccctccaaacgctataagggatgcaagtaacccttctggactccttgcgattgcggaggagaccttcacagagttcctctcaaaggctactgggacagctattgattgggtccagatgcctgggatgaagcctggtccggattcggttggtattgtggccatttcgcatggttgccgtggcgttgctgcccgcgcctgtggtttggtgaatctagaaccaacaaaagtcatagaaatcttgaaagatcgtccctcttggttccgtgattgtcgaagtctggaagtgtttacaatgtttccagctggaaatgggggaacaattgaacttatctacatgcagatgtacgccccaacaactttagttcctgcacgtgacttttggacgttgcgatacacgacaacaatggaagatggcagccttgtggtctgtgagagatccttgactggttctggaggcggtccaaatgcagcttctgcacagcaatttgttagggctgagatgcttccaagtgggtatttagtgcgcccatgcgaaggtggaggttcgattgtgcatatagtggaccatctagatctcgaggcatggagtgttcctgaagtgcttcgaccactatatgagtcttctagagtagttgctcagaaaatgactactgtggcactgcgccaccttagacaaattgctcaagaaacaagtggagaagtagtgtatgccttgggaaggcaacctgcagttctacggacctttagtcaaagactaagcagggggtttaatgatgccattagtggtttcaacgatgatggttggtctgtaatggggggagatggcattgaagacgttgttgttgcttgcaactcaaccaagaaaattaggaataatagcaatgctgggattacatttggagcgcctggaggcattatttgtgcgaaggcatccatgttactgcagagcgtcccaccggcagtactggtccgatttctgagggagcatagatctgaatgggctgattacaatattgatgcgtatttggcttcatcactgaagaccagtgcgtgctcacttcctgggttgcgacccatgagattttctggggggcagatgatcatgccacttgctcacacagtggagaacgaggagattcttgaagttgtccgccttgaaggacaacctcttactcatgatgaagcccttctttcaagggacatccaccttctccagctttgcactggaatagatgagaaatctgtgggttcctccttccagcttgtgtttgcaccaattgatgagcattttccggatgatgctccattgatttcctctggctttcgtgtcataccacttgatatgaaaacagatggtgtatcctctggtaggacgctagatttggcatctagtcttgatgtgggttctgctgcaccccaagcctcaggggatgcacctccagatgactgtaatttgagatctgtgctgacaatcgcctttcaattcccttatgagatgcaccttcaggacagtgttgctactatggcccgtcaatatgtgcgtagtgttgtttctgctgtgcaaagggtgtcgatggctatatctccctcccaatctggtctaaatgctgggcagaggatgctttctggcttccctgaagctgccacacttgctagatgggtttgccagagttatcactaccatctaggtgtggaattactcaatcaatcagatgaagctggtgaagcattgttgaaaatgctctggcatcatccagatgctgttctgtgctgctcttttaaggtaccagaagagttgtactcaagtccgcaatattccaatcttctaaagcagaggcagatccctttgacaagagaaacctatgtttacgtttgcaaacaaggcagggctcgacatgttagaaacatctcttattgcgctgcaagacctgacgctagacaagatcttcgacgagtcaggaaggaaagcaatattctcagatatctcaaaactaatggaacagggctacgcgtacctgccgtcgggcgtgtgcatgtcaggaatgggtcggcatgtctcattcgaccaagctgtagcgtggaaggtgctcggcgaggacagcagcgtccactgcctggcgttctgcttcgtcaactggtccttcgtttgacacgccatcccatggcctgtgtgatgagcaggccaatttttttgtatggtgatcccaatatggggaaaccatcagctgtgacagaaggctttatgttgcatgcactagttgtacgtcttgaatcgagtgtatttatgaagaaattggatactgcgcaaagtctggtgccacttacgtttgactgcctgcccggcaacaggctgtttgtctatctcaccggccaaccgaaacgatgcttattccattcagatgttacttgctgatgttaaggtatggttcaaaccagacagcaacaaaagtcggctgtttccaagtggtggaatggcatagcgacgctacacactcgtat

SEQ ID NO: 202154 - DNA, 3031 bp, Zea Mays
agcctgtccgctcgctgcgtcgtgcgcctgccttcctctcacggtcggcctcgccgcgcgtttgctttcccgcccacgcagggatcttcgcgagcggggagttgaagcgcgagatttgcgcggctacgattctgcgttgccgagggagcaagggaaccaatggctgcagcggtggcgatgcgagggggaagcagcgacagcggaggatttgacaaggttcccgggatggactcggggaaatacgtgcgctacaccccggagcaagttgaggtgctcgagcggctctacatcgattgccccaagccaagctcctcacggcgccagcaactgctgcgcgagtgtcctatactctccaacattgagccgaagcagatcaaggtctggttccagaaccgaaggtgccgcgataagcagcggaaggagtcttcgcggcttcaggctgtcaacagaaagctgacggcaatgaacaagcttcttatggaagagaatgagcgtcttcagaagcaagtctctcagttggttcatgaaaatgcgcacatgcggcagcagctgcagaacacttcattggccaatgatacaagctgtgaatcaaatgtcactgcccctccaaacgctataagggatgcaagtaacccttctggactccttgcgattgcggaggagaccttcacagagttcctctcaaaggctactgggacagctattgattgggtccagatgcctgggatgaagcctggtccggattcggttggtattgtggccatttcgcatggttgccgtggcgttgctgcccgcgcctgtggtttggtgaatctagaaccaacaaaagtcatagaaatcttgaaagatcgtccctcttggttccgtgattgtcgaagtctggaagtgtttacaatgtttccagctggaaatgggggaacaattgaacttatctacatgcagatgtacgccccaacaactttagttcctgcacgtgacttttggacgttgcgatacacgacaacaatggaagatggcagccttgtggtctgtgagagatccttgactggttctggaggcggtccaaatgcagcttctgcacagcaatttgttagggctgagatgcttccaagtgggtatttagtgcgcccatgcgaaggtggaggttcgattgtgcatatagtggaccatctagatctcgaggcatggagtgttcctgaagtgcttcgaccactatatgagtcttctagagtagttgctcagaaaatgactactgtggcactgcgccaccttagacaaattgctcaagaaacaagtggagaagtagtgtatgccttgggaaggcaacctgcagttctacggacctttagtcaaagactaagcagggggtttaatgatgccattagtggtttcaacgatgatggttggtctgtaatggggggagatggcattgaagacgttgttgttgcttgcaactcaaccaagaaaattaggaataatagcaatgctgggattacatttggagcgcctggaggcattatttgtgcgaaggcatccatgttactgcagagcgtcccaccggcagtactggtccgatttctgagggagcatagatctgaatgggctgattacaatattgatgcgtatttggcttcatcactgaagaccagtgcgtgctcacttcctgggttgcgacccatgagattttctggggggcagatgatcatgccacttgctcacacagtggagaacgaggagattcttgaagttgtccgccttgaaggacaacctcttactcatgatgaagcccttctttcaagggacatccaccttctccagctttgcactggaatagatgagaaatctgtgggttcctccttccagcttgtgtttgcaccaattgatgagcattttccggatgatgctccattgatttcctctggctttcgtgtcataccacttgatatgaaaacagatggtgtatcctctggtaggacgctagatttggcatctagtcttgatgtgggttctgctgcaccccaagcctcaggggatgcacctccagatgactgtaatttgagatctgtgctgacaatcgcctttcaattcccttatgagatgcaccttcaggacagtgttgctactatggcccgtcaatatgtgcgtagtgttgtttctgctgtgcaaagggtgtcgatggctatatctccctcccaatctggtctaaatgctgggcagaggatgctttctggcttccctgaagctgccacacttgctagatgggtttgccagagttatcactaccatctaggtgtggaattactcaatcaatcagatgaagctggtgaagcattgttgaaaatgctctggcatcatccagatgctgttctgtgctgctcttttaaggagaaacctatgtttacgtttgcaaacaaggcagggctcgacatgttagaaacatctcttattgcgctgcaagacctgacgctagacaagatcttcgacgagtcaggaaggaaagcaatattctcagatatctcaaaactaatggaacagggctacgcgtacctgccgtcgggcgtgtgcatgtcaggaatgggtcggcatgtctcattcgaccaagctgtagcgtggaaggtgctcggcgaggacagcagcgtccactgcctggcgttctgcttcgtcaactggtccttcgtttgacacgccatcccatggcctgtgtgatgagcaggccaatttttttgtatggtgatcccaatatggggaaaccatcagctgtgacagaaggctttatgttgcatgcactagttgtacgtcttgaatcgagtgtatttatgaagaaattggatactgcgcaaagtctggtgccacttacgtttgactgcctgcccggcaacaggctgtttgtctatctcaccggccaaccgaaacgatgcttattccattcagatgttacttgctgatgttaaggtatggttcaaaccagacagcaacaaaagtcggctgtttccaagtggtggaatggcatagcgacgctacacactcgtat

SEQ ID NO: 202155 - DNA, 2407 bp, Zea Mays
cctcggcgtccgggcatcgccatcgtagacacggcaaaggagacgccggaaggcccggacggaacaagcgagatatttaaggacgcctttttggcgcgaccccacgacatggcggcatatctatctactacacacgcctttaaaacctttcgccctcctccgcgctcccggctcctcccagcaccagcaagcagccttatctatcccctcagctctgcagctcagtgtccaccaccgccgcctccttccagctgggtggaagaaacatgtcgcgaatggcgcccccgtctccgcctcagtccctgaagcccccgacgctgcccttctccccgcccaaaaagccaccgccgatgccggtgtacaaggacctgcacttcaaccgcgacctctccgccaccaagaagctccaggccggagtggacctggtggcacggttgttgggggtcaccctggggcccaaggggaggaacgtggtgcttggcaacaagtatggccctcccaagattgtcaatgacggggagaccgtccttaaggagatcgaattggaagatccattagaaaatcttggagtgaagctggtccgacaggctggagcaaggaccaatgatattgcaggagatggttgtaccacatccataatccttgcccaaggcctcattgctgaagggatgaaggttcttgcagctggaatcaacccagttcaggtcgcacgtggcattgagaagactgctgctgctttggtgtctgagctcagactgatgtcgcgggtgattgaagaccatgaaattgcacatgtggctgcagttagtgcgggaaatgattatgctgttggaaatatgatttatgatgcttttcaaagagtaggtagacaaggaatggtgagaattgaaaatggaagaggcaccgagaacagtctggaggttctggaaggaatgcaatttgaacgcggttacctatctccttactttgttaccgatcgtggtaacatgacggtggagttcactgactgtcagatactattggttgacaagaaaattacggatgctagtgagattataaggatactggacagtgctgtcaaagaaaactatccgttgttaataatcgccgaggatgtggaagaacaggcaatggctgatttgataaaaaacaagctgaaagggacaattaaggttgcagccgttaaggccttctcttttggggaacaaaagactcaatgcttggatgacattgcaatcatgacaggaggtacactagtgagggatgacatggggcatatactggaaaaggcaggaaaagaggttcttggttccgcttctaaggtggtaatcacgaaagattcaacactaattgttactgacggaagcaatcgtcgagcagttgaggaaagggttgctatgataaaaggccaaattgagaattctaaggaaagttacaacaagaagatattgggtgagaggatagcaaggttatgtggtgcaattgcagtgatccaggttggtgctcaaacaatcattgagatgaaagataagaagctgaggattgaagatgcacttaacacaacaagggcagctattgaggaaggtgttgtagttggtggtggatgtagcctactaagactgtcagagaagattgacgcaatcaaggaatcatcgttggataatatagagcaggaggttggtgctgacatcttcaaacaagccttgagttaccctacctcactaatagcaaaaaatgcaggggtgaatggcgactttgtcattaaaaaggtgttactgaatgatgatgcaaattatggttacaatgctgccaagaactgctatgaggacttgatggctgctggaatactggacgcaacaaaggttgtgaggtgttgcattgagcatgctgctgtagttgctaagtcctttctcacctctgatgtggtgattgttgaggcaaaagaaggcaaacctattcgaataagacccccaatgcctcctaggcacttaattcccccaatgcctgcttcaagtattcgagtgtagcaggcgtcctttccaccaagaatcagcctcaacacaacaagactacgggcccggtacccccaagtttctaagataataaagcaaagaaaacatagtgaaattttgacgtcaaacgtggctttgtatgattgctccaagaagctctatgcacgctatcgcatcatcggagcagcagcaagggtggatgatatgtgttatatagggaatacaaaggtgaacaattcaattttgatgttcaaatgctccttaccgtcataaatatacttctgtttttttaggaacatatactttaatagcttcgcttagtttagaattttttttttgaagagtagaagaattactcattattatattaagaaaaaaagagttttagtcctgaa

SEQ ID NO: 202156 - DNA, 2206 bp, Zea Mays
cctcggcgtccgggcatcgccatcgtagacacggcaaaggagacgccggaaggcccggacggaacaagcgagatatttaaggacgcctttttggcgcgaccccacgacatggcggcatatctatctactacacacgcctttaaaacctttcgccctcctccgcgctcccggctcctcccagcaccagcaagcagccttatctatcccctcagctctgcagctcagtgtccaccaccgccgcctccttccagctgggtggaagaaacatgtcgcgaatggcgcccccgtctccgcctcagtccctgaagcccccgacgctgcccttctccccgcccaaaaagccaccgccgatgccggtgtacaaggacctgcacttcaaccgcgacctctccgccaccaagaagctccaggccggagtggacctggtggcacggttgttgggggtcaccctggggcccaaggggaggaacgtggtgcttggcaacaagtatggccctcccaagattgtcaatgacggggagaccgtccttaaggagatcgaattggaagatccattagaaaatcttggagtgaagctggtccgacaggctggagcaaggaccaatgatattgcaggagatggttgtaccacatccataatccttgcccaaggcctcattgctgaagggatgaaggttcttgcagctggaatcaacccagttcaggtcgcacgtggcattgagaagactgctgctgctttggtgtctgagctcagactgatgtcgcgggtgattgaagaccatgaaattgcacatgtggctgcagttagtgcgggaaatgattatgctgttggaaatatgatttatgatgcttttcaaagagtaggtagacaaggaatggtgagaattgaaaatggaagaggcaccgagaacagtctggaggttctggaaggaatgcaatttgaacgcggttacctatctccttactttgttaccgatcgtggtaacatgacggtggagttcactgactgtcagatactattggttgacaagaaaattacggatgctagtgagattataaggatactggacagtgctgtcaaagaaaactatccgttgttaataatcgccgaggatgtggaagaacaggcaatggctgatttgataaaaaacaagctgaaagggacaattaaggttgcagccgttaaggccttctcttttggggaacaaaagactcaatgcttggatgacattgcaatcatgacaggaggtacactagtgagggatgacatggggcatatactggaaaaggcaggaaaagaggttcttggttccgcttctaaggtggtaatcacgaaagattcaacactaattgttactgacggaagcaatcgtcgagcagttgaggaaagggttgctatgataaaaggccaaattgagaattctaaggaaagttacaacaagaagatattgggtgagaggatagcaaggttatgtggtgcaattgcagtgatccaggttggtgctcaaacaatcattgagatgaaagataagaagctgaggattgaagatgcacttaacacaacaagggcagctattgaggaaggtgttgtagttggtggtggatgtagcctactaagactgtcagagaagattgacgcaatcaaggaatcatcgttggataatatagagcaggaggttggtgctgacatcttcaaacaagccttgagttaccctacctcactaatagcaaaaaatgcaggggtgaatggcgactttgtcattaaaaaggtgttactgaatgatgatgcaaattatggttacaatgctgccaagaactgctatgaggacttgatggctgctggaatactggacgcaacaaaggttgtgaggtgttgcattgagcatgctgctgtagttgctaagtcctttctcacctctgatgtggtgattgttgaggcaaaagaaggcaaacctattcgaataagacccccaatgcctcctaggcacttaattcccccaatgcctgcttcaatttcaggtattcgagtgtagcaggcgtcctttccaccaagaatcagcctcaacacaacaagactacgggcccgctctatgcacgctatcgcatcatcggagcagcagcaagggtggatgatatgtgttatatagggaatacaaagaagaattactcattattatattaagaaaaaaagagttttagtcctgaa

SEQ ID NO: 202157 - DNA, 1390 bp, Zea Mays
ttttaaatttgaaaatttacttctgatttgcaaaacaaatggatatagttgttcccttcaatcatgtccaaggtcaagaaccattcaggtcataaacccctacgacaggggccacgagggctcatcttcgccactgcccctactcccaccttctgcatgtcctgctcggtgctgttccattccctagcgatgttctccggctaaagacgcttggagtttgtggtgtggtgacacttaatgaatcatacgagaggcttgttcccacatccctatacgaggataaaagaagtaggcgcaatgaggagtcatgttcattcacaagctctaacagagaaagttggggcagatgttcatctttaggtgcagccagtgatgaattattctcaggcgataataatgataagcagatatgagcccttgggcctccagttcgggcaacaagcatatggcaaagagagtgagggggcatgatattgttttccaattccaaactgtgatgatgtgtagaggcaaaggatccttcagagttcatcactcatcgagccaaagattttgtgtcaagcatgaaggacattgaaacccggtttatgtgtatagttgaagcaggaaataaggtttctagaatgcttgaaaccaagaagatcttgcttgacatatgtgctaaaataccaggattctaggttctccagttaagctacctactgcccgattgtgtcagcacttcaagtgtgctgcaattgtgatgttattctcaaccatgaaactgtgaccctccatagttaagggattgcactttcttaaatatttgatgaggaagttgttggactttgatgaacctagaactcttgcaccaacttgtctttttgttggaggtacaaaatacatggtgatccaaggtgaacctagagtggtcatccgaggaaagaagtgatgacgtgtgtttagaggatgggatccttgcaattgtcaaacaaggagatgagagaccccttgaattgcttgctaaagcatatgctatcaaatcttttgacatagatccccagaacccctctgatgttgttttcacgttagaatgggaatcaatcggtgtcctaccttgtggcgagatggcgagaagaaagataatttttactaccaagggatcttaatcagaattctaggctcattcatacattcactacaatgccttcgaactcatgaacatttatctctggctctattgtggtgggttacatgaatagagtttttgcatgttcttcgttttatatggtgacatacttgttactatgtgacattgtttgatgaaacccttgcggcattgtattatttattttgttctatatagtcttaacattttatcaaataaaaatttatgtgacgtcataacata

SEQ ID NO: 202158 - DNA, 1410 bp, Zea Mays
gtagtggatctctcctcctgttgttcccttcaatcatgtccaaggtcaagaaccattcaggtcataaacccctacgacaggggccacgagggctcatcttcgccactgcccctactcccaccttctgcatgtcctgctcggtgctgttccattccctagcgatgttctccggctaaagacgcttggagtttgtggtgtggtgacacttaatgaatcatacgagaggcttgttcccacatccctatacgaggataaaagaagtaggcgcaatgaggagtcatgttcattcacaagctctaacagagaaagttggggcagatgttcatctttaggtgcagccagtgatgaattattctcaggcgataataatgataagcagatatgagcccttgggcctccagttcgggcaacaagcatatggcaaagagagtgagggggcatgatattgttttccaattccaagatctaaggagcaaagactattaattatcataaacaagatttctaattggtgaaagctttttatatatagcagactgtgatgatgtgtagaggcaaaggatccttcagagttcatcactcatcgagccaaagattttgtgtcaagcatgaaggacattgaaacccggtttatgtgtatagttgaagcaggaaataaggtttctagaatgcttgaaaccaagaagatcttgcttgacatatgtgctaaaataccaggattctaggttctccagttaagctacctactgcccgattgtgtcagcacttcaagtgtgctgcaattgtgatgttattctcaaccatggtaaccagggatgaggaagttgttggactttgatgaacctagaactcttgcaccaacttgtctttttgttggaggtacaaaatacatggtgatccaaggtgaacctagagtggtcatccgaggaaagaagaatattttgccagtgatgacgtgtgtttagaggatgggatccttgcaattgtcaaacaaggagatgagagaccccttgaattgcttgctaaagcatatgctatcaaatcttttgacatagatccccagaacccctctgatgttgttttcacgttagaatgggaatcaatcggtgtcctaccttgtggcgagatggcgagaagaaagataatttttactaccaagggatcttaatcagaattctaggctcattcatacattcactacaatgccttcgaactcatgaacatttatctctggctctattgtggtgggttacatgaatagagtttttgcatgttcttcgttttatatggtgacatacttgttactatgtgacattgtttgatgaaacccttgcggcattgtattatttattttgttctatatagtcttaacattttatcaaataaaaatttatgtgacgtcataacata

SEQ ID NO: 202159 - DNA, 2296 bp, Zea Mays
cggggatttaatttgttggaactcggaacaaaccacgaaaggtgttgggtcgacgattggagctggcgtctacgtccttgttggcacagttgcgcgggagcattccgggccggcattgacgctttcatttctgatagccggaatagcagctgcgctttcagccttctgctatgcggagctggctagccgttgcccttcggcaggaagcgcctatcattattcgtacatctgcgttggcgaaggagttgcatggttgattggctgggctttgatacttgaatacacgattggtggatcagccgttgcccgtggcatttctcctaatctagccttattttttggaggacaggatagtctgccatggattttagcacgacatgagatcccatggcttgatgtcgttgtagatccttgtgcttctttcctcgttttcgtcgtcactggccttctctgtgtggggataaaagagagttcatttgtgcaaggagttgtgacggtcttaaattgctttgtgatgttatttgttatcatagccggtagctacatcggcttccaaacaggatgggttggctacaaggttgctggcggatttttcccttatggagcgaatggaatgcttgccgggtcagcaactgtcttcttcgcctacataggatttgattcagttgccagcacggctgaggaggtgaaaaatccacaacgagatctgccactgggaatcggaacagcattgtcgatttgctgttccttgtacatgttggtttcagttgttattgttggtctggtaccatactttgctatggacccagacacccctatttcatctgcttttgccaaacatgggatgcactgggcaatgtatcttgtaacaactggtgctgttcttgctctctgctcaaccttgatgggatctatattgccacagccaagaatattgatggccatggcacgagatggcctgctaccatcattcttctctgatgtccataagacgacacaagttccagtcaaaagcacagtagtgactggcatctgtgcagctgctcttgctttcttcatggatgtctctcaactggctggaatggttagtgtaggcacgctactcgcgttcactatagttgctgtgtccatcttgattcttagatacgttcctccagatgaggtacccctcccatcttccctgcaagcatcattccgcttgagccaagaaaatgacgaggaaaagctgaggggtacccttggagatgatgatcatgagcaaggctcagctgaaataagtgatgttgtagtagaaccaatcactgaccccctgatcgagaagcagctatacgcaagcaatttgagtgaggcaaaacggcgtaagaccgcggcatgcagcatcacatctgtttgcataggggttctgatcctcacgacgtcagcctcggcaacattcttgcccttcccggtgagatgctccgtttgtgttttgggtggcatgctcctcctagctggtctgggcatgctctgctggattgaccaagatgatgggaggcactcctttggccactccggaggattcatctgtccgtttgttcccttgctgccggtaatgtgtatcctcataaatacatacttgttaataaatcttggtggcggcacgtggatgcgagtgggggtgtggctagtgatgggggtgttcgtctacattttctatggccgcacccacagctcgttgacggatgtcgtgtatgtccctgtggccgaggcgaatgagatatacgggtcatcctcttcgttagggtttgtggcgtaaagagagatggaaggagatgtttgttgaagcctatcttgagccagtcatggtacttctcacaaaaacctcaaagatcctgactggagcaggtacctgcttgagctattgtgttgcaggcatgggtttgaagaattcaatttgtacgtcatatttttaaaatgtgtaaattgtaacgcacggctaagcttgtgtgtctctgttggaggaatgtaaatattagtatattgcatagaactatatataggtggtgccaatatacaggtgtttaaaaaaaagggggggggtcattctaggaatctgtatgttttactacgaacttgttctaaattcctaggaattcaaacaggcatgtctgaggcgtattatgtggttaaggcctcaaaggtccaaacacattttatttcatgttgaaatgaagattacacgagcagaaatgctcacggaaaaaacaatagtacatcaataattcagattcactgcaccaggtttccagcaccaggt

SEQ ID NO: 202160 - DNA, 4226 bp, Zea Mays
gaggcaagcacgcgcgtgacgaccacccctgaacccgtcagcgacaccgtcaaagatctgaaagcaagttgcagtttggcactccggcgacgccatgaaggggggtttaaagaaatgcgggcccctctgttctgaggtcaggcgacgggtgcggtcgccatcgccggggggcgatgccgcgtccgcgtgcgcgccggcggcagaatccgcccttgcgcctggacaggagctattgggcctacggctgctgcaaagattggcgaggcagccagggatgtatctggacggactgacgacggagatctcggttgattgtcctggtcaaacactctttgtttctgtaaatggaagttggataggaaacacaaaggccctttttggtggttgatccctgatcggaggggattggattcattggggaaaaaacaaggtttgtttggtgatcagagaattgaagtgggaaaattctcttgctattcaattatctggtaagaagatttcttcacatggatcccctccaattttctggtcattcagttggtttagagaaaaggtagagaaggtacagtttttgccgtgttaactagccagtaaattcgtgtttgactgctgcagctagaggagcatgacgaaacacaacctttttttccagatgttttgttttttgattggatgggaaaaaaattcgtttgtgagatttgcagtttcgcaagaaattcgaaaaggaaccgttgtcaggatcagcagaagcttccaaagcaacactttttttcctgtaaaaactatgtcaacaattaaacatgacgagaggagccagtttaccttaccagtaatacagagacatgatttggcgagaggtccatgttagggaagggaggctccaaaccggcgcttttcagccttgcgtcagtgttttatatatatgattcaaatatgtcgctgtaatgccgagtaaatctatgggcacttattagactggccatccacttcctccaattgctgcatcatgttagatgctgtcagtgtcaaaacacctaggaccaagctgctgcaaattaatccttggactaggaattctgagacgtgttgttgaattcaagcagtgtactgcttttctgttcatacatacacctaatataggccgcttgtgcgtgttcattggcgcgaaagtggccaaattcttcactggccgatttttccactgatgagacaaaatgaggagaacggaatctttgcctccgatgaagggaaagatacctgccatcactttgtttagtcccagctagctagtgccacactcaactagtacatgtcttctgtgcttgaactcttctgccaggcactatttttgtaaggttatttggtgctttaggtgggattctattttatattatctcatatgtttcattgcttctgttgcttgaatttcaagcgattgtccttagtagccctgctactgcaacactactaaagacagcttcttgtgactcccgttatcaatctggtcaatcgttgcaccaggagaggggagggtgagctgagaggggtttcatggagatggagggcagaggcctgtctgatttgttcaggaacaccagcgaggagatcttcctcaaggcagtgatggagaactcgatgggagtagcagcagcgccaagcatggagatgctggggttcaagaacacgtcgcgaagtctcagagaagacagcgaggagctgttcaacaactggcttatgaatggagagatccctggatttgggtcagtgaacaatcaccctcgacaaccatctaggttgtcatcagaagccgcaggccttccgaatcaacagcatgacattgctcaacaaagttttctcactgacaacttggttccacagaatttaacaattccttctgtcgaatatccaaataaccacaaccagcaatcactcaaaaatgcagcagagaagggaatgcaagccagtgacctacttctagcaaaagcctggttccacagcactcaaccaatgactagaagtcgttcgtcagagttaaggaggaggtatgctgcgatgcaaactaatatggcaccaataacaataggaagcattgaaacacctaaccaattaaaacaagattttacaaacacaacaaacatcacaccaatgagcaacacacttgttcatacaccaaagtttgtatctccttcaagttcatcaacatcccctctggataatccacatgtggcagcacaagatactgttacctcagtggtgagcatgctcaaggacacacttgagcgcaagaagcttggtagccatgctaacaaagacacctcagcaggcaattcttttggattctatgacactcagcagtttcaacaaaacattcttggaggaacagatttctttcccatagtgacaactgcccaagttcaggattccctgatgcttcccaaggttgacaggcccatggaaccaaacaatggtaacttcgttgctcctgcaaaccaggtttggttcagtgcagcttctcgagagccttcacacagtggatcgtctactgctatgactactcattcagctggatttgaaatgtgtgatgagctacctcctgcagcgcaagcgatgagtgtttgtgagagcaccagaaaaaatgctgcaaatggaacaaccgactgcaaatcaaaaggcaaagagtatagagagagggtacaaaaggataatttgaaagatgggaggaagaaagcagccctaactcgaataggatccatttcatctgaacaagcagctgataatggagatcctacaaagaagcgcagggttgagcgctcacgcaaaatggcagaagcaaaggaaagaagttccacaccagtaataccatctgatatgcaagccgtacttaaacgctgtgaaaccctagagaaggaggtccgatcactaaaacttaacctgtctttcatgaacaggaaagattcagaacagaccaagcagatcgaggagcttcagaagcaaaacgaggatttggccgaagagaaggagcggctggtggaagagatcgaaaggattgtctctgaccccaacacatgaccgcccaatcatttctgacatttttttatatactaatagaattagacttgaaatggtcctagatacaaatacacatacacaatccagcagggggcagcaagaattaagtgctggcctaaatgtaccattctttccttgttttcacaagtgtaacgtatacgaatatcaacaagcaaagggatcagggattacagtttatttcctgcagcatgttggcctcatgggtatcaatcagaacatgcgtgtgatatgaatgtggagtatgtgtgttatgtgtatctagttgcaaccaataaaaacagaacatgacatgcgggtaatcgttatttcagtagtagatttgaacaaaactcagcagtcttaattagattgaaaatcgcaaagcgaagacacctacggtttttccctaaagaccatcttaaaaaaaggaaaagaagagactggaaaaaaaaacaatctccttggtccttgctgactccatcggtcactccaatgcgatgcgagcccatcaaccttttcgctcaccagcagccgctgctgcggccgcaatggccactcgttccagttctttggcgtcggccagccacggccgccgcctcaacgccgccgtatcttcaacgtcaccggcggcatccgacgaggtgccatcgaaggtgccgtcgaacggcgcctcgcagaaggccatcgtggccacgagcctatccaccggccgcttcttcgtcttcgcggctgcggccagcctcgccggggcctcggggacgttcgttgcgcaggcgcggcctccgacagcggcacctggcgacagagcccaggcgccgtcgaacggcgcctcgcagaaggccatcatggccgcgaccctctccatcggccacttggcggccagcaacgccaacctcgacggcgcagccttgggaacgttggatgaggatgggctgttcccggcggcaagcgacgacgcagccgaggtgcggtcgaacggtgcctcgctgaaggccaccatggcaatgaggctctccatctccatcgccgctacctcgagtctgttcgattggttttggtcggggatgagatgctggcggcaggcggcgtctatatatatatggacgcctcaatatcgatgtcgttcggagtccgacgcaggcagaggtgtaacggaa

SEQ ID NO: 202161 - DNA, 3351 bp, Zea Mays
gcagagagaggcaagcacgcgcgtgacgaccacccctgaacccgtcagcgacaccgtcaaagatctgaaagcaagttgcagtttggcactccggcgacgccatgaaggggggtttaaagaaatgcgggcccctctgttctgaggtcaggcgacgggtgcggtcgccatcgccggggggcgatgccgcgtccgcgtgcgcgccggcggcagaatccgcccttgcgcctggacaggagctattgggcctacggctgctgcaaagattggcgaggcagccagggatgtatctggacggactgacgacggagatctcggttgattgtcctggtcaaacactctttgtttctgtaaatggaagttggataggaaacacaaaggtcagtgtcagtgaaaaccatatgcaaattcgtgtgaatccatcaccatgccccttcttcaggccctttttggtggttgatccctgatcggaggggattggattcattggggaaaaaacaaggtttgtttggtgatcagagaattgaagtgggaaaattctcttgctattcaattatctgcgattgtccttagtagccctgctactgcaacactactaaagacagcttcttgtgactcccgttatcaatctggtcaatcgttgcaccaggagaggggagggtgagctgagaggggtttcatggagatggagggcagaggcctgtctgatttgttcaggaacaccagcgaggagatcttcctcaaggcagtgatggagaactcgatgggagtagcagcagcgccaagcatggagatgctggggttcaagaacacgtcgcgaagtctcagagaagacagcgaggagctgttcaacaactggcttatgaatggagagatccctggatttgggtcagtgaacaatcaccctcgacaaccatctaggttgtcatcagaagccgcaggccttccgaatcaacagcatgacattgctcaacaaagttttctcactgacaacttggttccacagaatttaacaattccttctgtcgaatatccaaataaccacaaccagcaatcactcaaaaatgcagcagagaagggaatgcaagccagtgacctacttctagcaaaagcctggttccacagcactcaaccaatgactagaagtcgttcgtcagagttaaggaggaggtatgctgcgatgcaaactaatatggcaccaataacaataggaagcattgaaacacctaaccaattaaaacaagattttacaaacacaacaaacatcacaccaatgagcaacacacttgttcatacaccaaagtttgtatctccttcaagttcatcaacatcccctctggataatccacatgtggcagcacaagatactgttacctcagtggtgagcatgctcaaggacacacttgagcgcaagaagcttggtagccatgctaacaaagacacctcagcaggcaattcttttggattctatgacactcagcagtttcaacaaaacattcttggaggaacagatttctttcccatagtgacaactgcccaagttcaggattccctgatgcttcccaaggttgacaggcccatggaaccaaacaatggtaacttcgttgctcctgcaaaccaggtttggttcagtgcagcttctcgagagccttcacacagtggatcgtctactgctatgactactcattcagctggatttgaaatgtgtgatgagctacctcctgcagcgcaagcgatgagtgtttgtgagagcaccagaaaaaatgctgcaaatggaacaaccgactgcaaatcaaaaggcaaagagtatagagagagggtacaaaaggataatttgaaagatgggaggaagaaagcagccctaactcgaataggatccatttcatctgaacaagcagctgataatggagatcctacaaagaagcgcagggttgagcgctcacgcaaaatggcagaagcaaaggaaagaagttccacaccagtaataccatctgatatgcaagccgtacttaaacgctgtgaaaccctagagaaggaggtccgatcactaaaacttaacctgtctttcatgaacaggaaagattcagaacagaccaagcagatcgaggagcttcagaagcaaaacgaggatttggccgaagagaaggagcggctggtggaagagatcgaaaggattgtctctgaccccaacacatgaccgcccaatcatttctgacatttttttatatactaatagaattagacttgaaatggtcctagatacaaatacacatacacaatccagcagggggcagcaagaattaagtgctggcctaaatgtaccattctttccttgttttcacaagtgtaacgtatacgaatatcaacaagcaaagggatcagggattacagtttatttcctgcagcatgttggcctcatgggtatcaatcagaacatgcgtgtgatatgaatgtggagtatgtgtgttatgtgtatctagttgcaaccaataaaaacagaacatgacatgcgggtaatcgttatttcagtagtagatttgaacaaaactcagcagtcttaattagattgaaaatcgcaaagcgaagacacctacggtttttccctaaagaccatcttaaaaaaaggaaaagaagagactggaaaaaaaaacaatctccttggtccttgctgactccatcggtcactccaatgcgatgcgagcccatcaaccttttcgctcaccagcagccgctgctgcggccgcaatggccactcgttccagttctttggcgtcggccagccacggccgccgcctcaacgccgccgtatcttcaacgtcaccggcggcatccgacgaggtgccatcgaaggtgccgtcgaacggcgcctcgcagaaggccatcgtggccacgagcctatccaccggccgcttcttcgtcttcgcggctgcggccagcctcgccggggcctcggggacgttcgttgcgcaggcgcggcctccgacagcggcacctggcgacagagcccaggcgccgtcgaacggcgcctcgcagaaggccatcatggccgcgaccctctccatcggccacttggcggccagcaacgccaacctcgacggcgcagccttgggaacgttggatgaggatgggctgttcccggcggcaagcgacgacgcagccgaggtgcggtcgaacggtgcctcgctgaaggccaccatggcaatgaggctctccatctccatcgccgctacctcgagtctgttcgattggttttggtcggggatgagatgctggcggcaggcggcgtctatatatatatggacgcctcaatatcgatgtcgttcggagtccgacgcaggcagaggtgtaacggaa

SEQ ID NO: 202162 - DNA, 3380 bp, Zea Mays
caaaaacctgcactgcgcatattattgcagagagaggcaagcacgcgcgtgacgaccacccctgaacccgtcagcgacaccgtcaaagatctgaaagcaagttgcagtttggcactccggcgacgccatgaaggggggtttaaagaaatgcgggcccctctgttctgaggtcaggcgacgggtgcggtcgccatcgccggggggcgatgccgcgtccgcgtgcgcgccggcggcagaatccgcccttgcgcctggacaggagctattgggcctacggctgctgcaaagattggcgagacacaggcagccagggatgtatctggacggactgacgacggagatctcggttgattgtcctggtcaaacactctttgtttctgtaaatggaagttggataggaaacacaaaggtcagtgtcagtgaaaaccatatgcaaattcgtgtgaatccatcaccatgccccttcttcaggccctttttggtggttgatccctgatcggaggggattggattcattggggaaaaaacaaggtttgtttggtgatcagagaattgaagtgggaaaattctcttgctattcaattatctggagaggggagggtgagctgagaggggtttcatggagatggagggcagaggcctgtctgatttgttcaggaacaccagcgaggagatcttcctcaaggcagtgatggagaactcgatgggagtagcagcagcgccaagcatggagatgctggggttcaagaacacgtcgcgaagtctcagagaagacagcgaggagctgttcaacaactggcttatgaatggagagatccctggatttgggtcagtgaacaatcaccctcgacaaccatctaggttgtcatcagaagccgcaggccttccgaatcaacagcatgacattgctcaacaaagttttctcactgacaacttggttccacagaatttaacaattccttctgtcgaatatccaaataaccacaaccagcaatcactcaaaaatgcagcagagaagggaatgcaagccagtgacctacttctagcaaaagcctggttccacagcactcaaccaatgactagaagtcgttcgtcagagttaaggcaggaccttctgattccatgtgcgctattaccttcccgcatgaaatatatggttcttgcctcagttttcttggtcatatttgcaggaggaggtatgctgcgatgcaaactaatatggcaccaataacaataggaagcattgaaacacctaaccaattaaaacaagattttacaaacacaacaaacatcacaccaatgagcaacacacttgttcatacaccaaagtttgtatctccttcaagttcatcaacatcccctctggataatccacatgtggcagcacaagatactgttacctcagtggtgagcatgctcaaggacacacttgagcgcaagaagcttggtagccatgctaacaaagacacctcagcaggcaattcttttggattctatgacactcagcagtttcaacaaaacattcttggaggaacagatttctttcccatagtgacaactgcccaagttcaggattccctgatgcttcccaaggttgacaggcccatggaaccaaacaatggtaacttcgttgctcctgcaaaccaggtttggttcagtgcagcttctcgagagccttcacacagtggatcgtctactgctatgactactcattcagctggatttgaaatgtgtgatgagctacctcctgcagcgcaagcgatgagtgtttgtgagagcaccagaaaaaatgctgcaaatggaacaaccgactgcaaatcaaaaggcaaagagtatagagagagggtacaaaaggataatttgaaagatgggaggaagaaagcagccctaactcgaataggatccatttcatctgaacaagcagctgataatggagatcctacaaagaagcgcagggttgagcgctcacgcaaaatggcagaagcaaaggaaagaagttccacaccagtaataccatctgatatgcaagccgtacttaaacgctgtgaaaccctagagaaggaggtccgatcactaaaacttaacctgtctttcatgaacaggaaagattcagaacagaccaagcagatcgaggagcttcagaagcaaaacgaggatttggccgaagagaaggagcggctggtggaagagatcgaaaggattgtctctgaccccaacacatgaccgcccaatcatttctgacatttttttatatactaatagaattagacttgaaatggtcctagatacaaatacacatacacaatccagcagggggcagcaagaattaagtgctggcctaaatgtaccattctttccttgttttcacaagtgtaacgtatacgaatatcaacaagcaaagggatcagggattacagtttatttcctgcagcatgttggcctcatgggtatcaatcagaacatgcgtgtgatatgaatgtggagtatgtgtgttatgtgtatctagttgcaaccaataaaaacagaacatgacatgcgggtaatcgttatttcagtagtagatttgaacaaaactcagcagtcttaattagattgaaaatcgcaaagcgaagacacctacggtttttccctaaagaccatcttaaaaaaaggaaaagaagagactggaaaaaaaaacaatctccttggtccttgctgactccatcggtcactccaatgcgatgcgagcccatcaaccttttcgctcaccagcagccgctgctgcggccgcaatggccactcgttccagttctttggcgtcggccagccacggccgccgcctcaacgccgccgtatcttcaacgtcaccggcggcatccgacgaggtgccatcgaaggtgccgtcgaacggcgcctcgcagaaggccatcgtggccacgagcctatccaccggccgcttcttcgtcttcgcggctgcggccagcctcgccggggcctcggggacgttcgttgcgcaggcgcggcctccgacagcggcacctggcgacagagcccaggcgccgtcgaacggcgcctcgcagaaggccatcatggccgcgaccctctccatcggccacttggcggccagcaacgccaacctcgacggcgcagccttgggaacgttggatgaggatgggctgttcccggcggcaagcgacgacgcagccgaggtgcggtcgaacggtgcctcgctgaaggccaccatggcaatgaggctctccatctccatcgccgctacctcgagtctgttcgattggttttggtcggggatgagatgctggcggcaggcggcgtctatatatatatggacgcctcaatatcgatgtcgttcggagtccgacgcaggcagaggtgtaacggaa

SEQ ID NO: 202163 - DNA, 1205 bp, Zea Mays
cttcgtgtaggctcaccattgcgtctaaatcgcttcgtttttgctgccatctggctcggtggacgttaagagggccagggcaagagctccacgaaaccagcgcgagcagcactcccagcctcatcaggtcgaacaaggcttagaccaggggaaccaggacaatcagtaccccatggggaacggcaccgcggacagtggtgacaacgtgaactacggttcaaaaaaggtcttcgttggcggactgcaggatgacaccactgaggaggagttccgggcctactttgagacgtttggcactgtaacggatgtcgcggtgatatatgacagcgcaacgaaccggtcgagggggttcggcttcgtcacctttgattcggaggaagcagtagggaaggtgatgcggcagagctttcacgacttgaacgggaccaaggtagaagccaagattgctatccccaaggacgagcagtattaccgcaacagagggcgtggcgcacgctcctctggtgggagggtccctgctggctatgaaggctccatgtaccaaccgccatacaatgctggatatggctcctacaatggctacatgccacaacctgttcacgtgcagccctactttcctgccccctattttcctgtggcgggttatccctatgggagtggatacccaagccaagtcgtcatggcaaacgctcctgatatgatgtcaagatgggttcctccagcttatggaaattatcctcaaatgtatccatgatatgcagcaagctgacaacacttctagcgttacaacgatgttggaacatatgaagctaggttcacaatgactttcaggactaatacttctacaatggtgacactggagtacaacaattgtttgggaactcgcaactgtgaagacgacttggacttagattctttggttgacaagtatatcattagaattcttccagcttacctacgattcctattcctcccgcctgtaaactagtaaaagcatgctgcaagttgttactggctcccctcccctcttgtaccaatgttaaattcttacgtcgtttaatgcatcagaatcatactgttaaaatatacttgtttgctgcatgctttgacagattgttaccagaatgatggaatcatccatctatctcaaaatctggtgcattgagcttgtgcgtatatatgtcatgttggttgctgctggcgac

SEQ ID NO: 202164 - DNA, 798 bp, Zea Mays
ctgcaattggatgaacccatcagtatcattgagaacctgaagagcaagtgttccttgaacatcaaagttattaataccaccatctcttttaacaacaacattgagcttctcttctatagttactgtgacagggtcacttggaagagcagatgatcttgtagaaactgcacttggttgtacatcctccaaaatgacttctccttcggctttcaaagattcaaggaattgatttgtcttctgtgtcttgcctaatttcataccaaaacctttaccaggtgcagtagctgctgtagatggacggcctaaatgcacgagcctccttacctttgggcttgctagcaaatgagtccatgtcagtgctcagtccacctaatccagaaccactgatgctcatgtcactgaaagttttttcaatcacgcgtggaccagatattgatgagtatcctcctttgtcaagtttgcctctttccatcctcattttgtcaagctcattagccctcttcttcatgagatccttggtttcattgattttggtttgcatcatcagcttgtgtgccttctcttcatggctctccatctcacaatattgtttgacttgttgcactgttacattttccttgttcccaagagatatggcttcatcgaaagcaaatataatctcaaatgctgttttacaaataccctcctcatccaatgaaggggaagtaggatacgagcttggagaggagcctcaaagtgtccagatcttcaagaatattgctctgcttgtttgtgataagtagaagatataaacctttt

SEQ ID NO: 202165 - DNA, 2744 bp, Zea Mays
gcatagattctgctacttcagtccaaatcaaaggcgtgtttttgggctcggcgctgtctgaatttgagctatgaggtgcctgcctttcttgcatggagacgtcagtgagaaggatcctgtcactaagtcggcctctgtacggtccatgagcacaacatcgcgctcccgctccggttcagacttcacctccttgaatgtttccgacatgagcgccgagtcaataaggaggacacagtaccccagcttcactgactgcccgtctaacctgagggtgttctcctttgctgaattgaagagtgccacacgcaacttcagccgatctctcatgcttggcgagggtggctttggctgtgtgttcagcggcatcatcaagacctctgacaaacctaatgaacgaattgagattgctgttaagcaattgaaccgtaaaggacttcaggggcagaaggagtggttgacagagatgaatgtgcttggaattgtggaccatccaaacctagttaaactaataggctactgtgctgaagatgatgagaggggagtacaacgccttctagtgtatgaatatatgcctaatggaagtgtggatgatcacttatcaagtaggtcaactactctgtcatggccaatgagactaaaagtagctcttgattctgctcggggactgaagtatctgcatgaagaaatggaattccaggttattttccgagacctaaaaacatccaacattctgctggatgaaaactggaatgctaagttgtcagactttggtttggctaggcatgggccaacagaaggtctcacccatgtctccaccgcggtatgcacaattacaagccgactgttagtttattacattagtgtgtttagattgaatagtgttttgtatccttttggaaagtagatactagtatcctgacagtattcaagtgatgaaaggcatattacttgaacaaaaagagaattatggtgaagaaaaaatagacaattagtgagctcttttagctgtacttctataacattattgactttttatgccattgaatttggatactgagttgctaggcctccagaaacagaattatttttgtttactacttgcacaagtaacctcttaatgcatatgtttagtttcagtaccagacatgaagaacagagtcaaaaattgagaatgggaattgaagtaatggagaggtttgactacttgaaaacattgcaagtgatattcatttcctgaccagcttcagaatgtagcatgccactgtattctagccaaaatattcgaggaaaaaaaaacccagaagtcacctcttttcctgatcgcaggtgacaggaggggttgccccctactgattgtatgtttaaaaggagttgtgtgcagccaaaaaggaaaataaaagcccaagattacacaaaaacctttatccatcattttgtagcaggaaagttggatttcattgctcaatgggtgatcagagcaatagtatttctaggaagctctctgcatcgtcaaactttcaaagacatggcacacctcttaataacaaatagagaaggacactattaagtactttttttttgctaagttaccagctgccatatgaatttgccacagacagttttacatctatgtcctctccatgccatctcactagttcgttcctagagcagtctgaagttaccattccatgtaactacgaccctctttttgttatgtttcattttgaacaggtggttggaactctaggctacacagctccagaatacatgcagactggacacctcacggcgaagagcgacatatggagctacggagtcgtcctgtacgagctcatcacaggccgccgccccatcgaccagaaccgtccaaagagcgagcagaagcttctggactgggtgaagccatacatctcggacgtgaagcggttccccgtgatcatcgacccgcggctggaggggcactacaacctcaagtccgcgacgaagctggcgagcgtcgcgaaccggtgcatggtccggctgcccaagtcccgccccaagatgagcgaggtgtacggcatggtccagaggatcgtggacggcgtcgggaccggcccgccgcagcccccgctgctgcactaccaccatggctcggcctccgagccgggtgccaagcgcgccgagaaagggtcgctgaggaggaggttccgggaattcaggtccggctgccggcacgttgtcctgcggcggggcaggaagcctgaggtcgtgaaggacctctgagggagggaggcggtggtggatccggtgctgcaagtatatggtagtagtaggtgttcatagagacggtggtatcagttccaccgtgtagtgcttgggttggtatagggtgagttcatgcatgcataccagtcttgaagaagaaagaaagaaagaaaaaaagaaagaaagacaaggtgcaccgttgagcggtggcgttcgtgtagagtagtgctagctgtggttttgacctcctgtgtggtttacacaatgtgtgagctgcgataaggtgatctacagcatagggacccctttgtgtttacagtgcaacttctgctggctctttcgtcttgttgagaatcctttcagtagagttagaaattataggagtggtcttcgggaaagcctgcttccgttctgttccattgattcagattctcactcccttcttcgagtgtttatttgattttttatattaaagttgagattcttcgaaaagtaagaat

SEQ ID NO: 202166 - DNA, 2723 bp, Zea Mays
cttcagtccaaatcaaaggcgtgtttttgggctcggcgctgtctgaatttgagctatgaggtgcctgcctttcttgcatggagacgtcagtgagaaggatcctgtcactaagtcggcctctgtacggtccatgagcacaacatcgcgctcccgctccggttcagacttcacctccttgaatgtttccgacatgagcgccgagtcaataaggaggacacagtaccccagcttcactgactgcccgtctaacctgagggtgttctcctttgctgaattgaagagtgccacacgcaacttcagccgatctctcatgcttggcgagggtggctttggctgtgtgttcagcggcatcatcaagacctctgacaaacctaatgaacgaattgagattgctgttaagcaattgaaccgtaaaggacttcagaaggagtggttgacagagatgaatgtgcttggaattgtggaccatccaaacctagttaaactaataggctactgtgctgaagatgatgagaggggagtacaacgccttctagtgtatgaatatatgcctaatggaagtgtggatgatcacttatcaagtaggtcaactactctgtcatggccaatgagactaaaagtagctcttgattctgctcggggactgaagtatctgcatgaagaaatggaattccaggttattttccgagacctaaaaacatccaacattctgctggatgaaaactggaatgctaagttgtcagactttggtttggctaggcatgggccaacagaaggtctcacccatgtctccaccgcggtatgcacaattacaagccgactgttagtttattacattagtgtgtttagattgaatagtgttttgtatccttttggaaagtagatactagtatcctgacagtattcaagtgatgaaaggcatattacttgaacaaaaagagaattatggtgaagaaaaaatagacaattagtgagctcttttagctgtacttctataacattattgactttttatgccattgaatttggatactgagttgctaggcctccagaaacagaattatttttgtttactacttgcacaagtaacctcttaatgcatatgtttagtttcagtaccagacatgaagaacagagtcaaaaattgagaatgggaattgaagtaatggagaggtttgactacttgaaaacattgcaagtgatattcatttcctgaccagcttcagaatgtagcatgccactgtattctagccaaaatattcgaggaaaaaaaaacccagaagtcacctcttttcctgatcgcaggtgacaggaggggttgccccctactgattgtatgtttaaaaggagttgtgtgcagccaaaaaggaaaataaaagcccaagattacacaaaaacctttatccatcattttgtagcaggaaagttggatttcattgctcaatgggtgatcagagcaatagtatttctaggaagctctctgcatcgtcaaactttcaaagacatggcacacctcttaataacaaatagagaaggacactattaagtactttttttttgctaagttaccagctgccatatgaatttgccacagacagttttacatctatgtcctctccatgccatctcactagttcgttcctagagcagtctgaagttaccattccatgtaactacgaccctctttttgttatgtttcattttgaacaggtggttggaactctaggctacacagctccagaatacatgcagactggacacctcacggcgaagagcgacatatggagctacggagtcgtcctgtacgagctcatcacaggccgccgccccatcgaccagaaccgtccaaagagcgagcagaagcttctggactgggtgaagccatacatctcggacgtgaagcggttccccgtgatcatcgacccgcggctggaggggcactacaacctcaagtccgcgacgaagctggcgagcgtcgcgaaccggtgcatggtccggctgcccaagtcccgccccaagatgagcgaggtgtacggcatggtccagaggatcgtggacggcgtcgggaccggcccgccgcagcccccgctgctgcactaccaccatggctcggcctccgagccgggtgccaagcgcgccgagaaagggtcgctgaggaggaggttccgggaattcaggtccggctgccggcacgttgtcctgcggcggggcaggaagcctgaggtcgtgaaggacctctgagggagggaggcggtggtggatccggtgctgcaagtatatggtagtagtaggtgttcatagagacggtggtatcagttccaccgtgtagtgcttgggttggtatagggtgagttcatgcatgcataccagtcttgaagaagaaagaaagaaagaaaaaaagaaagaaagacaaggtgcaccgttgagcggtggcgttcgtgtagagtagtgctagctgtggttttgacctcctgtgtggtttacacaatgtgtgagctgcgataaggtgatctacagcatagggacccctttgtgtttacagtgcaacttctgctggctctttcgtcttgttgagaatcctttcagtagagttagaaattataggagtggtcttcgggaaagcctgcttccgttctgttccattgattcagattctcactcccttcttcgagtgtttatttgattttttatattaaagttgagattcttcgaaaagtaagaat

SEQ ID NO: 202167 - DNA, 1796 bp, Zea Mays
gtttttgggctcggcgctgtctgaatttgagctatgaggtgcctgcctttcttgcatggagacgtcagtgagaaggatcctgtcactaagtcggcctctgtacggtccatgagcacaacatcgcgctcccgctccggttcagacttcacctccttgaatgtttccgacatgagcgccgagtcaataaggaggacacagtaccccagcttcactgactgcccgtctaacctgagggtgttctcctttgctgaattgaagagtgccacacgcaacttcagccgatctctcatgcttggcgagggtggctttggctgtgtgttcagcggcatcatcaagacctctgacaaacctaatgaacgaattgagattgctgttaagcaattgaaccgtaaaggacttcaggggcagaaggagtggttgacagagatgaatgtgcttggaattgtggaccatccaaacctagttaaactaataggctactgtgctgaagatgatgagaggggagtacaacgccttctagtgtatgaatatatgcctaatggaagtgtggatgatcacttatcaagtaggtcaactactctgtcatggccaatgagactaaaagtagctcttgattctgctcggggactgaagtatctgcatgaagaaatggaattccaggttattttccgagacctaaaaacatccaacattctgctggatgaaaactggaatgctaagttgtcagactttggtttggctaggcatgggccaacagaaggtctcacccatgtctccaccgcggtggttggaactctaggctacacagctccagaatacatgcagactggacacctcacggcgaagagcgacatatggagctacggagtcgtcctgtacgagctcatcacaggccgccgccccatcgaccagaaccgtccaaagagcgagcagaagcttctggactgggtgaagccatacatctcggacgtgaagcggttccccgtgatcatcgacccgcggctggaggggcactacaacctcaagtccgcgacgaagctggcgagcgtcgcgaaccggtgcatggtccggctgcccaagtcccgccccaagatgagcgaggtgtacggcatggtccagaggatcgtggacggcgtcgggaccggcccgccgcagcccccgctgctgcactaccaccatggctcggcctccgagccgggtgccaagcgcgccgagaaagggtcgctgaggaggaggttccgggaattcaggtccggctgccggcacgttgtcctgcggcggggcaggaagcctgaggtcgtgaaggacctctgagggagggaggcggtggtggatccggtgctgcaagtatatggtagtagtaggtgttcatagagacggtggtatcagttccaccgtgtagtgcttgggttggtatagggtgagttcatgcatgcataccagtcttgaagaagaaagaaagaaagaaaaaaagaaagaaagacaaggtgcaccgttgagcggtggcgttcgtgtagagtagtgctagctgtggttttgacctcctgtgtggtttacacaatgtgtgagctgcgataaggtgatctacagcatagggacccctttgtgtttacagtgcaacttctgctggctctttcgtcttgttgagaatcctttcagtagagttagaaattataggagtggtcttcgggaaagcctgcttccgttctgttccattgattcagattctcactcccttcttcgagtgtttatttgattttttatattaaagttgagattcttcgaaaagtaagaat

SEQ ID NO: 202168 - DNA, 931 bp, Zea Mays
cacggctcacgttgtccgcctcacgtaaaggtcggtgccatcctctcctatctctcctcgcgcagttccacttcccattttccgccttcgtccgcatcagggacacactgcctccgatccgcatgcggcaagatcctccctcattctccaaacatgagaggagcagaggaggagagatctggcaccgccactgatgcgggaggagaggaggagaaacaggagaggagcgtcggcctgatggccggcctcatggacaaggccaagggcttcgtggtggagaaggtgatgcaaatccccaagcccgaggctgccctggatcacgtctccttccggagcatcagccgcgagggcgtcgagctgcatagccacgtcgacatcagcaacccctactctcaccgcatccccatctgcgagatcacctacacgttcaagagcgccgggtgatagcgtcgggcacgatgcccgaccccgggtggatcgcggcgagcggcagcaccaagctagacctgccggtgaaggtgccgtacgacttcatcgtgtcgctgatgaaggatctcggaggggactgggacatcgactacatgatggaggtggggctcactgtcgacctccccgccattggcgcctttactatcccgctcaccaccgagggcgagatcaagctccccaccttccgggacctattgttctaagcaattcagatatttggtgtatgaatcgatttgttttcacaccataatcaatgctgatgtggatttgcaatatttgtggatttctttatgtggtcagggattttaaagttaaaactatctcacaccaatgtgaaatagaggagtttaagcctgcccatcacaaaaaatctaacccgatgtagcaaacgtggcccctatgcataaccttgtttttgtgattggaatgatatacatacgtg

SEQ ID NO: 202169 - DNA, 3023 bp, Zea Mays
gctcgccgcgccttgttgccttcctttgttgttggttggggggacctgggaagaagagagaaaccccagcagacgccagaggaagagagaaaaccccaagtcctcctcgcctcttccgcctttcctcttcccccttcctagtatagacaatcatcaatctgtgagattggcgagcgaatcacgcatacaactgtaggatggagcggggaatgaatgcctcccctgattgcagttaatccttcccattccagtccgttcctcgtccactggagtccgttgaagtacaggctgcagtaggacagggagcaaccgccaccatagctgttcgccatttcttccatcaacaccaacatgagcagcaacaaggaaagggccaagaaggcattgaacgccatgaagctgcttggtttctctaagaagcaggccaccccagtactcaaggaactcctcaacatcttcaacaacaactgggagcccattgaggatgagtgctatcgtgccctcgctgatgccatcctcgataggcaagacaacaaacaaacccctccctcccaacagggcaaccaagcagcacatgcgcactcggagcacgatcggcaacaatatgtttctgctattcacgatgacagaggcgaagatgataatgaaacgcccctggtgaagaggcccaggatgggcacggctaatttcagggcagagttgcagccatttgagtctggaccacagcaacccactgtttcaacccaaggtgctctgtctgtttcgccacaaaacagtcgtggagtaactaggtccttgactgtagtgctgcaagatgctgggtgtgaatatcctttagctgtcgatgattctttcatcgtgaaagaacccaaaccagaaccacaaattgatatagcagaaatcaacattggtgaccatttaactgaaccacaagttgatatagcagaaatcagtgtcggtgaccatttaactgatcgagattttctgactggtcctgatgccatacagctcagtgatggatcttcagaacaaactgcaggttctggtgcaagaggcagcatggtcaaacaagctcaaagtctgggtaggagcaagcaaaaagccccattgtgcaagaatggggtagggtctatgattcaaaatactcaggagacatcgtttgtggaggtggatgttgcttcttccgccaatggcgaggtgaagatgtcattgaaatgcagcttggaatcttcgaatttcagcattagtatggaggaggttttcaaaatggttgaggagaaatgccttcactcatacaaggtgctacctccagatttttctattggcaagctgatgagtgaggtatgccaatctgttgtgcagttgggcactatgcattctgaggttaatagggacagtggcagcttgcataatgaagtagttgctccttttgtgaagccaattgcttgtgaggctgctgtggacataaatgataatgtggctggtggatcatcagtgcttgattcctcagaaccttgtttgcaaaattcgcttgttgcttgggatcctgagtttgctcattgtaagcaaaaaacaacccatgataccactgatatatccaaaggggaagagcgggtaagaatacctatagtaaatgaatttggcagcgagaaatgtcctccatccttttattacgtaccaagaaatcttgtcttccaaaatgcttatgtcaacatctcgattgctcggattggtgatgaagattgttgtgctgattgttctggcaactgtttgtcatccttagttccatgtggctgtgcaagagtgacggggggcgaattcccctatacaccagagggcctgcttaagacagaattccttgatgaatgcacctcagttaatcatttcccacaagagcatcataggttctactgtacagtttgccctcttgaaagatctaagaataaagcctcacctggtccgtgtaaaggccatcttatgagaaaattcattaaagaatgctggagtaaatgtggatgtggcatgcagtgtggaaatcgtgtgattcagcgtggtataacatgcaaattgcaggtgttctttacacgcgagggcaaaggctggggagtacgcacagtagaggatctcccaaaaggttcctttgtctgtgaatatgttggagaggtactaacaagttctgaattgcacgaaagagcaattgaaaatgcaagaaatggtaaacataagcatcaagtactcctggatgctggttggggttcaggtgtattgagggatgaagatgcccttagccttgatggttcattttatgggaacgttgggcgatttatcaaccacagatgctatgatgcgaatttagttcagatccctgttgaagttgagacgcctgatcatcattattaccatctggcatttttcacgaacaagaaagtagaggcatttgaagagctaacatgggattatggcattggttttgatgatacggaagggcccagtaaaccattcagatgcatgtgtggaagtagatattgccgcgatccgaataatctgaggaggatggctagagcagctgcaaagcggaagtaggcggggaagctgaacttggttggagattagcacatcaacttttgctgtggtatttggttccgtatttgatgtgcagcagcatcacatcagttagtacttagtattagtgtagatagatggagatgagggcggatgttttggacccttgcccgtggctgagcaacacgattgcgaccttaacctacggcatattggcatgtaaattagcctgggattgagtaggcgtagaaagaacgcgtaatagtacttagttatgtcatgtcatcttggtagagggcaagttaaattacatgccatgtcgttgcatcatctatgccatgctgggttggatgcttgtgctgaatgatttgttgaagcgactagcctaggcacttgtttttggcggtatcttctaaaaaaatttcttccctatatgtcatttttcttcatcagtgattttt

SEQ ID NO: 202170 - DNA, 2137 bp, Zea Mays
catgtactcacgggtcctataattgtaattgtggaggggcttaggcctaggactcggttgtcgctatcaaattgaccttcttatgggactactgtcagggtggagtatggtgacgccgcaattgcagctgaccaggcaggcgctcatgtgatcagccatgcgttccctcacacctatgggcagccccttgcacatttcctcaggaagacggctgttgtccttgatgctaaggtcatatctgaacacccggtggtcagggttggcattgtcttctgtggcaggcaatccccaggaggccacaatgttgtttggggactctatgaggctatcaaggcccacaaccaaaacagcaaactcattggtttcctcgatggtttgctagcgcagagaacattggagatcactaatgaagttcttgcttcatataaaaatcaaggtggatatgacatgcttggtcggacaaaggatcagattaggacgacagagcaggtcaatggtgcaatggctagttgccaggctttgaagttggatgctctggttataattggaggtgtcacttccaacactgacgctgctcaacttgctgagacttttgctgaggcaaagtgtgcaacgaaggttgtaggtgttcctgtaactttgaatggggacctcaagaaccagtttgttgagactactgttggctttgacaccatatgcaaggtgaatgcacaacttatcagcaatgtctgcactgatgctctatctgctgagaagtattactacttcattcgtttgatgggacgcaaggcttctcatgtggcattggaatgtgctcttcaatcacacccgaacatggtcatcctaggagaggaggtggctgcttccaaacttacaatttttgatattacgaagcagatttgtgatgcggttcaggcaagggcagaaaaagacaagaaccatggggttgttcttattcctgagggtcttgtggagagtattcctgaactatatgctctgcttcaggaaatccatggcctccatggcaaaggtgtttctgttgagaatatctcttctcagctttcaccctgggcatctgcactctttgagtttttgcccccttttatcaggaagcagctacttctccatcctgaatctgatgattcagctcaactttctcagattgagacagagaagcttctagcccagttagttgagactgagatgaacagacgtttgaaggagggcacttacaaaggaaagaagtttaatgcaatctgtcacttctttggctaccaagctaggggagcactgccttccaagtttgactgcgattatgcctatgtcttggggcatgtgtgctaccacatcatagctgccggtttgaacggttacatggccacagtgacaaatgttaagagtccagtgaacaagtggcgatgtggtgcggctcctatttcgtctatgatgactgtgcagcgatggtcgcgtggcccttcagccacccaaatcggaaagcctgctgttcacatggctagcgttgacttgaaaggaaaagcatacgatgtattgaggcagaattcttccaggtttttgttggaagatgtctacaggaacccaggtccgctccagtttgaaggaccaggtgccgattcaaagcctatctcactgtgcgtcgaggatcaagactacatgggcaggataaagaaattgcaggaatacctggagaaggtgaagagcattgtgaagcctgggtgctcgcaggatgtccttaaggcggcgctgagcgccatgtcttctgtgacggagacactgaacatcatgacctcatcgtccaccggccagactgcactgtgactcgtttggtgccgttttgtggtgcggatcagaatccccactttttccatggtgtcgattgacaaagttaggagcagtaatcctggtgccacacgggtcattcttttgtagcttcttgggagagttctgtcagttttgaattcgatagtttattatggagaggcttgttggtgagtttgagctcgaataatttttgaaacagacggattgcggaatcttaataaaccaaaatttgtgactgcattcacatttctgccagtcgtctgaatgagaaaaatgtgagagcgatctcttcatctga

SEQ ID NO: 202171 - DNA, 2181 bp, Zea Mays
aaattattctgtagcaatgatgatggacctatctacatgtactcacgggtcctataattgtaattgtggaggggcttaggcctaggactcggttgtcgctatcaaattgaccttcttatgggactactgtcagggtggagtatggtgacgccgcaattgcagctgaccaggcaggcgctcatgtgatcagccatgcgttccctcacacctatgggcagccccttgcacatttcctcaggaagacggctgttgtccttgatgctaaggtcatatctgaacacccggtggtcagggttggcattgtcttctgtggcaggcaatccccaggaggccacaatgttgtttggggactctatgaggctatcaaggcccacaaccaaaacagcaaactcattggtttcctcggtggatcagatggtttgctagcgcagagaacattggagatcactaatgaagttcttgcttcatataaaaatcaaggtggatatgacatgcttggtcggacaaaggatcagattaggacgacagagcaggtcaatggtgcaatggctagttgccaggctttgaagttggatgctctggttataattggaggtgtcacttccaacactgacgctgctcaacttgctgagacttttgctgaggcaaagtgtgcaacgaaggttgtaggtgttcctgtaactttgaatggggacctcaagaaccagtttgttgagactactgttggctttgacaccatatgcaaggtgaatgcacaacttatcagcaatgtctgcactgatgctctatctgctgagaagtattactacttcattcgtttgatgggacgcaaggcttctcatgtggcattggaatgtgctcttcaatcacacccgaacatggtcatcctaggagaggaggtggctgcttccaaacttacaatttttgatattacgaagcagatttgtgatgcggttcaggcaagggcagaaaaagacaagaaccatggggttgttcttattcctgagggtcttgtggagagtattcctgaactatatgctctgcttcaggaaatccatggcctccatggcaaaggtgtttctgttgagaatatctcttctcagctttcaccctgggcatctgcactctttgagtttttgcccccttttatcaggaagcagctacttctccatcctgaatctgatgattcagctcaactttctcagattgagacagagaagcttctagcccagttagttgagactgagatgaacagacgtttgaaggagggcacttacaaaggaaagaagtttaatgcaatctgtcacttctttggctaccaagctaggggagcactgccttccaagtttgactgcgattatgcctatgtcttggggcatgtgtgctaccacatcatagctgccggtttgaacggttacatggccacagtgacaaatgttaagagtccagtgaacaagtggcgatgtggtgcggctcctatttcgtctatgatgactgtgcagcgatggtcgcgtggcccttcagccacccaaatcggaaagcctgctgttcacatggctagcgttgacttgaaaggaaaagcatacgatgtattgaggcagaattcttccaggtttttgttggaagatgtctacaggaacccaggtccgctccagtttgaaggaccaggtgccgattcaaagcctatctcactgtgcgtcgaggatcaagactacatgggcaggataaagaaattgcaggaatacctggagaaggtgaagagcattgtgaagcctgggtgctcgcaggatgtccttaaggcggcgctgagcgccatgtcttctgtgacggagacactgaacatcatgacctcatcgtccaccggccagactgcactgtgactcgtttggtgccgttttgtggtgcggatcagaatccccactttttccatggtgtcgattgacaaagttaggagcagtaatcctggtgccacacgggtcattcttttgtagcttcttgggagagttctgtcagttttgaattcgatagtttattatggagaggcttgttggtgagtttgagctcgaataatttttgaaacagacggattgcggaatcttaataaaccaaaatttgtgactgcattcacatttctgccagtcgtctgaatgagaaaaatgtgagagcgatctcttcatctga

SEQ ID NO: 202172 - DNA, 797 bp, Zea Mays
gcaccacatcatagctgccggtttgaacggttacatggccacagtgacaaatgttaagagtccagtgaacaagtggcgatgtggtgcggctcctatttcgtctatgatgactgtgcagcgatggtcgcgtggcccttcagccacccaaatcggaaagcctgctgttcacatggctagcgttgacttgaaaggaaaagcatacgatgtattgaggcagaattcttccaggtttttgttggaagatgtctacaggaacccaggtccgctccagtttgaaggaccaggtgccgattcaaagcctatctcactgtgcgtcgaggatcaagactacatgggcaggataaagaaattgcaggaatacctggagaaggtgaagagcattgtgaagcctgggtgctcgcaggatgtccttaaggcggcgctgagcgccatgtcttctgtgacggagacactgaacatcatgacctcatcgtccaccggccagactgcactgtgactcgtttggtgccgttttgtggtgcggatcagaatccccactttttccatggtgtcgattgacaaagttaggagcagtaatcctggtgccacacgggtcattcttttgtagcttcttgggagagttctgtcagttttgaattcgatagtttattatggagaggcttgttggtgagtttgagctcgaataatttttgaaacagacggattgcggaatcttaataaaccaaaatttgtgactgcattcacatttctgccagtcgtctgaatgagaaaaatgtgagagcgatctcttcatctga

SEQ ID NO: 202173 - DNA, 2309 bp, Zea Mays
ggtcgcaggcagaagcagaactcacctccgcccggcccggctgtataaaaaaaaatcctctcacaccgcacacccgcatctctcccatcacagtgcgccacccgcacccaccaacgaggcaacgaaacccagtcggaagctagaccggcgacaagtgcagcgctcgccgcgatggattctgactacggcgtgccgcgcgagctgtcggaggtgcagaagaagcgcgcgctctaccagcccgaggtgcccccctgcctccagggtggagtatggtgacgccgcaattgcagctgaccaggcaggcgctcatgtgatcagccatgcgttccctcacacctatgggcagccccttgcacatttcctcaggaagacggctgttgtccttgatgctaaggtcatatctgaacacccggtggtcagggttggcattgtcttctgtggcaggcaatccccaggaggccacaatgttgtttggggactctatgaggctatcaaggcccacaaccaaaacagcaaactcattggtttcctcggtggatcagatggtttgctagcgcagagaacattggagatcactaatgaagttcttgcttcatataaaaatcaaggtggatatgacatgcttggtcggacaaaggatcagattaggacgacagagcaggtcaatggtgcaatggctagttgccaggctttgaagttggatgctctggttataattggaggtgtcacttccaacactgacgctgctcaacttgctgagacttttgctgaggcaaagtgtgcaacgaaggttgtaggtgttcctgtaactttgaatggggacctcaagaaccagtttgttgagactactgttggctttgacaccatatgcaaggtgaatgcacaacttatcagcaatgtctgcactgatgctctatctgctgagaagtattactacttcattcgtttgatgggacgcaaggcttctcatgtggcattggaatgtgctcttcaatcacacccgaacatggtcatcctaggagaggaggtggctgcttccaaacttacaatttttgatattacgaagcagatttgtgatgcggttcaggcaagggcagaaaaagacaagaaccatggggttgttcttattcctgagggtcttgtggagagtattcctgaactatatgctctgcttcaggaaatccatggcctccatggcaaaggtgtttctgttgagaatatctcttctcagctttcaccctgggcatctgcactctttgagtttttgcccccttttatcaggaagcagctacttctccatcctgaatctgatgattcagctcaactttctcagattgagacagagaagcttctagcccagttagttgagactgagatgaacagacgtttgaaggagggcacttacaaaggaaagaagtttaatgcaatctgtcacttctttggctaccaagctaggggagcactgccttccaagtttgactgcgattatgcctatgtcttggggcatgtgtgctaccacatcatagctgccggtttgaacggttacatggccacagtgacaaatgttaagagtccagtgaacaagtggcgatgtggtgcggctcctatttcgtctatgatgactgtgcagcgatggtcgcgtggcccttcagccacccaaatcggaaagcctgctgttcacatggctagcgttgacttgaaaggaaaagcatacgatgtattgaggcagaattcttccaggtttttgttggaagatgtctacaggaacccaggtccgctccagtttgaaggaccaggtgccgattcaaagcctatctcactgtgcgtcgaggatcaagactacatgggcaggataaagaaattgcaggaatacctggagaaggtgaagagcattgtgaagcctgggtgctcgcaggatgtccttaaggcggcgctgagcgccatgtcttctgtgacggagacactgaacatcatgacctcatcgtccaccggccagactgcactgtgactcgtttggtgccgttttgtggtgcggatcagaatccccactttttccatggtgtcgattgacaaagttaggagcagtaatcctggtgccacacgggtcattcttttgtagcttcttgggagagttctgtcagttttgaattcgatagtttattatggagaggcttgttggtgagtttgagctcgaataatttttgaaacagacggattgcggaatcttaataaaccaaaatttgtgactgcattcacatttctgccagtcgtctgaatgagaaaaatgtgagagcgatctcttcatctga

SEQ ID NO: 202174 - DNA, 1046 bp, Zea Mays
gtaagtcagaagtcgggttccgccggccatggccatccccggattcggcagctgcgcggacggccggactgcagccggcaggcggaagtgatgggcagcaccgtcgacgacgacgaggcgtgcgagctggtgagcggctcggacctcgtcatcggcgagggagacgacagcgtcagcgcgtaccttttcaaggccgtcaagaacaacaatggcaccggcatcctcctgctctccgacatcttcggcttccaggactccgccacgcgggacttcgcctaccgcgtcgcctgcaatggctacaatgtcctagttccggacttgttccgtgggaacccgtggaagctgaacgtcccgttcgacggcgacagcttcgagcggtggcgggcggggcaggccccgggccgggtgtccggcgacatcgacgcgtgcacgaggtggctggtggacgagttcaaggccgcgggggtgtccaagaagctgggcgtgatcgggttctgctacggcggcgggcgcctcgtggagacgctggcgcgcgacgccgagagctgcttcagcgcgggggtctgcttctacgggtcccggatggacgcgtccctgggcgaccgcgtcgcggcgcccgtcctgttcgtgtgcggcgacggcgacccgctgtgccccgtggagacggtgcgggagctggaggggcgcgcgagaggcgcccgggcggcggtgtacgccggcaggggccacgggttcgcgcaccggccgcagtcggtggaggaggacggcgacgccgaggacgcgttcaacgcgatgcgggggtggctgcacgaccacctgctcgcctgatcggacgatcagacgctgtacacgggtttgggtgttttgtacatacgtactaatatgttatttgaccaagtctcctggtcatcctataataaagagcaaaatccaccattaaaaaaataaaccgagagttatagcattataagtaacagaatgaacgtggttatagagatgtaacaatctaacttcgtctcaatatatgctggcaccatctatgaaag

SEQ ID NO: 202175 - DNA, 981 bp, Zea Mays
attataaagctcccaagaacagcaaatccggtctctgtccaacaaatccggtctctccctcgagcagtcgatctcctccggtctctgccaagaacagcaaatgagcagagctcccaagccgttcaatcttcaaatcatgccgtgcttcttcctttttttgccatgctcgtccggccaccaaaacagcaaatggcctattttctccccctctctgtctgtctgccaagaacagcaaataagcagagctccaagccgttcaatctccagaccatgacgtgcttcttccttccttttttttgccacgctcgtccggccaccaaaacagcaaatgggctattttctctccctctctgtccgtgtcttgttgtagcatctcatgattcttttttctacttgtacaggattaggagtgcacctattttgattctgcgaactgagtaactgattctaaaggatagggcaagaaggctcctttctaagcctatcaagtttttcaatgaaatgcaagagttgtttattaacagcagtgctgatggctctctagccatggaagctacaacttgtatgaatgaaactcatcctggagatgacagtgacttcaatgatgatgtgtgcagtgacttctccaactatcctcagcctgtgcatgatctaggtgatgattctgacactttacaatctcccaatcatcatccatctcaaagtgttgatcatagctcgtcaagttctggactgaagcgcccacaaggagagggagtaccagcgaagaggaacgtggaaccaaagagtcgcacaacaaagcaggatgatccatgtaggagatgaatggtgtgatagttggggtttttgcatttcttctaggttgatggatgtcaattgatggagatatttggtggttgtgactagtgttacattgctctttttgttgatttttaactttgagggtaccaatgagcatagtgcatagcaccagtacctttt

SEQ ID NO: 202176 - DNA, 1241 bp, Zea Mays
ctcgcctcgttcttcacctggatccggcgtcggcgtggggacgggccccgccgcgtggcgctggacgcgacagatcttgagctgcgcgtggcgggctccagtccgtggctgtggcatgctggaccggcggctaggcgggcgcgtcctgctccaatccggctaggcgggcgcgtcagccgcgagctaatgagcagatggaattataaagctcccaagaacagcaaatccggtctctgtccaacaaatccggtctctccctcgagcagtcgatctcctccggtctctgccaagaacagcaaatgagcagagctcccaagccgttcaatcttcaaatcatgccgtgcttcttcctttttttgccatgctcgtccggccaccaaaacagcaaatggcctattttctccccctctctgtctgtctgccaagaacagcaaataagcagagctccaagccgttcaatctccagaccatgacgtgcttcttccttccttttttttgccacgctcgtccggccaccaaaacagcaaatgggctattttctctccctctctgtccgtgtcttgttgtagcatctcatgattcttttttctacttgtacaggattaggagtgcacctattttgattctgcgaactgagtaactgattctaaaggatagggcaagaaggctcctttctaagcctatcaagtttttcaatgaaatgcaagagttgtttattaacagcagtgctgatggctctctagccatggaagctacaacttgtatgaatgaaactcatcctggagatgacagtgacttcaatgatgatgtgtgcagtgacttctccaactatcctcagcctgtgcatgatctagctcgtcaagttctggactgaagcgcccacaaggagagggagtaccagcgaagaggaacgtggaaccaaagagtcgcacaacaaaggaatgtatctagcacacaaagatcaaaagggtatgcgtggtttcttatctgctgcatcagacataacatttgagtcatgggtactaaagcatctgagtgatttggacctatgaatcgactagcaggatgatccatgtaggagatgaatggtgtgatagttggggtttttgcatttcttctaggttgatggatgtcaattgatggagatatttggtggttgtgactagtgttacattgctctttttgttgatttttaactttgagggtaccaatgagcatagtgcatagcaccagtacctttt

SEQ ID NO: 202177 - DNA, 769 bp, Zea Mays
cgccgcacgccccactcctcctctcacctcacttgctcgtcgccgcacctggatctggctctcgtctcctccaagcacggattaggagtgcacctattttgattctgcgaactgagtaactgattctaaaggatagggcaagaaggctcctttctaagcctatcaagtttttcaatgaaatgcaagagttgtttattaacagcagtgctgatggctctctagccatggaagctacaacttgtatgaatgaaactcatcctggagatgacagtgacttcaatgatgatgtgtgcagtgacttctccaactatcctcagcctgtgcatgatctaggtgatgattctgacactttacaatctcccaatcatcatccatctcaaagtgttgatcatagctcgtcaagttctggactgaagcgcccacaaggagagggagtaccagcgaagaggaacgtggaaccaaagagtcgcacaacaaagcacacaaagatcaaaagggtatgcgtggtttcttatctgctgcatcagacataacatttgagtcatgggtactaaagcatctgagtgatttggacctatgaatcgactagcaggatgatccatgtaggagatgaatggtgtgatagttggggtttttgcatttcttctaggttgatggatgtcaattgatggagatatttggtggttgtgactagtgttacattgctctttttgttgatttttaactttgagggtaccaatgagcatagtgcatagcaccagtacctttt

SEQ ID NO: 202178 - DNA, 929 bp, Zea Mays
cgccgcacgccccactcctcctctcacctcacttgctcgtcgccgcacctggatctggctctcgtctcctccaagcacggagtgcacctattttgattctgcgaactgagtaactgattctaaaggatagggcaagaaggctcctttctaagcctatcaagtttttcaatgaaatgcaagagttgtttattaacagcagtgctgatggctctctagccatggaagctacaacttgtatgaatgaaactcatcctggagatgacagtgacttcaatgatgatgtgtgcagtgacttctccaactatcctcagcctgtgcatgatctaggtgatgattctgacactttacaatctcccaatcatcatccatctcaaagtgttgatcatagctcgtcaagttctggactgaagcgcccacaaggagagggagtaccagcgaagaggaacgtggaaccaaagagtcgcacaacaaaggtagtagatgaactcagtgctactttggtagaacttcaaaatgatcttaagaagccaccacctccagtgcctatgccttttgttaaccctgatgcaatattgtggcaaaggcttgagaatatgacaattactactgatcaaaagttaatggtaggaatgtatctagcacacaaagatcaaaagggtatgcgtggtttcttatctgctgcatcagacataacatttgagtcatgggtactaaagcatctgagtgatttggacctatgaatcgactagcaggatgatccatgtaggagatgaatggtgtgatagttggggtttttgcatttcttctaggttgatggatgtcaattgatggagatatttggtggttgtgactagtgttacattgctctttttgttgatttttaactttgagggtaccaatgagcatagtgcatagcaccagtacctttt

SEQ ID NO: 202179 - DNA, 702 bp, Zea Mays
atttttttacgccgcacctggggcgctcgttttggccgccgcacgccgcacgccccactcctcctctcacctcacttgctcgtcgccgcacctggatctggctctcgtctcctccaagcacggattaggagtgcacctattttgattctgcgaactgagtaactgattctaaaggatagggcaagaaggctcctttctaagcctatcaagtttttcaatgaaatgcaagagttgtttattaacagcagtgctgatggctctctagccatggaagctacaacttgtatgaatgaaactcatcctggagatgacagtgacttcaatgatgatgtgtgcagtgacttctccaactatcctcagcctgtgcatgatctaggtgatgattctgacactttacaatctcccaatcatcatccatctcaaagtgttgatcatagctcgtcaagttctggactgaagcgcccacaaggagagggagtaccagcgaagaggaacgtggaaccaaagagtcgcacaacaaagcaggatgatccatgtaggagatgaatggtgtgatagttggggtttttgcatttcttctaggttgatggatgtcaattgatggagatatttggtggttgtgactagtgttacattgctctttttgttgatttttaactttgagggtaccaatgagcatagtgcatagcaccagtacctttt

SEQ ID NO: 202180 - DNA, 1003 bp, Zea Mays
cacatgttggttgttgctacgttacgagctggctgcttactcattttggctcttttcaatcgctaatgtcaacatgcctagcattgcaagcaaccaagcaggggagggtgtgtttggttcactgccccagatgccacagcctaaggttaggcatgccccatttttgtcggtaagtgtttggttcatgcctaatattaggcagccacgaaaagtgtggcgtgttacacaacccttgccgtatttttttacgccgcacctggggcgctcgttttggccgccgcacgccgcacgccccactcctcctctcacctcacttgctcgtcgccgcacctggatctggctctcgtctcctccaagcacggattaggagtgcacctattttgattctgcgaactgagtaactgattctaaaggatagggcaagaaggctcctttctaagcctatcaagtttttcaatgaaatgcaagagttgtttattaacagcagtgctgatggctctctagccatggaagctacaacttgtatgaatgaaactcatcctggagatgacagtgacttcaatgatgatgtgtgcagtgacttctccaactatcctcagcctgtgcatgatctaggtgatgattctgacactttacaatctcccaatcatcatccatctcaaagtgttgatcatagctcgtcaagttctggactgaagcgcccacaaggagagggagtaccagcgaagaggaacgtggaaccaaagagtcgcacaacaaaggaatgtatctagcacacaaagatcaaaagggtatgcgtggtttcttatctgctgcatcagacataacatttgagtcatgggtactaaagcatctgagtgatttggacctatgaatcgactaggttgatggatgtcaattgatggagatatttggtggttgtgactagtgttacattgctctttttgttgatttttaactttgagggtaccaatgagcatagtgcatagcaccagtacctttt

SEQ ID NO: 202181 - DNA, 951 bp, Zea Mays
tctggcagttcgaaatgtccagcagcaacgaggacgacacgacgagccagggtaacgcaggaggtggcgcggcggcgtccgccgcggagacggagggggacgagatggccgtggtggcggcagaggcggaggcggaggcggacgagcaggtggggtcggcggagacggaggagcacatccagcgcatcctcctcgccatcgacaactacacccgccaggtgtctgacatgctggatgccgggcgcgcgctgttcaaggacctcgccgccgacttcgaggaccgcctctgctcgatccacaaggagagggtggagcggtgggaggaggagatccgggagctgcgcgcccgcgacgtcgccaacgagcaggcccgcgccctcctccacaacgcccagctgcacctcctccacaccgtccgcgactaaccgatcgcccaatccatccagacctcagtagcaacaacttacctgcacatcactgttgcctgtctagaatgatagtgctgtactatgcatgtgtgcacatctgaatgctgttcaaatgtttcttgtttcggcagcaactgcatgcatcaaaacttgttctacgtgaattctagatgtctgttcaaagtgctaaaatatgcaagaccacacaccattttacttaggctaggggcacagcatcttgaggaagtgatttctgttcaggcgccacctcctgcttccaggctctagacgcacggtaccccttcatgttcctctccatcaccctcctggctgaacacgaacgcctatccgttgccggacgctcgggtcccgggttagtcgaggagcaccacgtggttcgcgttcgcaaagttttgtatactgtgatttgtatgtatgcccttgggcaaagatatgccagacccactttgatcagcaataaaaacaactcccctccaagatagggcccctttctttgagggaa

SEQ ID NO: 202182 - DNA, 1056 bp, Zea Mays
atccattttcgcatagggctggcttgtggcgggctatataaatgaacacacccgccgggccgtgagcgggtgagcccatccgatccacctctgttccaccacgctgctggctgctgaggatggaggcggggagggagagctccaaggccaagcgcgcgcgcgccgccatgagcaacgaggacgacacgacgagccagggtaacgcaggaggtggcgcggcggcgtccgccgcggaggcggaggcggacgagcaggtggggtcggcggagacggaggagcacatccagcgcatcctcctcgccatcgacaactacacccgccaggtgtctgacatgctggatgccgggcgcgcgctgttcaaggacctcgccgccgacttcgaggaccgcctctgctcgatccacaaggagagggtggagcggtgggaggaggagatccgggagctgcgcgcccgcgacgtcgccaacgagcaggcccgcgccctcctccacaacgcccagctgcacctcctccacaccgtccgcgactaaccgatcgcccaatccatccagacctcagtagcaacaacttacctgcacatcactgttgcctgtctagaatgatagtgctgtactatgcatgtgtgcacatctgaatgctgttcaaatgtttcttgtttcggcagcaactgcatgcatcaaaacttgttctacgtgaattctagatgtctgttcaaagtgctaaaatatgcaagaccacacaccattttacttaggctaggggcacagcatcttgaggaagtgatttctgttcaggcgccacctcctgcttccaggctctagacgcacggtaccccttcatgttcctctccatcaccctcctggctgaacacgaacgcctatccgttgccggacgctcgggtcccgggttagtcgaggagcaccacgtggttcgcgttcgcaaagttttgtatactgtgatttgtatgtatgcccttgggcaaagatatgccagacccactttgatcagcaataaaaacaactcccctccaagatagggcccctttctttgagggaa

SEQ ID NO: 202183 - DNA, 1898 bp, Zea Mays
tagaaatcacgaaaactgggttggagccgatggatcgtttctatcctcgttttcctccctctcctccagatccggtgctcctctccgccgcctccctcccgcagctcccatatttttccgtcgctcgcgcgcccgacgcctccctcccgcgctcccggagcttatgcgcgccaaatctcccgccagcatctccttctcccgcgcacgcctctggctttcgttccagaccaggctccggccagatgagaacgctccaccagtagctaggcttcattttcctttttaatggctcatttccatcccctgatctagcgctaaaatttagtccccaattcatctctaaggaaaatcgagtttcagatggatttgttagggaagggtggtgcgcaacaaaagaaatcaaagaagtcttctccaacctccagaaaatcaactgttgttccggccatggcatctgcaggcagtgcaggcgttgcagctccaagcacgggtggtcgaagtagttctcatccattttctgtggtttgggatgggatggcacttggaggctcattcgcgtctgaatcatctcccaccagctctgaatggctatatccaccaggcgggtttgtaaattctctaaggatgccatttccttatgctacctatccgaatggcagccaacttccagaaaactcccattttgttggttgtacaagcaacaaagggactccatcaccaactaatgataaagggactcctattgcagaagtacatgattcaattgacattgacgccgatgacaccctagagcctgctagaactgacaaacgattgaattggtcacatgaagaagatgttagattgttcttggctacaaaattcactagacccggtcgatggaaatgataagaagtcagattattactggacagatgttactaatacgtacaacagcaccacgccaagtaaccgtaggagaaaccgtaaccaattgaaaattcgttgggaccgtgttaagaaacctttaagtgagtttcatggctgttgggtaaggaccactagagtgttccaaagtgggcagagtgatgaccaaaggacagataatgcattgcagctatatgcatctgaacataatggcaagcctttcttgctgcaacatatatggagagtagtacgacatgaaaggaagtgggctgcatatgtggacaaacttattaatgcaaaggacaaccgtgcaacaccaagtcctgttgtgaatgtagaagattcacctacaaagcgtcctactgggaagaaaaaggccaaagaagagcgctttggaaaacgaaaggcaccagaagctatttctgcaattggagagaaactagaaaaattcattgaagcaagcagcaaggttgagaagatggcacaagtgcaacaatgtttggctgacaagaagttagaagtagccaagattaatcacaaagcagcccaagaacaaacaaagtgtaaaatgatagacctttataaagatttattgtgtggttccacggctggtcttagtgaagaagctctagctgagagatcaaaagctttagagtgtatgagattgtctttatttgctccagataattaaggagcttgatcggaaggtttttatatgcacatggagaggctggatctgtgcatggagaccgaacctgggtgtgctaatgttcatgtcgatcaaaagttgttgtccatctcagatctttgctatctatatattaagagaagtttgctataattatatattactatgtattatggactacattatatttatcaacatggatactgttttactatggattaatatattttaatctatgtgttgctattgaattgttggtcattgtatattgtggtgttcaggctgttgcaccagcagcacaaag

SEQ ID NO: 202184 - DNA, 1296 bp, Zea Mays
gtccgtttccttcctctctctctctctctctctctctctctctcttctggggcttgcagcagaatcgcagcgaccgcgtcgtccccacgcggtgcggccgctgcgcattgcgggccgggagagcgagaacggagtggggaagatggagacggtgaagagccttctgaagccgaagccgacgccgcagcagcagctgcgcgagtggcagcgccgcctccgcaacgagggccgcaacatcgaccggcagatccgagatgtgcagagggaggagaagaaggtggagaaggccatcagggaggccgccaagcgcaacgacatgggatccgccaaggcgctggccatggaggtggtgcgctcgaggaaggcagtcaaccgcctgtacgagaacaaggcccagctcaactccatctccatgcaccttggcgaaatcgttggtactaataactaactatcccacccgttggtactaggcaaacaaggttgtgactgaactgaatcgaccttccttccatgtttggtatttacattttttggaatgctatgtgattatgacttaaccgaccactgcacttgtccactggttggatgccatgttcccatctaatacttgtctcggtgtctcaggctgaagcctaattaaccttatttatttctacgtataggtgtatataagtgtagaaatagatgaagtgaaacgtcatgtgccaattccttgtatgccatcggaaaatatactcgttccttgtgtgccactggctccacatgtcatacacacaaaaaatgttggctccacatgtcatacacacaaaaaatgtatctatatgccactcagtggcacacaagggaatgagtataaaatctgatagcataccaggaatttttccaagaaaatttttagtagaatacctcctactgacaagaactataaccttgtgtgtgttcctcgttacctaacgtcggactagcttccctctgttcctttctttcaaccactgacatagatcatgtggatcattctttattgtgtccttatccgtaaacatggtaatgacactcataagtgcaatatagtaatcgcagtatgattgtatgaaacttagaggttgtacaagctgtactgacaataagctgggaataccgtaatctttcagctacagctaggacagtaggccacttgtccaagagcactgaagtgatgaaacttgtcaacggcctcatgaaagcccccgaggtcgcagccacaatgcaggaattcagcaaagagatgacaaagtaatttttgcctcgtcgtttatg

SEQ ID NO: 202185 - DNA, 1502 bp, Zea Mays
accatccgatccggtagtatccgaacccgataaagcgaccccccaacaacgctggcctcacctcacacaaacacacataccgaatccagccccgcacccaccgttgcgcccgccgcccgagtcgccgtggccgccgcggcagcgccctcccggccgtgagcgcggcccagcgcgcgcgccgcggccaccgccgccctcgaggcgcccagatctgggccctagcgcccccctccctcctataggcctttccccgctgcatcgccatggcgcggctactgctgtggtggacagcgctgctcctcccatccctcctcgccggcgttggtcccgccgccgccgccgccgcgtccccgccccacgatgcgtgcctggtgcctaccatcgcgcaatccgtccttaggactcccgacacgtgctcgacgctggatcgccgccttggcgacccggtcggcgtcatcgagggagatgaggtgacgttggcaagggcagttaatcttcttcacgcaaacaaggatgactacattgccctatccggcattttgcatttgaggaatctgcaattaggccaagcataatttcgagatacggcatccatggtttcccaacactctttctcttgaactcgaccatgagagtacgatatcatggaccaaggactgttaaatcacttgcagctttctacactgatgtctcaggtatcaatgcatcggtgaagtcaactgcaggggaggccatggtacatcccttggatgatattgagcataaaaaggacgctgaacaggaaaattgcccattctggtgggctcggtcaccagagaatatacttcagcaggatacttatctagcattggcgaccgtatttgtaattttgaggttgctgtatcgtatttttccaaagatagattcctttaccagatgggcatggaggaggcacaatatgtttgcaaaattgatgggagcacatgaatatttcctcacctaccttgagcaagcaagacagaagtttcataggctatacccttcaagttcaaagcgaggaaatctgcaggagggcgcaatgaacgctaccgcttgggcttccaaatcattagcatcagtttcaattggagaaccaagtgcaattggaaggacaaactctacaagtgagctaagatgaaatctgatcttttttgtccccagggattatatgtacagtacagtagagcgatcaggatatgaacacccagaaactgttgtaacggctatattactctttgtatcctccttagaataaatacgtccatgatttggctccttattttctgttgttgttacagcccaattctttggaggaataaagtttctggtgtattgagaggtgtctttctgaaatagggagcatatcagatgcacacgtgtctttcgtgtacatggtgctggtgcatatattgaatcaagcaacttaatatggtattaaaatcagggtctcaaatttgaatcctagttagcacaattcaatataa

SEQ ID NO: 202186 - DNA, 454 bp, Zea Mays
gtccaacgcctaggcgcctaccttgcctaggcgtccaggttgttgaaagtggtgggaagaacatcgaggttgcagtgatgacaaagaaggacggtctccgggaactcgaggagtctgagattgatgagtacgttgccgagatcgaggcagagaaggctgcagctgaggctgcaaagaagggtgccccgaagaacgcctaatttcccgtcttgtgctatggctcccttcaacactgtgtgtgtcccgtttttatgttccatagcaccatcttaactgttctagaaggatgctagatctttaggtgaaactacgcttatatgcctgtgggttaaatggtgtacaatgagctcgtctacatgccttcgtcggaggttttcagtttcgtgtattctgtcatctggacagcgacagttcaaatattgattttacctgattccttgtcatgactcatggc

SEQ ID NO: 202187 - DNA, 996 bp, Zea Mays
gcgccctcccccgctccccgcgtgactactctcctattgagcaaggagtatatagcgcaagttaattaaagctgagtaggaggaaggaattcagagtgacctgttccaccaggcgtccaagcaacccggccggctgggtggctcgtcgtcgtagaactccttggtggccgggcgcgcggcgaacgatcgcctatttcagctgctgagcgggcggctgatcggcggcgttccacggcttgggttacctaccactaccaacgacggaacggaaccggccgggccggcggcatggcggcgtggatgcggtcgctcttgtcgccgctcaggaagctctggatccgaatgcattcggcgcagaacaagaaggggcggggcatctacatcctgtacgaggacgtcaagtcgtgcccctgcgaggacgtgcacatcctctggtccatcctcgtcgactcgtcccactcccacccgccgccgctgtctctgcgcctcaagcactgactgactcgtccctccctccctgcctccgacgaacgagaccgtcggtgtacatgaagatgacgacgagtggcggcagctcaccttcttcttcagccgccgcgataccatatcgcttccacgcgcgggaagaagttccttttgtttgatgagtaggagattgatgagctccttcgttcaccctgccccgcgcgtcctccggtagatgcagccatgcaggtgcatagcagagcagagcagagcaggcttccctcaccgacaccgccaagggattttttttttcttctttcctttgcttttgtttttggaaaaggaacggcgcggttggtgatccgggacatgccgcgtgtgcctctagctaccatgtaaatacagaaaggtgaagagggggcaaaaaaaacagagaggtgtgtgtatatacggagagtactccactactaatactgtagtacagcgacgtgtgatgcaagctttttaaaaggatccgtcgtcacaagcgtg

SEQ ID NO: 202188 - DNA, 2256 bp, Zea Mays
gcgccgcgtccgcgctgctggcacgccgcgtgtgcttggctcccgccccacgcccagtgcctccctccctctctgcccccctgccgcggcgcgtgcctggctggctggttgccctccgcttgggccttggagagcccgggcttcgatttctagctggttccgccactgccgagaagccgcgcgttgtcaggcacgggaaagaggtagtccgcgggaggttctctccggaggagaggtatggtgcccgcgagggctcgccatatcgatagatccgcctctgaccagcagcaagggcccgctccagcgggggcggcgacgctgctagtgcggcacctcccagaggctatcacgcaagagatgctatcccgcctcttctcccactacggagccacatccgtccgcccctgttccggtggaaagttgagaaattgcgcatttgtagattttagggacgaggcggcagctaatcacgcacattcgctcttgaacaggttgaggtttctgggaaaagtgttgactgtcgagcgagctaactgtccaaatgcaaatgagtctcacctgaagcatcaggaccaattagggcatggggcgtcccaggtaccaagtattagttcccaaactcagaaggaccacacatcgattgccgaaccaattgcccccaagcttagtgtggactacccatttcctccacaccttgagtatgcatatccaccaccagatggaaacatattaacaaatattgtcaatgccctgatcgccgtccctcgattctacaaccaggtttattaggatttccaccctatgcacccattattacaactcgcaaggtcctgcatttaatgaacaagatgaaccttcctgctccatttcggatggcattgcctactccaccactaccatcgcaagttcctgttatccctcatcctcagccaccaccgggatctactacaactggggagcttcattcagcagatttgtctagtgatgagtctgagttagaatcatctgatgaagatattgataaacggaaaatcaagcgtgcaaagcatgaagcaattgttggtcctgcagttgacaaaaacgttgctcatgaagcagtgggggtgaaatctgttgcattggtttctaatgagcttcaagtgataaaaaagaaaaacccagtacttcagataaaaattacccctaagcctatacagaaggaaccacctgtcccaagtatgactgaaaatgaaccggattcaactcatgaacaacttcaagagaaacattttgtcacacctcaggaaatgtcgagagagaaattaccaccagaggagattttatcccttcctatgttcaagaattacactccaggaaatccagccagtgttctgtacattaagaacttggcaaaggatgtcactcatgacgacttctactatgtctttggctctgttttcgaaagcatggacagtgcaaggttgggtttaagtgtaaagttaatgcaggaaggacggatgcgtggtcaagcctttgtcacatttcccacggttgaacttgctcagcgtgccctgaatctagcgcatggctatgtgttcaaaggaaaaccaatgatcatacaattcggaagaaatcctgctgctaacaaagcttcctaaagcaggatacaattttctttccagattttgatagatttcagaagttggtaggaactggaaagtgacaaaccagaggttgtgggtatctgttggctgttgttactgcaacctgtttggcatacacactaggctgattggttcctcccatggtgtaatgtttgtcgaaaaataacattgtacattccagtttgtggattattaaaagaattactcgataaaagcggacattggaggttataagctgcaaatcgagcaatgactgctagcagcctgccgtcactgagaatcagaatctagcgcatggctatgtgttcaaaggaaaaccaatgatcatacaattcggaagaaatcctgctgctaacaaagcttcctaaagcaggatacaattttctttccagattttgatagatttcagaagttggtaggaactggaaagtgacaaaccagaggttgtgggtatctgttggctgttgttactgcaacctgtttggcatacacactaggctgattggttcctcccatggtgtaatgtttgtcgaaaaataacattgtacattccagtttgtggattattaaaagaattactcgataaaagcggacattggaggttataagctgc

SEQ ID NO: 202189 - DNA, 1014 bp, Zea Mays
atgtgttggcttttcctgctaacatccttgtcaacggcaagacgatcgatatgactgaagatcaccgggtaactagcgcgaccgaaagagctaggatagcaagaactgggcagcccctgagagacggtgaagctcgtcttagcggactaaatcttgctaggatgtttggtgacaagtttctcaaggagcaggacccgcgcttcagctcagaaccatacgtgagccaagccgttcgcatcaccaaagcgtgcacagccttcgccgtcattgctagcgacgggctctgggacgtcatcagcacgaaaagggcggtacagcttgtcgtcgagggaaaggagaggaggagctccggcgacgccacctcagcggcggccagagtagccagccgtgtgctggacgaagctcggagtctgcgaaccaaggacaacacatccgtaatattcgtagattttgacgtcctgagaagggatccctgtatctcgccagttgattgacatggcagattccggagactgcagcttcccatggatcgtcgtcttcctggctgctctattatatagctcccaagttttgttgtgttttcagtgagatgatgtggtgtaggaggcagagtgcgtgcataccgtgtaatctggtgcatgccttttagagtctcctctctctctctctctctctctctctctctctctctctctctctctctctctgtcaccctagttgatgaaccgatgatcacccatcatccaggaatggcttaacaaatctccattaactgtgaagtcattcgccatttttgttaatccgtttgcgcgtccagtttgaagtccaagggacgagatggaggcaagagaaagttgcttgctggtttcagtttgtgcacagatctgggatcagaaggcaccggctgcctgcctgacggaaatgggatgctgtggagactggcaatgtatcccaggatggaaggatgagggtggaagcagtgcagccccagaattcaggaaaaacagcaagtgg

SEQ ID NO: 202190 - DNA, 2704 bp, Zea Mays
gctccttgtccttttcacagatgctgctcgtggctccctcatggaacatggatccgtgctgcctggtgaaacgtgaacacatgcatgggagcctttggagacctcttctcgccaacttttcagatttttggcacaaaaaaaaaccttttaaaattgtttcgaagatctttgccaccgccaacgaccatatagttttttccccctgcgtgatccacttccactgtctgaattgctttccagtttttttactagtgtaaaagctttacgatcctgagcttttcagattacggtgattcctaaaaggccagatggcaccaaccgtccctatcgtttcttgttcagaaaaggcagtttgcaaaaactgtgccttgcctagctgttctagccactagattaccgcgccgccatgcatgttttgtaacgctgatcgccgctgcataccgctcgtcgtctccaggatatagcgggaaggagatgagaggtgaggagcacagggcagcgctgagacagaagagactcaagaaggccaagtgcttcaagtggagaccaagcaagggcgacatggatagcaaagtggaggcggggggagcggggtctggtcaggtctgcgatgacgcagtgctctgctcgctgtctacggccagcttcagtggcctggttagctggcagagagtgaggacccttgggaaggtggctgaggggtgtgatgctgccgatcctccggttccaagaaaattaagatcagccataaacaagcgagctggtcgatttgcttctgcgccatcacgccatgtcaaaaagaggcgtcatctttcggctatcagtgctcaaatttcttctgtaggccaggaaacaagatccaatgggagctcgttatttacagaacaagaggaagcaattgctgatgttctgctgtccctatcccaagtaccctctcacagcgaggtcacagccgacaaggctgtagcagatagttcaaacacgaatgacgcttcaacttctttttcaaaaggacctactaaggaggatgaccaaacagccgagctgccaagcgctgctaacgagctggctagccaatgcgcctgcataaataaagcggtggagcaaagcaacatcgttccaaatgcagatccagtggctgctgctgcaaatcaatccagcaacagtatcccacttctgtcagcgaatgagcaaatgcaggacctttctatggaaactgctgtgaatttgccaagcccatctaaagacacctccattaacagcgctcaaaagcaccatgaactgcagtttgatgatagcaaatgtcaccctgcacagaagccagaggctcctctttggctggtaaattctgatcaatctgagggtgtgctgctacatgagagggagaaggccaagaacaacagtgcacaagaaattgtgcctctggtccagactctgttgccttgtaccccagctgggtacttagtaaaaccctcttcaagcaaactggcagctcccgccaatacaatttctgaatccgctaacttcaccacgcctggaaatcagaacaagcaccctgtgctcagaaacgtcggcgcgccgaaggcatggaagaggagcatcacccacgtgtacgtgagccacgtgatccagatgcacgtgaacaaggagaaggccgccgcgtcgtcgtcgttacaaagccaagcgaggcctgaggagaggctcctcgcccgctgccccaggcctccgaacggctcgtccaccacctcgcacaaggccgccgccgctcgggacgagaggttgtacacggtgcacttcgacgtgcgcgtcccggctcaccagccgcccgctggcatctgcgatgcgggcgccggccggcagaagattgtcagcggtagttcctggcaaaaccttccggccacatcggcggccgccgcggcagcggcgcagcatgtccggtacctacaccctcagatggctcggccaccggcgacgccgcgtgacgcgacgccgtactcgttcccgcacttcccttacagcagggggagtctgccacccgccgcggcgcttcagcagatgccacagtatgtgtgcggcccggcgtatggtctgcgccctgcgagctcgtcggcgatgatgatgaagcagctacaacaacccatgccgacgcagcagcagcaccagcagatgtggcagtaccatgtctcgcagtaccagccgaggccggacgctacgctttctccggcggcagcgtggcacggcatttcgtcgtcgctgcgaccgatgggcatgcttgctcccccggagatgccgtcgccgccacggccgccgcagatggagctcttctgcgcgccgtaccaaggtggcaggcagccgcagcagctgaggttgatgtagcctggcctcccttctgctgctgatcagctgattgatactactattcagacgcactaatttatagtggataatatacaacatcttagcagtaaaaaagtgggatgttgcaaaaaagaaaaagaaagtgagatgcataaggttgtgttttatttatacactcaggaaatagggttatgcatggtaccagaggggactaaactgcaggccactggtatttagagtgagagcccttttggcaatgcctacggctctaactctggctcatcttcaatctctatcaaacggttataaaaaaatagcttcttatcgaaagccctctaaaagagag

SEQ ID NO: 202191 - DNA, 2270 bp, Zea Mays
gtcttttatagctgttgttcactttgccctaaggatatagcgggaaggagatgagaggtgaggagcacagggcagcgctgagacagaagagactcaagaaggccaagtgcttcaagtggagaccaagcaagggcgacatggatagcaaagtggaggcggggggagcggggtctggtcaggtctgcgatgacgcagtgctctgctcgctgtctacggccagcttcagtggcctggttagctggcagagagtgaggacccttgggaaggtggctgaggggtgtgatgctgccgatcctccggttccaagaaaattaagatcagccataaacaagcgagctggtcgatttgcttctgcgccatcacgccatgtcaaaaagaggcgtcatctttcggctatcagtgctcaaatttcttctgtaggccaggaaacaagatccaatgggagctcgttatttacagaacaagaggaagcaattgctgatgttctgctgtccctatcccaagtaccctctcacagcgaggtcacagccgacaaggctgtagcagatagttcaaacacgaatgacgcttcaacttctttttcaaaaggacctactaaggaggatgaccaaacagccgagctgccaagcgctgctaacgagctggctagccaatgcgcctgcataaataaagcggtggagcaaagcaacatcgttccaaatgcagatccagtggctgctgctgcaaatcaatccagcaacagtatcccacttctgtcagcgaatgagcaaatgcaggacctttctatggaaactgctgtgaatttgccaagcccatctaaagacacctccattaacagcaccatgaactgcagtttgatgatagcaaatgtcaccctgcacagaagccagaggctcctctttggctggtaaattctgatcaatctgagggtgtgctgctacatgagagggagaaggccaagaacaacagtgcacaagaaattgtgcctctggtccagactctgttgccttgtaccccagctgggtacttagtaaaaccctcttcaagcaaactggcagctcccgccaatacaatttctgaatccgctaacttcaccacgcctggaaatcagaacaagcaccctgtgctcagaaacgtcggcgcgccgaaggcatggaagaggagcatcacccacgtgtacgtgagccacgtgatccagatgcacgtgaacaaggagaaggccgccgcgtcgtcgtcgttacaaagccaagcgaggcctgaggagaggctcctcgcccgctgccccaggcctccgaacggctcgtccaccacctcgcacaaggccgccgccgctcgggacgagaggttgtacacggtgcacttcgacgtgcgcgtcccggctcaccagccgcccgctggcatctgcgatgcgggcgccggccggcagaagattgtcagcggtagttcctggcaaaaccttccggccacatcggcggccgccgcggcagcggcgcagcatgtccggtacctacaccctcagatggctcggccaccggcgacgccgcgtgacgcgacgccgtactcgttcccgcacttcccttacagcagggggagtctgccacccgccgcggcgcttcagcagatgccacagtatgtgtgcggcccggcgtatggtctgcgccctgcgagctcgtcggcgatgatgatgaagcagctacaacaacccatgccgacgcagcagcagcaccagcagatgtggcagtaccatgtctcgcagtaccagccgaggccggacgctacgctttctccggcggcagcgtggcacggcatttcgtcgtcgctgcgaccgatgggcatgcttgctcccccggagatgccgtcgccgccacggccgccgcagatggagctcttctgcgcgccgtaccaaggtggcaggcagccgcagcagctgaggttgatgtagcctggcctcccttctgctgctgatcagctgattgatactactattcagacgcactaatttatagtggataatatacaacatcttagcagtaaaaaagtgggatgttgcaaaaaagaaaaagaaagtgagatgcataaggttgtgttttatttatacactcaggaaatagggttatgcatggtaccagaggggactaaactgcaggccactggtatttagagtgagagcccttttggcaatgcctacggctctaactctggctcatcttcaatctctatcaaacggttataaaaaaatagcttcttatcgaaagccctctaaaagagag

SEQ ID NO: 202192 - DNA, 698 bp, Zea Mays
gtccagtcgtgcaagcccatataggcccacatcgtagttattaaagtggaggagcgccagtgctaacccgccgccgccgaagaaagtgtataccttccgcctagatcacactcctaggtgctagggttttgcagagtctggtgatgcgaagacgaaccggcggcgtatacgggaccggcggcgtatacgggaccggcggcggtacctgtactccaagagcctcgaggcctcccattgggtgctgttggagaaggagcgccgtatccgggcggcgctagaggagggaaagcccattcctaccgagctccgcaacgaggagcacgacctgcggaagcagatcgacctaggagcgtggagtgttggatgttgcagcgatgtctttctcgctaacctgcaagattcttttcatcaaagcacttgatcaattcatggctcggactgagaatcggcactatcatttgtatttgatatgttttgcatttacttctgttttcttgtcttcctgctagtttgacttggatcatgtacaaaataaactattattttgagtatatatagtgtttttttagagttttagggaattgacccaaatcttagcacagcctagaaccgcgggtattggggtccgggaaacggtttcccaatggttttttaatccctttcaaaatttggaaaaaatgaaaaaaactatagaaacc

SEQ ID NO: 202193 - DNA, 722 bp, Zea Mays
ctgtcacaatggatcattctcctaatgtgcttgatggaagaagtttgagggtgaactctgggccgccaccacccagagatcggtcatcaccgtcaccgcaaagacccaggggtgatgccaacagggtctacgtgggtaacctttcctggggagttgacaattcagctctcgcaaacctgttcagtgagcaaggtgaggtactggaagcaaggatcatctatgacagggagagtggaaggtcaagggggtttggttttgtcacgtacggttccgccgaagaggttgagaatgcaatatctaatctcgatggcgctgacttggacggcagacagatccgtgttacggtagcagagtcgaagccacctaggcagcaatactgaaattcctcttgagatttttgtaggtgtaccggtagcccaaactctggattatagtgacgccagtcctggatttggtctcgagattcattgaagttaaaaagccctcatgtatatggctcactatttatatacatgtaatattggattcccgtgttcagtgtccttttgtatcaatttggctgcatagtgtcttgtggcacttcaaaggacatagattgttgacgggcaaccaaacctcaagaaagtatcttgtattgtttcttgtctcgtgtggtttgttcactatatttacttttgcaattacatttatctacttgtatgatatttctgtattgtaattag

SEQ ID NO: 202194 - DNA, 1150 bp, Zea Mays
ccacgattctagatctccaacatcccatataaccgccggccaatatcgccctccctgtctccctcgcggcactgcagcaagccatgggcatgagcaccaccactgacctgtccgcgccaccccactccgccaccctgccctgccgcatggcctcctcctcgtcatcttcctccgtcgccccgtggccgcgtccagacaagcaccgcggcgcgggcgccctggtccgccgcgcgcagctcgtcctgtcgcgcgaggtcgggtggtgcgggcagcgcgcgtggcggaagctgctcaggcggctggcgcaggagaccaggtgcgtgtgcagctccccgacggcggcggccacgggtcggcccatcacgttcggctacgacgccgccagctacgccaagaacttcgacgacgggcgcagccccgcgccgcgccgcgtcgtcgtcggcgccaatgcgggcgataaaccgagcggcaacaactgaccaccccatcgacgttcttctctctctccctcgtcgatccccctccttccgatattttttttgtttgtttctttttaactatttttcctctatgcatgcttttatttccttctcattctagcgcctcccctggtgatggtgaattggtgatattggtgttgcaattgcctcatcaatatcccatataaatctagtaatttgtacatagctttcgagcgagataacacgagtggagtttggtaattaagagatttcaatcagaatgcaatgtgctatgtctgaatgactgaatctcttctcctgcattggtaagagatttcaatcagaattcagatattgcagggagccatttttttttctgatttcaagattacggaagagatgcaggcactacctaatctgaaacgcgaggctggatagatagtggcatgttaatttcatctcgatatttgatccactgacagcgctaacttgccaaagaaaggagatccttttaaagaaaaggaaagcgaccaacgggcggtgcatgcggatcaagctactcgtggaatggaccatgcagtaccggacaaaagggaaaagtggacgggatttattggtcttggttttagggttctttcttgattcgttgtgtcgctagctttgcccctgactgagtgactacacggcgg

SEQ ID NO: 202195 - DNA, 4960 bp, Zea Mays
atgagactcgcctcgaacccagaacgcgacgcgacgcgacgcaggcccacccctgtgaccctgtcctgcagaaatattcattatcttatattcaaataaataaaataaaaaccgactgaatttgcttatttccggctcttgttgaaaccgccacccgattcctccgctcgccaaatcctcgccgtgccctcgtagcaattccttgcgtcggcgcatcatcgcggcctcctctccctctctctctctatctctctcaatctctccgttggcaaatcgttgaatcgacgtgcttggccccggccgctctgagcccgccgccagcctcctcgtctgaagaagaacgacagccgtcgggctccggtggtcccgccgaagaacggcaggtagccagccgcgctcatcacgccggcgactcgattggcattgtattggcctttccgtttgttgtcagatcgaaaagaagaggaaagaatcgggaagcccgcccccctggtggatatgcgaggccatgtttttcatgtcacacccccgaccgattcgcctcgatttcgttcttctgttcttctgcgccgcaatggctccttcgctcgttcatatctgttattctgttgtgaatactcggtttgagtcaatgatgcgatttctttcattcaaaatcttctgggtgctcctgtgttattctgatttattcgctctgtttcgacgccagttaatctatcgtgtcggctgttgacaatatctttggtttcttgtccgcgacagagttctcgaagcaaaacgacctgatgagattcctcaaggggagcaaggtggaggtattgcaggaggcagatgtgccgtttggttcttggaggcctggtgagatcgtctccggcaatggacacgcctactttgtgagatatgatgaaagtcccgttgactccagcgtggctgttgaaagggtgccaagaaggttgatgaggcctcgccctcctgcggatgatcctgtacgctggagtttgggtagtatcattgaggcctttgacagctactcgtggaaggttgccgaggtggtgagagtgcttggaaagaatcaatatctagtcaggctccttgggtcctcgctggagttgagtgcacatgcatcggttcttcgaatgaggaagctttggctagatgacatatggattgtgactcagaagtattctgcaagatgcttggatggtggtgcattccgaggtcaatcaaaagataaaaatttagaccataacttcagaatggacagtcgtcaacttgagaaccagaatgcctttgagggtgatacatctagaggcatcaagagaaaatcgtctgctatatcaacacatcctcaatgcagtgaaatcactaagagattgcggacaccaaatagagatggaaggtactcaaagctggttgatagaagtttttcccctttggctgaaaaggtagatgatgttgattccccatgcattattctacgcgggaaatgcatccatgctggtcataaatggcatactggaacaactgaagaatttagtgatacagagagtatatcatcttctgttggcagttctagtcctaacagtacccctcatagatcacaacattataatttggtctaccaaagtggagatagctgtagtagaactgatgatgatgaagcttctacatctgaaagagaaacatcagaacatgataacaatgggtcgagggaagaaacccatgtgctggaattacatgcttatcgcgcaacaatgttagccttgcatgcttgtgggtcaattagctgggagcaagaggctttgttgactaacctaagggccaaggttggaggcttgtaaagcatccttccataggttcttgtaaatggaggagtctgccacatgttttgcagtgcgataaatgtggcaacatttccaatgaacttccattggtcaagctgggtcaagactggttccagattaatactggttgctggataaaatggtcaaattagattggtttatcatccaaagacaaaaaggtgatctgcttgttgtgtgatttttcacagaacaagcatatttcttctatgatggcatgcacccgtttgactgtccagaagagcacttgagggaacatctgtatcagcaccggagtgtttcctctttccagcaccggagtgtttccaccatcgtcattagaggtaggaccctcccacaacctagaagcaagaccctcgcacgcccgatctgaggatgacttcgagggatatgacgattgacttctcgagtcagacgatgaacttacatttgatgcgcaacctgaaggcccggctaactggaactgggtggctgagctacaataggaggttcaaactgagctgcctgctgaactaagtatgattcaagacgaaaaccactctaagtatgacctctcggatgaggacgtctccgtggaagggacggacgcgtccgatgatgatattttggcagataatcaggacccggctgatgaggatattgaagatatcgagccgaaagaagatgagaaagattcagaggagctcattgttatcgatgatgagccatgggcgccagatccatttattcctgttgttcctaatccgaagactcgagcaccggagattcctgtaccagaagcccctgcgccagtagctcttgcttcagagggtcccccacaaggaaatacaatgcctgagctcgtcccgcaaccggattgggtaaggacaaaatctcacaatcatcaactcaggtgtggctgaagacaatattcgtatggagactactcaaatataccgctgccctgaacactgactgagcatgacgctgccttgattgaactcgaggaattaaagaagcagaatgcccaactgtgactcatctggagaatgaaggacaacctcaggctgccgtgaaacttagattttcctgacttgcagccgacttctatgtagacacaaaattgttgggattacatagtttggccttgcatcaaggaaaagttgcaggttatctgtacagtaatttgccagtcgtcttatgcatatgatgcatacctttttactgttctagtgttttgtaatccagatattgtagccggtgttcttggtgaaatatgcgccaggagagactgagacttattttgccaccttactttgtgcaaagccagctgcccttcaactttgctggacaggcaatcacatattttcagaagtgaagcggtaggccccggtagttctgatgagcaagcaagtgaaaagtttgtatgtggtgtatgacgatgtaccttggatctctttacttccaattgaacctgcacatgttcctggcttcgtgtcatcacaatgaccttgtattgtttcagtgttcacctacagttcatgtaccttaggttccttttctgtttttgccttacacgtaattggttgcagcagagcaccaaggatcggggatgtacaaatcaatatcagtttgcaactttgcatggaaggcatgcccttgcaaggcctcttggacagactccttcctcagtgctgaccgcatttgcagttgcagtgcgttagaggtggctgctgatgctctgggcactagagaaccaaaagcatagtagtaaaggctttgtgcacatatctagtagtaaaggcctcttggacagactccttcctcagtgctgaccccatccatttctacaaatcgaattctggagacaacgccttagtggaatctgcgagttcaaaaaaatacatggaggtgataaagaaaagaatgacggatcttacaaatcagattagactacgtaaatggtggtagcacggtttatttaaatgttcctatcatgaatcagtactaactacatgtcacacagatgctgctttgaaccctcggacacactatgcgtatggcactagtgtttcagttatgagtgatcttcggcaggcattcgaatatatgactgatgtggatgcagcagtccaagcactgcaggagttgagttgtacagaagaaagcaaggggagtttgacagacctttggctgaaaaaatggcgtacgatcacaacactttgcttggtaagtaattacccgttgtctttagtacattaaggcttttgttcgtcgtgtgaatgtgctactttttgcagcatcatggtgggccatgtttggtgtagacactccaacgttacaaatgcttgctttgagattggtttcacagtgttgttcctccagtggctacgatagtataggtagcatggtgtaccatgttaaggcgagggcaatgataagagacttcaccattgtgttgtcgtctccttcgaatgaggccaccgtgacttgatagctcatgataaactggatcaaccttccgttgtactttggccaattcccgtccctatagttgcttggccatggcgttgcctgtagtctggcggagagtgggcatctgttatcagtgaaattgaaggcatggaaggtgttgctctgatgagtctatctaactttgtcaaaactgctcaatctcacatggccatgcgaggggtgcgtcggatcctactgggcctgcaacagcgagatttcctgctcaagggcttggaggtgctctttttcttgctagataaggagacgtattatggcctgtgccttactacgttgctgcttggccgcttgagcatctctctgcttctgaaggttggagttgcacatgcaaaggctcttgagtaagagttgctcttcggtgttgacaccaaggtccgggccgtcgtggaggtctgcatcattgtattccggaggcatttcaaatgggtgatgttggtggcctgctatggcattgaaacctaaggggccagaggcaggttcttcatcaaatccagacaaactttagcttggtagggttggcttttggggtttgggagggggtcccccaagttttctaaactggtggtgtggacctcgcactcttgttc

SEQ ID NO: 202196 - DNA, 4729 bp, Zea Mays
actgaatttgcttatttccggctcttgttgaaaccgccacccgattcctccgctcgccaaatcctcgccgtgccctcgtagcaattccttgcgtcggcgcatcatcgcggcctcctctccctctctctctctatctctctcaatctctccgttggcaaatcgttgaatcgacgtgcttggccccggccgctctgagcccgccgccagcctcctcgtctgaagaagaacgacagccgtcgggctccggtggtcccgccgaagaacggcaggtagccagccgcgctcatcacgccggcgactcgattggcattgtattggcctttccgtttgttgtcagatcgaaaagaagaggaaagaatcgggaagcccgcccccctggtggatatgcgaggccatgtttttcatagttctcgaagcaaaacgacctgatgagattcctcaaggggagcaaggtggaggtattgcaggaggcagatgtgccgtttggttcttggaggcctggtgagatcgtctccggcaatggacacgcctactttgtgagatatgatgaaagtcccgttgactccagcgtggctgttgaaagggtgccaagaaggttgatgaggcctcgccctcctgcggatgatcctgtacgctggagtttgggtagtatcattgaggcctttgacagctactcgtggaaggttgccgaggtggtgagagtgcttggaaagaatcaatatctagtcaggctccttgggtcctcgctggagttgagtgcacatgcatcggttcttcgaatgaggaagctttggctagatgacatatggattgtgactcagaagtattctgcaagatgcttggatggtggtgcattccgaggtcaatcaaaagataaaaatttagaccataacttcagaatggacagtcgtcaacttgagaaccagaatgcctttgagggtgatacatctagaggcatcaagagaaaatcgtctgctatatcaacacatcctcaatgcagtgaaatcactaagagattgcggacaccaaatagagatggaaggtactcaaagctggttgatagaagtttttcccctttggctgaaaaggtagatgatgttgattccccatgcattattctacgcgggaaatgcatccatgctggtcataaatggcatactggaacaactgaagaatttagtgatacagagagtatatcatcttctgttggcagttctagtcctaacagtacccctcatagatcacaacattataatttggtctaccaaagtggagatagctgtagtagaactgatgatgatgaagcttctacatctgaaagagaaacatcagaacatgataacaatgggtcgagggaagaaacccatgtgctggaattacatgcttatcgcgcaacaatgttagccttgcatgcttgtgggtcaattagctgggagcaagaggctttgttgactaacctaaggttaacactgaacatctcaattgatgaacatctagctgaattgaggagtttggttacccgtgctgttacttccagatagcttttgttgttactttcctggtggcatttcatatctttcaaattattggccaaggttggaggcttgtaaagcatccttccataggttcttgtaaatggaggagtctgccacatgttttgcagtgcgataaatgtggcaacatttccaatgaacttccattggtcaagctgggtcaagactggttccagattaatactggttgctggataaaatggtcaaattagattggtttatcatccaaagacaaaaaggtgatctgcttgttgtgtgatttttcacagaacaagcatatttcttctatgatggcatgcacccgtttgactgtccagaagagcacttgagggaacatctgtatcagcaccggagtgtttcctctttccagcaccggagtgtttccaccatcgtcattagaggtaggaccctcccacaacctagaagcaagaccctcgcacgcccgatctgaggatgacttcgagggatatgacgattgacttctcgagtcagacgatgaacttacatttgatgcgcaacctgaaggcccggctaactggaactgggtggctgagctacaataggaggttcaaactgagctgcctgctgaactaagtatgattcaagacgaaaaccactctaagtatgacctctcggatgaggacgtctccgtggaagggacggacgcgtccgatgatgatattttggcagataatcaggacccggctgatgaggatattgaagatatcgagccgaaagaagatgagaaagattcagaggagctcattgttatcgatgatgagccatgggcgccagatccatttattcctgttgttcctaatccgaagactcgagcaccggagattcctgtaccagaagcccctgcgccagtagctcttgcttcagagggtcccccacaaggaaatacaatgcctgagctcgtcccgcaaccggattgggtaaggacaaaatctcacaatcatcaactcaggtgtggctgaagacaatattcgtatggagactactcaaatataccgctgccctgaacactgactgagcatgacgctgccttgattgaactcgaggaattaaagaagcagaatgcccaactgtgactcatctggagaatgaaggacaacctcaggctgccgtgaaacttagattttcctgacttgcagccgacttctatgtagacacaaaattgttgggattacatagtttggccttgcatcaaggaaaagttgcaggttatctgtacagtaatttgccagtcgtcttatgcatatgatgcatacctttttactgttctagtgttttgtaatccagatattgtagccggtgttcttggtgaaatatgcgccaggagagactgagacttattttgccaccttactttgtgcaaagccagctgcccttcaactttgctggacaggcaatcacatattttcagaagtgaagcggtaggccccggtagttctgatgagcaagcaagtgaaaagtttgtatgtggtgtatgacgatgtaccttggatctctttacttccaattgaacctgcacatgttcctggcttcgtgtcatcacaatgaccttgtattgtttcagtgttcacctacagttcatgtaccttaggttccttttctgtttttgccttacacgtaattggttgcagcagagcaccaaggatcggggatgtacaaatcaatatcagtttgcaactttgcatggaaggcatgcccttgcaaggcctcttggacagactccttcctcagtgctgaccgcatttgcagttgcagtgcgttagaggtggctgctgatgctctgggcactagagaaccaaaagcatagtagtaaaggctttgtgcacatatctagtagtaaaggcctcttggacagactccttcctcagtgctgaccccatccatttctacaaatcgaattctggagacaacgccttagtggaatctgcgagttcaaaaaaatacatggaggtgataaagaaaagaatgacggatcttacaaatcagattagactacgtaaatggtggtagcacggtttatttaaatgttcctatcatgaatcagtactaactacatgtcacacagatgctgctttgaaccctcggacacactatgcgtatggcactagtgtttcagttatgagtgatcttcggcaggcattcgaatatatgactgatgtggatgcagcagtccaagcactgcaggagttgagttgtacagaagaaagcaaggggagtttgacagacctttggctgaaaaaatggcgtacgatcacaacactttgcttggtaagtaattacccgttgtctttagtacattaaggcttttgttcgtcgtgtgaatgtgctactttttgcagcatcatggtgggccatgtttggtgtagacactccaacgttacaaatgcttgctttgagattggtttcacagtgttgttcctccagtggctacgatagtataggtagcatggtgtaccatgttaaggcgagggcaatgataagagacttcaccattgtgttgtcgtctccttcgaatgaggccaccgtgacttgatagctcatgataaactggatcaaccttccgttgtactttggccaattcccgtccctatagttgcttggccatggcgttgcctgtagtctggcggagagtgggcatctgttatcagtgaaattgaaggcatggaaggtgttgctctgatgagtctatctaactttgtcaaaactgctcaatctcacatggccatgcgaggggtgcgtcggatcctactgggcctgcaacagcgagatttcctgctcaagggcttggaggtgctctttttcttgctagataaggagacgtattatggcctgtgccttactacgttgctgcttggccgcttgagcatctctctgcttctgaaggttggagttgcacatgcaaaggctcttgagtaagagttgctcttcggtgttgacaccaaggtccgggccgtcgtggaggtctgcatcattgtattccggaggcatttcaaatgggtgatgttggtggcctgctatggcattgaaacctaaggggccagaggcaggttcttcatcaaatccagacaaactttagcttggtagggttggcttttggggtttgggagggggtcccccaagttttctaaactggtggtgtggacctcgcactcttgttc

SEQ ID NO: 202197 - DNA, 1768 bp, Zea Mays
cggaaaacaaagggggcaggagccactgccaacgacttcgaggtcgcacctacccccgccccattctgcaagccttgctccatttgcgactcgcgagctcaccttccacaccctacctactcctccactctgagctcacaccaaacagcccgtgcaccaaggccaccattcacctccaccaacaacaaacgggaactcttcacagcttcgcacctcgcgtcacaacaccaagacgcacgtaggagggaacctcaagcttcagtcgtccatggctcagcagcaaacaaatcctgaagaggtggtcctcgggcaggaggtcggggccgcgagggtggccactctcaaccgcccgcgccagctcaacggcatctccgacagagtggtgtacctcctcgcacagtttctggagaaatgggagaaggatgagaacgccaaattcgtcatctttaagggtgctgggcgtgcattttctgctggtggggacctaaagatgttttatgaagggaaatcaaatgattcctgcctcgaggttgtgtatagaatgtattggctttgctaccacattcacacgtacaagaaaaccatggttgctcttgttaatgggcttgtcatgggtggtggcgctgcaatggttgcgccactaaagtttgcagttgtcacagagaaaacaatctttgctactcctgaggctagtgttggattgcacacagattgtagcttttcctacatccattcccggctccctggatatttaggcgagtatctggctttaactggtgctagactgaatgcgaaggaaatgatttctgctggtcttgctactcattttgtcagttctgaaaaattggaagaacttgaaaaacgtctactggatttggacacaggtgctgagtctgcagtccgagctgttattgaagaattttcaacagatgttcaaactgatgaagatagtatattgaataagctttcaactatcaacaaatgcttctctgcagagactgttgaggatatcataaaagcatttgtaaggattcaacactcatgccatcccactttatgctgaatcagaagcgagcatagacggaaaccaatggatagctccagtcctaaagggtctgagaagatcatctccaactgcactgaagatcaccctgagatcgatcagagaaggtcgaaaacagagtttgcctgaatgtttgactaaggaatttaggcttacaatgaatatactgcggtctgttgtcaatggggatgtttatgagggcattagagctcttagcatcgataaagacaatgcccctaagtggaatcccactacccttgaggaggtgaagtacgaggacatcgaccgtctgttccagccgttcagtccggagctggaacttcaggtcccatctgatgattccaacaggtggagcggcaaatacgagaacacggtctatggcagagcttcccagtgactgtatacaagatcccccagccttttgttattttcatccgaaccactgcattacggaatattcagtttgcggcacgtgtgtatttcgagtgtttgtgtagcgcgacgttccaatgtatgaactgttgcaaaggttacacgatgacatgaagtttgatccaacaccaaaaccatctattagatgggaaagttctgcactttggatgttatatcgccaatcagaagctcaaacccttgcaaatcaggagtactccaactccatgtagtatagtagtttctcttgtacttcgcagatgtcctctcaatcgg

SEQ ID NO: 202198 - DNA, 1682 bp, Zea Mays
ctctctctctctctctctctctctctctctcggaaaacaaagggggcaggagccactgccaacgacttcgaggtcgcacctacccccgccccattctgcaagccttgctccatttgcgactcgcgagctcaccttccacaccctacctactcctccactctgagctcacaccaaacagcccgtgcaccaaggccaccattcacctccaccaacaacaaacgggaactcttcacagcttcgcacctcgcgtcacaacaccaagacgcacgtaggagggaacctcaagcttcagtcgtccatggctcagcagcaaacaaatcctgaagaggtggtcctcgggcaggaggtcggggccgcgagggtggccactctcaaccgcccgcgccagctcaacggcatctccgacagagtggtgtacctcctcgcacagtttctggagaaatgggagaaggatgagaacgccaaattcgtcatctttaagggtgctgggcgtgcattttctgctggtggggacctaaagatgttttatgaagggaaatcaaatgattcctgcctcgaggttgtgtatagaatgtattggctttgctaccacattcacacgtacaagaaaaccatggttgctcttgttaatgggcttgtcatgggtggtggcgctgcaatggttgcgccactaaagtttgcagttgtcacagagaaaacaatctttgctactcctgaggctagtgttggattgcacacagattgtagcttttcctacatccattcccggctccctggatatttaggcgagtatctggctttaactggtgctagactgaatgcgaaggaaatgatttctgctggtcttgctactcattttgtcagttctgaaaaattggaagaacttgaaaaacgtctactggatttggacacaggctttcaactatcaacaaatgcttctctgcagagactgttgaggatatcataaaagcatttgaatcagaagcgagcatagacggaaaccaatggatagctccagtcctaaagggtctgagaagatcatctccaactgcactgaagatcaccctgagatcgatcagagaaggtcgaaaacagagtttgcctgaatgtttgactaaggaatttaggcttacaatgaatatactgcggtctgttgtcaatggggatgtttatgagggcattagagctcttagcatcgataaagacaatgcccctaagtggaatcccactacccttgaggaggtgaagtacgaggacatcgaccgtctgttccagccgttcagtccggagctggaacttcaggtcccatctgatgattccaacaggtggagcggcaaatacgagaacacggtctatggcagagcttcccagtgactgtatacaagatcccccagccttttgttattttcatccgaaccactgcattacggaatattcagtttgcggcacgtgtgtatttcgagtgtttgtgtagcgcgacgttccaatgtatgaactgttgcaaaggttacacgatgacatgaagtttgatccaacaccaaaaccatctattagatgggaaagttctgcactttggatgttatatcgccaatcagaagctcaaacccttgcaaatcaggagtactccaactccatgtagtatagtagtttctcttgtacttcgcagatgtcctctcaatcgg

SEQ ID NO: 202199 - DNA, 2040 bp, Zea Mays
aacacactaacctaaccagctgcctctcctaagctatccgccgtcgccgtcgccgtcgccgtcgctctcctctctcctccgagccgctgctccctctcccctgcgcgccgccactgtgggcatctacaccgctgccgctctcctctctcctctgtgccgcagctcttctctctccctctcccctgcgcgccgccactgcgggcaccctgcacgccgccactgcgggcaccctgcacgccgccgctgcgtggccctacacgccaccgctacgggtgccctacgcgccgccgtcattgctccagctcttctctcctctgtttcccagccaatgccgccgctctaactccccaaggcatcgccccgacgacggctcaacgacgccccgtcgacgcctcgcggacgccctgcgccgcagcgggcgctttacgctccatggcaaggtaccggcatctgggccaattcgccccactaggagggaaacaaactgctgcacaacttcccggggactggatctccattggccacagcacccagtggctctggtactccgtgtacgcaacctgcttccattaagaattggtcatcatggcgtgggagctcattgaagttccgggcaacttgaatccctctctcaaagactcttcagttgatgtggtggccgccaagattgatcccaagttagccaatactctcattaggcagttaagccaggtgtgccctttggagaatctgaggcatgtaaagcgtgtacgtcgacgtactgaatgtggtggaaaatctgagttatcaataatcctatgtgtttctactgggtctgaaacttgtaacatacagttctctgaagatctacagaagatagtggatacttatcagctgagtcctttcaccgcaaaagttgccaggtgttgtgctacatcaaaagaggagtgggaggaacagtgcaaactttggccaacatcttaccatcctgcacatgaccttggtattgtccgtggatttcaagaggaggaattaccatcaatatttaattgcatgaaggctgctattcagttatcaaaggcaggcaatgctgcaatcattgttgatccatcaagcatgcaaatagttgcaaaggccactgaccatacacacaagcatgatacggctgaagaagggaacacattttctgaagcgaatgcagatgttacctgcccttggaatacatcgactgatgatgacaacaatctgtcacttccaggatcctttcttcctaaactcaacagtttgaacatggaaatcccatgtataaatccttggggatggatgaaaaaaaggacttgtgagcagaagccatcgccatgggatggctgttctgcatggcatcctctgagacatgctcccatggctgccattgaaaatgctgctgagagggacagaacgatgtttccttcttcgatttcaataaccaagccagattcagatggcagtcccgagaactgctgcgacaatgaaccagcaaaaaggctgaagacggatacaaaagataatgagaaaccggcatctgaatcatctggtggcgacctgtttgagaccagcagaccatatctctgcacagggtttgatatctaccttgtttgggaaccatgcacaatgtgtgcgatggcgcttgtgcatcataggttcaagcgcgtgttctacgccttccccaatcctgtggccggagcactcggtggagtctacaggttgcatggggagaggagtctaaaccatcactataatgtgtttagggtttcagtacctgaggcgtacttgaatgggttgaactgttattcgaaggaatgctgatccaacacctttccgtttttatttagaaaaaaagaggatccaagactgttttccttttttttttatttttggcacaagggcttcatattaggcctaaacttgcccatctgtattattaaatgttttggtaacaaatgtgtttatggatgtaaacgttggtgctatttttttattagtttacttaaatttaatgaaatatgatcggtttcaaacatg

SEQ ID NO: 202200 - DNA, 1710 bp, Zea Mays
ccagctgcctctcctaagctatccgccgtcgccgtcgccgtcgccgtcgctctcctctctcctccgagccgctgctccctctcccctgcgcgccgccactgtaccggcatctgggccaattcgccccactaggagggaaacaaactgctgcacaacttcccggggactggatctccattggccacagcacccagtggctctggtactccgtgtacgcaacctgcttccattaagaattggtcatcatggcgtgggagctcattgaagttccgggcaacttgaatccctctctcaaagactcttcagttgatgtggtggccgccaagattgatcccaagttagccaatactctcattaggcagttaagccaggtgtgccctttggagaatctgaggcatgtaaagcgtgtacgtcgacgtactgaatgtggtggaaaatctgagttatcaataatcctatgtgtttctactgggtctgaaacttgtaacatacagttctctgaagatctacagaagatagtggatacttatcagctgagtcctttcaccgcaaaatctttaacaggttgccaggtgttgtgctacatcaaaagaggagtgggaggaacagtgcaaactttggccaacatcttaccatcctgcacatgaccttggtattgtccgtggatttcaagaggaggaattaccatcaatatttaattgcatgaaggctgctattcagttatcaaaggcaggcaatgctgcaatcattgttgatccatcaagcatgcaaatagttgcaaaggccactgaccatacacacaagcatgatacggctgaagaagggaacacattttctgaagcgaatgcagatgttacctgcccttggaatacatcgactgatgatgacaacaatctgtcacttccaggatcctttcttcctaaactcaacagtttgaacatggaaatcccatgtataaatccttggggatggatgaaaaaaaggacttgtgagcagaagccatcgccatgggatggctgttctgcatggcatcctctgagacatgctcccatggctgccattgaaaatgctgctgagagggacagaacgatgtttccttcttcgatttcaataaccaagccagattcagatggcagtcccgagaactgctgcgacaatgaaccagcaaaaaggctgaagacggatacaaaagataatgagaaaccggcatctgaatcatctggtggcgacctgtttgagaccagcagaccatatctctgcacagggtttgatatctaccttgtttgggaaccatgcacaatgtgtgcgatggcgcttgtgcatcataggttcaagcgcgtgttctacgccttccccaatcctgtggccggagcactcggtggagtctacaggttgcatggggagaggagtctaaaccatcactataatgtgtttagggtttcagtacctgaggcgtacttgaatgggttgaactgttattcgaaggaatgctgatccaacacctttccgtttttatttagaaaaaaagaggatccaagactgttttccttttttttttatttttggcacaagggcttcatattaggcctaaacttgcccatctgtattattaaatgttttggtaacaaatgtgtttatggatgtaaacgttggtgctatttttttattagtttacttaaatttaatgaaatatgatcggtttcaaacatg

SEQ ID NO: 202201 - DNA, 1632 bp, Zea Mays
cacgcgcgccttagcgcctaagcgacgctaaggtaccggcatctgggccaattcgccccactaggagggaaacaaactgctgcacaacttcccggggactggatctccattggccacagcacccagtggctctggtactccgtgtacgcaacctgcttccattaagaattggtcatcatggcgtgggagctcattgaagttccgggcaacttgaatccctctctcaaagactcttcagttgatgtggtggccgccaagattgatcccaagttagccaatactctcattaggcagttaagccaggtgtgccctttggagaatctgaggcatgtaaagcgtgtacgtcgacgtactgaatgtggtggaaaatctgagttatcaataatcctatgtgtttctactgggtctgaaacttgtaacatacagttctctgaagatctacagaagatagtggatacttatcagctgagtcctttcaccgcaaaagttgccaggtgttgtgctacatcaaaagaggagtgggaggaacagtgcaaactttggccaacatcttaccatcctgcacatgaccttggtattgtccgtggatttcaagaggaggaattaccatcaatatttaattgcatgaaggctgctattcagttatcaaaggcaggcaatgctgcaatcattgttgatccatcaagcatgcaaatagttgcaaaggccactgaccatacacacaagcatgatacggctgaagaagggaacacattttctgaagcgaatgcagatgttacctgcccttggaatacatcgactgatgatgacaacaatctgtcacttccaggatcctttcttcctaaactcaacagtttgaacatggaaatcccatgtataaatccttggggatggatgaaaaaaaggacttgtgagcagaagccatcgccatgggatggctgttctgcatggcatcctctgagacatgctcccatggctgccattgaaaatgctgctgagagggacagaacgatgtttccttcttcgatttcaataaccaagccagattcagatggcagtcccgagaactgctgcgacaatgaaccagcaaaaaggctgaagacggatacaaaagataatgagaaaccggcatctgaatcatctggtggcgacctgtttgagaccagcagaccatatctctgcacagggtttgatatctaccttgtttgggaaccatgcacaatgtgtgcgatggcgcttgtgcatcataggttcaagcgcgtgttctacgccttccccaatcctgtggccggagcactcggtggagtctacaggttgcatggggagaggagtctaaaccatcactataatgtgtttagggtttcagtacctgaggcgtacttgaatgggttgaactgttattcgaaggaatgctgatccaacacctttccgtttttatttagaaaaaaagaggatccaagactgttttccttttttttttatttttggcacaagggcttcatattaggcctaaacttgcccatctgtattattaaatgttttggtaacaaatgtgtttatggatgtaaacgttggtgctatttttttattagtttacttaaatttaatgaaatatgatcggtttcaaacatg

SEQ ID NO: 202202 - DNA, 3419 bp, Zea Mays
atggtgacctactggctacttttgttggtactgctttggatgggtagaaaaaagttattaactcctcctgaaactccactttttcgatctttggatgacgaagaaaaccaatccatcactcaggtttctaggggcagagctcagagcaagcctatacaaatttcaagatcatccatggtagataataatcaaagagctagtagaagcagtgcaagctcaagtaggcttagcccatcgccatgctctatgggaaggacaagatcatctagttcagcttctcgctctagtccaccacttgctgaaacacaaacaccatcacgaagattgtcaacccctccgattgctaagacattaacacctcctcgaaggtctccaagtcctgtctcaagaaggatgagtactggttcaagtggcccaactttgaatggaacaagaggagcttcaccagtgaaatctaatcacaggtcttcttcaccaaagctgcatggatggcaatcaaatgttcctggtttctctttcgatgcgcctttgaaccttcgcacatctctaactgatcgtccagtatgccggtcaaggggtggatcgccttcatcttttagtggactagaaaagggttcaagaggtagaagactgtcaatgtctcccactccacctagaagagccagttcatctcacagcattgaacgggaccgaatgagctcttatagcaaagcttctgcaacatcatctggtgaggatgatctggagtctatgcagtctgtaccaattagctactccagtagcccagttgtgaaaaagagcttggttgtgatgaaaaccagaaccattgcatcatcaaagaatctgtccaaaaaattgacacctagttctgtcccaaagcggtcatttgactctgcactttggttaatggatcatcgcaaagctccacaagataggtttcggccacttctatcagcactgcaagctcttaccatggtgccacttttggctcttatatgcatggcagccaagaacaacatgattttgctggtgaatgggaagcagatgatatttctcagggtcatgaggatatatttatgtttgataaattggatgagctaaatgaagacattcattacaagagcatggaatctacggataattcactggtaatagtaaaacatctagtaagtggcagacaggacttggaaggaagcagaagacctaatcagtccttatgccattctactgatatttctcatgttagctttaaggctacttgctctagatgtgggaagtttttcgatgcgatggatgttgatgaagagggtgtctattgtgatgcatgtgctacaaaggatgggaatatcctcaccagtcctattgtacaaactataggagaagaaaaccaacaatatggtaaaactgcaaatttgaaaccttgcatcgcatctgattctcctgtacccacagattgtgaaatctatagcaaagaagtatctcttgatcatcaactagtgaacaatgaatcttacgctgattgcctggaccaggcccctccaattcactcaatggggcacacacctcaggaaatgctactggggcaggaggaaaacattgacgctgagcatagaaataaacatgttggggattcgttaggaaatacaaacgataattcctttcatcgatctagtgtggatgaatgtgaacaaacagaaccaacatctgtagggcaggacctttttatcatagaccaaatgaataaccataatcgtggactatcccaatgtaatgaaaatgtctctgaatctgtgacctgtgacaattctcatcaactgggatcaactacatatcagaaccctaagcttgaaactaccgaggatactgggatatcagtattgttagtccctaagcccaacagtaataaatggccaaatatgctctgttcagaaccctattatgcaagagatggtgtcagtatgatgaagcgtagctttggactgggcagctcttcagctgcttcttccagtgatcttgggtcttcaagacagtcaatcatatgttttgagcgccttaggagtggtaagaagggtgactttgagaagtcccagataagcagtactattagttgtcaaagcattgcttctgtgtcagatatgtcaatttgtagctcttcagcttcactttgccctcagagtgatgcagtaggagattcctgtttcccaattgacactttggaaagcggcacttcaggaactctgatctcttctcaagaaaatgatgatgctttttgtaaggatactttgccaagtgctatggaatgtccgtcttcttcacagtttattgctgatgatgacagtcccggtgacatgaaaatccagagctacttaagtgaggtaggatatacaacagttgagaaccatagtgcttgcagaatgactgacatggattgtaccagtacaaatatgtattctttagatactgaaatgccaagtgataccctagaatcatcaggcccagtggaaagtagcatgcctgaaactgaagaggatgcttacactatcagtcagtgtaataaaggtagtgctccagaacattcaagtgatgagaataactttgataatattcaaatgcagtctgaaatagttcagggttcagcggaggaaaacagattggatgattgttgcatgtctgctatctcggaggaggacgtattgatttctggacaagaagatgacataaggaatcttcccaatgatgaagaattatgtgcggaggtagaaggaccaaggaaacaaatccagagatgttttacattggaagaagctgctgatacaattctcttctgtagttccattgtccacgaccttgcatacaaggctgcgactattgcgttggaaaacaagaaggaaccaaagtttgtggactctattcgtccaactgttgcaattgttagaggatcttttgctaaggaagagagtttaccaaagctgcctcacagacgaaccccaaaccgtaaggtcaaaaggaaaagattggaaggcgaaacaactacaacggaaactacagagaaagacgttgtcgcgaatgactccccccctgtatgttctgcatcgggtattacaaggaattccgataatatgaagccgccaaagctggagtccaagtgcaactgtataattatgtaactcggtcacatccaagattgaaattcctacatgcttggttaaccccgtcatcagcagcgatggagttcagcacaatggatcttccgctagattattttgcaaaggtgcatttgctgtgttttaggtgacagaatgcactgccagctgctattcttttgtaaagtcttttcttctcttttctgcttgtaatgaggtccttgcggtttgtccaaagttgtgctgatagcctatttacttgcaacgcacgtggct

SEQ ID NO: 202203 - DNA, 4103 bp, Zea Mays
aatcggtttttccacttctttaactccaaataaaccaacggaaattgaaaaacaaaagccacttcttcgccagtcctccgcctcccctcctctgctcctccagcgaagcgcacgcacggcgcgcaggctgagcaaggcaaccgaagcgagcgaggtcctttgcttctacccgcggcaacgccccaggcgcgcgcgacgcgtcgagctccggaggccgagggcgagcaccagtgcgggagtggaggagaggaggtctccgctggacgactgcacccccacccactcggggtcagggtccaaagccggatctgccttggggctcgcgcccgcggctggtggaacggactgctggctgacgagggctccgataatcgacggcggcggtggaatgccggtggaacacctgtttttcatttttgatgaggccatgatatatgttccatctgttctggatggaatttgactgcattctactgtctctaaaagaagggtaccaggcttaagaaaccagaaaaaatgccaccgtcaccctcaccgaggacatcaaggtctcctgcacaggagacttatcaaaagaggacaaacagtttcagaaatgtgcttcctgcaaaatcaaaggatgatgaactcgctttgttctctgatatgcagaaagttgagacggacaacttcttactggaaccgtcagtggattttgatgattcaatgaaaaaattgagatatttcccggaagtaaaacttggtgtcaacattcctgcccatggagaaagccatgaattgcttaacacagacggcgataaaaatgattatgagtggttattaactcctcctgaaactccactttttcgatctttggatgacgaagaaaaccaatccatcactcaggtttctaggggcagagctcagagcaagcctatacaaatttcaagatcatccatggtagataataatcaaagagctagtagaagcagtgcaagctcaagtaggcttagcccatcgccatgctctatgggaaggacaagatcatctagttcagcttctcgctctagtccaccacttgctgaaacacaaacaccatcacgaagattgtcaacccctccgattgctaagacattaacacctcctcgaaggtctccaagtcctgtctcaagaaggatgagtactggttcaagtggcccaactttgaatggaacaagaggagcttcaccagtgaaatctaatcacaggtcttcttcaccaaagctgcatggatggcaatcaaatgttcctggtttctctttcgatgcgcctttgaaccttcgcacatctctaactgatcgtccagtatgccggtcaaggggtggatcgccttcatcttttagtggactagaaaagggttcaagaggtagaagactgtcaatgtctcccactccacctagaagagccagttcatctcacagcattgaacgggaccgaatgagctcttatagcaaagcttctgcaacatcatctggtgaggatgatctggagtctatgcagtctgtaccaattagctactccagtagcccagttgtgaaaaagagcttggttgtgatgaaaaccagaaccattgcatcatcaaagaatctgtccaaaaaattgacacctagttctgtcccaaagcggtcatttgactctgcactttggttaatggatcatcgcaaagctccacaagataggtttcggccacttctatcagcactgcaagctcttaccatggtgccacttttggctcttatatgcatggcagccaagaacaacatgattttgctggtgaatgggaagcagatgatatttctcagggtcatgaggatatatttatgtttgataaattggatgagctaaatgaagacattcattacaagagcatggaatctacggataattcactggtaatagtaaaacatctagtaagtggcagacaggacttggaaggaagcagaagacctaatcagtccttatgccattctactgatatttctcatgttagctttaaggctacttgctctagatgtgggaagtttttcgatgcgatggatgttgatgaagagggtgtctattgtgatgcatgtgctacaaaggatgggaatatcctcaccagtcctattgtacaaactataggagaagaaaaccaacaatatggtaaaactgcaaatttgaaaccttgcatcgcatctgattctcctgtacccacagattgtgaaatctatagcaaagaagtatctcttgatcatcaactagtgaacaatgaatcttacgctgattgcctggaccaggcccctccaattcactcaatggggcacacacctcaggaaatgctactggggcaggaggaaaacattgacgctgagcatagaaataaacatgttggggattcgttaggaaatacaaacgataattcctttcatcgatctagtgtggatgaatgtgaacaaacagaaccaacatctgtagggcaggacctttttatcatagaccaaatgaataaccataatcgtggactatcccaatgtaatgaaaatgtctctgaatctgtgacctgtgacaattctcatcaactgggatcaactacatatcagaaccctaagcttgaaactaccgaggatactgggatatcagtattgttagtccctaagcccaacagtaataaatggccaaatatgctctgttcagaaccctattatgcaagagatggtgtcagtatgatgaagcgtagctttggactgggcagctcttcagctgcttcttccagtgatcttgggtcttcaagacagtcaatcatatgttttgagcgccttaggagtggtaagaagggtgactttgagaagtcccagataagcagtactattagttgtcaaagcattgcttctgtgtcagatatgtcaatttgtagctcttcagcttcactttgccctcagagtgatgcagtaggagattcctgtttcccaattgacactttggaaagcggcacttcaggaactctgatctcttctcaagaaaatgatgatgctttttgtaaggatactttgccaagtgctatggaatgtccgtcttcttcacagtttattgctgatgatgacagtcccggtgacatgaaaatccagagctacttaagtgaggtaggatatacaacagttgagaaccatagtgcttgcagaatgactgacatggattgtaccagtacaaatatgtattctttagatactgaaatgccaagtgataccctagaatcatcaggcccagtggaaagtagcatgcctgaaactgaagaggatgcttacactatcagtcagtgtaataaagcggaggaaaacagattggatgattgttgcatgtctgctatctcggaggaggacgtattgatttctggacaagaagatgacataaggaatcttcccaatgatgaagaattatgtgcggaggtagaaggaccaaggaaacaaatccagagatgttttacattggaagaagctgctgatacaattctcttctgtagttccattgtccacgaccttgcatacaaggctgcgactattgcgttggaaaacaagaaggaaccaaagtttgtggactctattcgtccaactgttgcaattgttagaggatcttttgctaaggaagagagtttaccaaagctgcctcacagacgaaccccaaaccgtaaggtcaaaaggaaaagattggaaggcgaaacaactacaacggaaactacagagaaagacgttgtcgcgaatgactccccccctgtatgttctgcatcgggtattacaaggaattccgataatatgaagccgccaaagctggagtccaagtgcaactgtataattatgtaactcggtcacatccaagattgaaattcctacatgcttggttaaccccgtcatcagcagcgatggagttcagcacaatggatcttccgctagattattttgcaaaggtgcatttgctgtgttttaggtgacagaatgcactgccagctgctattcttttgtaaagtcttttcttctcttttctgcttgtaatgaggtccttgcggtttgtccaaagttgtgctgatagcctatttacttgcaacgcacgtggct

SEQ ID NO: 202204 - DNA, 4325 bp, Zea Mays
aatcggtttttccacttctttaactccaaataaaccaacggaaattgaaaaacaaaagccacttcttcgccagtcctccgcctcccctcctctgctcctccagcgaagcgcacgcacggcgcgcaggctgagcaaggcaaccgaagcgagcgaggtcctttgcttctacccgcggcaacgccccaggcgcgcgcgacgcgtcgagctccggaggccgagggcgagcaccagtgcgggagtggaggagaggaggtctccgctggacgactgcacccccacccactcggggtcagggtccaaagccggatctgccttggggctcgcgcccgcggctggtggaacggactgctggctgacgagggctccgataatcgacggcggcggtggaatgccggtggaacacctgtttttcatttttgatgaggtggaatgcggcttcccaagctccattctgttttccatttcaatgaggccatgatatatgttccatctgttctggatggaatttgactgcattctactgtctctaaaagaagggtaccaggcttaagaaaccagaaaaaatgccaccgtcaccctcaccgaggacatcaaggtctcctgcacaggagacttatcaaaagaggacaaacagtttcagaaatgtgcttcctgcaaaatcaaaggatgatgaactcgctttgttctctgatatgcagaaagttgagacggacaacttcttactggaaccgtcagtggattttgatgattcaatgagtaatgcttaaaaattgagatatttcccggaagtaaaacttggtgtcaacattcctgcccatggagaaagccatgaattgcttaacacagacggcgataaaaatgattatgagtggttattaactcctcctgaaactccactttttcgatctttggatgacgaagaaaaccaatccatcactcaggtttctaggggcagagctcagagcaagcctatacaaatttcaagatcatccatggtagataataatcaaagagctagtagaagcagtgcaagctcaagtaggcttagcccatcgccatgctctatgggaaggacaagatcatctagttcagcttctcgctctagtccaccacttgctgaaacacaaacaccatcacgaagattgtcaacccctccgattgctaagacattaacacctcctcgaaggtctccaagtcctgtctcaagaaggatgagtactggttcaagtggcccaactttgaatggaacaagaggagcttcaccagtgaaatctaatcacaggtcttcttcaccaaagctgcatggatggcaatcaaatgttcctggtttctctttcgatgcgcctttgaaccttcgcacatctctaactgatcgtccagtatgccggtcaaggggtggatcgccttcatcttttagtggactagaaaagggttcaagaggtagaagactgtcaatgtctcccactccacctagaagagccagttcatctcacagcattgaacgggaccgaatgagctcttatagcaaagcttctgcaacatcatctggtgaggatgatctggagtctatgcagtctgtaccaattagctactccagtagcccagttgtgaaaaagagcttggttgtgatgaaaaccagaaccattgcatcatcaaagaatctgtccaaaaaattgacacctagttctgtcccaaagcggtcatttgactctgcactttggttaatggatcatcgcaaagctccacaagataggtttcggccacttctatcaggtgcccctgccaacacatttggtgctgggaatggaaatgatgtgcacaaacctatgttctcacacaattcttctttgacaactagcagcactgcaagctcttaccatggtgccacttttggctcttatatgcatggcagccaagaacaacatgattttgctggtgaatgggaagcagatgatatttctcagggtcatgaggatatatttatgtttgataaattggatgagctaaatgaagacattcattacaagagcatggaatctacggataattcactggtaatagtaaaacatctagtaagtggcagacaggacttggaaggaagcagaagacctaatcagtccttatgccattctactgatatttctcatgttagctttaaggctacttgctctagatgtgggaagtttttcgatgcgatggatgttgatgaagagggtgtctattgtgatgcatgtgctacaaaggatgggaatatcctcaccagtcctattgtacaaactataggagaagaaaaccaacaatatggtaaaactgcaaatttgaaaccttgcatcgcatctgattctcctgtacccacagattgtgaaatctatagcaaagaagtatctcttgatcatcaactagtgaacaatgaatcttacgctgattgcctggaccaggcccctccaattcactcaatggggcacacacctcaggaaatgctactggggcaggaggaaaacattgacgctgagcatagaaataaacatgttggggattcgttaggaaatacaaacgataattcctttcatcgatctagtgtggatgaatgtgaacaaacagaaccaacatctgtagggcaggacctttttatcatagaccaaatgaataaccataatcgtggactatcccaatgtaatgaaaatgtctctgaatctgtgacctgtgacaattctcatcaactgggatcaactacatatcagaaccctaagcttgaaactaccgaggatactgggatatcagtattgttagtccctaagcccaacagtaataaatggccaaatatgctctgttcagaaccctattatgcaagagatggtgtcagtatgatgaagcgtagctttggactgggcagctcttcagctgcttcttccagtgatcttgggtcttcaagacagtcaatcatatgttttgagcgccttaggagtggtaagaagggtgactttgagaagtcccagataagcagtactattagttgtcaaagcattgcttctgtgtcagatatgtcaatttgtagctcttcagcttcactttgccctcagagtgatgcagtaggagattcctgtttcccaattgacactttggaaagcggcacttcaggaactctgatctcttctcaagaaaatgatgatgctttttgtaaggatactttgccaagtgctatggaatgtccgtcttcttcacagtttattgctgatgatgacagtcccggtgacatgaaaatccagagctacttaagtgaggtaggatatacaacagttgagaaccatagtgcttgcagaatgactgacatggattgtaccagtacaaatatgtattctttagatactgaaatgccaagtgataccctagaatcatcaggcccagtggaaagtagcatgcctgaaactgaagaggatgcttacactatcagtcagtgtaataaaggtagtgctccagaacattcaagtgatgagaataactttgataatattcaaatgcagtctgaaatagttcagggttcagcggaggaaaacagattggatgattgttgcatgtctgctatctcggaggaggacgtattgatttctggacaagaagatgacataaggaatcttcccaatgatgaagaattatgtgcggaggtagaaggaccaaggaaacaaatccagagatgttttacattggaagaagctgctgatacaattctcttctgtagttccattgtccacgaccttgcatacaaggctgcgactattgcgttggaaaacaagaaggaaccaaagtttgtggactctattcgtccaactgttgcaattgttagaggatcttttgctaaggaagagagtttaccaaagctgcctcacagacgaaccccaaaccgtaaggtcaaaaggaaaagattggaaggcgaaacaactacaacggaaactacagagaaagacgttgtcgcgaatgactccccccctgtatgttctgcatcgggtattacaaggaattccgataatatgaagccgccaaagctggagtccaagtgcaactgtataattatgtaactcggtcacatccaagattgaaattcctacatgcttggttaaccccgtcatcagcagcgatggagttcagcacaatggatcttccgctagattattttgcaaaggtgcatttgctgtgttttaggtgacagaatgcactgccagctgctattcttttgtaaagtcttttcttctcttttctgcttgtaatgaggtccttgcggtttgtccaaagttgtgctgatagcctatttacttgcaacgcacgtggct

SEQ ID NO: 202205 - DNA, 4278 bp, Zea Mays
aatcggtttttccacttctttaactccaaataaaccaacggaaattgaaaaacaaaagccacttcttcgccagtcctccgcctcccctcctctgctcctccagcgaagcgcacgcacggcgcgcaggctgagcaaggcaaccgaagcgagcgaggtcctttgcttctacccgcggcaacgccccaggcgcgcgcgacgcgtcgagctccggaggccgagggcgagcaccagtgcgggagtggaggagaggaggtctccgctggacgactgcacccccacccactcggggtcagggtccaaagccggatctgccttggggctcgcgcccgcggctggtggaacggactgctggctgacgagggctccgataatcgacggcggcggtggaatgccggtggaacacctgtttttcatttttgatgaggccatgatatatgttccatctgttctggatggaatttgactgcattctactgtctctaaaagaagggtaccaggcttaagaaaccagaaaaaatgccaccgtcaccctcaccgaggacatcaaggtctcctgcacaggagacttatcaaaagaggacaaacagtttcagaaatgtgcttcctgcaaaatcaaaggatgatgaactcgctttgttctctgatatgcagaaagttgagacggacaacttcttactggaaccgtcagtggattttgatgattcaatgagtaatgcttaaaaattgagatatttcccggaagtaaaacttggtgtcaacattcctgcccatggagaaagccatgaattgcttaacacagacggcgataaaaatgattatgagtggttattaactcctcctgaaactccactttttcgatctttggatgacgaagaaaaccaatccatcactcaggtttctaggggcagagctcagagcaagcctatacaaatttcaagatcatccatggtagataataatcaaagagctagtagaagcagtgcaagctcaagtaggcttagcccatcgccatgctctatgggaaggacaagatcatctagttcagcttctcgctctagtccaccacttgctgaaacacaaacaccatcacgaagattgtcaacccctccgattgctaagacattaacacctcctcgaaggtctccaagtcctgtctcaagaaggatgagtactggttcaagtggcccaactttgaatggaacaagaggagcttcaccagtgaaatctaatcacaggtcttcttcaccaaagctgcatggatggcaatcaaatgttcctggtttctctttcgatgcgcctttgaaccttcgcacatctctaactgatcgtccagtatgccggtcaaggggtggatcgccttcatcttttagtggactagaaaagggttcaagaggtagaagactgtcaatgtctcccactccacctagaagagccagttcatctcacagcattgaacgggaccgaatgagctcttatagcaaagcttctgcaacatcatctggtgaggatgatctggagtctatgcagtctgtaccaattagctactccagtagcccagttgtgaaaaagagcttggttgtgatgaaaaccagaaccattgcatcatcaaagaatctgtccaaaaaattgacacctagttctgtcccaaagcggtcatttgactctgcactttggttaatggatcatcgcaaagctccacaagataggtttcggccacttctatcaggtgcccctgccaacacatttggtgctgggaatggaaatgatgtgcacaaacctatgttctcacacaattcttctttgacaactagcagcactgcaagctcttaccatggtgccacttttggctcttatatgcatggcagccaagaacaacatgattttgctggtgaatgggaagcagatgatatttctcagggtcatgaggatatatttatgtttgataaattggatgagctaaatgaagacattcattacaagagcatggaatctacggataattcactggtaatagtaaaacatctagtaagtggcagacaggacttggaaggaagcagaagacctaatcagtccttatgccattctactgatatttctcatgttagctttaaggctacttgctctagatgtgggaagtttttcgatgcgatggatgttgatgaagagggtgtctattgtgatgcatgtgctacaaaggatgggaatatcctcaccagtcctattgtacaaactataggagaagaaaaccaacaatatggtaaaactgcaaatttgaaaccttgcatcgcatctgattctcctgtacccacagattgtgaaatctatagcaaagaagtatctcttgatcatcaactagtgaacaatgaatcttacgctgattgcctggaccaggcccctccaattcactcaatggggcacacacctcaggaaatgctactggggcaggaggaaaacattgacgctgagcatagaaataaacatgttggggattcgttaggaaatacaaacgataattcctttcatcgatctagtgtggatgaatgtgaacaaacagaaccaacatctgtagggcaggacctttttatcatagaccaaatgaataaccataatcgtggactatcccaatgtaatgaaaatgtctctgaatctgtgacctgtgacaattctcatcaactgggatcaactacatatcagaaccctaagcttgaaactaccgaggatactgggatatcagtattgttagtccctaagcccaacagtaataaatggccaaatatgctctgttcagaaccctattatgcaagagatggtgtcagtatgatgaagcgtagctttggactgggcagctcttcagctgcttcttccagtgatcttgggtcttcaagacagtcaatcatatgttttgagcgccttaggagtggtaagaagggtgactttgagaagtcccagataagcagtactattagttgtcaaagcattgcttctgtgtcagatatgtcaatttgtagctcttcagcttcactttgccctcagagtgatgcagtaggagattcctgtttcccaattgacactttggaaagcggcacttcaggaactctgatctcttctcaagaaaatgatgatgctttttgtaaggatactttgccaagtgctatggaatgtccgtcttcttcacagtttattgctgatgatgacagtcccggtgacatgaaaatccagagctacttaagtgaggtaggatatacaacagttgagaaccatagtgcttgcagaatgactgacatggattgtaccagtacaaatatgtattctttagatactgaaatgccaagtgataccctagaatcatcaggcccagtggaaagtagcatgcctgaaactgaagaggatgcttacactatcagtcagtgtaataaaggtagtgctccagaacattcaagtgatgagaataactttgataatattcaaatgcagtctgaaatagttcagggttcagcggaggaaaacagattggatgattgttgcatgtctgctatctcggaggaggacgtattgatttctggacaagaagatgacataaggaatcttcccaatgatgaagaattatgtgcggaggtagaaggaccaaggaaacaaatccagagatgttttacattggaagaagctgctgatacaattctcttctgtagttccattgtccacgaccttgcatacaaggctgcgactattgcgttggaaaacaagaaggaaccaaagtttgtggactctattcgtccaactgttgcaattgttagaggatcttttgctaaggaagagagtttaccaaagctgcctcacagacgaaccccaaaccgtaaggtcaaaaggaaaagattggaaggcgaaacaactacaacggaaactacagagaaagacgttgtcgcgaatgactccccccctgtatgttctgcatcgggtattacaaggaattccgataatatgaagccgccaaagctggagtccaagtgcaactgtataattatgtaactcggtcacatccaagattgaaattcctacatgcttggttaaccccgtcatcagcagcgatggagttcagcacaatggatcttccgctagattattttgcaaaggtgcatttgctgtgttttaggtgacagaatgcactgccagctgctattcttttgtaaagtcttttcttctcttttctgcttgtaatgaggtccttgcggtttgtccaaagttgtgctgatagcctatttacttgcaacgcacgtggct

SEQ ID NO: 202206 - DNA, 876 bp, Zea Mays
ccacgcgtttctttaccctaacctttccactgctccagcgaaggcactcagcctccgccatttcttcatctccaatctccatccttccatcttccgctccctcccctgcttgcgctcggcacgcaggcgacctcggcggcgctcgggctcggtctctcagcgacggcgtcagcagattcccctcctgcctctcgccagtcccctcgccactggtcctctgcgaaccggccggtgactctgcgaaactattccagcacaggtacccaagtatggcggcaagacgcaatgttcggtactcgcctcttccttcagaggacggggatgacagcaattttattaaagaagatgttgacctccgatacacttacactccgaaatcgtcacatggagggtgatagttctcaggcatatggtctcttgttcctgggtttcctttcctttcttcctggtttctacgagactcgagttgcttactattcatggcggggagcaccagggtacacttttgcatccataccagattattagcctttcagtttgcgctgctgatgcagtaaggataatgaacaagcaaacaacttcaaactttccttgggaaccaattttagtgataaaagagttaagcatgcatatgtagtggctcaaatgattgttgtgtttataggatgttattgcttcgtcggtcagtaaaagaataattccttgtgatattgtgtaagagcaaaggttgattttgcaatttcttggtatttccttgtcaaatataacagaaattagtgccaccagtatgtgtttgtgtgatggtatctgttgatgaagatagactatgtactccatttggggctttggagtatgtatataatgtggctgcaccag

SEQ ID NO: 202207 - DNA, 6293 bp, Zea Mays
atcgaaccaagcaactatcgcttccgtcgccggcgagcctccttctccgcaaccaccgacgccgccgcgaaaggggaagcgatggggttcttggacggcttccgtcccgacacgctgctaaagcgcgtctgcaagtcgctgctcaagaagcggctgggggatctgatcctcggcgacctggacctcgatcagttcgacatccagcttggccacggcacgctgcagctcaacgacctcgctctcaacgctgagttcatcaaccgtaagttatcaggatcccctattacgctgaaagaaggatcaataaaatccttgctagtaagattcgctgctagctgcgagattgttgttgaagaattggagcttgtgctttctccatctgttgcaagtgaagttgatgatgtgcatactgaatgctctgtctctggtagtactagtgacacacacactttagtcaagatccaaagaaatgaatccgatagtaatcagtgttccacttctgtatctcgagatgtggatgatggtgtaaagagaattgccaatgccgtcaaacggtttctgacaagctttaatatcaagttaaagaatgcctatgtcatatttgatcctcaaaccagtttgagtagtagatttccagaaactagtcgatctctagttttccgaattaaagagttggaatttggaacccaacttggtctatttaaactggacaactttttaactttccgtgaggcagtcattgagtttttgaagatggatgatgtcgacacactgcttcaaaatgatctaaatagaggaacagctgacatttcagcacatcatagtactaccgcagtcttaaccggtcccattggtggattctcagggaaactcaatttaagcatcccatggaataagggttgcttgagctttgagaaaattgatgcagatgtatcagttgattcattagaattacgtttacaattcagcagcatccggtggatcatgaatgtatgggattctctccaaagaaagccagtagacgaacagagttgtgttcataatattgcagatatctctattagtgcttcgagctctgcctactgtccacctgcttcaagctctttgaagccatgttcagattctgtgatagccagtgactacatggcacagagcacattttctcaaaacaggcaggataaagttcaggattctttccttacaagcgcacacgtgataacagactggatggagcctgttgctcgtaaggatctgtgtgaccctgattcagattgtgatgaaagcattgatcagttctttgaatgttttgaggaattgaggaactcccagtcaagtttaggaaacagtggtatatgggactggacgtgttcagtattcaatgccataagttttgcatccactttagcttctggatctgatcaagttcctaaagaaccagttgtcgagaggaccttacgagcctccatcaccgagatatctgttcttcttttgttcagtgatgacacagatataaaaaattccagtgttcctatcagtgcattggatgatatgagacattctgaaatgttttcgagctgcctttcctctgagcattttgagaaatcaattatatctcctgctacagcttccagcttaaatatgcatcatctcaaagccaagtgtgagaacattcatcttgatctacagacttatccaaaaaatgtaaggctcaaggcatcaattgcccaaattaaacttgatgaatactaccacgccggaaacaatatttcagatgattcaaaccttggtaatcacttcttgaacaataacttgcggcaaggagttcaagcttccctccctcagtgcctgtttgctgttggagatcattcggtggaaacctatgaattttgtggcaatagttcaactgaattgactagagttgaattgctaaaaacttttggcgagtgcacattctgttatgatgtcagtaccaaagatcaagatggcaatttagtgagctcaacttccatgtcgatctatttggctcctttgcttttatgggtgcactttcatacaatatacatgctactgagttttgtaagtaatgttgagtctgatttgtcacatggagagcataaaattcaaaagcatggtgacgaaaagggaagcagattgactaccagcacaaccatgtcctcaagtggaagtctaaaagttcagatatccctagcacaggcaagaattgtcctgtgctttccatctgagttttcatgggatttgagccacccatctgtcctggataagttcctggtgatcgaccatacttcatgtctgaacatggtagaaactgcatcacaccctcaaaacgaaatgcaaaatgaggttcatcttagcaagtcgtgtacctcaatacatttggctgtaggggacatagatgtatatttggttaagccagtcaataatgtattggttggtagaatctgttcttcaagtaggcaaactttctctgcaatgaaaattctttctgttactggatccagttataatgactctggcatcacactgatcaggagaaagtatcctgtaactggccctgagattttgaacaatgcttggagtttgccaaagatgcatgatgaaaagatcactaaaaatcaaaacagcaaatgggctggcatttccccttcttcaaatgatcttttagagacaggatctagtatgcgccaggagctccttaagagcactgagctcttatttcatgttcaactttcttgtgtttcattacgacttagtaaaaaggattgtgagttactaaataagctgctagatcatgtcattaaggggatatcaaatgaacaaacaagcatttctggaaattccaaggaccaatctgttctgatcaatgataccttcattcaaacgtctgtcctttttgaatgcagtatattggaaatttgcactgaattgaatgaaacagtggaagttggtcctttattacaggcagaactaaaaggatcctggaactctgttaagttgaatgtttcaaaattttgtcttttctcctgttcaaatgttggaggcctcaacaatgccagttttctttgggtgaatcatggtgaaggtgagctttggggttctgttagtgctaagaatgataaaatccctggagaaagtaaagattttcttatagtggcttgcaaggactctgcctgcaggcggggtgatggtgaaggtactaatgtgctgtctattggtgctgctggctgttctgtgacccacatcaggaacccaaagctaaaagagaattacacttctgttgatgttcgttctggcacaattgtagcacctggtggccgtatggattggatcaatgcgatatgcctgctgttcagttcaggctcagatagaactgaaaagtcagatgatagtaacacaccaaatagctatcagtctggtgaaccttattcatcatctttatttatcgagttggctgatgttgctgttagctatgaacctcattttaaacattccactctcagtgctggagcagccgaccgcaagtttttctcatgccttttagctgcatcatcatttaaactccataataaatctgcatcagcctctgcagctactgattttgatatccaattacgtgatcttggagtcctcatttctcaatcatctggttcaacaaatggtacttgcagttatggtgtagattaccttcgtcaagcaggttatactaaggttgtccagaacacattcattgaagcttctctaagattagattcttccttttggaagcttgaaatatctgattcccaatttgacattggtacatgtcatgacacaacttatggtcttattggtttgggatctcaactccagcagctatatggtccagatatgcaggatgctttagatcatctgcagtctaggtggaatagtgttcagcaagcaaacaagcaaaatatggctgctgatgcatcagacaagtctgagagcagtttggagattttggtcgattctggggattaccagtcagatggacttcttgatgatattattgagaatgcttttaacacagaggattgcatggacaccaatttttgggagaacaattaccatcacttatttagtagcagtgagacggatgatggatttgagctgaatgcggccacttcacatgtatttcctatatctactccagaaggcaatgttactcaaatatcactagaacagaacgtctgtcctgatcaaatcattgattcatattgtgtgcctgaatttcatcaatcattatcaactctatgtgatgaagagcataaatgtacatctggtgacaattctcatagaaccctggaaagtgaagatgctggatgtttgaatcctgatgaatattgtaatctgaaaggaaaggttcatattcatgatatagatgtaaagtggcggatgtatgctggagatgactggttattacctcagaaagatttgactagcttaacatgcacagatggaagaaataggagctcttcactggaatttactgtgagagggctcaatatccaagttgacatgtatccaaatggggatgtttctatatctaggctatctgtagctgctgaggacataactctttgtgatcaaagtatccatgctccatggaaactggttcttggatgttacaactcaaaggattacccaagagagtcatgctccagtgcattcaggttagaattggagtctgtgaggccggagccacaggctcctttggaagactacaggctccatcttgagattttgcctctacagttgcatcttgatcaagagcaacttaacttcctaataaatttcttcaagaatgattcatgtaacaatgatcctcatttgcattgcgaaaatgatactgttgatgtgaagagcacaagcaatggaagcaatatggttgtggatgaggcattacttcctttctttcagaaatttgacgtaaagccacttattctgcacattaattatataccccgtcagtttgacccgattgccctaagcaagggaaattacgcagaacttctcaacattcttccatggaagggaattgatttgaagcttaagcatgtttctgcaatgggcatttacggatggaacagcataggtgatacggtagcagcggaatggttggaagacatttctaaaaatcaggtgcacaaattgctaaaagggcttcctccaataagatcactagttgctgttggttcagggaccagaaagttggtctcgttgcccatcaaaagctacaagaaggatcggaaattgctcaagggaatgcaaagaggcgcagttgcttttattagaagtgttaccattgaggcagtagggcttggagtccatttggctgcaggagctcatgatatgcttgtgaagacagaatgcgcccttacaactgttccaccacctttagcctcatgtgaagtgaaacgaacaaagcacaacattagagctaaccaacctgaaagtgcacagcaaggaatgaaacaggcatatgaaagtttaactgacgggtttggaagaacttcctctgctatcattggcaatcctattaaagtttataaccgaggggctggtgtcggatcagttctggctactgcaatctgtggagcaccagctgctgcagtagctccaatctcagcatctgctcgtgctttacattatgcacttcttgggctaaggaacagccttgatcctgagcataagaaggaatccatgtacaaataccagggaccctcccaagcatagacgtcattggtggtcggttcattctttggcgagccttacaccatctccctgaaactggttttaggagctcctttgccagtctcgtccaatggtgaggtgcaaacttgtacagtgtgtacagatcgtaagacagattatatttggcatcaaagccacacactaaattgacacataagggtttaattagcactcatattttgcaccacgaaggcacgtggaagttttgtaatccctcttcgttgcatgactgcccccgatgtacataatgtggttgctgtgtgggttgtgcggatgtaaattatcttcatgactgtccccaatgtacataatgtggctgctgcgtgagttgtgcggatgtaaatatctcttttgctttggttgcgtgtgcgcgcgcctctggtccgctgttcaagagtgtgttttgagctgctgctgctggtgtcatttgccgcagcccatgaacctgatcattctggctttctagtgttatcacgctaaaatatctgatatagaagttgtgc

SEQ ID NO: 202208 - DNA, 6367 bp, Zea Mays
cgaaccaagcaactatcgcttccgtcgccggcgagcctccttctccgcaaccaccgacgccgccgcgaaaggggaagcgatggggttcttggacggcttccgtcccgacacgctgctaaagcgcgtctgcaagtcgctgctcaagaagcggctgggggatctgatcctcggcgacctggacctcgatcagttcgacatccagcttggccacggcacgctgcagctcaacgacctcgctctcaacgctgagttcatcaaccgtaagttatcaggatcccctattacgctgaaagaaggatcaataaaatccttgctagtaagattcgctgctagctgcgagattgttgttgaagaattggagcttgtgctttctccatctgttgcaagtgaagttgatgatgtgcatactgaatgctctgtctctggtagtactagtgacacacacactttagtcaagatccaaagaaatgaatccgatagtaatcagtgttccacttctgtatctcgagatgtggatgatggtgtaaagagaattgccaatgccgtcaaacggtttctgacaagctttaatatcaagttaaagaatgcctatgtcatatttgatcctcaaaccagtttgagtagtagatttccagaaactagtcgatctctagttttccgaattaaagagttggaatttggaacccaacttggtctatttaaactggacaactttttaactttccgtgaggcagtcattgagtttttgaagatggatgatgtcgacacactgcttcaaaatgatctaaatagaggaacagctgacatttcagcacatcatagtactaccgcagtcttaaccggtcccattggtggattctcagggaaactcaatttaagcatcccatggaataagggttgcttgagctttgagaaaattgatgcagatgtatcagttgattcattagaattacgtttacaattcagcagcatccggtggatcatgaatgtatgggattctctccaaagaaagccagtagacgaacagagttgtgttcataatattgcagatatctctattagtgcttcgagctctgcctactgtccacctgcttcaagctctttgaagccatgttcagattctgtgatagccagtgactacatggcacagagcacattttctcaaaacaggcaggataaagttcaggattctttccttacaagcgcacacgtgataacagactggatggagcctgttgctcgtaaggatctgtgtgaccctgattcagattgtgatgaaagcattgatcagttctttgaatgttttgaggaattgaggaactcccagtcaagtttaggaaacagtggtatatgggactggacgtgttcagtattcaatgccataagttttgcatccactttagcttctggatctgatcaagttcctaaagaaccagttgtcgagaggaccttacgagcctccatcaccgagatatctgttcttcttttgttcagtgatgacacagatataaaaaattccagtgttcctatcagtgcattggatgatatgagacattctgaaatgttttcgagctgcctttcctctgagcattttgagaaatcaattatatctcctgctacagcttccagcttaaatatgcatcatctcaaagccaagtgtgagaacattcatcttgatctacagacttatccaaaaaatgtaaggctcaaggcatcaattgcccaaattaaacttgatgaatactaccacgccggaaacaatatttcagatgattcaaaccttggtaatcacttcttgaacaataacttgcggcaaggagttcaagcttccctccctcagtgcctgtttgctgttggagatcattcggtggaaacctatgaattttgtggcaatagttcaactgaattgactagagttgaattgctaaaaacttttggcgagtgcacattctgttatgatgtcagtaccaaagatcaagatggcaatttagtgagctcaacttccatgtcgatctatttggctcctttgcttttatgggtgcactttcatacaatatacatgctactgagttttgtaagtaatgttgagtctgatttgtcacatggagagcataaaattcaaaagcatggtgacgaaaagggaagcagattgactaccagcacaaccatgtcctcaagtggaagtctaaaagttcagatatccctagcacaggcaagaattgtcctgtgctttccatctgagttttcatgggatttgagccacccatctgtcctggataagttcctggtgatcgaccatacttcatgtctgaacatggtagaaactgcatcacaccctcaaaacgaaatgcaaaatgaggttcatcttagcaagtcgtgtacctcaatacatttggctgtaggggacatagatgtatatttggttaagccagtcaataatgtattggttggtagaatctgttcttcaagtaggcaaactttctctgcaatgaaaattctttctgttactggatccagttataatgactctggcatcacactgatcaggagaaagtatcctgtaactggccctgagattttgaacaatgcttggagtttgccaaagatgcatgatgaaaagatcactaaaaatcaaaacagcaaatgggctggcatttccccttcttcaaatgatcttttagagacaggatctagtatgcgccaggagctccttaagagcactgagctcttatttcatgttcaactttcttgtgtttcattacgacttagtaaaaaggattgtgagttactaaataagctgctagatcatgtcattaaggggatatcaaatgaacaaacaagcatttctggaaattccaaggaccaatctgttctgatcaatgataccttcattcaaacgtctgtcctttttgaatgcagtatattggaaatttgcactgaattgaatgaaacagtggaagttggtcctttattacaggcagaactaaaaggatcctggaactctgttaagttgaatgtttcaaaattttgtcttttctcctgttcaaatgttggaggcctcaacaatgccagttttctttgggtgaatcatggtgaaggtgagctttggggttctgttagtgctaagaatgataaaatccctggagaaagtaaagattttcttatagtggcttgcaaggactctgcctgcaggcggggtgatggtgaaggtactaatgtgctgtctattggtgctgctggctgttctgtgacccacatcaggaacccaaagctaaaagagaattacacttctgttgatgttcgttctggcacaattgtagcacctggtggccgtatggattggatcaatgcgatatgcctgctgttcagttcaggctcagatagaactgaaaagtcagatgatagtaacacaccaaatagctatcagtctggtgaaccttattcatcatctttatttatcgagttggctgatgttgctgttagctatgaacctcattttaaacattccactctcagtgctggagcagccgaccgcaagtttttctcatgccttttagctgcatcatcatttaaactccataataaatctgcatcagcctctgcagctactgattttgatatccaattacgtgatcttggagtcctcatttctcaatcatctggttcaacaaatggtacttgcagttatggtgtagattaccttcgtcaagcaggttatactaaggttgtccagaacacattcattgaagcttctctaagattagattcttccttttggaagcttgaaatatctgattcccaatttgacattggtacatgtcatgacacaacttatggtcttattggtttgggatctcaactccagcagctatatggtccagatatgcaggatgctttagatcatctgcagtctaggtggaatagtgttcagcaagcaaacaagcaaaatatggctgctgatgcatcagacaagtctgagagcagtttggagattttggtcgattctggggattaccagtcagatggacttcttgatgatattattgagaatgcttttaacacagaggattgcatggacaccaatttttgggagaacaattaccatcacttatttagtagcagtgagacggatgatggatttgagctgaatgcggccacttcacatgtatttcctatatctactccagaaggcaatgttactcaaatatcactagaacagaacgtctgtcctgatcaaatcattgattcatattgtgtgcctgaatttcatcaatcattatcaactctatgtgatgaagagcataaatgtacatctggtgacaattctcatagaaccctggaaagtgaagatgctggatggtataacaatgttcccttaacaatagttgagaatcatgttttgaaaaagaaaaacgagcaagtacttcaacacaaagtgtcttctgtttgcagtttgaatcctgatgaatattgtaatctgaaaggaaaggttcatattcatgatatagatgtaaagtggcggatgtatgctggagatgactggttattacctcagaaagatttgactagcttaacatgcacagatggaagaaataggagctcttcactggaatttactgtgagagggctcaatatccaagttgacatgtatccaaatggggatgtttctatatctaggctatctgtagctgctgaggacataactctttgtgatcaaagtatccatgctccatggaaactggttcttggatgttacaactcaaaggattacccaagagagtcatgctccagtgcattcaggttagaattggagtctgtgaggccggagccacaggctcctttggaagactacaggctccatcttgagattttgcctctacagttgcatcttgatcaagagcaacttaacttcctaataaatttcttcaagaatgattcatgtaacaatgatcctcatttgcattgcgaaaatgatactgttgatgtgaagagcacaagcaatggaagcaatatggttgtggatgaggcattacttcctttctttcagaaatttgacgtaaagccacttattctgcacattaattatataccccgtcagtttgacccgattgccctaagcaagggaaattacgcagaacttctcaacattcttccatggaagggaattgatttgaagcttaagcatgtttctgcaatgggcatttacggatggaacagcataggtgatacggtagcagcggaatggttggaagacatttctaaaaatcaggtgcacaaattgctaaaagggcttcctccaataagatcactagttgctgttggttcagggaccagaaagttggtctcgttgcccatcaaaagctacaagaaggatcggaaattgctcaagggaatgcaaagaggcgcagttgcttttattagaagtgttaccattgaggcagtagggcttggagtccatttggctgcaggagctcatgatatgcttgtgaagacagaatgcgcccttacaactgttccaccacctttagcctcatgtgaagtgaaacgaacaaagcacaacattagagctaaccaacctgaaagtgcacagcaaggaatgaaacaggcatatgaaagtttaactgacgggtttggaagaacttcctctgctatcattggcaatcctattaaagtttataaccgaggggctggtgtcggatcagttctggctactgcaatctgtggagcaccagctgctgcagtagctccaatctcagcatctgctcgtgctttacattatgcacttcttgggctaaggaacagccttgatcctgagcataagaaggaatccatgtacaaataccagggaccctcccaagcatagacgtcattggtggtcggttcattctttggcgagccttacaccatctccctgaaactggttttaggagctcctttgccagtctcgtccaatggtgaggtgtacagatcgtaagacagattatatttggcatcaaagccacacactaaattgacacataagggtttaattagcactcatattttgcaccacgaaggcacgtggaagttttgtaatccctcttcgttgcatgactgcccccgatgtacataatgtggttgctgtgtgggttgtgcggatgtaaattatcttcatgactgtccccaatgtacataatgtggctgctgcgtgagttgtgcggatgtaaatatctcttttgctttggttgcgtgtgcgcgcgcctctggtccgctgttcaagagtgtgttttgagctgctgctgctggtgtcatttgccgcagcccatgaacctgatcattctggctttctagtgttatcacgctaaaatatctgatatagaagttgtgc

SEQ ID NO: 202209 - DNA, 1462 bp, Zea Mays
attggtatcgatcctgccaagtgccgtagcccgcagccacccagagcctcttatcggcgttcccttcgttctactccgatcccctctccaagcggcacatctacatccttccagcgcaccaaatgctttggattgcgttgcttagcactaaagactagatgcccttatgcgattatatatgctcaaaagcctgtggtgatagctcaagccacatgaatgtattagatcaggtgaaagggcaagagtttcgatcagtgggcaggccgcaggcgcaaacaaacagttgacagggtagactcaaggcaatagtgaggaagtggccgatctgttgaggccgatggaggcagatagcatggtggccatgggctgcggaggtttctactggcagtcgcctccgcgcttcctccttgaacccctcgacctagccgacatcgtcgacagcatgtacgtgccgacgaacgaggctgatgagcccgtatccgggctctgctcatcgaaccggccggcggaggattactccagttcggccgagggcgccaactcctgttccgcggcggtggttccgtcgccgccgccgcctccgggcgtgacgacgacgacgacgaggaacatggacatggagaggacccgccgcaggaagctcaacgagaggctctacgcgctccggagcgtcgtgcccaacatcaccaagatggacaaggcgtccatagtcagggacgccatcgcccacatcgagcatctgcaggagcaggagcgccgactgctcgccgagatatccgttctccagtcttctgacgacggcaccgccgccgccgccgccgtcaagacggaggacgctgccgccactgggggtgctgcgtacgacgtcgacagcgtcccctggaggaagaagccgagggcggtgccactgccgtccgtgtatttcaccgacaacccgacgagctccatctcgtcatctccgccagtccgaatcctggaggtgcaggtctcgcaggcaggggagagggtggcggtggtgagcctctggtgcagcaggggcagggacgccgtgggcaagatttgcctcgcactggagccgctgcgcctccgggtcgtcacggccaccatcaccgcgcgcggcgacactgtcttccacacactgttcgtggagacaggagaaacaggtggcgctcggctaaaggaggcgatactggctgctctcgctcggctcaacgtcctcgctaacgctgaccaagtcgtccatgagttactgggatgattgatgcggtggcatcttggacagcaacacctggtgttgttgtcgttgtcagcactctcgactgtccgattcaataatgatgtacctcaggaatgtttgaatatgatatcattgccatttcttggcctgaagtacaataggagtcacattatatttacatatattacctccattcacaaatatataatactacttattttttct

SEQ ID NO: 202210 - DNA, 1298 bp, Zea Mays
cggagcctataaaacagctcgagtgagagaccagtgagtgaactcatcactcccgcttccagcttcccgcagcgagcatcaaaaggagaagagcgagagagagcagcaggcatggaaatgggcgacagcttcgagtactactgggagatgcagcagtacctggagtcagaggagctcagcctctacatgggcacccaggacgatgccctgtcctgctacgactccagctcgccggatggctccatctccaactcgtcctgggcgccggcgggcgtggcggccacggcgtccgagaagcgggagggccccggcggcgcggcggccgcgaacaagaacatcctcatggagcgcgaccgccggcgcaagctcaacgagaagctctacgcgctgcgcagcgtcgtgcccaacatcacaaagatggacaaggcgtcgatcatcaaggacgcgatcgagtacatcgagcagctacaggcggaggagcggcgggcgctgcaggcgctcgaggccggcgagggggcgcgctgcggcggccacgggcacggcgaggaggcgcgcgtggtcctgcagcagcccgccgccgccccggcgcccgtggaggtcctggagctgcgcgtgtcggaggtgggcgaccgcgtgctggtggtgaacgtgacgtgcagcaagggccgcgacgccatggcccgcgtgtgccgcgccgtcgaggagctccggctccgcgtcatcaccgccagcgtcacctccgtcgccggctgcctcatgcacaccatcttcgtcgaggtacgtcgtcggcaggtggattcggaccagacgaatcgtatccagatcaagcacatgatcgaggccgctctcgcccagctagatgatgcctccgcgagcccgccgagcgtgatgagctactattagaatcggacaaccgtcacgctgacatgcacgagccggcctagctactgtggccgaccggtactgttccgtgcgcgtatataggaactaggaagaagtgggtgctttgtttgctatatatgaggcactaggtcagggggttttgtgatggggctttatgcaactttgatgtaatggaccgaaaacgacagattgagtgttggcggctagctcccatatgtttagagtctagggaaggaataaataatcgagacaagtcttatccctgtatttttgtagagaggtatttgaaacaagaagttcatcaaatacaagggaaaaatgtcatggcgacaaatatgttagaaatctatggagttctatgtttaatttaatctgaaaatagcataatatgtgac

SEQ ID NO: 202211 - DNA, 2028 bp, Zea Mays
cggagcctataaaacagctcgagtgagagaccagtgagtgaactcatcactcccgcttccagcttcccgcagcgagcatcaaaaggagaagagcgagagagagcagcaggcatggaaatgggcgacagcttcgagtactactgggagatgcagcagtacctggagtcagaggagctcagcctctacatgggcacccaggacgatgccctgtcctgctacgactccagctcgccggatggctccatctccaactcgtcctgggcgccggcgggcgtggcggccacggcgtccgagaagcgggagggccccggcggcgcggcggccgcgaacaagaacatcctcatggagcgcgaccgccggcgcaagctcaacgagaagctctacgcgctgcgcagcgtcgtgcccaacatcacaaagatggacaaggcgtcgatcatcaaggacgcgatcgagtacatcgagcagctacaggcggaggagcggcgggcgctgcaggcgctcgaggccggcgagggggcgcgctgcggcggccacgggcacggcgaggaggcgcgcgtggtcctgcagcagcccgccgccgccccggcgcccgtggaggtcctggagctgcgcgtgtcggaggtgggcgaccgcgtgctggtggtgaacgtgacgtgcagcaagggccgcgacgccatggcccgcgtgtgccgcgccgtcgaggagctccggctccgcgtcatcaccgccagcgtcacctccgtcgccggctgcctcatgcacaccatcttcgtcgaggtacgtcgtcggcaggcaagcactagcagcagcatatatgttcgcattgtgcattgtttgcgaagcaagcacagagtgctctgctttttcttgtcaagttttcgaatgcttaggaatttaggggatgttggttttgaccgtatagtttgacattttttctcctgttcttttctttattagggcttattaagactaatttagaaactttaaaagggatttacatatttctaagagaaattagtttattttttctgggtaagattagaatctactggaagaacagtgttctcaaactagaccttagataaaaaaaaagtggagtgaataaaagatcctgtgtttcataacgaacggcacgaattgaaaagggcagcgacgagtttcctgtactgcacgacgccatggctgccctgcccctcacatgtcgatagcacgtggaaaacgatgggcacgtgttcgagccacccgcaagtcgcgccgtggctgtttccatcatgcatgaattattagtactagcactagcaggaacacaacaaatctattttccacatgcttgatagcgactggtccgagtcctacgccgtcgccgggcacaaactgcacgtgctcggctatctcgcatatgattagtgtgtgtgggttggatcggatgcgagtgactgattggcatttttagcatcgataatattttactatttttggatgaaaaaaaagagacttacaatcctgtggttttctttgccaggtggattcggaccagacgaatcgtatccagatcaagcacatgatcgaggccgctctcgcccagctagatgatgcctccgcgagcccgccgagcgtgatgagctactattagaatcggacaaccgtcacgctgacatgcacgagccggcctagctactgtggccgaccggtactgttccgtgcgcgtatataggaactaggaagaagtgggtgctttgtttgctatatatgaggcactaggtcagggggttttgtgatggggctttatgcaactttgatgtaatggaccgaaaacgacagattgagtgttggcggctagctcccatatgtttagagtctagggaaggaataaataatcgagacaagtcttatccctgtatttttgtagagaggtatttgaaacaagaagttcatcaaatacaagggaaaaatgtcatggcgacaaatatgttagaaatctatggagttctatgtttaatttaatctgaaaatagcataatatgtgac

SEQ ID NO: 202212 - DNA, 927 bp, Zea Mays
cccaggtccagtccgtccgtccgtcggcattgcatcgcattgccagagggatcgacggcagatggacaaggcgtcgatcatcaaggacgcgatcgagtacatcgagcagctacaggcggaggagcggcgggcgctgcaggcgctcgaggccggcgagggggcgcgctgcggcggccacgggcacggcgaggaggcgcgcgtggtcctgcagcagcccgccgccgccccggcgcccgtggaggtcctggagctgcgcgtgtcggaggtgggcgaccgcgtgctggtggtgaacgtgacgtgcagcaagggccgcgacgccatggcccgcgtgtgccgcgccgtcgaggagctccggctccgcgtcatcaccgccagcgtcacctccgtcgccggctgcctcatgcacaccatcttcgtcgaggtggattcggaccagacgaatcgtatccagatcaagcacatgatcgaggccgctctcgcccagctagatgatgcctccgcgagcccgccgagcgtgatgagctactattagaatcggacaaccgtcacgctgacatgcacgagccggcctagctactgtggccgaccggtactgttccgtgcgcgtatataggaactaggaagaagtgggtgctttgtttgctatatatgaggcactaggtcagggggttttgtgatggggctttatgcaactttgatgtaatggaccgaaaacgacagattgagtgttggcggctagctcccatatgtttagagtctagggaaggaataaataatcgagacaagtcttatccctgtatttttgtagagaggtatttgaaacaagaagttcatcaaatacaagggaaaaatgtcatggcgacaaatatgttagaaatctatggagttctatgtttaatttaatctgaaaatagcataatatgtgac

SEQ ID NO: 202213 - DNA, 1057 bp, Zea Mays
cagtccgtcagtgtggtggtcagagagaaaagatgaaaaaaaagaataattcattggagccgcacgtctccttccggccttccccgacgatgccgctgccgccgggaggaacggatggatcccattggcttgccaccaccactgcccgcttcggttcctattcccgctcgctacggccccagtcgcgctcctcaccggccggcaccaccccgcccgccctcgccttttgcctgccgagatttaggcctggcattctagcaatgcagaagaagtgatcttataatcataaaagataacaatggggatatccaaggtgaccggcatctctgcgacagcttttcttgtcacatctgttggtctgtaccagctcggcatgagaattattgtgcttcctttcctagccaccagtattgttgcttctgttgtcactgttgcatcccatgatgccatcaacctaccgtggatcctggggaagaactcagtgggaaggtttcctctttggtcagttatactgtttggtcctttcttgacgcttgctcggacatatgcaatggttaagagatacatgaggaaagagtccgtgtatgacaagattgtggatggcctatatcttggaggatggccctttctcttgaaacatttgccccctggaaacccatctgtcatagactgcacttgtgagcttccaagaatttccttcgttccagcagacgagtatctttgtcttgcaacttgggataccagagctccaacaccataccaaattgaaaaagctgcacgttgggcttgtggaaagagatctgaggggaagccggtttatgtccattgcgcatttggtcatggaagaagtgcttgtgtcgtgtgtgcaattctagtagcgctgggcattgctgagaactggaaagaggctgagaacatcatccgtgaaagaagaaagataaaaatgaacgcccttcacaggaaaaccttggaagagtggtccaaacaacgggattctcagaaaaaggctaagtagttcttggtccaactggctcgccatgtttgctgctgctccgag

SEQ ID NO: 202214 - DNA, 992 bp, Zea Mays
cggccagagtcaaccatgccgacggtgtcccgccaccgcgggaagacgcgcgcccaaagtcaacgatgctgtcggtgtgtcttaatcctccggtggcgatgctccctcctcatccgtgggtccggcttcggctccggctccggccccggccccctccgcttcctcgagagcaccttcggtgtcaacgtacttcgccaacgtcgcgagcttcttcaacatacagggcgccggccggcgtcgagaatatccggtgcttaggagcctgcgactgcgagcaatggggaggatgcggcgggcgagcagcggcaagaggagggaggacatcatcggggccagccgcgagagtatccaatgccctctatcgccgctccgctccacaaaaagcaccactcacaaggcgccacgaagccacatagatacagatacgccgctacttctgaatcggaggctgggttcgcagcggagcatgacaatttctggtccaaatgaagctgaacaagttaatacgactatagctacgaatggtttcagtgaggagcatagcacaagacaacactggtacaagagactataagcatgaatacgaagatggctacgtacggcaatggtggtgaaggctacgacgaaaggattgcggcgatattacggttgatgaatggcatgatgtataattttcttgatggacaaaaggatatatacacctccgatctgttttgtccattgagcagcaatctatgtaatcttatgcctaatgaacaggctaaggatgttttagacacaactactctagttggcacaatgttggattcggaagggaaacattgtaaaacgttggttgcttccttgtgtacatgttgcgcgcagcattatattatatgtctattgtttgtcatggtggcatattttgagtggctgttaaggccatcgcaaactcgatcaccacaacggcctgcgcacgccatttcgatcggccggctcccttttcgtttcgg

SEQ ID NO: 202215 - DNA, 1253 bp, Zea Mays
tctccatcccggccattactcggccacgacttgccgactacgatgccagcgccaagcctccgccgcccagctaaaaatcccccaggcgttcctgagcacccgtttatcatcacatgaccggagtcggccagaatttgccgtagctctcgcccccgctcgccgtgcgcttctcgtcccattcccccgggatcgtagattctcgagctgagctgagctgagctgagctgagcgatggatcgcgagctcagccccaggggcaatgctccagggagagggagcggcggcgcgtcgtcatcgaagcacaagaacggcggcggcggcaagaagccgatcaaggtgctttacatcgccaaccccatgcgcgtccagaccagcgccgagggtttccgcgccctcgtgcaggagctcaccggccaacacgccgatccctccaagtacagccccggcgaccttgactccggcgctgccgcacagggtctgagccccagggccagggtcgcggacgtttcgtcggaaaccatcgtcgcaagccacagccctggcagtaaggccgcgccgcacggaggggactactacgacgtcgaggaagacgaagatgacgtcttcaggtcgcctcacatgctgctggagaacaattatacggtgttctcgccgccgacgctactatatgaccatcacccgcacagcaaggctacttctgaatcggaggctgggttcgcagcggagcatgacaatttctggtccaaatgaagctgaacaagttaatacgactatagctacgaatggtttcagtgaggagcatagcacaagacaacactggtacaagagactataagcatgaatacgaagatggctacgtacggcaatggtggtgaaggctacgacgaaaggattgcggcgatattacggttgatgaatggcatgatgtataattttcttgatggacaaaaggatatatacacctccgatctgttttgtccattgagcagcaatctatgtaatcttatgcctaatgaacaggctaaggatgttttagacacaactactctagttggcacaatgttggattcggaagggaaacattgtaaaacgttggttgcttccttgtgtacatgttgcgcgcagcattatattatatgtctattgtttgtcatggtggcatattttgagtggctgttaaggccatcgcaaactcgatcaccacaacggcctgcgcacgccatttcgatcggccggctcccttttcgtttcgg

SEQ ID NO: 202216 - DNA, 609 bp, Zea Mays
gttctcgtcaccgacgctactctacgactatcactcgcacaacagggctacttctgaatcggaggctgggttcgcagcggagcatgacaatttctggtccaaatgaagctgaacaagttaatacgactatagctacgaatggtttcagtgaggagcatagcacaagacaacactggtacaagagactataagcatgaatacgaagatggctacgtacggcaatggtggtgaaggctacgacgaaaggattgcggcgatattacggttgatgaatggcatgatgtataattttcttgatggacaaaaggatatatacacctccgatctgttttgtccattgagcagcaatctatgtaatcttatgcctaatgaacaggctaaggatgttttagacacaactactctagttggcacaatgttggattcggaagggaaacattgtaaaacgttggttgcttccttgtgtacatgttgcgcgcagcattatattatatgtctattgtttgtcatggtggcatattttgagtggctgttaaggccatcgcaaactcgatcaccacaacggcctgcgcacgccatttcgatcggccggctcccttttcgtttcgg

SEQ ID NO: 202217 - DNA, 1302 bp, Zea Mays
gacatagctaggtacaggcacccagtcctgtcatgacgtaaaagcttatagaattcgatcagatggcataaatactactatgcagagggccaaaggttggtgggacgaacggaccagcaggctagcaggtcatccagaaagctttcgtgctcctccatttctaggctatagctagcctagctggggttggacgacctttcaggcacacgcatgcaagtacctgcagtcggttcataagaggaggaggaggccatatggacgacgaaggagccaagtagaaaaggcaggcaccgcaaccaacggtaaagctggtgatcgagcaagttttgtcaagagcgagctcatggaggatggcagcagtgctccaagacgggctactccccccacccgcaggagcagatctgccgacttccacaacttttcagaaaggaggagaagggacaggatcaacgagaagctgagagcgttgcaggagcttcttccaaactgcaccaagaccgacaaagtttccatgctagatgaagcgatcgactacctaaaatccctccagctacagcttcagatgctggtcatggggaaggggggaggaatggcaccggtggttcctcctgagctgcagcagtacatgcactacatcacggccgaccccgcccaccagatgatgcctccgccgctgcggccctccgccgggcagctgcagcccgccgccggccggcagtttcagataacccaagcagcagcagcagcagccaacaacgacaacgacccccagcgacgacgacagtccaacgtcgagtcggacttcttgagccagatgcagaacctgcacccctccgatcagccgcctcatcatcacaacttcctcaggccgccgagattgcagctctttacgccgaggggcggcggcggcggcctgcctaccacgagccacaacgccggctggatttccgggaggagttcctcgtataattttatggagtgacgtgtgtgctccctgatgctgccaaaattaatttgaaacaaccgttctcatcttgaactcagaagacggcgtcagcgcactctgggaccttcagctagcgtgtggtggtgtccatgcatgaatgaatgcagtagtagttatatatatattagcaagctagttgtgtcattaaataaaggaacgctgtgtgactgtgatgctgctgctgctgctcgttttgctatctgaatcgcacaccgttcaattcctccgatcctctgtgcgtgtcgatcgtacgtgttcgattcatgcaaaggctagttggcgacgtctgtgttttg

SEQ ID NO: 202218 - DNA, 1207 bp, Zea Mays
gtgggacgaacggaccagcaggctagcaggtcatccagaaagctttcgtgctcctccatttctaggctatagctagcctagctggggttggacgacctttcaggcacacgcatgcaagtacctgcagtcggttcataagaggaggaggaggccatatggacgacgaaggagccaagtagaaaaggcaggcaccgcaaccaacggtaaagctggtgatcgagcaagttttgtcaagagcgagctcatggaggatggcagcagtgctccaagacgggctactccccccacccgcaggagcagatctgccgacttccacaacttttcagaaagggtagaggagaagggacaggatcaacgagaagctgagagcgttgcaggagcttcttccaaactgcaccaagaccgacaaagtttccatgctagatgaagcgatcgactacctaaaatccctccagctacagcttcagatgctggtcatggggaaggggggaggaatggcaccggtggttcctcctgagctgcagcagtacatgcactacatcacggccgaccccgcccaccagatgatgcctccgccgctgcggccctccgccgggcagctgcagcccgccgccggccggcagtttcagataacccaagcagcagcagcagcagccaacaacgacaacgacccccagcgacgacgacagtccaacgtcgagtcggacttcttgagccagatgcagaacctgcacccctccgatcagccgcctcatcatcacaacttcctcaggccgccgagattgcagctctttacgccgaggggcggcggcggcggcctgcctaccacgagccacaacgccggctggatttccgggaggagttcctcgtataattttatggagtgacgtgtgtgctccctgatgctgccaaaattaatttgaaacaaccgttctcatcttgaactcagaagacggcgtcagcgcactctgggaccttcagctagcgtgtggtggtgtccatgcatgaatgaatgcagtagtagttatatatatattagcaagctagttgtgtcattaaataaaggaacgctgtgtgactgtgatgctgctgctgctgctcgttttgctatctgaatcgcacaccgttcaattcctccgatcctctgtgcgtgtcgatcgtacgtgttcgattcatgcaaaggctagttggcgacgtctgtgttttg

SEQ ID NO: 202219 - DNA, 1939 bp, Zea Mays
ctgtcacctaaaatctaggatatattattcccccaaaacaaacactaaccggccggcccaattctcacgcgctcgccgcctaggagcattcacgttggtggcgggcggtggctcggttcctctcctccaccgcacctccaagaatccacctccacgactaagctgacggctcggcggcgccatggcggttcaccggctccaaccttccctctctggcctacagtgctccaccgcccggtcgccagtgctcctccatgggccacggctgacgggtgcacgcaccgatggttggtgcaggcaggagaggtggatttggtggacctagattcgatgtgcagagagcgacttggaggtggctgacatcttcaagcactgcaacatgcagttacaactactgttggccatacagggaaatgctgggcctattataccaattgttcaaagcatggaccttgttatttttccagcacttgacattcgagtgaaaaatgtcgcagggacatattctcttgaacataaaggagaaaattatctcttcgcacatcagacaaggcttctactctttcagaagaaagtcattttcaagagaatcttgaacaaaatgaccagatgtttaggcctggttggaaggacatttttcgaatgaatcagagtgagctcgaggctgagattcgaaaaggtctctcgagattctactcttgatccaaggaggaaggcctatctgatccaaaatctcatgaccagccgttggatagctgctcagcagaaatcaccacaaccaagcgtcgaaggacataatggatgtacacgacgacctggatgtgttccttcgtaccgagacccagggaaacaaatatttggctgtgagcattacaaaagaaactgcaagcttgttgctgcatgctgcaataagctattcacttgcatattctgtcacgataaagttagtgaccatacaatggacaggtatcttcaccacaaccattcattttaccgtccacacctttcctgctgagggatgctttcaaggatttcattttaacatcgaaccaatatcaattaagcatggcattttatttggaaatagatgtttgtggtggtgccatggacctgtgcgtcccttgtgaaatgaattgattttttgtcattgaattttctaactgaagctttttcattcgtttgattcacttgagctcccttaagttgtattgtattatttaatcataaatgccatccttcctcttatagttatataatcaaatattagttttaatcctatctgcatggtttacaatgtattgggttgtgtcattgtgtgaagaatgtttggtggttagtctgaccacatgtgttagctgaatatgagtgccgagcagtagcatgcatataagttccactgcattcaatatttacatttttttcttatttccaggtaactcaagaggtccacttattgactcttatgaccatgtaattggtgttaatacaactacattaacacgtaaaggttggtagatctggaaggtcttgatggtctaatacctgtctatgagtacgaaagaaaaggcgggagaagtcggtctctgcagcatcgcgcgtgaaaaaaaatcagccaattccatgagcattgatgttgtcatgacttcaaggagagaccatgctaagaataatgcattatgacatttgtcaggcttacatatcgattgtttgatatggatagatgtataggtttatgaccaatccagttcaaagcaatttgagtacaaaagaaataaggagcaggaaagctctgtacatcttgcattttgctgtttttttgtcgaagtttcaatgtctgtcgcgtgacaaaatatagttgtaatttatattttggcatgcacgaaacatgtgtatttattcatttttgaacgaaattttacgtcaaatcctctattgcgtt

SEQ ID NO: 202220 - DNA, 1357 bp, Zea Mays
ctgtcacctaaaatctaggatatattattcccccaaaacaaacactaaccggccggcccaattctcacgcgctcgccgcctaggagcattcacgttggtggcgggcggtggctcggttcctctcctccaccgcacctccaagaatccacctccacgactaagctgacggctcggcggcgccatggcggttcaccggctccaaccttccctctctggcctacagtgctccaccgcccggtcgccagtgctcctccatgggccacggctgacgggtgcacgcaccggcaggagaggtggatttggtggacctagattcgatgtgcagagagcgacttggaggtggctgacatcttcaagcactgcaacatgcagttacaactactgttggccatacagggaaatgctgggcctattataccaattgttcaaagcatggaccttgttatttttccagcacttgacattcgagtgaaaaatgtcgcagggacatattctcttgaacataaaggagaaaattatctcttcgcacatcagacaaggcttctactctttcagaagaaagtcattttcaagagaatcttgaacaaaatgaccagatgtttaggcctggttggaaggacatttttcgaatgaatcagagtgagctcgaggctgagattcgaaaaggtctctcgagattctactcttgatccaaggaggaaggcctatctgatccaaaatctcatgaccagccgttggatagctgctcagcagaaatcaccacaaccaagcgtcgaaggacataatggatgtacacgacgacctggatgtgttccttcgtaccgagacccagggaaacaaatatttggctgtaactcaagaggtccacttattgactcttatgaccatgtaattggtgttaatacaactacattaacacgtaaaggttggtagatctggaaggtcttgatggtctaatacctgtctatgagtacgaaagaaaaggcgggagaagtcggtctctgcagcatcgcgcgtgaaaaaaaatcagccaattccatgagcattgatgttgtcatgacttcaaggagagaccatgctaagaataatgcattatgacatttgtcaggcttacatatcgattgtttgatatggatagatgtataggtttatgaccaatccagttcaaagcaatttgagtacaaaagaaataaggagcaggaaagctctgtacatcttgcattttgctgtttttttgtcgaagtttcaatgtctgtcgcgtgacaaaatatagttgtaatttatattttggcatgcacgaaacatgtgtatttattcatttttgaacgaaattttacgtcaaatcctctattgcgtt

SEQ ID NO: 202221 - DNA, 1255 bp, Zea Mays
ctgtcacctaaaatctaggatatattattcccccaaaacaaacactaaccggccggcccaattctcacgcgctcgccgcctaggagcattcacgttggtggcgggcggtggctcggttcctctcctccaccgcacctccaagaatccacctccacgactaagctgacggctcggcggcgccatggcggttcaccggctccaaccttccctctctggcctacagtgctccaccgcccggtcgccagtgctcctccatgggccacggctgacgggtgcacgcaccggcaggagaggtggatttggtggacctagattcgatgtgcagagagcgacttggaggttatttttccagcacttgacattcgagtgaaaaatgtcgcagggacatattctcttgaacataaaggagaaaattatctcttcgcacatcagacaaggcttctactctttcagaagaaagtcattttcaagagaatcttgaacaaaatgaccagatgtttaggcctggttggaaggacatttttcgaatgaatcagagtgagctcgaggctgagattcgaaaaggtctctcgagattctactcttgatccaaggaggaaggcctatctgatccaaaatctcatgaccagccgttggatagctgctcagcagaaatcaccacaaccaagcgtcgaaggacataatggatgtacacgacgacctggatgtgttccttcgtaccgagacccagggaaacaaatatttggctgtaactcaagaggtccacttattgactcttatgaccatgtaattggtgttaatacaactacattaacacgtaaaggttggtagatctggaaggtcttgatggtctaatacctgtctatgagtacgaaagaaaaggcgggagaagtcggtctctgcagcatcgcgcgtgaaaaaaaatcagccaattccatgagcattgatgttgtcatgacttcaaggagagaccatgctaagaataatgcattatgacatttgtcaggcttacatatcgattgtttgatatggatagatgtataggtttatgaccaatccagttcaaagcaatttgagtacaaaagaaataaggagcaggaaagctctgtacatcttgcattttgctgtttttttgtcgaagtttcaatgtctgtcgcgtgacaaaatatagttgtaatttatattttggcatgcacgaaacatgtgtatttattcatttttgaacgaaattttacgtcaaatcctctattgcgtt

SEQ ID NO: 202222 - DNA, 1358 bp, Zea Mays
ctgtcacctaaaatctaggatatattattcccccaaaacaaacactaaccggccggcccaattctcacgcgctcgccgcctaggagcattcacgttggtggcgggcggtggctcggttcctctcctccaccgcacctccaagaatccacctccacgactaagctgacggctcggcggcgccatggcggttcaccggctccaaccttccctctctggcctacagtgctccaccgcccggtcgccagtgctcctccatgggccacggctgacgggtgcacgcaccggcaggagaggtggatttggtggacctagattcgatgtgcagagagcgacttggaggttatttttccagcacttgacattcgagtgaaaaatgtcgcagggacatattctcttgaacataaaggagaaaattatctcttcgcacatcagacaaggcttctactctttcagaagaaagtcattttcaagagaatcttgaacaaaatgaccagatgtttaggcctggttggaaggacatttttcgaatgaatcagagtgagctcgaggctgagattcgaaaaggtctctcgagattctactcttgatccaaggaggaaggcctatctgatccaaaatctcatgaccagccgttggatagctgctcagcagaaatcaccacaaccaagcgtcgaaggacataatggatgtacacgacgacctggatgtgttccttcgtaccgagacccagggaaacaaatatttggctgtgagcattacaaaagaaactgcaagcttgttgctgcatgctgcaataagctattcacttgcatattctgtcacgataaagttagtgaccatacaatggacaggtaactcaagaggtccacttattgactcttatgaccatgtaattggtgttaatacaactacattaacacgtaaaggttggtagatctggaaggtcttgatggtctaatacctgtctatgagtacgaaagaaaaggcgggagaagtcggtctctgcagcatcgcgcgtgaaaaaaaatcagccaattccatgagcattgatgttgtcatgacttcaaggagagaccatgctaagaataatgcattatgacatttgtcaggcttacatatcgattgtttgatatggatagatgtataggtttatgaccaatccagttcaaagcaatttgagtacaaaagaaataaggagcaggaaagctctgtacatcttgcattttgctgtttttttgtcgaagtttcaatgtctgtcgcgtgacaaaatatagttgtaatttatattttggcatgcacgaaacatgtgtatttattcatttttgaacgaaattttacgtcaaatcctctattgcgtt

SEQ ID NO: 202223 - DNA, 1212 bp, Zea Mays
atgagaaagatattatttgttgactcaaagttatgccaccatccttttaatatgccacatcagcataaccgccttcaaaaccaccatggtggggttgtttgaatgcgatcttgcagttagaggtaccccagaaaaattattcatttgcacaaatatcttggtatggtctaaggtggattttgagtttccttcttatggaaggcatgacacactttttccactacaatgcctttgtagtaagccggctatggcagcagttatccccttttgaggttttcatcatcagttatggggtgttaaactttatgtggttgaaattctttcttatttggcgctacttccggttttggtcactggttggaggagtcgagactcctgaaaacatgccaaggtgtataaataattgccatgatctggagagtttctggaaaagctggcatgcttcttttaataaatggttggttaggtacttatacattcctcttggtggttctcaaagaaaactactgagtatctgggtgatattcacgtttgtagcagtgtggcatgatctagaatggaaacttatctcatgggcatggttgacttgcttatttttcattccagagatattggttaaatctctgtccagcaaatttcaggcaactagttcccttgggatgcttgttcaccgtgaatttaaagcaattgctggtgcagtgacaatcagctgtcttatggtggcaaatcttgttggttacgtcgtggggccatccgggattaaagttctgatatcaagaatggctgggaaggatgccctgccttcccttgccttcatatttactacgttctacgtgggcgttaagcttatgttccatatacgggatgctagcaagaaccaaggttgagggagctttaagatgatgtctccagttttgactcgcaagcaagcagatggcttcgccgtggctgaagatgatagcttcgtcttttttgtttgcatattttgtttttgttttctaaacagtgtcgagagaacatcagcgctataagcgttgacatgtgattttgcttttagaatatataaaggtaaaggctgactcattagcgtggtgaatgttgaagttgcacactgctatacgtccggttgtaaccatgatcgacgtgattcatctggctcaaatgcatatgcgaatttaatgtgttgctaaaccaactttgaaccttggtttc

SEQ ID NO: 202224 - DNA, 1668 bp, Zea Mays
gttttactggttttttaagttcagtgacctaagtgacacatcgtgccaagtttgaggaccgctactgcattttactcttttcataatggcataataacctatagtacactattgtaatataaatacttaattttaccgttagttctgtagcatcaaaatggtgtaatacaggttattatggaaatatattacactttgctacaagttatatatactatcttcaacaggggtaaaaatgtaaaatcatcttttcttatgaaagttaacaccgttagaggtcagaattaacggtagtgtcatatagtgaaccaaatttacgtctaatgtcaaataggtaaaatttatattttgagggccaagaaaggaaccatgaactttactagtgtcaaataagaaattgtctccaaggaatcaggcctctcatgagaagatattggaagaagacttactaaggaatggaaagagggctcagtcttgacagatatacatttcttatgtatttatgctacttgacatatgctccagtgtatattgctggacctattgttggatacaatgcatttgctgctcagttagaggtaccccagaaaaattattcatttgcacaaatatcttggtatggtctaaggtggattttgagtttccttcttatggaaggcatgacacactttttccactacaatgcctttgtagtaagccggctatggcagcagttatccccttttgaggttttcatcatcagttatggggtgttaaactttatgtggttgaaattctttcttatttggcgctacttccggttttggtcactggttggaggagtcgagactcctgaaaacatgccaaggtgtataaataattgccatgatctggagagtttctggaaaagctggcatgcttcttttaataaatggttggttaggtacttatacattcctcttggtggttctcaaagaaaactactgagtatctgggtgatattcacgtttgtagcagtgtggcatgatctagaatggaaacttatctcatgggcatggttgacttgcttatttttcattccagagatattggttaaatctctgtccagcaaatttcaggcaactagttcccttgggatgcttgttcaccgtgaatttaaagcaattgctggtgcagtgacaatcagctgtcttatggtggcaaatcttgttggttacgtcgtggggccatccgggattaaagttctgatatcaagaatggctgggaaggatgccctgccttcccttgccttcatatttactacgttctacgtgggcgttaagcttatgttccatatacgggatgctagcaagaaccaaggttgagggagctttaagatgatgtctccagttttgactcgcaagcaagcagatggcttcgccgtggctgaagatgatagcttcgtcttttttgtttgcatattttgtttttgttttctaaacagtgtcgagagaacatcagcgctataagcgttgacatgtgattttgcttttagaatatataaaggtaaaggctgactcattagcgtggtgaatgttgaagttgcacactgctatacgtccggttgtaaccatgatcgacgtgattcatctggctcaaatgcatatgcgaatttaatgtgttgctaaaccaactttgaaccttggtttc

SEQ ID NO: 202225 - DNA, 2148 bp, Zea Mays
gccttctaggcttccactctcaccgcagtcgccggtgtcgcctccgcctggatcgtccgccactgccagctgccattccgcctcggatctgagtcgccttgctgcctctgcgcccggacacagccgcgcattccccaccggctcgccgagcaggggccctgctcccacgctgctcactctccccaatttcccacgcacgcctagcgaggtcgggggttgaggtctggcggagatgggcggcgtgccctggaaccgggtggaacttacgctgctcgtactctacgcgctgggcttctacctcgtcgtgatctggaggtcgcttcgcctctcgcacgaatattccgggaggctctacggactacgcgtgggatcacttgcgggtcatctgaatgacctgtcggatgcgcaatggagaaacttccgcgggaacttgccaattctgactgttgtaatgggagcatttctgattctggtcaatacgttgagatattgctatggcctgaaaggtcgaggtactgctttgttgtggctcatactgtctttgagctatttatgctatcttcacggtgcttgtgttgtttttgttcttttaattgcactgattaattactcaatagtgaagctatttgctcattataagtattgcacaagtctcatttggagcttcaacttatctgttcttattcttaaccgagtttatgaaggatattcattctcattgttcggtcaaaatatggcttttctagacaactatcggggtacattcaggtggcacatatgcttcaattttgttgtattacggatgattagctttggatgtgattactgctggacaattcattcttctcattttgacttcaagaaacatatgcaaagatgtcaggtttgttattctggaaagacatgctactttgctttgcaggaaagagggctcagtcttgacagatatacatttcttatgtatttatgctacttgacatatgctccagtgtatattgctggacctattgttggatacaatgcatttgctgctcagcgatcttgcagttagaggtaccccagaaaaattattcatttgcacaaatatcttggtatggtctaaggtggattttgagtttccttcttatggaaggcatgacacactttttccactacaatgcctttgtagtaagccggctatggcagcagttatccccttttgaggttttcatcatcagttatgggtacaggtgttaaactttatgtggttgaaattctttcttatttggcgctacttccggttttggtcactggttggaggagtcgagactcctgaaaacatgccaaggtgtataaataattgccatgatctggagagtttctggaaaagctggcatgcttcttttaataaatggttggttaggtacttatacattcctcttggtggttctcaaagaaaactactgagtatctgggtgatattcacgtttgtagcagtgtggcatgatctagaatggaaacttatctcatgggcatggttgacttgcttatttttcattccagagatattggttaaatctctgtccagcaaatttcaggcaactagttcccttgggatgcttgttcaccgtgaatttaaagcaattgctggtgcagtgacaatcagctgtcttatggtggcaaatcttgttggttacgtcgtggggccatccgggattaaagttctgatatcaagaatggctgggaaggatgccctgccttcccttgccttcatatttactacgttctacgtgggcgttaagcttatgttccatatacgggatgctagcaagaaccaaggttgagggagctttaagatgatgtctccagttttgactcgcaagcaagcagatggcttcgccgtggctgaagatgatagcttcgtcttttttgtttgcatattttgtttttgttttctaaacagtgtcgagagaacatcagcgctataagcgttgacatgtgattttgcttttagaatatataaaggtaaaggctgactcattagcgtggtgaatgttgaagttgcacactgctatacgtccggttgtaaccatgatcgacgtgattcatctggctcaaatgcatatgcgaatttaatgtgttgctaaaccaactttgaaccttggtttc

SEQ ID NO: 202226 - DNA, 4549 bp, Zea Mays
agcgagagaagttctcggagagagaaactaagcgagcgagataaaagaagcgaaacgcgggcagctgttgctgaggcgtggagacggaggcggcggcgcggccgaaccctagccgacggcggcgcgtttgaggcgggaccctctgcaggcgacgcctggcggccggattcgagctgccggcgtcggcagcttcagatcggcggtcgcgccgacggaatcggcggggatcccggcgggatgggcgcggcgaggcccgtgctctggtcgtgagtttgcttggttcgtgggttctggctctgggctcccgagcaaggttttgagctcggtgtagccgcttgcttgctgagttgctgctgtcgctttttgggcggtttgaagcgggtttttgcggggggtttgggagggatctgccgggaaggcccgaggtttaggccggtttttgagagctggaggctccggccgggatcgggggagccatgtcgtctcttagcagggagctggttttcctcatcctgcagttcctcgacgaggagaagttcaaagagacggtccacaagttggagcaggagtcgggcttctacttcaacatgaagcacttcgaggacctcgtgcagggcggcgagtgggacgaggtggagaagtacctcagcggcttcaccaaggtggaggacaaccgctactccatgaagatcttctttgagatccgcaagcaaaagtacctcgaggcccttgataggcatgacagagccaaggctgtggagattctcgtgaaggatcttaaggtattcgcctccttcaatgaggagctgttcaaggagataacgcagctgctgaccttggagaatttcaggcaaaatgagcagctgtccaagtatggggacacaaagtcagcccggaatatcatgcttttggagctcaaaaagctcattgaagcaaaccctctgttccgggacaagctgaatttcccaccattcaaagcttccagacttcgcacattgatcaatcaaagtctgaactggcaacatcagctttgcaagaaccccagaccaaaccctgacatcaagacactcttcactgatcactcttgtgctgctcctaccaatggagcaagagcacctccacctgccaatggtccacttggatccatccctaagtcagctggatttccaccaatgggtgctcatgctccatttcaacctgtggtgtcgccatctccaaacgcaattgcaggttggatgacaaatgccaacccctctttgcctcatgctgctgttgcacaagggccacctggtctcgttcaggctccaaacacagcggcatttctaaagcatcctagaacccctacaagtgcacctggtattgattaccaatctgcagattcagaacatctcatgaaaagaatgcgggttggacaaccagatgaggtatctttctctggtgcaagccatcctgccaatatgtacacacaagaagaccttcccaaacaagtttctcgtacccttaatcagggttctaatgttatgagcctggatttccaccccgttcaacaaaccattcttttagtttcctgacctaaacagttggaacaaatgttggtgacattgcggtgtgggaagttggttcacgggaaaggatagctcacaagactttcaaagtttgggatattggttcctgtaccttgcctttgcaggcttcgctgatgaaagatgctgcagtatctgtcaatagatgtctgtggagccctgatggaactattctaggtgttgctttctcgaagcatattgttcagacatatacttttgtacctaatggagatttacggcagcaagcagagattgacgcacacatcggtggggttaatgatatagccttctctcaccctaataaaactctatctatcatcacatgtggtgatgataaactcatcaaggtgtgggatgctcaaacaggacagaagcagtacacatttgaaggacatgaagctcctgtgtattctgtatgccctcactacaaggagtccattcagtttatcttctctactgccattgatggaaaaatcaaggcatggttgtatgattgcttgggctcaagagttgactatgatgctcctggacattggtgtactaccatggcttacagtgctgatgggacaagattattctcttgtggtactagtaaagaaggtgattcacacttggttgagtggaatgaaactgaaggggcaattaagaggacatacaatggcttcaggaaacgttcactcggtgttgttcagtttgacacaactaggaatcgcttcttggctgctggagatgaatttcttgttaaattctgggatatggataacaataacatactaacaacaacagactgtgacggtggactgccagcaagccctcgtttgagattcaatagagaaggttcattacttgcagttaccacaagtgataatggaataaaaatacttgccaacactgatggacaacgcttgcttaggatgcttgagagtagagcatttgagggctctagaggacctcctcaacaaataaacaccaagcctccaattgtcgcccttggtcctgtttcaaatgtcagcagtcctatagcagtaaatgccgagcgacctgatcggatcttgcctgcagtgtcgacaagtggcttggcacctatggatgctagcagaactccagatgttaagccaagaataacagatgaatccgaaaaggtcaaaacctggaagttggctgacattgttgataatggacatcttcgagctctgcatttgacagacacagacactaatccaagcaaaattgtccgtttgttatatacaaataatggggttgcactcttggctcttggctccaatgctgttcataagttgtggaaatggcaacggagcgacagaaatcctagcggcaagtctactgcatctgttgcacctcacctgtggcaacctgcaaatgggattctgatgacaaatgacacgaatgatggcaacccagaagaagcaaccgcctgcattgcattgtccaaaaatgactcctatgttatgtctgcatctggtggcaaagtctcgttgttcaatatgatgacatttaaggtcatgactactttcatggcacctccacctgctgcaactttccttgcattccacccacaagataataatatcatcgccattggaatggaggactctaccatccaaatctacaatgtccgcattgatgatgtcaaaagtaagctcaagggacatcagaagaagattacggggctggccttttctcaatcaatgaatgtgctagtatcatcaggtgctgatgctcagctatgtgtgtggagtattgatggctgggaaaaaaagaaatcaagatatatccaacccccagcaaaccgacctggcactttggttggtgacacaagggtgcagtttcacaatgaccaaacacatcttttggtcgtccatgagagccagttgggaatctatgatgggaatcttgactgtttgcgcttgtggtctccaagagatgcactcccagctccgatatcgagtgcgatatactcgtgcgacggtctcttggtttacgctgggttctgcgatggtgctatcggagtcttcgaagcagaatctcttaggctgcgctgccggattgctccttccgcttacattccaccttcaatactagcctgtgctggacgggtctacccgttggtagtcgctgcgcaccccatggagcctaaccagatcgcgatcggcatgagcgacggcaaggtccatgtggtggagccattagacggggacccgaagtggggatcggcacctccacaggacaatggagcgcacccgcacccgcatccagcgatatcagcggcaccgtcgaccgccaccaaccaggcatctgatcagccaacaaggtgactctggcctgcagcactggaggagattcgttagcgcagagactggtaggacctgtaggagatagggagaaagggtaaacgattagatgacgagaggatgatgctatatttatcaagtccgcagcgcctctcttgtggtggcccgcgacacaggtggggtgattgacagtgacatcgctcgctctaagttaggttttggttcttccctggcccccggaaatcatcacctggcgccgccacattcgaatggagatggatctgctggcatcatcttgcttcctcttttgtaaagcttttcctgctgagtttagtggtaccttagattgtcgtccatttctgccctgttctccgggcagctatttgtagtgtaaaaatatggtggcgtgctggatggtgttatttatgcgtgcgtggcctgtcatgacgaattccaccatgtttggggctatttgatggatgtttactgatcatggctcgaattttttttttcttcgtgccatttgcaattgtagaccgtggacgcggtgtgagttgatgagatttgctggtgagctgtttctggatgtgagtttgtcggtgtctttgtacttcggaccatggccggccatcccgacctaataactctcttcca

SEQ ID NO: 202227 - DNA, 4352 bp, Zea Mays
gaaaaaccccgaaacgggtgaggagaaaacagagagcgagagaagttctcggagagagaaactaagcgagcgagataaaagaagcgaaacgcgggcagctgttgctgaggcgtggagacggaggcggcggcgcggccgaaccctagccgacggcggcgcgtttgaggcgggaccctctgcaggcgacgcctggcggccggattcgagctgccggcgtcggcagcttcagatcggcggtcgcgccgacggaatcggcggggatcccggcgggatgggcgcggcgaggcccgtgctctggtcgtgagtttgcttgggagctggttttcctcatcctgcagttcctcgacgaggagaagttcaaagagacggtccacaagttggagcaggagtcgggcttctacttcaacatgaagcacttcgaggacctcgtgcagggcggcgagtgggacgaggtggagaagtacctcagcggcttcaccaaggtggaggacaaccgctactccatgaagatcttctttgagatccgcaagcaaaagtacctcgaggcccttgataggcatgacagagccaaggctgtggagattctcgtgaaggatcttaaggtattcgcctccttcaatgaggagctgttcaaggagataacgcagctgctgaccttggagaatttcaggcaaaatgagcagctgtccaagtatggggacacaaagtcagcccggaatatcatgcttttggagctcaaaaagctcattgaagcaaaccctctgttccgggacaagctgaatttcccaccattcaaagcttccagacttcgcacattgatcaatcaaagtctgaactggcaacatcagctttgcaagaaccccagaccaaaccctgacatcaagacactcttcactgatcactcttgtgctgctcctaccaatggagcaagagcacctccacctgccaatggtccacttggatccatccctaagtcagctggatttccaccaatgggtgctcatgctccatttcaacctgtggtgtcgccatctccaaacgcaattgcaggttggatgacaaatgccaacccctctttgcctcatgctgctgttgcacaagggccacctggtctcgttcaggctccaaacacagcggcatttctaaagcatcctagaacccctacaagtgcacctggtattgattaccaatctgcagattcagaacatctcatgaaaagaatgcgggttggacaaccagatgaggtatctttctctggtgcaagccatcctgccaatatgtacacacaagaagaccttcccaaacaagtttctcgtacccttaatcagggttctaatgttatgagcctggatttccaccccgttcaacaaaccattcttttagttggaacaaatgttggtgacattgcggtgtgggaagttggttcacgggaaaggatagctcacaagactttcaaagtttgggatattggttcctgtaccttgcctttgcaggcttcgctgatgaaagatgctgcagtatctgtcaatagatgtctgtggagccctgatggaactattctaggtgttgctttctcgaagcatattgttcagacatatacttttgtacctaatggagatttacggcagcaagcagagattgacgcacacatcggtggggttaatgatatagccttctctcaccctaataaaactctatctatcatcacatgtggtgatgataaactcatcaaggtgtgggatgctcaaacaggacagaagcagtacacatttgaaggacatgaagctcctgtgtattctgtatgccctcactacaaggagtccattcagtttatcttctctactgccattgatggaaaaatcaaggcatggttgtatgattgcttgggctcaagagttgactatgatgctcctggacattggtgtactaccatggcttacagtgctgatgggacaagattattctcttgtggtactagtaaagaaggtgattcacacttggttgagtggaatgaaactgaaggggcaattaagaggacatacaatggcttcaggaaacgttcactcggtgttgttcagtttgacacaactaggaatcgcttcttggctgctggagatgaatttcttgttaaattctgggatatggataacaataacatactaacaacaacagactgtgacggtggactgccagcaagccctcgtttgagattcaatagagaaggttcattacttgcagttaccacaagtgataatggaataaaaatacttgccaacactgatggacaacgcttgcttaggatgcttgagagtagagcatttgagggctctagaggacctcctcaacaaataaacaccaagcctccaattgtcgcccttggtcctgtttcaaatgtcagcagtcctatagcagtaaatgccgagcgacctgatcggatcttgcctgcagtgtcgacaagtggcttggcacctatggatgctagcagaactccagatgttaagccaagaataacagatgaatccgaaaaggtcaaaacctggaagttggctgacattgttgataatggacatcttcgagctctgcatttgacagacacagacactaatccaagcaaaattgtccgtttgttatatacaaataatggggttgcactcttggctcttggctccaatgctgttcataagttgtggaaatggcaacggagcgacagaaatcctagcggcaagtctactgcatctgttgcacctcacctgtggcaacctgcaaatgggattctgatgacaaatgacacgaatgatggcaacccagaagaagcaaccgcctgcattgcattgtccaaaaatgactcctatgttatgtctgcatctggtggcaaagtctcgttgttcaatatgatgacatttaaggtcatgactactttcatggcacctccacctgctgcaactttccttgcattccacccacaagataataatatcatcgccattggaatggaggactctaccatccaaatctacaatgtccgcattgatgatgtcaaaagtaagctcaagggacatcagaagaagattacggggctggccttttctcaatcaatgaatgtgctagtatcatcaggtgctgatgctcagctatgtgtgtggagtattgatggctgggaaaaaaagaaatcaagatatatccaacccccagcaaaccgacctggcactttggttggtgacacaagggtgcagtttcacaatgaccaaacacatcttttggtcgtccatgagagccagttgggaatctatgatgggaatcttgactgtttgcgcttgtggtctccaagagatgcactcccagctccgatatcgagtgcgatatactcgtgcgacggtctcttggtttacgctgggttctgcgatggtgctatcggagtcttcgaagcagaatctcttaggctgcgctgccggattgctccttccgcttacattccaccttcaatactagcctgtgctggacgggtctacccgttggtagtcgctgcgcaccccatggagcctaaccagatcgcgatcggcatgagcgacggcaaggtccatgtggtggagccattagacggggacccgaagtggggatcggcacctccacaggacaatggagcgcacccgcacccgcatccagcgatatcagcggcaccgtcgaccgccaccaaccaggcatctgatcagccaacaaggtgactctggcctgcagcactggaggagattcgttagcgcagagactggtaggacctgtaggagatagggagaaagggtaaacgattagatgacgagaggatgatgctatatttatcaagtccgcagcgcctctcttgtggtggcccgcgacacaggtggggtgattgacagtgacatcgctcgctctaagttaggttttggttcttccctggcccccggaaatcatcacctggcgccgccacattcgaatggagatggatctgctggcatcatcttgcttcctcttttgtaaagcttttcctgctgagtttagtggtaccttagattgtcgtccatttctgccctgttctccgggcagctatttgtagtgtaaaaatatggtggcgtgctggatggtgttatttatgcgtgcgtggcctgtcatgacgaattccaccatgtttggggctatttgatggatgtttactgatcatggctcgaattttttttttcttcgtgccatttgcaattgtagaccgtggacgcggtgtgagttgatgagatttgctggtgagctgtttctggatgtgagtttgtcggtgtctttgtacttcggaccatggccggccatcccgacctaataactctcttcca

SEQ ID NO: 202228 - DNA, 1058 bp, Zea Mays
tgacttgagcaaagctgacgaagtttcctggtttagaaacttcttctctgctggacatgctaataaatgcagagtgtgcacttcttctgtggggattctacaggattttatctggtgatcctggtattgttgcttgtgattcttcatatttggaagaagctggctgcaaggattttgtggaagctatatactcgagtgagaaactcccaatgctctcaagggtcaggcagtgtacctggtgcaaagcaaacattaggggctatgaccatcattgtcctgcatttggtacttgcataggacagaaaaatcatcgtctatttatggcccttttgacaggatttgttgttgctgaatcaacatatacgatgtgctcaacaaaatatattaccagatgcatcagttcagggactataagatcggagaatcctgtatctttaaacatagtaatcagtacaacgctcttctctatcctccaggtcctctggcagattgtattcttgatgtggcacatatattgcatctgcttcaacatcaagacagatgagtggattaactggaagaaatatcctgaattccagatgaaggaacaacctcgatcagattctgaagtcaaatttgtgaacccatatgacaagggcatgctgtgtaacataagagaatttctaaagccggaatgatagatagccaattttgagtacgaagacctggaactagaaagatgggaagtctgaagtgcgttataactggatggaagcttgtttccttgttggctatagattttcaggaatctattctgatgttgtagccgtttagttgagattccagatttatgacagcgaatctggttcagtaaactgaaccaaacacactctgaggatcattgaactccctgtagtttaatgtgcaagtaacattcttttgtaaggttactttcacttatggaattcatatcgtggtcctgcatttttcaccgtttggtctgacgttctgtgggaaaagggtcgcacctgtagggatttgaaataatttgaagggaattgccgtgcttttgtctatga

SEQ ID NO: 202229 - DNA, 1998 bp, Zea Mays
gaaaaaatggcttcttggccagagaacgagagaacgagagaaccaaagagacaaggggggaggaccccttgctgttgttcgtttgcatgcagggatcggcacgagggtgctcgcccactctcgcgtcgatccggcaatttccatggggctgctgagctccgccaacagatgcggctgcaagaacatcctgagctgcaacctactaaggtgcgcgtgctgctgctcgtggatccgctccgtctgcggcggcaggacgacgacgagcaataaggcggccgcgcagcaggaggcgtcggacgcggagaggaaggcgaagaggaagttggcccgtggcttgtgcggcggagcggtgcgagaggcggaggagcccctgacgtcggaggcgaagaagaagaggacgaacacggcggcgacgatccccgagccgcagaagtgcaagtggacgaagaaggcgcggaagaaaaagaagacgaagaatgagcagaacgggctggcagccctagtggaggagatctcgctctcgaacagtcccaagcacagggcagcagcaggggagatactgcggatcggcaaccacaacatccccagcagggtgtttacgttccgtgaactggtggacgccaccaactctttctgcccagaaaacctgctgggcgagggcggcttcgggagggtgtacaagggatgcattccagacaccatggaagtcatagcggttaagcagctcgacaaagatgggctgcaaggtaaccgtgagttcctcgtcgaggtgctgatgcttagcctgctgcaccatccaaacctagtcaccttggtcgggtacagcacagactgtgaccagaggatcctagtgtacgagtacatgtcactcggttcactgcaagaccatctcctcgatctcagtccgaaatcccagccactttcctggcacacacggatgaagatcgcagtgggtgcagctagaggcatcgagtacttgcacgaggtagccaacccgccagtgatctaccgcgatctcaaggcatccaacatcctcttggacgcaagcttcaacgcgaagctgtcggacttcggtctggccaagcttggtccgagcggcgacaacacccatgtcagcacaagggtgatgggcacgtacggctactgcgctccagagtacgccatgactggcaagctgaccaagacatctgacatctatagctttggcgtggttctcttggagctcatcactgggaggcgagcgatcgacaccacgaaaccaactcgggagcagatccttgttcactgggcagcaccattcttcagggataagaggaagtttgtgaagatggccgacccattgcttgacatgaagtttcctctgaaaggtctgtaccaagcactcgcgatctcatccatgtgcttgcaagaagaagcaagcagtaggccgctgatcagcgatgtcgtgaccgcccttacatttcttgctgatccaaactatgaccctccggatgacatcaaggatcctctgcccataacagttccaaacctagacatggaaacaactggccaaaacggaacagaaggaggtaaagaacaattgcagcaaaacgaaggagaaagccgccattccacaaaaaacgaagaagaaggtagctgaaatgtggctttctctggaattacgaaatgttaaatcaagccagagctagctccttgaatgaaactaacaggtggacgtggtttggttaggtgtaatcaatttctcaacattcttgaaaccggtgtatgtcatataggcaaagatgtaatatcagctcattttcttgaatgaaactagcgtgtgcagtttggttaggcacaatcaatttttcaacatatcataagagataccttagggctccacgaaataaaatactcatggctcgcccgatttgtgatcgtttgaatttttttatgctcacgaactcaaacgagccatcctatatttcagcaaatggaaactatatgtatatcatttac

SEQ ID NO: 202230 - DNA, 1006 bp, Zea Mays
gttgtgactccttgcgggctgcgagcctgcgagaccgaatcgatctgcatcgccccgccccgccccgccccgtgcgccaatgttcctgcggcggctgagaacgtccgccgccgtccgccggggcgcgaccgacggcgcagtcctggccgccgtccgcgccgagctggccctcgagctctcctcctcggctccccctccattccgttccgagctggcgcccgacttcgacaccgtgtctgacgccccgcgcgcgcaggacgtgctcctgcgccgccgggacgggtccgaggaggtcctcgtgtcggcgctgctcgccccgctgcggttcgtgggccgagacccgctgcccagggccgcgctcgtcaaggtcttcgtcagtaagcctggcgcggcgcccgtcctgcacttcgactgccgtgcgtcttgggtgggggaggaggagcgcggcggcggcgctgctgactacgctatcaacgctgtccggtaccactcctctcctggcgccggtggagcagacgagtacgaagggccggcgttcagatcatggtatgccggttcaccaaggaatcataaacgatagatctggatcctcggctacaggctgctttacgagagtatctggtagcgagaggcttcaactccaagctggcaagttcgattcttcaacacctccttcagaaggagcgcaaccagtatgtgaattggctgaagactttggaagaggcgttcgccaaacatcactgacccaatgaaacgattagtggatccttctacatagcctggatttggcactctactatccttcagtgcctcccattggaaaaatccggccagagtgtaaaccttctacgtctattttccatgaccaaagctgtcgtgttctttcccatttaacactagaggtattcgatgactgcgatacagttttgcagagagctcggccaagactcctaaagtttaccgacagaaggaaatacggacaattatcttcataactagcggcaga

SEQ ID NO: 202231 - DNA, 387 bp, Zea Mays
caacccatttgggtcggaggcccattcgtctccgaaatccagagtgggacctgagcgtaaatagaacccgagcccctctccgcctccctccccgccgcacagcctccacagcccgaaaccctcgccgccgatcggtttcggagaagagaagcaaatcaagatgtttctcggctcgctcccgcggcgcccgagcaaggaggctgcgtacaagcagctgcggtcgcacatcatcatcatggcctcctgcgccgccgtcatccgcgccaccccttacatcctccatttcctcgcccgcgacggcgacatccaggaactcaagctcgatctgtaggcccgtccgttgcttccccacctccagaggttaacggtaaacacactacttacaag

SEQ ID NO: 202232 - DNA, 2967 bp, Zea Mays
tgctaataattctagcacaagcggcggtggcggtgggcatatgcatgcatggcccccgttatctgactggccggccgctccgattattcggtccgtgcgcgcttctcctcccgctagcgtacgtcctcccccaccccggaccgcctcaacgacggccggccgtgcggaagggagaggcgtggccattgcattgcccctcgtcaataatggcgcggcagatgcacgcgcgcacgcacgtcgccgttgctcccagcgttcagaggtcgttaggttttcatttgtaactccacaccgtgttagggcgatctggaggtgaatcgctgaaaaagtagcagaaacagcagccgcacacaggtgtccgccatgggttcctgtacctccaagtccgcgcttgatcacaggaggccggcgaggtactacaccagggggcggcgagtccacagccgccggtccatcatgccggaggcgccccagtcgcagcagctgggcgatgccagcagaggccgcatgaccggcttctccatgagcgagatcgtgcacgtggagacggccaaccggggcaagtcggagcactccaagacgttccacctcacgcagatggaatggcaccacagccagagggactctaaagggtgcagcaacgaagacgcctggttcgattctgtcagcatcctcgaagatgattctgacgacgaattcaagagcgtcgatggagacagcgacgaagacgaagagcaggcggagaagcagcaatacgcgagcgtgtccagcttcgccgacgcgctctctcgcatcggagacatatgccgcggcgtgcctttacccgacatccttgcgctgaaaggcgacggacgtcggagccagcagagcatgccgtcctccttcggcctcaaggcggtcctcatcaaggacaagagcgacgccgcagacgacgacgacgacgacggcgacggcggtggcggcaaggagacctccacgccgtcccgcctgcgcaagctgctgcagtccatcagcttcaacgagagggtgcagcagctgacgggcggcagccccgcgaagaagaagtccaccgtcattcgcctctcgtacaagacgacgtcgtcgtgcggcggggacgactacgaggacggcggcggcggcggaggcggcgaatgcggtagatctaagaagtacgttgttcgtccgaaggtagggcagacagtcccgtgcggaggagagaggccggcgacgggatgctggtcgcggatggacccgtccctcttcaagctcaggagcgacaccttcctaaaagacaagaagaaatgcgcggctccaaactacgctgcctactatccgataggcgttgacctgtttgcctgccccaagaaggtccatcacatcgcccagcacctggaccttccgcagatcaagacgcaccccaagatcccgtcgctcctcatcgtgaacatccagcgacggggaaggcttgagcctggtcctgtacttcagggtgtccgaatgctacgacaaggaggtttccgaacatttcaaggagtctatgatgaggtttttcgaggacgaaaccgagaaggtgaaagggttcacgtcagaatccactgtgagctacagagatcggctgaagatcatggccggcctggtcaacccggacgacctccagctgggctctacggagagaaagctcgtccaggcgtacaacgagaagccagtcctctcgcggccccagcacagcttctacgagggagaggactaccttgaggtggaccttgacatccaccggttcagctacattgctaggaaggggctggactcgttcagggcacgcctcaagaacggcatcctcgatctggggttaacgatccaggcccagaagcagtcggagctccctgagcaggtcctctgctgcgtcaggctgaacaagatcgatttcactgaccaagaagttccaacaatagtcaccgttgatgacaactgacgcatttgatcaaaatggtcatcacacgtgcgagctattattaactgctgcaaggctagatccatgggattcagaggcgacacaacaactgatgactccacgccttggtttctgcctaatatgttcgccgatctgcctacttttaagcacgggctttttcttgtcttccctgtaactataatataataatgtatattatatacaagacgatacaaccctgcgggtgttggtcatgttcctaacctttttgcacactccacttgctggttgcaatatgcctgcttccagatgcagaaagacattgaacctgacaatattcaaatgcccatgcatcagacggacatgtacatccataataggattttgacagaaattgcggcgggtgcgcctgttgtaagcttttgttccggacattccggtattaaaagcaaaggtaacctgtttccggaaaagcgaaacaaaataaaggatccagacaaatcagtagccatacatacctcgacgagacacagattatcatcagcaactgtacctttatatatcctgtagaaataacatttacgaagaacaggaaggaagccgtgtatctacaaaccatgtctcatttacaggtttttaatcgagtatatacacttgggcaggtgaaagttgtcatctactatagttctccaggggaacgactgttggcatttacaaccaatggccttaatgacaacataatatacgccacgcagccagcagggtgcatagaagaagctgaggatgtgttttgtaagtctgccattctgcgactactggatgctgaactctggaccctgtgtgctacgctggtggaacatgacccattggcattggcagcggcatggctactgttcctggctgctggaacatcatggctgtgcttcccttcgtacgttgttatgatggcatttgggtcttgggatgatctttcaatatgcttcttcacatcgcacccttgatacgtgcatttgtag

SEQ ID NO: 202233 - DNA, 2168 bp, Zea Mays
cctcctctgtaggtctgctttttttttctttcttggattcaacctggtcgttaggttttcatttgtaactccacaccgtgttagggcgatctggaggtgaatcgctgaaaaagtagcagaaacagcagccgcacacaggtgtccgccatgggttcctgtacctccaagtccgcgcttgatcacaggaggccggcgaggtactacaccagggggcggcgagtccacagccgccggtccatcatgccggaggcgccccagtcgcagcagctgggcgatgccagcagaggccgcatgaccggcttctccatgagcgagatcgtgcacgtggagacggccaaccggggcaagtcggagcactccaagacgttccacctcacgcagatggaatggcaccacagccagagggactctaaagggtgcagcaacgaagacgcctggttcgattctgtcagcatcctcgaagatgattctgacgacgaattcaagagcgtcgatggagacagcgacgaagacgaagagcaggcggagaagcagcaatacgcgagcgtgtccagcttcgccgacgcgctctctcgcatcggagacatatgccgcggcgtgcctttacccgacatccttgcgctgaaaggcgacggacgtcggagccagcagagcatgccgtcctccttcggcctcaaggcggtcctcatcaaggacaagagcgacgccgcagacgacgacgacgacgacggcgacggcggtggcggcaaggagacctccacgccgtcccgcctgcgcaagctgctgcagtccatcagcttcaacgagagggtgcagcagctgacgggcggcagccccgcgaagaagaagtccaccgtcattcgcctctcgtacaagacgacgtcgtcgtgcggcggggacgactacgaggacggcggcggcggcggaggcggcgaatgcggtagatctaagaagtacgttgttcgtccgaaggtagggcagacagtcccgtgcggaggagagaggccggcgacgggatgctggtcgcggatggacccgtccctcttcaagctcaggagcgacaccttcctaaaagacaagaagaaatgcgcggctccaaactacgctgcctactatccgataggcgttgacctgtttgcctgccccaagaaggtccatcacatcgcccagcacctggaccttccgcagatcaagacgcaccccaagatcccgtcgctcctcatcgtgaacatccagatgcctacctaccccgctgctatgttcctcggcgacagcgacggggaaggcttgagcctggtcctgtacttcagggtgtccgaatgctacgacaaggaggtttccgaacatttcaaggagtctatgatgaggtttttcgaggacgaaaccgagaaggtgaaagggttcacgtcagaatccactgtgagctacagagatcggctgaagatcatggccggcctggtcaacccggacgacctccagctgggctctacggagagaaagctcgtccaggcgtacaacgagaagccagtcctctcgcggccccagcacagcttctacgagggagaggactaccttgaggtggaccttgacatccaccggttcagctacattgctaggaaggggctggactcgttcagggcacgcctcaagaacggcatcctcgatctggggttaacgatccaggcccagaagcagtcggagctccctgagcaggtcctctgctgcgtcaggctgaacaagatcgatttcactgaccaagaagttccaacaatagtcaccgttgatgacaactgacgcatttgatcaaaatggtcatcacacgtgcgagctattattaactgctgcaaggctagatccatgggattcagaggcgacacaacaactgatgactccacgccttggtttctgcctaatatgttcgccgatctgcctacttttaagcacgggctttttcttgtcttccctgtaactataatataataatgtatattatatacaagacgatacaaccctgcgggtgttggtcatgttcctaacctttttgcacactccacttgctggttgcaatatgcctgcttccagatgcagaaagacattgaacctgacaatattcaaatgcccatgcatcagacggacatgtacatccataataggattttgacagaaat

SEQ ID NO: 202234 - DNA, 1440 bp, Zea Mays
gtccccacgacacgtcattgccgtggcccagcgctagtttccagaagcagccgcgagcttccaccgccttcttcccgtgcattttctcgagcgacggagcgatccgttcgggccgtccaccacagcgagagagagcggcagaggcgcagagcgcaaccgagcgagagagagaggacggcgacggcggagatgatggggtggggagaggaggtggtggctctgtccctgcgaggctacggctatggcaacgaggaggacgaccggccggagaagccgcggcggaaatattggattctcttagtccattcgttgatggtttgaagttctctggcggatgccatagtttgatgggaaaggagttggttagagagatcactgatctagcacacaggcatgacatttatgtgagcacaggtgattgggcagagcatttgctgcgccaaggaccctcttctttcaagcaatatgtagaggaatgcaaggccttagggtttgacacaattgagctgaatgctgggtctctcaacctccctgaagaggctctgttgagactagtccgcctcatcaagagtagtggtttaagggcaaagccaatgttttcggtgaagtttgacagttctgatattcctgcgtctggtgatagggcctttggggcttacatagctccagtcaaagggaagacctcagaaagagttgaagatgttgacctgctgattaggagggcagagagatgcttggaagcaggcgctgatatgatcatgatcgatgctgatgatgtttgccagcgtgctgaatctctgaggacagacatcatcgccaagattgtaggccggctcgggcttgataaaaccatgtttgaagcttccaactccaacacctcggagtggttcgtcagacgttatggcccaagggtaaatctctttgttgaacactctgacgtgatgaatctggagcgcctccggggcttcaacatgcgcagaagcaactcggcctcccgttttgcctcgccgttcttcctgatctaatgggctaatggccattccccttcctgagatgtgtaagatacttctacatgttctcaccctcgcagagcttgttatggcctagagatgtaaccgcctttgttaatgcctcgatgtagcccccagcgagcagcgcatagcacctgttatgttgtcagcgtcgctactgataatcggttctgttggtcaatgctactataataatcggttgtggtgcaagtaatgtgaatagtgtaagagtgttttgtgttccattgcatcggtgagccaggtccttggattcatgtttgtactattgtatgcgtgtgaaatatcggaactttcagtttccagggcatgagagcacgtctccacatgaacttcaaaaattatttggtctcaaaagcaggacaacgccgaaaattgttttctggcacgg

SEQ ID NO: 202235 - DNA, 1402 bp, Zea Mays
ccacgacacgtcattgccgtggcccagcgctagtttccagaagcagccgcgagcttccaccgccttcttcccgtgcattttctcgagcgacggagcgatccgttcgggccgtccaccacagcgagagagagcggcagaggcgcagagcgcaaccgagcgagagagagaggacggcgacggcggagatgatggggtggggagaggaggtggtggctctgtccctgcgaggctacggctatggcaacgaggaggacgaccggccggagaagccgcggcggtacggggtgacggagatgcggagccccttctactccttccgccccgcaaaccaggcgctccaggaaatattggattctcttagtccattcgttgatggtttgaagttctctggcggatgccatagtttgatgggaaaggagttggttagagagatcactgatctagcacacaggcatgacatttatgtgagcacaggtgattgggcagagcatttgctgcgccaaggaccctcttctttcaagcaatatgtagaggaatgcaaggccttagggtttgacacaattgagctgaatgctgggtctctcaacctccctgaagaggctctgttgagactagtccgcctcatcaagagtagtggtttaagggcaaagccaatgttttcggtgaagtttgacagttctgatattcctgcgtctggtgatagggcctttggggcttacatagctccagtcaaagggaagacctcagcgtgctgaatctctgaggacagacatcatcgccaagattgtaggccggctcgggcttgataaaaccatgtttgaagcttccaactccaacacctcggagtggttcgtcagacgttatggcccaagggtaaatctctttgttgaacactctgacgtgatgaatctggagcgcctccggggcttcaacatgcgcagaagcaactcggcctcccgttttgcctcgccgttcttcctgatctaatgggctaatggccattccccttcctgagatgtgtaagatacttctacatgttctcaccctcgcagagcttgttatggcctagagatgtaaccgcctttgttaatgcctcgatgtagcccccagcgagcagcgcatagcacctgttatgttgtcagcgtcgctactgataatcggttctgttggtcaatgctactataataatcggttgtggtgcaagtaatgtgaatagtgtaagagtgttttgtgttccattgcatcggtgagccaggtccttggattcatgtttgtactattgtatgcgtgtgaaatatcggaactttcagtttccagggcatgagagcacgtctccacatgaacttcaaaaattatttggtctcaaaagcaggacaacgccgaaaattgttttctggcacgg

SEQ ID NO: 202236 - DNA, 1461 bp, Zea Mays
ccacgacacgtcattgccgtggcccagcgctagtttccagaagcagccgcgagcttccaccgccttcttcccgtgcattttctcgagcgacggagcgatccgttcgggccgtccaccacagcgagagagagcggcagaggcgcagagcgcaaccgagcgagagagagaggacggcgacggcggagatgatggggtggggagaggaggtggtggctctgtccctgcgaggctacggctatggcaacgaggaggacgaccggccggagaagccgcggcggtacggggtgacggagatgcggagccccttctactccttccgccccgcaaaccaggcgctccaggaaatattggattctcttagtccattcgttgatggtttgaagttctctggcggatgccatagtttgatgggaaaggagttggttagagagatcactgatctagcacacaggcatgacatttatgtgagcacaggtgattgggcagagcatttgctgcgccaaggaccctcttctttcaagcaatatgtagaggaatgcaaggccttagggtttgacacaattgagctgaatgctgggtctctcaacctccctgaagaggctctgttgagactagtccgcctcatcaagagtagtggtttaagggcaaagccaatgttttcggtgaagtttgacagttctgatattcctgcgtctggtgatagggcctttggggcttacatagctccagtcaaagggaagacctcagagagatgcttggaagcaggcgctgatatgatcatgatcgatgctgatgatgtttgccagcgtgctgaatctctgaggacagacatcatcgccaagattgtaggccggctcgggcttgataaaaccatgtttgaagcttccaactccaacacctcggagtggttcgtcagacgttatggcccaagggtaaatctctttgttgaacactctgacgtgatgaatctggagcgcctccggggcttcaacatgcgcagaagcaactcggcctcccgttttgcctcgccgttcttcctgatctaatgggctaatggccattccccttcctgagatgtgtaagatacttctacatgttctcaccctcgcagagcttgttatggcctagagatgtaaccgcctttgttaatgcctcgatgtagcccccagcgagcagcgcatagcacctgttatgttgtcagcgtcgctactgataatcggttctgttggtcaatgctactataataatcggttgtggtgcaagtaatgtgaatagtgtaagagtgttttgtgttccattgcatcggtgagccaggtccttggattcatgtttgtactattgtatgcgtgtgaaatatcggaactttcagtttccagggcatgagagcacgtctccacatgaacttcaaaaattatttggtctcaaaagcaggacaacgccgaaaattgttttctggcacgg

SEQ ID NO: 202237 - DNA, 1903 bp, Zea Mays
aaaaaatattgggtgtccctttactagatccgcccctgtcctcatggaatgttggtaccttgcaattacaccagcctgttcagttatacttcagatagcatcttctttgcttgccctcttttgcatcctcatgtcatgtggtcgatgatgctatcacattcttgaaagccttccatactgtccatctgcgcgtactgctatttctacattcgttccttaacagtcgcttactttgacgtcccatttcccacttggatgccaatggctgaacccagtttcagaacattgcgtatcattttttctagctgtttctgttgtttttcttcctatccatacatcatcaatttgctcccccaatattgttggttcctgtgctctttccaaagtttccttggatctttgagctttggaagatgccgaggtggacagagaattctgcttccaccaaatcagctgaattggtgaaacaacaagaccgtttggagtttgacgatcctgatgaggtagacgaagaggaagaagttgagtatgaggaagttgaggaggaggtcgagtatgaagagacagaggacgagtatggacagactgaagctgtacgccaagttgatgctaaacatgacagtaaaatggtggatgctgatacggatgagggtggaaaagggagtcatgatgaacttcttgctcttcctcctcatggatccgaagtttatgttgggggcatcgcctctgatgtctcttctgatgatctcaaaaaactctgcgagtctgttggggaagtagtcgaagtgcgaatgccaggaaagagtggtaggctgtatgcctttgtcaatttcagaactaaagagctggcttcaaaggccatccagaagttgaacaataaagatctaaagggaaagaagataagagtttcttcctcacaggctaaaaacaggctatttatcgggaacataccctataactggacagagaatgaatttaaaaaagcagcagaggaagttggccctggagttttaaaagttaatctcgtgaaggcaccacattcagatacgaacaagggttatggatttattgaatactacaaccaggcttgcgcagagtatgctaagaagatgatgtctaccccagaattcaaactagataaaaatgcccctaatgtcagttgggcagatactaagaatggtggtgaatctgcctctactgcacagccaatgttgtatgttccaggtgctcctccaggttcgacaatgatcccaatggttctaccagatggtcgtcttgtatacgtaccacagcctgcaggacagcagcctgtgcccatgacttcgcctccgccgccacagcaaggtgatcgtcattatggtggcagtggtggatcgagctccggtggaaggcgacaacagaggagagatgacagtggtggtagtaacaccaacagccgcaggggtcggcgccgtccctattgatgcttgtcgctgttagcgcttagaagttagaacctagtaggcatattcagagtatctctgctgcagtacaaccatgatgcagacgccaactgatgctggaaaccgtactttctagtggttagttttttcgctgtgcgtctcgtgtctgtaacacaggctgctgttgtgataagagtaataacagttccaagtggcagatgtggtttgggatgcagtggtaaaatgtatctgttccccagcttcatgaataactatgctgttagtgtctgaggtttacattgtgtcagtttggtcactttaggtgtgatgagttttagtagtggtgtggccggtggatatgcagtgaaattgtatcgcttgaacagtgatcagatacctctatggaagggtgaaaacccacaaatgcttcggacaaaaagctgtctttgctctagtacaaa

SEQ ID NO: 202238 - DNA, 1313 bp, Zea Mays
attgccgaccaggctccctcgcttctgttcgtctccctcctcgcgttcctctcttccgctcgccgccgccgccgcatccgtcaccttcacactgcgctccctccatccctccctgtctgcggcgactgggtggtctaccgctgccctcgctttcgcgggcgaagagcgcccaccagtttccttggatctttgagctttggaagatgccgaggtggacagagaattctgcttccaccaaatcagctgaattggtgaaacaacaagaccgtttggagtttgacgatcctgatgaggtagacgaagaggaagaagttgagtatgaggaagttgaggaggaggtcgagtatgaagagacagaggacgagtatggacagactgaagctgtacgccaagttgatgctaaacatgacagtaaaatggtggatgctgatacggatgagggtggaaaagggagtcatgatgaacttcttgctcttcctcctcatggatccgaagtttatgttgggggcatcgcctctgatgtctcttctgatgatctcaaaaaactctgcgagtctgttggggaagtagtcgaagtgcgaatgccaggaaagagtggtaggctgtatgcctttgtcaatttcagaactaaagagctggcttcaaaggccatccagaagttgaacaataaagatctaaagggaaagaagataagagtttcttcctcacaggctaaaaacaggctatttatcgggaacataccctataactggacagagaatgaatttaaaaaagcagcagaggaagttggccctggagttttaaaagttaatctcgtgaaggcaccacattcagatacgaacaagggttatggatttattgaatactacaaccaggcttgcgcagagtatgctaagaagatgatgtctaccccagaattcaaactagataaaaatgcccctaatgtcagttgggcagatactaagaatggtggtgaatctgcctctactgcacaggttaaatcactatatgtaaaaaacctgcccaaggctgttactcaagagcaactgaaaaaactatttgagcaccttggagaagttacaaaggttgttattcctcctgcaaaagctggtcatgaaaatcgatatggttttgttcacttcaaagaacgatccatggctatgaaggctctggaagacactgagagattcgaacttgacggtcagctgctggattgttcacttgcaaagcctcttgctgataagaaggacgatacatcagcacctaaaggagcattttcatctcctcatcttagatcttaagagcagttctct

SEQ ID NO: 202239 - DNA, 1292 bp, Zea Mays
cgaaacattgccgaccaggctccctcgcttctgttcgtctccctcctcgcgttcctctcttccgctcgccgccgccgccgcatccgtcaccttcacactgcgctccctccatccctccctgtctgcggcgactgggtggtctaccgctgccctcgctttcgcgggcgaagagcgcccaccagatgccgaggtggacagagaattctgcttccaccaaatcagctgaattggtgaaacaacaagaccgtttggagtttgacgatcctgatgaggtagacgaagaggaagaagttgagtatgaggaagttgaggaggaggtcgagtatgaagagacagaggacgagtatggacagactgaagctgtacgccaagttgatgctaaacatgacagtaaaatggtggatgctgatacggatgagggtggaaaagggagtcatgatgaacttcttgctcttcctcctcatggatccgaagtttatgttgggggcatcgcctctgatgtctcttctgatgatctcaaaaaactctgcgagtctgttggggaagtagtcgaagtgcgaatgccaggaaagagtggtaggctgtatgcctttgtcaatttcagaactaaagagctggcttcaaaggccatccagaagttgaacaataaagatctaaagggaaagaagataagagtttcttcctcacaggctaaaaacaggctatttatcgggaacataccctataactggacagagaatgaatttaaaaaagcagcagaggaagttggccctggagttttaaaagttaatctcgtgaaggcaccacattcagatacgaacaagggttatggatttattgaatactacaaccaggcttgcgcagagtatgctaagaagatgatgtctaccccagaattcaaactagataaaaatgcccctaatgtcagttgggcagatactaagaatggtggtgaatctgcctctactgcacaggttaaatcactatatgtaaaaaacctgcccaaggctgttactcaagagcaactgaaaaaactatttgagcaccttggagaagttacaaaggttgttattcctcctgcaaaagctggtcatgaaaatcgatatggttttgttcacttcaaagaacgatccatggctatgaaggctctggaagacactgagagattcgaacttgacggtcagctgctggattgttcacttgcaaagcctcttgctgataagaaggacgatacatcagcacctaaaggagcattttcatctcctcatcttagatcttaagagcagttctct

SEQ ID NO: 202240 - DNA, 2021 bp, Zea Mays
ggaaatcttgttggtctgcgtctaggcgagccgaaacattgccgaccaggctccctcgcttctgttcgtctccctcctcgcgttcctctcttccgctcgccgccgccgccgcatccgtcaccttcacactgcgctccctccatccctccctgtctgcggcgactgggtggtctaccgctgccctcgctttcgcgggcgaagagcgcccaccaggtattcccacccccttctatttcctgtatgccgtgcgaaagcgaaaccgagttcgcagtttttttttttttttgaaattgagttctcaaagactaacttcaatctgtttggctatttgatgcccactaactttttgcaaaaaaatattgggtgtccctttactagatccgcccctgtcctcatggaatgttggtaccttgcaattacaccagcctgttcagttatacttcagatagcatcttctttgcttgccctcttttgcatcctcatgtcatgtggtcgatgatgctatcacattcttgaaagccttccatactgtccatctgcgcgtactgctatttctacattcgttccttaacagtcgcttactttgacgtcccatttcccacttggatgccaatggctgaacccagtttcagaacattgcgtatcattttttctagctgtttctgttgtttttcttcctatccatacatcatcaatttgctcccccaatattgttggttcctgtgctctttccaaagtttccttggatctttgagctttggaagatgccgaggtggacagagaattctgcttccaccaaatcagctgaattggtgaaacaacaagaccgtttggagtttgacgatcctgatgaggtagacgaagaggaagaagttgagtatgaggaagttgaggaggaggtcgagtatgaagagacagaggacgagtatggacagactgaagctgtacgccaagttgatgctaaacatgacagtaaaatggtggatgctgatacggatgagggtggaaaagggagtcatgatgaacttcttgctcttcctcctcatggatccgaagtttatgttgggggcatcgcctctgatgtctcttctgatgatctcaaaaaactctgcgagtctgttggggaagtagtcgaagtgcgaatgccaggaaagagtggtaggctgtatgcctttgtcaatttcagaactaaagagctggcttcaaaggccatccagaagttgaacaataaagatctaaagggaaagaagataagagtttcttcctcacaggctaaaaacaggctatttatcgggaacataccctataactggacagagaatgaatttaaaaaagcagcagaggaagttggccctggagttttaaaagttaatctcgtgaaggcaccacattcagatacgaacaagggttatggatttattgaatactacaaccaggcttgcgcagagtatgctaagaagatgatgtctaccccagaattcaaactagataaaaatgcccctaatgtcagttgggcagatactaagaatggtggtgaatctgcctctactgcacaggttaaatcactatatgtaaaaaacctgcccaaggctgttactcaagagcaactgaaaaaactatttgagcaccttggagaagttacaaaggttgttattcctcctgcaaaagctggtcatgaaaatcgatatggttttgttcacttcaaagaacgatccatggctatgaaggctctggaagacactgagagattcgaacttgacggtcagctgctggattgttcacttgcaaagcctcttgctgataagaaggacgatacatcagcacctaaaggaggtccattgctcccaagttataccccagttggatatggactgatgggagcctataacccactcggaaatggcctggcagtggcaggcgcttacaatccgtatggaaatggactggcaggtgcttatggtgtgcttggtgctcatgctgcacagctcgagccagctgtgcgcgcgtcccccctggccgca

SEQ ID NO: 202241 - DNA, 1514 bp, Zea Mays
agctgaagagcgggcgaggaaatcttgttggtctgcgtctaggcgagccgaaacattgccgaccaggctccctcgcttctgttcgtctccctcctcgcgttcctctcttccgctcgccgccgccgccgcatccgtcaccttcacactgcgctccctccatccctccctgtctgcggcgactgggtggtctaccgctgccctcgctttcgcgggcgaagagcgcccaccagtttccttggatctttgagctttggaagatgccgaggtggacagagaattctgcttccaccaaatcagctgaattggtgaaacaacaagaccgtttggagtttgacgatcctgatgaggtagacgaagaggaagaagttgagtatgaggaagttgaggaggaggtcgagtatgaagagacagaggacgagtatggacagactgaagctgtacgccaagttgatgctaaacatgacagtaaaatggtggatgctgatacggatgagggtggaaaagggagtcatgatgaacttcttgctcttcctcctcatggatccgaagtttatgttgggggcatcgcctctgatgtctcttctgatgatctcaaaaaactctgcgagtctgttggggaagtagtcgaagtgcgaatgccaggaaagagtggtaggctgtatgcctttgtcaatttcagaactaaagagctggcttcaaaggccatccagaagttgaacaataaagatctaaagggaaagaagataagagtttcttcctcacaggctaaaaacaggctatttatcgggaacataccctataactggacagagaatgaatttaaaaaagcagcagaggaagttggccctggagttttaaaagttaatctcgtgaaggcaccacattcagatacgaacaagggttatggatttattgaatactacaaccaggcttgcgcagagtatgctaagaagatgatgtctaccccagaattcaaactagataaaaatgcccctaatgtcagttgggcagatactaagaatggtggtgaatctgcctctactgcacaggttaaatcactatatgtaaaaaacctgcccaaggctgttactcaagagcaactgaaaaaactatttgagcaccttggagaagttacaaaggttgttattcctcctgcaaaagctggtcatgaaaatcgatatggttttgttcacttcaaagaacgatccatggctatgaaggctctggaagacactgagagattcgaacttgacggtcagctgctggattgttcacttgcaaagcctcttgctgataagaaggacgatacatcagcacctaaaggaggtccattgctcccaagttataccccagttggatatggactgatgggagcctataacccactcggaaatggcctggcagtggcaggcgcttacaatccgtatggaaatggactggcaggtgcttatggtgtgcttggtgctcatgctgcacagctcgagccagctgtgcgcgcgtcccccctggccgca

SEQ ID NO: 202242 - DNA, 332 bp, Zea Mays
ttatataatatctaggtccacccctgcatctggtggttgttgatccggtgacccgcccacggcgactccaccagaagactaagatggctccagggaagaggtccgcatggacctcacggaaacccgaagaacctatgccaactgattacgagaaaataagggctatgaatatgatgaagaacaatcaattgtttcaacggctaggccttggacaactgaaatcactggtgactgctacagctgcaaacaacaaagacgactctcctcagcaatcagagagtttatatgatggtgaaaacactgacaattctaatgaagaggctcaattcacc

SEQ ID NO: 202243 - DNA, 3384 bp, Zea Mays
gaaattagttctcgtgttttcggccgtgcgctcgctggcgcaagccgcgcgaatcggatcgctgtccgcctctccatttcccctcgtccgcacacccgagcctcgcttccgcctcccacttcccaccaggccaccaccccgtccggcgatcccgatcgcgagacgagggtagcgagatcgagaggattgtcgcggctgccgggcggcgctccagttccaagtcgaggcgaggaactacacgtgtgatatctgcaactcatatggctgggacccacaagaagcgaatggaagaccgttttggtagttttttctcatttgatgaagattctgaaagtgaggacatatcgctggatgagttggaggaggaacttaaagagcacaagaactgtgatgtactagtaactattttaaccaatggtgaaaaacagcgaggcatggcaacattggttgagggcgacctaggccatactgaagaagctcttattcaagattatattgaggataatgacagccttgttctgttgcacgatcagattcatgactgtgacgttattttgtcacaaataggattaattcttagtgggtttcagacccatatatgttcgataagctcggaaatcagaagcctccaggagaaatcctgggatataagcttgaaattgaagaaccgcaagttggttgagacaaagcttgctgggtttgttgaagagatagttgctcctcctggtttggtaaatattcttgttaatggagagtttcttttgttaggtaaatgaaggttatgccagaagtctggagatccttagcagaaagttgaaatttgttcaagtggatccgttgattaatgcatcaaaagctctgaatgatattaagcaagaattggaaaggcttcgacaaaaggcactatccaagatttccagccatattatggagattttctttgctatgagaaaccctgggactaatatacagatattgcaacaaaatttgcttcagaagcacaggtatctcgttctgtttcttaaagagcatggttccgagacatatggtgatttgtgtgcatcatatgttgatacaatgaacaaggtgctgagtacatactttcatgtgtatgtagaagcattggagaagttgaagctagaaattggtgtacccagtgattttaatggacatgataccagtatcatcgatattataataagaggaagggagcatttgagaaatcatggtttcatgttttcgttaggtgaacgtgcaaatattctgaaggagattcatcaacctggcttggttccacatatatctcaaggcaactctcgtacatacccatatgaagttattttcaggagccttcagaagcttctgatggacactgctagctctgagtatcttttcatggaatcattctttggagaagagtcactgttttatcaagtttttgaaggaccttttgctgttattgatcaacatttggatattactcttccaaattgtcatgatgctgtatgcctcatgctcataatctgcataactaggaagcaccagttggttatgtgcaacagacagctttcttgtcttgataactattttgataaggctctgatgtatctctggccacgtttcaaggtagtgtttgacatgtatattcaaagcttatatcagtgtgatgcgaaaacattatggatagatggtacccatccacaccatattgcaaggtgctacgtggagttcacagcatcccttgttcaacttaatgctgaatgcggagatggtcagcttgatatgaacttggaacgcttgcagtcagctatcgaattcctacttgttaggcttgcccaaacttttacaactaccaagctgcagcacctttttcttctaaataattatgacatggccatctctgtcctgaaggaaactggcgatgaagccaaaaaactgcaaaaatattttgaagagaagttagaaagtaacatgatggcttttgtggatgatttgctgatggaacatttcagtgacttacttcggtttgtgaggagtcatgtctcggaagacctggtatcttacaccgagaacaccaatattgccgacgttgagccagttgtgaagaactttgccatgaagtggagaattgctctagagctcatgcacaacgaagtcataacttcttgtactaaccttttgtctgggatggcaattctaaaagcagctatgactcagttgcttaatgactataacaggctctcagagtgcgtcaaaaaaatcacagggggttcaactttgaacagacatatggtttccatcacatctatttcatatgaaatcaggaaatactcaagaacactctagctgcttataatggtgtcaaagaaattctgataaaaaggttaaacaaaaatatcaccatcgagatttttttgaacattccaaccaggcaaatgctggttgcatttttagtttgatttttgaaattaggtattgtaaatgggacagctcgaacatgttttaatttttgtttgtgactattattgctcatttttatatgctacaaggctttgttgttgttgtcgttgttgttggtcagtcagactatactcgacaacagtaatatgcattattttgaaaagttaattgaatcacctgaagctgaatattatgtgtgaactgccgtaatatggagccccaataaagtgcaactctatgttagcttcgtcctataagctatagctatgctggggactgtattttatagcaagcttcgacctgacattttggtagattggtttcggcttgcatatcgttgtcagctgctgacggtaagtatgctttaaatacgttttcccgttttttcctacggcaaatgataccttttttaatcttggatgtagatagagttctcaacaggaaaagctgttttcgtgaaattagtgtacttgaaactggcccagctgaaaaaaaactctatttgctttaactttttgcagatttgcataatccgctattgttcctcgtgatggaataagtcatgtggtcttcgtgtggaggacagtccgcacagcatctctgctgtaggacagcagcaacaacagtttttgactgcaacgactgcggcagacagcatagcagcagtcttttaactgcaaggacagcgtgctgcaggcatctacttttcattttctagcttttggaggacaacagcttgctgcagtttcttttgactagagtacaacaacacctagtggttagtgcagtttgtaggacaacatattcgcaactctagtaagcatatgttgcagccccttgggctataaatatgaatcccaacccttagacgagtatgacattgtgtagtgtttgagaaaataaacagaaaattgccccaactta

SEQ ID NO: 202244 - DNA, 3385 bp, Zea Mays
agaaatatgaaaacgaaattagttctcgtgttttcggccgtgcgctcgctggcgcaagccgcgcgaatcggatcgctgtccgcctctccatttcccctcgtccgcacacccgagcctcgcttccgcctcccacttcccaccaggccaccaccccgtccggcgatcccgatcgcgagacgagggtagcgagatcgagaggattgtcgcggctgccgggcggcgctccagttccaagtcgaggcgaggaactacacgtgtgatatctgcaactcatatggctgggacccacaagaagcgaatggaagaccgttttggtagttttttctcatttgatgaagattctgaaagtgaggacatatcgctggatgagttggaggaggaacttaaagagcacaagaactgtgatgtactagtaactattttaaccaatggtgaaaaacagcgaggcatggcaacattggttgagggcgacctaggccatactgaagaagctcttattcaagattatattgaggataatgacagccttgttctgttgcacgatcagattcatgactgtgacgttattttgtcacaaataggattaattcttagtgggtttcagacccatatatgttcgataagctcggaaatcagaagcctccaggagaaatcctgggatataagcttgaaattgaagaaccgcaagttggttgagacaaagcttgctgggtttgttgaagagatagttgctcctcctggtttggtaaatattcttgttaatggagaggtaaatgaaggttatgccagaagtctggagatccttagcagaaagttgaaatttgttcaagtggatccgttgattaatgcatcaaaagctctgaatgatattaagcaagaattggaaaggcttcgacaaaaggcactatccaagatttccagccatattatggagattttctttgctatgagaaaccctgggactaatatacagatattgcaacaaaatttgcttcagaagcacaggtatctcgttctgtttcttaaagagcatggttccgagacatatggtgatttgtgtgcatcatatgttgatacaatgaacaaggtgctgagtacatactttcatgtgtatgtagaagcattggagaagttgaagctagaaattggtgtacccagtgattttaatggacatgataccagtatcatcgatattataataagaggaagggagcatttgagaaatcatggtttcatgttttcgttaggtgaacgtgcaaatattctgaaggagattcatcaacctggcttggttccacatatatctcaaggcaactctcgtacatacccatatgaagttattttcaggagccttcagaagcttctgatggacactgctagctctgagtatcttttcatggaatcattctttggagaagagtcactgttttatcaagtttttgaaggaccttttgctgttattgatcaacatttggatattactcttccaaattgtcatgatgctgtatgcctcatgctcataatctgcataactaggaagcaccagttggttatgtgcaacagacagctttcttgtcttgataactattttgataaggctctgatgtatctctggccacgtttcaaggtagtgtttgacatgtatattcaaagcttatatcagtgtgatgcgaaaacattatggatagatggtacccatccacaccatattgcaaggtgctacgtggagttcacagcatcccttgttcaacttaatgctgaatgcggagatggtcagcttgatatgaacttggaacgcttgcagtcagctatcgaattcctacttgttaggcttgcccaaacttttacaactaccaagctgcagcacctttttcttctaaataattatgacatggccatctctgtcctgaaggaaactggcgatgaagccaaaaaactgcaaaaatattttgaagagaagttagaaagtaacatgatggcttttgtggatgatttgctgatggaacatttcagtgacttacttcggtttgtgaggagtcatgtctcggaagacctggtatcttacaccgagaacaccaatattgccgacgttgagccagttgtgaagaactttgccatgaagtggagaattgctctagagctcatgcacaacgaagtcataacttcttgtactaaccttttgtctgggatggcaattctaaaagcagctatgactcagttgcttaatgactataacaggctctcagagtgcgtcaaaaaaatcacagggggttcaactttgaacagacatatggtttccatcacatctatttcatatgaaatcaggaaatactcaagaacactctagctgcttataatggtgtcaaagaaattctgataaaaaggttaaacaaaaatatcaccatcgagatttttttgaacattccaaccaggcaaatgctggttgcatttttagtttgatttttgaaattaggtattgtaaatgggacagctcgaacatgttttaatttttgtttgtgactattattgctcatttttatatgctacaaggctttgttgttgttgtcgttgttgttggtcagtcagactatactcgacaacagtaatatgcattattttgaaaagttaattgaatcacctgaagctgaatattatgtgtgaactgccgtaatatggagccccaataaagtgcaactctatgttagcttcgtcctataagctatagctatgctggggactgtattttatagcaagcttcgacctgacattttggtagattggtttcggcttgcatatcgttgtcagctgctgacggtaagtatgctttaaatacgttttcccgttttttcctacggcaaatgataccttttttaatcttggatgtagatagagttctcaacaggaaaagctgttttcgtgaaattagtgtacttgaaactggcccagctgaaaaaaaactctatttgctttaactttttgcagatttgcataatccgctattgttcctcgtgatggaataagtcatgtggtcttcgtgtggaggacagtccgcacagcatctctgctgtaggacagcagcaacaacagtttttgactgcaacgactgcggcagacagcatagcagcagtcttttaactgcaaggacagcgtgctgcaggcatctacttttcattttctagcttttggaggacaacagcttgctgcagtttcttttgactagagtacaacaacacctagtggttagtgcagtttgtaggacaacatattcgcaactctagtaagcatatgttgcagccccttgggctataaatatgaatcccaacccttagacgagtatgacattgtgtagtgtttgagaaaataaacagaaaattgccccaactta

SEQ ID NO: 202245 - DNA, 1731 bp, Zea Mays
cggcaagacaaggcttcctcgcacactggcagttgacttgtctccgctcgtcccacctcatcctcctccctgatttttgccacgagctcgtcctagctaggtatgtatttcctctgaggatgatctcgtccacgcatcgtatgtctaggatatctcgcttggttattgtcccgcctccaaatcaaacgcatcctaagtgacacaggcatagagaagctttgctagcgaagtccagtagtgcaactcaccccttcctggtcctgctgctccgccctctccacctagctaccactcccttagagcgccactgccaagccatggcgggaggaggggcggcctaccagagctcgtcggcgtcgccggactggctgaacaagggcgacaatgcgtggcagatgacgtccgcgacgctggtgggcctgcagagcatgcccgggctggtgatcctgtacggcagcatcgtgaagaagaagtgggccatcaactcggcgttcatggcgctgtacgccttcgccgccgtctggctctgctgggtggtgtgggcctacaacatgtcgttcggcgaccggctgctgcccttctggggcaaggcgaggccggcgctcgggcagcgcttcctggtggcgcagtcccagctcacggccaccgccgtgcggtaccgcgacgggtcgctcgaggcggagatgctccaccccttctacccggccgccaccatggtgtacttccagtgcgtgttcgccagcatcaccgtcatcatcctcgccggctcgctgctgggccgcatggacatcaaggcctggatggccttcgtcccgctctggatcaccttctcctacaccgtctccgccttctcgctctggggcggcggcttcctcttccagtggggcgtcatcgactactccggcggctacgtcatccacctctcctcgggaatcgccggcctcaccgccgcttactgggtagggccaaggtcggcgtcggacagggagcggttccctcccaacaacatactgctggtgctggcgggggcaggcctgctgtggctcggatggactggcttcaacggcggcgacccgtactcggccaacatcgactcgtccatggcggtgctcaacacgcacatctgcgcctccaccagcctcctcatgtggaccctccttgacgtcttcttcttcgggaagccgtcggtgatcggtgctgtgcagggcatgatcaccggccttgtgtgcatcacgcctggcgcaggcctggtgcaagggtgggcagccattgtcatgggaattctctcaggtagcatcccctggtacactatgatggtactgcacaagaaatggtccttcatgcagaggatcgacgacaccctcggcgtattccacacccatgcggtcgctgggctcctcggcggcgccactactggactctttgctgagcctgtcctctgcaacctcttcctcgccatcccggactccagaggtgcattttatggtggtgatggtggatcacagtttgggaagcagatcgctggcgcactcttcgtcattggctggaacattgttatcacttccataatctgtgttcttattggcctagtcctgcccctccgaattcctgatgcacagctgcttatcggggatgatgctgtacatggtgaggaggcgtatgctatatgggcagaaggcgagctcaacgatgtaacccgccaagatgaaagcaggcatggcagcgtcgtca

SEQ ID NO: 202246 - DNA, 1569 bp, Zea Mays
gttgtcgaccttgatcggaaacagatggatggcagtagctgtacagggaagcggataactgtacgggaagcattgaataccgcattagatgaagaaatgtcggcagacccttctgttttcttgatgggagaagaggttggcgagtaccaaggtgcatacaagatatccaagggtttgcttgacaagtatggccccgatagggttctcgatactccgatcactgaggcgggcttcactggcattggtgttggtgccgcttaccatggtcttcgacctattgtagagttcatgacatttaacttttcgatgcaggcaattgatcacataattaattcagctgccaagtcgaactacatgtctgctgggcagatatctgttcctattgtctttaggggtccaaatggtgctgctgctggagttggtgcccaacactcacagtgctatgcagcttggtatgcacatgttcccggattgaaagttctagctccatattctgcagaagatgctcgaggtttgctgaaagcagcaatcagggatccagatcctgttgtgttccttgaaaatgaacttctttatggtgaatcatttcctgtatctgctgaggtacttgattctagcttctgccttccgattggaaaggctaagatagagcgacaagggaaagatgtcactatcactgcattctccaaaatggtgggatatgcccttcaggccgctgatatactggccaaggaaggtatcagtgccgaggtaatcaatcttcgctcaattagaccgctggatagagctactattaatgcatctgtgaggaaaaccaatagattggtaaccgtagaagaaggcttccctcaacatgggattggtgcggaaatatgcatgtctgttgtagaggacagctttgagtatcttgatgcaccagtcgagaggattgctggagctgatgtgcccatgccgtacgctgccaaccttgagaggatggctgttccacaggtcgatgacatcgtccgggcagccaagcgtgcttgctacagggcagcagtaccgatggcagcaaccgcctagtccagcagaaccctgcatgttgcatttctttgtctaattttaatgtccgtgctgcagaaagacgtgtcacataatggtgtgacgagtacccactgccgctgcaactcaactatagcatgagctgagtttttgtagagccaccgagagatttgcagcagagcctctggagatgagaattttacttgtggcgagatgttgtgagtaacttgtattcagaagggggaactctcaagagatcctcaagtcgtgattccagttgcggctttcttgatagtaacgtactccctctgttttttagttgtcgctggatagtttaattttgcattattcagtgataactaaaacaaaacggatggagtacgtatttaccatgctagtgctagaggatcttttgttcctctgcagggtgcagcagtcactgcgtgtggccctgagcacccccgtctgtccactcaccagccatgcagtcgaccgcagaggatccgaatccatccgagactggaagcg

SEQ ID NO: 202247 - DNA, 3524 bp, Zea Mays
gaaggagggcgcaaatttctccttttttttcgcagtgcttctctttcttgccgtgcccccactccgctcgattctcgactctagtcaccccgccggaccgccgtctcacgttctacacccacccactcctgactccgacgacgccgttcaaacccacgcaatccagcagaggagaccatctccgccgccgacgacgccgttcaaaccctagccgatccgctggctctgccatcgcaagccaatgccccacaccgaaccctagcaacaccatagtccttccacaaccggtgcgaacagtactgcccgaatatggcggccgaacccgccgctacggccgctgcttcggcggcggccgctatctccgctgtcatggactggcgctcctcccccgacgcccgcgccgctgccttcgcgtacctcgaatcagttaagagtggggacgtccgagccttggcaagcacatcatttttcttggttcggaaggaccagacgtcagagatccgcttgcacgggttcaagatgttgcagcacctggtaaggttgaggtgggaggagctcagtgctgcagaacggaatgaatttgctaatatgacaattaatttgatatcggatgttgttggccctcatgaggtgtgggccttgaagagtcaaacagctgctttagtagcagaggtggttcgaagggagggagttgatttgtggattactttactcccatctattgtttctctctctaacaatggccctactgaggctgagttagttgccatgattctaaggtggcttccagaggatatcactattcataatgaagatttggagggtgataggcggagatctctgttgcgcggccttactgagtcactgtcacaaattctgcctctgttgtattctctacttgagaaacattttggtgctgctttaagtgagcatgcgaagcagcaaatggatttggctaaacaacatgcagggacggtgactgcagttctaaatgctgtcaatgcatatgctgaatgggttcctgtgacagatctagccaaatatggtttaattcacggatgtgggtccttgctttcttacagcgattttcgcctccacgcttgtgagttttttaaagtgatatgtcagaggaaaagacctgtggatgtggcagttgctgagtatgatgctgcaatgtgcaacatattccaggtgttgatgaacatttcacaacaatttttgaccagatctggcatgcaacccagttctattgatgagagcgaatatgagtttgcatcatgtgtttgtgagacaatggttgctctaggatcttcaaacatgcaatgcatactagccgatggagccaggactttccagttcttacaacaaatgctggagtattaccaacactacaaaatcacacttcatttccagtctctattattttggctggtggtattgagagaaccatcgaaatctaagtctattgcacgtgtttctggtgataattctgctgctggtaattctgcatctactggtgacttatcaacagaaaagaagaaaggggtatcggtatttgtcactgatgaaatatacagtacaattttggatgtttctttcaagagaatgctgaagaacaatggaagtgcaacttctgggttgttagaaatatggagtgaagagcttgaggggaagagcgacttctgcaactaccgcaccaaattgttggatctcattaaagtcattgcttctcaaagatctgtgattgctgcagcaattgtagttcagagaataaatgttgtctttggagatgctaatcaagcaactaagtccccacaggatcttgatgcaatggaaggggctcaactggggcttgaagcagttgtcaatgctattttcgatggctcagttgattgtgggaaaactgatttggatacgaaatcccaactgcacaagatttttgaaggcttacttcaacagcttctttctttaaagtggacagaacctaaccttgcagttattcatggtcattatttggatgctttgggccctttcttgaagcatcatccagatgcagttgccagtgttgttaataagctttttgaactgttgacgtctctcccaatcacatttcaggatccatcaaacaattctcgcctagcaaggttacagatctgctcatcattcattcgtatatcgagagctgctgataaagcacttctgcctcacatgaagaacattgctgataccatggcttaccttcaaggagagggtcgcttactacgtggtgaacataatcatttatgtgaagcgtttcttgtgatgtcatcctctgctgggattcaacagcaacaagaagttcttgcttggttacttgaacctcttaataaaatgtggactcaagtggaatggcaaactgcatacttgtctgatccttctggtttgacaaacatgtttgctgatagccaattcatgtggtcaatttatcacacagttacattctttgaaaaggcactcaagagaagtggaaccaaaaagtcttcagcaactccacaagcacccaccacaacagtacctggttatctgcatccgatgtcttcacatctagcatggattgtgccccctctcttgaggctgctgcgatgcatacatgtcctttggtctgagccatttgcccagtctcagacggccgaaatcaaagcagcaaaaagcatgactgttgcagagcaggctagccttctaggagagacaggtaaacttaccaaaggtcaggttgctccagctgatggtttgctggatgttcaaagagatggagaatctaaagaaaacaatataaaaaactggttgcgtgggatccgagacagcgggtacaatgttttaggactagcagctactcttggggaagcattctttcgatgcatagagggttcttctgtcacccttgctattatggagaatgtgcaagttatggagtttcggcatctgcgccaacttatccaccttgttattattccatttgttaaatattgccctgccgatttatggctgtggctagtgaaccttttgcagccgttatttgtccactgtcagcaagctcttaattattcatggtccagtcttcttcatgagggtcgggctaaggttcctgacagcattggtaatctttctgggtcagaactgaaggtagaggtaatggaagaaaagttgctacgtgacttgactcgtgaagtatgttctgtcctttgggctttatcatcaccaggcttaaataatggacttccatccttggaacaacttggaccttccaaccggatggattctgttttgaagaatctggagtcctttgcttcaagttctctaactgggcaacagtactcgttccatcgcatgttgttgcattgtccaagcaagcctgaaacgaagtgacacaaagctgtaaagtatagacgagccgttacctttggaggacaccagggacaagcgctattttaacggatcctttggcgcatgctgctggagataaaaaggacacaagcacacgctaa

SEQ ID NO: 202248 - DNA, 2379 bp, Zea Mays
cgagcccacgacggcccacgttcttgcatgttttgaagggaagagacatttcttagcggagaattgaagccaccgcccaccggacctggcgcaccgcgcacgacaccaaagtaccaaacgcttgggagctttggactctacaccgcgcatagatcgtgggcatcgcgacacctcacctgcccccctgcggccgccgtctctcctcgccggttaccccttgctgcccgctcccctgcgcctcgcctttctcgccctctttccgcctttctcacacgtgcccgccttctccgcccctctcctcaccagcggtggcgtcgaccggcagcggcgttcaactgcgccccacgagcaggtttcttggccccgtcgacttccagtgagttcagtttagctcagtaagcatctgatcaacttcgaggtgccagacagatcctatgctgccttactgggatgaaaggtggctgtctgcataggctccttgtccacaagctatgctttggcctgagtattctcactgtgccgattattgttctgttactggaaggagccccagtactcactatcttcagcccaacaccagggcaattaaaagttctctctcaaggttttctacatcagcaggagcaggaacatcttggagatgatggagcaaccctagctggatctccaggtccagcttccaggagccgctcgcaaaaaagtaggggcaaagtgatgaaaaattgcaactacgcaaaggggaagtggatagaagatgataagcggccgctgtactctggtaatgagtgcaaacaatggctgtcaaaaatgtgggcttgtcgaatgatgcggcgcacacatttctcttatgagaattaccggtggcaaccacatgactgtgagatgcctgagtttacagggcctaagttcttaaaaaggatgagaaaccgaactcttgcttttgttggtgattcacttggcagacaacaatttcagtcaatgatgtgtatagcaactggtggcaaatacagtccagaggttgaagatgttggttggaaatatggccttgtcaaagccccaggtgctctaagacctgacgggtgggcttatagattttcgtccaccaacacaactatccttttctactggtctgctactctgtctgaattggaacctctgaatacagaacacacagttaccagatatgcattgcatcttgatcgaccagttacatttttgaaggagtatcttaatgactttgatgtcctagtacttaacactggccatcactggaacagagggaaattcaatggaaatcactgggaattgcatgctgacgggaagcctgtaggcaatggtagtagactcgcagacctaaaccgtgcaaaaaatcttacattgtatagcattgctagatggatggattcagaactcacacggcatcctaagatgaaagttttcctcaggacaatttcaccaaggcactttgtaaatggtgactggaacacaggtggaacatgtggaaatactgtcccctttactaatggaagtgaagtgttgcaggatcattcaattgatatacccgcagaaaatgctgtgaagggaactcgggttaagcttttggatatcactgctatctcaaaactacgggatgaggggcatatctcaaactctagtttcaaaaaggcttccaccggaattaatgattgcttgcactggtgcttacctggtataccagacatgtggaatgagcttctctttgtacagatttagtatcaccctctggttaggcagatctttttcagagccccaaggatctccgctgttcatagcatagaagtaaagtttatggaattttgggtcgcccatatggaggtgttcacaagatgatactattgatttctatgaagtacgaaatttacagtgtggaacagattattccaacttcctttcggagcagagtagatggaggtgttgcccagcccaatctgactatcgagtattcttcagtgatagatgacctgatataccatgcatcttatacctatatgacacacctagggcccggacggacgacctcgtctggatgtagcccgtgcgaaatgggggaccgcatgggcgcatggcatgtgaaaggaggccagtgctgccagcttaccgcgacgactgattcgttattcgagttatttacaagtacctaatatatctagatgatacatttgcaacatgcatcaaaatttgctgaaacatttcgaatgtgtttgtaacataagtatagttattacaatagactccctcggttcgttttttatttgttgtctgttagcacagagctgaatagggtggcgtttggtttgcgaaatataacgtaaatgataatggtaactatttacactcgaa

SEQ ID NO: 202249 - DNA, 2123 bp, Zea Mays
cgagcccacgacggcccacgttcttgcatgttttgaagggaagagacatttcttagcggagaattgaagccaccgcccaccggacctggcgcaccgcgcacgacaccaaagtaccaaacgcttgggagctttggactctacaccgcgcatagatcgtgggcatcgcgacacctcacctgcccccctgcggccgccgtctctcctcgccgcggtggcgtcgaccggcagcggcgttcaactgcgccccacgagcaggtttcttggccccgtcgacttccagtgagttcagtttagctcagtaagcatctgatcaacttcgaggtgccagacagatcctatgctgccttactgggatgaaaggagccccagtactcactatcttcagcccaacaccagggcaattaaaagttctctctcaaggttttctacatcagcaggagcaggaacatcttggagatgatggagcaaccctagctggatctccaggtccagcttccaggagccgctcgcaaaaaaattgcaactacgcaaaggggaagtggatagaagatgataagcggccgctgtactctggtaatgagtgcaaacaatggctgtcaaaaatgtgggcttgtcgaatgatgcggcgcacacatttctcttatgagaattaccggtggcaaccacatgactgtgagatgcctgagtttacagggcctaagttcttaaaaaggatgagaaaccgaactcttgcttttgttggtgattcacttggcagacaacaatttcagtcaatgatgtgtatagcaactggtggcaaatacagtccagaggttgaagatgttggttggaaatatggccttgtcaaagccccaggtgctctaagacctgacgggtgggcttatagattttcgtccaccaacacaactatccttttctactggtctgctactctgtctgaattggaacctctgaatacagaacacacagttaccagatatgcattgcatcttgatcgaccagttacatttttgaaggagtatcttaatgactttgatgtcctagtacttaacactggccatcactggaacagagggaaattcaatggaaatcactgggaattgcatgctgacgggaagcctgtaggcaatggtagtagactcgcagacctaaaccgtgcaaaaaatcttacattgtatagcattgctagatggatggattcagaactcacacggcatcctaagatgaaagttttcctcaggacaatttcaccaaggcactttgtaaatggtgactggaacacaggtggaacatgtggaaatactgtcccctttactaatggaagtgaagtgttgcaggatcattcaattgatatacccgcagaaaatgctgtgaagggaactcgggttaagcttttggatatcactgctatctcaaaactacgggatgaggggcatatctcaaactctagtttcaaaaaggcttccaccggaattaatgattgcttgcactggtgcttacctggtataccagacatgtggaatgagcttctctttgtacagatttagtatcaccctctggttaggcagatctttttcagagccccaaggatctccgctgttcatagcatagaagtaaagtttatggaattttgggtcgcccatatggaggtgttcacaagatgatactattgatttctatgaagtacgaaatttacagtgtggaacagattattccaacttcctttcggagcagagtagatggaggtgttgcccagcccaatctgactatcgagtattcttcagggcccggacggacgacctcgtctggatgtagcccgtgcgaaatgggggaccgcatgggcgcatggcatgtgaaaggaggccagtgctgccagcttaccgcgacgactgattcgttattcgagttatttacaagtacctaatatatctagatgatacatttgcaacatgcatcaaaatttgctgaaacatttcgaatgtgtttgtaacataagtatagttattacaatagactccctcggttcgttttttatttgttgtctgttagcacagagctgaatagggtggcgtttggtttgcgaaatataacgtaaatgataatggtaactatttacactcgaa

SEQ ID NO: 202250 - DNA, 666 bp, Zea Mays
atcttgaaatggttgtggaagaaaaagatttgtctgagggccactggaaggagctgcaactacagaatcttgatggtgcaggaatcattatcaagggaactgcaaatcgagcgggataagaacaagtctctgaccgagaggtttgaggatgtggagaggcaactcgagttggcaattaaagagcaagaagcaacggtagaactctttgcagaagaaaggaagtgccacgaccaagaggtggaaaacctgaagcggaagctcacggaggcctcttccaccattcaggatctgatggagcagctcaatgctgcccggaactgctgcaagagatgaagcagcagacgaagcaacttcaccccccagtaatacgttagtacgtgtatgtcaccagcatgctcttagcataaataatgcccagatggttgtggagctgttagcagtagcagaccagaatgctctatgtatgtttcacgtcctgttgttagatgtgtggtagcaagtgtaagatgattgaatgagactaacgtgatgaattccctaggccctcatggttcctgatttagtgtaataataattagagaggatattgagagtgaattgcaactggctttgtttgggagcaatgatactgaaggggattagagggcctaaaatctgaatagcaag

SEQ ID NO: 202251 - DNA, 2743 bp, Zea Mays
ggccttgccaagaaagcaccatcgctccagttcgcgctcatggcccccactgctgtggatcccggtcccagcgaccaccttctagcgccggcgccggctgccatggctggaggaggggatggcggtgatggacagatggaggtggtgttcaatgtgagcagcagcgacaccgactccgatgacctcggcgccggtggtggaaagaggtcgcggcccgtggcggggcaaggtggtggcagggatcgagaggacaagaaggccagaatcttggccgctgccgccacggtcccagccggattcctagagccgctttcgccggtgaggttactccccccgccggcgccgggaaggagcgtgacgaagcagttctggaaggccggagactacgtcggcaagccggatcacctgcttgccgtagtggcggctcagcattctgattctggaatggatcacgttcgtgtgcatcccaaatttctacattccaacgcgacaagccacaagtgggcactaggaggttgtgcatggagcgacatatgtgaacattgacatgatagaaagtaagaaggatggaactccaatgctgcttgttcaagacaatggtggggggatgaacccagataagatgcgtcattgtatgtccttgggttattctgcgaagagcaaagtcaagaataccattggacaatatggaaatggttttaagacaagtacgatgagacttggagctgatgtcttagtgttttcatgtagtcgtggtattgaaggaacaaggcctacacaaagcgttgggatgctatcatacaccttcctaaggagcaccaacagagatgatatcattgttcctatgattgactatgaaaaagagaatgaatggaaaaggaaggcacggacaacattgactgattggtgtatgagcttagaaacaataatacaatggtctccttattccacagaagcagaacttattcaggagtttggctcaataggggaacaaggaactcgaattatcatatacaatctgtgggaggatgatgaaggagagctggagcttgattttgatgctgacgcaaatgatattcagattagaggtgttaacagagatcagaacaagatcaagaaggcaaatcagtttccaaactccaaacacttctttacttatagacattctctaaggagttatgcatcaattttatatcttatgctcccggataacttccaaatgattttacggggaaaaaagattgaccaccataacattatcaatgatctcatgctaaagaagcaacttacttataatccaacagtgggcgatggacttccaaaggatatgcatgtggcagctaaggtgacaattggttttgttaaggatgcgagacaacatattgatattcaagggtttaatgtttaccacaagaatcgcctaataaagcctttttggagagtatggacttctgctggagttgctggccgtggtatcataggtgtactggaagtaaattttgtagaaccagctcatgacaagcaggactttgaacgcacaaattgccttgcaagactcgaagcacgattaaaccgaatgcagaagaaatattggtctgataatcgccatcgaattggctatggaaccaatgatgctagcacagattctgtaaaaaggaaaacaggactgtcgttgcgtccatttggccaaggttcctggaagtcagggtatctgcaaacgatcagaagtgatggcagatcatgttctaatacaacaaataatattatgaatgcaagcatgtcatccccagaaacttccaagcttagtggtcccaatagagagttctcttcaacaacagtgtgccagcacagagctgaaaagtctgcaaataccataagatctgaaagatcagttttgcatggcttgtcaaatacagatggtggaaagactgagactgccaacgccccatccaaatcaacttcccctatcctaaggactagtttgccaccaactcccaatgaaggaaaacgaagtgagaggattgctgccaaataccaatcgaagcaagtaaatgcaacaactaatggagacagggaatccattgttgaccctgaagctatcatcaagaagttgaaggaagaaaattcatcgctaaaggagagaatcttgatggtgcaggaatcattatcaagggaactgcaaatcgagcgggataagaacaagtctctgaccgagaggtttgaggatgtggagaggcaactcgagttggcaattaaagagcaagaagcaacggtagaactctttgcagaagaaaggaagtgccacgaccaagaggtggaaaacctgaagcggaagctcacggaggcctcttccaccattcaggatctgatggagcagctcaatgctgcccggaactgctgcaagagatgaagcagcagacgaagcaacttcaccccccagtaatacgttagtacgtgtatgtcaccagcatgctcttagcataaataatgcccagatggttgtggagctgttagcagtagcagaccagaatgctctatgtatgtttcacgtcctgttgttagatgtgtggtagcaagtgtaagatgattgaatgagactaacgtgatgaattccctaggccctcatggttcctgatttagtgtaataataattagagaggatattgagagtgaattgcaactggctttgtttgggagcaatgatactgaaggggattagagggcctaaaatctgaatagcaag

SEQ ID NO: 202252 - DNA, 2674 bp, Zea Mays
ggcggccttgccaagaaagcaccatcgctccagttcgcgctcatggcccccactgctgtggatcccggtcccagcgaccaccttctagcgccggcgccggctgccatggctggaggaggggatggcggtgatggacagatggaggtggtgttcaatgtgagcagcagcgacaccgactccgatgacctcggcgccggtggtggaaagaggtcgcggcccgtggcggggcaaggtggtggcagggatcgagaggacaagaaggccagaatcttggccgctgccgccacggtcccagccggattcctagagccgctttcgccggtgaggttactccccccgccggcgccgggaaggagcgtgacgaagcagttctggaaggccggagactacgtcggcaagccggatcacctgcttgccgtagtggcggctcagcattctgattctggaatggatcacgttcgtgtgcatcccaaatttctacattccaacgcgacaagccacaagtgggcactaggagctttcgccgagctgcttgacaactctcttgatgaagttgtgcatggagcgacatatgtgaacattgacatgatagaaagtaagaaggatggaactccaatgctgcttgttcaagacaatggtggggggatgaacccagataagatgcgtcattgtatgtccttgggttattctgcgaagagcaaagtcaagaataccattggacaatatggaaatggttttaagacaagtacgatgagacttggagctgatgtcttagtgttttcatgtagtcgtggtattgaaggaacaaggcctacacaaagcgttgggatgctatcatacaccttcctaaggagcaccaacagagatgatatcattgttcctatgattgactatgaaaaagagaatgaatggaaaaggaaggcacggacaacattgactgattggtgtatgagcttagaaacaataatacaatggtctccttattccacagaagcagaacttattcaggagtttggctcaataggggaacaaggaactcgaattatcatatacaatctgtgggaggatgatgaaggagagctggagcttgattttgatgctgacgcaaatattagaggtgttaacagagatcagaacaagatcaagaaggcaaatcagtttccaaactccaaacacttctttacttatagacattctctaaggagttatgcatcaattttatatcttatgctcccggataacttccaaatgattttacggggaaaaaagattgaccaccataacattatcaatgatctcatgctaaagaagcaacttacttataatccaacagtgggcgatggacttccaaaggatatgcatgtggcagctaaggtgacaattggttttgttaaggatgcgagacaacatattgatattcaagggtttaatgtttaccacaagaatcgcctaataaagcctttttggagagtatggacttctgctggagttgctggccgtggtatcataggtgtactggaagtaaattttgtagaaccagctcatgacaagcaggactttgaacgcacaaattgccttgcaagactcgaagcacgattaaaccgaatgcagaagaaatattggtctgataatcgccatcgaattggctatggaaccaatgatgctagcacagattctgtaaaaaggaaaacaggactgtcgttgcgtccatttggccaaggttcctggaagtcagggtatctgcaaacgatcagaagtgatggcagatcatgttctaatacaacaaataatattatgaatgcaagcatgtcatccccagaaacttccaagcttagtggtcccaatagagagttctcttcaacaacagtgtgccagcacagagctgaaaagtctgcaaataccataagatctgaaagatcagttttgcatggcttgtcaaatacagatggtggaaagactgagactgccaacgccccatccaaatcaacttcccctatcctaaggactagtttgccaccaactcccaatgaaggaaaacgaagtgagaggattgctgccaaataccaatcgaagaatcttgatggtgcaggaatcattatcaagggaactgcaaatcgagcgggataagaacaagtctctgaccgagaggtttgaggatgtggagaggcaactcgagttggcaattaaagagcaagaagcaacggtagaactctttgcagaagaaaggaagtgccacgaccaagaggtggaaaacctgaagcggaagctcacggaggcctcttccaccattcaggatctgatggagcagctcaatgctgcccggaactgctgcaagagatgaagcagcagacgaagcaacttcaccccccagtaatacgttagtacgtgtatgtcaccagcatgctcttagcataaataatgcccagatggttgtggagctgttagcagtagcagaccagaatgctctatgtatgtttcacgtcctgttgttagatgtgtggtagcaagtgtaagatgattgaatgagactaacgtgatgaattccctaggccctcatggttcctgatttagtgtaataataattagagaggatattgagagtgaattgcaactggctttgtttgggagcaatgatactgaaggggattagagggcctaaaatctgaatagcaag

SEQ ID NO: 202253 - DNA, 2654 bp, Zea Mays
gagaaatgctaatgaccattaatgcagtgcgatgctaattcttcaaaacgggtgagattataataccacggattcaattacgacgataatgatgccaatagtctgaagtccgccgaacggagtggcacggttgcgaaattctcctccccaacccatttcgttcgccgccagcgacgccggcacacaacaagtgagaccccggtttccttccgccgtagttttcccttcatcgtcctcctcctccgttccactagcaacaccggagcggagcggagatccactctccggacttagaccggtttccttctccgtgtggcgagttcaatacctgactcgggtgccccttccccatgtcgcacgtcgagcccgccgccgccggagtggaccaagtcggcgaggggacggtcgtgccgcacgacaacggtgtcagcggcaccgggggtgacgtggccaccacggaagcgcaagtggctgttgccgtttccacctccggcgacgagaggcggggggattacggcgatgatgcagagaacgaggaggaggaggaggccgcaacggtgcagggcagcaaggagggcactgacgagctgctccggaaggtggtgtgcagcgaagaggccgcctacaagctctactgcgattacggccaccgcatggggttcagcatccggaaagggaagcagtcctacttcaccggcaccaagcggatacgcaccaaggactacttctgctccaaggaggggctcaaggaaggggagaagctcactgatgcaaatttcaacgacccccacaccaggaccaattgcagggccatggtgcggttcagggtgaatgatcagggggagtggaaggttatccgactggtatctgatcataaccacaacctggcaaggcctgaggaacgacatcttttgcggtctgcaaggtcgcttatagcagggcggtcaagttctgtggagaatcagaagcaagatttgctcctcggctacggtgctgcgacaaagacactgactataggaactggggatgtgcagagccttgtgagccatctgaaaagcagggcaaatgaagatggtatgttttactgggatgttcaattggaccgaggtggtcggatgactaatttcttttggcgtgatgggaggagcaggactgactatgactgtttctgtgatgtggtcgtgtttgattcaacttaccgcttgagcaaacataacctgatatgtgcaccgtttgttggcgtcaatcatcattggcagaccactatgtatggttgcgcacttttagctgacgagtctacgtcagcttttgtgtggctgttcaagtctttcttggagtccatggggaaccgacatccacaatctattttcacaaatctagatcaagttgtgacaaaagcggttgaggaggtcttcccaaatgcacgccatcgcattgctcattggcacatccaaaagaatgcccactctcgtctgggtgctcttaatgtctcaaaaacattcaataagatgttcaccaagtgcatacagggatgtgactccgaagcagagtttgaggaaacatgggctcaaatgctctgtgaatttaagttgcaagataacaagtggcttaaaaaattgtataagctcaaacagaagtggtgtagtgctcttaacaactgcacctttgatggtgggatcgagtatgaaccacaatgtgacagtatgagcaacatgtttaataatgtttctgataagttgacttctctttgtgcaattgctgttgctgtggataaacagactgaagattggagggaaaaagaattagatgaggatgcacggtgtttccaaaggccacctgcttgcatcataaaatacagtgatattttgaatcatgcagcaaaggtttatacacatagaatctacaaactgtttgagacagattttcttgatgggtgtggagccacaaaattcaaagagcttccgtgtcaagataacaatacatatcaatttgagatgactatgcaagggcgaggatcaagagtttgcacagttcatttcaatatgtctatgatgcaattaagttgcagctgcagtaagtttgagacaatgggtttactttgcccacatgctttgaaagctcttagtataaaaaatatatgcaaaattccagaaagctacatactgaagcggtggaccaaggatgcgaagaaatgggtttttaatccaaaacaatatgaatcatcatatcaggaatgtatgaatgatgaagctgcatactgcaactatgttatgagatatgcttatgatcttgtcacgaagagccaagggcaggatgcattaaggaaagcactgtgggagactcttgaaagtggtgagaaagaattggagagatacctagaaaacgttacccaacatgcaccttatgccacttgaaaggatcactaattaacctcctagacttatctgctaaggatgaacaagatacttccttgttctttcaagatgcattcagaacttctctcaaattgtacatttatagagatgaaacggatgcttgtcaaagatacaggcttgacgacgctgccatgcctgctttcatcttggcgggttacatcgttgagctcgccttctgcccatatagcatacgcctcctcaccatgtacagcatcatcc

SEQ ID NO: 202254 - DNA, 1039 bp, Zea Mays
ctcgcatccacacaccaaagacatcaggcgtttttatctgccctcgattcgatctgattgggtttgtccggttgcggtgcttgcttggttgggcagcttaaaggtgcataccattcagatatagggatattaatgatggagcttctgatgatgaacaaaagaaacttgttgaagttctcatgatcagctcccaaagtggaccgggtcttctatttccaaagggaggctgggagaatgatgaaactgttgaagaggcagctgcaagggaagctatcgaagaagctggagtgcgaggagatttagtgcaactgctggggttctacgatttcaagagcaagcagcccgaagcaacgtgcagagccgcaatcttcgccctgcacgtgaaggaagagctagcctcctggccagaacagagcacccggcagaggagctggctcaccgttcccgaggcggcggagcggagccgctacccgtggatgcaggaggccctcgtgacaggcttctccgcctggctcgagaactggagaaacggtggtggcggcggcggcggctgcgtggaccgaactgagagatgacaccaccttaaagcatcaggggggcccccggcggagaagccatctgctagctatttcttggcgttgtatcttgcttggactagaattttcttccagaggctgactgcctggcatacatgcatgagggctctctgatgctcggtagcttttgtttactttgtcgctttattacaccgtcgtcttcaggatgacagtctcctcagctgatgatggcccgaggtttgttaaattgtaagcttgctgattctcgcggtcgccagctatatttaactgtcttgtattgagccttgagacaaagcaagctttgtgtatatcatgtgtcgtcgtcgtcgtggtgtactggtgtttgcctttttttgaagagttactggtgtttgccttgctatggaagtgcaacgggagtcctcttgttgtcacagtcgcaacttctctgcctttttaccctcggaaagatgctcttgcga

SEQ ID NO: 202255 - DNA, 938 bp, Zea Mays
gtccggttgcggtgcttgcttggttgggcagcttaaaggtgcataccattcagatatagggatattaatgatggagcttctgatgatgaacaaaagaaacttgttgaagttctcatgatcagctcccaaagtggaccgggtcttctatttccaaagggaggctgggagaatgatgaaactgttgaagaggcagctgcaagggaagctatcgaagaagctggagtgcgaggagatttagtgcccgaagcaacgtgcagagccgcaatcttcgccctgcacgtgaaggaagagctagcctcctggccagaacagagcacccggcagaggagctggctcaccgttcccgaggcggcggagcggagccgctacccgtggatgcaggaggccctcgtgacaggcttctccgcctggctcgagaactggagaaacggtggtggcggcggcggcggctgcgtggaccgaactgagagatgacaccaccttaaagcatcaggggggcccccggcggagaagccatctgctagctatttcttggcgttgtatcttgcttggactagaattttcttccagaggctgactgcctggcatacatgcatgagggctctctgatgctcggtagcttttgtttactttgtcgctttattacaccgtcgtcttcaggatgacagtctcctcagctgatgatggcccgaggtttgttaaattgtaagcttgctgattctcgcggtcgccagctatatttaactgtcttgtattgagccttgagacaaagcaagctttgtgtatatcatgtgtcgtcgtcgtcgtggtgtactggtgtttgcctttttttgaagagttactggtgtttgccttgctatggaagtgcaacgggagtcctcttgttgtcacagtcgcaacttctctgcctttttaccctcggaaagatgctcttgcga

SEQ ID NO: 202256 - DNA, 491 bp, Zea Mays
acgcaattcagcctagggttttgtctccgctacaccctcctccactcttatataagcctccgccgccgctaacattcctcttcccctcgcgcaccgctcctgagtcctgtccaccctgccaccgccgacgccgcgccgccgcagcaattgtcaccgtcgctatggcccgtatcaaggtgcacgagctccgggggaagagcaagacggacctgcaggcgcagctcaaggagctgaagtctgagctctccctcctccgcgtagccaaggtcaccggcggcgcacccaacaagctctccaagatcaaggtggtgcgcacctcgatcgcgcgcgtgctcacagtgatctcgcagaagcagaagtcggcgttgcgggaggcgtacaagaagaagaacctgctccccctcgacctccgccctaagaagacccgtgccatccgccgccgtctgaccaagcaccagagctcaagtctgaaagagcactaatatttgcag

SEQ ID NO: 202257 - DNA, 593 bp, Zea Mays
acgcaattcagcctagggttttgtctccgctacaccctcctccactcttatataagcctccgccgccgctaacattcctcttcccctcgcgcaccgctcctgagtcctgtccaccctgccaccgccgacgccgcgccgccgcagcaattgtcaccgtcgctatggcccgtatcaaggtgcacgagctccgggggaagagcaagacggacctgcaggcgcagctcaaggagctgaagtctgagctctccctcctccgcgtagccaaggtcaccggcggcgcacccaacaagctctccaagatcaaggtggtgcgcacctcgatcgcgcgcgtgctcacagtgatctcgcagaagcagaagtcggcgttgcgggaggcgtacaagaagaagaacctgctccccctcgacctccgccctaagaagacccgtgccatccgccgccgtctgaccaagcaccagctctctctgaagaccgagagggaaaagaagcgtgagaagtacttccccatgaggaagtatgctatcaaggcctaggcattgcttgatgagcgcaaaaaaaaaaaaaaacaagaagaagaaagaagaggaaaccaa

SEQ ID NO: 202258 - DNA, 581 bp, Zea Mays
tattctattccaacataaagaactatgatattacaaagggcagacccaaccttcagaagttcattgaggaagtggacaagattgatgcatacacacagactaaacaggacccacagtttttacttgagcagacaaagaagcggcttgggattgcttaaagcttgcggccgaggatgactctcgacagaaataccagcatagtagatcgacacttgtttagtcatttgtgtgcttgaataatgaatactacatatatggttttcaataagacatggtcctctatactgggttgtacttctgaaaacaaactagttgtcctgatattatagctttcgtggtgtgtttacgtcactgtatatgaaagggtggggagagagaatgatatgccatgtattctgtcaaatgtttttttataatgtcaagagctctgacttttaattaagaagaaaaaggattatatataagggccaaccaaacacatgatgctgccaaacaatatattcgaatggctaacccacctatgcaatacggcaaagcattatcatgaatcatggttgctactaaaaaaaggaaaaaaaaaa

SEQ ID NO: 202259 - DNA, 776 bp, Zea Mays
ccgccggcccagcgagagcgagccagcgaggtgcccaggaccaggacggctggggaccctgtcatccaatcagtccgtcacacgaacacgacacgattcacacatttcaatcactcgcttcccatgaattcgctcgctttccctagctgcccgtcagcattgacgcccgcctccaccaccgcccccgcgtcctctccctttccctcgccgcgtataaagattcgctgcccgcgacaagaagatgcagctcattaccacctccgcctccgcgatcgaagctcctcacaaaccgttatcgtcgccatggcagccgccgcgcctgcaagctccgtgaaggaagtgctgccatctcccctgacctccgcctccgagccccctcccctcttcgatggcaccaccaggctgtacgttgcctatcattgcccgtacgcgcagcgcgcttggattgccaggaactacaaggacaagattaagatagtcgccatcgatcttgctgacaggccaacatggtacaaggagaaggtttatccagaaaacaaggtgccttctctggagcacaacaaccaggtgaaaggtgagagtttggatctggtcaagtacattgacagcaactttgaaggcccatcgttgctcccagaggatccttcaaaaaagcagttcgctgaggagctgcttgcatatactgatgcatttaacaaagcattatacttttgtatagtctccaaggaagttcattgaggctgaatggcccaatgcaaacagttttcttgataatg

SEQ ID NO: 202260 - DNA, 2327 bp, Zea Mays
ctaaaacctcattcgtcatcttgggcgaatccaagcgctaggtctcgcttgcttgctccctcccggtccctgatcgagtcggagacggctctctgcttcctccgcccgatgctcggttcacttcactccaaccaagtcgaaccacgcctccgctgtccgcccgtccacgctgcctctctctgcctgccctcctctccttcctccactccttgccgaaactgccacgagcacctcctgagcccaagctcgtttactttccaagtttggtgcggtgctcgcagctcgctggtgctgctgacgcggccgccgccttgattagcgacaagccacacccgctgttcctggcttcctgctcgggccggccgctttgattattcgtctctttttctttctcggcgatcgcctttttcccgagattgcattttttttattttgtcggcggtacggcactttggctccttccgcgaggccgccggccgtgcagatgcagcagcagcagcagaagctggtggtggcgtcgtgaacaagaaattcctccggttccacgcggtcccctcccctcgctttggccccatttattttcttccttttccgctggttttctggtggggggcggggggttttgcgctggttgttccggttgggtttaggacgccaaccagctggttttccccaccccgcttgcgcttccatccgtgagctcatccgcccagctggaaaacaagaatcctcatgagttctagaagggaagtcgcgatctctgggtgaggtgtccgtttcctcccgttgctggatccgctgactgaccgatcggcagagccgccatggcgtcgtcgtgcatcccggccggcggcatccggctgccggacctggagatggtcaaggccgcgccgccggcgcactccgcggcgtcctccacgctctcggaggcgtccagcgcgtccgcagtctcctcgtcggccacctcgtcatcggtggcgtcgctgtcgctcaagcgcccgcgcacgccgcggaagcggtccagccagacgtacaacgaggcggcggcactgctcgcgtccatgtacccctccgtcttccccgtcgccaggggcggcgccgcgccgcgccgcctcctcggcctcgcctccgcgctcgccgacgactcgtcctgctccgacctcctcccgccgttcccagtccccggcggccacgccgccttcctcctccgcgacctgacgccgcggatccccgccgccgaaagctgcccgtcgcccgctgccgtcagcagcgtcttcagcgagttccgcgacccggcgccgtctcctgcgacccctgacgacgctgcggcggcgcctgacgagcgcagggatcttggcttcgacgatgacgacggtttcgacgccgattctattctgtgcggcgtcgaccagagcgcggccgagggcatcgatggcatcatgggatcagaatatcatcatcaatcaagcgctgaagcggcatagtgtcgatcctgaatggtggatgtgccctgccatacctgtgaaagacattaccccggcaccaccgccttcagtggcaatggccaaggtgacagacaagaagaagactaagaagaagtcactggggacaatatacgaggaggggagtcctgagcctgccaatggcgatgacgatggagctttggcactgccagagacaggattggggcttagcttgaatactgacggggtgctcaaggcgtggtgtggcagaggctctgcgtttgctgatggcaatgggcctgacttgccattgtcccctgctcatgtggtagttaaacatgaagacaatgatctcttcccaaagaatggtaccggcgctgttatcagggaaggcaacattctgaagatgcagcgcaagcagaagccatgcactcccctcccctccaacaagcagagtcggtactaccggcctcgggtcaaggggaggtttgtcagcaaggcttgtttcctccagcgacagcaagcgttagagaaggagagctagagaaagatggatcctgctccaaggcgcatttctggggctctcttggagaagcagcagagcttctccgttttcatctctgcggcggttcccatattgtggagggttcgaacgtgcctaaagtgaagacagaaaacaacaacagactcctagttcacacacaatacgttttcagagcccaggtcacgtacccagcactcgaaaagaaaaaaaacagtaacctccagcttcgttcgtcttcccgctgaccaccacccatcagctggttctcatcaccttgtttgtctgcgctgtcaccatcgacatgttgctgcaagtagaag

SEQ ID NO: 202261 - DNA, 1018 bp, Zea Mays
cgcccgatgctcggttcacttcactccaaccaagtcgaaccacgcctccgctgtccgcccgtccacgctgcctctctctgcctgccctcctctccttcctccactccttgccgaaactgccacgagcacctcctgagcccaagctcgtttactttccaagtttggtgcggtgctcgcagctcgctggtgctgctgacgcggccgccgccttgattagcgacaagccacacccgctgttcctggcttcctgctcgggccggccgctttgattattcgtctctttttctttctcggcgatcgcctttttcccgagattgcattttttttattttgtcggcggtacggcactttggctccttccgcgaggccgccggccgtgcagatgcagcagcagcagcagaagctggttaaacatgaagacaatgatctcttcccaaagaatggtaccggcgctgttatcagggaaggcaacattctgaagatgcagcgcaagcagaagccatgcactcccctcccctccaacaagcagagtcggtactaccggcctcgggtcaaggggaggtttgtcagcaaggcttgtttcctccagcgacagcaagcgttagagaaggagagctagagaaagatggatcctgctccaaggcgcatttctggggctctcttggagaagcagcagagcttctccgttttcatctctgcggcggtacagtgcggcagatgtagagatgcctgtagagtggtgcttgtgaacctcaattctcagtttcttctatccattccaggttcccatattgtggagggttcgaacgtgcctaaagtgaagacagaaaacaacaacagactcctagttcacacacaatacgttttcagagcccaggtcacgtacccagcactcgaaaagaaaaaaaacagtaacctccagcttcgttcgtcttcccgctgaccaccacccatcagctggttctcatcaccttgtttgtctgcgctgtcaccatcgacatgttgctgcaagtagaag

SEQ ID NO: 202262 - DNA, 1102 bp, Zea Mays
tagatagccagtaaccacttcagcacagaagacatgcaggtaccccaaggcatgtatgcatatgctcagttcaattgttggtagagtggttgggctcaatttggctgtgcaaaagctagcgcaatgaaccccagccaacctggcctttctgcttttgaatagcaagtatattggagcggctgtgcttttggaaagaaacccattcgttaaagcttttgttggctctcctgacatagacatgttaatgatcaattgccccgcattttgcaaaaaactgtctcattgtgctaaaactggctcgtttggtaagacatgttaatgatcaattgcctatccccaacttgctgttgtacactgtacatgaacctggttttctttcaaacatatatatgtttttttgtttttgagaaacttcttgcatataaagctacacttttactgaagagacgagacatgcttctcactggcaagtgtggaacttccatcgcaggttaaacatgaagacaatgatctcttcccaaagaatggtaccggcgctgttatcagggaaggcaacattctgaagatgcagcgcaagcagaagccatgcactcccctcccctccaacaagcagagtcggtactaccggcctcgggtcaaggggaggtttgtcagcaaggcttgtttcctccagcgacagcaagcgttagagaaggagagctagagaaagatggatcctgctccaaggcgcatttctggggctctcttggagaagcagcagagcttctccgttttcatctctgcggcggtacagtgcggcagatgtagagatgcctgtagagtggtgcttgtgaacctcaattctcagtttcttctatccattccaggttcccatattgtggagggttcgaacgtgcctaaagtgaagacagaaaacaacaacagactcctagttcacacacaatacgttttcagagcccaggtcacgtacccagcactcgaaaagaaaaaaaacagtaacctccagcttcgttcgtcttcccgctgaccaccacccatcagctggttctcatcaccttgtttgtctgcgctgtcaccatcgacatgttgctgcaagtagaag

SEQ ID NO: 202263 - DNA, 1834 bp, Zea Mays
tagcattgctttcgggggaggggacctgctgctcgatgctctctcctcttcggccaactttgcgtgcgcgccatgctagcgttcccactctcgtgttgctttggatcgtgtccaaagccggacggaatgtgttctacaagttgtctgcatgtcgccactattattgcggggggaagtgatgcagtgacaggccacataatatcgactacgattgggggaaagaatggtgaaccaaagaggaccatcagctatatggctgagcgagttgttggaactggatcgtttggggttgtcttccaggcaaaatgcattgagactggtgaaaccgttgcaattaagaaggttctacaggacaaaagatacaagaatagggagttacaaataatgcgatcaattgaccattgcaatgtcatttccctgaagcattgtttcttctctaccacaagtagggatgaacttttccttaacttagtcatggagtttgttccagagtcactttatcgcgttctgaaacactacaaagacatgaagcagaggatgccccttatatatgttaaattgtatatgtaccaggtgggtagtggtagaattgcattctatcttgatatgcatgtgctagaagaggtgtttaatatatttacatttttcatatcttgtgcagatattccggggactagcttatattcatactgtaccaggaatttgtcaccgagatattaagcctcagaatatcttggtggatcctctttcccaccaagtcaaggtttgtgacttcgggagtgctaaaatcttgattaaaggtgaagctaatatatcatatatatgctcacgctattatcgtgctcctgagctcatatttggtgcaactgaatacacaacatctattgatatatggtcagctggatgtgttcttgctgagcttcttcttagtcaaccattatttcctggggaaagtgctgtggaccagctggttgagattatcaaggttttgggcaccccaacacgagaggaaattcgttgtatgaatcccaactatacagaattcaagtttcctcagataaaagcatgtccatggcacaagatcttccacaagagaatgcctccagaagcaatagatcttgtttcccgtcttcttcagtattcgccgaatctgcgatgtagcgcacttgaggcgtgtgctcattcattctttgacgaattacgagaatcacatgcaagactccctaatggacgcccatttcctccactattcaactttaagcaggaactagcaaacgcaccaccggagcttgtcagcaggctattaccagagcatgctcgacggcattcaggattcggttccttatttgggagtggaccgtagcccgtaggaaaatctcgttttaatgttgggctgctgtacgccgtcagagggcaatctgcatatcccaaatctaagttttagaacctgaccatcttgttgagaagttgccagccttagaaaaacccgaggtggcctcttgtgtccatgctctgccagtagcggcacataatgctggggggatggttaggtttgttaagcacagagggtaactgactgagctaatgtattttcacgttttatgtctgtatcgaacttgtacctgtgtaccctgtaccaatcgcagctgatgtaatcatgtaaatgcttctaaactacttcaagctattatgatggccaattcgcaattttacagtacaccaaacgccccaatcatttcattcttgtttttttaggttagtgtgttggtttgaggacgaggaatggagtgatttatatctgttttttatgatggaatcatggaatcaatgtttg

SEQ ID NO: 202264 - DNA, 3561 bp, Zea Mays
tacgggactggacccctagaacaaccaccacactctcctccctccctccccgcccacactccaccacccgcgccccgccgcccgccccgccgccgcctcctacttcgcctcggccgcctcggatccggaccgagcgccggccatggcgctcgccttcgacgagttcgggcgccccttcatcatcctgcgggagcaggagaagaagacgcgcctgcgggggctcgacgcgcagaaggccaacatcggcgcgggcaaggccgtcgcgcggatcctccgcacctcgctcggccccaagggcgcggacaagatgctccagtcccccgacggcgacgtcatcatcacaaatgatggggcgaccatcctggagcagatggatgttgacaaccagatcgcaaagctgatggtggagctgtcccgtagtcaagactacgaaatcggggatggtaccaccggtgtggtagtcatggcaggggcgctccttgagcaggccgagaagcttttagaacgtggtattcaccccattagggttgctgaaggctatgagatggcatcaaaggtagcttttgatcacctagaacgaatctccgaaaagtttgagttcagtgcagacaacattgagcccctggttcagacatgcatgacaactctatcctcaaagattgttaaccgttgcaagcgggcattggcagagattgctgtcaaagcagtacttgcggttgcagatttggagaggaaggatgttaacttggatttaattaaagtagaaggcaaggttggtgggaagctggaggacaccgagcttgtatatggaattattgttgacaaagatatgagccatccacaaatgccaaagagaattgaggatgctaagattgccatcctgacatgcccatttgagccaccgaagcctaagaccaagcataaggttgacattgatactgtcgagaaattccagacactgcgtgagcaagagcagaaatacttcgatgaaatggttcagaagtgcaaagatgctggtgcaaccctggttatttgtcagtggggttttgatgatgaagccaatcatttgttgatgcatagaaatctgccagctgtcagatgggttggtggtgttgaattggaattgattggacgaattgttccgagattccaagagttgagtcctgaaaagcttgggaaggctggattagtcagagagaaatcattcggaacaacaaaggataggatgctttacattgagcagtgtgccaattccagagctgtaactatcttcattcgtggtggaaataaaatgatgattgaggagaccaagcgcagtcttcatgatgctctttgtgtggcaaggaatctgatccggaacaactcaatcgtgtacggcggtggctcagcagagatatcttgctcaattgctgttgaaactgctgcagatcggcaccctggagttgagcagtacgctatcaggtcattcgctgatgcattagacgctgttccactggccttggctgaaaacagtggtttgtcgccaattgataccttgacggcggtaaaagctcagcaagttaaggagagcaacccccactgcggcatagactgcaacgatgtaggcaccaacgacatgaaagagcagaacgtctttgagaccctgattggcaagcagcagcagatcctgctggccactcaggtggtgaagatgatcctgaagatcgacgacgtcatctcaccgtccgagtactgatgaagcctgaaggaaggaggaaaaaaaaagagaggaacaggtggctatgctggatgagagtttagtaggcagcattgctgatgtgttgattggtttactccttgttcaggcgtgctccttgagcagccgttctaccatcccaaagagggcacctacatgaagctcatcgtgctgctgggccggtcagggcagccgacccgtgcacaccaactcttcgacgagatgttgcagcaaggatgccagcccacccccgagctctacaccgccttgatcggggcctactgccgaagcggcctactggacgaggcactccagctcctcaacgacatgaagagctcccctttatgccagcctgacgtctacacctacagcaccatcatcaaggcctgcattgacgctgccagcggctacgggaaggccgggcggttggacgacatggagcgagtgctctccgacatgctcgacagcgtgtcatgcaaaccggacgtttggaccatgaacatcctgattggcgcctacgggaagcggcggatgtatgacaagatgtccgcagtcatggagcacatgcgcaagctcgcgttcccgtggacgaccgcgacgtacaacaacgtgatcgaagcatttgctgaggccggcgacgccgggaacatggagcacgcgttcaaccagatgcgttccgagggcatgaggccggacactaagaccttctgctgcctgatcgacgggttcagcagggcaggccagttccataaggtggtgggcatggtgaagctcgccgagaggctcgacgtgcccgtgaacacgcctttccacaatgctgttcttggcgcgtgcgctagagcggacgatctcgtggagatggagagggtgttcaggcgcatgaagcatacgcagtgcgagcctgatgcttcgacgtactctatcttggtggaggcttatcgcaaggagggaatgaccgacaagatctatgctctgcatcaggagaacccggctctggttccagctgattttgtcatggtttgaatgacccagtgactgagtcacggtcctgaaattttagagcttggttgcattggttgagaatcttcttgctatccaccaaacagagtggcggccattcttcaactccattttttttgtctgttggtatgcagagctagtatagacgtctcctccaactcaaggggggtgaaagtgcgtcagcaacgtacgggtattcatctagtttgatatattccaagaaaaacaaagaccaatgcaggagaagatggacaatgtgacacagaataatctctggaaaatagatacctggaagcttcctcgtcaaacaagactattatgaagactacaaaagccgcccgcccgttcgacagcgagctatatatgagctgtctggaacacgatttcccccctctgttcctgcgtttttcatgcacgaataaatctgagctgatttctgtgaaatttatatgcgaaccccttgaaattcatgtgttccaaacacggcctaaaagaactttgtctagagaaaccctctaggtaacacagacgcgcaaaccttcaagtatcgatctcagagaggacatgcagaagatgatttgcagtttgctgcggggtaggctcctcagggcctttgggactgcttttgtcttcgcctgactccaccttttatttttgtttgaacttgctaccagctggatacttccagagaatccgtacagtacagcccttggctgttgaattccaagtcttcgctaaatgaaccattcagacatcgccatctatgatctgtgtaactactctgtagaccacctatggtatcaagg

SEQ ID NO: 202265 - DNA, 2260 bp, Zea Mays
cgaaactggcggagaaagcatccccaccaccgatcattatgctgagtgcttctgctaataaattgtcgaggcttaaggagcaagctgaggagtatgcagccttgatcatggaggaacttgatcctgaagggcttggctacattgagctttggcaactggagacattgctactgcaaaaggatacctatgtcaactacagccaggccttgagctacacaagccaagcactaagccagaaccttgctggtctaaggaaaagaagtccaatccgaaaaattagcagcacattgaactactatctggaggacaactggaaacgtgtttgggtgcttgcagtatggattggaataatggctggattgtttatttggaagttcattcagtaccgtaaccgttatgtctttgatgtgatgggctactgtgtcacaactgcgaaaggtgctgcagagactctcaaactgaacatggcacttattctcttgcctgtatgccgcaacactatcacctggctgcggaatacgaaagctgcacgggcattgccgtttgatgacaacattaacttccacaagactattgcagcagcaattgtggttggtgttgtccttcatgcagggaaccaccttgtatgtgattttccacggctcattagttcatcagaggtgaagtatgctccactgcgcaaatactttggggaaaataaaccaacatatctggatctggtaaaaggagtggagggcataacagggataatcatggttgtgtgcatgcttatcgcttttactctagcaacaaggtggttccgccgtagcctggtgaagcttccaaggccatttgacaaactaactggcttcaatgcattctggtactctcatcatttgttcatcattgtgtacatatcacttgttattcatggagagtgtctataccttatccacgactggtacaaaaggacgacatggatgtaccttgctgttcctgttggtctgtatgtaggggagaggactctgaggtttttcagatcgggcagttattctgtccggttattgaaggtggctatatatcctggtaatgttttgacattgcagatgtctaaacctcccacattccgttacaagagtgggcagtatatgtttgttcaatgccctgcagtttcaccttttgaatggcatcctttctcaattacttcagcacctggggatgactatctaagcattcatgttcgacaacttggtgactggacacgggagctcaaacgggtattctcagcagcttgtgagccacctgtgggtgggaaaagtggccttcttcgagcagacgaaacaaccaagaaagcgttaccaaaacttttgattgacggaccatatggttctcctgcacaagactacagcaagtatgacgttttactacttgtcggattaggtatcggtgccacaccttttattagcatactgaaagacctgctcaataacatcatcaaaatggaggaagaggaagaagcttcaagcgatctttacccaccaattggtcgcagcaaggcacatgttgatcttgacacccttatgaggattacctcaaaaccaaagagggtactgaagacaacaaatgcttacttttattgggtgacacgtgaacaagggtcttttgattggtttaaaggggtcatgaatgaaattgctgaactagatcagaggaatatcattgagatgcacaattatctcacaagtgtttacgaggaaggggatgctcggtcagcactcattacgatgctacaagctctcaaccatgccaagaatggtgttgatatagtttctggaactaaagtgcggacacattttgcaaggccaaattttaaaaaggtcttatctaagatagctaccaaacatccatatgctaagattggagtgttctactgcggggctccagttctggcacaggaactaagcaagctctgttatgaattcaatggcaagtctacaacaaaattcgaattccacaaggagcatttctgacatacaacaaggttaatgcagaatattggaacaagggggagaagatgtgatgtatattgggataggctggcctccttcgtgtcaaaacccgagccacgtgaatgtgccagagattaactagaaagacggttccctacccttgcacgatgatgtcacgcaggtctcatcaaactcttgaattttgatacttgaaaattcaaggcatacattttgtagctagcaattttgcaaagtcattgttttgtaaggca

SEQ ID NO: 202266 - DNA, 2770 bp, Zea Mays
ggacaccaagctcctgctgctggaaccaaaaatctacagctttggcaactggagacattgctactgcaaaaggatacctatgtcaactacagccaggccttgagctacacaagccaagcactaagccagaaccttgctggtctaaggaaaagaagtccaatccgaaaaattagcagcacattgaactactatctggaggacaactggaaacgtgtttgggtgcttgcagtatggattggaataatggctggattgtttatttggaagttcattcagtaccgtaaccgttatgtctttgatgtgatgggctactgtgtcacaactgcgaaaggtgctgcagagactctcaaactgaacatggcacttattctcttgcctgtatgccgcaacactatcacctggctgcggaatacgaaagctgcacgggcattgccgtttgatgacaacattaacttccacaagggaaccaccttgtatgtgattttccacggctcattagttcatcagaggtgaagtatgctccactgcgcaaatactttggggaaaataaaccaacatatctggatctggtaaaaggagtggagggcataacagggataatcatggttgtgtgcatgcttatcgcttttactctagcaacaaggtggttccgccgtagcctggtgaagcttccaaggccatttgacaaactaactggcttcaatgcattctggtactctcatcatttgttcatcattgtgtacatatcacttgttattcatggagagtgtctataccttatccacgactggtacaaaaggacgacatggatgtaccttgctgttcctgttggtctgtatgtaggggagaggactctgaggtttttcagatcgggcagttattctgtccggttattgaaggtggctatatatcctggtaatgttttgacattgcagatgtctaaacctcccacattccgttacaagagtgggcagtatatgtttgttcaatgccctgcagtttcaccttttgaatggcatcctttctcaattacttcagcacctggggatgactatctaagcattcatgttcgacaacttggtgactggacacgggagctcaaacgggtattctcagcagcttgtgagccacctgtgggtgggaaaagtggccttcttcgagcagacgaaacaaccaagaaagcgttaccaaaacttttgattgacggaccatatggttctcctgcacaagactacagcaagtatgacgttttactacttgtcggattaggtatcggtgccacaccttttattagcatactgaaagacctgctcaataacatcatcaaaatggaggaagaggaagaagcttcaagcgatctttacccaccaattggtcgcagcaaggcacatgttgatcttgacacccttatgaggattacctcaaaaccaaagagggtactgaagacaacaaatgcttacttttattgggtgacacgtgaacaagggtcttttgattggtttaaaggggtcatgaatgaaattgctgaactagatcagaggaatatcattgagatgcacaattatctcacaagtgtttacgaggaaggggatgctcggtcagcactcattacgatgctacaagctctcaaccatgccaagaatggtgttgatatagtttctggaactaaagtgcggacacattttgcaaggccaaattttaaaaaggtcttatctaagctccagttctggcacaggaactaagcaagctctgttatgaattcaatggcaagtctacaacaaaattcgaattccacaaggagcatttctgacatacaacaaggttaatgcagaatattggaacaagggggagaagatgtgatgtatgtaagtcacttgtgctttaacatgttgctttcttggcgatgagtttgaaagagcaagggattctgcacaaggtgttgtatcaccacagcttactccgcatttgtgatactactgtcccccagttacaactgcattatctattgcttgagatactaaaatacaataagatcgcatagaaaggaaaatgggggtcagcagcacatcacacaaggtttccatcgaaggttcaagagcacataccccaggtggagtagcaagggaatctctcccatggagtccacaaccataaattgtgattatataagtagcgtgatgtaggacacatacaatgaaggccaggatgtcacaaggctacctaactgtatatttgcatgcagctgagtggctgactgaggccacaagtttgatctaactttgtacttgtacacagggttgaaaaacaggaagaaggtacattttgtttttgtaagtagcgtaggttggtagtgactgggctcagattgggggccctcaagtttcattaaagcttgttccgttgcctcgttgagtggtaggttgcatttttttttaggacagatctggctgattcatgtatatctttactgaaggccatgttttttttaaaaaatttatgatgctgtctacatgttgatatggaaaggattaaatgtggaaaatgatatgtatacctgtgctaatttggcgacagattgggataggctggcctccttcgtgtcaaaacccgagccacgtgaatgtgccagagattaactagaaagacggttccctacccttgcacgatgatgtcacgcaggtctcatcaaactcttgaattttgatacttgaaaattcaaggcatacattttgtagctagcaattttgcaaagtcattgttttgtaaggca

SEQ ID NO: 202267 - DNA, 2391 bp, Zea Mays
cgggcggataccggagaattggtcttcgctcctgagccagactattgcagcagcaattgtggttggtgttgtccttcatgcagggaaccaccttgtatgtgattttccacggctcattagttcatcagaggtgaagtatgctccactgcgcaaatactttggggaaaataaaccaacatatctggatctggtaaaaggagtggagggcataacagggataatcatggttgtgtgcatgcttatcgcttttactctagcaacaaggtggttccgccgtagcctggtgaagcttccaaggccatttgacaaactaactggcttcaatgcattctggtactctcatcatttgttcatcattgtgtacatatcacttgttattcatggagagtgtctataccttatccacgactggtacaaaaggacgacatggatgtaccttgctgttcctgttggtctgtatgtaggggagaggactctgaggtttttcagatcgggcagttattctgtccggttattgaaggtggctatatatcctggtaatgttttgacattgcagatgtctaaacctcccacattccgttacaagagtgggcagtatatgtttgttcaatgccctgcagtttcaccttttgaatggcatcctttctcaattacttcagcacctggggatgactatctaagcattcatgttcgacaacttggtgactggacacgggagctcaaacgggtattctcagcagcttgtgagccacctgtgggtgggaaaagtggccttcttcgagcagacgaaacaaccaagaaagcgttaccaaaacttttgattgacggaccatatggttctcctgcacaagactacagcaagtatgacgttttactacttgtcggattaggtatcggtgccacaccttttattagcatactgaaagacctgctcaataacatcatcaaaatggaggaagaggaagaagcttcaagcgatctttacccaccaattggtcgcagcaaggcacatgttgatcttgacacccttatgaggattacctcaaaaccaaagagggtactgaagacaacaaatgcttacttttattgggtgacacgtgaacaagggtcttttgattggtttaaaggggtcatgaatgaaattgctgaactagatcagaggaatatcattgagatgcacaattatctcacaagtgtttacgaggaaggggatgctcggtcagcactcattacgatgctacaagctctcaaccatgccaagaatggtgttgatatagtttctggaactaaagtgcggacacattttgcaaggccaaattttaaaaaggtcttatctaagctccagttctggcacaggaactaagcaagctctgttatgaattcaatggcaagtctacaacaaaattcgaattccacaaggagcatttctgacatacaacaaggttaatgcagaatattggaacaagggggagaagatgtgatgtatgtaagtcacttgtgctttaacatgttgctttcttggcgatgagtttgaaagagcaagggattctgcacaaggtgttgtatcaccacagcttactccgcatttgtgatactactgtcccccagttacaactgcattatctattgcttgagatactaaaatacaataagatcgcatagaaaggaaaatgggggtcagcagcacatcacacaaggtttccatcgaaggttcaagagcacataccccaggtggagtagcaagggaatctctcccatggagtccacaaccataaattgtgattatataagtagcgtgatgtaggacacatacaatgaaggccaggatgtcacaaggctacctaactgtatatttgcatgcagctgagtggctgactgaggccacaagtttgatctaactttgtacttgtacacagggttgaaaaacaggaagaaggtacattttgtttttgtaagtagcgtaggttggtagtgactgggctcagattgggggccctcaagtttcattaaagcttgttccgttgcctcgttgagtggtaggttgcatttttttttaggacagatctggctgattcatgtatatctttactgaaggccatgttttttttaaaaaatttatgatgctgtctacatgttgatatggaaaggattaaatgtggaaaatgatatgtatacctgtgctaatttggcgacagattgggataggctggcctccttcgtgtcaaaacccgagccacgtgaatgtgccagagattaactagaaagacggttccctacccttgcacgatgatgtcacgcaggtctcatcaaactcttgaattttgatacttgaaaattcaaggcatacattttgtagctagcaattttgcaaagtcattgttttgtaaggca

SEQ ID NO: 202268 - DNA, 3345 bp, Zea Mays
ggtgtaattttttattattctaatttttattataatttctatcatgcgtgtatatgttctaataaatagaaaagtgtgaacatgtggcagagtctaagtaatgccttgtacgctatgtcgtggacctatgattgaattagagaaataaagtccaaccctagaaaactctcgcatcgtcactccaaatcagccgctagggctgcattcatccacctcgtgcttatcgcctactccaacgccgactcctgctcgtcggtcgtcgcctcgtccagctctctccgcccctccagcctagcctagcccctcctgctcactgcgtcgtctccagaatccggcctacgaccgttggcggctggtgcccccaccggcaatcggtggtcatggtctgtccctgctcactccattcagatccgctatgcgcgaggcgcaactggatctatcgtattcctggttgctctctccctctccgcgggcgatgcgcctctctaggttctaccggcgtccgtccaaccggtgttcagcgtgccttcgcaggcccccttctctgccttcgatgagtgcatttggtgagtggtgacacaactgggcggagtggtgaactagtgattgatgcgcttgccggcgacttgcaaactaagtcagaatcggcttctcatcttcctatccctttgtgtgatactactactctgtatgtggaaaaaataattattccctggtttaatattatttgttcttaagtctgaaaattcactcatatagttcatttgtgcagtgttttttagtccttagctattagagaatgatgcctggtaatacctgaatcggccactgcattttattatcctgttgttattaaatttggctattagataatgccagcgttttttattatcctgaatcggccactgcattttttagtccttagctattagagaatgatgtctgaaaattcactcgtatagataaggaacgttgtctagcaacaagagagatcatgtcacaaaaaatcctcaagctaaaacaagaacatgttacactatattttattatcctgttgttattaaatttggctcggggcttcggtaatacctgaatcggccactgcatagagtagtaaacctaaaaaaaatcagactcttattgttatataatttccatggtttcttcctctatgaataggagagaaaaattgatcctagattgcagtctactaagatgcatgcaatgcgttatctccttatacagttactgttacaagttcttctccatccagatcagtattgggaggctgcacttgatgtgactatatgttggaagaaatcctttcttgtcattgctcgaggtgataactccagtgactatattgtcgaccttcacttctcgctacaacaaagatgcggtccttcttaccatccttttactatctgatttccctaaaataattttgtttgactattcaaatcatgcttggagaggatcatggcgtgggatcagaaagagcaccaacaattttctacatgttgtacaatggggttatgattacttgaattttgtcatttgttttagtaattatgtgatctgcaattgatctagcacaagcacattcaaattgaccaatttctactagtgctataactttattccgaatggatggcttccttccggaaagactaaactgaataattatgtcaaagttgtttcactagtttggcctaataggtattgatctatggtatctagactacatattgtactatatggttgattgttctgatttcgggcttggttaatctgacgtttctagcatccaaacatatagatatatgtcagctacctgtgtaccatgcacgaataatcctataaattcaggttgaatattttctgcatgtaacctaaaacttctacgctatggtctttcacttacaggttgttaaagaagagcagatgtgctattttggttggtctaaaatcaggggtggaccaacagggggtccaggggggccacggcacaccctaggccagcccagcaaggaccccacccctttgtcgcccagccgctagcacgtagctaccacgactagtgcccaggtcaccaccgccatgcctagcgccaagccaccactcacccgcacccaacaccaagtcgccgcaatcctagtgcccattgtacatgtgaacatataaagctaccatgatcatggaggtagcaggtgcagagacacccatcaaggtttcttcgtctctagtcatttgttacgcaaattcaaatacaggtaaaagtagcattgtataaggtgcagattgatttgtacagatgaggttgcttctgaaaattgacaggaaaattccttggtatacttgtatgcaggcttttggaaagttgaggcctatttgtgcacaatagtatactaaccattgaagattattactctcatctattgcaggtacattattctgaaactcagttcatgaaatggaatgagttcagtttcaatatagcagaatagcatgctagcagcaaacatgcacgtgcccagacttcattcagtaacatgtggtggtgacatggcacaacaagaacttgaagaagtagacatgttgctgctgcctgcagggtgacgtctatggtgttgtgctgcgggcaaggcccacacaatgtgatcgggctgcacgccaatgttcaacatgtgccccaaccagaatgtgtatgctactactaatataacattcgtcattggttggttcaccccaagaggtttgctgcatgttcatggagctggtggataataaattttagttgttctttttgtggtttattagatgacatcaattagtgttcaattgagccttagagtaggatgaatacaactgtcttaagtttctttgttccagcagattgtttgggggcaaggttacctatgaacttcaagaattggtcttatgatattgttagtttgtacaacttagtgttaggttgctcgacttcttcatgaatgaggtgttagacattggtcgatcatgcagggttgaaggtgcttcatataactaaatctaccatgactttctaggaaaagatggaatggaactcaatttttggtggccgtacaagtgtggaaacttgaattcatatatacttacaatcaacattagcgcaaacagttgaccaagtttttcaattagtattttagtttgaatttagtgtgcaataatgtatgagttatttaacaatgcttattcatgacatattgaatgatacttatatttattatatcaattatgatgttattaaatatatgtgtgcatgtatatttctctttaaaaatataataatgtgttatctcaaaa

SEQ ID NO: 202269 - DNA, 2618 bp, Zea Mays
ggtgtaattttttattattctaatttttattataatttctatcatgcgtgtatatgttctaataaatagaaaagtgtgaacatgtggcagagtctaagtaatgccttgtacgctatgtcgtggacctatgattgaattagagaaataaagtccaaccctagaaaactctcgcatcgtcactccaaatcagccgctagggctgcattcatccacctcgtgcttatcgcctactccaacgccgactcctgctcgtcggtcgtcgcctcgtccagctctctccgcccctccagcctagcctagcccctcctgctcactgcgtcgtctccagaatccggcctacgaccgttggcggctggtgcccccaccggcaatcggtggtcatggtctgtccctgctcactccattcagatccgctatgcgcgaggcgcaactggatctatcgtattcctggttgctctctccctctccgcgggcgatgcgcctctctaggttctaccggcgtccgtccaaccggtgttcagcgtgccttcgcaggcccccttctctgccttcgatgagtgcatttgtattgggaggctgcacttgatgtgactatatgttggaagaaatcctttcttgtcattgctcgaggttgttaaagaagagcagatgtgctattttggttggtctaaaatcaggggtggaccaacagggggtccaggggggccacggcacaccctaggccagcccagcaaggaccccacccctttgtcgcccagccgctagcacgtagctaccacgactagtgcccaggtcaccaccgccatgcctagcgccaagccaccactcacccgcacccaacaccaagtcgccgcaatcctagtgcccattgtacatgtgaacatataaagctaccatgatcatggaggtagcaggtgcagagacacccatcaaggtttcttcgtctctagtcatttgttacgcaaattcaaatacaggtaaaagtagcattgtataaggtgcagattgatttgtacagatgaggttgcttctgaaaattgacaggaaaattccttggtatacttgtatgcaggcttttggaaagttgaggcctatttgtgcacaatagtatactaaccattgaagattattactctcatctattgcaggtacattattctgaaactcagttcatgaaatggaatgagttcagtttcaatatagcagaatagcatgctagcagcaaacatgcacgtgcccagacttcattcaggtgacatctttcattgtctcttctcaatcatttatagtgtcatttcgagttttcatggcttgtattgtgctatgagtttttagtgcttcatggtgggcttagttgcatgaagggttctcagctttgagattaattaccaatgcaccttttgagagctcaaaagatggtcttcgcattgagctagtaagttagaattttgttaaaatttgcagatttagtaaagttattatttattggttttttaaaaaaatttgactcggcgaggataaaatagccctgggcatcatatatatagagatgaccttcttgtagtatcttatataaaaaatttgttacggcataccctatataaaaaacctaggtccgccactgcctaaaatcatatagaaaagagtgttgctttggtctacaagtctgaatctatattattgctatatggatgagcttcttactgctaattaaattacagtaacatgtggtggtgacatggcacaacaagaacttgaagaagtagacatgttgctgctgcctgcagggtgacgtctatggtgttgtgctgcgggcaaggcccacacaatgtgatcgggctgcacgccaatgttcaacatgtgccccaaccagaatgtgtatgctactactaatataacattcgtcattggttggttcaccccaagaggtttgctgcatgttcatggagctggtggataataaattttagttgttctttttgtggtttattagatgacatcaattagtgttcaattgagccttagagtaggatgaatacaactgtcttaagtttctttgttccagcagattgtttgggggcaaggttacctatgaacttcaagaattggtcttatgatattgttagtttgtacaacttagtgttaggttgctcgacttcttcatgaatgaggtgttagacattggtcgatcatgcagggttgaaggtgcttcatataactaaatctaccatgactttctaggtaagatgttacatccatatgacctttgtgatatgtcataatgtgaggtgttcaactgtgtctaactactaattattgcctttttctatttgttgtataggaaaagatggaatggaactcaatttttggtggccgtacaagtgtggaaacttgaattcatatatacttacaatcaacattagcgcaaacagttgaccaagtttttcaattagtattttagtttgaatttagtgtgcaataatgtatgagttatttaacaatgcttattcatgacatattgaatgatacttatatttattatatcaattatgatgttattaaatatatgtgtgcatgtatatttctctttaaaaatataataatgtgttatctcaaaa

SEQ ID NO: 202270 - DNA, 2237 bp, Zea Mays
ggtgtaattttttattattctaatttttattataatttctatcatgcgtgtatatgttctaataaatagaaaagtgtgaacatgtggcagagtctaagtaatgccttgtacgctatgtcgtggacctatgattgaattagagaaataaagtccaaccctagaaaactctcgcatcgtcactccaaatcagccgctagggctgcattcatccacctcgtgcttatcgcctactccaacgccgactcctgctcgtcggtcgtcgcctcgtccagctctctccgcccctccagcctagcctagcccctcctgctcactgcgtcgtctccagaatccggcctacgaccgttggcggctggtgcccccaccggcaatcggtggtcatggtctgtccctgctcactccattcagatccgctatgcgcgaggcgcaactggatctatcgtattcctggttgctctctccctctccgcgggcgatgcgcctctctaggttctaccggcgtccgtccaaccggtgttcagcgtgccttcgcaggcccccttctctgccttcgatgagtgcatttgatcagtattgggaggctgcacttgatgtgactatatgttggaagaaatcctttcttgtcattgctcgaggttgttaaagaagagcagatgtgctattttggttggtctaaaatcaggggtggaccaacagggggtccaggggggccacggcacaccctaggccagcccagcaaggaccccacccctttgtcgcccagccgctagcacgtagctaccacgactagtgcccaggtcaccaccgccatgcctagcgccaagccaccactcacccgcacccaacaccaagtcgccgcaatcctagtgcccattgtacatgtgaacatataaagctaccatgatcatggaggtagcaggtgcagagacacccatcaaggtttcttcgtctctagtcatttgttacgcaaattcaaatacaggtaaaagtagcattgtataaggtgcagattgatttgtacagatgaggttgcttctgaaaattgacaggaaaattccttggtatacttgtatgcaggcttttggaaagttgaggcctatttgtgcacaatagtatactaaccattgaagattattactctcatctattgcaggtacattattctgaaactcagttcatgaaatggaatgagttcagtttcaatatagcagaatagcatgctagcagcaaacatgcacgtgcccagacttcattcaggtgacatctttcattgtctcttctcaatcatttatagtgtcatttcgagttttcatggcttgtattgtgctatgagtttttagtgcttcatggtgggcttagttgcatgaagggttctcagctttgagattaattaccaatgcaccttttgagagctcaaaagatggtcttcgcattgagctataacatgtggtggtgacatggcacaacaagaacttgaagaagtagacatgttgctgctgcctgcagggtgacgtctatggtgttgtgctgcgggcaaggcccacacaatgtgatcgggctgcacgccaatgttcaacatgtgccccaaccagaatgtgtatgctactactaatataacattcgtcattggttggttcaccccaagaggtttgctgcatgttcatggagctggtggataataaattttagttgttctttttgtggtttattagatgacatcaattagtgttcaattgagccttagagtaggatgaatacaactgtcttaagtttctttgttccagcagattgtttgggggcaaggttacctatgaacttcaagaattggtcttatgatattgttagtttgtacaacttagtgttaggttgctcgacttcttcatgaatgaggtgttagacattggtcgatcatgcagggttgaaggtgcttcatataactaaatctaccatgactttctaggaaaagatggaatggaactcaatttttggtggccgtacaagtgtggaaacttgaattcatatatacttacaatcaacattagcgcaaacagttgaccaagtttttcaattagtattttagtttgaatttagtgtgcaataatgtatgagttatttaacaatgcttattcatgacatattgaatgatacttatatttattatatcaattatgatgttattaaatatatgtgtgcatgtatatttctctttaaaaatataataatgtgttatctcaaaa

SEQ ID NO: 202271 - DNA, 3102 bp, Zea Mays
ggtgtaattttttattattctaatttttattataatttctatcatgcgtgtatatgttctaataaatagaaaagtgtgaacatgtggcagagtctaagtaatgccttgtacgctatgtcgtggacctatgattgaattagagaaataaagtccaaccctagaaaactctcgcatcgtcactccaaatcagccgctagggctgcattcatccacctcgtgcttatcgcctactccaacgccgactcctgctcgtcggtcgtcgcctcgtccagctctctccgcccctccagcctagcctagcccctcctgctcactgcgtcgtctccagaatccggcctacgaccgttggcggctggtgcccccaccggcaatcggtggtcatggtctgtccctgctcactccattcagatccgctatgcgcgaggcgcaactggatctatcgtattcctggttgctctctccctctccgcgggcgatgcgcctctctaggttctaccggcgtccgtccaaccggtgttcagcgtgccttcgcaggcccccttctctgccttcgatgagtgcatttgtattgggaggctgcacttgatgtgactatatgttggaagaaatcctttcttgtcattgctcgaggtgataactccagtgactatattgtcgaccttcacttctcgctacaacaaagatgcggtccttcttaccatccttttactatctgatttccctaaaataattttgtttgactattcaaatcatgcttggagaggatcatggcgtgggatcagaaagagcaccaacaattttctacatgttgtacaatggggttatgattacttgaattttgtcatttgttttagtaattatgtgatctgcaattgatctagcacaagcacattcaaattgaccaatttctactagtgctataactttattccgaatggatggcttccttccggaaagactaaactgaataattatgtcaaagttgtttcactagtttggcctaataggtattgatctatggtatctagactacatattgtactatatggttgattgttctgatttcgggcttggttaatctgacgtttctagcatccaaacatatagatatatgtcagctacctgtgtaccatgcacgaataatcctataaattcaggttgaatattttctgcatgtaacctaaaacttctacgctatggtctttcacttacaggttgttaaagaagagcagatgtgctattttggttggtctaaaatcaggggtggaccaacagggggtccaggggggccacggcacaccctaggccagcccagcaaggaccccacccctttgtcgcccagccgctagcacgtagctaccacgactagtgcccaggtcaccaccgccatgcctagcgccaagccaccactcacccgcacccaacaccaagtcgccgcaatcctagtgcccattgtacatgtgaacatataaagctaccatgatcatggaggtagcaggtgcagagacacccatcaaggtttcttcgtctctagtcatttgttacgcaaattcaaatacaggtaaaagtagcattgtataaggtgcagattgatttgtacagatgaggttgcttctgaaaattgacaggaaaattccttggtatacttgtatgcaggcttttggaaagttgaggcctatttgtgcacaatagtatactaaccattgaagattattactctcatctattgcaggtacattattctgaaactcagttcatgaaatggaatgagttcagtttcaatatagcagaatagcatgctagcagcaaacatgcacgtgcccagacttcattcaggtgacatctttcattgtctcttctcaatcatttatagtgtcatttcgagttttcatggcttgtattgtgctatgagtttttagtgcttcatggtgggcttagttgcatgaagggttctcagctttgagattaattaccaatgcaccttttgagagctcaaaagatggtcttcgcattgagctagtaagttagaattttgttaaaatttgcagatttagtaaagttattatttattggttttttaaaaaaatttgactcggcgaggataaaatagccctgggcatcatatatatagagatgaccttcttgtagtatcttatataaaaaatttgttacggcataccctatataaaaaacctaggtccgccactgcctaaaatcatatagaaaagagtgttgctttggtctacaagtctgaatctatattattgctatatggatgagcttcttactgctaattaaattacagtaacatgtggtggtgacatggcacaacaagaacttgaagaagtagacatgttgctgctgcctgcagggtgacgtctatggtgttgtgctgcgggcaaggcccacacaatgtgatcgggctgcacgccaatgttcaacatgtgccccaaccagaatgtgtatgctactactaatataacattcgtcattggttggttcaccccaagaggtttgctgcatgttcatggagctggtggataataaattttagttgttctttttgtggtttattagatgacatcaattagtgttcaattgagccttagagtaggatgaatacaactgtcttaagtttctttgttccagcagattgtttgggggcaaggttacctatgaacttcaagaattggtcttatgatattgttagtttgtacaacttagtgttaggttgctcgacttcttcatgaatgaggtgttagacattggtcgatcatgcagggttgaaggtgcttcatataactaaatctaccatgactttctaggaaaagatggaatggaactcaatttttggtggccgtacaagtgtggaaacttgaattcatatatacttacaatcaacattagcgcaaacagttgaccaagtttttcaattagtattttagtttgaatttagtgtgcaataatgtatgagttatttaacaatgcttattcatgacatattgaatgatacttatatttattatatcaattatgatgttattaaatatatgtgtgcatgtatatttctctttaaaaatataataatgtgttatctcaaaa

SEQ ID NO: 202272 - DNA, 3367 bp, Zea Mays
ggtgtaattttttattattctaatttttattataatttctatcatgcgtgtatatgttctaataaatagaaaagtgtgaacatgtggcagagtctaagtaatgccttgtacgctatgtcgtggacctatgattgaattagagaaataaagtccaaccctagaaaactctcgcatcgtcactccaaatcagccgctagggctgcattcatccacctcgtgcttatcgcctactccaacgccgactcctgctcgtcggtcgtcgcctcgtccagctctctccgcccctccagcctagcctagcccctcctgctcactgcgtcgtctccagaatccggcctacgaccgttggcggctggtgcccccaccggcaatcggtggtcatggtctgtccctgctcactccattcagatccgctatgcgcgaggcgcaactggatctatcgtattcctggttgctctctccctctccgcgggcgatgcgcctctctaggttctaccggcgtccgtccaaccggtgttcagcgtgccttcgcaggcccccttctctgccttcgatgagtgcatttggtgagtggtgacacaactgggcggagtggtgaactagtgattgatgcgcttgccggcgacttgcaaactaagtcagaatcggcttctcatcttcctatccctttgtgtgatactactactctgtatgtggaaaaaataattattccctggtttaatattatttgttcttaagtctgaaaattcactcatatagttcatttgtgcagtgttttttagtccttagctattagagaatgatgcctggtaatacctgaatcggccactgcattttattatcctgttgttattaaatttggctattagataatgccagcgttttttattatcctgaatcggccactgcattttttagtccttagctattagagaatgatgtctgaaaattcactcgtatagataaggaacgttgtctagcaacaagagagatcatgtcacaaaaaatcctcaagctaaaacaagaacatgttacactatattttattatcctgttgttattaaatttggctcggggcttcggtaatacctgaatcggccactgcatagagtagtaaacctaaaaaaaatcagactcttattgttatataatttccatggtttcttcctctatgaataggagagaaaaattgatcctagattgcagtctactaagatgcatgcaatgcgttatctccttatacagttactgttacaagttcttctccatccagatcagtattgggaggctgcacttgatgtgactatatgttggaagaaatcctttcttgtcattgctcgaggtgataactccagtgactatattgtcgaccttcacttctcgctacaacaaagatgcggtccttcttaccatccttttactatctgatttccctaaaataattttgtttgactattcaaatcatgcttggagaggatcatggcgtgggatcagaaagagcaccaacaattttctacatgttgtacaatggggttatgattacttgaattttgtcatttgttttagtaattatgtgatctgcaattgatctagcacaagcacattcaaattgaccaatttctactagtgctataactttattccgaatggatggcttccttccggaaagactaaactgaataattatgtcaaagttgtttcactagtttggcctaataggtattgatctatggtatctagactacatattgtactatatggttgattgttctgatttcgggcttggttaatctgacgtttctagcatccaaacatatagatatatgtcagctacctgtgtaccatgcacgaataatcctataaattcaggttgaatattttctgcatgtaacctaaaacttctacgctatggtctttcacttacaggttgttaaagaagagcagatgtgctattttggttggtctaaaatcaggggtggaccaacagggggtccaggggggccacggcacaccctaggccagcccagcaaggaccccacccctttgtcgcccagccgctagcacgtagctaccacgactagtgcccaggtcaccaccgccatgcctagcgccaagccaccactcacccgcacccaacaccaagtcgccgcaatcctagtgcccattgtacatgtgaacatataaagctaccatgatcatggaggtagcaggtgcagagacacccatcaaggtttcttcgtctctagtcatttgttacgcaaattcaaatacaggcttttggaaagttgaggcctatttgtgcacaatagtatactaaccattgaagattattactctcatctattgcaggtacattattctgaaactcagttcatgaaatggaatgagttcagtttcaatatagcagaatagcatgctagcagcaaacatgcacgtgcccagacttcattcaggtgacatctttcattgtctcttctcaatcatttatagtgtcatttcgagttttcatggcttgtattgtgctatgagtttttagtgcttcatggtgggcttagttgcatgaagggttctcagctttgagattaattaccaatgcaccttttgagagctcaaaagatggtcttcgcattgagctaggtgacgtctatggtgttgtgctgcgggcaaggcccacacaatgtgatcgggctgcacgccaatgttcaacatgtgccccaaccagaatgtgtatgctactactaatataacattcgtcattggttggttcaccccaagaggtttgctgcatgttcatggagctggtggataataaattttagttgttctttttgtggtttattagatgacatcaattagtgttcaattgagccttagagtaggatgaatacaactgtcttaagtttctttgttccagcagattgtttgggggcaaggttacctatgaacttcaagaattggtcttatgatattgttagtttgtacaacttagtgttaggttgctcgacttcttcatgaatgaggtgttagacattggtcgatcatgcagggttgaaggtgcttcatataactaaatctaccatgactttctaggaaaagatggaatggaactcaatttttggtggccgtacaagtgtggaaacttgaattcatatatacttacaatcaacattagcgcaaacagttgaccaagtttttcaattagtattttagtttgaatttagtgtgcaataatgtatgagttatttaacaatgcttattcatgacatattgaatgatacttatatttattatatcaattatgatgttattaaatatatgtgtgcatgtatatttctctttaaaaatataataatgtgttatctcaaaa

SEQ ID NO: 202273 - DNA, 3350 bp, Zea Mays
ggtgtaattttttattattctaatttttattataatttctatcatgcgtgtatatgttctaataaatagaaaagtgtgaacatgtggcagagtctaagtaatgccttgtacgctatgtcgtggacctatgattgaattagagaaataaagtccaaccctagaaaactctcgcatcgtcactccaaatcagccgctagggctgcattcatccacctcgtgcttatcgcctactccaacgccgactcctgctcgtcggtcgtcgcctcgtccagctctctccgcccctccagcctagcctagcccctcctgctcactgcgtcgtctccagaatccggcctacgaccgttggcggctggtgcccccaccggcaatcggtggtcatggtctgtccctgctcactccattcagatccgctatgcgcgaggcgcaactggatctatcgtattcctggttgctctctccctctccgcgggcgatgcgcctctctaggttctaccggcgtccgtccaaccggtgttcagcgtgccttcgcaggcccccttctctgccttcgatgagtgcatttggtgagtggtgacacaactgggcggagtggtgaactagtgattgatgcgcttgccggcgacttgcaaactaagtcagaatcggcttctcatcttcctatccctttgtgtgatactactactctgtatgtggaaaaaataattattccctggtttaatattatttgttcttaagtctgaaaattcactcatatagttcatttgtgcagtgttttttagtccttagctattagagaatgatgcctggtaatacctgaatcggccactgcattttattatcctgttgttattaaatttggctattagataatgccagcgttttttattatcctgaatcggccactgcattttttagtccttagctattagagaatgatgtctgaaaattcactcgtatagataaggaacgttgtctagcaacaagagagatcatgtcacaaaaaatcctcaagctaaaacaagaacatgttacactatattttattatcctgttgttattaaatttggctcggggcttcggtaatacctgaatcggccactgcatagagtagtaaacctaaaaaaaatcagactcttattgttatataatttccatggtttcttcctctatgaataggagagaaaaattgatcctagattgcagtctactaagatgcatgcaatgcgttatctccttatacagttactgttacaagttcttctccatccagatcagtattgggaggctgcacttgatgtgactatatgttggaagaaatcctttcttgtcattgctcgaggtgataactccagtgactatattgtcgaccttcacttctcgctacaacaaagatgcggtccttcttaccatccttttactatctgatttccctaaaataattttgtttgactattcaaatcatgcttggagaggatcatggcgtgggatcagaaagagcaccaacaattttctacatgttgtacaatggggttatgattacttgaattttgtcatttgttttagtaattatgtgatctgcaattgatctagcacaagcacattcaaattgaccaatttctactagtgctataactttattccgaatggatggcttccttccggaaagactaaactgaataattatgtcaaagttgtttcactagtttggcctaataggtattgatctatggtatctagactacatattgtactatatggttgattgttctgatttcgggcttggttaatctgacgtttctagcatccaaacatatagatatatgtcagctacctgtgtaccatgcacgaataatcctataaattcaggttgaatattttctgcatgtaacctaaaacttctacgctatggtctttcacttacaggttgttaaagaagagcagatgtgctattttggttggtctaaaatcaggggtggaccaacagggggtccaggggggccacggcacaccctaggccagcccagcaaggaccccacccctttgtcgcccagccgctagcacgtagctaccacgactagtgcccaggtcaccaccgccatgcctagcgccaagccaccactcacccgcacccaacaccaagtcgccgcaatcctagtgcccattgtacatgtgaacatataaagctaccatgatcatggaggtagcaggtgcagagacacccatcaaggtttcttcgtctctagtcatttgttacgcaaattcaaatacaggcttttggaaagttgaggcctatttgtgcacaatagtatactaaccattgaagattattactctcatctattgcaggtacattattctgaaactcagttcatgaaatggaatgagttcagtttcaatatagcagaatagcatgctagcagcaaacatgcacgtgcccagacttcattcagtgcttcatggtgggcttagttgcatgaagggttctcagctttgagattaattaccaatgcaccttttgagagctcaaaagatggtcttcgcattgagctataacatgtggtggtgacatggcacaacaagaacttgaagaagtagacatgttgctgctgcctgcagggtgacgtctatggtgttgtgctgcgggcaaggcccacacaatgtgatcgggctgcacgccaatgttcaacatgtgccccaaccagaatgtgtatgctactactaatataacattcgtcattggttggttcaccccaagaggtttgctgcatgttcatggagctggtggataataaattttagttgttctttttgtggtttattagatgacatcaattagtgttcaattgagccttagagtaggatgaatacaactgtcttaagtttctttgttccagcagattgtttgggggcaaggttacctatgaacttcaagaattggtcttatgatattgttagtttgtacaacttagtgttaggttgctcgacttcttcatgaatgaggtgttagacattggtcgatcatgcagggttgaaggtgcttcatataactaaatctaccatgactttctaggaaaagatggaatggaactcaatttttggtggccgtacaagtgtggaaacttgaattcatatatacttacaatcaacattagcgcaaacagttgaccaagtttttcaattagtattttagtttgaatttagtgtgcaataatgtatgagttatttaacaatgcttattcatgacatattgaatgatacttatatttattatatcaattatgatgttattaaatatatgtgtgcatgtatatttctctttaaaaatataataatgtgttatctcaaaa

SEQ ID NO: 202274 - DNA, 3230 bp, Zea Mays
ggtgtaattttttattattctaatttttattataatttctatcatgcgtgtatatgttctaataaatagaaaagtgtgaacatgtggcagagtctaagtaatgccttgtacgctatgtcgtggacctatgattgaattagagaaataaagtccaaccctagaaaactctcgcatcgtcactccaaatcagccgctagggctgcattcatccacctcgtgcttatcgcctactccaacgccgactcctgctcgtcggtcgtcgcctcgtccagctctctccgcccctccagcctagcctagcccctcctgctcactgcgtcgtctccagaatccggcctacgaccgttggcggctggtgcccccaccggcaatcggtggtcatggtctgtccctgctcactccattcagatccgctatgcgcgaggcgcaactggatctatcgtattcctggttgctctctccctctccgcgggcgatgcgcctctctaggttctaccggcgtccgtccaaccggtgttcagcgtgccttcgcaggcccccttctctgccttcgatgagtgcatttggtgagtggtgacacaactgggcggagtggtgaactagtgattgatgcgcttgccggcgacttgcaaactaagtcagaatcggcttctcatcttcctatccctttgtgtgatactactactctgtatgtggaaaaaataattattccctggtttaatattatttgttcttaagtctgaaaattcactcatatagttcatttgtgcagtgttttttagtccttagctattagagaatgatgcctggtaatacctgaatcggccactgcattttattatcctgttgttattaaatttggctattagataatgccagcgttttttattatcctgaatcggccactgcattttttagtccttagctattagagaatgatgtctgaaaattcactcgtatagataaggaacgttgtctagcaacaagagagatcatgtcacaaaaaatcctcaagctaaaacaagaacatgttacactatattttattatcctgttgttattaaatttggctcggggcttcggtaatacctgaatcggccactgcatagagtagtaaacctaaaaaaaatcagactcttattgttatataatttccatggtttcttcctctatgaataggagagaaaaattgatcctagattgcagtctactaagatgcatgcaatgcgttatctccttatacagttactgttacaagttcttctccatccagatcagtattgggaggctgcacttgatgtgactatatgttggaagaaatcctttcttgtcattgctcgaggttgttaaagaagagcagatgtgctattttggttggtctaaaatcaggggtggaccaacagggggtccaggggggccacggcacaccctaggccagcccagcaaggaccccacccctttgtcgcccagccgctagcacgtagctaccacgactagtgcccaggtcaccaccgccatgcctagcgccaagccaccactcacccgcacccaacaccaagtcgccgcaatcctagtgcccattgtacatgtgaacatataaagctaccatgatcatggaggtagcaggtgcagagacacccatcaaggtttcttcgtctctagtcatttgttacgcaaattcaaatacaggtaaaagtagcattgtataaggtgcagattgatttgtacagatgaggttgcttctgaaaattgacaggaaaattccttggtatacttgtatgcaggcttttggaaagttgaggcctatttgtgcacaatagtatactaaccattgaagattattactctcatctattgcaggtacattattctgaaactcagttcatgaaatggaatgagttcagtttcaatatagcagaatagcatgctagcagcaaacatgcacgtgcccagacttcattcaggtgacatctttcattgtctcttctcaatcatttatagtgtcatttcgagttttcatggcttgtattgtgctatgagtttttagtgcttcatggtgggcttagttgcatgaagggttctcagctttgagattaattaccaatgcaccttttgagagctcaaaagatggtcttcgcattgagctagtaagttagaattttgttaaaatttgcagatttagtaaagttattatttattggttttttaaaaaaatttgactcggcgaggataaaatagccctgggcatcatatatatagagatgaccttcttgtagtatcttatataaaaaatttgttacggcataccctatataaaaaacctaggtccgccactgcctaaaatcatatagaaaagagtgttgctttggtctacaagtctgaatctatattattgctatatggatgagcttcttactgctaattaaattacagtaacatgtggtggtgacatggcacaacaagaacttgaagaagtagacatgttgctgctgcctgcagggtgacgtctatggtgttgtgctgcgggcaaggcccacacaatgtgatcgggctgcacgccaatgttcaacatgtgccccaaccagaatgtgtatgctactactaatataacattcgtcattggttggttcaccccaagaggtttgctgcatgttcatggagctggtggataataaattttagttgttctttttgtggtttattagatgacatcaattagtgttcaattgagccttagagtaggatgaatacaactgtcttaagtttctttgttccagcagattgtttgggggcaaggttacctatgaacttcaagaattggtcttatgatattgttagtttgtacaacttagtgttaggttgctcgacttcttcatgaatgaggtgttagacattggtcgatcatgcagggttgaaggtgcttcatataactaaatctaccatgactttctaggaaaagatggaatggaactcaatttttggtggccgtacaagtgtggaaacttgaattcatatatacttacaatcaacattagcgcaaacagttgaccaagtttttcaattagtattttagtttgaatttagtgtgcaataatgtatgagttatttaacaatgcttattcatgacatattgaatgatacttatatttattatatcaattatgatgttattaaatatatgtgtgcatgtatatttctctttaaaaatataataatgtgttatctcaaaa

SEQ ID NO: 202275 - DNA, 3636 bp, Zea Mays
ggtgtaattttttattattctaatttttattataatttctatcatgcgtgtatatgttctaataaatagaaaagtgtgaacatgtggcagagtctaagtaatgccttgtacgctatgtcgtggacctatgattgaattagagaaataaagtccaaccctagaaaactctcgcatcgtcactccaaatcagccgctagggctgcattcatccacctcgtgcttatcgcctactccaacgccgactcctgctcgtcggtcgtcgcctcgtccagctctctccgcccctccagcctagcctagcccctcctgctcactgcgtcgtctccagaatccggcctacgaccgttggcggctggtgcccccaccggcaatcggtggtcatggtctgtccctgctcactccattcagatccgctatgcgcgaggcgcaactggatctatcgtattcctggttgctctctccctctccgcgggcgatgcgcctctctaggttctaccggcgtccgtccaaccggtgttcagcgtgccttcgcaggcccccttctctgccttcgatgagtgcatttggtgagtggtgacacaactgggcggagtggtgaactagtgattgatgcgcttgccggcgacttgcaaactaagtcagaatcggcttctcatcttcctatccctttgtgtgatactactactctgtatgtggaaaaaataattattccctggtttaatattatttgttcttaagtctgaaaattcactcatatagttcatttgtgcagtgttttttagtccttagctattagagaatgatgcctggtaatacctgaatcggccactgcattttattatcctgttgttattaaatttggctattagataatgccagcgttttttattatcctgaatcggccactgcattttttagtccttagctattagagaatgatgtctgaaaattcactcgtatagataaggaacgttgtctagcaacaagagagatcatgtcacaaaaaatcctcaagctaaaacaagaacatgttacactatattttattatcctgttgttattaaatttggctcggggcttcggtaatacctgaatcggccactgcatagagtagtaaacctaaaaaaaatcagactcttattgttatataatttccatggtttcttcctctatgaataggagagaaaaattgatcctagattgcagtctactaagatgcatgcaatgcgttatctccttatacagttactgttacaagttcttctccatccagatcagtattgggaggctgcacttgatgtgactatatgttggaagaaatcctttcttgtcattgctcgaggtgataactccagtgactatattgtcgaccttcacttctcgctacaacaaagatgcggtccttcttaccatccttttactatctgatttccctaaaataattttgtttgactattcaaatcatgcttggagaggatcatggcgtgggatcagaaagagcaccaacaattttctacatgttgtacaatggggttatgattacttgaattttgtcatttgttttagtaattatgtgatctgcaattgatctagcacaagcacattcaaattgaccaatttctactagtgctataactttattccgaatggatggcttccttccggaaagactaaactgaataattatgtcaaagttgtttcactagtttggcctaataggtattgatctatggtatctagactacatattgtactatatggttgattgttctgatttcgggcttggttaatctgacgtttctagcatccaaacatatagatatatgtcagctacctgtgtaccatgcacgaataatcctataaattcaggttgaatattttctgcatgtaacctaaaacttctacgctatggtctttcacttacaggttgttaaagaagagcagatgtgctattttggttggtctaaaatcaggggtggaccaacagggggtccaggggggccacggcacaccctaggccagcccagcaaggaccccacccctttgtcgcccagccgctagcacgtagctaccacgactagtgcccaggtcaccaccgccatgcctagcgccaagccaccactcacccgcacccaacaccaagtcgccgcaatcctagtgcccattgtacatgtgaacatataaagctaccatgatcatggaggtagcaggtgcagagacacccatcaaggtttcttcgtctctagtcatttgttacgcaaattcaaatacaggcttttggaaagttgaggcctatttgtgcacaatagtatactaaccattgaagattattactctcatctattgcaggtacattattctgaaactcagttcatgaaatggaatgagttcagtttcaatatagcagaatagcatgctagcagcaaacatgcacgtgcccagacttcattcagtgcttcatggtgggcttagttgcatgaagggttctcagctttgagattaattaccaatgcaccttttgagagctcaaaagatggtcttcgcattgagctagtaagttagaattttgttaaaatttgcagatttagtaaagttattatttattggttttttaaaaaaatttgactcggcgaggataaaatagccctgggcatcatatatatagagatgaccttcttgtagtatcttatataaaaaatttgttacggcataccctatataaaaaacctaggtccgccactgcctaaaatcatatagaaaagagtgttgctttggtctacaagtctgaatctatattattgctatatggatgagcttcttactgctaattaaattacagtaacatgtggtggtgacatggcacaacaagaacttgaagaagtagacatgttgctgctgcctgcagggtgacgtctatggtgttgtgctgcgggcaaggcccacacaatgtgatcgggctgcacgccaatgttcaacatgtgccccaaccagaatgtgtatgctactactaatataacattcgtcattggttggttcaccccaagaggtttgctgcatgttcatggagctggtggataataaattttagttgttctttttgtggtttattagatgacatcaattagtgttcaattgagccttagagtaggatgaatacaactgtcttaagtttctttgttccagcagattgtttgggggcaaggttacctatgaacttcaagaattggtcttatgatattgttagtttgtacaacttagtgttaggttgctcgacttcttcatgaatgaggtgttagacattggtcgatcatgcagggttgaaggtgcttcatataactaaatctaccatgactttctaggaaaagatggaatggaactcaatttttggtggccgtacaagtgtggaaacttgaattcatatatacttacaatcaacattagcgcaaacagttgaccaagtttttcaattagtattttagtttgaatttagtgtgcaataatgtatgagttatttaacaatgcttattcatgacatattgaatgatacttatatttattatatcaattatgatgttattaaatatatgtgtgcatgtatatttctctttaaaaatataataatgtgttatctcaaaa

SEQ ID NO: 202276 - DNA, 4370 bp, Zea Mays
aattgcagttctagtttaacacctgcgaggctaaagtctgttctcaccgatccacttcatccaatacacacgcatccataacacatgcgtactgccgatttgaacatcatgaactgaaaaacaaataaacgcgtgccattcacgagttcggacggagacgcctgctggatcgtttggttttattacacatgcgccactgtaaaacaccggttggtcacggctcacggaaacggcgcgtgacgcttcatctcgtgcggcacgacgtccaccgcgaagcccttgcggtggcggagccagtagtcggcctggcccgggtgctcctcggcgggcgcctcgacgtcggccctagcggcgcggagctcctccgtggagaggccgtacctgtcgtctcgcttccggaccaggtcggggcgcacggctgcggcggggtcggcctgcggggacaccatgagcgcgggggcgcccagcggcaggcggtcgccgcggtccacctgccaggtgcaccagaacttgccgaacgtggcggccatgtggtccagctccgccttctccagcagccccgccacgtgcgggctcgtccacaggcctgacttgatctcgtgcgcgtgcgagtgccacagccgctgctcctccgccggcagcgagtcgaagatcttcctcgacacgatgtactccacgcctgcatgcagttaaaagaaaagatccatgtagatgcagtgtccttcttgggcgtgagcacatgccaaagaatcaattgaagatgacagtaagatggggtgcacggtgcacgcaccgatgagacgcgcgtcggctttgtcggagtcatagacggcgcactggaggaagtcctggttgaggcgggagacgtagtggtgcgtctccacctgccgcttcgggtcgtgcgcgtacagcgcgaacgtgcacatgtgctgcttcgcctgcttcacggggcgcaacgactgcatcgccgccgcgcccatgtccagcaccttggacgctaccgtggtcggctgcccgggcggcgcggtgctgctgccgccgccgccgcccacagaggccggggttggcagtggtttcccgtcgctggacgccatcgtcgggtcggctagaccgaacaaaaattcagccttgtgttacggcatcagatgagtggcgcagtgcgctgcgctacggcgcgttctttaaaacacggcaccggagacgtcgggaatggctgcgcgtgacacgtatggagctcgcggtctcgacgtggcggacggcatgtgaccgaggtggcagatatgcctgaaacagctgtagcgacaaatgtcaccgactcaccgatgactgcggtgctgcgcctgtgcgggatgcttgacagtgccgaagcgtcgcagatgggccgccttggttgggctctctcttttcccaggccacgagcccacccgtccgctgaatggcaaacccaccacggccaccatctcgctcgccaccgcttccttcccgatgccgtcgtcgacgatccgaagcatctccatcaccgtctccgacgacgacggtgctgcggcggcaccgtcacggcggccgcgcgctggaagacggaaggcggtggcgcgtagcttggggcagcgggcggtgcggctggtggcgcggtggtggcccgttctcctgctcctcccggccgtcgcgctcctcctcttcgaggcgtcgcggctccgcgcctcatccccgggcccctccccaccggtctccagcctcggacggctcgacccgaccacacgtctcgtccatggcgtgcgcgagccttgcttgaagctccttagccccaaaagtttggcaaatgtggtgttcccggagggtacaagactcgattctgtggtgagcagaatcacgtacaaaactgatgacgatgactatgacacataccactccgaagcaaactctacatatttactgcaacatgcggaagcaacaaggttcgacctgtttacaggatttcagacacttgctgaaagagaagatagcttcaaggtgaatgagactgttagtgtgcactgtggtttctacagcgacaatggtggcttcaaaatttctgaggaggacaggagatacatgagagcctgtaaagttgttgtgtctacctgtgcatttggtggtggggatgatctatatcaacctattggaatggccaattcttctattggcagggtttgctatgttgctttctgggatgaagtgacactagcagctcaggaagctgaaggaaaggtaattggtgatgatagcatgataggaaggtggcggatcattgttgtcaggagcctcccttttgtagatcaacgattaaatgggaagataccaaagatgttgactcatcgccttttcacagaggcaaggtactctatatgggttgactctaaataccaattacgaagagatcctataggaatgcttgaagctcttctttggaggacaaactctacatttgctatctctgaacatggagcacggagtaacatatatgatgaggggaaagctattgttcaaaagcacaaggctacccctgaagaggtagaggtacaattgactcggtatcgtcaagatggaatgccggacacaaaaagattgcacggactgaaagctctagccgaagcctctgttattgtgagggaactcacccctgcaacgaaccatttcatgtgtgcttggtttaatgaagtgggatcttgtgaatagtttgggtcacacaaggaaagtaaaacctcttacacagacaaattcagggtcttctactacttcgtaaccttcctcccagttcatttgctggtagccaactaaccattgatttacatatggttctaatcgtcgatactcgacatctctggttcacaattttgttgttgtatattatcatctttgcgttcttcctgcgagggaatcctggatctgaaccagaaacacgttaagctgttgcttcactgcaacgcaatcacacgatgttgccactatatatgtaaaagatatgctttctttggttagaagagaatgaacacttttctgcctcctttccgtttcctgatggaacatgtgaaaatggtgtccgttatcaattaattcggcttctgctgctgatggttgtcgcggaaactagcagcaatggaagttctgttcccgtcattttatttggactcgagaatttctctgattaccgatgtttctaattggtacttgaacagcggaatcgtttgaaaaaaatatggtcctgtctgaagctatattttgttaatgcagctccctttgcccaatagtaatacattgaatttcttttttttagatggaattatggaaccgccattattctgagtttgggaagagtttcaaaggaagcgtttaaatctcagatgagctgataaggacatatggaatacaacctggtatcctaaggctgcagatcatgtaactaccgagaagacatggtatgttgttgatgcaacagacaagatcctaggcaggctagcatccaccattgcagtacatatcaggggaaagaatgaacccacttacactcctagtgtagacatgggagcttttgttattgtggtcaatgcagataaggttgctgtttctggtaaaaagcggtcacaaaagctttataggaggcactccggaaggcctggagggatgaaagaagaaacttttgaccaacttcagaaaagaattccagagagaatcattgaacatgcggttcgtggcatgctccccaagggaaggctgggaagaagattatttacccacctcaaggtatacaaagggacagaacatccgcacgaggctcaaaaacctgtcccactcccgatcagggataaaagaatacaaaaaactggatagagaattcatcgactgaaaaggatgcagtggcgaattcctccccagaaggttttgccctttgtttggaatgctatcctcataaccatgcctctgatcggggaggggggggggggagtataaatcctctttgtaattttgatgtttaccaatgcatgaaattcagtcaaatttctgtcaatgagtagtcatgtaatatggtacggtttaaatcaacctaaaatctttattttccagttgaagtttgtaattttgacctcgtatggtatgaagtggcagattgtttcaatgttcggcctgccatctggatatacgaaattgatcgacagttttcataaccaattttcttgggtggcgaggtgtgatattttcttctgagtttgtagaatagacatgtgcttcctcatgtgacctatatcttttggtaaaattgttgtggatgtaactgaatgctggaatgcgtgggaataaacatggaaacataaaataaaataccacacatacag

SEQ ID NO: 202277 - DNA, 2262 bp, Zea Mays
cgagcccacccgtccgctgaatggcaaacccaccacggccaccatctcgctcgccaccgcttccttcccgatgccgtcgtcgacgatccgaagcatctccatcaccgtctccgacgacgacggtgctgcggcggcaccgtcacggcggccgcgcgctggaagacggaaggcggtggcgcgtagcttggggcagcgggcggtgcggctggtggcgcggtggtggcccgttctcctgctcctcccggccgtcgcgctcctcctcttcgaggcgtcgcggctccgcgcctcatccccgggcccctccccaccggtctccagcctcggacggctcgacccgaccacacgtctcgtccatggcgtgcgcgagccttgcttgaagctccttagccccaaaagtttggcaaatgtggtgttcccggagggtacaagactcgattctgtggtgagcagaatcacgtacaaaactgatgacgatgactatgacacataccactccgaagcaaactctacatatttactgcaacatgcggaagcaacaaggttcgacctgtttacaggatttcagacacttgctgaaagagaagatagcttcaaggtgaatgagactgttagtgtgcactgtggtttctacagcgacaatggtggcttcaaaatttctgaggaggacaggagatacatgagagcctgtaaagttgttgtgtctacctgtgcatttggtggtggggatgatctatatcaacctattggaatggccaattcttctattggcagggtttgctatgttgctttctgggatgaagtgacactagcagctcaggaagctgaaggaaaggtaattggtgatgatagcatgataggaaggtggcggatcattgttgtcaggagcctcccttttgtagatcaacgattaaatgggaagataccaaagatgttgactcatcgccttttcacagaggcaaggtactctatatgggttgactctaaataccaattacgaagagatcctataggaatgcttgaagctcttctttggaggacaaactctacatttgctatctctgaacatggagcacggagtaacatatatgatgaggggaaagctattgttcaaaagcacaaggctacccctgaagaggtagaggtacaattgactcggtatcgtcaagatggaatgccggacacaaaaagattgcacggactgaaagctctagccgaagcctctgttattgtgagggaactcacccctgcaacgaaccatttcatgtgtgcttggtttaatgaagtggacatatggaatacaacctggtatcctaaggctgcagatcatgtaactaccgagaagacatggtatgttgttgatgcaacagacaagatcctaggcaggctagcatccaccattgcagtacatatcaggggaaagaatgaacccacttacactcctagtgtagacatgggagcttttgttattgtggtcaatgcagataaggttgctgtttctggtaaaaagcggtcacaaaagctttataggaggcactccggaaggcctggagggatgaaagaagaaacttttgaccaacttcagaaaagaattccagagagaatcattgaacatgcggttcgtggcatgctccccaagggaaggctgggaagaagattatttacccacctcaaggtatacaaagggacagaacatccgcacgaggctcaaaaacctgtcccactcccgatcagggataaaagaatacaaaaaactggatagagaattcatcgactgaaaaggatgcagtggcgaattcctccccagaaggttttgccctttgtttggaatgctatcctcataaccatgcctctgatcggggaggggggggggggagtataaatcctctttgtaattttgatgtttaccaatgcatgaaattcagtcaaatttctgtcaatgagtagtcatgtaatatggtacggtttaaatcaacctaaaatctttattttccagttgaagtttgtaattttgacctcgtatggtatgaagtggcagattgtttcaatgttcggcctgccatctggatatacgaaattgatcgacagttttcataaccaattttcttgggtggcgaggtgtgatattttcttctgagtttgtagaatagacatgtgcttcctcatgtgacctatatcttttggtaaaattgttgtggatgtaactgaatgctggaatgcgtgggaataaacatggaaacataaaataaaataccacacatacag

SEQ ID NO: 202278 - DNA, 1824 bp, Zea Mays
ctcgccaccgcttccttcccgatgccgtcgtcgacgatccgaagcatctccatcaccgtctccgacgacgacggtgctgcggcggcaccgtcacggcggccgcgcgctggaagacggaaggcggtggcgcgtagcttggggcagcgggcggtgcggctggtggcgcggtggtggcccgttctcctgctcctcccggccgtcgcgctcctcctcttcgaggcgtcgcggctccgcgcctcatccccgggcccctccccaccggtctccagcctcggacggctcgacccgaccacacgtctcgtccatggcgtgcgcgagccttgcttgaagctccttagccccaaaagtttggcaaatgtggtgttcccggagggtacaagactcgattctgtggtgagcagaatcacgtacaaaactgatgacgatgactatgacacataccactccgaagcaaactctacatatttactgcaacatgcggaagcaacaaggttcgacctgtttacaggatttcagacacttgctgaaagagaagatagcttcaaggtgaatgagactgttagtgtgcactgtggtttctacagcgacaatggtggcttcaaaatttctgaggaggacaggagatacatgagagcctgtaaagttgttgtgtctacctgtgcatttggtggtggggatgatctatatcaacctattggaatggccaattcttctattggcagggtttgctatgttgctttctgggatgaagtgacactagcagctcaggaagctgaaggaaaggtaattggtgatgatagcatgataggaaggtggcggatcattgttgtcaggagcctcccttttgtagatcaacgattaaatgggaagataccaaagaggcaaggtactctatatgggttgactctaaataccaattacgaagagatcctataggaatgcttgaagctcttctttggaggacaaactctacatttgctatctctgaacatggagcacggagtaacatatatgatgaggggaaagctattgttcaaaagcacaaggctacccctgaagaggtagaggtacaattgactcggtatcgtcaagatggaatgccggacacaaaaagattgcacggactgaaagctctagccgaagcctctgttattgtgagggaactcacccctgcaacgaaccatttcatgtgtgcttggtttaatgaagtggttcgcttcacatctcgtgatcagctcagttttccatacgttttgtggcggctaaacatgcatggattgagcatgtttcctgtatgcactcgcagggatcttgtgaatagtttgggtcacacaaggaaagtaaaacctcttacacagacaaattcagggtcttctactacttcgtaaccttcctcccagttcatttgctggtagccaactaaccattgatttacatatggttctaatcgtcgatactcgacatctctggttcacaattttgttgttgtatattatcatctttgcgttcttcctgcgagggaatcctggatctgaaccagaaacacgttaagctgttgcttcactgcaacgcaatcacacgatgttgccactatatatgtaaaagatatgctttctttggttagaagagaatgaacacttttctgcctcctttccgtttcctgatggaacatgtgaaaatggtgtccgttatcaattaattcggcttctgctgctgatggttgtcgcggaaactagcagcaatggaagttctgttcccgtcattttatttggactcgagaatttctctgattaccgatgtttctaattggtacttgaacagcgg

SEQ ID NO: 202279 - DNA, 2342 bp, Zea Mays
ctcgccaccgcttccttcccgatgccgtcgtcgacgatccgaagcatctccatcaccgtctccgacgacgacggtgctgcggcggcaccgtcacggcggccgcgcgctggaagacggaaggcggtggcgcgtagcttggggcagcgggcggtgcggctggtggcgcggtggtggcccgttctcctgctcctcccggccgtcgcgctcctcctcttcgaggcgtcgcggctccgcgcctcatccccgggcccctccccaccggtctccagcctcggacggctcgacccgaccacacgtctcgtccatggcgtgcgcgagccttgcttgaagctccttagccccaaaagtttggcaaatgtggtgttcccggagggtacaagactcgattctgtggtgagcagaatcacgtacaaaactgatgacgatgactatgacacataccactccgaagcaaactctacatatttactgcaacatgcggaagcaacaaggttcgacctgtttacaggatttcagacacttgctgaaagagaagatagcttcaaggtgaatgagactgttagtgtgcactgtggtttctacagcgacaatggtggcttcaaaatttctgaggaggacaggagatacatgagagcctgtaaagttgttgtgtctacctgtgcatttggtggtggggatgatctatatcaacctattggaatggccaattcttctattggcagggtttgctatgttgctttctgggatgaagtgacactagcagctcaggaagctgaaggaaaggtaattggtgatgatagcatgataggaaggtggcggatcattgttgtcaggagcctcccttttgtagatcaacgattaaatgggaagataccaaagatgttgactcatcgccttttcacagaggcaaggtactctatatgggttgactctaaataccaattacgaagagatcctataggaatgcttgaagctcttctttggaggacaaactctacatttgctatctctgaacatggagcacggagtaacatatatgatgaggggaaagctattgttcaaaagcacaaggctacccctgaagaggtagaggtacaattgactcggtatcgtcaagatggaatgccggacacaaaaagattgcacggactgaaagctctagccgaagcctctgttattgtgagggaactcacccctgcaacgaaccatttcatgtgtgcttggtttaatgaagtggttcgcttcacatctcgtgatcagctcagttttccatacgttttgtggcggctaaacatgcatggattgagcatgtttcctgtatgcactcgcagggatcttgtgaatagtttgggtcacacaaggaaagacatatggaatacaacctggtatcctaaggctgcagatcatgtaactaccgagaagacatggtatgttgttgatgcaacagacaagatcctaggcaggctagcatccaccattgcagtacatatcaggggaaagaatgaacccacttacactcctagtgtagacatgggagcttttgttattgtggtcaatgcagataaggttgctgtttctggtaaaaagcggtcacaaaagctttataggaggcactccggaaggcctggagggatgaaagaagaaacttttgaccaacttcagaaaagaattccagagagaatcattgaacatgcggttcgtggcatgctccccaagggaaggctgggaagaagattatttacccacctcaaggtatacaaagggacagaacatccgcacgaggctcaaaaacctgtcccactcccgatcagggataaaagaatacaaaaaactggatagagaattcatcgactgaaaaggatgcagtggcgaattcctccccagaaggttttgccctttgtttggaatgctatcctcataaccatgcctctgatcggggaggggggggggggagtataaatcctctttgtaattttgatgtttaccaatgcatgaaattcagtcaaatttctgtcaatgagtagtcatgtaatatggtacggtttaaatcaacctaaaatctttattttccagttgaagtttgtaattttgacctcgtatggtatgaagtggcagattgtttcaatgttcggcctgccatctggatatacgaaattgatcgacagttttcataaccaattttcttgggtggcgaggtgtgatattttcttctgagtttgtagaatagacatgtgcttcctcatgtgacctatatcttttggtaaaattgttgtggatgtaactgaatgctggaatgcgtgggaataaacatggaaacataaaataaaataccacacatacag

SEQ ID NO: 202280 - DNA, 2493 bp, Zea Mays
ctcgccaccgcttccttcccgatgccgtcgtcgacgatccgaagcatctccatcaccgtctccgacgacgacggtgctgcggcggcaccgtcacggcggccgcgcgctggaagacggaaggcggtggcgcgtagcttggggcagcgggcggtgcggctggtggcgcggtggtggcccgttctcctgctcctcccggccgtcgcgctcctcctcttcgaggcgtcgcggctccgcgcctcatccccgggcccctccccaccggtctccagcctcggacggctcgacccgaccacacgtctcgtccatggcgtgcgcgagccttgcttgaagctccttagccccaaaagtttggcaaatgtggtgttcccggagggtacaagactcgattctgtggtgagcagaatcacgtacaaaactgatgacgatgactatgacacataccactccgaagcaaactctacatatttactgcaacatgcggaagcaacaaggttcgacctgtttacaggatttcagacacttgctgaaagagaagatagcttcaaggtgaatgagactgttagtgtgcactgtggtttctacagcgacaatggtggcttcaaaatttctgaggaggacaggagatacatgagagcctgtaaagttgttgtgtctacctgtgcatttggtggtggggatgatctatatcaacctattggaatggccaattcttctattggcagggtttgctatgttgctttctgggatgaagtgacactagcagctcaggaagctgaaggaaaggtaattggtgatgatagcatgataggaaggtggcggatcattgttgtcaggagcctcccttttgtagatcaacgattaaatgggaagataccaaagatgttgactcatcgccttttcacagaggcaaggtactctatatgggttgactctaaataccaattacgaagagatcctataggaatgcttgaagctcttctttggaggacaaactctacatttgctatctctgaacatggagcacggagtaacatatatgatgaggggaaagctattgttcaaaagcacaaggctacccctgaagaggtagaggtacaattgactcggtatcgtcaagatggaatgccggacacaaaaagattgcacggactgaaagctctagccgaagcctctgttattgtgagggaactcacccctgcaacgaaccatttcatgtgtgcttggtttaatgaagtggttcgcttcacatctcgtgatcagctcagttttccatacgttttgtggcggctaaacatgcatggattgagcatgtttcctgtatgcactcgcagggatcttgtgaatagtttgggtcacacaaggaaagtaaaacctcttacacagacaaattcagggtcttctactacttcgtaaccttcctcccagttcatttgctgatggaattatggaaccgccattattctgagtttgggaagagtttcaaaggaagcgtttaaatctcagatgagctgataaggacatatggaatacaacctggtatcctaaggctgcagatcatgtaactaccgagaagacatggtatgttgttgatgcaacagacaagatcctaggcaggctagcatccaccattgcagtacatatcaggggaaagaatgaacccacttacactcctagtgtagacatgggagcttttgttattgtggtcaatgcagataaggttgctgtttctggtaaaaagcggtcacaaaagctttataggaggcactccggaaggcctggagggatgaaagaagaaacttttgaccaacttcagaaaagaattccagagagaatcattgaacatgcggttcgtggcatgctccccaagggaaggctgggaagaagattatttacccacctcaaggtatacaaagggacagaacatccgcacgaggctcaaaaacctgtcccactcccgatcagggataaaagaatacaaaaaactggatagagaattcatcgactgaaaaggatgcagtggcgaattcctccccagaaggttttgccctttgtttggaatgctatcctcataaccatgcctctgatcggggaggggggggggggagtataaatcctctttgtaattttgatgtttaccaatgcatgaaattcagtcaaatttctgtcaatgagtagtcatgtaatatggtacggtttaaatcaacctaaaatctttattttccagttgaagtttgtaattttgacctcgtatggtatgaagtggcagattgtttcaatgttcggcctgccatctggatatacgaaattgatcgacagttttcataaccaattttcttgggtggcgaggtgtgatattttcttctgagtttgtagaatagacatgtgcttcctcatgtgacctatatcttttggtaaaattgttgtggatgtaactgaatgctggaatgcgtgggaataaacatggaaacataaaataaaataccacacatacag

SEQ ID NO: 202281 - DNA, 2441 bp, Zea Mays
ccacgcgacaccgattcagttaacaacgacgaaaattatcacagcgccataaaacacagcggctgccgcccgcgacacgctccgcctccttccactccctcgccaccaccacgcaccaccacctctgctctgctgtgtgtgtgcctaacgggtcggaggcggggacggccccaccgccccgagctcccaaccgccgacagtctccggcggctccaacttcaatacctccctcctcggcatgccggttgccgtcgcgttggcggcggccgccgcgctcgtcgtcctgctcgtcctgtccgcggtggccgccgccgttttcttcgcgcgcacgcggggcgccaggccgccctcgctgtcgcgcgtcgagcacgcgccgtcgtccgcctccggctcctcccgcgccgcgtcgtccgcgcgcaaggagaaggtcggcgcggaccaggtcgccgagccgggcgccgcctcctctggcgtggccagctcttccgcggccgcgagctccctcgagtcgccggtgaagaggaaggcggaagcggtcagggtcggcggcggcggcggcggggccgccgcgggggtggagatggaggttgggtgggggaggtggtacgacctgacggagctggagatcgccacgggcgggttctgcccagcgaacgtggtcggggagggaggctacggcaccgtgtaccgcggcatccttgccggcggcgaggtcgtcgcggtcaaggacttgtttgatcacaagggccaggccgagaaggaattcaaggtggaggttgaagccatcggcaaagtgaggcacaagcaccttgtcggtctcatcgggtactgcgcagaaggtccaaaacggatgctcctttacgagttcgtcgaaaatggcaacttggagcagtggctgcacggcgacgtcggaccggtcagccctctgacctgggaaatacggatgaagatcgccgtcggaacggccaaaggcgtacctgcacgaaggcctggagccgaaggtggtgcaccgcgacatcaagtcgagcaacatcctgctggacaagagatggaaccccaaggtgtcggacttcggcatggccaaggtgctggggcccgggtccagctacgtgacgacccgcgtgatgggcacgttcgggtacgtggcccccgagtacgcgtcgacgggcatgctgaacgagagcagcgacgtctacagcttcggcgtgctgctcatggagctcatctccgggcggagccccgtggactacaaccggccggccggcgaggtgaacctggtggagtggttcagggccatggtgggcgcccggcgcgtggaggacctggtggacccgcggatccccgcgccgccgccgcctccgcgggtgctcaaccgggtgctgctcgtctgcctccgatgcatcgacgccgacgcgcacaagcggccccggatggggcagatcgtgcacatgctcgagggtgacgagttccccttccgcacggagcaccgctcgccgcgggcgtctcaccggacgtcgacgggctcacggccgtcgcttctgtcggagaacgtcggtgccaccgacgactcggacaagtcgatggcgagatgaaggatccgagctgcctgcacaagcaactctgcaaacaagcaagcaaccctccactaacggatctggcgccgtcgtgcggcgtgcgaggagctggagcagaggggcttgggggctggactgactttttttcacccgatgtaaatttttgctgttgattaacggcgggatgagcgttctaatttgctatgctgcttgtttggtttgacggtctttaccgtaaagtatgatttgacgtagccgaacacatcttctctttgttgtttgttattactaggcttccggatttgggcaccacccgaagctttcttcgaccggcgtgctccctccgccacatgatcggattgcttacgggacgacgggaaatcccggtgatgagatcaagtgtggaacaacatgtgatttaggggcgaaagggaagacgggaggggtattgtttggtttaggttctatatattttgtaccaacgattatgcacttagatatagatttcttttatatctatgtacctagtagaaatagtatatttctaaagttaaagaggtgttatagtttataatgaaggggacagcttcttattgcctagcaaaatagaagtctaagaggagatgatgcagataaaataatcgttacatgccaaaggagcccaatttctgacatagttaccctatttcgatctaattccctgacatagttaccctgaccaagatggatctgaccatgataaaactagttggcatccccaaacataattaccccgaccaggttggacccgacctcgaccatcccaagcaaaagtcttgatccaagttgtcctagtcggttggcctcgactttagtcacgccaagata

SEQ ID NO: 202282 - DNA, 474 bp, Zea Mays
tcctctgccttgcacaagcagtcgggtcgcagtgagccaccagcatgccccctcgtcgtgtgcgggcgagaacagggggtgccattgaaatccttgaccttttcgttattcgggacaatctaagggcttgggggattcattgggttgttatggtggttttcttggccttcccgggtgaagtaatccaccggagcaccagtaattgctcaccggagatagtgctccgccgtgggccgccatccgtcgtcaaccaagcatggcgcgacattattcaaggtcaagaacaggtaccgcaagatgaggtgcatggtggttgctgcgatgtgttcgtgagaggtctaggccgtcgtctcccagtcaactttgggttgctggaccgttgtctccttataatgtaattatttatttattttgtacaaaactcctattatatagtaaagatgtgacattcgatcctgtggcatgattcatcat

SEQ ID NO: 202283 - DNA, 3193 bp, Zea Mays
cttttactgcgacacagagctggacagaacagagaggagtctttcgtagcggagtgtggagactggagagtggagacggaagccaagcctccaagggggccgtcgcagaactcgcgccaccgcccgccatggcttcgtcatctaaggcctccgactcctcctcccaacgatccaagcggtcggatcaagggacgggcagggaagccgctcccgcctctgttgtcccgatccacgggaacctgacgcagttgatacgccaaatcaaatcgaggcgcctcttgtacatcaaggagaaattggaggcgaacaggaagacgctgcagaggcactcctgcgcgctgttcgacgtggcagcggcggcggaggtggcgtcgaggggcagcgatggcggcaacgctttgtcgcagcgagcggcggagggacagttcaggctcgctgggtcagacctggcacacgggataggggagagggacgtggtgtacatgcaggaggagaacctggcgtccgggacgctcgtgctctccagctcgggcgctgccgcgcagcggacagtcgtgcggttcgtgaagctgccgttggttgagaggatccctccgtacaccacttggatcttcctggacaacgcagaaatcaaagaatggctgatgatcagtcagttgttggtaggagaagaatttactatgatccaatcggaaacgaggctctgatctgcagtgacagcgatgaagaaattccagaaccagaggaagagaaacactttttcacagagggagaagatcaattgatatggagagctactcaagagcatgggttaaaccgagaggttgttaatgtcctctgccagtttattgattcaactccatcagaaattgaggaaagatctgaagtcctatttgagaaaaatgagaaaaactctggatcttcagataagatagagaggcaactttctcttgacaaaactatggatgccgttctggattcttttgataatctcttctgccgcagatgcttggtttttgattgtcgcctccatggttgctcacagaatttggtattcccaagtgagaagcaaccctacagctttgagcctgatgaaaacaagaagccatgtggtcgtcagtgctaccttcgatggagagaaggatttcaagagattcatgatgttggtcttagtggctgtgcaacatataatatggaatcaggaactgtctcacacaaagttgatgttagtattatgtctgaatcagaagattcaaaccgtgagaaaggcaacattaggtccatgacactagttggaaccagtggatcaaaaataatttcttctgttagtgctgaagaaagcactactccgccttcagcagatacctctgaaacagagaatgcatcctctgatatgcctcccagtagtttaaggaaatacaagatttcaaaacgtggacctaggtacagggagcgttctcctggcaaaaggcagaaggtttttacttatgacatttcttttgcaagcaatatactgaataaactttcgattccggagattcgcgacacaagactagagtctagagaacctggaggtgataaactacaaattcttgacgagtccactaagaaaacttcaagcaaagatatctgtggagaaagcccaattactactactgaaaatgtgggaagagagagtaaaaaagtatcttcaacaaagaatttcttggagcacactctttcatgttggagtgccttagagcgagatctatacttgaagggcatagagatatttggaaagaacagctgtctcattgccagaaacttactatctggtatgaagacctgcatggaagtggccaactacatgtataacaatggtgcagcaatggcgaagagacctctcttgaataaatccatctcaggcgactttgcagaaactgaacaagactacatggagcaagacatggttgccagaacaagaatctatcgtcggaggggccgcaatcgaaagctgaaatatacttggaagtctgcagggcatccaactgttagaaaaagaattggtgatgggaagcaatggtgttcgaagagctgcaaaaacaagtttagaggctgtcattgtgcaaaaagtcaatgcagaagcagacagtgcccctgttttgcagccagtcgtgaatgtgatccagatgtttgtaggaattgttgggtgagctgtggagatggttcactaggtgagccacctgccagaggtgatggttatcagtgtggaaatatgaagctccttttgaaacaacaacaaaggattttgttaggaagatctgatgttgcaggttggggtgcattcatcaagaatcctgtaaataaaaatgattatcttggagaatatactggtgaattgatctctcacaaggaagcagacaaacgtggcaaaatttatgaccgggcaaactcatcatttctgtttgatttaaatgaccagtatgtgttggatgcttatcgcaagggggacaaattaaagtttgcaaatcactcatctaaccccaactgctatgcaaaggtgatgctggtggctggcgaccatcgggttggtatctatgcgaaggagcatattgaggctagtgaggaactcttctatgattatcgttatgggcctgaccaggctccagcttgggctaggagacccgaagggtcaaagaaggacgaagcatccgtctctcaccatcgagcacacaaagttgctcgatagctgaagagcagctccggatgatacaatatgcagtaaattatatatttaatacatgatttagtcctagttcattatacgaggacttcgttggtagataagcatattgtatattcattagtgaataaactcccatacatcaagttggggaataagtgcatataaatattttttaccttaggtcggaaggtgacaaactgacaaccttgttaggttgagtaaagttagtgcttacaggttttcaaactggtgtggccattgctagagtatcaaatagctgagatggctacaactatagccttgtttgtatttttttttggcaagagggatggaatttatttgccaaatgtacacattgttgcaggaagtatttaatgatttaggaggtgttcttcagtcaccctcctaaattttagaaattaaactttagtctctaaaatttctgtttaggaggtctcatttagtcat

SEQ ID NO: 202284 - DNA, 3513 bp, Zea Mays
tacaaattcattcatgtaatcgaactgaagaggcaatactcattcaaatagcagcagcaatgtcccagttcaaagttcaagtacctcaaagatcgttctggagaaaacatttagcaaatgtatgaccgagaacagcagcctttcaatcgaatcatcaagagcttcttcttcctcctcttcctgctcatccttctcctcccttgatggcaacaaatcagtccagcaggagcttccttacatcaacgaggagctctttgtgcagaggtcactgaagacctcgccaagtttgaaggaatctgacatgaacaccaagtctgggcatcctaatgtcggtttcagagacatagtgaaggactccatcaaccgagaccctggaggcctgactgtaaaaacctcggtgcaggaggcaaggaggaacgggcagtacaaggactcaccgaggccactgctgctgtccaaatcaatggatggaacctgtatcattgggatcgataggaccacaaaggttcctgcaaatgtcactgaatctggaaggtgtttgcaggaacggtcacgcttctcatgcgatgaccgaagactcctgcggccagctgaaacccaggaatgcaagaggccttcctcgaggctaaaagagcttcctagactgtccttggacagtagaaaggagtctctgagtccaggctcacgtcagaagagcatcagttacaagagaactgatgatattcttctggatactttgaggcctcaagattcccccagcaacaggagagctaacagtgtcattgccaagctgatggggttggaagaagcaacaaatgctacaggggtgctaaccgctgatagctgtgaacccacaagatcaccaagaccagcccaagccactcaacatgagcgtccatcgcgatcccccaaaaacacttgccaggattcctgcagcatgcagccgaagaaccaactgaaagccaagccttcccaaagaattgccacagaagcggctccttggaggcagcaggacagaagtgccaacaataccaaggcggaacaatgtcgagaggctgaagggagggcaagaactgcatctgtctatgctgatatagagagaagcgggggttttaacttcttagagtgtaataacaaggacttcagggctctcagaatattgggtgcattgaacgcgaaagatgccaagagcaagaatgacagcagtggcggatctgtggctattcacaggacagggtatgatctaaccactagctctggaagttttcaggctcctattgtggtcatgaagcctgcaagaaccactgagaaacatggggtttcacttgcttcggttgctcccatagctggcctgagaagcctcagaaagttgccggcgggtagatattcatctttcactggcacaaatgacaagatgcagcttcggatgtcaagagatcaatcgaagtctgaggaaactgtcagcagtgccagctcaccaaggcctacaagctcatcaagccccagaaatgtgttaaagaagtcagaacctgaaaggaggtctcgtccacctgtctcaccaaaatctccaagcaagaagtccaatgaagccgtctccccaaaaggaagaacaagatcgaagccttctcaggtgaaatgccaccgtgatgaggtcttgcagatcacagggaacagaataagcttggcaaaacaggttgatgtcagcattatggattgcccaaagcctttgggtggtaactcaaccttcgttccagaaggcaatactgctgcaacagcaagccaaaaggctgcttcaattctgggttcagaccaaaacattcattcgctggacaacattccaagccctgtctctgtccttgatgcatccttctaccacaaaaggatctcggattcattcaaagatggtgagacacattcttcagaggaatgctggaacccaaacagcttgcctgacacgccacagtcaaaggcgaacagtgaagtcaaccagattaaaccagaaaatctggaagttctgatccagaagctcgagcaactgcaatccatgagcgaagaagacgcaagtatcaaagaagtcatggcgtcagtcgctgcgaacaaagatcaccagtatatctacgagataatgttggcatctggtcttctgcacaaagaacatagtgtcacagcactacctggccaactccaaccatcaaactacccaatcaatccggagctcttcctcatccttgagcaaacaagaccagtctcagtttccgccttccaaactgtcggtggagctaagagaagctgtaagccttgcgcagggaagcttcatcggagacttgtgttcgacctggtaaacgaaaccatagctcagaagatgagcatctgcagatccggaagccagccagtgaagtttcttcgatcaaggaagctaagtgggtggcaactgttcaaggacttgtgcgccgtggttgacaggctaacaaaatgctccgaggaggaggagaacgaaaacatggtattggatgaggatgcaatcaatggaaccaaagactggatgagcttcgacactgtgctgcatggcatggtttgggagatcgaacgatccatcttcaagggccttatcgacgaggtcgtcagcggtgagaccacagagaagatgcgatttggacagaggaagctgcagaggcagctttctttcggtagcacaaactgaatatgcgccgtagtagtagtcatttgcgtcaagaagctttacagcaactagtaaatgtgaaacattttctgtttttttccctgaagactaaactgtagaaggagtataaatgcaaaaaaaaaaaaaatgatcctcaacactagtctttctgccagaagaagcaaggaatataaatataatgttcttagtaaacttgtgtgtgaattgtgatgttgttttgattgaatcatgccgcacaattacccaatctgctgtttctttcatgaagcaggaccgtttggcttctaaactttaggaacatctcatactattatagataacaagatagtcttctgccactctgccagagggccaacgacaaagtaggttctgaaactgtagtccaaactccaaactgtcttactactatttagccaaaagactgcaacggctccaacctggcattcgcacaagaacgatcaacacacgaagtaaacataatcgatgagtggtgtgcagacgacatctaacactgcagtgccagatcatgtagggcatgggacatgacaccggatgcaaactgggagcagggagatgaattgagcagacagggacgggccaggacaggcatttgctgaaagcggcggagcaaggcgtacctccaaccccagaccggcatccatgcttgtcactttccaaactgtgcgtccatggtggaataggccaagattgcaatgatccgcctcctggagttatctgacgacgactctcacagagctcccgcactcgatgccccttccgacttatccgaggctaaaagatttcgaattttc

SEQ ID NO: 202285 - DNA, 472 bp, Zea Mays
atcaatcccaccctactttatttggagttcgcagagctgcgtggatgctacgtgatatggttttctgccagaggaatatgacagcttctttgttaagtacctttatccatcgttcactccaacagttgttctgtttttggctggtacggttgggtatggtgtcctcaaatactttgaaagcgagaaaagcaaaagctagatgacagcacgaagcatgtttggagcaatgatgagggtagagttagcaaatgtgcttgttatgtatgaagtagcttaaagcagcagatatgtgccagagaataggctggtgtttttatttatttttccttatatcctgcatcccaaattcctaattattcttttttgtttgtttgtaaattaacgatcaatggatactttcctgaatatgtattaagttgagttgtatattggtttttggcgatcaattggcttgttgagaccattttgacca

SEQ ID NO: 202286 - DNA, 1943 bp, Zea Mays
atgacaagacacaacatatcgaagtcgctcgccgtcgtcctccgcgcccgcatgcagcccaatcccatctcctccccgcctccgccgacccctccgccgccgcccacggaccccgaccccgccgccccgcttgtggcttccgtcagccactggctccacgtatctgcctccgccgcctccccgccccccgcggcgctcgacagcttctccgatgggtaccgctccctcgaccttgtcgggcgccgcgaggtcctccgttccctcgccgtcgactacgatgtgccccgcgcgcgtgtccgggatctcatgaaacagtacatgagcgtcacctccgccgaaccatcaggcgtggatgacgtggaggcggaggaggggaaggagggcgccgcgtcggccctgtaccggatggagagggggctccgggatgcactccggccccggtacgccggattccttgaggccatgaacgcgcagccaggtgggctcaagctcctcgccgtgctccgtgccgatctcctcgccttgctgggagaggagaacgtttcagcgctgcgggctctggactcgtacttgaaggagaaactggtgacttggcttagtcctgctgcattgacgctccaccagataacctgggatgatcctgcctcgttgctagagaagattgtggcatatgaagccgtacatccaatcaggaatctgatagacttgaagagaagattgggcattggtcgccgatgctttgggtacttccatccagcaataccaggggaaccactgattttcattgaagttgctttactcaaagatatggaagcatctatacaggaggtcttgtgggatgaccccccaactcctgaatctgaagctagttgtgcactattttactcaatatcgtcaacccagccgggtttatcaggtattaatctagggaagtttcttctcaagcgtgtgattgacatgttgagaagagatatgccatcagtacagaattttgcaacacttagcccaatccctggtttgatgcaatggcttcttgctaagctggcctcccaaataaaattatcagaggcagaatcacgggaggggaattcactaggagcctgttctactttcaaagaatccatccttcttcctgatgaagagagaatgattcatgatgccatcgaacaagctgatggaaaacaagggattgaactattgcaagatatactgaaatcaagacagtgggtaaagtctgacaaattatctgctgcattaaaatcacctcttatgcgtttatgtgcaaggtatcttgccagagagaagaagcgaggaaaagctctagacgctgttgcaaattttcacttgcaaaatggagcagtaagctactatcacaaattcagtttgaaatggtgctgctgaagaacagatgtggttttgtcatgtttggttgacctgtacctgaaaaaaataaacaaagggcagacccggtgatttttttaaataaaattgtaaaacgatgttgtagtaccttctttactatgtaagacattatatgatatttttcatgtgtaaacttggggcctaatcaaatcagataactagctatttgaaacaaccgcttcacataacagcacttgctattttggtagatgattgagagaattaattggatggctgaccaatcagagaagggcattcaacaaagtggaggtatcatggtcaattatctttacagattagagaacatagaagagtatgcattgtcatattcgagtacagggctcatccattcttcacctagcctgtctgagtatcttgagccgaaggatttatgagacaaaatatttctggaacggacttttgcttcctgaggtcttaaaagcttctggcatatgtttctgagttggtcctcgtgtatacttaactagtttgtaaaagggtgacaaattgactgctgtaac

SEQ ID NO: 202287 - DNA, 1703 bp, Zea Mays
caccgcccgcgaaaacgcaaccaccggcgccgtcaccctccctggctccggccttcagccgcctcgccagcgacgaccacggctgcgtcacatgacaagacacaacatatcgaagtcgctcgccgtcgtcctccgcgcccgcatgcagcccaatcccatctcctccccgcctccgccgacccctccgccgccgcccacggaccccgaccccgccgccccgcttgtggcttccgtcagccactggctccacgtatctgcctccgccgcctccccgccccccgcggcgctcgacagcttctccgatgggtaccgctccctcgaccttgtcgggcgccgcgaggtcctccgttccctcgccgtcgactacgatgtgccccgcgcgcgtgtccgggatctcatgaaacagtacatgagcgtcacctccgccgaaccatcaggcgtggatgacgtggaggcggaggaggggaaggagggcgccgcgtcggccctgtaccggatggagagggggctccgggatgcactccggccccggtacgccggattccttgaggccatgaacgcgcagccaggtgggctcaagctcctcgccgtgctccgtgccgatctcctcgccttgctgggagaggagaacgtttcagcgctgcgggctctggactcgtacttgaaggagaaactggtgacttggcttagtcctgctgcattgacgctccaccagataacctgggatgatcctgcctcgttgctagagaagattgtggcatatgaagccgtacatccaatcaggaatctgatagacttgaagagaagattgggcattggtcgccgatgctttgggtacttccatccagcaataccaggaggtcttgtgggatgaccccccaactcctgaatctgaagctagttgtgcactattttactcaatatcgtcaacccagccgggtttatcaggtattaatctagggaagtttcttctcaagcgtgtgattgacatgttgagaagagatatgccatcagtacagaattttgcaacacttagcccaatccctggtttgatgcaatggcttcttgctaagctggcctcccaaataaaattatcagaggcagaatcacgggaggggaattcactaggagcctgttctactttcaaagaatccatccttcttcctgatgaagagagaatgattcatgatgccatcgaacaagctgatggaaaacaagggattgaactattgcaagatatactgaaatcaagacagtgggtaaagtctgacaaattatctgctgcattaaaatcacctcttatgcgtttatgtgcaaggtatcttgccagagagaagaagcgaggaaaagctctagacgctgttgcaaattttcacttgcaaaatggagcaatgattgagagaattaattggatggctgaccaatcagagaagggcattcaacaaagtggaggtatcatggtcaattatctttacagattagagaacatagaagagtatgcattgtcatattcgagtacagggctcatccattcttcacctagcctgtctgagtatcttgagccgaaggatttatgagacaaaatatttctggaacggacttttgcttcctgaggtcttaaaagcttctggcatatgtttctgagttggtcctcgtgtatacttaactagtttgtaaaagggtgacaaattgactgctgtaac

SEQ ID NO: 202288 - DNA, 2556 bp, Zea Mays
caaactcccaaatttcaacgtccaagggtggcgcgagcacacagacatagaggcacggaaagcagagcgcgaggaagagagagacagagagaaaaacccaaaccctaacaatcatttccaggcccccgccccccggcgtctccagaacgttccagaaccttcaaggaaccatccacaggagcaggcgcgagcgcgggtgtttggatcgtgggaggcaacgctggcggctcgcagcggcagcaggtgatggcggattcgcctagcggtggaggatctagggcttgtgtctgctgggtgagacaggtcgaggaggcagcgtcggggctggtgctcgggagaaacgaacaggggaggagggagggaggatgctgagcgtggtccgggtgcaccttccgtccgagatcccgatcgtgggctgcgaggtcacgccctacgtgctactgcggcggcccgacggtgcagtctccaccgacgatgtccctgaaactgcgcccgctgatggccagttcatgcggtacagatggtaccgcatacagagcgatcggaaagtccctatctgcagtgtgcatccaatggaacaagcgacgattcagtgcctcggttgtctcaagtcaaaaatacctgttgctaagagctaccactgttcagctaaatgtttctctgatgcatggcagcaccacaaagttttgcatgaacgagccagtagtgctcaaaatgaaaatggggctgaagaagaggagttatgtggcagtgctgtggattcagaaaaaaggtctccaattggacctccgacctcagttatgacgtcacacgtaatccccgcaccaactccgacccctcgtcgccttatccaagtgaatggggatgttttgggtcacttggatttagacagccaaacttcatccttggggacattcactgtattatcttacaatattcttgctgatacatatgctacaagtgatgcatatagctactgcccaacatgggcacttacctggacttatagaagacaaaatttgttgcgtgaaattattggttatcatgctgatatcatctgtcttcaggaggtacaagtaaaccactttgaagattttttttcacctgagcttgacagacatggatatcaggcgctttacaagaaaaggacaacagaggtgtattctggaaatcctatggccatagatggctgtgctacttttttccgcagagacaagttttcgcatgttaaaaaatacgaggttgagttcaataaggctgcacagtccttaacagatgcgattattccttctgctcagaaaagactggctttaaatcgtttgattaaagacaacattgcactaattgcggttttagaagccaaatttgctaatcatggagctgaaaatcctggtaaaagacagctactttgtgtggcaaatacacatataaatgttcatcaagacctaaaagatgtgaagctatgggaggttcataccctcttaaaaggattggagaagatagctgtcagcgcagacattcctatgttggtctgtggagatttcaactcgccccctgggagttctccacatgcgcttcttgcaatgggcaaagttgatcagcatcatccagatctggcaatagacccccttggaattttacgccctccaagcaagttgaatcatcagcttcctctggtcagtgcatactctgcatttgcaagaatggtaggtgttggctatgatttggagcatcagcggagaaggacagaccctgcaacaaatgaaccactcttcacaaattgcacaagagattttactggaactgttgattacatattttacacagcggactccttgacagtggattcattattggaacttttggatgaggaaagtttaagaaaagacacagctcttccatctcctggatggtcatcagatcacatagcactgttagccgagttccggtgcaagcctagaatcagaagttgacacattaggtcttgtagaaaaaggttattgtcatcatccttggtggtggaacagcgttccatgtgggtatgacgggacgcgggctctcggggaagcaagcagcctaggtagcagcctcagcaaggggaaggggcatgtaacatttgattttacccttttacattttagctcatgatactcaagctgcccatgtgtaccattacttcctatagaagaaaatacttgagagaaattttgaaggctagtttggaaactctattttttccaaggtatttctatttttcaaggggaaatgaaatattttttcgtggaaaaatagaaatctctagaaaaaatgaggttcctaaactagcccttaaagggctataagccccttttttttctttcactctggtcgcgttggatttaacctctttgctgtatccatatgctcgctgcctacaagatgtaggagccttcagtttctctaccaatgtaattccagttccagtttttgttctccatgttgctggttgctctcattgccgttagatgtctggtgcctttttgttgtatactaacggaatctggctggttgttggct

SEQ ID NO: 202289 - DNA, 2646 bp, Zea Mays
aaatttcaacgtccaagggtggcgcgagcacacagacatagaggcacggaaagcagagcgcgaggaagagagagacagagagaaaaacccaaaccctaacaatcatttccaggcccccgccccccggcgtctccagaacgttccagaaccttcaaggaaccatccacaggcgcgagcgcgggtgtttggatcgtgggaggcaacgctggcggctcgcagcggcagcaggtgatggcggattcgcctagcggtggaggatctagggcttgtgtctgctgggtgagacaggtcgaggaggcagcgtcggggctggtgctcgggagaaacgaacaggggaggagggagggaggatgctgagcgtggtccgggtgcaccttccgtccgagatcccgatcgtgggctgcgaggtcacgccctacgtgctactgcggcggcccgacggtgcagtctccaccgacgatgtccctgaaactgcgcccgctgatggccagttcatgcggtacagatggtaccgcatacagagcgatcggaaagtccctatctgcagtgtgcatccaatggaacaagcgacgattcagtgcctcggttgtctcaagtcaaaaatacctgttgctaagagctaccactgttcagctaaatgtttctctgatgcatggcagcaccacaaagttttgcatgaacgagccagtagtgctcaaaatgaaaatggggctgaagaagaggagttatgtggcagtggtactgataaaaattctggagaaacttggtatgaagttgggcgcttgcgaacgtatacaccaactgctgctgatattgggcatgcactaaaatttgagtgtgtagctgtggattcagaaaaaaggtctccaattggacctccgacctcagttatgacgtcacacgtaatccccgcaccaactccgacccctcgtcgccttatccaagtgaatggggatgttttgggtcacttggatttagacagccaaacttcatccttggggacattcactgtattatcttacaatattcttgctgatacatatgctacaagtgatgcatatagctactgcccaacatgggcacttacctggacttatagaagacaaaatttgttgcgtgaaattattggttatcatgctgatatcatctgtcttcaggaggtacaagtaaaccactttgaagattttttttcacctgagcttgacagacatggatatcaggcgctttacaagaaaaggacaacagaggtgtattctggaaatcctatggccatagatggctgtgctacttttttccgcagagacaagttttcgcatgttaaaaaatacgaggttgagttcaataaggctgcacagtccttaacagatgcgattattccttctgctcagaaaagactggctttaaatcgtttgattaaagacaacattgcactaattgcggttttagaagccaaatttgctaatcatggagctgaaaatcctggtaaaagacagctactttgtgtggcaaatacacatataaatgttcatcaagacctaaaagatgtgaagctatgggaggttcataccctcttaaaaggattggagaagatagctgtcagcgcagacattcctatgttggtctgtggagatttcaactcgccccctgggagttctccacatgcgcttcttgcaatgggcaaagttgatcagcatcatccagatctggcaatagacccccttggaattttacgccctccaagcaagttgaatcatcagcttcctctggtcagtgcatactctgcatttgcaagaatggtaggtgttggctatgatttggagcatcagcggagaaggacagaccctgcaacaaatgaaccactcttcacaaattgcacaagagattttactggaactgttgattacatattttacacagcggactccttgacagtggattcattattggaacttttggatgaggaaagtttaagaaaagacacagctcttccatctcctggatggtcatcagatcacatagcactgttagccgagttccggtgcaagcctagaatcagaagttgacacattaggtcttgtagaaaaaggttattgtcatcatccttggtggtggaacagcgttccatgtgggtatgacgggacgcgggctctcggggaagcaagcagcctaggtagcagcctcagcaaggggaaggggcatgtaacatttgattttacccttttacattttagctcatgatactcaagctgcccatgtgtaccattacttcctatagaagaaaatacttgagagaaattttgaaggctagtttggaaactctattttttccaaggtatttctatttttcaaggggaaatgaaatattttttcgtggaaaaatagaaatctctagaaaaaatgaggttcctaaactagcccttaaagggctataagccccttttttttctttcactctggtcgcgttggatttaacctctttgctgtatccatatgctcgctgcctacaagatgtaggagccttcagtttctctaccaatgtaattccagttccagtttttgttctccatgttgctggttgctctcattgccgttagatgtctggtgcctttttgttgtatactaacggaatctggctggttgttggct

SEQ ID NO: 202290 - DNA, 2286 bp, Zea Mays
caaaattttgcagtcaaattgtcctgacaaactggttattgagctcatggtaccgcatacagagcgatcggaaagtccctatctgcagtgtgcatccaatggaacaagcgacgattcagtgcctcggttgtctcaagtcaaaaatacctgttgctaagagctaccactgttcagctaaatgtttctctgatgcatggcagcaccacaaagttttgcatgaacgagccagtagtgctcaaaatgaaaatggggctgaagaagaggagttatgtggcagtggtggttctggggttctaagtactgctggatctggttctttgtcaaattttggacagagccctagtattaacaatgaacctgtgcctttgtatccctcaggtactgataaaaattctggagaaacttggtatgaagttgggcgcttgcgaacgtatacaccaactgctgctgatattgggcatgcactaaaatttgagtgtgtagctgtggattcagaaaaaaggtctccaattggacctccgacctcagttatgacgtcacacgtaatccccgcaccaactccgacccctcgtcgccttatccaagtgaatggggatgttttgggtcacttggatttagacagccaaacttcatccttggggacattcactgtattatcttacaatattcttgctgatacatatgctacaagtgatgcatatagctactgcccaacatgggcacttacctggacttatagaagacaaaatttgttgcgtgaaattattggttatcatgctgatatcatctgtcttcaggaggtacaagtaaaccactttgaagattttttttcacctgagcttgacagacatggatatcaggcgctttacaagaaaaggacaacagaggtgtattctggaaatcctatggccatagatggctgtgctacttttttccgcagagacaagttttcgcatgttaaaaaatacgaggttgagttcaataaggctgcacagtccttaacagatgcgattattccttctgctcagaaaagactggctttaaatcgtttgattaaagacaacattgcactaattgcggttttagaagccaaatttgctaatcatggagctgaaaatcctggtaaaagacagctactttgtgtggcaaatacacatataaatgttcatcaagacctaaaagatgtgaagctatgggaggttcataccctcttaaaaggattggagaagatagctgtcagcgcagacattcctatgttggtctgtggagatttcaactcgccccctgggagttctccacatgcgcttcttgcaatgggcaaagttgatcagcatcatccagatctggcaatagacccccttggaattttacgccctccaagcaagttgaatcatcagcttcctctggtcagtgcatactctgcatttgcaagaatggtaggtgttggctatgatttggagcatcagcggagaaggacagaccctgcaacaaatgaaccactcttcacaaattgcacaagagattttactggaactgttgattacatattttacacagcggactccttgacagtggattcattattggaacttttggatgaggaaagtttaagaaaagacacagctcttccatctcctggatggtcatcagatcacatagcactgttagccgagttccggtgcaagcctagaatcagaagttgacacattaggtcttgtagaaaaaggttattgtcatcatccttggtggtggaacagcgttccatgtgggtatgacgggacgcgggctctcggggaagcaagcagcctaggtagcagcctcagcaaggggaaggggcatgtaacatttgattttacccttttacattttagctcatgatactcaagctgcccatgtgtaccattacttcctatagaagaaaatacttgagagaaattttgaaggctagtttggaaactctattttttccaaggtatttctatttttcaaggggaaatgaaatattttttcgtggaaaaatagaaatctctagaaaaaatgaggttcctaaactagcccttaaagggctataagccccttttttttctttcactctggtcgcgttggatttaacctctttgctgtatccatatgctcgctgcctacaagatgtaggagccttcagtttctctaccaatgtaattccagttccagtttttgttctccatgttgctggttgctctcattgccgttagatgtctggtgcctttttgttgtatactaacggaatctggctggttgttggct

SEQ ID NO: 202291 - DNA, 679 bp, Zea Mays
ggagaagttgacacagctcttccatctcctggatggtcatcagatcacatagcactgttagccgagttccggtgcaagcctagaatcagaagttgacacattaggtcttgtagaaaaaggttattgtcatcatccttggtggtggaacagcgttccatgtgggtatgacgggacgcgggctctcggggaagcaagcagcctaggtagcagcctcagcaaggggaaggggcatgtaacatttgattttacccttttacattttagctcatgatactcaagctgcccatgtgtaccattacttcctatagaagaaaatacttgagagaaattttgaaggctagtttggaaactctattttttccaaggtatttctatttttcaaggggaaatgaaatattttttcgtggaaaaatagaaatctctagaaaaaatgaggttcctaaactagcccttaaagggctataagccccttttttttctttcactctggtcgcgttggatttaacctctttgctgtatccatatgctcgctgcctacaagatgtaggagccttcagtttctctaccaatgtaattccagttccagtttttgttctccatgttgctggttgctctcattgccgttagatgtctggtgcctttttgttgtatactaacggaatctggctggttgttggct

SEQ ID NO: 202292 - DNA, 1514 bp, Zea Mays
accgaaggtccatgacaattaccaagaggtacaagtaaaccactttgaagattttttttcacctgagcttgacagacatggatatcaggcgctttacaagaaaaggacaacagaggtgtattctggaaatcctatggccatagatggctgtgctacttttttccgcagagacaagttttcgcatgttaaaaaatacgaggttgagttcaataaggctgcacagtccttaacagatgcgattattccttctgctcagaaaagactggctttaaatcgtttgattaaagacaacattgcactaattgcggttttagaagccaaatttgctaatcatggagctgaaaatcctggtaaaagacagctactttgtgtggcaaatacacatataaatgttcatcaagacctaaaagatgtgaagctatgggaggttcataccctcttaaaaggattggagaagatagctgtcagcgcagacattcctatgttggtctgtggagatttcaactcgccccctgggagttctccacatgcgcttcttgcaatgggcaaagttgatcagcatcatccagatctggcaatagacccccttggaattttacgccctccaagcaagttgaatcatcagcttcctctggtcagtgcatactctgcatttgcaagaatggtaggtgttggctatgatttggagcatcagcggagaaggacagaccctgcaacaaatgaaccactcttcacaaattgcacaagagattttactggaactgttgattacatattttacacagcggactccttgacagtggattcattattggaacttttggatgaggaaagtttaagaaaagacacagctcttccatctcctggatggtcatcagatcacatagcactgttagccgagttccggtgcaagcctagaatcagaagttgacacattaggtcttgtagaaaaaggttattgtcatcatccttggtggtggaacagcgttccatgtgggtatgacgggacgcgggctctcggggaagcaagcagcctaggtagcagcctcagcaaggggaaggggcatgtaacatttgattttacccttttacattttagctcatgatactcaagctgcccatgtgtaccattacttcctatagaagaaaatacttgagagaaattttgaaggctagtttggaaactctattttttccaaggtatttctatttttcaaggggaaatgaaatattttttcgtggaaaaatagaaatctctagaaaaaatgaggttcctaaactagcccttaaagggctataagccccttttttttctttcactctggtcgcgttggatttaacctctttgctgtatccatatgctcgctgcctacaagatgtaggagccttcagtttctctaccaatgtaattccagttccagtttttgttctccatgttgctggttgctctcattgccgttagatgtctggtgcctttttgttgtatactaacggaatctggctggttgttggct

SEQ ID NO: 202293 - DNA, 3179 bp, Zea Mays
tcaagtaaaactcctccagccccaccgccacctcccctcatgacaggaaagaaagcgcctgtgcccccacctccaccacctcaagcaccaaaacctcctggagttgtgcctccaccaccaccaccaagctcaaagatctcaaatgcaccagcaccacctccattattgggaaggggacgtggcaacacaactggaccaactaaaggccgtggcattggtttggcacaacaaagtaatcctcccaagaaggcttcactgaagcctctacattgggtgaaagtcacgagagcaatgcaagggagtctctgggctgatgcccagaaacaagggaatcaggctaggtctcctgatatcgatttatccgaactggagagcttgttctccactgcagttgtaaccagcacaagtgaaaagggggcaacaagacgtggttcagctattaacaagccagaaattgttcacctggttgacatgcgacgagcaaacaattgtgagataatgcttacgaaaattaaaatgcctctacctgatatgattaatgcaattttggctctggacacttccgttcttgataatgaccaagtggagaatctcattaagttttgccctacaaaggaagagatcgagatgttgaagggttataatggcaacaaagaaatgcttgggaaatgtgaacagttcttcctggagctgatgaaagttccacgtgtagaggccaagctaagagtttttgctttcagaattactttctcaacacaggtagatgaactaagaactaacctaaccaccataaacgatgcaacgaaggaggtcaaagaatctctgaagttacggcagataatgaagaccattctcacattggggaatgcattaaatcaagggacagcacgaggatctgctgttggcttcagattagacagcctccttaagctgtcggatactcgatctagaaacaataaaatgacgctgatgcattatttatgcaagcttcttgctgagaaaatgcccgaacttcttgattttgacaaagacctaatttatctggaagcagcttccaagatccaactgaaattgcttgcggaagaaatgcaagcaataaacaaaggtcttgagaaggtggagcaggagctagctgcttcagaaagtgatggtgcgatttcagttggctttcgtaaggcattgaaaagctttcttgatgcagcagaagctgagggaaggaacgctgattcgctagctcagtattttggtgaggatcctgcacgctgcccgtttgaacaagtgacatcaattttagttattttcgtgaatatgttcaaaaaatcacgtgatgaaaatgctcgaaacgctgaggctgagaaaaagaaactggaaaaggaaaaagaaaaggcaagtgtgtctgctaaataaggtttggaatgagactgctgctctgccaaagttgcatctttgtgaagctgtcgtgctggactgacaaagaggacctgcagtataatttgcggcagtgcagaacctgctttgaaacaccttctgtacgtacagagatgctgtgccaggagtctcgctatctggttgccatccattaaatggtttcctttgcgaattccaaggtctaggagctttcgtgctcatgtacagtgggaatgtttgaacagatgactgaacaaacatgcccacgccacggctgctgtagtttttgcgtgtaaatataacagaaactggagtatagctgtctcgcctgtacataaaattagtccagggcccgaagcggggacgaagaaactacaccactgttcatttttttctataataacaactgtacaatgttgctgtattactaaagagcaaacaaatgacgagtacaaatcatttgcacttcatacttttatccattgcgaggcatgtagcatgttactctttatcccacttgtacttagattaggtgcaggtgtcatgttttacttgttgcacaccgtttcactgatgagtagctcccataccccataatttgactgatgagctaagataaggaatgaccaaccatttaacatcatctttcaaaccatcgacaaattttgtggcataatacagaggatcaacattgagctgataagcattcagttggtccacaagttgtgcaaactgctcaatataatcagagacaataaaggtttgtcttccagcttggcgtggagcacgacgatgtcattggtgtttgcggccaccgtcttctctagcgctccccaatgcatgtcctgtcctgtggctcaggccgatcacatagctaccagagaagcttggattgtatggcgatgttcttcgattgcgattcgatttgcttggactgtgtgctgccaacaccatcactatgctaggatccgacacaccatccatcttcgccattcatgtgaagtatatactagcataatagtcctagaattccgattcacaaatacgacatgtctgacagcatccaaatcagtacaaacaagtgttcaggtgacacactgtacatggattatggtcatatcaactcagcaccttatctcgtccgtccgtggatgaacatgctcccaacaatggacgattagtgatttaccaccatgcataggcaaactaggcatagatgacttcctctgcttcatcgacatcctctggtctccacaagaatatgtgctcacgcccagaagccgtacttgacaggtgtcccggtgggcttgagccacggctcggcgtgcaagaagttctgcacggtgaacttttcggcctcctccttgctgatcaccttcttgtagccgggccatgtgacgcggccggcggtgtcggcgccgggcccccggttggcgtactcggcgtaccacagcgtcttgagcccgaagtcgccattccacggcaggtacccggccttgtcgatgaacgcggggatgtcggactccatgatgagcgtgcgcgagaactcgcgccaggggcgggcgaggtagctccggatgggcgggcgggacgcgtccttgagccccgtctcggcggtgaagcggcagtactggaagacgaagcccgtgctctcgcgcccgtccgcgcggccctgcgccgtggcgatgttctgctggttgtccatgggccggcggaggaccaggatgcagttctggaacacggcggccgcgtcgccgaagatgaagtcgatg

SEQ ID NO: 202294 - DNA, 563 bp, Zea Mays
tcaagtaaaactcctccagccccaccgccacctcccctcatgacaggaaagaaagcgcctgtgcccccacctccaccacctcaagcaccaaaacctcctggagttgtgcctccaccaccaccaccaagctcaaagatctcaaatgcaccagcaccacctccattattgggaaggggacgtggcaacacaactggaccaactaaaggccgtggcattggtttggcacaacaaagtaatcctcccaagaaggcttcactgaagcctctacattgggtgaaagtcacgagagcaatgcaagggagtctctgggctgatgcccagaaacaagggaatcaggctaggtctcctgatatcgatttatccgaactggagagcttgttctccactgcagttgtaaccagcacaagtgaaaagggggcaacaagacgtggttcagctattaacaagccagaaattgttcacctggttgacatgcgacgagcaaacaattgtgagataatgcttacgaaaattaaaatgcctctacctgatatgatttgctgcaacctctgacattgcgggct

SEQ ID NO: 202295 - DNA, 960 bp, Zea Mays
tcctcggtcttggatacattggtgcgtgccgtaccgggtgaacaagaaagacgacgagggcggcaacccgtgcagcagcctcggcgacgacacggcggcggaggtggaggtgctcatgatctccacgcctaaccgggccgacatggtcttccccaagggcgggtgggaggacgacgaggacgtctaccaggcggcgtgccgcgagaccacggaggaggccggcgtcaagggcatcatcaacagagctgcgctggggcactgggtgttcaagagcaagagcagccagaacagcaccaccagcaccagtggagcctgcaagggctacatcttcggcatggaggtcacggaggagctcgagtcatggccggagcaggacacgcacgaccggcgatgggtctctccggccgaagcctaccagctctgccggtacgactggatgcgggaggcgctcaccgcgctgctggagaggctgtcggtgctgcagccggtggcagcggcggcggcggcggccacaccggaactggcggccgaccaatctggcatgtacatgatgctccaggcgtcctcggacggaggagcggtggcgctgtgctagctcattgatggtggacgacgctgctgttgctaactgtccaaactgcacgctccacgttcagttcaaagcaagtgcaacaaattcagaccctctatctaattgctcgtttagtcccttcggttttcagctagtcatgagtcttcactcttcagtgtgcctgcaattaatgcaacattggtgttggttggctagtttcagaggtcaggacaaagcgactgtcccctcggcccttgcatgatgatctatatatacgattactgagtgttcctgtgtcatctactgtggtgttcatgtaatatgtgaaaaatgttatggcgtttgtgaatgctaataataatactcttacatcgagttttgttcggcgg

SEQ ID NO: 202296 - DNA, 3532 bp, Zea Mays
ccgcctgcctcggacggatacccactccactcaccacaccatccatggcgatggcgccctccacggcggccgcatccacccttctccccgtcctcctcctcatcgccaccgccacccagtgcaccgcagccgattcattctcttctcaggacgctgccgccctcctcaacctctctgcggcggtagcagacccctcgggctacctctccacgcactggactccggacaccgcggtctgctcgtggccgcgcgtgtcctgcgacgccaccgacacacgagtcatctccctcgacctctccggcctcaatctatctggccccatccccgccgccgcgctctcctctttcccgtacctccagtcgctcaacctctccaacaacatactcaactccaccgccttccccgacgagatcatcgcgtcgctcaagagccttcgcgttctcgacctctacaacaacaacctcaccggttcgctgccggcagcgctccccaacctcaccgacctcgtccacgtccacctcggcggcaatttcttctccggcagcatcccgaggtcctacggccagtggagccgcatccggtacctggccctctccgggaacgagctcaccggcgagataccggaggagctcggcaacctgacgacattgagggagctgtacctcggctactacaacaacttcaccggcggtataccacccgagctcgggaggctgcgggcgctcgtccggctcgacatggctaactgcggcatctccgaggagatcccgccggaactggcgaacttgacgtcgctcgacactctgtttcttcagatcaacgctctgtctgggaggctcccgacggagataggcgcaatggggtcgctcaaatcgctcgacctgtcgaacaacttgttcgtcggggagatccccgcgagcttcgcgtcgctcaagaacctgaccctgctgaacctcttccggaatcgcctcgccggtgagattcccgagttcatcggcgacttgccgaacctcgaggttctgcagctgtgggagaacaacttcacaggcgggatacccacgaacctcggcgtggcggcgaccaggctgaggatcgttgacgtgagcacgaacaagctcaccggcgttctgccatccgagctgtgcgccggccagcggctggagacgttcatcgctctgggaaattcgctattcggcgacgttccggacgggctcgcggggtgcccgtcgctgacgaggattcggctgggagagaattttctcaacgggacgatacctgcaaagctgttcacgttgccgaacctgacgcaggtagagctgcacaacaatttgctctccggcgagctccggctggacggagggaaggtgtcttcttcgatcggagagctgagtctgttcaacaaccgactgaccggccaggtgcctaccgggatcggtggactcctgggattacagaagctgttgctcgccgggaacatgttgtccggcgagctcccgccggaggtcgggaagcttcagcagctctcgaaggcggacctttctgggaacctgctctccggagcggtacccccggcgatcggcagatgccgtctgctcaccttcctcgatatctcgagcaacaagctctccggcagcatcccgccggagctcggcagcctccgcatcctcaactacctcaacgtttcccacaacgcgctccaaggggagattccgcctgccatcgccggaatgcagagcctgacagccgtggacttctcgtacaacaacctctcgggcgaggtcccgtccaccggtcagtttggctacttcaacgccacttccttcgcaggcaacgctggcctctgcggggcgttcctctccccgtgccgctccgtgggcgtggcgacttcggccctgggctccctctcttcgacgtccaaactcctgctcgtgctcggcctcctcgcgctgtccgtcgtcttcgcgggcgcggccgtgctgaaggcgcggtcgctgaagcggtccgccgaggcgcgcgcgtggcggctgacggcgttccagcggctggacttcgccgtggacgacgtgctggactgcctcaaggaggagaacgtgatcggcaagggcgggtccgggatcgtgtacaagggcgcgatgccgggcggcgccgtggtggccgtgaagcggctgccggccatcgggcgcgcgggcgcggcgcacgacgactacgggttctcggcggagatacagacgctggggcgcatcaggcaccgccacatcgtgcggctgctcggcttcgcggccaaccgggagaccaacctgctggtgtacgagtacatgccgaacggcagcctcggcgaggtgctccacggcaagaagggcggccacctgcagtgggcgacgcggttcaagatcgccgtggaggcggccaagggcctctgctacctgcaccacgactgctcgccgccgatcctgcaccgcgacgtcaagtccaacaacatcctcctcgacgccgacttcgaggcccacgtcgcggacttcggcctcgccaagttcctccggggcaacgctggcggttcggagtgcatgtccgctatcgccggctcgtacggctacattgctcctggtacgcctacacgctgaaggtggacgagaagagcgacgtgtacagcttcggcgtggtgctgctggagctcatcgccgggcgcaagcccgtcggggagttcggcgacggcgtggacatcgtgcactgggtgcggacggtgaccgggtcgagcaaggagggcgtgatgaagatcgccgacccacggctctcgacggtgcctctgtacgagctaacccacgtcttctacgtcgccatgctgtgcgtggcggagcagagcgtggagcggcccacgatgcgcgaggtcgtgcagatactggccgacatgcccggctcgacatccacgacgtccatagacgtgccccttgtcatcgagccgaaggaggaggacgggggcccggagaagaagcagcagcagcagcaggaagggccacacgactcgccgccgcagcaggatcttcttagtatctagaagcgcagttgcgagagttggtcgtactgatggtacttggtagcatccctgcctgccctgttctttgagtgaagcgttggaacgtggcgtgtgtgtagtgtaactgtgtatgcaggcggtgatttatatgcatgcttcctttaagtagattgccagtagtatttgcgtatggtgagctggtcggtccttaatgtctgtccccatgtacaaaaccagatcaagatgcttgggcttccggttgagtttacgccttaggtgctgtttgtttaccctcgacattatataatccagcttaaataaatcaagagttaaacaaacaacacagattatatattaggtggattatatagtctagatgtctagattatgataatttataagcatgtcattagatgcagatatggattagaattgctagtttgtttgtttgtttgttttcgagaaaaaagaagaatcgttcctttgaaaaaaaaaaactac

SEQ ID NO: 202297 - DNA, 2604 bp, Zea Mays
ccactccactcaccacaccatccatggcgatggcgccctccacggcggccgcatccacccttctccccgtcctcctcctcatcgccaccgccacccagtgcaccgcagccgattcattctcttctcaggacgctgccgccctcctcaacctctctgcggcggtagcagacccctcgggctacctctccacgcactggactccggacaccgcggtctgctcgtggccgcgcgtgtcctgcgacgccaccgacacacgagtcatctccctcgacctctccggcctcaatctatctggccccatccccgccgccgcgctctcctctttcccgtacctccagtcgctcaacctctccaacaacatactcaactccaccgccttccccgacgagatcatcgcgtcgctcaagagccttcgcgttctcgacctctacaacaacaacctcaccggttcgctgccggcagcgctccccaacctcaccgacctcgtccacgtccacctcggcggcaatttcttctccggcagcatcccgaggtcctacggccagtggagccgcatccggtacctggccctctccgggaacgagctcaccggcgagataccggaggagctcggcaacctgacgacattgagggagctgtacctcggctactacaacaacttcaccggcggtataccacccgagctcgggaggctgcgggcgctcgtccggctcgacatggctaactgcggcatctccgaggagatcccgccggaactggcgaacttgacgtcgctcgacactctgtttcttcagatcaacgctctgtctgggaggctcccgacggagataggcgcaatggggtcgctcaaatcgctcgacctgtcgaacaacttgttcgtcggggagatccccgcgagcttcgcgtcgctcaagaacctgaccctgctgaacctcttccggaatcgcctcgccggtgagattcccgagttcatcggcgacttgccgaacctcgaggttctgcagctgtgggagaacaacttcacaggcgggatacccacgaacctcggcgtggcggcgaccaggctgaggatcgttgacgtgagcacgaacaagctcaccggcgttctgccatccgagctgtgcgccggccagcggctggagacgttcatcgctctgggaaattcgctattcggcgacgttccggacgggctcgcggggtgcccgtcgctgacgaggattcggctgggagagaattttctcaacgggacgatacctgcaaagctgttcacgttgccgaacctgacgcaggtagagctgcacaacaatttgctctccggcgagctccggctggacggagggaaggtgtcttcttcgatcggagagctgagtctgttcaacaaccgactgaccggccaggtgcctaccgggatcggtggactcctgggattacagaagctgttgctcgccgggaacatgttgtccggcgagctcccgccggaggtcgggaagcttcagcagctctcgaaggcggacctttctgggaacctgctctccggagcggtacccccggcgatcggcagatgccgtctgctcaccttcctcgatatctcgagcaacaagctctccggcagcatcccgccggagctcggcagcctccgcatcctcaactacctcaacgtttcccacaacgcgctccaaggggagattccgcctgccatcgccggaatgcagagcctgacagccgtggacttctcgtacaacaacctctcgggcgaggtcccgtccaccggtcagtttggctacttcaacgccacttccttcgcaggcaacgctggcctctgcggggcgttcctctccccgtgccgctccgtgggcgtggcgacttcggccctgggctccctctcttcgacgtccaaactcctgctcgtgctcggcctcctcgcgctgtccgtcgtcttcgcgggcgcggccgtgctgaaggcgcggtcgctgaagcggtccgccgaggcgcgcgcgtggcggctgacggcgttccagcggctggacttcgccgtggacgacgtgctggactgcctcaaggaggagaacgtgatcggcaagggcgggtccgggatcgtgtacaagggcgcgatgccgggcggcgccgtggtggccgtgaagcggctgccggccatcgggcgcgcgggcgcggcgcacgacgactacgggttctcggcggagatacagacgctggggcgcatcaggcaccgccacatcgtgcggctgctcggcttcgcggccaaccgggagaccaacctgctggtgtacgagtacatgccgaacggcagcctcggcgaggtgctccacggcaagaagggcggccacctgcagtgggcgacgcggttcaagatcgccgtggaggcggccaagggcctctgctacctgcaccacgactgctcgccgccgatcctgcaccgcgacgtcaagtccaacaacatcctcctcgacgccgacttcgaggcccacgtcgcggacttcggcctcgccaagttcctccggggcaacgctggcggttcggagtgcatgtccgctatcgccggctcgtacggctacattgctcctgatgcatcgtacatcccctgca

SEQ ID NO: 202298 - DNA, 3510 bp, Zea Mays
tggcccgagcagccctggcaactgacgcgacggattcgcctaggccatgcaggcacccggcgtcgcggtcgcggtcgcgggcggcgaaaccgacgagagccacccgcttgaaccgctgcccccgcacgcggagaaccaccgactgcccgggcctgccggcgaactcctcctctgccgccgcggcccgcaggaggccgccgagctggacgtcgagcctcctcaggacggcgttctcgaactcggagcccgagacgtggggctgcacctgcacgtccttgtccgtcacggcgaccgcgagtatgtcgccgtcccagtccgagaattcgctgtccttagctgcaaagctgatctgagacaacagacaacagcgcgcgcgcgggttgagcggcgtgcggtcgacggtagcactaacactgtcgcggatggcttgtgctagctaggcggatgatcgaatcgattccgctttccacgtacgggaatccgaaccaaaccactagatgcatatatataggaattgacaggccgatcctggtgaatcaaggcatcgtatgtagttggagtagaaacaaaacaggcggcgcacctgaggcagttcgacggcggcgttgggccaggtcaggccgagagtggcggcggcggcagtagcggcgtcacccatcggagacaacaggaaatgtgccggccggaatgtgggaggcgtgcgttgaactgatagctagcgtggcgaggacccttggaatgcgagagccgagagggcgtgcgctgaattcctgctgctcactgtggagtgtggacttcactcgctagaagacggggacgaggctttatagaaagggtaaaaacgttgtcaggagataaattttccatctcctgccatggcggtggcggctaattcattcattgaaccttgggcggggcccgcgatgacggatgttgcggactctcgaacggagaacgggcgagggctttgtgtatgttgtagttgtagttgtagcgtgtagccgtgtaggcaaccgttctcacccgtttccctgatctgccatccaccgtcgtggcgttccgccagaagccatccgtcgccatcggagctgccaaagcaagcagactgcaggcagccacaccaaacgtgccaaacccccaacgccatcctctataaacggcttcctcgcgggctccccctccccctccccgactcctccccatcgcccatcgccgccctccgatccttcatggccgctgccacagccgccgccgccgcgctcgcctccccggcgggcctctccacatcgctggcgcgccgcggcctcgtcagcttcgcacccgcgctccgccccggccctgaccgcagctctcgcgccgtcgccctcctcggtgtacgaactcatgtcacggctgttgatcaagccattgtaaaaggtgatacaaagttggaaggtcctgtggttgttgttactggtgcttccagggggattggaaaagccactgcattggctcttggaaaagcaggctgcaaggtcttggtgaattatgctcgatcttcaaaggaggctgaagaagtctccaaggagattgaagcatctggaggccaggccattacctttggaggagatgtttccaaagaggctgatgttgaatctatgataaaagtggctgttgatacatggggaacgattgatgtactagtaaataatgcaggctgcaacaaaagtaatgatgaagaagaaaaagggaagaattatcaatatagcatcggttgttggtcttactggtaatgctggacaagctaattatgctgctgccaaggctggggttattgggttcacaaaaacagttgctagggagtatgccagcagaaatattaatgcaaacgttatcgctcctggatttattgcttcagatatgactgctgaacttggtgaagagttagagaagaaaattctgtcaactattcctttagggcgctatggtcggccagaggatgtagcaggcctggtggaattcttagccctcagccctgctgcaagctacatcactggacaggtcctcaccatcgatggaggaatggtaatcggtttgtggtatagtacagtttgtttcgaagggagagttgatactagaaatttgcacacgtatagttagcttaatttctttgcgattggccgattgctccaaacatgttattggaacgctctttccctgagtcttcgtttccgtttcccttataaagtcttataaagtgtttggtttgatgaatcactctattcaaaattcaaaatgaaacggtatatcatggatttattccttaaatttggtgggataactccattccacatattagtactaaacaactaactatgaagaatgaggtggtgatggattaactcactccattctacaaaccaaacaaaaaatgagggagaagatgatggactacatcattcctcaaaccaaacactccagtactgtcgagcctcggctcaacttctgtttctgggacggagtacataccatgagcaacggtcacacaaatataatgaacagcaaacatctagtttagaagaatacaaagaaaagttgccaccaaatatgaacgccaatacgaattgccagtcaaaccaatttagccatttatggaaatggaggaatacatcgtacttccgacccacagcaaatgtccatacaaaccaaaaattaaaacacagccgatgatatgctaagcgcagcatctcacagttctgacctaggccttgatagcatacttcctcatggggaagtacttctcacgcttcttttccctctcggtcttcagagagagctgcaggacagacagagcaaaatgtcaggccatctatgattaaaaaaccaacacaaaagagcaatcactcaaagaaatatgccatgcaatttcaaatgtcacttggacacgtgtcaaacattcagaaactgattgtataccaccattttgtgcgatgtcatagtcatagcaattgaaagatgacaggcctgtttggttcgttatctaacttgccataattcgactaacttttttttgcctaaggttaatgattcaatttggccagctaaccttatgcaagttgtggcacagttagccaggaaccaaacaggcccaacaactggctaatgcttgcatacaccttataatcctaaaacctaaacctgggctgcaaatattagtgctctttcagacttgagctctgcatggagagggttatcaggtatcttgcaaatgcttaatatcatatatgatcagattgacgaaaaaacattaacaacaaacacttcaccttgattttgcacaacaatgagaagtaacattattcagatcacatagtcagtcatcaaacattactcactttctacagttgcatccgtacgcaaaatatattggctcataaagctaagaggaatttcaaaaaaatatcattcgttgctctattaatgcttcatccagcaatgaacataacttatataccacttattgacacgagc

SEQ ID NO: 202299 - DNA, 1104 bp, Zea Mays
atcacaagggcaagtggcgagcagcggccgggcgcacgcaacccatgaaaccacaagcttgtcacgggagatcgatgccaaagcaaaccggagtgaaagcgaacggaaatctagcggacgacgagaccgcgattaggaggaattggaccgtccgcaacggcgacccgctcgtgcacctccatatccggcagccggcaccacggccacggccgcgaggaggcgaagaacgtcgtctggtcccgcaccggatcgctaagctgtcatgggcgtccgatcccgaggtgttctacatgctcaacgccgtggcccggcagaaagagctgtgcgtggcgatcaacgtgtgctggggtgaccagagggagaaggtgtgcgacgcgacggaggacgggaggagctccatctcgagtcgctcgtcatggctagccgtggcctcggccagatccaaagatctgcaagctcatgaagtactgctactgatagctggtttccttcttagttatggggagtgctatatgcgattagataggaacagatatcagaacactaatagcgtgtttggtttgcaagatgaccggtctgaaataatccgattcaaacaccgaagctgctggaactgtttggttaacgtagtggagccaactcgtccgtcacaaacacgttcagcaacataccaaatctgcaggttgggtcggttcctccaatttcgccagacaagtatgacgagtgtatgctgaacgtactcaaccctacaaccaaacacgttgtaaaagatgcacatatttgcactagtcactctatgaatttcaaattgttgctgtaaaaaattggaatcagacactgaaaatccacgctgtgctatgttctgttactgtttttttttaaaccatgcacgtcatgctgcaggagacgaaaaattgggacgaaacttgggtccagataaactgacacactgaagccgcctgaaactctgaagcagactaaaagttttcagggagcaggggaacttcagttctttattgcccaacggaagctacagaacgcatattacgtatataatcctctggttcataaggttacaaagctattaaaagggcccaaaactgc

SEQ ID NO: 202300 - DNA, 2185 bp, Zea Mays
aaaaaccacaccgcggcggcagctatataaaagccttcacctgacccgggcgctagggtttattcgctcctcccgcccgccgccgtcgccgcctcctctccccagcacccggagctcgcccgaccgccgctcaccatgatcatccccaagaagaaccgcaatgagatctgcaagtacctcttcaagggtatgtggttcttggtccactagactcgcagtagggtaacctgggctgattggttgtttcaccttctaggaggtgacaggtcttcaaattattttcgtattactaggagggagtgctcgtgtattattttgagttcacttttttggtccaatttcagcatctcacaaacttacgatctgatatataggcttgacacagcgagcattgtcaaatatttttgtgctccaaatttatttgccccctaaactatggattccttgttatacattcatctgcgttatgttcatgcgatttctgttagtttgatgtatttgctgctgcagagggcgtgctgtatgccaagaaggactacaacctggcgaagcacccgcagatcgatgtgcccaacctccaggtgatcaagctcatgcagagctttaagtccaaggagtatgttagggagaccttctcctggcagtactactactggtatctcaccaacgatggcattgagcacctacgcaactacctgaacctcccgtctgagatcgtgcctgccacgctcaagaagtctgccaagccacctggccgcccatttggctctggccctcctggtgaccgcccaaggtaaaagccttaaatcttgtggtgctgtggcatttttgttcatgtacttaacaaatgtgtctagtgatgatttcacatgtttgcttctcatgtctggtgatgattttagatggaaaagtacagtcaaatctgaagtagctttttgtgcacctctcatcttatgatgatagggttatctagtaaatggcttgttgctgggtgcttattatgcattttccaattatgtttttgtgcaatgcaacattatttctaatactgtagctcggggatattggagataaagccttttacatgtgtgctattatgaagctggttgttgcataagaaaaaaagattacatgtttattaaagaattctgtctttgctttatgtatttatactgagttgtaattggtttgctaaaatctgctctagaatgacacattttgcagtgtaaaggatattgttgtgaagaagacaatctaaatttatgtaagattgtatttgtgtgcttattacagtgtgttttaccgaggagcagattaaagttaaccaattaggggcccaggtcgttttgacggcgacaggccaaggtttggtgacagggatgggtaccgtggtggtcctcgtggtgctcctggtgactttggtggcgataagagtggagctcctgctgagttccagccatcattcaggaggcctggctttgggcgtggtggcggcagcggcttcggcgcaggcccaacctcttcttccatggagtgaagttgcccttggtttggacatggtgtttcccttcgcatgtggcctttagttttgaaggacagttattatgtactagtaatattactcggatcggccagtgctgacatatgcaaaaaaatgttctgtcgttatacattggttccagtattattgtcttcgcaaaactcttgggttttcaagttactactttttcactgatatacgagtaatcgtcctgcgtttggtggttggctgatctgatcggttggtcatgctgggatgttgttttgttcgtatgttgtgtcgtctagctgtttctgtttggacccaagaagttctaatctgtcaagtaactgtagcagatataatctctgagaactggttgtgtagtgatattagccatgatgttctgatggtacgagccttcctggggttgtcttttatatttgcagatgattgcatgtataacatgttggtccaggattggtttgttttttttcttttgttttttccggcttgtttgcctctatgttccagcaactgatagttgtcttttatattagcggaagcagatgatgtacaagtatggcatatatgtgttgtattgagatgatgtacacgtattgcattccaatacataaaaagtcgaaagatgagccttcatgttag

SEQ ID NO: 202301 - DNA, 3439 bp, Zea Mays
actggtaatccttgtcaagtgtcaacccaaccgtccacggtccgccctcctccttcgttcacgtcttcctcctcgcgttcctctcgtcagtacggcgacgccgcaaggctcgcaccgctgacagtcccccttcccggatcgagcctctcttttcccagatcggattctaatttggctatcgccgccgccctacgccaggtgccgagtccttagctgatcttcgccggcgaggagcgcccaccagattgaatgacaagaatgttctctatatcatcctcagtatgtgtgaagaaatagtctgtaactacacatacctttcattgcaattaccaagaactggaaatggacgatgataatgggcttgagcttagtttgggcctatctttgggcgggtcatcagggaaggccaaggctagagatgcacctctagaaccaaaagcagaaccccaagtggaagaaagcagtagcaaaggtggtttacaaactcctgatgctccttctgggaaattttatcaaaagagcgctgataaccatgaacaaaatagtaaacagaggcacagccctgttgcaccacaatttgggaacttctggggacaaccagggaattcctccggtccagtggtagatggttctgttgaaccggtgagtcatcagcctcagctttccagttatcaagatggaaggatgccaattaacagtggaaataattctgaggagcagaagccagtttctggtaaccacaagttgccttctgaagagatgaactttcagaagaaacatcagacagctagtgaccagcctgatgcattcagtaagagctctgacggaggtgcaaagaatgcacctatctcgattagtacggatgatggttcaactggtgaaaatgaggatgttgcagagtcagaagcagaaggctcaaattcttggttggttgcacagcgtgaagacagtgctaagggctctgttgttaacaaaggaactgataggaaaaggtccgccgatgctgctgcagatggttttaaaggaaagagacaaccaagtttctcaggaagcgagtccagctctggaaagttgacacctggaaatcttatatcgatgcaggcatcaaatgtagtggctttgccatatcaagtcccaggtcaagtttctggacctcctgtcttaactaatgcaccaaattttcacccggtatgtactgtgcagttgaggccgcccacaaatggtggactagctgtccagacaatgggtagtgcctctcaagttgcttttggttacccagcagtccagctaccaacacttgaaacgggctcttcatgggcatttggtgctccacctcaggctctgtcttcttttactgcaaaagacaaagctgatcaaacaggaaccaagcaagttgacgatggcaagaagccccaggaggcaggtgcttcctcgtctgctcatgctgaagatgagaaaaaggctgatagaggactctctcttatgggttctgccataaggccaggcatcgcaccaaatgtcaaatttggagggtctggatcatatccggatcttccctgggtttctaccatcggcgccggaccaaatggcagaaccatatcaggtgtgacatacaagtttggtagaaatgaggtaaagatagtatgtgcttgccatggcactcacatgtctccggaggagttcatgcggcatgcaagtgcagatgctccggcccaagataatagtgcaaccctgccagcattccctgctggtaaccaagccacgtctgcagaaaattaggttagcggttcagagaatgcttgactaataatccttgcccctcttgtgtctatatcagccattcactgtaatactcagtgttcatctcgtgttaactttttatcatgcaagtttagattcttgtattttgagctttgtttgaggataaaatctgtgtatttttagcgctatgtaacacatggactgccaattgctgtggttggattttgatctatagacgatgtgttcattgctattagaaacagggacttggtcttcttcgtaagttcctcgcgaagggtgagagcatctcatgagagtgtatttctataactcgttctctctaaattatatttgaagagtcattaaaataaaaaaaacgttttaatatcttattagtctaatagtttttatatcttttttttactctaatagttttgcttagccttgtccggacacggcgtcgttcggggccacgcctgaccttgctcctctggttctgaggctggctctatcttcttgaccatatcgacctgagcagtgccaatctcgccgcgggcttccactgctttgccctatgcactttacgccgccccccggactggaaaattgcttccccgcggacctccactccaacggtgcccgtatctcctttgtcctggctggatccgtataatctcctttgtcctccccctcccctcgttcccgtctccctcgcgttcctctcgaccgtacgccgccgcctggctcgcaccgtcgacagtacctcagtccagatcgaccctccctctacccagatcgggttccagttggcctaccgcccccgccgccctactacaggtgccgaggccttcaccggcgaagagcgcccgccagacaaatggaactgggtgataaggcggtcggttttctgctgactctgacaagcttaaccttatttacatactacacattctgggtcatcattttgccatttgtcgacagcgaccactttgtgcacaagtacttcctgcctcaagagtatgcgattttgataccggtactggccggcgtggttctcctttcgttcttgagcgtgtttgtgggccttgtgatgctcaaatcgaagaagaagaagacggcttaatcgggtttgccatgtacactgctgtgtcattcacttagtgtgatgaaatgcatgagttcgcagtatctaattgctagaagctcggttctgtaatcagttccgtcatactttaaaggtctttactttgtcatctggatgtgtgttttttttattctggtggtcaattaaaagcagtgttcatcaaaactctagttagaggtcacatatcgttagccattattcggaccgaacagcattttgaagagtgaacgattgacagtggctaaaagacgaccgctcactcatcctcttcacagctgtcgggttggtatccaagcgctgatgatgcagaggcaagattctggcgtgcaaaaaaaaactgagagttgttctgttcgttgtgggtagcatcgattgtgcaatttcagtggttaccggattagttaggttaaactgagaatttttagagtatatatgacaactcaagtccgcccccaccttttccagcgccggcaaggtccagctcccggaggcgaggaaagcagcggccaaagagtgacactgatcagagacaga

SEQ ID NO: 202302 - DNA, 1663 bp, Zea Mays
aattgctcaacccgaaatttgggtgaacccgagtgtactcccctagccacacatggccagtcactcgagcgtggttgagccaccgttcacgtgtgccgcgcagaactagcaggagggggaaattttgaaaagctttttcccaacattaacaggtggaacatatgctaaagaaataaggggcaagcgagaagatgaggctggtgggtttgacgggtggcatcgcatctgggaagagcactgtctctaacctctttagggactctggtgtccccgttgtggatgccgatgtcattgctcgggatgtagtgcagaaaggcaccagaggttggaagaagattgtaaaagcctttgggaatgatattttgctggaaagtggagaaattaacagagctctattgggacaaatcgtattttctgacccatcaaaacgtcaacttctaaaccgtcttctggcaccacatatttcttatagcattgtctgggagatagcaaaactgtggatgaaaggctgcaaggttatcatccttgacatcccgctgctgtttgagacaaagatggatagatggacgaatccaatcattgttctctgggttgatccaaaagtccagattgagaggctcatttcaagagatggatgctctgaaggacaagctcagaataggatcaatgcacagcttgcactagactggaagaaatcagaagcagacatagtgattgacaattctggttccctggatgacaccaaacagcaattccaagaagtgttgatgaaagtctcggagcccttgacatggaaggaacgcttgagatctagagatggtctgatctctgttgtcgtctttactgcagtgggcgtattacttgcccagaagaatctgctatgatcatgaaggcttagggagttaaaaatgttgatacgatgttttaaaggactggcacaactaagtaagaacccttagtaagaaccactatttttagttgtccttactggataatgggtcaagtaatgaaagtctgcatttagggattgctgggcttagccaaaatcttgttgtaccaaattgtgttgatgggctgggaattacaactatattcggactacgggctatccatgttcatgtgattttttgtaccgagtataaagcatggccatgcatgcgaatccgcactgcctaattatggaagccacttgattagaagcttgccctttagtcacagaagtgttcttttcaggcttgtcaacatttcaattttgggtacacattactctttcaatcataagtttgggggtgtttggtttcaagtttgggggtgtttagtttctggggactaatttttagtctctcaaatttattctatgctaatctctaaattaccaaatacggaaactaattagcaatttagaagggactaaaaatctctagaaaccaaacacctctttttgaaagtgatacgagtgtatttgtttttttagaaatagtatgataaatatttgccaaagtttgaaatggctgatttcaggaaacctaatacaccacttatttgtcactggacggaataatcaactctgagggctagtttaagagctaaaataccagtgggaattggaggagctaaaattctcttattttgaaaaaaaaagattttagtttcatcaatcccc

SEQ ID NO: 202303 - DNA, 3134 bp, Zea Mays
ataaaaaaaaaaagggaaactcccaatcagcacgcacgtttcagcatccagtagctagagctgcaggctgcagccgtcagccgcacccgaggccgagagcccagagccgagaggcgagttgggcggctgtgctggccggccatggcgaagccaggcggcagcgatgagtcgtgggagtacagtctgcgcaagtatctcctgctgctggccacgctggtggccacggtgacgtacggtgcggggttcaaccccccaggcggcgtctggcagactgccgaccccgccgtcgaccgcatcgccggcgaccccatcatccgcgacacgaactacgcccgctacctgtccttcttctacagcaacgccaccgccttcgcctcgtcgctcgtggtcatcgtcctcgtcctcatcctgtccgtgctgcacgacaacgggggaatcaccatgctcgcgccgctgctcggcgtcctccgggccgtcatggtgctggacctgctcagcctcatgggcgcctacgcggcggggacgttccgggacacgctcacggcggtctactccctggtgctgtcggccggcgtcgtcgcctacctcgtggcccacctggccctggcctcgagggcgccggcggccgaggacaagagggggcagagcgcgccggagcggctccgcaaggtgctcatgctcctcgccacgttcgccgcgagcgtcacgtacgtcgccggcctcagcgcgccgggcggcttctgggaccactccgaggacggccaccgcccgggcgacgcgatcctcaagggagggccccacgacgcgcgcctcaaggccttcttcgtctgcaacaccacggcgttcgtcgcgtccctgctcatcctcgtcatgctcctggagaagaagctctgcttcagccagaagcaaattcgaccgaggggcaacaaacacgaactcaaggtcccctaacaaataatggcaatggcagtgatgagcgtcagcagactcaaggtccgcaaacaagcatggacagtaatgacagggatgagcagcagcaacaaacccacggtctgcaaactagtgatgacaatgtcagtgaccaccaccagcagcagcaacaaactcagagtcctcaaactagcaatggcaatggcaatgccagcgatgagcatgagaagcaacaaaatccagcgctggagaaggctcgctctcttgtcctgctgctcgctactctcgcagcggcaatcacctaccaagcgggcctgaacccgccgggtggcctctggcagagcaacggccgcctctacaagatcggtgatccgatcctcttgaccacgaaccccagacggtacaaggcattctactactgcaactccgtcgccttcgtcgcctccttggtcgccgttatgctggttaggaagaagacactgcaccaccacaacgcgctggaggccgccatggtactggacctgttcggcctcatcggcgcttacgccgccgggagctgccgggacgtcagcacgtccatctacgccatggcccttgcaggcgccgtgctggtctacgtggtcatccatgtcgtcttcttgacgctggacgaaaaggacggcagcagcgcgagaaggaatgatgacgcttccttcgaggagagagagaaaaaggaggcgggcctggtggagaagaggcgcaaacgactgctcctattcgccatcttggccgcgaccatcacctaccaagccgggctgacaccgccgggcggctttctggtccaggacgataaccgtaccggccgccatgccggcgacgcggtcctgctcaacaactacccgcgccgttacacggctttcttctactgcaactcggtgagcttcatgctgtccatcgccctcatcatcctcctcgtgaaccccaacctgtaccgccctgccattcggagcaatgcgctgtctgtctgcacggcggccgggttgattggaatcatgggcggctacgcggccggctgcacgcagcatctgaagacatccatctatatcttcgtgttggcggccgtggttctgtccactgtggtctttctggctgcggtgttccttgtgatccatctgagaaaaaaaagacgataatgctaacagcaccaacagagcagcagcaagagaggcacctggggaagaacaagaagccaatgctggtgctggggtgccaaatgccatggggggcgagcaaagaggtccccaaggagccaaagctcgccgaaaagaaaagagggcacacgccaagcgcaagtatctgatgctgcttggaatcctcgtggcgagcgtgacctaccaggccgggctggcgccgccgggcggggcgtggcagtccaacgacggcacccacaccgcgggcgaccctgtgatgcacgactaccggagggcccggtaccttgccttcttctacagcaactccacctccttcgtggcgtccgtggtcgtcgtcgtgcttctgctgccggagtcgctgcacaagaagtggtggtggctcggggtcatgaacgcgacgatcgtgctggacctgctgggcctcttgatcgcctatgccgccgggtccagcaggacgtggaagacttctgtggttgtttccgctctcgttctcgctgtgctcgcctatttcgccatacatgtgctgctgtcaagctgcgtcaggagagggaagaagacagcccccgactctccgtctccgccccaggaccaggagaacagagaggaaaacgaagcggcaacgaaagaggtcgagctccagggtccagcttgctgaaactggagtgtacagtgcggagctgaatgtgtgtgcagtccagtacttgtagatttttttttcacgaccgtgttgtcgcattttttttttttgtcaagaggtgtagtgtttttgttgatccacgtagcgggcgggaacgattgatgtgcaatcaagtgttagatgtaagtgtacaaacaagtctgcgtgcaagcgaggcttctctgtctttttagatcatgtagtcttcgcgtgggtcataaatgacttcacgggtttggaacagtcttactgaatatcagcgtacctgatgactggatattactgtacgagctgattcctgaggagtcaaaatctcctgcgaaaagcatgaacagaag

SEQ ID NO: 202304 - DNA, 2058 bp, Zea Mays
gcagaggccagtgccactgctggcaggcgctgaggcgcccgagggccctcaagtggcgcgcgagccgcacgccaacgcccgcgacgcgacgaattatctttatcccctttccctctgccgtcctcgttcccggccgtccgtgccgaaggaagtatctgctgagtgctgacccagcccatgcccatccacctcgctccctcgaccgacccacccagcccagcgcgcgctcgcatggcgatgctgctccgcaaggtgtggggctccgtgctggcgcgcgccgcagcgccgggggccgacccgcgagcccgccgcgcgcaggcgcatcgcgcggagcagtaccagtaccacggctcgctatcgctgggcgcgctcgacgccgtccccaccgacgtgctcgcccagatcctgcgcctgctgggcccgctcgacgccgcgcgctccagcgccgtctgccgcgcctggcgcgtcctcgcctccgacaacggcctctgggctttcttcctccgcctcggccccgagccctaggacctcgtcgtcttcgccgagacgcacctcgccgccggccccgcctcgcacccgtggctgtactacgatagctcgccgcagctctcgttcaaacagatttacggcctccgagcgctggtcccgggtactctcatcgtggatggtggatctggttattgcaagtatggctggagcaagtatgctgctccttccgggcgttgtgctacattcttggaattcggtaacattgaagcacctatgtatgcaaggcttcgtcacttcttctctacaatatatacgaggatgcaaataaagccttcgactcagccagttattgttgtccttccactgtgtcactctgatgataccgagtctgctagggcctcaagaaaacaatacaaggagacgctgtactctgtcttgtttgacatgaatgttcctgctgtttgtgctgtcgatcaggcagttctatctttgtatgcttctaaacggacctctggtattgttgtgcacattggattcaatacgacttctgttgttcccatctttcaaggtagggtaatgtatgagataggtgttgaaactgtggggcaaggtgcccttaaactcactggatttctcaaggagttgatgcagcggagaaatatatcctaaactttgctacgtagctgctgattatgaagctgaattgcgtaaagatacacaagcgtcctgcgagatcgatggtgaagggtgtttcactctgtcggaagagagattcaagactccagaaatcctatttcagccccatatgggaggaatgcgtgctatgggcttgcataaagcagtatctctatgtatggatcactgctatgtttcaggaacggttggtgatgacagctggtacaagacggtcattttagctggtggttcgtcgtgcttgcctggtttaccagagaggctggagaaagagcttcaccaacttcttccaccttatatgtcagaaggaataagagtactccccccttcatttggcactgattctgcctggtttggtgcaaagatgatcagcaacgtgagtactttcactgaggcatggtgtgcaaagaagaaacaattccgtcagaagacaggccggagtggtacattgtttgccaattcctggtaatgaaaatctcagacacaagtcacgagcaagaaacttaaagagttccccgcatcaaaaatacggacataacatccggtccatgctccactgagcctccaccagtatatagaagcatgagcattcatgcccagtatatattcacgtccatatcatgcatatatggattatgagccagtgcatcatttggtggtgttgttataggatgttttggtaagttcgttgtggttataggttgttggcaaaagcgcagttgtctcgttttaattttaagtggaacgattaattagttattgagcatgagtctttgtttatagctatatatgtctcatgaaatttggtacagttctaaatgttgtaaaacgcaataaatcattttataaatgagatatgtctttattgctgttgtt

SEQ ID NO: 202305 - DNA, 2114 bp, Zea Mays
gcagaggccagtgccactgctggcaggcgctgaggcgcccgagggccctcaagtggcgcgcgagccgcacgccaacgcccgcgacgcgacgaattatctttatcccctttccctctgccgtcctcgttcccggccgtccgtgccgaaggaagtatctgctgagtgctgacccagcccatgcccatccacctcgctccctcgaccgacccacccagcccagcgcgcgctcgcatggcgatgctgctccgcaaggtgtggggctccgtgctggcgcgcgccgcagcgccgggggccgacccgcgagcccgccgcgcgcaggcgcatcgcgcggagcagtaccagtaccacggctcgctatcgctgggcgcgctcgacgccgtccccaccgacgtgctcgcccagatcctgcgcctgctgggcccgctcgacgccgcgcgctccagcgccgtctgccgcgcctggcgcgtcctcgcctccgacaacggcctctgggctttcttcctccgcctcggccccgagccctaggacctcgtcgtcttcgccgagacgcacctcgccgccggccccgcctcgcacccgtggctgtactacgatagctcgccgcagctctcgttcaaacagatttacggcctccgagcgctggtcccgggtactctcatcgtggatggtggatctggttattgcaagtatggctggagcaagtatgctgctccttccgggcgttgtgctacattcttggaattcggtaacattgaagcacctatgtatgcaaggcttcgtcacttcttctctacaatatatacgagataccgagtctgctagggcctcaagaaaacaatacaaggagacgctgtactctgtcttgtttgacatgaatgttcctgctgtttgtgctgtcgatcaggcagttctatctttgtatgcttctaaacggacctctggtattgttgtgcacattggattcaatacgacttctgttgttcccatctttcaaggtagggtaatgtatgagataggtgttgaaactgtggggcaaggtgcccttaaactcactggatttctcaaggagttgatgcagcggagaaatatatcctgtgagtcactgtacactgttcgaaccatcaaggagaaactttgctacgtagctgctgattatgaagctgaattgcgtaaagatacacaagcgtcctgcgagatcgatggtgaagggtgtttcactctgtcggaagagagattcaagactccagaaatcctatttcagccccatatgggaggaatgtgcgaaatattcagatattgtttgatttgtgcatcgattacagtttagttatggttggtcaatgttgatcttgcccttgcaggcgtgctatgggcttgcataaagcagtatctctatgtatggatcactgctatgtttcaggaacggttggtgatgacagctggtacaagacggtcattttagctggtggttcgtcgtgcttgcctggtttaccagagaggctggagaaagagcttcaccaacttcttccaccttatatgtcagaaggaataagagtactccccccttcatttggcactgattctgcctggtttggtgcaaagatgatcagcaacgtgagtactttcactgaggcatggtgtgcaaagaagaaacaattccgtcagaagacaggccggagtggtacattgtttgccaattcctggtaatgaaaatctcagacacaagtcacgagcaagaaacttaaagagttccccgcatcaaaaatacggacataacatccggtccatgctccactgagcctccaccagtatatagaagcatgagcattcatgcccagtatatattcacgtccatatcatgcatatatggattatgagccagtgcatcatttggtggtgttgttataggatgttttggtaagttcgttgtggttataggttgttggcaaaagcgcagttgtctcgttttaattttaagtggaacgattaattagttattgagcatgagtctttgtttatagctatatatgtctcatgaaatttggtacagttctaaatgttgtaaaacgcaataaatcattttataaatgagatatgtctttattgctgttgtt

SEQ ID NO: 202306 - DNA, 2077 bp, Zea Mays
gcagaggccagtgccactgctggcaggcgctgaggcgcccgagggccctcaagtggcgcgcgagccgcacgccaacgcccgcgacgcgacgaattatctttatcccctttccctctgccgtcctcgttcccggccgtccgtgccgaaggaagtatctgctgagtgctgacccagcccatgcccatccacctcgctccctcgaccgacccacccagcccagcgcgcgctcgcatggcgatgctgctccgcaaggtgtggggctccgtgctggcgcgcgccgcagcgccgggggccgacccgcgagcccgccgcgcgcaggcgcatcgcgcggagcagtaccagtaccacggctcgctatcgctgggcgcgctcgacgccgtccccaccgacgtgctcgcccagatcctgcgcctgctgggcccgctcgacgccgcgcgctccagcgccgtctgccgcgcctggcgcgtcctcgcctccgacaacggcctctgggctttcttcctccgcctcggccccgagccctaggacctcgtcgtcttcgccgagacgcacctcgccgccggccccgcctcgcacccgtggctgtactacgatagctcgccgcagctctcgttcaaacagatttacggcctccgagcgctggtcccgggtactctcatcgtggatggtggatctggttattgcaagtatggctggagcaagtatgctgctccttccgggcgttgtgctacattcttggaattcggtaacattgaagcacctatgtatgcaaggcttcgtcacttcttctctacaatatatacgaggatgcaaataaagccttcgactcagccagttattgttgtccttccactgtgtcactctgatgataccgagtctgctagggcctcaagaaaacaatacaaggagacgctgtactctgtcttgtttgacatgaatgttcctgctgtttgtgctgtcgatcaggcagttctatctttgtatgcttctaaacggacctctggtattgttgtgcacattggattcaatacgacttctgttgttcccatctttcaaggtagggtaatgtatgagataggtgttgaaactgtggggcaaggtgcccttaaactcactggatttctcaaggagttgatgcagcggagaaatatatcctgtgagtcactgtacactgttcgaaccatcaaggagctgctgattatgaagctgaattgcgtaaagatacacaagcgtcctgcgagatcgatggtgaagggtgtttcactctgtcggaagagagattcaagactccagaaatcctatttcagccccatatgggaggaatgcgtgctatgggcttgcataaagcagtatctctatgtatggatcactgctatgtttcaggaacggttggtgatgacagctggtacaagacggtcattttagctggtggttcgtcgtgcttgcctggtttaccagagaggctggagaaagagcttcaccaacttcttccaccttatatgtcagaaggaataagagtactccccccttcatttggcactgattctgcctggtttggtgcaaagatgatcagcaacgtgagtactttcactgaggcatggtgtgcaaagaagaaacaattccgtcagaagacaggccggagtggtacattgtttgccaattcctggtaatgaaaatctcagacacaagtcacgagcaagaaacttaaagagttccccgcatcaaaaatacggacataacatccggtccatgctccactgagcctccaccagtatatagaagcatgagcattcatgcccagtatatattcacgtccatatcatgcatatatggattatgagccagtgcatcatttggtggtgttgttataggatgttttggtaagttcgttgtggttataggttgttggcaaaagcgcagttgtctcgttttaattttaagtggaacgattaattagttattgagcatgagtctttgtttatagctatatatgtctcatgaaatttggtacagttctaaatgttgtaaaacgcaataaatcattttataaatgagatatgtctttattgctgttgtt

SEQ ID NO: 202307 - DNA, 2172 bp, Zea Mays
gcagaggccagtgccactgctggcaggcgctgaggcgcccgagggccctcaagtggcgcgcgagccgcacgccaacgcccgcgacgcgacgaattatctttatcccctttccctctgccgtcctcgttcccggccgtccgtgccgaaggaagtatctgctgagtgctgacccagcccatgcccatccacctcgctccctcgaccgacccacccagcccagcgcgcgctcgcatggcgatgctgctccgcaaggtgtggggctccgtgctggcgcgcgccgcagcgccgggggccgacccgcgagcccgccgcgcgcaggcgcatcgcgcggagcagtaccagtaccacggctcgctatcgctgggcgcgctcgacgccgtccccaccgacgtgctcgcccagatcctgcgcctgctgggcccgctcgacgccgcgcgctccagcgccgtctgccgcgcctggcgcgtcctcgcctccgacaacggcctctgggctttcttcctccgcctcggccccgagccctaggacctcgtcgtcttcgccgagacgcacctcgccgccggccccgcctcgcacccgtggctgtactacgatagctcgccgcagctctcgttcaaacagatttacggcctccgagcgctggtcccgggtactctcatcgtggatggtggatctggttattgcaagtatggctggagcaagtatgctgctccttccgggcgttgtgctacattcttggaattcggtaacattgaagcacctatgtatgcaaggcttcgtcacttcttctctacaatatatacgaggatgcaaataaagccttcgactcagccagttattgttgtccttccactgtgtcactctgatgataccgagtctgctagggcctcaagaaaacaatacaaggagacgctgtactctgtcttgtttgacatgaatgttcctgctgtttgtgctgtcgatcagttctatctttgtatgcttctaaacggacctctggtattgttgtgcacattggattcaatacgacttctgttgttcccatctttcaaggtagggtaatgtatgagataggtgttgaaactgtggggcaaggtgcccttaaactcactggatttctcaaggagttgatgcagcggagaaatatatcctgtgagtcactgtacactgttcgaaccatcaaggagaaactttgctacgtagctgctgattatgaagctgaattgcgtaaagatacacaagcgtcctgcgagatcgatggtgaagggtgtttcactctgtcggaagagagattcaagactccagaaatcctatttcagccccatatgggaggaatgtgcgaaatattcagatattgtttgatttgtgcatcgattacagtttagttatggttggtcaatgttgatcttgcccttgcaggcgtgctatgggcttgcataaagcagtatctctatgtatggatcactgctatgtttcaggaacggttggtgatgacagctggtacaagacggtcattttagctggtggttcgtcgtgcttgcctggtttaccagagaggctggagaaagagcttcaccaacttcttccaccttatatgtcagaaggaataagagtactccccccttcatttggcactgattctgcctggtttggtgcaaagatgatcagcaacgtgagtactttcactgaggcatggtgtgcaaagaagaaacaattccgtcagaagacaggccggagtggtacattgtttgccaattcctggtaatgaaaatctcagacacaagtcacgagcaagaaacttaaagagttccccgcatcaaaaatacggacataacatccggtccatgctccactgagcctccaccagtatatagaagcatgagcattcatgcccagtatatattcacgtccatatcatgcatatatggattatgagccagtgcatcatttggtggtgttgttataggatgttttggtaagttcgttgtggttataggttgttggcaaaagcgcagttgtctcgttttaattttaagtggaacgattaattagttattgagcatgagtctttgtttatagctatatatgtctcatgaaatttggtacagttctaaatgttgtaaaacgcaataaatcattttataaatgagatatgtctttattgctgttgtt

SEQ ID NO: 202308 - DNA, 2094 bp, Zea Mays
gcagaggccagtgccactgctggcaggcgctgaggcgcccgagggccctcaagtggcgcgcgagccgcacgccaacgcccgcgacgcgacgaattatctttatcccctttccctctgccgtcctcgttcccggccgtccgtgccgaaggaagtatctgctgagtgctgacccagcccatgcccatccacctcgctccctcgaccgacccacccagcccagcgcgcgctcgcatggcgatgctgctccgcaaggtgtggggctccgtgctggcgcgcgccgcagcgccgggggccgacccgcgagcccgccgcgcgcaggcgcatcgcgcggagcagtaccagtaccacggctcgctatcgctgggcgcgctcgacgccgtccccaccgacgtgctcgcccagatcctgcgcctgctgggcccgctcgacgccgcgcgctccagcgccgtctgccgcgcctggcgcgtcctcgcctccgacaacggcctctgggctttcttcctccgcctcggccccgagccctaggacctcgtcgtcttcgccgagacgcacctcgccgccggccccgcctcgcacccgtggctgtactacgatagctcgccgcagctctcgttcaaacagatttacggcctccgagcgctggtcccgggtactctcatcgtggatggtggatctggttattgcaagtatggctggagcaagtatgctgctccttccgggcgttgtgctacattcttggaattcggtaacattgaagcacctatgtatgcaaggcttcgtcacttcttctctacaatatatacgaggatgcaaataaagccttcgactcagccagttattgttgtccttccactgtgtcactctgatgataccgagtctgctagggcctcaagaaaacaatacaaggagacgctgtactctgtcttgtttgacatgaatgttcctgctgtttgtgctgtcgatcagtctttcaaggtagggtaatgtatgagataggtgttgaaactgtggggcaaggtgcccttaaactcactggatttctcaaggagttgatgcagcggagaaatatatcctgtgagtcactgtacactgttcgaaccatcaaggagaaactttgctacgtagctgctgattatgaagctgaattgcgtaaagatacacaagcgtcctgcgagatcgatggtgaagggtgtttcactctgtcggaagagagattcaagactccagaaatcctatttcagccccatatgggaggaatgtgcgaaatattcagatattgtttgatttgtgcatcgattacagtttagttatggttggtcaatgttgatcttgcccttgcaggcgtgctatgggcttgcataaagcagtatctctatgtatggatcactgctatgtttcaggaacggttggtgatgacagctggtacaagacggtcattttagctggtggttcgtcgtgcttgcctggtttaccagagaggctggagaaagagcttcaccaacttcttccaccttatatgtcagaaggaataagagtactccccccttcatttggcactgattctgcctggtttggtgcaaagatgatcagcaacgtgagtactttcactgaggcatggtgtgcaaagaagaaacaattccgtcagaagacaggccggagtggtacattgtttgccaattcctggtaatgaaaatctcagacacaagtcacgagcaagaaacttaaagagttccccgcatcaaaaatacggacataacatccggtccatgctccactgagcctccaccagtatatagaagcatgagcattcatgcccagtatatattcacgtccatatcatgcatatatggattatgagccagtgcatcatttggtggtgttgttataggatgttttggtaagttcgttgtggttataggttgttggcaaaagcgcagttgtctcgttttaattttaagtggaacgattaattagttattgagcatgagtctttgtttatagctatatatgtctcatgaaatttggtacagttctaaatgttgtaaaacgcaataaatcattttataaatgagatatgtctttattgctgttgtt

SEQ ID NO: 202309 - DNA, 1872 bp, Zea Mays
ctcgttcctgccttgcgaaacggagcacccaaaccctagcatgtattgggagaatctaatccagttcccgatgaccatggcgcagcgcacgatgtgcctgcttcggcggtccattgggtttacagggccgcaggcacagagagccctgagtaccactgccgcgccggcggcggagggtgcagccgtggctgaagctacggcgaaggaggcgaagaggaggaggaagaatctgtttgacgtagtgcagttcctgccagagtggggcattggatacaaggttgccaagaccacctggcgtgatgtctcctatcagatcaccaagatcaacctgtacaaggatggtcggcatggaaaggcgtgggggcttcggtacaaggtgtgcaagctgcagacaccccaactaggatcagcggtgttaacaaacgtgggtggaagtacataaaagaatcacagaagaaactacaagaagcccccaaagtagacgtagctgttgctgctgcctagtttgtagttacatgcatgtttgttgtaagatgattcggtaaatctttagatggctgttgccagggtgagaacagggaaccactttttttttggatcgactctatacttttttgtcgatgacgactgaacctctctgcaacatgtccagtttctcttcttttcttttccttatggaacgaacctttaccgtaatgtactgatgcagaagaactgtgttgattgtggcaatctagtttccattcaaatgcaatccttgtttcattctgagccaatgttcctaggtttcagccgttcgttttccaagttgaactattttgttcctcaccatgttcctaggttttcattctacactgcggaggcgattgactggtattctcagtcagatgatgctggacggagtcatgcctacacgttcgcaacgcaggacaagtttggtgttcagccccgcgaggaccactacatggtcgatctgggactggtgttctggtatggcaggcggtgctggttgcctgccatctttcacggcagcgaggctgtaggcactcatctaattttggaagcagcaagcgagcgaacaaacaaacataccattgtgtgtcacaaagatgtcgaaaaacaaacttgcttgtatcaaaattagctcttcatgtatactgtaccaaatatacgcaaatgaccccgcagcatagttaattacaagctaaactcataaaaggaaattccttcaacattcccattggcatcctcggtggtcggtgctgaagccgcaggcaatggtcttaagtgactgtcgtagtcaagagaggttccaggtattgcttgaacttatcttttgtcattgccccttctcgccggctatctgctacctctcggccattcttgaagaaaatcaaagtcgggagaccatagaccttgtactcttcaatcagctgcggattggcgtcgtgatcgatcttgacgatttttactcgcccgtcatattcctgcgtcacaagattagactttaatcaaagctgtgattctggttagaagcaagcaatattgtttcctcgcacatatgtttaaagcatcacattctgctatgaggtgccagccaatgatggatcatctccctcaggatcgtaacactagccttgaatcaaacatgctgttccagtgttcctaatagcttccacacctgatgaacactgaaactgtcctcactttctaaagcgttttggccactgaatttcagcaaagcaaaaaactggaccgtggacttgtacactgatgccaactcaaatcacagacatgaacctatggacaagagcacgacatggcaccagcacagacgaacacagacatggataaggataagcacccgccggg

SEQ ID NO: 202310 - DNA, 1728 bp, Zea Mays
tgcaattaacggaccttctacgtgggccactcttcctcacatcgcctccctcgacgatggccgccgccaccgccgccgccgccacggcgtcggcttcgtgtcttctccggaggtctatatcctctgcattcctcgcgaagcgcgcggtccctagcattccgcgtacaactctctgctattcctcctccgcatccgccagactcaaaccaacgccgtccctgtctccgcctgtcacgtccgccaacgatggaggcggcgggatgaggtgggagtcagcgcgcaagaagagggtggtgctccgcatcggctacgtcggcactgattaccgagggcttcaaaagcagcaagagcttggcgtggattcgagtacactcattggctacaatgatttcccttaagatggaaatccctgatagagcatgggaggatgatcctgatggtattgctcttgccagcttcattaactcaaatttgccggacaatgtgagggtttttagtatattgcctgcacaaaggagttttgatgtaaggagggagtgcttatatcgtgagtacttctatcttcttcctgctgaaattattggaattaaagatgactatagctctgaagaaatgcaagagcacttgtcagaattcaacaaaatactgaaaggttttgagggaaaccatccattccataattacactgcacgtgccaagtataggaaggttctcgcgggaagacacagaagggccaaaggagcaagctcggcgttgaagtccatgtcctctgacactggcatggcagaaagctcttctgaagaaagcacttctccagatcacgatgaggacttgaatatttcatcaatctttgactctggtataccagaagacactcgtgtgaatggtattctgaagctttctgaggatcggctgcagattcaagctaggtggctgcatgagcctgacgaaagcgatagattaaacgcttcacatttcagagatatcattacctgttcctgtggagacttgcaaacttcatcagggattcagttcgttgagttgaccatatgcggggtatctttcatgctacatcagatccggaaaatggttggaaccgccgtgacggtgaagcgtggactactaccaagagacatcatagagctgtccctcgcgaagttctccagaatcgttctaccaatagccccttcagaggtcctggtcctcaaggacaacagtttctgcacgaagagcaagggagggaggatcgttcgccccgggatccagtccatgaacaagtcggaagcaaccaggaagggggtcgaggagttctacagggcagcgctcctgccagaagtagcgaagttcctggacccctctctgccgccgtggaaggagtggctggagaacctggacaggttctcgggcataccgggttcgcagctggacgaagtcagggaggcgtatcgagcgtggagggatgattacgaccgagcgaagatggctagaaactaggagtgctggcagtgtcgcaaggtggatgaactacctagcagtgaacaatgatgatttatatatactagttcgcttgatgtttatatattgagattcatacatatgcagcccgtcacgcagtgcaagcagcgcgcgggcactgctgttgttgttgggttgatactagctcaggagcaagctagtgttctgtactcacgtcacgtggaggcattccaatggcgaggcacatgcacg

SEQ ID NO: 202311 - DNA, 3823 bp, Zea Mays
cacggttctgcctccagtccgccgcccgcgcgactgctccaacgaaggaaagtctgatcccgccatggcgccatctccacccccgcttacctctctcggccgccatcatggaaggtccgaccccgccatcgctgtccccacgcggttgctccaaggaaggaaactctgatcccgctatccccgcccccgctctctctcgccatctccgtgcggctgctccaaggaaggaaggtccgaccccgccatcgccatccccgcgtggctgccttcccctctcgccatccccgcgcggctgctccaaggaaggaaggtccgaccccgccatcgccatccccgcgcgcccggtcgagcgccaccagccgcataagtctgggctagcgccgccggccaccattggctcggtcgagcacctcatgcccacgacggtcagtcgccgccttcatggctcagagtcgtcggtccctgcccaccaaggtcaccatgggctcgacgacgatggcaacaaggtcaaggtcgtcatcacaacccaagaaaaaatcatcttctacgattcagagaaattatgtgaagcttcaatttgactccatgcaacaggtttagctattgacaacctcgattacattttcacagtgggagctccttcgattattaaccacagttgtgtaccaaatgcagttttgatatttgatggtaggacagcatatgttcgtgcattgcaaccgataaataaagatgaagaggtatctataagctacattgagactgcggcagtcaccaagaagagaaacaatgatctgaaacagtacttcttcacctgcacatgtccacgctgtgtaaagggttttgatgaggatgcactacttgaggggttcaggtgcaagagccaagcatgtgatggctttctgctgcccaactcaggtaaaaaggcttatacatgccaaaaatgtggtgcttctagagatgtggaagagataaaaaatatgagaagcaaaatactacagttatcggataaagcatcttcatttctttcatcaggaaataaggctgaagcaggttctatctacaagataatcaaacagttagagagaaatctgtaccatgctttctcaactactttgctgcacacgtgcgaaacactattgaagatatatctggaattacaagattggtggactgcgttgacatactgtagattgacaattcctgtttatgaaagagtttatccaccttttcatccgatgattggattacaattctatacttgtggaaagcttgaatggtatggactattagcccttacctatttacctcacacaaggacaacaatcatatgagtttattccttatccggtataaatgtttgctgttaatgtcttatgctttactaatatagctgttattgattctgacaaaagttgattttggatttgacactgatagtatagggtcaataagagcaactctaaaagcctctgtaaatttcaatctctatatctaacatttggagagccattcaatgaatattatttttgtatatctctcttatctgcaacaggttttccaatatttgttctctatacttcgatagcttatcatattttttctttgttgaaaaacaagaaaactaaatgtagccgcctcttcaaaaatggagtgaaggaaggatggttttggagagtggtttagagaagtttatctattggagtttttttatttgttttctaaattttgttataaagaaacatgtagaatgtcttagagattctctaagaaaaatgctagctatgaacttttataaagagaagttcagaatcagttctttttattctctaatatatatgttgttcgtttccatgtaattattatgtactaacatttatcgaataatttttacgccgtcgcaacgcacggacacacacctatatagatatatgatggtcatgtttcgcccggacgcagggactggttcggagggagacggcccctcactctctgccctcctgctgcctgcctactgctatactgttctcttgtgttcatgttcatataaaattcagtttcatgttcatattttcataactgtatatgttcatcttatcatacagtttgggtccttgaactttggaacactgaatccctactactctccccccataaaggtgtgtgacctcatatgatgcggagctgttttggtctcgagtcataagggtattgatttggagataatgctgctcgggcttctttgaactgaactgattaagtcagcaacatatccaatattaatgtgtgttcatacatcagataggaaggaacacaaaagggtcaaatcaatacccttatgtctccccttctggaccaggctccgccgccggtgccgtggcctgcatcgcatgcccgacgctctacgcctacctgaagaagacagaccccggagtgcccgcgcagctgctggagtacgacgagcggttcgggcagtacggctgcgacttcaccttctacgactacaaccgaccggaggagctgccggcggcgatgaagcacgcctaccgagtcatcgttgccgaccctccctatctggggaagttcggatggaccgggcattggagctgctgaatgttcgtccctgcggtttcaggcctcgccactcgaacaaactaggcaacgagttccggctgttcacgaattaagatcctgctgacagacttggtggttgggagcaaagtgatggtgcccccatttaactataaactaatacaatttttgttctagagctgttccatctttatgaacatgttgcatctttgatccacagctcactgatccctccaatttaaattgtagtgacaattatttgaggaatctgtgtgctatgatgtatgattaatcaaacatttacactgttagtgtacctcattttaatttcattttaaaatacactgttagtgtatgtttcattttaatttcatcagtattctttagaatgtctcgttggcttattcagatttatagccaaaatgacattatcttggggatagttcatcagtattttttaatttcattatctcgttcggcggcggcatcccggacgggcacagcctgcacactggcgggcaggtcgtgaaggcacccaccatcgagcagaacctgtcgtgcaaccttgagtagctgtacaagggcatcaccaagaagttgaatatttctagggaaattgttgacgcaagtgggcgacgcttctccttcagacgctcaaccagtcaagaaggagtccgagagccaggcatggctcggattaggaccgaatgccgtcaagtccaacctgaacctgagctagcacacaacgacacagccaaataagacagcacagcaacctcaccaaagcctttgcaggacgatctgaaaatatgctttgccactagagtaccgaaaccataaatatcctctcgttatcgtgttttagtgttctgtttaggccgtggtcctacgccctcttgtcacatagtctggatgtaaagataagtagccagccatgactgagagaagttttttgggggggggggtgttaacacacggccactctgaattggccatgctaaggaaaatgatagtagtgcaaagagaagtatatgtcttttttctttttctttttctgaaagccagatcgtttggctctagccttgatgtatgcagaacaagtgattgtaatggattctgagtatcctcatcgtcttgctgttgcttcaccaacccaagtttgtttggattcttgccattcctgctgcagcaaatctctggtagtttatggtagcaactctagcaatctaag

SEQ ID NO: 202312 - DNA, 3368 bp, Zea Mays
gttctgcctccagtccgccgcccgcgcgactgctccaacgaaggaaagtctgatcccgccatggcgccatctccacccccgcttacctctctcggccgccatcatggaaggtccgaccccgccatcgctgtccccacgcggttgctccaaggaaggaaactctgatcccgctatccccgcccccgctctctctcgccatctccgtgcggctgctccaaggaaggaaggtccgaccccgccatcgccatccccgcgtggctgccttcccctctcgccatccccgcgcggctgctccaaggaaggaaggtccgaccccgccatcgccatccccgcgcgcccggtcgagcgccaccagccgcataagtctgggctagcgccgccggccaccattggctcggtcgagcacctcatgcccacgacggtcagtcgccgccttcatggctcagagtcgtcggtccctgcccaccaaggtcaccatgggctcgacgacgatggcaacaaggtcaaggtcgtcatcacaacccaaggttcgaggcgttcaaggcgaactctaggcacatcggcgagttcaacaagatgaaagacgttccctacaagctcggcctcaacaagaaaaaatcatcttctacgattcagagaaattatgtgaagcttcaatttgactccatgcaacaggtttagctattgacaacctcgattacattttcacagtgggagctccttcgattattaaccacaggtcgtatgctaaactattagctatatattcgtttatctattatctttaccagattagatcaattaatatatcaccaccttctctattcatccatttttttgggtatatttagttgtgtaccaaatgcagttttgatatttgatggtaggacagcatatgttcgtgcattgcaaccgataaataaagatgaagaggtatctataagctacattgagactgcggcagtcaccaagaagagaaacaatgatctgaaacagtacttcttcacctgcacatgtccacgctgtgtaaagggttttgatgaggatgcactacttgaggggttcaggtgcaagagccaagcatgtgatggctttctgctgcccaactcaggtaaaaaggcttatacatgccaaaaatgtggtgcttctagagatgtggaagagataaaaaatatgagaagcaaaatactacagttatcggataaagcatcttcatttctttcatcaggaaataaggctgaagcaggttctatctacaagataatcaaacagttagagagaaatctgtaccatgctttctcaactactttgctgcacacgtgcgaaacactattgaagatatatctggaattacaagattggtggactgcgttgacatactgtagattgacaattcctgtttatgaaagagtttatccaccttttcatccgatgattggattacaattctatacttgtggaaagcttgaatgatatatgatggtcatgtttcgcccggacgcagggactggttcggagggagacggcccctcactctctgccctcctgctgcctgcctactgctatactgttctcttgtgttcatgttcatataaaattcagtttcatgttcatattttcataactgtatatgttcatcttatcatacagtttgggtccttgaactttggaacactgaatccctactactctccccccataaaggctccgccgccggtgccgtggcctgcatcgcatgcccgacgctctacgcctacctgaagaagacagaccccggagtgcccgcgcagctgctggagtacgacgagcggttcgggcagtacggctgcgacttcaccttctacgactacaaccgaccggaggagctgccggcggcgatgaagcacgcctaccgagtcatcgttgccgaccctccctatctggtactgtttctaccctaccagagattgcctattaaaaagtgtttgatcagttcttaacatttgagatgagaggaaatatcgaggagaaatggctattattcattggttgatgatgtagagtaaggagtgcttggaaaaggttgccaaaacagtatctttcctcgcacgacctgaaggttcattcctgctgctgctcacaggggaagttcggatggaccgggcattggagctgctgaatgttcgtccctgcggtttcaggcctcgccactcgaacaaactaggcaacgagttccggctgttcacgaattaagatcctgctgacagacttggtggttgggagcaaagtgatggtgcccccatttaactataaactaatacaatttttgttctagagctgttccatctttatgaacatgttgcatctttgatccacagctcactgatccctccaatttaaattgtagtgacaattatttgaggaatctgtgtgctatgatgtatgattaatcaaacatttacactgttagtgtacctcattttaatttcattttaaaatacactgttagtgtatgtttcattttaatttcatcagtattctttagaatgtctcgttggcttattcagatttatagccaaaatgacattatcttggggatagttcatcagtattttttaatttcattatctcgttcggcggcggcatcccggacgggcacagcctgcacactggcgggcaggtcgtgaaggcacccaccatcgagcagaacctgtcgtgcaaccttgagtagctgtacaagggcatcaccaagaagttgaatatttctagggaaattgttgacgcaagtgggcgacgcttctccttcagacgctcaaccagtcaagaaggagtccgagagccaggcatggctcggattaggaccgaatgccgtcaagtccaacctgaacctgagctagcacacaacgacacagccaaataagacagcacagcaacctcaccaaagcctttgcaggacgatctgaaaatatgctttgccactagagtaccgaaaccataaatatcctctcgttatcgtgttttagtgttctgtttaggccgtggtcctacgccctcttgtcacatagtctggatgtaaagataagtagccagccatgactgagagaagttttttgggggggggggtgttaacacacggccactctgaattggccatgctaaggaaaatgatagtagtgcaaagagaagtatatgtcttttttctttttctttttctgaaagccagatcgtttggctctagccttgatgtatgcagaacaagtgattgtaatggattctgagtatcctcatcgtcttgctgttgcttcaccaacccaagtttgtttggattcttgccattcctgctgcagcaaatctctggtagtttatggtagcaactctagcaatctaag

SEQ ID NO: 202313 - DNA, 3387 bp, Zea Mays
ctccagtccgccgcccgcgcgactgctccaacgaaggaaagtctgatcccgccatggcgccatctccacccccgcttacctctctcggccgccatcatggaaggtccgaccccgccatcgctgtccccacgcggttgctccaaggaaggaaactctgatcccgctatccccgcccccgctctctctcgccatctccgtgcggctgctccaaggaaggaaggtccgaccccgccatcgccatccccgcgtggctgccttcccctctcgccatccccgcgcggctgctccaaggaaggaaggtccgaccccgccatcgccatccccgcgcgcccggtcgagcgccaccagccgcataagtctgggctagcgccgccggccaccattggctcggtcgagcacctcatgcccacgacggtcagtcgccgccttcatggctcagagtcgtcggtccctgcccaccaaggtcaccatgggctcgacgacgatggcaacaaggtcaaggtcgtcatcacaacccaaggttcgaggcgttcaaggcgaactctaggcacatcggcgagttcaacaagatgaaagacgttccctacaagctcggcctcaacaagaaaaaatcatcttctacgattcagagaaattatgtgaagcttcaatttgactccatgcaacaggtttagctattgacaacctcgattacattttcacagtgggagctccttcgattattaaccacaggtcgtatgctaaactattagctatatattcgtttatctattatctttaccagattagatcaattaatatatcaccaccttctctattcatccatttttttgggtatatttagttgtgtaccaaatgcagttttgatatttgatggtaggacagcatatgttcgtgcattgcaaccgataaataaagatgaagaggtatctataagctacattgagactgcggcagtcaccaagaagagaaacaatgatctgaaacagtacttcttcacctgcacatgtccacgctgtgtaaagggttttgatgaggatgcactacttgaggggttcaggtgcaagagccaagcatgtgatggctttctgctgcccaactcaggtaaaaaggcttatacatgccaaaaatgtggtgcttctagagatgtggaagagataaaaaatatgagaagcaaaatactacagttatcggataaagcatcttcatttctttcatcaggaaataaggctgaagcaggttctatctacaagataatcaaacagttagagagaaatctgtaccatgctttctcaactactttgctgcacacgtgcgaaacactattgaagatatatctggaattacaagattggtggactgcgttgacatactgtagattgacaattcctgtttatgaaagagtttatccaccttttcatccgatgattggattacaattctatacttgtggaaagcttgaatgggactggttcggagggagacggcccctcactctctgccctcctgctgcctgcctactgctatactgttctcttgtgttcatgttcatataaaattcagtttcatgttcatattttcataactgtatatgttcatcttatcatacagtttgggtccttgaactttggaacactgaatccctactactctccccccataaagataggaaggaacacaaaagggtcaaatcaatacccttatgtctccccttctggaccaggctccgccgccggtgccgtggcctgcatcgcatgcccgacgctctacgcctacctgaagaagacagaccccggagtgcccgcgcagctgctggagtacgacgagcggttcgggcagtacggctgcgacttcaccttctacgactacaaccgaccggaggagctgccggcggcgatgaagcacgcctaccgagtcatcgttgccgaccctccctatctggtactgtttctaccctaccagagattgcctattaaaaagtgtttgatcagttcttaacatttgagatgagaggaaatatcgaggagaaatggctattattcattggttgatgatgtagagtaaggagtgcttggaaaaggttgccaaaacagtatctttcctcgcacgacctgaaggttcattcctgctgctgctcacaggggaagttcggatggaccgggcattggagctgctgaatgttcgtccctgcggtttcaggcctcgccactcgaacaaactaggcaacgagttccggctgttcacgaattaagatcctgctgacagacttggtggttgggagcaaagtgatggtgcccccatttaactataaactaatacaatttttgttctagagctgttccatctttatgaacatgttgcatctttgatccacagctcactgatccctccaatttaaattgtagtgacaattatttgaggaatctgtgtgctatgatgtatgattaatcaaacatttacactgttagtgtacctcattttaatttcattttaaaatacactgttagtgtatgtttcattttaatttcatcagtattctttagaatgtctcgttggcttattcagatttatagccaaaatgacattatcttggggatagttcatcagtattttttaatttcattatctcgttcggcggcggcatcccggacgggcacagcctgcacactggcgggcaggtcgtgaaggcacccaccatcgagcagaacctgtcgtgcaaccttgagtagctgtacaagggcatcaccaagaagttgaatatttctagggaaattgttgacgcaagtgggcgacgcttctccttcagacgctcaaccagtcaagaaggagtccgagagccaggcatggctcggattaggaccgaatgccgtcaagtccaacctgaacctgagctagcacacaacgacacagccaaataagacagcacagcaacctcaccaaagcctttgcaggacgatctgaaaatatgctttgccactagagtaccgaaaccataaatatcctctcgttatcgtgttttagtgttctgtttaggccgtggtcctacgccctcttgtcacatagtctggatgtaaagataagtagccagccatgactgagagaagttttttgggggggggggtgttaacacacggccactctgaattggccatgctaaggaaaatgatagtagtgcaaagagaagtatatgtcttttttctttttctttttctgaaagccagatcgtttggctctagccttgatgtatgcagaacaagtgattgtaatggattctgagtatcctcatcgtcttgctgttgcttcaccaacccaagtttgtttggattcttgccattcctgctgcagcaaatctctggtagtttatggtagcaactctagcaatctaag

SEQ ID NO: 202314 - DNA, 3085 bp, Zea Mays
ccgcgcgactgctccaacgaaggaaagtctgatcccgccatggcgccatctccacccccgcttacctctctcggccgccatcatggaaggtccgaccccgccatcgctgtccccacgcggttgctccaaggaaggaaactctgatcccgctatccccgcccccgctctctctcgccatctccgtgcggctgctccaaggaaggaaggtccgaccccgccatcgccatccccgcgtggctgccttcccctctcgccatccccgcgcggctgctccaaggaaggaaggtccgaccccgccatcgccatccccgcgcgcccggtcgagcgccaccagccgcataagtctgggctagcgccgccggccaccattggctcggtcgagcacctcatgcccacgacggtcagtcgccgccttcatggctcagagtcgtcggtccctgcccaccaaggtcaccatgggctcgacgacgatggcaacaaggtcaaggtcgtcatcacaacccaagaaaaaatcatcttctacgattcagagaaattatgtgaagcttcaatttgactccatgcaacaggtttagctattgacaacctcgattacattttcacagtgggagctccttcgattattaaccacaggacagcatatgttcgtgcattgcaaccgataaataaagatgaagaggtatctataagctacattgagactgcggcagtcaccaagaagagaaacaatgatctgaaacagtacttcttcacctgcacatgtccacgctgtgtaaagggttttgatgaggatgcactacttgaggggttcaggtgcaagagccaagcatgtgatggctttctgctgcccaactcaggtaaaaaggcttatacatgccaaaaatgtggtgcttctagagatgtggaagagataaaaaatatgagaagcaaaatactacagttatcggataaagcatcttcatttctttcatcaggaaataaggctgaagcaggttctatctacaagataatcaaacagttagagagaaatctgtaccatgctttctcaactactttgctgcacacgtgcgaaacactattgaagatatatctggaattacaagattggtggactgcgttgacatactgtagattgacaattcctgtttatgaaagagtttatccaccttttcatccgatgattggattacaattctatacttgtggaaagcttgaatgggactggttcggagggagacggcccctcactctctgccctcctgctgcctgcctactgctatactgttctcttgtgttcatgttcatataaaattcagtttcatgttcatattttcataactgtatatgttcatcttatcatacagtttgggtccttgaactttggaacactgaatccctactactctccccccataaagataggaaggaacacaaaagggtcaaatcaatacccttatgtctccccttctggaccaggctccgccgccggtgccgtggcctgcatcgcatgcccgacgctctacgcctacctgaagaagacagaccccggagtgcccgcgcagctgctggagtacgacgagcggttcgggcagtacggctgcgacttcaccttctacgactacaaccgaccggaggagctgccggcggcgatgaagcacgcctaccgagtcatcgttgccgaccctccctatctgagtaaggagtgcttggaaaaggttgccaaaacagtatctttcctcgcacgacctgaaggttcattcctgctgctgctcacaggggaagttcggatggaccgggcattggagctgctgaatgttcgtccctgcggtttcaggcctcgccactcgaacaaactaggcaacgagttccggctgttcacgaattaagatcctgctgacagacttggtggttgggagcaaagtgatggtgcccccatttaactataaactaatacaatttttgttctagagctgttccatctttatgaacatgttgcatctttgatccacagctcactgatccctccaatttaaattgtagtgacaattatttgaggaatctgtgtgctatgatgtatgattaatcaaacatttacactgttagtgtacctcattttaatttcattttaaaatacactgttagtgtatgtttcattttaatttcatcagtattctttagaatgtctcgttggcttattcagatttatagccaaaatgacattatcttggggatagttcatcagtattttttaatttcattatctcgttcggcggcggcatcccggacgggcacagcctgcacactggcgggcaggtcgtgaaggcacccaccatcgagcagaacctgtcgtgcaaccttgagtagctgtacaagggcatcaccaagaagttgaatatttctagggaaattgttgacgcaagtggctaaccagatggaccagtccctgtcagatttatgcttggttaatttctgctcgcccggtgcaggcgacgcttctccttcagacgctcaaccagtcaagaaggagtccgagagccaggcatggctcggattaggaccgaatgccgtcaagtccaacctgaacctgagctagcacacaacgacacagccaaataagacagcacagcaacctcaccaaagcctttgcaggacgatctgaaaatatgctttgccactagagtaccgaaaccataaatatcctctcgttatcgtgttttagtgttctgtttaggccgtggtcctacgccctcttgtcacatagtctggatgtaaagataagtagccagccatgactgagagaagttttttgggggggggggtgttaacacacggccactctgaattggccatgctaaggaaaatgatagtagtgcaaagagaagtatatgtcttttttctttttctttttctgaaagccagatcgtttggctctagccttgatgtatgcagaacaagtgattgtaatggattctgagtatcctcatcgtcttgctgttgcttcaccaacccaagtttgtttggattcttgccattcctgctgcagcaaatctctggtagtttatggtagcaactctagcaatctaag

SEQ ID NO: 202315 - DNA, 3879 bp, Zea Mays
cgcgactgctccaacgaaggaaagtctgatcccgccatggcgccatctccacccccgcttacctctctcggccgccatcatggaaggtccgaccccgccatcgctgtccccacgcggttgctccaaggaaggaaactctgatcccgctatccccgcccccgctctctctcgccatctccgtgcggctgctccaaggaaggaaggtccgaccccgccatcgccatccccgcgtggctgccttcccctctcgccatccccgcgcggctgctccaaggaaggaaggtccgaccccgccatcgccatccccgcgcgcccggtcgagcgccaccagccgcataagtctgggctagcgccgccggccaccattggctcggtcgagcacctcatgcccacgacggtcagtcgccgccttcatggctcagagtcgtcggtccctgcccaccaaggtcaccatgggctcgacgacgatggcaacaaggtcaaggtcgtcatcacaacccaaggtagtagctcttcagttcccccgccattccccaccacccctccaccgtctccaccgcacacagcatgcccgactctattctcctccccgaaatccccgtggcgcgcagatctagccccggctcctcgccggcacaaaccacgtgcgcgccctcgacccatggcatccccaaatcccgcccccggttcctctcccttcccgttcgcggacgacgcttccgcgcgttgacgtacgcgtccccaaatccccggttcccctcccttcctgttcgcggatggcgcttccgagccctcgacccatggcgtccccaaatcccaggttcctctcccttcccgttcgcggacggcgcttccgcgcgtcgacgttcgtgtccccaattcctgccccggttcggcgcttccccacatcgaggcaccacaccatcgccatggggtatcgacaacgtcgacagcgtgtggccccatcgttcgcagaccaacccggccacggttgccctgctgctgacggataaggacctggagtcggaggagagcatgtacgagcggtggagcagcgtgcacaccgtgtcgcgggacctcacggagaagcagagcaggttcgaggcgttcaaggcgaactctaggcacatcggcgagttcaacaagatgaaagacgttccctacaagctcggcctcaacaagaacaaaaggaaagttgagaagattgaaaatgactatgccaaatgcaagttcgttgcccaatgttttatatatggtgatagtttcagctctggaatttagctgaagttgaatgcttcatatgtttagactgaaattttggtactaaactggtagattattgttatttaaatatataaaaaaaatcatcttctacgattcagagaaattatgtgaagcttcaatttgactccatgcaacaggtttagctattgacaacctcgattacattttcacagtgggagctccttcgattattaaccacaggacagcatatgttcgtgcattgcaaccgataaataaagatgaagaggtatctataagctacattgagactgcggcagtcaccaagaagagaaacaatgatctgaaacagtacttcttcacctgcacatgtccacgctgtgtaaagggttttgatgaggatgcactacttgaggggttcaggtgcaagagccaagcatgtgatggctttctgctgcccaactcaggtaaaaaggcttatacatgccaaaaatgtggtgcttctagagatgtggaagagataaaaaatatgagaagcaaaatactacagttatcggataaagcatcttcatttctttcatcaggaaataaggctgaagcaggttctatctacaagataatcaaacagttagagagaaatctgtaccatgctttctcaactactttgctgcacacgtgcgaaacactattgaagatatatctggaattacaagattggtggactgcgttgacatactgtagattgacaattcctgtttatgaaagagtttatccaccttttcatccgatgattggattacaattctatacttgtggaaagcttgaatgggactggttcggagggagacggcccctcactctctgccctcctgctgcctgcctactgctatactgttctcttgtgttcatgttcatataaaattcagtttcatgttcatattttcataactgtatatgttcatcttatcatacagtttgggtccttgaactttggaacactgaatccctactactctccccccataaaggctccgccgccggtgccgtggcctgcatcgcatgcccgacgctctacgcctacctgaagaagacagaccccggagtgcccgcgcagctgctggagtacgacgagcggttcgggcagtacggctgcgacttcaccttctacgactacaaccgaccggaggagctgccggcggcgatgaagcacgcctaccgagtcatcgttgccgaccctccctatctgagtaaggagtgcttggaaaaggttgccaaaacagtatctttcctcgcacgacctgaaggttcattcctgctgctgctcacaggggaagttcggatggaccgggcattggagctgctgaatgttcgtccctgcggtttcaggcctcgccactcgaacaaactaggcaacgagttccggctgttcacgaattaagatcctgctgacagacttggtggttgggagcaaagtgatggtgcccccatttaactataaactaatacaatttttgttctagagctgttccatctttatgaacatgttgcatctttgatccacagctcactgatccctccaatttaaattgtagtgacaattatttgaggaatctgtgtgctatgatgtatgattaatcaaacatttacactgttagtgtacctcattttaatttcattttaaaatacactgttagtgtatgtttcattttaatttcatcagtattctttagaatgtctcgttggcttattcagatttatagccaaaatgacattatcttggggatagttcatcagtattttttaatttcattatctcgttcggcggcggcatcccggacgggcacagcctgcacactggcgggcaggtcgtgaaggcacccaccatcgagcagaacctgtcgtgcaaccttgagtagctgtacaagggcatcaccaagaagttgaatatttctagggaaattgttgacgcaagtggctaaccagatggaccagtccctgtcagatttatgcttggttaatttctgctcgcccggtgcaggcgacgcttctccttcagacgctcaaccagtcaagaaggagtccgagagccaggcatggctcggattaggaccgaatgccgtcaagtccaacctgaacctgagctagcacacaacgacacagccaaataagacagcacagcaacctcaccaaagcctttgcaggacgatctgaaaatatgctttgccactagagtaccgaaaccataaatatcctctcgttatcgtgttttagtgttctgtttaggccgtggtcctacgccctcttgtcacatagtctggatgtaaagataagtagccagccatgactgagagaagttttttgggggggggggtgttaacacacggccactctgaattggccatgctaaggaaaatgatagtagtgcaaagagaagtatatgtcttttttctttttctttttctgaaagccagatcgtttggctctagccttgatgtatgcagaacaagtgattgtaatggattctgagtatcctcatcgtcttgctgttgcttcaccaacccaagtttgtttggattcttgccattcctgctgcagcaaatctctggtagtttatggtagcaactctagcaatctaag

SEQ ID NO: 202316 - DNA, 3203 bp, Zea Mays
cgcgactgctccaacgaaggaaagtctgatcccgccatggcgccatctccacccccgcttacctctctcggccgccatcatggaaggtccgaccccgccatcgctgtccccacgcggttgctccaaggaaggaaactctgatcccgctatccccgcccccgctctctctcgccatctccgtgcggctgctccaaggaaggaaggtccgaccccgccatcgccatccccgcgtggctgccttcccctctcgccatccccgcgcggctgctccaaggaaggaaggtccgaccccgccatcgccatccccgcgcgcccggtcgagcgccaccagccgcataagtctgggctagcgccgccggccaccattggctcggtcgagcacctcatgcccacgacggtcagtcgccgccttcatggctcagagtcgtcggtccctgcccaccaaggtcaccatgggctcgacgacgatggcaacaaggtcaaggtcgtcatcacaacccaaggttcgaggcgttcaaggcgaactctaggcacatcggcgagttcaacaagatgaaagacgttccctacaagctcggcctcaacaagaaaaaatcatcttctacgattcagagaaattatgtgaagcttcaatttgactccatgcaacaggtttagctattgacaacctcgattacattttcacagtgggagctccttcgattattaaccacagttgtgtaccaaatgcagttttgatatttgatggtaggacagcatatgttcgtgcattgcaaccgataaataaagatgaagaggtatctataagctacattgagactgcggcagtcaccaagaagagaaacaatgatctgaaacagtacttcttcacctgcacatgtccacgctgtgtaaagggttttgatgaggatgcactacttgaggggttcaggtgcaagagccaagcatgtgatggctttctgctgcccaactcaggtaaaaaggcttatacatgccaaaaatgtggtgcttctagagatgtggaagagataaaaaatatgagaagcaaaatactacagttatcggataaagcatcttcatttctttcatcaggaaataaggctgaagcaggttctatctacaagataatcaaacagttagagagaaatctgtaccatgctttctcaactactttgctgcacacgtgcgaaacactattgaagatatatctggaattacaagattggtggactgcgttgacatactgtagattgacaattcctgtttatgaaagagtttatccaccttttcatccgatgattggattacaattctatacttgtggaaagcttgaatgggactggttcggagggagacggcccctcactctctgccctcctgctgcctgcctactgctatactgttctcttgtgttcatgttcatataaaattcagtttcatgttcatattttcataactgtatatgttcatcttatcatacagtttgggtccttgaactttggaacactgaatccctactactctccccccataaagataggaaggaacacaaaagggtcaaatcaatacccttatgtctccccttctggaccaggctccgccgccggtgccgtggcctgcatcgcatgcccgacgctctacgcctacctgaagaagacagaccccggagtgcccgcgcagctgctggagtacgacgagcggttcgggcagtacggctgcgacttcaccttctacgactacaaccgaccggaggagctgccggcggcgatgaagcacgcctaccgagtcatcgttgccgaccctccctatctgagtaaggagtgcttggaaaaggttgccaaaacagtatctttcctcgcacgacctgaaggttcattcctgctgctgctcacaggggaagttcggatggaccgggcattggagctgctgaatgttcgtccctgcggtttcaggcctcgccactcgaacaaactaggcaacgagttccggctgttcacgaattaagatcctgctgacagacttggtggttgggagcaaagtgatggtgcccccatttaactataaactaatacaatttttgttctagagctgttccatctttatgaacatgttgcatctttgatccacagctcactgatccctccaatttaaattgtagtgacaattatttgaggaatctgtgtgctatgatgtatgattaatcaaacatttacactgttagtgtacctcattttaatttcattttaaaatacactgttagtgtatgtttcattttaatttcatcagtattctttagaatgtctcgttggcttattcagatttatagccaaaatgacattatcttggggatagttcatcagtattttttaatttcattatctcgttcggcggcggcatcccggacgggcacagcctgcacactggcgggcaggtcgtgaaggcacccaccatcgagcagaacctgtcgtgcaaccttgagtagctgtacaagggcatcaccaagaagttgaatatttctagggaaattgttgacgcaagtggctaaccagatggaccagtccctgtcagatttatgcttggttaatttctgctcgcccggtgcaggcgacgcttctccttcagacgctcaaccagtcaagaaggagtccgagagccaggcatggctcggattaggaccgaatgccgtcaagtccaacctgaacctgagctagcacacaacgacacagccaaataagacagcacagcaacctcaccaaagcctttgcaggacgatctgaaaatatgctttgccactagagtaccgaaaccataaatatcctctcgttatcgtgttttagtgttctgtttaggccgtggtcctacgccctcttgtcacatagtctggatgtaaagataagtagccagccatgactgagagaagttttttgggggggggggtgttaacacacggccactctgaattggccatgctaaggaaaatgatagtagtgcaaagagaagtatatgtcttttttctttttctttttctgaaagccagatcgtttggctctagccttgatgtatgcagaacaagtgattgtaatggattctgagtatcctcatcgtcttgctgttgcttcaccaacccaagtttgtttggattcttgccattcctgctgcagcaaatctctggtagtttatggtagcaactctagcaatctaag

SEQ ID NO: 202317 - DNA, 3321 bp, Zea Mays
cgcgactgctccaacgaaggaaagtctgatcccgccatggcgccatctccacccccgcttacctctctcggccgccatcatggaaggtccgaccccgccatcgctgtccccacgcggttgctccaaggaaggaaactctgatcccgctatccccgcccccgctctctctcgccatctccgtgcggctgctccaaggaaggaaggtccgaccccgccatcgccatccccgcgtggctgccttcccctctcgccatccccgcgcggctgctccaaggaaggaaggtccgaccccgccatcgccatccccgcgcgcccggtcgagcgccaccagccgcataagtctgggctagcgccgccggccaccattggctcggtcgagcacctcatgcccacgacggtcagtcgccgccttcatggctcagagtcgtcggtccctgcccaccaaggtcaccatgggctcgacgacgatggcaacaaggtcaaggtcgtcatcacaacccaaggttcgaggcgttcaaggcgaactctaggcacatcggcgagttcaacaagatgaaagacgttccctacaagctcggcctcaacaagaacaaaaggaaagttgagaagattgaaaatgactatgccaaatgcaagttcgttgcccaatgttttatatatggtgatagtttcagctctggaatttagctgaagttgaatgcttcatatgtttagactgaaattttggtactaaactggtagattattgttatttaaatatataaaaaaaatcatcttctacgattcagagaaattatgtgaagcttcaatttgactccatgcaacaggtttagctattgacaacctcgattacattttcacagtgggagctccttcgattattaaccacagttgtgtaccaaatgcagttttgatatttgatggtaggacagcatatgttcgtgcattgcaaccgataaataaagatgaagaggtatctataagctacattgagactgcggcagtcaccaagaagagaaacaatgatctgaaacagtacttcttcacctgcacatgtccacgctgtgtaaagggttttgatgaggatgcactacttgaggggttcaggtgcaagagccaagcatgtgatggctttctgctgcccaactcaggtaaaaaggcttatacatgccaaaaatgtggtgcttctagagatgtggaagagataaaaaatatgagaagcaaaatactacagttatcggataaagcatcttcatttctttcatcaggaaataaggctgaagcaggttctatctacaagataatcaaacagttagagagaaatctgtaccatgctttctcaactactttgctgcacacgtgcgaaacactattgaagatatatctggaattacaagattggtggactgcgttgacatactgtagattgacaattcctgtttatgaaagagtttatccaccttttcatccgatgattggattacaattctatacttgtggaaagcttgaatgggactggttcggagggagacggcccctcactctctgccctcctgctgcctgcctactgctatactgttctcttgtgttcatgttcatataaaattcagtttcatgttcatattttcataactgtatatgttcatcttatcatacagtttgggtccttgaactttggaacactgaatccctactactctccccccataaaggctccgccgccggtgccgtggcctgcatcgcatgcccgacgctctacgcctacctgaagaagacagaccccggagtgcccgcgcagctgctggagtacgacgagcggttcgggcagtacggctgcgacttcaccttctacgactacaaccgaccggaggagctgccggcggcgatgaagcacgcctaccgagtcatcgttgccgaccctccctatctgagtaaggagtgcttggaaaaggttgccaaaacagtatctttcctcgcacgacctgaaggttcattcctgctgctgctcacaggggaagttcggatggaccgggcattggagctgctgaatgttcgtccctgcggtttcaggcctcgccactcgaacaaactaggcaacgagttccggctgttcacgaattaagatcctgctgacagacttggtggttgggagcaaagtgatggtgcccccatttaactataaactaatacaatttttgttctagagctgttccatctttatgaacatgttgcatctttgatccacagctcactgatccctccaatttaaattgtagtgacaattatttgaggaatctgtgtgctatgatgtatgattaatcaaacatttacactgttagtgtacctcattttaatttcattttaaaatacactgttagtgtatgtttcattttaatttcatcagtattctttagaatgtctcgttggcttattcagatttatagccaaaatgacattatcttggggatagttcatcagtattttttaatttcattatctcgttcggcggcggcatcccggacgggcacagcctgcacactggcgggcaggtcgtgaaggcacccaccatcgagcagaacctgtcgtgcaaccttgagtagctgtacaagggcatcaccaagaagttgaatatttctagggaaattgttgacgcaagtggctaaccagatggaccagtccctgtcagatttatgcttggttaatttctgctcgcccggtgcaggcgacgcttctccttcagacgctcaaccagtcaagaaggagtccgagagccaggcatggctcggattaggaccgaatgccgtcaagtccaacctgaacctgagctagcacacaacgacacagccaaataagacagcacagcaacctcaccaaagcctttgcaggacgatctgaaaatatgctttgccactagagtaccgaaaccataaatatcctctcgttatcgtgttttagtgttctgtttaggccgtggtcctacgccctcttgtcacatagtctggatgtaaagataagtagccagccatgactgagagaagttttttgggggggggggtgttaacacacggccactctgaattggccatgctaaggaaaatgatagtagtgcaaagagaagtatatgtcttttttctttttctttttctgaaagccagatcgtttggctctagccttgatgtatgcagaacaagtgattgtaatggattctgagtatcctcatcgtcttgctgttgcttcaccaacccaagtttgtttggattcttgccattcctgctgcagcaaatctctggtagtttatggtagcaactctagcaatctaag

SEQ ID NO: 202318 - DNA, 3144 bp, Zea Mays
gcgactgctccaacgaaggaaagtctgatcccgccatggcgccatctccacccccgcttacctctctcggccgccatcatggaaggtccgaccccgccatcgctgtccccacgcggttgctccaaggaaggaaactctgatcccgctatccccgcccccgctctctctcgccatctccgtgcggctgctccaaggaaggaaggtccgaccccgccatcgccatccccgcgtggctgccttcccctctcgccatccccgcgcggctgctccaaggaaggaaggtccgaccccgccatcgccatccccgcgcgcccggtcgagcgccaccagccgcataagtctgggctagcgccgccggccaccattggctcggtcgagcacctcatgcccacgacggtcagtcgccgccttcatggctcagagtcgtcggtccctgcccaccaaggtcaccatgggctcgacgacgatggcaacaaggtcaaggtcgtcatcacaacccaaggttcgaggcgttcaaggcgaactctaggcacatcggcgagttcaacaagatgaaagacgttccctacaagctcggcctcaacaagaaaaaatcatcttctacgattcagagaaattatgtgaagcttcaatttgactccatgcaacaggtttagctattgacaacctcgattacattttcacagtgggagctccttcgattattaaccacagttgtgtaccaaatgcagttttgatatttgatggtaggacagcatatgttcgtgcattgcaaccgataaataaagatgaagaggtatctataagctacattgagactgcggcagtcaccaagaagagaaacaatgatctgaaacagtacttcttcacctgcacatgtccacgctgtgtaaagggttttgatgaggatgcactacttgaggggttcaggtgcaagagccaagcatgtgatggctttctgctgcccaactcaggtaaaaaggcttatacatgccaaaaatgtggtgcttctagagatgtggaagagataaaaaatatgagaagcaaaatactacagttatcggataaagcatcttcatttctttcatcaggaaataaggctgaagcaggttctatctacaagataatcaaacagttagagagaaatctgtaccatgctttctcaactactttgctgcacacgtgcgaaacactattgaagatatatctggaattacaagattggtggactgcgttgacatactgtagattgacaattcctgtttatgaaagagtttatccaccttttcatccgatgattggattacaattctatacttgtggaaagcttgaatgggactggttcggagggagacggcccctcactctctgccctcctgctgcctgcctactgctatactgttctcttgtgttcatgttcatataaaattcagtttcatgttcatattttcataactgtatatgttcatcttatcatacagtttgggtccttgaactttggaacactgaatccctactactctccccccataaaggctccgccgccggtgccgtggcctgcatcgcatgcccgacgctctacgcctacctgaagaagacagaccccggagtgcccgcgcagctgctggagtacgacgagcggttcgggcagtacggctgcgacttcaccttctacgactacaaccgaccggaggagctgccggcggcgatgaagcacgcctaccgagtcatcgttgccgaccctccctatctgagtaaggagtgcttggaaaaggttgccaaaacagtatctttcctcgcacgacctgaaggttcattcctgctgctgctcacaggggaagttcggatggaccgggcattggagctgctgaatgttcgtccctgcggtttcaggcctcgccactcgaacaaactaggcaacgagttccggctgttcacgaattaagatcctgctgacagacttggtggttgggagcaaagtgatggtgcccccatttaactataaactaatacaatttttgttctagagctgttccatctttatgaacatgttgcatctttgatccacagctcactgatccctccaatttaaattgtagtgacaattatttgaggaatctgtgtgctatgatgtatgattaatcaaacatttacactgttagtgtacctcattttaatttcattttaaaatacactgttagtgtatgtttcattttaatttcatcagtattctttagaatgtctcgttggcttattcagatttatagccaaaatgacattatcttggggatagttcatcagtattttttaatttcattatctcgttcggcggcggcatcccggacgggcacagcctgcacactggcgggcaggtcgtgaaggcacccaccatcgagcagaacctgtcgtgcaaccttgagtagctgtacaagggcatcaccaagaagttgaatatttctagggaaattgttgacgcaagtggctaaccagatggaccagtccctgtcagatttatgcttggttaatttctgctcgcccggtgcaggcgacgcttctccttcagacgctcaaccagtcaagaaggagtccgagagccaggcatggctcggattaggaccgaatgccgtcaagtccaacctgaacctgagctagcacacaacgacacagccaaataagacagcacagcaacctcaccaaagcctttgcaggacgatctgaaaatatgctttgccactagagtaccgaaaccataaatatcctctcgttatcgtgttttagtgttctgtttaggccgtggtcctacgccctcttgtcacatagtctggatgtaaagataagtagccagccatgactgagagaagttttttgggggggggggtgttaacacacggccactctgaattggccatgctaaggaaaatgatagtagtgcaaagagaagtatatgtcttttttctttttctttttctgaaagccagatcgtttggctctagccttgatgtatgcagaacaagtgattgtaatggattctgagtatcctcatcgtcttgctgttgcttcaccaacccaagtttgtttggattcttgccattcctgctgcagcaaatctctggtagtttatggtagcaactctagcaatctaag

SEQ ID NO: 202319 - DNA, 3736 bp, Zea Mays
gactgctccaacgaaggaaagtctgatcccgccatggcgccatctccacccccgcttacctctctcggccgccatcatggaaggtccgaccccgccatcgctgtccccacgcggttgctccaaggaaggaaactctgatcccgctatccccgcccccgctctctctcgccatctccgtgcggctgctccaaggaaggaaggtccgaccccgccatcgccatccccgcgtggctgccttcccctctcgccatccccgcgcggctgctccaaggaaggaaggtccgaccccgccatcgccatccccgcgcgcccggtcgagcgccaccagccgcataagtctgggctagcgccgccggccaccattggctcggtcgagcacctcatgcccacgacggtcagtcgccgccttcatggctcagagtcgtcggtccctgcccaccaaggtcaccatgggctcgacgacgatggcaacaaggtcaaggtcgtcatcacaacccaaggtagtagctcttcagttcccccgccattccccaccacccctccaccgtctccaccgcacacagcatgcccgactctattctcctccccgaaatccccgtggcgcgcagatctagccccggctcctcgccggcacaaaccacgtgcgcgccctcgacccatggcatccccaaatcccgcccccggttcctctcccttcccgttcgcggacgacgcttccgcgcgttgacgtacgcgtccccaaatccccggttcccctcccttcctgttcgcggatggcgcttccgagccctcgacccatggcgtccccaaatcccaggttcctctcccttcccgttcgcggacggcgcttccgcgcgtcgacgttcgtgtccccaattcctgccccggttcggcgcttccccacatcgaggcaccacaccatcgccatggggtatcgacaacgtcgacagcgtgtggccccatcgttcgcagaccaacccggccacggttgccctgctgctgacggataaggacctggagtcggaggagagcatgtacgagcggtggagcagcgtgcacaccgtgtcgcgggacctcacggagaagcagagcaggttcgaggcgttcaaggcgaactctaggcacatcggcgagttcaacaagatgaaagacgttccctacaagctcggcctcaacaagaaaaaatcatcttctacgattcagagaaattatgtgaagcttcaatttgactccatgcaacaggtttagctattgacaacctcgattacattttcacagtgggagctccttcgattattaaccacagttgtgtaccaaatgcagttttgatatttgatggtaggacagcatatgttcgtgcattgcaaccgataaataaagatgaagaggtatctataagctacattgagactgcggcagtcaccaagaagagaaacaatgatctgaaacagtacttcttcacctgcacatgtccacgctgtgtaaagggttttgatgaggatgcactacttgaggggttcaggtgcaagagccaagcatgtgatggctttctgctgcccaactcaggtaaaaaggcttatacatgccaaaaatgtggtgcttctagagatgtggaagagataaaaaatatgagaagcaaaatactacagttatcggataaagcatcttcatttctttcatcaggaaataaggctgaagcaggttctatctacaagataatcaaacagttagagagaaatctgtaccatgctttctcaactactttgctgcacacgtgcgaaacactattgaagatatatctggaattacaagattggtggactgcgttgacatactgtagattgacaattcctgtttatgaaagagtttatccaccttttcatccgatgattggattacaattctatacttgtggaaagcttgaatgggactggttcggagggagacggcccctcactctctgccctcctgctgcctgcctactgctatactgttctcttgtgttcatgttcatataaaattcagtttcatgttcatattttcataactgtatatgttcatcttatcatacagtttgggtccttgaactttggaacactgaatccctactactctccccccataaaggctccgccgccggtgccgtggcctgcatcgcatgcccgacgctctacgcctacctgaagaagacagaccccggagtgcccgcgcagctgctggagtacgacgagcggttcgggcagtacggctgcgacttcaccttctacgactacaaccgaccggaggagctgccggcggcgatgaagcacgcctaccgagtcatcgttgccgaccctccctatctgagtaaggagtgcttggaaaaggttgccaaaacagtatctttcctcgcacgacctgaaggttcattcctgctgctgctcacaggggaagttcggatggaccgggcattggagctgctgaatgttcgtccctgcggtttcaggcctcgccactcgaacaaactaggcaacgagttccggctgttcacgaattaagatcctgctgacagacttggtggttgggagcaaagtgatggtgcccccatttaactataaactaatacaatttttgttctagagctgttccatctttatgaacatgttgcatctttgatccacagctcactgatccctccaatttaaattgtagtgacaattatttgaggaatctgtgtgctatgatgtatgattaatcaaacatttacactgttagtgtacctcattttaatttcattttaaaatacactgttagtgtatgtttcattttaatttcatcagtattctttagaatgtctcgttggcttattcagatttatagccaaaatgacattatcttggggatagttcatcagtattttttaatttcattatctcgttcggcggcggcatcccggacgggcacagcctgcacactggcgggcaggtcgtgaaggcacccaccatcgagcagaacctgtcgtgcaaccttgagtagctgtacaagggcatcaccaagaagttgaatatttctagggaaattgttgacgcaagtggctaaccagatggaccagtccctgtcagatttatgcttggttaatttctgctcgcccggtgcaggcgacgcttctccttcagacgctcaaccagtcaagaaggagtccgagagccaggcatggctcggattaggaccgaatgccgtcaagtccaacctgaacctgagctagcacacaacgacacagccaaataagacagcacagcaacctcaccaaagcctttgcaggacgatctgaaaatatgctttgccactagagtaccgaaaccataaatatcctctcgttatcgtgttttagtgttctgtttaggccgtggtcctacgccctcttgtcacatagtctggatgtaaagataagtagccagccatgactgagagaagttttttgggggggggggtgttaacacacggccactctgaattggccatgctaaggaaaatgatagtagtgcaaagagaagtatatgtcttttttctttttctttttctgaaagccagatcgtttggctctagccttgatgtatgcagaacaagtgattgtaatggattctgagtatcctcatcgtcttgctgttgcttcaccaacccaagtttgtttggattcttgccattcctgctgcagcaaatctctggtagtttatggtagcaactctagcaatctaag

SEQ ID NO: 202320 - DNA, 2675 bp, Zea Mays
ctccaacgaaggaaagtctgatcccgccatggcgccatctccacccccgcttacctctctcggccgccatcatggaaggtccgaccccgccatcgctgtccccacgcggttgctccaaggaaggaaactctgatcccgctatccccgcccccgctctctctcgccatctccgtgcggctgctccaaggaaggaaggtccgaccccgccatcgccatccccgcgtggctgccttcccctctcgccatccccgcgcggctgctccaaggaaggaaggtccgaccccgccatcgccatccccgcgcgcccggtcgagcgccaccagccgcataagtctgggctagcgccgccggccaccattggctcggtcgagcacctcatgcccacgacggtcagtcgccgccttcatggctcagagtcgtcggtccctgcccaccaaggtcaccatgggctcgacgacgatggcaacaaggtcaaggtcgtcatcacaacccaagaaaaaatcatcttctacgattcagagaaattatgtgaagcttcaatttgactccatgcaacaggtttagctattgacaacctcgattacattttcacagtgggagctccttcgattattaaccacagttgtgtaccaaatgcagttttgatatttgatggtaggacagcatatgttcgtgcattgcaaccgataaataaagatgaagaggtatctataagctacattgagactgcggcagtcaccaagaagagaaacaatgatctgaaacagtacttcttcacctgcacatgtccacgctgtgtaaagggttttgatgaggatgcactacttgaggggttcaggtgcaagagccaagcatgtgatggctttctgctgcccaactcaggtaaaaaggcttatacatgccaaaaatgtggtgcttctagagatgtggaagagataaaaaatatgagaagcaaaatactacagttatcggataaagcatcttcatttctttcatcaggaaataaggctgaagcaggttctatctacaagataatcaaacagttagagagaaatctgtaccatgctttctcaactactttgctgcacacgtgcgaaacactattgaagatatatctggaattacaagattggtggactgcgttgacatactgtagattgacaattcctgtttatgaaagagtttatccaccttttcatccgatgattggattacaattctatacttgtggaaagcttgaatggtatggactattagcccttacctatttacctcacacaaggacaacaatcatatgagtttattccttatccggtataaatgtttgctgttaatgtcttatgctttactaatatagctgttattgattctgacaaaagttgattttggatttgacactgatagtatagggtcaataagagcaactctaaaagcctctgtaaatttcaatctctatatctaacatttggagagccattcaatgaatattatttttgtatatctctcttatctgcaacaggttttccaatatttgttctctatacttcgatagcttatcatattttttctttgttgaaaaacaagaaaactaaatgtagccgcctcttcaaaaatggagtgaaggaaggatggttttggagagtggtttagagaagtttatctattggagtttttttatttgttttctaaattttgttataaagaaacatgtagaatgtcttagagattctctaagaaaaatgctagctatgaacttttataaagagaagttcagaatcagttctttttattctctaatatatatgttgttcgtttccatgtaattattatgtactaacatttatcgaataatttttacgccgtcgcaacgcacggacacacacctatatagatatatgatggtcatgtttcgcccggacgcagggactggttcggagggagacggcccctcactctctgccctcctgctgcctgcctactgctatactgttctcttgtgttcatgttcatataaaattcagtttcatgttcatattttcataactgtatatgttcatcttatcatacagtttgggtccttgaactttggaacactgaatccctactactctccccccataaaggtgtgtgacctcatatgatgcggagctgttttggtctcgagtcataagggtattgatttggagataatgctgctcgggcttctttgaactgaactgattaagctccgccgccggtgccgtggcctgcatcgcatgcccgacgctctacgcctacctgaagaagacagaccccggagtgcccgcgcagctgctggagtacgacgagcggttcgggcagtacggctgcgacttcaccttctacgactacaaccgaccggaggagctgccggcggcgatgaagcacgcctaccgagtcatcgttgccgaccctccctatctggtactgtttctaccctaccagagattgcctattaaaaagtgtttgatcagttcttaacatttgagatgagaggaaatatcgaggagaaatggctattattcattggttgatgatgtagagtaaggagtgcttggaaaaggttgccaaaacagtatctttcctcgcacgacctgaaggttcattcctgctgctgctcacagaatgatccattaattaatgtcttaatagcgcag

SEQ ID NO: 202321 - DNA, 3186 bp, Zea Mays
ctccaacgaaggaaagtctgatcccgccatggcgccatctccacccccgcttacctctctcggccgccatcatggaaggtccgaccccgccatcgctgtccccacgcggttgctccaaggaaggaaactctgatcccgctatccccgcccccgctctctctcgccatctccgtgcggctgctccaaggaaggaaggtccgaccccgccatcgccatccccgcgtggctgccttcccctctcgccatccccgcgcggctgctccaaggaaggaaggtccgaccccgccatcgccatccccgcgcgcccggtcgagcgccaccagccgcataagtctgggctagcgccgccggccaccattggctcggtcgagcacctcatgcccacgacggtcagtcgccgccttcatggctcagagtcgtcggtccctgcccaccaaggtcaccatgggctcgacgacgatggcaacaaggtcaaggtcgtcatcacaacccaaggttcgaggcgttcaaggcgaactctaggcacatcggcgagttcaacaagatgaaagacgttccctacaagctcggcctcaacaagaaaaaatcatcttctacgattcagagaaattatgtgaagcttcaatttgactccatgcaacaggtttagctattgacaacctcgattacattttcacagtgggagctccttcgattattaaccacaggtcgtatgctaaactattagctatatattcgtttatctattatctttaccagattagatcaattaatatatcaccaccttctctattcatccatttttttgggtatatttagttgtgtaccaaatgcagttttgatatttgatggtaggacagcatatgttcgtgcattgcaaccgataaataaagatgaagaggtatctataagctacattgagactgcggcagtcaccaagaagagaaacaatgatctgaaacagtacttcttcacctgcacatgtccacgctgtgtaaagggttttgatgaggatgcactacttgaggggttcaggtgcaagagccaagcatgtgatggctttctgctgcccaactcaggtaaaaaggcttatacatgccaaaaatgtggtgcttctagagatgtggaagagataaaaaatatgagaagcaaaatactacagttatcggataaagcatcttcatttctttcatcaggaaataaggctgaagcaggttctatctacaagataatcaaacagttagagagaaatctgtaccatgctttctcaactactttgctgcacacgtgcgaaacactattgaagatatatctggaattacaagattggtggactgcgttgacatactgtagattgacaattcctgtttatgaaagagtttatccaccttttcatccgatgattggattacaattctatacttgtggaaagcttgaatgggactggttcggagggagacggcccctcactctctgccctcctgctgcctgcctactgctatactgttctcttgtgttcatgttcatataaaattcagtttcatgttcatattttcataactgtatatgttcatcttatcatacagtttgggtccttgaactttggaacactgaatccctactactctccccccataaaggctccgccgccggtgccgtggcctgcatcgcatgcccgacgctctacgcctacctgaagaagacagaccccggagtgcccgcgcagctgctggagtacgacgagcggttcgggcagtacggctgcgacttcaccttctacgactacaaccgaccggaggagctgccggcggcgatgaagcacgcctaccgagtcatcgttgccgaccctccctatctgagtaaggagtgcttggaaaaggttgccaaaacagtatctttcctcgcacgacctgaaggttcattcctgctgctgctcacaggggaagttcggatggaccgggcattggagctgctgaatgttcgtccctgcggtttcaggcctcgccactcgaacaaactaggcaacgagttccggctgttcacgaattaagatcctgctgacagacttggtggttgggagcaaagtgatggtgcccccatttaactataaactaatacaatttttgttctagagctgttccatctttatgaacatgttgcatctttgatccacagctcactgatccctccaatttaaattgtagtgacaattatttgaggaatctgtgtgctatgatgtatgattaatcaaacatttacactgttagtgtacctcattttaatttcattttaaaatacactgttagtgtatgtttcattttaatttcatcagtattctttagaatgtctcgttggcttattcagatttatagccaaaatgacattatcttggggatagttcatcagtattttttaatttcattatctcgttcggcggcggcatcccggacgggcacagcctgcacactggcgggcaggtcgtgaaggcacccaccatcgagcagaacctgtcgtgcaaccttgagtagctgtacaagggcatcaccaagaagttgaatatttctagggaaattgttgacgcaagtgggcgacgcttctccttcagacgctcaaccagtcaagaaggagtccgagagccaggcatggctcggattaggaccgaatgccgtcaagtccaacctgaacctgagctagcacacaacgacacagccaaataagacagcacagcaacctcaccaaagcctttgcaggacgatctgaaaatatgctttgccactagagtaccgaaaccataaatatcctctcgttatcgtgttttagtgttctgtttaggccgtggtcctacgccctcttgtcacatagtctggatgtaaagataagtagccagccatgactgagagaagttttttgggggggggggtgttaacacacggccactctgaattggccatgctaaggaaaatgatagtagtgcaaagagaagtatatgtcttttttctttttctttttctgaaagccagatcgtttggctctagccttgatgtatgcagaacaagtgattgtaatggattctgagtatcctcatcgtcttgctgttgcttcaccaacccaagtttgtttggattcttgccattcctgctgcagcaaatctctggtagtttatggtagcaactctagcaatctaag

SEQ ID NO: 202322 - DNA, 2220 bp, Zea Mays
aggaaagtctgatcccgccatggcgccatctccacccccgcttacctctctcggccgccatcatggaaggtccgaccccgccatcgctgtccccacgcggttgctccaaggaaggaaactctgatcccgctatccccgcccccgctctctctcgccatctccgtgcggctgctccaaggaaggaaggtccgaccccgccatcgccatccccgcgtggctgccttcccctctcgccatccccgcgcggctgctccaaggaaggaaggtccgaccccgccatcgccatccccgcgcgcccggtcgagcgccaccagccgcataagtctgggctagcgccgccggccaccattggctcggtcgagcacctcatgcccacgacggtcagtcgccgccttcatggctcagagtcgtcggtccctgcccaccaaggtcaccatgggctcgacgacgatggcaacaaggtcaaggtcgtcatcacaacccaaggttcgaggcgttcaaggcgaactctaggcacatcggcgagttcaacaagatgaaagacgttccctacaagctcggcctcaacaagaacaaaaggaaagttgagaagattgaaaatgactatgccaaatgcaagttcgttgcccaatgttttatatatggtgatagtttcagctctggaatttagctgaagttgaatgcttcatatgtttagactgaaattttggtactaaactggtagattattgttatttaaatatataaaaaaaatcatcttctacgattcagagaaattatgtgaagcttcaatttgactccatgcaacaggtttagctattgacaacctcgattacattttcacagtgggagctccttcgattattaaccacaggtcgtatgctaaactattagctatatattcgtttatctattatctttaccagattagatcaattaatatatcaccaccttctctattcatccatttttttgggtatatttagttgtgtaccaaatgcagttttgatatttgatggtaggacagcatatgttcgtgcattgcaaccgataaataaagatgaagaggtatctataagctacattgagactgcggcagtcaccaagaagagaaacaatgatctgaaacagtacttcttcacctgcacatgtccacgctgtgtaaagggttttgatgaggatgcactacttgaggggttcaggtgcaagagccaagcatgtgatggctttctgctgcccaactcaggtaaaaaggcttatacatgccaaaaatgtggtgcttctagagatgtggaagagataaaaaatatgagaagcaaaatactacagttatcggataaagcatcttcatttctttcatcaggaaataaggctgaagcaggttctatctacaagataatcaaacagttagagagaaatctgtaccatgctttctcaactactttgctgcacacgtgcgaaacactattgaagatatatctggaattacaagattggtggactgcgttgacatactgtagattgacaattcctgtttatgaaagagtttatccaccttttcatccgatgattggattacaattctatacttgtggaaagcttgaatggtatggactattagcccttacctatttacctcacacaaggacaacaatcatatgagtttattccttatccggtataaatgtttgctgttaatgtcttatgctttactaatatagctgttattgattctgacaaaagttgattttggatttgacactgatagtatagggtcaataagagcaactctaaaagcctctgtaaatttcaatctctatatctaacatttggagagccattcaatgaatattatttttgtatatctctcttatctgcaacaggttttccaatatttgttctctatacttcgatagcttatcatattttttctttgttgaaaaacaagaaaactaaatgtagccgcctcttcaaaaatggagtgaaggaaggatggttttggagagtggtttagagaagtttatctattggagtttttttatttgttttctaaattttgttataaagaaacatgtagaatgtcttagagattctctaagaaaaatgctagctatgaacttttataaagagaagttcagaatcagttctttttattctctaatatatatgttgttcgtttccatgtaattattatgtactaacatttatcgaataattttt

SEQ ID NO: 202323 - DNA, 3344 bp, Zea Mays
catggcgccatctccacccccgcttacctctctcggccgccatcatggaaggtccgaccccgccatcgctgtccccacgcggttgctccaaggaaggaaactctgatcccgctatccccgcccccgctctctctcgccatctccgtgcggctgctccaaggaaggaaggtccgaccccgccatcgccatccccgcgtggctgccttcccctctcgccatccccgcgcggctgctccaaggaaggaaggtccgaccccgccatcgccatccccgcgcgcccggtcgagcgccaccagccgcataagtctgggctagcgccgccggccaccattggctcggtcgagcacctcatgcccacgacggtcagtcgccgccttcatggctcagagtcgtcggtccctgcccaccaaggtcaccatgggctcgacgacgatggcaacaaggtcaaggtcgtcatcacaacccaaggttcgaggcgttcaaggcgaactctaggcacatcggcgagttcaacaagatgaaagacgttccctacaagctcggcctcaacaagaacaaaaggaaagttgagaagattgaaaatgactatgccaaatgcaagttcgttgcccaatgttttatatatggtgatagtttcagctctggaatttagctgaagttgaatgcttcatatgtttagactgaaattttggtactaaactggtagattattgttatttaaatatataaaaaaaatcatcttctacgattcagagaaattatgtgaagcttcaatttgactccatgcaacaggtttagctattgacaacctcgattacattttcacagtgggagctccttcgattattaaccacagttgtgtaccaaatgcagttttgatatttgatggtaggacagcatatgttcgtgcattgcaaccgataaataaagatgaagaggtatctataagctacattgagactgcggcagtcaccaagaagagaaacaatgatctgaaacagtacttcttcacctgcacatgtccacgctgtgtaaagggttttgatgaggatgcactacttgaggggttcaggtgcaagagccaagcatgtgatggctttctgctgcccaactcaggtaaaaaggcttatacatgccaaaaatgtggtgcttctagagatgtggaagagataaaaaatatgagaagcaaaatactacagttatcggataaagcatcttcatttctttcatcaggaaataaggctgaagcaggttctatctacaagataatcaaacagttagagagaaatctgtaccatgctttctcaactactttgctgcacacgtgcgaaacactattgaagatatatctggaattacaagattggtggactgcgttgacatactgtagattgacaattcctgtttatgaaagagtttatccaccttttcatccgatgattggattacaattctatacttgtggaaagcttgaatgggactggttcggagggagacggcccctcactctctgccctcctgctgcctgcctactgctatactgttctcttgtgttcatgttcatataaaattcagtttcatgttcatattttcataactgtatatgttcatcttatcatacagtttgggtccttgaactttggaacactgaatccctactactctccccccataaagataggaaggaacacaaaagggtcaaatcaatacccttatgtctccccttctggaccaggctccgccgccggtgccgtggcctgcatcgcatgcccgacgctctacgcctacctgaagaagacagaccccggagtgcccgcgcagctgctggagtacgacgagcggttcgggcagtacggctgcgacttcaccttctacgactacaaccgaccggaggagctgccggcggcgatgaagcacgcctaccgagtcatcgttgccgaccctccctatctgagtaaggagtgcttggaaaaggttgccaaaacagtatctttcctcgcacgacctgaaggttcattcctgctgctgctcacaggggaagttcggatggaccgggcattggagctgctgaatgttcgtccctgcggtttcaggcctcgccactcgaacaaactaggcaacgagttccggctgttcacgaattaagatcctgctgacagacttggtggttgggagcaaagtgatggtgcccccatttaactataaactaatacaatttttgttctagagctgttccatctttatgaacatgttgcatctttgatccacagctcactgatccctccaatttaaattgtagtgacaattatttgaggaatctgtgtgctatgatgtatgattaatcaaacatttacactgttagtgtacctcattttaatttcattttaaaatacactgttagtgtatgtttcattttaatttcatcagtattctttagaatgtctcgttggcttattcagatttatagccaaaatgacattatcttggggatagttcatcagtattttttaatttcattatctcgttcggcggcggcatcccggacgggcacagcctgcacactggcgggcaggtcgtgaaggcacccaccatcgagcagaacctgtcgtgcaaccttgagtagctgtacaagggcatcaccaagaagttgaatatttctagggaaattgttgacgcaagtggctaaccagatggaccagtccctgtcagatttatgcttggttaatttctgctcgcccggtgcaggcgacgcttctccttcagacgctcaaccagtcaagaaggagtccgagagccaggcatggctcggattaggaccgaatgccgtcaagtccaacctgaacctgagctagcacacaacgacacagccaaataagacagcacagcaacctcaccaaagcctttgcaggacgatctgaaaatatgctttgccactagagtaccgaaaccataaatatcctctcgttatcgtgttttagtgttctgtttaggccgtggtcctacgccctcttgtcacatagtctggatgtaaagataagtagccagccatgactgagagaagttttttgggggggggggtgttaacacacggccactctgaattggccatgctaaggaaaatgatagtagtgcaaagagaagtatatgtcttttttctttttctttttctgaaagccagatcgtttggctctagccttgatgtatgcagaacaagtgattgtaatggattctgagtatcctcatcgtcttgctgttgcttcaccaacccaagtttgtttggattcttgccattcctgctgcagcaaatctctggtagtttatggtagcaactctagcaatctaag

SEQ ID NO: 202324 - DNA, 3639 bp, Zea Mays
ctctcggccgccatcatggaaggtccgaccccgccatcgctgtccccacgcggttgctccaaggaaggaaactctgatcccgctatccccgcccccgctctctctcgccatctccgtgcggctgctccaaggaaggaaggtccgaccccgccatcgccatccccgcgtggctgccttcccctctcgccatccccgcgcggctgctccaaggaaggaaggtccgaccccgccatcgccatccccgcgcgcccggtcgagcgccaccagccgcataagtctgggctagcgccgccggccaccattggctcggtcgagcacctcatgcccacgacggtcagtcgccgccttcatggctcagagtcgtcggtccctgcccaccaaggtcaccatgggctcgacgacgatggcaacaaggtcaaggtcgtcatcacaacccaaggtagtagctcttcagttcccccgccattccccaccacccctccaccgtctccaccgcacacagcatgcccgactctattctcctccccgaaatccccgtggcgcgcagatctagccccggctcctcgccggcacaaaccacgtgcgcgccctcgacccatggcatccccaaatcccgcccccggttcctctcccttcccgttcgcggacgacgcttccgcgcgttgacgtacgcgtccccaaatccccggttcccctcccttcctgttcgcggatggcgcttccgagccctcgacccatggcgtccccaaatcccaggttcctctcccttcccgttcgcggacggcgcttccgcgcgtcgacgttcgtgtccccaattcctgccccggttcggcgcttccccacatcgaggcaccacaccatcgccatggggtatcgacaacgtcgacagcgtgtggccccatcgttcgcagaccaacccggccacggttgccctgctgctgacggataaggacctggagtcggaggagagcatgtacgagcggtggagcagcgtgcacaccgtgtcgcgggacctcacggagaagcagagcaggttcgaggcgttcaaggcgaactctaggcacatcggcgagttcaacaagatgaaagacgttccctacaagctcggcctcaacaagaaaaaatcatcttctacgattcagagaaattatgtgaagcttcaatttgactccatgcaacaggtttagctattgacaacctcgattacattttcacagtgggagctccttcgattattaaccacaggacagcatatgttcgtgcattgcaaccgataaataaagatgaagaggtatctataagctacattgagactgcggcagtcaccaagaagagaaacaatgatctgaaacagtacttcttcacctgcacatgtccacgctgtgtaaagggttttgatgaggatgcactacttgaggggttcaggtgcaagagccaagcatgtgatggctttctgctgcccaactcaggtaaaaaggcttatacatgccaaaaatgtggtgcttctagagatgtggaagagataaaaaatatgagaagcaaaatactacagttatcggataaagcatcttcatttctttcatcaggaaataaggctgaagcaggttctatctacaagataatcaaacagttagagagaaatctgtaccatgctttctcaactactttgctgcacacgtgcgaaacactattgaagatatatctggaattacaagattggtggactgcgttgacatactgtagattgacaattcctgtttatgaaagagtttatccaccttttcatccgatgattggattacaattctatacttgtggaaagcttgaatgggactggttcggagggagacggcccctcactctctgccctcctgctgcctgcctactgctatactgttctcttgtgttcatgttcatataaaattcagtttcatgttcatattttcataactgtatatgttcatcttatcatacagtttgggtccttgaactttggaacactgaatccctactactctccccccataaaggctccgccgccggtgccgtggcctgcatcgcatgcccgacgctctacgcctacctgaagaagacagaccccggagtgcccgcgcagctgctggagtacgacgagcggttcgggcagtacggctgcgacttcaccttctacgactacaaccgaccggaggagctgccggcggcgatgaagcacgcctaccgagtcatcgttgccgaccctccctatctgagtaaggagtgcttggaaaaggttgccaaaacagtatctttcctcgcacgacctgaaggttcattcctgctgctgctcacaggggaagttcggatggaccgggcattggagctgctgaatgttcgtccctgcggtttcaggcctcgccactcgaacaaactaggcaacgagttccggctgttcacgaattaagatcctgctgacagacttggtggttgggagcaaagtgatggtgcccccatttaactataaactaatacaatttttgttctagagctgttccatctttatgaacatgttgcatctttgatccacagctcactgatccctccaatttaaattgtagtgacaattatttgaggaatctgtgtgctatgatgtatgattaatcaaacatttacactgttagtgtacctcattttaatttcattttaaaatacactgttagtgtatgtttcattttaatttcatcagtattctttagaatgtctcgttggcttattcagatttatagccaaaatgacattatcttggggatagttcatcagtattttttaatttcattatctcgttcggcggcggcatcccggacgggcacagcctgcacactggcgggcaggtcgtgaaggcacccaccatcgagcagaacctgtcgtgcaaccttgagtagctgtacaagggcatcaccaagaagttgaatatttctagggaaattgttgacgcaagtggctaaccagatggaccagtccctgtcagatttatgcttggttaatttctgctcgcccggtgcaggcgacgcttctccttcagacgctcaaccagtcaagaaggagtccgagagccaggcatggctcggattaggaccgaatgccgtcaagtccaacctgaacctgagctagcacacaacgacacagccaaataagacagcacagcaacctcaccaaagcctttgcaggacgatctgaaaatatgctttgccactagagtaccgaaaccataaatatcctctcgttatcgtgttttagtgttctgtttaggccgtggtcctacgccctcttgtcacatagtctggatgtaaagataagtagccagccatgactgagagaagttttttgggggggggggtgttaacacacggccactctgaattggccatgctaaggaaaatgatagtagtgcaaagagaagtatatgtcttttttctttttctttttctgaaagccagatcgtttggctctagccttgatgtatgcagaacaagtgattgtaatggattctgagtatcctcatcgtcttgctgttgcttcaccaacccaagtttgtttggattcttgccattcctgctgcagcaaatctctggtagtttatggtagcaactctagcaatctaag

SEQ ID NO: 202325 - DNA, 3136 bp, Zea Mays
tctctcgccatctccgtgcggctgctccaaggaaggaaggtccgaccccgccatcgccatccccgcgtggctgccttcccctctcgccatccccgcgcggctgctccaaggaaggaaggtccgaccccgccatcgccatccccgcgcgcccggtcgagcgccaccagccgcataagtctgggctagcgccgccggccaccattggctcggtcgagcacctcatgcccacgacggtcagtcgccgccttcatggctcagagtcgtcggtccctgcccaccaaggtcaccatgggctcgacgacgatggcaacaaggtcaaggtcgtcatcacaacccaaggttcgaggcgttcaaggcgaactctaggcacatcggcgagttcaacaagatgaaagacgttccctacaagctcggcctcaacaagaacaaaaggaaagttgagaagattgaaaatgactatgccaaatgcaagttcgttgcccaatgttttatatatggtgatagtttcagctctggaatttagctgaagttgaatgcttcatatgtttagactgaaattttgaaaaaatcatcttctacgattcagagaaattatgtgaagcttcaatttgactccatgcaacaggtttagctattgacaacctcgattacattttcacagtgggagctccttcgattattaaccacagcatatgttcgtgcattgcaaccgataaataaagatgaagaggtatctataagctacattgagactgcggcagtcaccaagaagagaaacaatgatctgaaacagtacttcttcacctgcacatgtccacgctgtgtaaagggttttgatgaggatgcactacttgaggggttcaggtgcaagagccaagcatgtgatggctttctgctgcccaactcaggtaaaaaggcttatacatgccaaaaatgtggtgcttctagagatgtggaagagataaaaaatatgagaagcaaaatactacagttatcggataaagcatcttcatttctttcatcaggaaataaggctgaagcaggttctatctacaagataatcaaacagttagagagaaatctgtaccatgctttctcaactactttgctgcacacgtgcgaaacactattgaagatatatctggaattacaagattggtggactgcgttgacatactgtagattgacaattcctgtttatgaaagagtttatccaccttttcatccgatgattggattacaattctatacttgtggaaagcttgaatgggactggttcggagggagacggcccctcactctctgccctcctgctgcctgcctactgctatactgttctcttgtgttcatgttcatataaaattcagtttcatgttcatattttcataactgtatatgttcatcttatcatacagtttgggtccttgaactttggaacactgaatccctactactctccccccataaagataggaaggaacacaaaagggtcaaatcaatacccttatgtctccccttctggaccaggctccgccgccggtgccgtggcctgcatcgcatgcccgacgctctacgcctacctgaagaagacagaccccggagtgcccgcgcagctgctggagtacgacgagcggttcgggcagtacggctgcgacttcaccttctacgactacaaccgaccggaggagctgccggcggcgatgaagcacgcctaccgagtcatcgttgccgaccctccctatctgagtaaggagtgcttggaaaaggttgccaaaacagtatctttcctcgcacgacctgaaggttcattcctgctgctgctcacaggggaagttcggatggaccgggcattggagctgctgaatgttcgtccctgcggtttcaggcctcgccactcgaacaaactaggcaacgagttccggctgttcacgaattaagatcctgctgacagacttggtggttgggagcaaagtgatggtgcccccatttaactataaactaatacaatttttgttctagagctgttccatctttatgaacatgttgcatctttgatccacagctcactgatccctccaatttaaattgtagtgacaattatttgaggaatctgtgtgctatgatgtatgattaatcaaacatttacactgttagtgtacctcattttaatttcattttaaaatacactgttagtgtatgtttcattttaatttcatcagtattctttagaatgtctcgttggcttattcagatttatagccaaaatgacattatcttggggatagttcatcagtattttttaatttcattatctcgttcggcggcggcatcccggacgggcacagcctgcacactggcgggcaggtcgtgaaggcacccaccatcgagcagaacctgtcgtgcaaccttgagtagctgtacaagggcatcaccaagaagttgaatatttctagggaaattgttgacgcaagtggctaaccagatggaccagtccctgtcagatttatgcttggttaatttctgctcgcccggtgcaggcgacgcttctccttcagacgctcaaccagtcaagaaggagtccgagagccaggcatggctcggattaggaccgaatgccgtcaagtccaacctgaacctgagctagcacacaacgacacagccaaataagacagcacagcaacctcaccaaagcctttgcaggacgatctgaaaatatgctttgccactagagtaccgaaaccataaatatcctctcgttatcgtgttttagtgttctgtttaggccgtggtcctacgccctcttgtcacatagtctggatgtaaagataagtagccagccatgactgagagaagttttttgggggggggggtgttaacacacggccactctgaattggccatgctaaggaaaatgatagtagtgcaaagagaagtatatgtcttttttctttttctttttctgaaagccagatcgtttggctctagccttgatgtatgcagaacaagtgattgtaatggattctgagtatcctcatcgtcttgctgttgcttcaccaacccaagtttgtttggattcttgccattcctgctgcagcaaatctctggtagtttatggtagcaactctagcaatctaag

SEQ ID NO: 202326 - DNA, 2926 bp, Zea Mays
tctctcgccatctccgtgcggctgctccaaggaaggaaggtccgaccccgccatcgccatccccgcgtggctgccttcccctctcgccatccccgcgcggctgctccaaggaaggaaggtccgaccccgccatcgccatccccgcgcgcccggtcgagcgccaccagccgcataagtctgggctagcgccgccggccaccattggctcggtcgagcacctcatgcccacgacggtcagtcgccgccttcatggctcagagtcgtcggtccctgcccaccaaggtcaccatgggctcgacgacgatggcaacaaggtcaaggtcgtcatcacaacccaagaaaaaatcatcttctacgattcagagaaattatgtgaagcttcaatttgactccatgcaacaggtttagctattgacaacctcgattacattttcacagtgggagctccttcgattattaaccacagttgtgtaccaaatgcagttttgatatttgatggtaggacagcatatgttcgtgcattgcaaccgataaataaagatgaagaggtatctataagctacattgagactgcggcagtcaccaagaagagaaacaatgatctgaaacagtacttcttcacctgcacatgtccacgctgtgtaaagggttttgatgaggatgcactacttgaggggttcaggtgcaagagccaagcatgtgatggctttctgctgcccaactcaggtaaaaaggcttatacatgccaaaaatgtggtgcttctagagatgtggaagagataaaaaatatgagaagcaaaatactacagttatcggataaagcatcttcatttctttcatcaggaaataaggctgaagcaggttctatctacaagataatcaaacagttagagagaaatctgtaccatgctttctcaactactttgctgcacacgtgcgaaacactattgaagatatatctggaattacaagattggtggactgcgttgacatactgtagattgacaattcctgtttatgaaagagtttatccaccttttcatccgatgattggattacaattctatacttgtggaaagcttgaatgtttgggtccttgaactttggaacactgaatccctactactctccccccataaagataggaaggaacacaaaagggtcaaatcaatacccttatgtctccccttctggaccaggctccgccgccggtgccgtggcctgcatcgcatgcccgacgctctacgcctacctgaagaagacagaccccggagtgcccgcgcagctgctggagtacgacgagcggttcgggcagtacggctgcgacttcaccttctacgactacaaccgaccggaggagctgccggcggcgatgaagcacgcctaccgagtcatcgttgccgaccctccctatctggtactgtttctaccctaccagagattgcctattaaaaagtgtttgatcagttcttaacatttgagatgagaggaaatatcgaggagaaatggctattattcattggttgatgatgtagagtaaggagtgcttggaaaaggttgccaaaacagtatctttcctcgcacgacctgaaggttcattcctgctgctgctcacaggggaagttcggatggaccgggcattggagctgctgaatgttcgtccctgcggtttcaggcctcgccactcgaacaaactaggcaacgagttccggctgttcacgaattaagatcctgctgacagacttggtggttgggagcaaagtgatggtgcccccatttaactataaactaatacaatttttgttctagagctgttccatctttatgaacatgttgcatctttgatccacagctcactgatccctccaatttaaattgtagtgacaattatttgaggaatctgtgtgctatgatgtatgattaatcaaacatttacactgttagtgtacctcattttaatttcattttaaaatacactgttagtgtatgtttcattttaatttcatcagtattctttagaatgtctcgttggcttattcagatttatagccaaaatgacattatcttggggatagttcatcagtattttttaatttcattatctcgttcggcggcggcatcccggacgggcacagcctgcacactggcgggcaggtcgtgaaggcacccaccatcgagcagaacctgtcgtgcaaccttgagtagctgtacaagggcatcaccaagaagttgaatatttctagggaaattgttgacgcaagtggctaaccagatggaccagtccctgtcagatttatgcttggttaatttctgctcgcccggtgcaggcgacgcttctccttcagacgctcaaccagtcaagaaggagtccgagagccaggcatggctcggattaggaccgaatgccgtcaagtccaacctgaacctgagctagcacacaacgacacagccaaataagacagcacagcaacctcaccaaagcctttgcaggacgatctgaaaatatgctttgccactagagtaccgaaaccataaatatcctctcgttatcgtgttttagtgttctgtttaggccgtggtcctacgccctcttgtcacatagtctggatgtaaagataagtagccagccatgactgagagaagttttttgggggggggggtgttaacacacggccactctgaattggccatgctaaggaaaatgatagtagtgcaaagagaagtatatgtcttttttctttttctttttctgaaagccagatcgtttggctctagccttgatgtatgcagaacaagtgattgtaatggattctgagtatcctcatcgtcttgctgttgcttcaccaacccaagtttgtttggattcttgccattcctgctgcagcaaatctctggtagtttatggtagcaactctagcaatctaag

SEQ ID NO: 202327 - DNA, 1712 bp, Zea Mays
gccaaaccgagctaactaagaatcgaagtagctgacaagcatttcgtcccgctttgacagtgtctttgaagcctgaactttttgaaggattgaggtttgacttcacaaaagggttgaatcaaaagttttctcttagccacaggtaagatcattacataagggcagacccagggccagaggctcccacatgagtgtggcctggggaagggataaactgaaccaagtatccccccgcaattgcggagaggctgcttcgaacccgtgacctggtgattcagtgagacagctctcaccactgcaccaggcctgcccactaagatcattacataaatgttagcaaatatcttatgttatattttcccgagtatatcctaacaacatcttccacagcgtttttatgggctccttagaagttccagcccaggggtctgaaactattaaagttccaactgctcattatgaatttggtgccaattttttagatccaaagttaatgctcattggaagggtgatgacagatggaaggcttaatgctcgcgtgaaatgtgatttgacagacaatctgatgctgaaagtaaatgcacaggtagatggatcaaagagtttaggttcagtggttcatcctttccttcgttgatactttgctttccttattctactgatggttgttctcttcccagcttacccaagaggcacattactcacaaggaatgtttaactttgactacaagggaagtgactatcgagcacaattccaaatagggaacaatgcattctatggtgcaaattatattcagagtgttactccgaacctatcaatgggaactgaaatgttctggcttggtcaccaaaggaagtctggaattggttttgcctgtcgctataacacggacaaaatggtgggcactctacaggtcgcaagcactggaatagttgccttaagttatgtccagaagatttctgagaaggtttcccttgcgtctgatttcatgtataaccatatgtcaagagacgtaacttccagctttggttacgattacttgcttaggcagtgccgtctaagaggcaaaattgactcgaatggtgttgttgcggcatatctggaggagaggttgaacatgggtgtcaactttcttctatctgctgagattgaccattgtaagaagaactacaagtttggtttcggaatgaccgtaggagagtaattctgctaaaacaattgctgagaagagcacatgaggactttcgcagtctgctttgcattgtatgttaagatacttcaggtctcagttttgattgatcaggttctgccccgtcgaaaaaaatactagctgttgctgctttacagggttttgtctcagtgtattggtggttgtttattttcagctacttgagcatgggggccatgattctttgttcatcttggatgtaactagctgattggtgttccaatgatgttgtatttgcagaacgattttttccttttaaatcaccaacaaccaccacactaggctttttctgtaccatcatggacgggccacaagattttacagttcaaagctttggcacttgccatatttgatgtcgtcttgtgcttttgctcatccatgtaagtcagaaatctcagttcatatcagtgcttttgctcatccatgtaagtcagaaatctctgttcatatcagtttttttattaaaaaaagtttccgctgcat

SEQ ID NO: 202328 - DNA, 1632 bp, Zea Mays
ttgacagagcacaatggtctcatcctaatgttttcatcacatttgaatgaacactaaagaaagctgcttgatgcgtggtgcaggatgaactggaatcccttttggatgactctggacatttgcggacacttgctttcttgtatggcagcaaaggaatgtgctccaaagccctttctatatggcgtgtactggcaaggaattatagtgcaggtttgtggaaggatctgtctgagaatgattcttgtggaactttggttactaaaaggtctggcgaggaaattgccgctgtagaagcagccaagatcctcaaagcattatctgatgaggaccttgttctggaacatcttggatgggtggcagacattgatcaagatctagcgattgcagttttaacatctgagacgagggaaaatcaactctcaccagaaaaggttgttgcttctgttgatgcagaaaaggttgtgattcatcaaagatatttgcagtggttgattgagggtcagggctgcgatgatcctcactatcacacatcatatgctctttcactggccaaatctgcaattgaagcagttgatatggagtctaaatatagagggaaagatgatagtgaaattgattctgatgcacagtttgtttattcagtaagagaaagcttgcaattgtttctgcaagcttcagacctgtatgacccagaagatgtgctcgatgtgatagcagaatcagagctatggctggaaaaggcaatattgtataggaagatgggccaagagaatattgtacttcagatactagcattctggaggatagtgaagctgctgagcagtattgcgcagagattggtcgagatgatgcttatattcagcttttgggcttgtatttggaccctcaaaacgggaaggagcctatgtttacagcagctgtacgacttcttcataatcatggtgaatcgttggaccccatacaagtattggagaaattatctcctgatatgcctctccagctggcatcagacacaattttacggacactgagggcccgagtgcaccatcatcgtcaaggacagatagtccataatctatcacgtgcgacaaacctggacgtgcggttgacaagactggaggagagatcgaggcatgtgcagctaaccgatgagagtatctgcgactcctgtcgagctcgcctcggcaccaagctatttgctatgtacccaaatgactcggttgtttgctacaggtgctatcgatcccagcaaggtgaatcttcatcagggcatggtcgtagcatgaggaaagatgttatattcaaacagagctggcttgtaagtagatagatagcgaggaaggaatgaagagtggtgatcttgaggccagcatttggctgtggctgctctgaaatgggcaccaagtttttttgtctggatgggctctctggaaacttgaacagggtgttgtatattctttttgaggccaatgaatgaatatatacaaatacaagcatacagcataccggaggatgtctagtctgttcttccgtttttttttgtactttagtttttttgtcaaaattttatattcacacctgtagtgggactattaccgtatgcgtcaaggttatacggctcggtgctgtaag

SEQ ID NO: 202329 - DNA, 3263 bp, Zea Mays
ccagcaagcagtgcgaagttagtcgccggccggcagcgtccccctcgccccccaagtccctagtggttgacactgacagaggtctgcagagactagcggcgatggcgccaccctgccccgaaccctaaccccactccaccaccggccatgggatcccagccgccggcctcccgcgcggccctggagcacctcgctacgcttgaccccgccgcactcgccggcctccctgtctcctccccgctcaccgtccgctccgccgccgtctccgcccacctgctctatctcggcaccggcggcggcaagctgctcctcttctccctgcaggatccctccactcctgagttcctccgcctcctccccatcggcgccaccctacccgtctctgctatcgtcccgctcccctccgtcgcccgcctcctcgtcctcgctgacggcctcctcctcctcgccgacccgctcctctcgcgccccgtccgccgcctcggctccctgcgcagcgtcaccgccgtcgccgcccgccgcgtcgtcctcgcggacccatcatcatgctccgtcgccatctccgtcgggaagaagctgctccgtgtcgacttcacgctgcacgacgccgacgagctggatgtacagacgcgcgagatcgcctcagtcgagggggtcaaggcgctcgcttgggtcgacgattctgtcttcgttgccactgccactgggtactccctctactcgagcaccaatggtcagggtgtggatatattctcgctcccagaatccgccggtcacccaagggtgaagccgctctctggaggtgacgaggtgatgctcctggtcgacaatgtcggtgttgtggtcgatagatttggccagcccgttggaagcagcttggtgttcagcaccacgcccgactacatagctgaggtattcccctatgtgattgttgctggggactccaaggtcgatgtgtacaggaggaggaacgctgcacacctacagaccattccggttgccaggactggtcaaggcgttctgattgtggctggggatgatgatgggatagacacggagctagttgtgatcgctacaacttataaggtaacgtaggtcttttgctaccgtaaagtatctgcattggagcagattaaggcatctttacgaagaaagaactacaaggaagctatttctttgctagaagagtttgagtcggacggtgaaatctcaaaggatatgatctcctttgtccatgctcaacttggttttttattgtttttcgacttgcgtttcgaggatgctgtgaatcatttcttgctatcggagactatgcagccatcagaagtatttccattcattatgcgggatcctaaccgttggtcagatctggtgccaagaaagcggtattggggtttgcaccctccccctaagccccttgaagaatttattgatgatggactggtaacagttcaacaggcattgtttctgaaaaaggcaggtgtggatacagttgtggatgaagatttcctttcaaacccaccaagtagagctgatcttttggaactagcgatcagaaatattatcaggtacctttgtgcatcgcggatgaagaatctaccttctccagagatggaaggagttgatactcttctgatgtatctttatagagcacttcatcttgttgatgacatgtataatctcgcatcttctcagaatagctgtattgtggatgaactggaatcccttttggatgactctggacatttgcggacacttgctttcttgtatggcagcaaaggaatgtgctccaaagccctttctatatggcgtgtactggcaaggaattatagtgcaggtttgtggaaggatctgtctgagaatgattcttgtggaactttggttactaaaaggtctggcgaggaaattgccgctgtagaagcagccaagatcctcaaagcattatctgatgaggaccttgttctggaacatcttggatgggtggcagacattgatcaagatctagcgattgcagttttaacatctgagacgagggaaaatcaactctcaccagaaaaggttgttgcttctgttgatgcagaaaaggttgtgattcatcaaagatatttgcagtggttgattgagggtcagggctgcgatgatcctcactatcacacatcatatgctctttcactggccaaatctgcaattgaagcagttgatatggagtctaaatatagagggaaagatgatagtgaaattgattctgatgcacagtttgtttattcagtaagagaaagcttgcaattgtttctgcaagcttcagacctgtatgacccagaagatgtgctcgatgtgatagcagaatcagagctatggctggaaaaggcaatattgtataggaagatgggccaagagaatattgtacttcagatactagcattgaagctggaggatagtgaagctgctgagcagtattgcgcagagattggtcgagatgatgcttatattcagcttttgggcttgtatttggaccctcaaaacgggaaggagcctatgtttacagcagctgtacgacttcttcataatcatggtgaatcgttggaccccatacaagtattggagaaattatctcctgatatgcctctccagctggcatcagacacaattttacggacactgagggcccgagtgcaccatcatcgtcaaggacagatagtccataatctatcacgtgcgacaaacctggacgtgcggttgacaagactggaggagagatcgaggcatgtgcagctaaccgatgagagtatctgcgactcctgtcgagctcgcctcggcaccaagctatttgctatgtacccaaatgactcggttgtttgctacaggtgctatcgatcccagcaaggtgaatcttcatcagggcatggtcgtagcatgaggaaagatgttatattcaaacagagctggcttgtaagtagatagatagcgaggaaggaatgaagagtggtgatcttgaggccagcatttggctgtggctgctctgaaatgggcaccaagtttttttgtctggatgggctctctggaaacttgaacagggtgttgtatattctttttgaggccaatgaatgaatatatacaaatacaagcatacagcataccggaggatgtctagtctgttcttccgtttttttttgtactttagtttttttgtcaaaattttatattcacacctgtagtgggactattaccgtatgcgtcaaggttatacggctcggtgctgtaag

SEQ ID NO: 202330 - DNA, 3366 bp, Zea Mays
cgaataacttttttttttacgtgcttttgatctgcaacagcaggtatgctgttggtttgtatcgcagtcagtttctgaagtcctgaagtcgtcttctccacctcgaagcaaaccagcaagcagtgcgaagttagtcgccggccggcagcgtccccctcgccccccaagtccctagtggttgacactgacagaggtctgcagagactagcggcgatggcgccaccctgccccgaaccctaaccccactccaccaccggccatgggatcccagccgccggcctcccgcgcggccctggagcacctcgctacgcttgaccccgccgcactcgccggcctccctgtctcctccccgctcaccgtccgctccgccgccgtctccgcccacctgctctatctcggcaccggcggcggcaagctgctcctcttctccctgcaggatccctccactcctgagttcctccgcctcctccccatcggcgccaccctacccgtctctgctatcgtcccgctcccctccgtcgcccgcctcctcgtcctcgctgacggcctcctcctcctcgccgacccgctcctctcgcgccccgtccgccgcctcggctccctgcgcagcgtcaccgccgtcgccgcccgccgcgtcgtcctcgcggacccatcatcatgctccgtcgccatctccgtcgggaagaagctgctccgtgtcgacttcacgctgcacgacgccgacgagctggatgtacagacgcgcgagatcgcctcagtcgagggggtcaaggcgctcgcttgggtcgacgattctgtcttcgttgccactgccactgggtactccctctactcgagcaccaatggtcagggtgtggatatattctcgctcccagaatccgccggtcacccaagggtgaagccgctctctggaggtgacgaggtgatgctcctggtcgacaatgtcggtgttgtggtcgatagatttggccagcccgttggaagcagcttggtgttcagcaccacgcccgactacatagctgaggtattcccctatgtgattgttgctggggactccaaggtcgatgtgtacaggaggaggaacgctgcacacctacagaccattccggttgccaggactggtcaaggcgttctgattgtggctggggatgatgatgggatagacacggagctagttgtgatcgctacaacttataaggtcttttgctaccgtaaagtatctgcattggagcagattaaggcatctttacgaagaaagaactacaaggaagctatttctttgctagaagagtttgagtcggacggtgaaatctcaaaggatatgatctcctttgtccatgctcaacttggttttttattgtttttcgacttgcgtttcgaggatgctgtgaatcatttcttgctatcggagactatgcagccatcagaagtatttccattcattatgcgggatcctaaccgttggtcagatctggtgccaagaaagcggtattggggtttgcaccctccccctaagccccttgaagaatttattgatgatggactggtaacagttcaacaggcattgtttctgaaaaaggcaggtgtggatacagttgtggatgaagatttcctttcaaacccaccaagtagagctgatcttttggaactagcgatcagaaatattatcaggtacctttgtgcatcgcggatgaagaatctaccttctccagagatggaaggagttgatactcttctgatgtatctttatagagcacttcatcttgttgatgacatgtataatctcgcatcttctcagaatagctgtattgtggatgaactggaatcccttttggatgactctggacatttgcggacacttgctttcttgtatggcagcaaaggaatgtgctccaaagccctttctatatggcgtgtactggcaaggaattatagtgcaggtttgtggaaggatctgtctgagaatgattcttgtggaactttggttactaaaaggtctggcgaggaaattgccgctgtagaagcagccaagatcctcaaagcattatctgatgaggaccttgttctggaacatcttggatgggtggcagacattgatcaagatctagcgattgcagttttaacatctgagacgagggaaaatcaactctcaccagaaaaggttgttgcttctgttgatgcagaaaaggttgtgattcatcaaagatatttgcagtggttgattgagggtcagggctgcgatgatcctcactatcacacatcatatgctctttcactggccaaatctgcaattgaagcagttgatatggagtctaaatatagagggaaagatgatagtgaaattgattctgatgcacagtttgtttattcagtaagagaaagcttgcaattgtttctgcaagcttcagacctgtatgacccagaagatgtgctcgatgtgatagcagaatcagagctatggctggaaaaggcaatattgtataggaagatgggccaagagaatattgtacttcagatactagcattgaagctggaggatagtgaagctgctgagcagtattgcgcagagattggtcgagatgatgcttatattcagcttttgggcttgtatttggaccctcaaaacgggaaggagcctatgtttacagcagctgtacgacttcttcataatcatggtgaatcgttggaccccatacaagtattggagaaattatctcctgatatgcctctccagctggcatcagacacaattttacggacactgagggcccgagtgcaccatcatcgtcaaggacagatagtccataatctatcacgtgcgacaaacctggacgtgcggttgacaagactggaggagagatcgaggcatgtgcagctaaccgatgagagtatctgcgactcctgtcgagctcgcctcggcaccaagctatttgctatgtacccaaatgactcggttgtttgctacaggtgctatcgatcccagcaaggtgaatcttcatcagggcatggtcgtagcatgaggaaagatgttatattcaaacagagctggcttgtaagtagatagatagcgaggaaggaatgaagagtggtgatcttgaggccagcatttggctgtggctgctctgaaatgggcaccaagtttttttgtctggatgggctctctggaaacttgaacagggtgttgtatattctttttgaggccaatgaatgaatatatacaaatacaagcatacagcataccggaggatgtctagtctgttcttccgtttttttttgtactttagtttttttgtcaaaattttatattcacacctgtagtgggactattaccgtatgcgtcaaggttatacggctcggtgctgtaag

SEQ ID NO: 202331 - DNA, 302 bp, Zea Mays
ccacaggataacaattatgttggtttgcatgacaggcttgttacagtcacaggaacctttgataatcagatgaatgcgatagatttgatactgaaaaagttatctttggatgttcactacccagctaatttgagctccccatttccatatgcaggtcttactttcccaagctaccctggtgttcctgttggttatatgattccgcaggtgccatataataatgctgtgaactatggacctaataacgggtatggaggaaggtaccaaaacaacaagtacaagttggaggtctcgaattttaa

SEQ ID NO: 202332 - DNA, 1182 bp, Zea Mays
ggataacaattatgttggtttgcatgacaggcttgttacagtcacaggaacctttgataatcagatgaatgcgatagatttgatactgaaaaagttatctttggatgttcactacccagctaatttgagctccccatttccatatgcagcatgcatttcttggaaacataggtcttactttcccaagctaccctggtgttcctgttggttatatgattccgcaggtgccatataataatgctgtgaactatggacctaataacgggtatggaggaaggtaccaaaacaacaagcccagtacacctatgagatctcctgctagtaatgaagcccaagaatctctgaccattggtattgccgatgaacacattggtgctgttgtaggacgtgctggaaggaacataacagagattattcaggctagtggtgctcggatcaagatatcggataggggtgacttcatatctgggacatctgacaggaaggtgacgattactggaacatcagaagctatccggaccgcggagtccatgatcatgcagagggtgtcagccagttcggagaggctatgataccagatatgtttgacggactgtgggggccgttgttgagtccgagcagcatgtttgatgcaagttattattgtttgttgcgttgcgccaatggtttagtcgaagatatatatgtgcagcgtttgaatggatttgggaatagggctgagttatatcccgtggatgccacaacaaggcaggcaggcgccgctctgtgctagtggctgagtaggttgacaattcgaaagggcatggttggaagctttcagcgtttcccattcattcttgtgtgcctctccggatggagatcctctgcagtgccatgtcggccagactgcgagcaaaagctgacttttctggcggacgaagataggagtagcatgcatctagctgtcttgtgaaagtactattatttatcaaaatacagaatcggtcctcaaactttggtacgttgttggctccctgaattcaagaaatcgaaaaaaaaaacaagtcttgtaactttgtcgggtctaaaattagatttgtctaaaccgaatgcgccgatgtggcgtgacactattattaggtttagtgtatttaaacacctctaaatatatgagaaaggcgtgccactattattaggtttagt

SEQ ID NO: 202333 - DNA, 1193 bp, Zea Mays
gtttgatttaatctgcatgtgctattttttgtggagtttgatatttatgtgcttaaatttcgtgacttagcaatactggttgtatgctgagatgtctgaaaagctattacgttttctgtgaactgttgtgtagtttttaggtcgtgcatgccgtggaaagtgtgggtgtggcttttggtggaaaacatgaaagaacttcacccactgctacaatctaattgttttatatttttatcatgcatatctatactgttggtctgttggattaatttgagttgtgactatttctgttgatactttgcagcccagtacacctatgagatctcctgctagtaatgaagcccaagaatctctgaccattggtattgccgatgaacacattggtgctgttgtaggacgtgctggaaggaacataacagagattattcaggctagtggtgctcggatcaagatatcggataggggtgacttcatatctgggacatctgacaggaaggtgacgattactggaacatcagaagctatccggaccgcggagtccatgatcatgcagagggtgtcagccagttcggagaggctatgataccagatatgtttgacggactgtgggggccgttgttgagtccgagcagcatgtttgatgcaagttattattgtttgttgcgttgcgccaatggtttagtcgaagatatatatgtgcagcgtttgaatggatttgggaatagggctgagttatatcccgtggatgccacaacaaggcaggcaggcgccgctctgtgctagtggctgagtaggttgacaattcgaaagggcatggttggaagctttcagcgtttcccattcattcttgtgtgcctctccggatggagatcctctgcagtgccatgtcggccagactgcgagcaaaagctgacttttctggcggacgaagataggagtagcatgcatctagctgtcttgtgaaagtactattatttatcaaaatacagaatcggtcctcaaactttggtacgttgttggctccctgaattcaagaaatcgaaaaaaaaaacaagtcttgtaactttgtcgggtctaaaattagatttgtctaaaccgaatgcgccgatgtggcgtgacactattattaggtttagtgtatttaaacacctctaaatatatgagaaaggcgtgccactattattaggtttagt

SEQ ID NO: 202334 - DNA, 1524 bp, Zea Mays
atgtgttgtatttttatccactaattctactttattcaaaggaaagtgctgagagaggtggcatctggaggacgtgatgccgagcgtgtgaagcttaagttagaaattgtagtcgagtctgtagactatgacaaggagggatctgttttacgtgtgcgtggaaaaaatatcactgagaatgaccatgtgaagattggccagttccacacgttagagcttgagctgaagagaccttttgttctacgaaaggaaatttgggattggttagcacttgagaccattcagcaagcatgtgatcctgctgcaagtgctgatctagcagttattctcatgcaagaaggacttgcccacctattcctcattggcaaaagcataacagcaacccgggcacgtattgaaacatcaattcctaggaagcatggccctgcaattgctggctacgagacggccctcaagaagttctttgagtatgttttgcaagcatttctgaaacacattgattttgaagttgtccagtgtactgtaattgcaagcccaggttttacgaaggaccagttccgcgattatttgtttcttgaagctgcacggcgagatttaagagtaataattgagaacaagcaacgccttgttctggcgcatgcaacatcaggttacaagcatagtttaaaggaagttttggacacaccaggtgtgatggcactgataaaagatacaaaagcagcacaggaggtccgagctctgcaggatttcttcaatatgcttactaatgagtcagctcgtgcttgttatggaccgaagcatgttgagtttgcactgcaacagtttgctatccagactcttttaataactgatactttgtttcggaacgctgacattgctacgaggcaaaggtacgtgaagttggttgaagatgtcaagaaaaatagtggcacagtacacatattttcctcgatgcatgtctcgggcgaacagttggcgcaactgacaggaatagcggctatacttcgttttcctcttcctgaactagaggacatggagctgtgatgaaaccaacctttttgcttctcgataacattctttttggttgtgatctgttagcatactacctgtatcatgtgtaacgttatggagctatttgatattgtataggcaaccctggaaaggaattctggtattttttaaggtatatcctattcgttgtaaatggttcatcgtgcgttgtttgccagttctttttctcgttaagggctagtttagaaaccctaatttctcaagggtttttcattttcccaagagaatttagttcattttctcatgggaaattggaaatctcatggaaaaatagggttgccaaactagacctaagtcttgttgttatttttcacatcctaaactatctgcatgtaaagttaccactgagcgttggagctccagacatcagaactaattttcgtgggccttcttgttagttcgtgcctcttttactttattgtatttctttgatgacaaaggcatcatctactg

SEQ ID NO: 202335 - DNA, 1728 bp, Zea Mays
atccataacttctcgcaattgatctagtcaccatatccgcggtaaggtcgccacgcccgcagcccgccgacgcaaagccgcgcgcgaggcctctcccctgcgtacgcggcgatgaagatcgtccaccgcgacctcgttcgcaacgggcctggctccgtcaagttggtgccggaggaggaggacgacttgtggcacgcgtacaacctcattgccattggtgacagcctccaggccgtcaccgtacggaaagtgctgagagaggtggcatctggaggacgtgatgccgagcgtgtgaagcttaagttagaaattgtagtcgagtctgtagactatgacaaggagggatctgttttacgtgtgcgtggaaaaaatatcactgagaatgaccatgtgaagattggccagttccacacgttagagcttgagctgaagagaccttttgttctacgaaaggaaatttgggattggttagcacttgagaccattcagcaagcatgtgatcctgctgcaagtgctgatctagcagttattctcatgcaagaaggacttgcccacctattcctcattggcaaaagcataacagcaacccgggcacgtattgaaacatcaattcctaggaagcatggccctgcaattgctggctacgagacggccctcaagaagttctttgagtatgttttgcaagcatttctgaaacacattgattttgaagttgtccagtgtactgtaattgcaagcccaggttttacgaaggaccagttccgcgattatttgtttcttgaagctgcacggcgagatttaagagtaataattgagaacaagcaacgccttgttctggcgcatgcaacatcaggttacaagcatagtttaaaggaagttttggacacaccaggtgtgatggcactgataaaagatacaaaagcagcacaggaggtccgagctctgcaggatttcttcaatatgcttactaatgagtcagctcgtgcttgttatggaccgaagcatgttgagtttgcactgcaacagtttgctatccagactcttttaataactgatactttgtttcggaacgctgacattgctacgaggcaaaggtacgtgaagttggttgaagatgtcaagaaaaatagtggcacagtacacatattttcctcgatgcatgtctcgggcgaacagttggcgcaactgacaggaatagcggctatacttcgttttcctcttcctgaactagaggacatggagctgtgatgaaaccaacctttttgcttctcgataacattctttttggttgtgatctgttagcatactacctgtatcatgtgtaacgttatggagctatttgatattgtataggcaaccctggaaaggaattctggtattttttaaggtatatcctattcgttgtaaatggttcatcgtgcgttgtttgccagttctttttctcgttaagggctagtttagaaaccctaatttctcaagggtttttcattttcccaagagaatttagttcattttctcatgggaaattggaaatctcatggaaaaatagggttgccaaactagacctaagtcttgttgttatttttcacatcctaaactatctgcatgtaaagttaccactgagcgttggagctccagacatcagaactaattttcgtgggccttcttgttagttcgtgcctcttttactttattgtatttctttgatgacaaaggcatcatctactg

SEQ ID NO: 202336 - DNA, 1447 bp, Zea Mays
aacagatcatgctttcaaattaataatgtcaccgagccacttcttgtggaggttgaccagatctatcaccttgcttgccctgcttcaccaatcttctacaagcacaatcctgttaagaccatcaagacaaatgttattggtaccctgaacatgctgggccttgcaaagagagttggagctaggattttgttgacatcaacatctgaagtttatggtgatccgcttgagcatcctcaaaccgaggcctactggggcaatgttaacccaattggagtcaggagctgttatgatgagggtaagcgtgtagcagagacgctgatgttcgactatcacaggcagcatggcattgaaatccgaattgccaggattttcaacacctatggaccaaggatgaacattgacgatggccgtgttgttagcaacttcattgctcaggctgtgcgtggcgaaccccttactgtccagaagccaggaacacagactaggagcttctgctatgtcgccgatatggttgatggtcttattagactgatgaatggaaacaacactgggccgattaacttggggaacccaggtgaattcaccatgctggaacttgctgagaatgtgaaggagttgattaacccagatataacagtgacgatgaccgagaacactcctgatgatccccgccagaggaagccggacatcaccaaggcaaaggaagttctagggtgggagcccaagatcgtcctgaaggacggcttggtgctcatggaggatgatttccgggagcgcctggccgtgcccaagaaaaccaaggcctaaactgccctgcggtgggcgaagaatatccacgggggagcatactcatagttggcttgtcattattcgtggccacatttcattacggaatttgagttccaataaacggaatataccttcgtcgatcaccttgaaggattgtatcattagaattttcatacagggctggccttttgagtctctgcctacgcacgcagatgttgtggttcttgtgtttgtagcctatatgtactccctgagtcgattatagaaatgtttattccattttgagttttttgttccttccttttgctttgccgtctaagactgagatgacgccagctgcgctgcagatttgtgattgtaatggactggccatggcaaggtgtcgttgtctctctcaaattctgtaaaatggagtactactataaaccacagtctagtctggtttcggaggcttttccaacgagcgagaagctacagaatcacaatctagtctggttcggcgcttttccaacaagaagagctttgtttcggtgcttctccaacgagatgccacgagcagcagaagagcttccgggaaagtgcaggcgtagaaacacacagaacagaaccttctttacctcgatcgacaaaaacgcctccgtccatgacatgtgggccc

SEQ ID NO: 202337 - DNA, 2920 bp, Zea Mays
ccctactcccaacacctcgccgtctactcgtctcccactcccccctgcaccaacaccaccaatcgggtcccccaccacttccgtcgccctcgcccgctccgccgcgccccgtacagcggcgacatggccgagtaccgcctcggacttcagctgcacggccacaccgacgacgttcgtggcatctgtgtatgcggcgatgctgggatcgcgacatcatcgagggaccgtactgtgaagttctggacccggaacccagaaaaggagagcgaatatgttctctccaagacactcgcaggacattcgagttttgtcggcccattggcttggatacctccttcagaccgttttcctgaaggtggaatcgtctctggtggaatggacacatttgttttcctctgggatctgcaaaaaggagaagttgccgagacaatgaaggggcacagttcgcaagtcactggactcgctgtggacactaacggtgacatcatctcttcatccatggattgtactgtaagacgttggagaaatggcaatgctatagaggtttgggaagcgcacaaggttgcagtgcaaactgttctaaagctgcccacaggggaactcttcactggttcaagtgattccactattaagctatggaaaggaaggacttgcctacagactttctcaggacatgcagacactgttagatttttagcctcaatgccaggtctaggaattctttccgcctcacacgacagcactgtcaagttatgggcgttgtcaggtcagcccctgctggacatgatcggacattcttctcttgtatattctgtggatgcacattcttcaggtctaattgctagtggtagtgaggatcgctctttgaagatatggaaagatggtgtctgcgttcaaagcattgaacacccaggatgtatatgggatgctaagttcttgggaaatggagatattgtaactgcttgttctgatggcactacaaggatatggacagcagattctaacaggttctgcagtgatgaggaaattgcagcttatacagatcttatttctcaatacacacttagcagaaagactgttggtggacttaagttgatggatctaccaggtgtggaggcgctgcaagttccagggaactccgatggacaaacattaatcgttcgagaaggggataatggtgttgcatattcatggaattcagcagagttaaaatgggacaaaattggtgaagtagtggatggacctggtgaagctgctcaaggccaagttcatgatggtgttcggtatgattttgtttttaatgttgatattggagatggagaacccatacgaaaactaccctataatcgttcagatgacccatacacagtcgcggacaagtggctcctgaaagaaaatctgcctttgacatatcgccaacaggttgtagaatttatactgcagaattctggccagaacaactttgttccagatccatcttttcgggatccctatactggggccaatgcatatgtgcctgggcaaccatcatcatcatccaatggtaatactccggaaccaattttcaagcacataccgaagagtggaatgctgtcatttgagacagctcagtttgatggaatcctaaagaaagttgcagagtttaattcaaaactttcatctgactcgagctgcacgcctacacatgtgacttgcactgagaagtatattgtatagaagtatgttgaaagggaggacatggtctgcatcgaagatgtgaacagaaacaattatctctgtctgagacggagatgtcaagattacctgccatagtgaacgtgttgaaagagacatcattttatcacacaagtaagcttgcagatgctgatatgacattgttggtaaagatattgaagtcttggcctccacaaatgatgtttccagtcattgattttctgagaatgttcgtgttgcatcctgatggagcttctttacttctcaagaccatcgaaactggaaatgatatacttttggaaacctttcgtaaagctgttgcgtcgcctgtacagccagcaaatttgcttacagtcctcaaagctgtgacaaacttgtttggcaactcatgcttgcaccagtggctgaggacccactgtgctgagatcattgattcggtgtcaaactgcaagtcttcttttagcaagaatgcacacttggcatatgccacgcttctactgaactacgctgttctttcgattgaatcaaaggaggaacagagtcaggcgcagattctttctgccgcccttgaaatcgccgaagatgacacccaagatttcgactcaaagtaccgggcacttgtcgcaatcggttctcttatgctcaagggccttgtgaagtcccttgccctcgaccttgatgttaagagcgttgcaagcagcgccaagtcttcaatggaccagaagattgcggaagtaggaggtgacatcgaatcgctaacaagatgactacaataggtttgcgtgcacttggtcgttgcggacattgttgctccttcgctcgaggcgctaccatgcataacttaaagccggtctgtgttgcagaccaattcagacgccctccacgtctctaccgaaaaatcgcaatgggttatgattattttttcacctttgtaaccatcatggaagtgtggattttgggtggtagcgcttagattttgtaaattgaatagctgggctactctgcagatacagttcaatatttctcgcggagggatgcagatcagacacgcaacgaatatttcgatatcatctgcatttctatcaggcacgcaactacacacaaaggacctcctaaacgtgtcacctaaagggcaagaaacgaagcaaatggaagaaaaacgaaaaggaaaataaacaagtaaatcatcacacaaaaaacaaaaata

SEQ ID NO: 202338 - DNA, 1984 bp, Zea Mays
actcccaacacctcgccgtctactcgtctcccactcccccctgcaccaacaccaccaatcgggtcccccaccacttccgtcgccctcgcccgctccgccgcgccccgtacagcggcgacatggccgagtaccgcctcggacttcagctgcacggccacaccgacgacgttcgtggcatctgtgtatgcggcgatgctgggatcgcgacatcatcgagggaccgtactgtgaagttctggacccggaacccagaaaaggagagcgaatatgttctctccaagacactcgcaggacattcgagttttgtcggcccattggcttggatacctccttcagaccgttttcctgaaggtggaatcgtctctggtggaatggacacatttgttttcctctgggatctgcaaaaaggagaagttgccgagacaatgaaggggcacagttcgcaagtcactggactcgctgtggacactaacggtgacatcatctcttcatccatggattgtactgtaagacgttggagaaatggcaatgctatagaggtttgggaagcgcacaaggttgcagtgcaaactgttctaaagctgcccacaggggaactcttcactggttcaagtgattccactattaagctatggaaaggaaggacttgcctacagactttctcaggacatgcagacactgttagatttttagcctcaatgccaggtctaggaattctttccgcctcacacgacagcactgtcaagttatgggcgttgtcaggtcagcccctgctggacatgatcggacattcttctcttgtatattctgtggatgcacattcttcaggtctaattgctagtggtagtgaggatcgctctttgaagatatggaaagatggtgtctgcgttcaaagcattgaacacccaggatgtatatgggatgctaagttcttgggaaatggagatattgtaactgcttgttctgatggcactacaaggatatggacagcagattctaacaggttctgcagtgatgaggaaattgcagcttatacagatcttatttctcaatacacacttagcagaaagactgttggtggacttaagttgatggatctaccaggtgtggaggcgctgcaagttccagggaactccgatggacaaacattaatcgttcgagaaggggataatggtgttgcatattcatggaattcagcagagttaaaatgggacaaaattggtgaagtagtggatggacctggtgaagctgctcaaggccaagttcatgatggtgttcggtatgattttgtttttaatgttgatattggagatggagaacccatacgaaaactaccctataatcgttcagatgacccatacacagtcgcggacaagtggctcctgaaagaaaatctgcctttgacatatcgccaacaggttgtagaatttatactgcagaattctggccagaacaactttgttccagatccatcttttcgggatccctatactggggccaatgcatatgtgcctgggcaaccatcatcatcatccaatggtaatactccggaaccaattttcaagcacataccgaagatctggtgctggcggttaccacatgagtggggtctagggaaggaataaccgagccaagcctaactcctgcatttttgcagagaggatgcattgaaccgagaacccaggacctttggctcagtggaaaggcttctcatcactgtgccagacctatccttctaacaatattgattatgttaatataatatatatgtaacatgaactaattgtcttgccaaatcaaacaaagccttgtgcaaaacaataaagcagtatagatcaaaatttttatccaatcatctgcctcatcttgttacattaactgttgattgatgctttatattttttaaaccagaagcaagttgccatgaaaataatacatgagttattttacaacttttgtgaattaacccggagcctgcttattt

SEQ ID NO: 202339 - DNA, 671 bp, Zea Mays
cggcgaccgttgtgtattgtgataatgcatggatgaagaggacgatcaatccgcaacgcttgaccaggtcctaaacgacacgacgagggtcggttacttcaaagggtacctcaattcagttgcgcaagcgatcaaggacggagctgatgtccgcgggtactttgcgtggtcgttcctggacaacttcgagtgggcaatgggctacaccaagaggttcggcatagtctacgtggactacaagaacgggctgtccaggcacccgaaagcatcggcgctgtggttctcgcgcttgctcaggggcgaggctggcactggcacaagctgagcgaactgcacgcaggaagcaagcacagaacgtcgttattacaatataaatattccacacaactagacgtttttctcctgttgttgtatcgtactactgtacagtaagcgccaataagctagcctcagatgtgtgctgcctgcctatacctctagtgactgccattgatccagcactagctgaaatgtacccggcctccaagaatcagcaccagaatatatgctttgaattgaactcatgcatgctatgctaggcgggggcggcacggcactctggttacagatagcaccaataactgttgtactattcacctgcaggtaggtaaggttgtgctgtcattactgat

SEQ ID NO: 202340 - DNA, 2187 bp, Zea Mays
gaagatgactcaagctacagttgatgggaagaagaacaaggtttatggacagaacctttgttatctggctaagctatttcttgatcacaagacattgtactatgatgttgatttgttcttgttttatgtcctctgcgaatgtgatgatcggggatgtcatatggtgggatatttctctaaggaaaaacactccgaagaatcttataatttggcttgcattctcactctccccccataccaaagaaaaggatatgggaagttcctgattgctttctcatatgaactttccaagaaagaaggtaaagttgggacaccggagcgccctctctctgatcttggtctgctcagctatagaggttattggactagagtgcttctggaaattctaaagaaacataagggaaacatatctataaaggtaacacccttccatccagatatacctttttcgttgtacaaatttcgaaagctgattgaattatgatgcagcagttctagaaagaaactttctattggctcctcatattaccctacttaacccttgatctatgaccaaaaaaggttagcccctgtgtttcatagattacacttcaataaacaggtggattttctgtgctgcaattgcgtgttagtcaaacattccctgaataaggacatttagtagtcttctagaacataatgtatggtaatggtctttttggatgagaaagatcacctcaggaatgtttaggtttagtccagttccaacatcctctttccaaacatatcttaaaataccaggttacatgtggagtcagctttatattactcggtgctgttatctggtataaaaactggcttttcatcttagttatcctgctactgcatgtcttgcctgggccctgaaacttttgggtgcatgtgaagcgactagtttggtggtagatatcatcatctggaattctggatatttatgggatcgtagttgtcagcacagtgtactgtgtcgctattcggggaggtagtatgtacgggtggtagattgttatacctggcttcagctcttcaagcagtagatttttttttttaccgaaaaacaggtggatggagcagttagtcgatgttattcttttcactcctaggagaatcatgtttgttatcgaaagcactataacatcgcagaagagacaaaacatgtaaatagtaacatatatcatatcataggcagctgtaacttgtaacatcagatgtgcaaggattgtagcaaacaatatgctagacttcaaaccgagtagaagtgtactgaatagctttaattctataactgtgaagcccagtgcaatgttgacagggccacgtgcacccagtgaaatatgcagaaacttcctgcatggaaggacatttgatccatgtgctctgtgggtcttctgtctgtgccctcctgtccgtgttgctgctgcccttgaaaaaatttggacgtaggaagtatgcaaagcagatcatctgacgagagtacatggaacaattgtattctgaacgtcattgctgttgccttcttgtccttgatctgtaccagtgtttgttggtagagtgcacatgctcgtagtagaaccttttttttcatgaagacatgtacatgatcatagggtgcccctctagcattcatgagtgtttctgaatccaaaaggtagcataacactgttctaacaagctagttcgtacatgcatttttttttgtaacaaactcttgtgcttgcgcgcaggaactaagcgacatgacggcaataaaagcagatgacatattgagcacgctacagagcctggacctaatccagtaccgcaaagggcagcacgtcatctgcgctgacccgaaggtcctcgaccgccacctcaaggcggcggggcggggcggcctggacgtcgacgttagcaagctcatatggactccctacaaggagcaaggctaaaaggcgaactgctccgtgtctcagatttagactcgctgaccgatgcgatgcagtccctgtacatagcatctccccacagctcacttgacttgacttgactcgtgtaccgtgaaactctacttgtaactttgaacatccacatcgttgtctcctcatttctccttgcattaaccatgctacctttttttttttcttggataagccagatcagagcgtggaaccagcagcgaagtgatgctgg

SEQ ID NO: 202341 - DNA, 892 bp, Zea Mays
ccacttttgagcaacaacaaagattttgagaagatgactcaagctacagttgatgggaagaagaacaaggtttatggacagaacctttgttatctggctaagctatttcttgatcacaagacattgtactatgatgttgatttgttcttgttttatgtcctctgcgaatgtgatgatcggggatgtcatatggtgggatatttctctaaggaaaaacactccgaagaatcttataatttggcttgcattctcactctccccccataccaaagaaaaggatatgggaagttcctgattgctttctcatatgaactttccaagaaagaaggtaaagttgggacaccggagcgccctctctctgatcttggtctgctcagctatagaggttattggactagagtgcttctggaaattctaaagaaacataagggaaacatatctataaaggaactaagcgacatgacggcaataaaagcagatgacatattgagcacgctacagagcctggacctaatccagtaccgcaaagggcagcacgtcatctgcgctgacccgaaggtcctcgaccgccacctcaaggcggcggggcggggcggcctggacgtcgacgttagcaagctcatatggactccctacaaggagcaaggctaaaaggcgaactgctccgtgtctcagatttagactcgctgaccgatgcgatgcagtccctgtacatagcatctccccacagctcacttgacttgacttgactcgtgtaccgtgaaactctacttgtaactttgaacatccacatcgttgtctcctcatttctccttgcattaaccatgctacctttttttttttcttggataagccagatcagagcgtggaaccagcagcgaagtgatgctgg

SEQ ID NO: 202342 - DNA, 3513 bp, Zea Mays
ggaaatccctcctctcttgccggccgtgggcaaagccctacggccggcctccccagcgccttctaaccctagcctcaagttctctctctagatcagccacgacgccctgcgccgtgcacagcctccttgcctccaccggcgacaacgcagtcgccacccccttctccctcccctcgcatgcagctctaacccataaacagtacccgtgggactgtagtgcccccagccatccataacaccacacctcatatagatattcaagacaaacattgtgccatttagcatgatagtccttatgagaaagttttagaaaaaaggcttctcttttgatgatatcgcctggttgggctgctgcttttgcatcgccaccagttgcaatggcattggccatgatggctgctggtgcctcaggaacagaaacaagaacacctcctaggaataccttgaataggcgtgacaaagcattgcctgagcgcaaggcagcagcaaaactacagactttctcgagtttccagatgcctatggaaacagcatctaacaagcctgggtccaccctgaaggacaaggcagcagcaaaagctgccgcattggcagccgctcgtgaccttgaacgaactgctaagattggttcaagaaggggccttagtgctgtagcaatggcaacatcaggacaaaggaggagttcgggtgacatcgaacgagcaaagaggtggaatacgtcagaagctatgagtgctgcttgggtggagtgtctgcaatcagatgattccaaatcagttgtgggaagggatttttcagccctttcatacaaatatgtcgcagtacttgtttcttgtttggccttagcacgaaacttacaacgagctgagatggagaggcaaacactagttgatgtgttaattcggcatcgcgcctcaactgggcttcgagcatggcggcatcttcttcattgcctaacagagatgggtagactatatggaccttttgaacatctgtgcactcctgatcgtgttttctggaaattagattttactgaaagctcttcaaggatgagaagatttgtgaaaagaaattacaagggatgtgatcatttaggtgcagctgctgattatgaggaccggaagcttcttaatacttctgcacagtcaaatgaacataactctgaggatgctaattcttcattaacaagcactcttccatcatctgcttctgtaattatggctgatgccatgtcgatgaatgacagaaatgtggaaaatgagcagttagaaactgacactactcgcagcagtgttgatgacgatcagcttcaacattcttcagcagctgatcaacaatcggtaaaaggatcgataggttcaagaacttctgacatttgtgctgatcgaaatttggttaggtctacagttcttgcacctagttatgtgcctagcgaagctgatgagagaattattgttgaactgccatcattaatggtgcgaccattgaaggtggttcgaggaacattccaagtaacttcaaagaggattaacttcataattgatgagcgttcaaatgacagtaacattgatgatgctgcatctactagtggccaatgtgatcaacaagataaagatcgaagctggttggtctcatcactttatcagatatatagcagacgatacttgctacgccgaagtgctttggaattattcatggtagataggtcgaatttcttttttgactttgcggatattgatgcccgtaaaaacgcttatcgggccattgttcataccaaacctcctaacttgaatgacatctttttagctacccagagagctgagcagattcttaaaagaactcagttgatggagcgctgggctaattgggagatcaacaattttgagtacttaatggaacttaacacactggctgggcgcagttacaatgacattactcagtaccctgtttttccctgggtagtagcagattacaaatcccgagtgttgaatctggatgaccctttgtcgtatcgagatctttcaaagccaattggagcactaaaccctgaacgtctaaagaagttccaagaacggtactctacattcgaggatccaatcataccaaagtttcattatggttcacattactccagtgctggcacggtcttgtattaccttttcagagtggagccttttacaacactgtctatacaactgcaagacggcaaatttgaccacgctgatcgcatgttttctgatctttctggtacatgggatagtgttcttgaagacatgagtgatgtaaaagagctagtacccgagatgttttacctccctgaggtatttaccaacataaatggcattgactttgggacaactcaacttggagggaagctagatataaacagaggggcaaagaagcgataatggcaaacaatgtattcttctacataacatatgaggggactgttgacattgacaaaattacaaacccagtggatcggcgagctacacaagatcaaatagcttactttggacaaacaccatctcaactgctgactgtacctcacatgaagaggaagccactggcggaggtcttacaactacaggtggccacgttgatggttcattgaagttgatatccctagatggagcgaagacaattgaaactgcttctgggcatattgctccagtgacatgccttgcgctgtcacctgatagcaactaccttgtgacagggtctagagataccacagttatactctggaggattcatcagacaggctcctcacataagaaaaatgctcaagaacctccaccgactacaccaacgacaccacgcagtcctctctctggcagcactagcaccatgagcagcctctcagaaacaaagagacgtcgcgttgaaggtccaatgcatgtaatgagaggacatcttggggaagtaacctgctgctcggttagtccagacttaggacttgttgcttcctcatcaaatgcaacaggcattcttctgcattccttacgcacaggcaggctgataaggaggcttgatgtcgatgaggcacatgcaatatgcttatcttctcaaggaatcattttggtttggaatggaacaaagaaaacattatctaccttcactgtcaatggactccctattgctaactcagttctgttgcctttctctggacaagttagttgcatcgagatttctacagatggccattttgctttatttggaacatctttgttcaacaactacaagtgtgataacagtactgaaactggggatcatgagcttggacccaatggcactgatgatgtatcaaaaaattctgaacaatctgttcacgcgccttcaatctgctttgttgacctgcatacactgaaggtttttcatactctgaagctggcaaagggccaggacatcacagcaattgctctaaacaaagagaacacaaatcttttagtttctactgctgataattttttttatagtctttactgatcccgctgtaagcatcctcgatac

SEQ ID NO: 202343 - DNA, 3006 bp, Zea Mays
ctcatctatcacctcaacaaccacaccagcaaatgagttacttatctctactattccttaagaccataacgagggcgtccaccgcatcaccgtgcccccgcccccgtctacgagcgaccctctgcgctcgcgcgaatcccgcccgagatcgccgccgatccgaagcaacggcaccgtgcccctccccctcgcgagatccgcgaccgccccatcccggcgccgcgggatccacgcctccgccctcgcccttccccacccccacccgctaatctcgcggtcgatccgcgcccggtcctgaccccgcctccgtcctcagcaccgccactccgtcccccatcttcggcgccgccgtctcccgctcccctggcacgcattcggggtccttgcgggcgacaagcacctccgtcccggaggcatctgccgctgcagcatagaccaccatgtcctcgctcggcagcaccgatgttgacgatggcaacgaggaggaggacggctccgcgagcacccccgagatctactgctgccactcccacgcagttcttgctcacgagatctgtgtgcaggttgatgtcctcgtggtgccacgccgacctcgccgccaccaagcgcgccacccatgtcctcaccgacctcgccaaaattgcgccgccgcgcccgctcgccgcgaagcacaaggacgagccggaccccgacgacggcaggcagagggtcactgtcttcttcggcacgcaaaccggcaccgctgagggctttgccaagtgcatgactcgtgcccgcgccaggactcgttgccaatattgcactcttagtgcaaagaatagctgagcttgttacagataatatgggtggacctgtcaaagatgctaacgacatgctcacaaggtggctggagaagagtactgagctgagaacatcgctacaaacaagtttgttgcctattggttgcatcaagatagggttatcacatcaccgtgccctacttttcaagatccttgcctatagtgttgggattccatgcaaacttgtcaaagggagcaattatactggtggtgatgacgacgatgctataaacataattaagatggacaatgaaagggagtttttggttgatctgatggctgctcctggtgctcttattccagcagatatcttaagttggaaaggcaattcgttaaattctaatcgaaaactcggcctgaatcgaacagctggatcatcaagtactgttgatgctaatgtggatcctactgtattgccacttgaacctaaaggtggccaactgcctttgttcagcagtggtgattggatgtcagacattgattctggatatgaggcagcagaaattgcagcttctactcaaacctcttcgggtgtcacaccatatctgtgttctgctggaagtgtttttggcagttcatggatgctggttaatcatgaccaatcagatggaccatcaacttctgctggtacatcatcgcagcagaaagttgtacctcaaagcgagcatcagcggaatttaaaccgccttccagatctgcaggaaattccagagtcaaaaaacctttttgctgaccttgttccttctggggataataagtccaagaaaacttcagtaccattcaaaggaccagatcataggaacaatgagttgcaaaagcgcagagagaacattgtccctaatgctggaagaccacatcagcggttagttatgaagaattggtctccttacaatgatgtttccaacaacaaacagtacaattatgtcgaggattcgtttgctcgtagaaatgttggtaataatgctgcaccatcatcatcccagatgccacgaccagccgcaagatctaaccttaattctagattgcataatgatgcatcatatcataattatgatagcattatggctggtacctctgccatgaacattacatctacagctgagaccgggaaggttcctgaaagggttatgcgtggtgatttggacaaaggccaaacaaattatagattggaggatcaacatgtcatagttcaaccaccacagggaagacttccatggggtattcctgcagaaggaagcgttccaatgaatagagttcagagtcaagcaaaacaacacttggaaaacatggatgcaaagcaagaccataagaaattgctccctgatccaaaaaaatctccccttgacaaattcatggacacatcattgccttcaagaaacatggacatgaggtcacagaggcttgacttcgatgatgtctctgagtgcgaaattccttgggaagatcttgtgattggtgaaaggattggcttaggttcatatggagagatttactgtgctgactggaatggaaccgaagtagctgtaaaaaaattcttggatcaagatttttatggcgatgctctggatgagtttaggagtgaagcggcgaccagaatatgcatcaggcgggaggaatggggcggtcgctggagctgctgctgatccagtttttgatgccggataacgacacacgtcggcaggcggaggagcagatccgacggctggcccgtgacccgcaggtggtccctgcgctcgtccaccatctccgtacggccaagacccccaacgtccgccagctcgccgcggtgctactccgcaagaagatcacctcccactggcccaagcttccccctgactccaaggcatcacttaaacaagcccttatcgattcaatcacactcgaccacaggatgcaaagatttttcaaaggaactttgtgattgatctattaagttacgaggacaattcataccgctatgccatccctgcaaacatacaacagggacttatataggtctacatgatattgatggttgcaatgtagtggtgaaagggatagattaaaataacaaaatttatatgtatagccaggatcatcaatggattacaaaatcttttctcataacaatataacacatttatatataagttatgatgatattatatgtttccgttgcaacgcacgg

SEQ ID NO: 202344 - DNA, 2738 bp, Zea Mays
accgcatcaccgtgcccccgcccccgtctacgagcgaccctctgcgctcgcgcgaatcccgcccgagatcgccgccgatccgaagcaacggcaccgtgcccctccccctcgcgagatccgcgaccgccccatcccggcgccgcgggatccacgcctccgccctcgcccttccccacccccacccgctaatctcgcggtcgatccgcgcccggtcctgaccccgcctccgtcctcagcaccgccactccgtcccccatcttcggcgccgccgtctcccgctcccctggcacgcattcggggtccttgcgggcgacaagcacctccgtcccggaggcatctgccgctgcagcatagaccaccatgtcctcgctcggcagcaccgatgttgacgatggcaacgaggaggaggacggctccgcgagcacccccgagatctactgctgccactcccacgcagttcttgctcacgagatctgtgtgcaggttgatgtcctcgtggtgccacgccgacctcgccgccaccaagcgcgccacccatgtcctcaccgacctcgccaaaattggacggatcgaagcaccataataagtgtttagctttcctccgcgcctcgggcggccgcggcacaggcgccgccgcgcccgctcgccgcgaagcacaaggacgagccggaccccgacgacggcaggcagagggtcactgtcttcttcggcacgcaaaccggcaccgctgagggctttgccaagtgcatgactcgtgcccgcgccaggactcgttgccaatattgcactcttagtgcaaagaatagctgagcttgttacagataatatgggtggacctgtcaaagatgctaacgacatgctcacaaggtggctggagaagagtactgagctgagaacatcgctacaaacaagtttgttgcctattggttgcatcaagatagggttatcacatcaccgtgccctacttttcaagatccttgcctatagtgttgggattccatgcaaacttgtcaaagggagcaattatactggtggtgatgacgacgatgctataaacataattaagatggacaatgaaagggagtttttggttgatctgatggctgctcctggtgctcttattccagcagatatcttaagttggaaaggcaattcgttaaattctaatcgaaaactcggcctgaatcgaacagctggatcatcaagtactgttgatgctaatgtggatcctactgtattgccacttgaacctaaaggtggccaactgcctttgttcagcagtggtgattggatgtcagacattgattctggatatgaggcagcagaaattgcagcttctactcaaacctcttcgggtgtcacaccatatctgtgttctgctggaagtgtttttggcagttcatggatgctggttaatcatgaccaatcagatggaccatcaacttctgctggtacatcatcgcagcagaaagttgtacctcaaagcgagcatcagcggaatttaaaccgccttccagatctgcaggaaattccagagtcaaaaaacctttttgctgaccttgttccttctggggataataagtccaagaaaacttcagtaccattcaaaggaccagatcataggaacaatgagttgcaaaagcgcagagagaacattgtccctaatgctggaagaccacatcagcggttagttatgaagaattggtctccttacaatgatgtttccaacaacaaacagtacaattatgtcgaggattcgtttgctcgtagaaatgttggtaataatgctgcaccatcatcatcccagatgccacgaccagccgcaagatctaaccttaattctagattgcataatgatgcatcatatcataattatgatagcattatggctggtacctctgccatgaacattacatctacagctgagaccgggaaggttcctgaaagggttatgcgtggtgatttggacaaaggccaaacaaattatagattggaggatcaacatgtcatagttcaaccaccacagggaagacttccatggggtattcctgcagaaggaagcgttccaatgaatagagttcagagtcaagcaaaacaacacttggaaaacatggatgcaaagcaagaccataagaaattgctccctgatccaaaaaaatctccccttgacaaattcatggacacatcattgccttcaagaaacatggacatgaggtcacagaggcttgacttcgatgatgtctctgagtgcgaaattccttgggaagatcttgtgattggtgaaaggattggcttaggttcatatggagagatttactgtgctgactggaatggaaccgaagtagctgtaaaaaaattcttggatcaagatttttatggcgatgctctggatgagtttaggagtgaagcggcgaccagaatatgcatcaggcgggaggaatggggcggtcgctggagctgctgctgatccagtttttgatgccggataacgacacacgtcggcaggcggaggagcagatccgacggctggcccgtgacccgcaggtggtccctgcgctcgtccaccatctccgtacggccaagacccccaacgtccgccagctcgccgcggtgctactccgcaagaagatcacctcccactggcccaagcttccccctgactccaaggcatcacttaaacaagcccttatcgattcaatcacactcgaccacaggatctctcccggaggcaagttcta

SEQ ID NO: 202345 - DNA, 3453 bp, Zea Mays
ccgcccccgtctacgagcgaccctctgcgctcgcgcgaatcccgcccgagatcgccgccgatccgaagcaacggcaccgtgcccctccccctcgcgagatccgcgaccgccccatcccggcgccgcgggatccacgcctccgccctcgcccttccccacccccacccgctaatctcgcggtcgatccgcgcccggtcctgaccccgcctccgtcctcagcaccgccactccgtcccccatcttcggcgccgccgtctcccgctcccctggcacgcattcggggtccttgcgggcgacaagcacctccgtcccggaggcatctgccgctgcagcatagaccaccatgtcctcgctcggcagcaccgatgttgacgatggcaacgaggaggaggacggctccgcgagcacccccgagatctactgctgccactcccacgcagttcttgctcacgagatctgtgtgcaggttgatgtcctcgtggtgccacgccgacctcgccgccaccaagcgcgccacccatgtcctcaccgacctcgccaaaattggacggatcgaagcaccataataagtgtttagctttcctccgcgcctcgggcggccgcggcacaggcgccgccgcgcccgctcgccgcgaagcacaaggacgagccggaccccgacgacggcaggcagagggtcactgtcttcttcggcacgcaaaccggcaccgctgagggctttgccaaggtccctactcaaactctgctcctctgtttgctgtgtttgcggtcccttctacagactacagccagagctcggtgctctgctcgcttgcttgcaccgctggctaagatcggatttgacggcacttttgggcgtggagatcttggtaccgtccagaagaagctcaaatctatttcatacacaagtgcatttgattttgttcctgatgttaggctgacctttaacaatgcgatgacttacattccttgtggccatgtagtgcatgactcgtgcccgcgccaggactcgttgccaatattgcactcttagtgcaaagaatagctgagcttgttacagataatatgggtggacctgtcaaagatgctaacgacatgctcacaaggtggctggagaagagtactgagctgagaacatcgctacaaacaagtttgttgcctattggttgcatcaagatagggttatcacatcaccgtgccctacttttcaagatccttgcctatagtgttgggattccatgcaaacttgtcaaagggagcaattatactggtggtgatgacgacgatgctataaacataattaagatggacaatgaaagatatcttaagttggaaaggcaattcgttaaattctaatcgaaaactcggcctgaatcgaacagctggatcatcaagtactgttgatgctaatgtggatcctactgtattgccacttgaacctaaaggtggccaactgcctttgttcagcagtggtgattggatgtcagacattgattctggatatgaggcagcagaaattgcagcttctactcaaacctcttcgggtgtcacaccatatctgtgttctgctggaagtgtttttggcagttcatggatgctggttaatcatgaccaatcagatggaccatcaacttctgctggtacatcatcgcagcagaaagttgtacctcaaagcgagcatcagcggaatttaaaccgccttccagatctgcaggaaattccagagtcaaaaaacctttttgctgaccttgttccttctggggataataagtccaagaaaacttcagtaccattcaaaggaccagatcataggaacaatgagttgcaaaagcgcagagagaacattgtccctaatgctggaagaccacatcagcggttagttatgaagaattggtctccttacaatgatgtttccaacaacaaacagtacaattatgtcgaggattcgtttgctcgtagaaatgttggtaataatgctgcaccatcatcatcccagatgccacgaccagccgcaagatctaaccttaattctagattgcataatgatgcatcatatcataattatgatagcattatggctggtacctctgccatgaacattacatctacagctgagaccgggaaggttcctgaaagggttatgcgtggtgatttggacaaaggccaaacaaattatagattggaggatcaacatgtcatagttcaaccaccacagggaagacttccatggggtattcctgcagaaggaagcgttccaatgaatagagttcagagtcaagcaaaacaacacttggaaaacatggatgcaaagcaagaccataagaaattgctccctgatccaaaaaaatctccccttgacaaattcatggacacatcattgccttcaagaaacatggacatgaggtcacagaggcttgacttcgatgatgtctctgagtgcgaaattccttgggaagatcttgtgattggtgaaaggattggcttaggttcatatggagagatttactgtgctgactggaatggaaccgaagtagctgtaaaaaaattcttggatcaagatttttatggcgatgctctggatgagtttaggagtgaagcggcgaccagaatatgcatcaggcgggaggaatggggcggtcgctggagctgctgctgatccagtttttgatgccggataacgacacacgtcggcaggcggaggagcagatccgacggctggcccgtgacccgcaggtggtccctgcgctcgtccaccatctccgtacggccaagacccccaacgtccgccagctcgccgcggtgctactccgcaagaagatcacctcccactggcccaagcttccccctgactccaaggcatcacttaaacaagcccttatcgattcaatcacactcgaccacaggttctttgctaaatacctatcaccaatccttctacgcatgtctgccttagaatctgcacgctttcaattcactcaaattgtgcatttggccatttgcctaaggaacactttgagtgtattctcaacttattagtttgtgctgatcagaattgaactgagaggtccagctttagtgaaccttcctgtttgcgccccaaacaacatagaattttgatgctctattgtgaccgcacaccacaattgctcatataattagttatatatgtcaattggggagaaattctgcttgcgcttcacccaattttggttgagtactgtgaagattatctgcgcaatatattctcatccatgttataaaatggctgatgattaatctttctgctgaactaaattaatcatggttgctctagagctggttgatccaggccgtgctttgttcaattggttacatgataatgcattgtggtcagattatggtaactgatactgtgatataaatatccgatgacctcccatttctggttacttgtggtctagacctaaatctgct

SEQ ID NO: 202346 - DNA, 3066 bp, Zea Mays
cgagcgaccctctgcgctcgcgcgaatcccgcccgagatcgccgccgatccgaagcaacggcaccgtgcccctccccctcgcgagatccgcgaccgccccatcccggcgccgcgggatccacgcctccgccctcgcccttccccacccccacccgctaatctcgcggtcgatccgcgcccggtcctgaccccgcctccgtcctcagcaccgccactccgtcccccatcttcggcgccgccgtctcccgctcccctggcacgcattcggggtccttgcgggcgacaagcacctccgtcccggaggcatctgccgctgcagcatagaccaccatgtcctcgctcggcagcaccgatgttgacgatggcaacgaggaggaggacggctccgcgagcacccccgagatctactgctgccactcccacgcagttcttgctcacgagatctgtgtgcaggttgatgtcctcgtggtgccacgccgacctcgccgccaccaagcgcgccacccatgtcctcaccgacctcgccaaaattggacggatcgaagcaccataataagtgtttagctttcctccgcgcctcgggcggccgcggcacaggcgccgccgcgcccgctcgccgcgaagcacaaggacgagccggaccccgacgacggcaggcagagggtcactgtcttcttcggcacgcaaaccggcaccgctgagggctttgccaagtgcatgactcgtgcccgcgccaggactcgttgccaatattgcactcttagtgcaaagaatagctgagcttgttacagataatatgggtggacctgtcaaagatgctaacgacatgctcacaaggtggctggagaagagtactgagctgagaacatcgctacaaacaagtttgttgcctattggttgcatcaagatagggttatcacatcaccgtgccctacttttcaagatccttgcctatagtgttgggattccatgcaaacttgtcaaagggagcaattatactggtggtgatgacgacgatgctataaacataattaagatggacaatgaaagggagtttttggttgatctgatggctgctcctggtgctcttattccagcagatatcttaagttggaaaggcaattcgttaaattctaatcgaaaactcggcctgaatcgaacagctggatcatcaagtactgttgatgctaatgtggatcctactgtattgccacttgaacctaaaggtggccaactgcctttgttcagcagtggtgattggatgtcagacattgattctggatatgaggcagcagaaattgcagcttctactcaaacctcttcgggtgtcacaccatatctgtgttctgctggaagtgtttttggcagttcatggatgctggttaatcatgaccaatcagatggaccatcaacttctgctggtacatcatcgcagcagaaagttgtacctcaaagcgagcatcagcggaatttaaaccgccttccagatctgcaggaaattccagagtcaaaaaacctttttgctgaccttgttccttctggggataataagtccaagaaaacttcagtaccattcaaaggaccagatcataggaacaatgagttgcaaaagcgcagagagaacattgtccctaatgctggaagaccacatcagcggttagttatgaagaattggtctccttacaatgatgtttccaacaacaaacagtacaattatgtcgaggattcgtttgctcgtagaaatgttggtaataatgctgcaccatcatcatcccagatgccacgaccagccgcaagatctaaccttaattctagattgcataatgatgcatcatatcataattatgatagcattatggctggtacctctgccatgaacattacatctacagctgagaccgggaaggttcctgaaagggttatgcgtggtgatttggacaaaggccaaacaaattatagattggaggatcaacatgtcatagttcaaccaccacagggaagacttccatggggtattcctgcagaaggaagcgttccaatgaatagagttcagagtcaagcaaaacaacacttggaaaacatggatgcaaagcaagaccataagaaattgctccctgatccaaaaaaatctccccttgacaaattcatggacacatcattgccttcaagaaacatggacatgaggtcacagaggcttgacttcgatgatgtctctgagtgcgaaattccttgggaagatcttgtgattggtgaaaggattggcttaggttcatatggagagatttactgtgctgactggaatggaaccgaagtagctgtaaaaaaattcttggatcaagatttttatggcgatgctctggatgagtttaggagtgaagtagattcgaattatgcgtcggctgcgccatccaaatattgttctctttatgggtgctgttacacgccctccgaacttatctattgtatctgaatatattccaaggcggcgaccagaatatgcatcaggcgggaggaatggggcggtcgctggagctgctgctgatccagtttttgatgccggataacgacacacgtcggcaggcggaggagcagatccgacggctggcccgtgacccgcaggtggtccctgcgctcgtccaccatctccgtacggccaagacccccaacgtccgccagctcgccgcggtgctactccgcaagaagatcacctcccactggcccaagcttccccctgactccaaggcatcacttaaacaagcccttatcgattcaatcacactcgaccacaggatgcaaagatttttcaaaggaactttgtgattgatctattaagttacgaggacaattcataccgctatgccatccctgcaaacatacaacagggacttatataggtctacatgatattgatggttgcaatgtagtggtgaaagggatagattaaaataacaaaatttatatgtatagccaggatcatcaatggattacaaaatcttttctcataacaatataacacatttatatataagttatgatgatattatatgtttccgttgcaacgcacgg

SEQ ID NO: 202347 - DNA, 2783 bp, Zea Mays
ctaagatcggatttgacggcacttttgggcgtggagatcttgtgcatgactcgtgcccgcgccaggactcgttgccaatattgcactcttagtgcaaagaatagctgagcttgttacagataatatgggtggacctgtcaaagatgctaacgacatgctcacaaggtggctggagaagagtactgagctgagaacatcgctacaaacaagtttgttgcctattggttgcatcaagatagggttatcacatcaccgtgccctacttttcaagatccttgcctatagtgttgggattccatgcaaacttgtcaaagggagcaattatactggtggtgatgacgacgatgctataaacataattaagatggacaatgaaagggagtttttggttgatctgatggctgctcctggtgctcttattccagcagatatcttaagttggaaaggcaattcgttaaattctaatcgaaaactcggcctgaatcgaacagctggatcatcaagtactgttgatgctaatgtggatcctactgtattgccacttgaacctaaaggtggccaactgcctttgttcagcagtggtgattggatgtcagacattgattctggatatgaggcagcagaaattgcagcttctactcaaacctcttcgggtgtcacaccatatctgtgttctgctggaagtgtttttggcagttcatggatgctggttaatcatgaccaatcagatggaccatcaacttctgctggtacatcatcgcagcagaaagttgtacctcaaagcgagcatcagcggaatttaaaccgccttccagatctgcaggaaattccagagtcaaaaaacctttttgctgaccttgttccttctggggataataagtccaagaaaacttcagtaccattcaaaggaccagatcataggaacaatgagttgcaaaagcgcagagagaacattgtccctaatgctggaagaccacatcagcggttagttatgaagaattggtctccttacaatgatgtttccaacaacaaacagtacaattatgtcgaggattcgtttgctcgtagaaatgttggtaataatgctgcaccatcatcatcccagatgccacgaccagccgcaagatctaaccttaattctagattgcataatgatgcatcatatcataattatgatagcattatggctggtacctctgccatgaacattacatctacagctgagaccgggaaggttcctgaaagggttatgcgtggtgatttggacaaaggccaaacaaattatagattggaggatcaacatgtcatagttcaaccaccacagggaagacttccatggggtattcctgcagaaggaagcgttccaatgaatagagttcagagtcaagcaaaacaacacttggaaaacatggatgcaaagcaagaccataagaaattgctccctgatccaaaaaaatctccccttgacaaattcatggacacatcattgccttcaagaaacatggacatgaggtcacagaggcttgacttcgatgatgtctctgagtgcgaaattccttgggaagatcttgtgattggtgaaaggattggcttaggttcatatggagagatttactgtgctgactggaatggaaccgaagtagctgtaaaaaaattcttggatcaagatttttatggcgatgctctggatgagtttaggagtgaagtaggtgaacttttatctgtttctatcttggagttttcctaaataaactattcaattttcatatttactcagttcaattgttgatttattgtttgatatacggatatactttttgacaagattcgaattatgcgtcggctgcgccatccaaatattgttctctttatgggtgctgttacacgccctccgaacttatctattgtatctgaatatattccaaggcggcgaccagaatatgcatcaggcgggaggaatggggcggtcgctggagctgctgctgatccagtttttgatgccggataacgacacacgtcggcaggcggaggagcagatccgacggctggcccgtgacccgcaggtggtccctgcgctcgtccaccatctccgtacggccaagacccccaacgtccgccagctcgccgcggtgctactccgcaagaagatcacctcccactggcccaagcttccccctgactccaaggcatcacttaaacaagcccttatcgattcaatcacactcgaccacaggttctttgctaaatacctatcaccaatccttctacgcatgtctgccttagaatctgcacgctttcaattcactcaaattgtgcatttggccatttgcctaaggaacactttgagtgtattctcaacttattagtttgtgctgatcagaattgaactgagaggtccagctttagtgaaccttcctgtttgcgccccaaacaacatagaattttgatgctctattgtgaccgcacaccacaattgctcatataattagttatatatgtcaattggggagaaattctgcttgcgcttcacccaattttggttgagtactgtgaagattatctgcgcaatatattctcatccatgttataaaatggctgatgattaatctttctgctgaactaaattaatcatggttgctctagagctggttgatccaggccgtgctttgttcaattggttacatgataatgcattgtggtcagattatggtaactgatactgtgatataaatatccgatgacctcccatttctggttacttgtggtctagacctaaatctgct

SEQ ID NO: 202348 - DNA, 3353 bp, Zea Mays
gcacttttgggcgtggagatcttgtgcatgactcgtgcccgcgccaggactcgttgccaatattgcactcttagtgcaaagaatagctgagcttgttacagataatatgggtggacctgtcaaagatgctaacgacatgctcacaaggtggctggagaagagtactgagctgagaacatcgctacaaacaagtttgttgcctattggttgcatcaagatagggttatcacatcaccgtgccctacttttcaagatccttgcctatagtgttgggattccatgcaaacttgtcaaagggagcaattatactggtggtgatgacgacgatgctataaacataattaagatggacaatgaaagggagtttttggttgatctgatggctgctcctggtgctcttattccagcagatatcttaagttggaaaggcaattcgttaaattctaatcgaaaactcggcctgaatcgaacagctggatcatcaagtactgttgatgctaatgtggatcctactgtattgccacttgaacctaaaggtggccaactgcctttgttcagcagtggtgattggatgtcagacattgattctggatatgaggcagcagaaattgcagcttctactcaaacctcttcgggtgtcacaccatatctgtgttctgctggaagtgtttttggcagttcatggatgctggttaatcatgaccaatcagatggaccatcaacttctgctggtacatcatcgcagcagaaagttgtacctcaaagcgagcatcagcggaatttaaaccgccttccagatctgcaggaaattccagagtcaaaaaacctttttgctgaccttgttccttctggggataataagtccaagaaaacttcagtaccattcaaaggaccagatcataggaacaatgagttgcaaaagcgcagagagaacattgtccctaatgctggaagaccacatcagcggttagttatgaagaattggtctccttacaatgatgtttccaacaacaaacagtacaattatgtcgaggattcgtttgctcgtagaaatgttggtaataatgctgcaccatcatcatcccagatgccacgaccagccgcaagatctaaccttaattctagattgcataatgatgcatcatatcataattatgatagcattatggctggtacctctgccatgaacattacatctacagctgagaccgggaaggttcctgaaagggttatgcgtggtgatttggacaaaggccaaacaaattatagattggaggatcaacatgtcatagttcaaccaccacagggaagacttccatggggtattcctgcagaaggaagcgttccaatgaatagagttcagagtcaagcaaaacaacacttggaaaacatggatgcaaagcaagaccataagaaattgctccctgatccaaaaaaatctccccttgacaaattcatggacacatcattgccttcaagaaacatggacatgaggtcacagaggcttgacttcgatgatgtctctgagtgcgaaattccttgggaagatcttgtgattggtgaaaggattggcttaggtacttattttgctaccaagttttgatatacactcttctgcttttgaactactcccttcggtttcgttttaactgaggtcctagccttttttgtgtgaatgttaattattgatgttttacctattataactattttatgaccatgctacccttcattaatgataagctaacgcctcgtttcctccaacgtttcgtttgccgttccatgctagcgactgataacaagcagtacgccagccaaaaacagcaaggcgcgaatcgcgatagaaaaaaaacggcagtgcgacaatgtaaaatagtgtcctgaaaaaaaatgccaagctatgtaaaatatgccatgcaaaaataaacgtgctatggcaagactcgaacccaagtgctcgggtgtttttgctatagcaagcaaccagtaggcatcaaagcagatctggttgaggtggccacgatacatatttaataagggtacaacaggaaatcacacataattaatcactccttggtatgctaaatcatgtcctaaatgtcaattaaaacgaaactggagggagtaataacataaagctgttttggaaactaattttaaatatgctgaactgtatttcaagttgttagctttgatgggtatgctttttattggttgaataggagtgggttggttgcttgaacttgcaccttcctgatctctgcatgaaaactattgattgatttgcttcgttcaataggttcatatggagagatttactgtgctgactggaatggaaccgtaagtagttcattcacccattttagttttttgtatcttgagcttggccatttgttcaagatgttctgtggaagccataaaagaatcagatgagaaaccaaatcatggtcaatgcactgaagttttcatttattttcaggaagtagctgtaaaaaaattcttggatcaagatttttatggcgatgctctggatgagtttaggagtgaagtaggtgaacttttatctgtttctatcttggagttttcctaaataaactattcaattttcatatttactcagttcaattgttgatttattgtttgatatacggatatactttttgacaagattcgaattatgcgtcggctgcgccatccaaatattgttctctttatgggtgctgttacacgccctccgaacttatctattgtatctgaatatattccaaggcggcgaccagaatatgcatcaggcgggaggaatggggcggtcgctggagctgctgctgatccagtttttgatgccggataacgacacacgtcggcaggcggaggagcagatccgacggctggcccgtgacccgcaggtggtccctgcgctcgtccaccatctccgtacggccaagacccccaacgtccgccagctcgccgcggtgctactccgcaagaagatcacctcccactggcccaagcttccccctgactccaaggcatcacttaaacaagcccttatcgattcaatcacactcgaccacaggatgcaaagatttttcaaaggaactttgtgattgatctattaagttacgaggacaattcataccgctatgccatccctgcaaacatacaacagggacttatataggtctacatgatattgatggttgcaatgtagtggtgaaagggatagattaaaataacaaaatttatatgtatagccaggatcatcaatggattacaaaatcttttctcataacaatataacacatttatatataagttatgatgatattatatgtttccgttgcaacgcacgg

SEQ ID NO: 202349 - DNA, 2884 bp, Zea Mays
gaaaagaatacaccgttcaccaatgaaagtgtagcaggtgggccattaatcggtttatggcctagggtaggggcatgtttggggttagggcttccagcatagcaagcggcaagcgctcttttgaccggtctcccgaccccgaagaccacttgccccctccaggccgaggccgccgccgccaactactgacacagtgacacgcaccaatgaccaacccggcggccggccacgaacgataacacgccggcccgcctcgccacgctcccaccctcctgcctccgcgcgccacgaccagccgccccagcagcagatgtcgcctccgtccgtcctgctcctccactcccgcatcccgcttcagccccgccccttcaggatgaactcccgggcagctccgagcagggtcgtcgtctgctccgtcgcgtctaccgaggggttcatctccgcagcgccgatcctcctccccgatggcccttggaaacaggtggaaggcggcgtcactgccgcgaaggggttcaaggcggcgggtatctacagtgggttgcgtgccaaaggcgagaagcctgacttggcactggtcgcctgcgacgtcgacgccactgtagcaggagcatttacaacaaacgtcgtagccgccgcacctgttttgtattgcaagcatgtccttagtacatcgaaaacaggtcgtgctgtgttaattaatgctggacaagcaaatgctgcaactgtaagtgtttataagcaccatgtcatagtcatcagtagcagttatgaactcagtgactgatatttgttgaagtgttaggctgactccagcagttcacccaaagcttacccataagcactgttttgcactgtagactgcactgttcgcagagtggagtttgaatatgggcatgagtatgggtaagttgttggagatagtcttagagtggacgcgctagcgagttcgacccaaaaggttaagctgatgggagaaagtagtttatgcaccttttgggttgaactggttagtgcatccactctaacttggtatcaaagccagaggtctcaagttcgaatcctggcagaggctttatttgtgccttcacccattttattccatgtttgcgcctttctctttggctgcgtttgctcctttctctctggctgcacgtgagtgaagatgttgaagtgtataagtggataaactatcttcttccgtcagcttaagcttttgggtcgaactggctagtacctccactctaacaatattgaggttttgtctcaaatgattgcctatcagggtgatcttggctatcaggatgcagtggatagtgcagatgctgttgccaagcttctcaatgtaagcacagataacatactgattcagtctactggtgtcattggtcaaaggataaagaaggaggcacttttaaattcactacctagacttgtgggctcactgtcttcttcagttcagggtgcgaattctgctgctgtggccattacaactacagaccttgttagcaagagcattgctgtccagactgagattggaggagtggctattagaataggtgggatggctaaaggttctggaatgattcacccaaatatggcaacaatgcttggtgttttgaccacagatgctcaagtcagcagtgatgtctggagagaaatgatccggatgtcagtgagtagaagtttcaaccaaattacagtggatggtgatactagtaccaatgactgtgttattgctatggcaagtgggttgtctggtttatctggaattcaaagtcttgatagcattgaggctcaacagttccaagcatgcctagatgcagtaatgcaaagtcttgcaaaatccatagcatgggatggtgagggtgcaacatgcctaattgaggttactgtaagtggcgccaacaacgaggcagaagctgctaaaattgctcgttcagtagcatcttcttctttggttaaagccgctatatttggaagagacccaaattggggacgaattgcttgctcagttggttattcaggcattcaatttgacgcaaatcgacttgatatttctctgggagttattccactaatgaaaaatgggcaaccactcccctttgacagattgaccgctagcaagtatctcaaagatgctggagatgcccatggtacagtaaacattgatatatcagttgggagtggaggaggaaatggaaaggcatggggctgtgatctgagctacaaatatgttgaaataaatgctgaatatacaacatgagatttatatttgccatgaagaaaaaaaatcttgaaatgatgaatgggtgcgactaccgtcaggagaatgtagtttcgtgttgcaatggcagccttgcggatgtattatttcacgtgagatcaatcagaccaatatttcataagtgtaataatgtgatgaataacgatgggcgcaataacaacactgacgatgccaccttgttcggttctgaatttctgatgatgagaaagcattggtcagacaaataattttggaattcggtatacaaagctctggttctgccgtcctgcgtatcaaactgaagctccacttttatgtcagttggactgatatggtgttaatttcaccactgatacctatatcaattggattccttgacggtttgccagccgcagttctcttgttttaacattttagccttacaaacacaacgtgatgttgatgtagtttgtaacgtggaatgtcagaaataatattgatacaatgttgtagatttgttgttttatttgaaattatgtacattgctttagacgaatctcactaagtcatattcgatttggaaaagccaacgtttctaggttcatgaatagttataatatgagagaataaagatgtgctgtt

SEQ ID NO: 202350 - DNA, 1540 bp, Zea Mays
agacaagataagataagcccaggacaagctatcaccaaacgggagggcgaggggcaacaggacacacacactgacctagcaccagctcgatctcacaggatggttacgctatgccatccgattcggatccgagcaagcgggagcaccgcgagctggcggaggagaaatgcggcggcggcggcgaaggtcctctgctccgtgcagcaaatgccgccgccgccgccggcggccacggctgcccagagcacgatcaagagatcgggaggacggccgtcgttgcggtgagcaaggccaggggaatggagctcgcgggcgcgatcgactcgcagtgcattggcgaggacgcgggacagataagtggcatggacgagccgctggagatccctgtgctgaacgacctcaccatggttctgggctccatagcgcagtcgagagcaaccggcgtggtggtcgacttcagcgagccttcagctgtttacgacaatgtcaagcaggcagcggcgtttggtctgagcagcgtcgtctacgttccgaaaatcgagctagagacagtgactgaactgtcagcgttctgcgagaaggcaagcgtgggctgcttggttgcgccaacgctgtcgattgggtccgtgctccttcagcaagcggctatacaggcctcgttccactacagcaacgttgagattgtggaatcgagaccaaacccatcggatcttccatcgcaagatgcaatccagattgcaaacaacatatcagaccttggtcagatatacaacagggaagatatggattccagcagtccagccagaggccagctgctcggggaagacggagtgcgcgtgcacagcatggttctccctggtctcgtctccagcacgtcgatcaacttctctggcccaggagagatgtacaccttacggcatgacgttgcgaatgttcagtgcctgatgccaggactgatcctggcgatacggaaggtggtgcggttcaagaacttgatttatgggctagagaagttcttgtagtgaacaacaaacaaccaatgcaaaacatcgacaggcaacaggcaaggcagatatcatctgacgtcgcaacaaccaaaacgacagagatttggaaaataaaggctgcacagaagacgtctggggttttgtgtgcaccaggctgcgcagagaacgtctgtcattttgtgtgcaccactacggcactacctgctgagcgcgatttttataaaaaaggcatgggagggagatcatacacaggaaaagtcacgaaggaaaaaggggtcacatggacatacaggtattggtagcataaccaaaacaatggatctgattctgcgattcggttccatcggcatatgcttgttcagaagaaagttgcatcgggacttgaagaaaaggagggtctagtttgcgttttgtaaccgagactgcgtaattcggcatgcgtatggcaatccaaattgcgccagactaatccagattcaattttataaaatggataaaacataaaaaagacatataacattcctctccccccg

SEQ ID NO: 202351 - DNA, 715 bp, Zea Mays
atgatgacccatcagatgacaggacgcactccaccaccaaaccgaggaagacgacgctcagccgctcaggaatcgaaggagcgacgaagctaaaggagggcgcatctaagccgaattgaagcatgagggaatcgattaatcgtccgcctacgccgagcgcggtggaggatcgggacaaggagccttctctcgtagaaatcattaacatcaagtttgtagagagtggagagaaggagaagctgacggagctcctccgcgagcggctcgtcgagtgcggctggatggatgagatgaaggcattctgcagcatcagtgcctgcttcggtgaaggcagaactcctgcaacgtatccggtccttcatggctaccacacttcggtagtcatttatcgtgacggttggagctacatgtaccattgtacgaacactgggaggtcgatcttgttggggaccaagggtgcaggtactgagcatgaaaaggatcagtgtgatcttcatgatgctatcgacatgttcctcgtcagacaggcggttggcgtgatttcaggtgtagcaacacggagttataaccctgaatactgtaccgttaaaggaaccttgtagtttgtaatgctacattgccttatcattgtatcaacagatgctttatttcacaattagaaaacagaaacacaatcttgatataaatgactacactaatgtgcatcatgtgaaac

SEQ ID NO: 202352 - DNA, 3934 bp, Zea Mays
cgcaaggaccaccgcacgacggccaccgcccgtctcctcctcatatccttcccgctgtcgccggcctccatacttggtttgcaaaccatcgcatggccgtggatggggagcacgctcgtgtggcaggcgagtgatcgaaccatgggcacgtaacaaaagcaaggaagccagcgagtgaagaaggacggaagatgtcaaacccgccgccaaagaaggcgatccggaatcccggcggcggcgctggggggccggcgggcggcccgcgggggccggcggggaacacggtgaagttcgcgcggcggacatcgagcgggcggtacgtgagtctgtcccgggaggacatcgacatggagggcgagctggcggcggattacaccaactacacggtgcagatcccgcccacgcccgacaaccaaccgatgatggacccggcgtccgtggccatgaaggccgaggagcagtacgtctccaactcgctcttcaccggcgggttcaacagcgtcacgcgcgcccacctcatggacaaggtcatcgagtccgaggtgacgcacccgcagatggccggctccaagggctcccgctgcgccatgcccgcctgcgacggcaaggtcatgcgcaatgagcgcggcgaggacatcgacccctgcgagtgcagattcaagatctgccgcgactgctacctggacgcacagaaggaaggctgcctctgcccggggtgcaaggagcactacaagatcggcgagtacgccgacgacgaccccaacgacgcgtcctcggggaagcactacctgccagggccgggcggcggcatgatgaacaacagcaagtctctgctggcgcggaaccagaacggcgagttcgaccataatcggtggctcttcgagagctccggcacctacggctacggcaacgcgttctggcccaagggcggcatgtacgacgacgacctggacgacgagggcggccccggcggcggtggaggcgacggtatgctcccggagcagaagccgttcaagccgctgacccgcaagatacccatgccgacgtccatcatcagcccctaccggatcttcatcgtcatccggatgttcgtgctcatcttctacctcacgtggcgcgtccgcaaccccaacatggaggcgctctggctctggggcatgtccatcgtgtgcgagctctggttcgctttctcctggctgctggacatgctcccaaaggtgaaccccgtgaaccggagcacggacctcgccgtgctcaaggagaagttcgagacgccgtcgccgtccaacccgcacggccgctccgacctgccggggctggacgtgttcgtgtccacggccgacccggataaggagccggtgctcaccacggccaccaccatcctgtccatcctggccgctgactacccggtggagaagctggcgtgctacgtgtccgacgacggcggcgcgctgctcaccttcgaggccatggcggaggctgccagcttcgccaacatttgggtgcccttctgcaagaagcacgacatcgagccccgccagccggacagctacttcagcatcaagggcgacccgaccaagggcaagcggcggtcggacttcgtcaaggaccgccgcaaggtgaagcgggagttcgacgagttcaaggtgcgcatcaacggcctgcccgactccatccgccggcgctccgatgccttcaacgcccgcgaggacatgaagatgctcaagcacctgcgcgagaccggcgccgatccggccgagcagcccaaggtgaagaaggcaacgtggatggcggacggcacgcactggcccggcacctgggccgtgtcggcgcccgaccacgccaagggaaaccacgccggcatcctacagcctccttctcccgaccctctgtacgggatgcacgacgaggagcagctgatcgacttcagcgacgtggacatccgtcttccgatgctggtgtacatgtcccgcgagaagcgtcccgggtacgaccacaacaagaaggctggcgccatgaacgccctggtgcgctgctccgccgtgatgtccaacgggcccttcatcctcaacttcgactgcgaccactacatcaactacgcgcaggccatccgcgaggccatgtgcttcgtgatggaccgcggcggcgagcgcatcgcgtacatccagttcccgcagcgcttcgagggcatcgacccctccgaccgctacgccaacaacaacaccgtcttcttcgacggcaacatgcgcgcgctggacggcctgcagggccccatgtacgtcggcacaggctgcatgttccgccgcttcgcgctctacggcttcgacccgccgcgcacaaccgagtacacgggctggctcttcaagaagaagaaggtgacgacgttcggcaaggcggaccagggcgagacggacacgcagtcgctcaacagcaagggggcggaggacttcgacgccgagctcacgtcgatgcttgtgcccaggcggttcggcaactcgtcggcgctgatggcgtccatccccgtggccgagttccaggcgcgaccgctggcggaccacccggccgtgctgcacgggcggccccccggctcgctgacggtgccccggccgccgctggacccgccgaccgtggcggaggccgtgtccgtcatctcctgctggtacgaggacaagacggagtggggggaccgcgtgggctggatctacggctccgtgacggaggacgtggtgagcggctaccgcatgcacaaccgcgggtggcgctccgtctactgcatccccaagcgcgacgcgttcctgggcacggcgcccatcaacctgacggaccgcctccaccaggtgctgcgctgggcgaccgggtcggtggagatattcttctcgcggaacaacgcgttcctggcgtcgcggaggctcatgttcttgcagcgggtggcctacctcaatgtcggcatctaccccttcacctccatcttcctgctggtctactgcttcatcccggcgctgtccctcttctcgggcttcttcatcgtgcagacgctcaatgtcgccttcctctgctacctgctgaccatcaccgtcaccctcatcgcgctcggcgtgctcgaggtcaagtggtcgggcatcgagctcgaggactggtggcgcaacgagcagttctggctcatctcgggaacaagcgcgcacctgtacgcggtggtgcaggggctgctcaaggtgatggccggcatcgagatctccttcaccctcacggccaaggcggccgtggacgacaacgaggacatctacgccgacctctacgtggtgaagtggtcgtcgctgctcatcccgcccattaccatcggcatgatcaacgtcatcgccatcgccttcgccttcgcgcgcaccgtctacagcgacaacccgcgctggggcaagttcatcggcggcggcttcttcagcttctgggtgctggcgcacctctaccccttcgccaaggggctcatgggccgccgcggcaagacacccaccatcgtcttcgtttggtcgggactcatctccatcaccatctccctgctctgggtcgccatcagcccgccggaggccagcgccggcggccgcggtgctggcttccagtttccttgacaacgaccgcctagctttaatttgtcagatgacagttccgccattcctgatgacgtgtacgtgtcacaatttctagtctgcaggcatttcatcatcatgcattacagattccaccatatgatcagtgctgctgcacgtgtgcgatagtgagcaaagtaactagatgtgtcaaacttattgtgttgagttttcactactttttctctggtagggttaatttctatagacaaattaaatggaattgttcagctcgaactgaacagaagaacaaatccaagatgtgtattcatataaaatttattattaagaagttg

SEQ ID NO: 202353 - DNA, 3094 bp, Zea Mays
acatgtggaaagtggcgtccggatgaatcacggagacctgaaattgatgacgcccccgttttcactccgactgaagaggaatttaaggatgcaaccgaatacattgctagcattcgcccgcaagcagaaagatatggaatttgtcgtattattccaccatcttcttggaaacctccgtgtcctctgaaggagaagagtttctggaaatgtacagagttcaatactcgagttcaacaagttgacaagcttcaaaacagggagcccacaaagaaaagaacacaacctcgagttcagaggaaaagaaagagaagaaagagactgaggtttgggatgacacatagacgtcctacttcaagtgcggactctgaagagaaatttggctttcaatctgggtctgacttcacatttgaggagtttcagaaatatgctgatgagttcaagcaggaatattttggaatgaaaacgagtgatgaaatttctatttgtgaaattaagaaccacataaaaacatgggaaccatcagtggaggagattgagggggaatattggcggatagtcataggccctgctgatgaagttgaggtggattatggtgctgatttggacactgcaacctttggtagtggttttgttaaattatcttcttcagatggaaataagcaagatccatatggtgtgtcttgttggaacttgaataatctgccacggctgcctggatctgttatctcatttgaggaagacgatatatctggtgttgttgtcccgtggctttatgtaggaatgtgcttctcttcattttgctggcatgtggaagaccattttctttattctttaaattatatgcattttggtgaaccaaaagtttggtatggtgttcctggtggtgaggcagtaaagctggaagaatctatgagaaaaaacttacccaaactgtttgaagagcagcctgacctacttcatgagctggttacacagttatctccatctgttctgaaagcagaaggagtttctgtttaccgtgctgttcagaagtcagtgtgctgttgagctctatagagatcagcatcgcaagacatcaatatcacatgacaagttattactgaaggctgcaaaagaagctatcagacaactttggatgaacgttttgaattgcagaagtggtaaaggagaatacagatggctgaacacatgtggaaaggatggagtcctgacaagtgcaattaagacaagagttaagatggaggttgctgcatgggaggcaaatgttcctttgaaaagtaagaagatggacaaggattacgattccaatgaccgagagtgcttttcatgcttttatgatctgcacttgtctgctgtcagttgccagtgcacacctgaccgctttgcttgcttaaaccatacaaatcttctttgttcatgcggaatggacaggaaaatcacattctttcgatatagcatggaggagcttaatactcttgtagcagctctggagggtgatctggctgcagtttgttgctgggtacaggaccacctaggcttagtttgccaatcaggttctctgaagcacagcaaaatggactcatgtaaaagcacagaattttcaggattagctattgatgccaatcatgtttctgtatttggtggtattcaaaatcagtgccatgaccttcaaaagccagcaggattccagcaagagaaaggaatccaggataattgtcttaatctcaacatagaagatccaccatgcagttccagaataaaagaagagcatggcaaggataggatgtttcttgatcataggcctttacagaaaactgacagtccatttagaatgagctctgagtgcagttcttcattgtctttatattgttcaggcaacttagtctctccttcaagaaatcaagctagcaattctggcctagcttgcaacactactaagaaactatttggcgttgacattggaaatttagcaaagcattctaatggtcaagttggtcaaatggtaatggcttcagggcaatctgatgcatcgtctaggccaatgtccgggcaccaggttgagccactagactatggaatggtaatgattgacaaaaggtggttcaataatcaagctattttccctaaaggtttcagaagtcgagttacattttacaatatacaagatccgacagcgtggtgcttttatgtttcagaagtcctggatgctggacctcttggaccattgtttaaggtgaccttagagcaagttcctgatgtctctttcactcatacctcaccgatgagttgttgggatagtgttagagacaaggtgaatgaagaaatagaaaacctacaaggaattggaaaatgtggcgttcctaattttttaccacctgattctgtaaacgggctcgaaatgtttgggttcttgtccccacaaatcgtccaggaaatcgaggctctagatccccatcaccagtgtttagactactggttatcgaagtctgcagtagttcctgcgtcaatgaggacacttgagaagctgccaaagaaggctaaactgccagatggacagaaactatctagcatataggagcaacgagcaaggacctgagaaggtaggcgcattctgcaggatgaaatgaagtaatagaataggtaaattaggcctgaatagatagaacatgtcaagtgtcgcctcagaatgactagactaaactggtcaccattgatttacagcttgttcgctgcggcttgctgcggctgcaatccggctgcggctgcggcttctacagtatttttctctctatggattgcagctgcagcagtccaaacagctgcaacagtgtcggcttgtagccagccgaacacgcccttacttttttacagacagcttccaatgaccgtactcattttacattcttttattcataaggatggcaggatggctgatttgtccactgattgtttccctgattagtcaatttcatggcaatcaatatatgggctatttttttttttgtctcagacatagtttgcatgtacaaaacattcggtgctggaaatccgaaagatgtgaagtttattgattatggttaacctaattgtatta

SEQ ID NO: 202354 - DNA, 773 bp, Zea Mays
caaagaagccatagtgaagaaaatttgcgggcagcactcaacaaaatgggcgttggtgggcatgcattggaagaggtaatggataaagtgaagaacaggcattaccaggtagcttgcacattaacctttgaggccacacacggtgtctcctgtgattctggaatcaaccatccaaatcaatatttcagtgaaagccagaaagttctgcgagccaaaaaccaaacaatggagagccaatcgcaatcagcaacctaaattgtgtcagcagctggagaaactatacatttccaaaaaacttaccagcaggtaagcactgaagcaaaattcatccttgatgccaattatgttatcgtcattggctgtacctttggcgcttacctggaatattgttgctccctggtgtttccaaatcccagctgctggcttggcctaaaacgaaaacctccaggctccagctgctagctgtcataccctacaagtgatggcaccgcactctacactagaattgttacctagtgctgcgaacagcagcaggtcaaggcgtctgtagactctgtacatgtaattctcgaaagaaccaagacttctgcatttaatgtaggatcagctgtgctgtgctcttagacctcatccaccagtttatctataaatttatccaaaatactgtctttcattgttctatattgtaaaccgcgttgttcgcgtagtagggtttgaaatggggatgataatggataaactgttggagatagtattattacaagataaaaaaa

SEQ ID NO: 202355 - DNA, 678 bp, Zea Mays
gcagcttctattgtgatgtcacttggcattgaagaaaatttgcgggcagcactcaacaaaatgggcgttggtgggcatgcattggaagaggtaatggataaagtgaagaacaggcattaccaggtagcttgcacattaacctttgaggccacacacggtgtctcctgtgattctggaatcaaccatccaaatcaatatttcagtgaaagccagaaagttctgcgagccaaaaaccaaacaatggagagccaatcgcaatcagcaacctaaattgtgtcagcagctggagaaactatacatttccaaaaaacttaccagcagctgctggcttggcctaaaacgaaaacctccaggctccagctgctagctgtcataccctacaagtgatggcaccgcactctacactagaattgttacctagtgctgcgaacagcagcaggtcaaggcgtctgtagactctgtacatgtaattctcgaaagaaccaagacttctgcatttaatgtaggatcagctgtgctgtgctcttagacctcatccaccagtttatctataaatttatccaaaatactgtctttcattgttctatattgtaaaccgcgttgttcgcgtagtagggtttgaaatggggatgataatggataaactgttggagatagtattattacaagataaaaaaa

SEQ ID NO: 202356 - DNA, 1829 bp, Zea Mays
gccatcgccatcgccgccgtcaagttgctgccgggagtctccggctacatcgcggcggagaagaagaaggttgttgacaagatgcaatcaggtggggccaagaacaatcggcgagctgagttgccaactattggccttgccgagcaagtgatagaggaacttgaaacactgaaagccaaagatgtagactggcagggaaaatgctctggcacagtatatattgctggaagtgagtctgagggtcattttcaattgataaacaaggcgtactctatgttttcacacaccaatccgctccatcaagatgtatttaagagcgtagcaaacatggaagctgaagtcgttgcaatgacagcggctttacttggcagcaaagaaaaatcatctggtggacaaatttgcggcaacatgacatcaggtggaactgaaagcatattattagcagtcaaaacatcacgtgactatatgcgatcaaagaaaggaattacaaggcctgaaatgttgttttgcacaggataattgctgaatcagcacattctgcatatgacaaagctgctcaatacttcaatattaaagtgcggcgtgtacctgtgaacaaagagtttcttgcagatgtgaaaggattcaaacgatgcataaatggaaacaccataatgatggttggatctacaccaggatttccgcatggtttaattgatcctattgaggaacttggggaactggcttcgcgctatgacatttgcttgcatgttgatttatgccttggtggctttgtgctgccttttgctcataagcttgggtaccctattcctccctttgatttttctgtcaagggtgttacatccatctcatctgatgttcataagtacggattagcaccaaaaggcacaagcattgtcctgtacagaaatcatgaaattagaaagcatcagtttgttgctgttactgagtggaccggtggcctttacgtttctcccacaattgctggaagcaggccaggtggattgatagcgggagcttgggctgctatgatgtctctcggactgaacggctacttggacagtacaagccgtatcatggatgtttcaaagaaaatacaaagagggattggagagatcccagggttgtttgtgatagggaaaccggatatgaccgttgtggcgttcggctcagacgttgtcgacatatttgaggtgaacgacataatgtcatcaaaaggttggcatctcaatgctctgcagagacctaacagcttgcatatctgtgtgacccttcaacacacgactgtttacgaccaattcctgaaggatctgcaagactctgtcaacactgtgaaagcaaacccaggcccgattagcggcggaaaggctcctatctacggcgccgcagggaagatgccggacagaggcacggtgagggagctgctcgtggagttcatggacagctcttgctgaattcattatggcttgtgagaagaatttgttcttgtacatgaaacttctatttctttttcaactgaaaaggcagagctcctaccatttgtttaaaaaaaaaacattatggcttgtgaaaaacagtcgcagggctgtgatttgttggcctaggtatacaaagttgtcattaggaaaagcggggaaagtcattgaggcgatacaaccacatgtattcacgattacaagaagtttgtccgtatgattgtatatcaatatcacagcatgcatacgcaatgtgtctggttatatatttatctgttcctataaaacattggttgcatttcacgcgtactcacccccgtgaattctcggtaaaataaagatagaaatgactaa

SEQ ID NO: 202357 - DNA, 2174 bp, Zea Mays
ccttgatgcacttgtgggtttcagtgttcactttgatattccaacaaaggtcacattgctagactcccagattggttcctaacaatgagggcacatgaacgagctgccagtttggctcttgcctgtctgagcttggctccacttctggttaacgtaaacccaaatgtgaatgtggtattgacagcatgccttactgtctatgtgggttgctaccgatctgtgaagccaactccaccttctgagaccatgtccaaggagcatgctatgcggttccctttagttggaagcgctatgcttttatcactgttccttctattcaagtttctctcaaaagatttggtcaacgctgtgctcactgcctactttttcattctaggcattgttgctctctccgcaacactgcttccttctataaaacgttttcttccaaaagagtggaatgataatctcatcgtctggcgggctccattcttccactcactctcggtggagttcacaaagtcccagattattgcctcaatacctggatttttcttttgcttgtggtatgcgtcaaagaagcattggcttgcaaacaatgtcctgggattggctttctgtattcaggggattgagatgctgtcattgggatcatttaaaactggagccattctcttgggtggactttttgtgtatgacattttctgggtgttcttcactccagttatggtcagtgtggctaaatctttcgatgctccaataaagcttctgtttccaactgcagacgctgaacggccattctccatgcttggccttggtgacattgtaatacctgtaatatcagcctctgtaggagtgtcaagcgtcaactttgttctacatgattaaattatgggcgtgttcggctggctacaagccgacactgttgcagctgtttggactgctgcagctgcaatccatagagagaaaaatactgtagaagccgcagccgcagccggattgcagccgcagcaagccgcagcgaacaagctgtatatgtaccaaactgctacatattggaacattcttagaatgtctataagaagcatttactgatatgctgtatagagctcttgcttttgttgattcatggttacttttggtatctatgtattctttgtagcactcaacagagaatcaaatgttgtaactagaattcgtcccactggattgagatcatgctctgcaccatattgttaggtccatgctcagatatacttttaggccatcccatcttgttgcatgcaatgcagcctaaagttattggcaatacaaccaatatgtgtgtccattcctggtccctggaggaccacacaatagtgtatcaacagaaaacaatttgtaatttctactgattcaagttgcatatcattccagagcttctcagcagacaatctcagccccctagtttaagtctacgtcctcaggggcgccctttacttggttgagatctaaccaatacaaaactgtgatatttgaatctgaatttaggcagtttccgagtcattgagcacgtaatatgttatgtgtacttttgcttgcaggtatattcgtcgcacttgccttgcgctttgatgtctcaagaggtaccaagaagcgttacttcaacagtgcatttttgggatacgctgtgggtatgacggtgaccatcgttgtaatgaactggtttcaagcggcacagcctgctctactataccttgttcctggtgtgattggttttgtcgctgttccctgtctgtggtatggagaagtgaaacagctactggagtttgacgagtcaaaaactgagtcagaggaaggcagtacagaagaggagcaagatgatgatagttccaaaggcaacaaaaaggtagagtagcaggatttagttccggaggtaaaaggacaggaaaacagttttcgtgtaatgtcgtctggcagctaaaaaaacgggcctgatgaccctctaataccggattcgctcgccttacttaagaacttagaagaaatggttcagcatgatacaagttttattttattttttgtttcgttttgcggattatttgccctgggctgttacttgcgatgtactccctgattcgttgaattcaccagaactgagacttgaccgacgcatatattcatcacgtatacacgcacatgtgtgtgttgttgcc

SEQ ID NO: 202358 - DNA, 1582 bp, Zea Mays
ctctgatccttacttcctttcccggcgcctgatcgtacaaagctgcgcgcttgctcgagtttgaagaaaaacttagccttttcggtttccttggccgttcggatctggcttccccgtcggcgccggcgtgcagagtttgcacggcggatccgtttcggtgcgggtgtagagggcgtgtgcgagggccgagtggggttcaacttcactgtgaatacgctgacgctacgagaagtcatcacggaaggggtctcgaagcaaggtgcaaagactcacctgccgtctctgatgggctttgctggctgggtatccatgctgctcttcctcctggtcgccggtgctgtagcaaatgaccagatcttcaccacttcaggtgtgccatttgggcggagttcgcgtgagccaagttaccgcgtcgaattccatcctgttgattcaccattccatccagagaatggtcaagaatcggtaccaatggctagtcatgatgggaaacgttataaatgctttctaccagttgaagaaactaaaaccatgaagtcaatgcttccgcaaaatgcaactaatgttataatagaaagtgaaaggagaattaagccaaaggagccagatgagttacttgaggttctcaaggaccagtgcttctacaggcatgaaggttggtggtcgtatgaattctgttatcatgggaaaatcagacaggtccatgtagacgacgataaggttatccaagaatttgttctaggcgaattcgatgacgacgcgactgctgcataccatgaaaatatcacttctgagttagttgacgatgaccatcatgtgaaagatatatctcagaggtatcatgttcacttgtatacaaatgggactgtatgcgatctcacagatattccgcgggagacagaggttagatttgtctgctcggagcctactgtactgattagttcagtcaaggagatctcttcctgcagatatgttgtaacgattcaaagtcccatgctttgcaaaaacccgaagaaaaacgaaccctctccatccactgcaatgagttgcctgctagagcggaatccagcgcggaggatgactcgcttccaaaagaagctcagatttccatcatccccgatcaggatgagctacatgatttcccagcctatgctacttgatttgcctccaataattatgtttgatgtagaaaaaaaaacaccattttggaggcgcaggggcaactgagcaacactatgtattaactatctcgtagatactacagcagaggctccttgtaaagcaggttgagacgatcattctgcagttcttattatataggatgattacgaaggtaacatgtttgggacagtaacatttgcttgaaatgtatatagtctacaacaagaataatgccagcattcttgaaatgtaggtgtgcgagcacttttacacgaagtaatattgctctggtgtgacgaacgatctgttgtcggttgagatgaaaaggcgttcgccttctattaagaatgtaaatggtacaaaaggatgtaaatggtacggatattatctgttcgtatttgaatttaatccggtttgagat

SEQ ID NO: 202359 - DNA, 1449 bp, Zea Mays
atcaaaggcgtaaactcggcgtagacggagactgcagacgcccggaccacaggaacaccgaagtaccgaacactaccggccacacgctcgagaataggcggcggtgcaggtcctcctccatctctgtcgtgggttcaacttcactgtgaatacgctgacgctacgagaagtcatcacggaaggggtctcgaagcaaggtgcaaagactcacctgccgtctctgatgggctttgctggctgggtatccatgctgctcttcctcctggtcgccggtgctgtagcaaatgaccagatcttcaccacttcaggtgtgccatttgggcggagttcgcgtgagccaagttaccgcgtcgaattccatcctgttgattcaccattccatccagagaatggtcaagaatcggtaccaatggctagtcatgatgggaaacgttataaatgctttctaccagttgaagaaactaaaaccatgaagtcaatgcttccgcaaaatgcaactaatgttataatagaaagtgaaaggagaattaagccaaaggagccagatgagttacttgaggttctcaaggaccagtgcttctacaggcatgaaggttggtggtcgtatgaattctgttatcatgggaaaatcagacaggtccatgtagacgacgataaggttatccaagaatttgttctaggcgaattcgatgacgacgcgactgctgcataccatgaaaatatcacttctgagttagttgacgatgaccatcatgtgaaagatatatctcagaggtatcatgttcacttgtatacaaatgggactgtatgcgatctcacagatattccgcgggagacagaggttagatttgtctgctcggagcctactgtactgattagttcagtcaaggagatctcttcctgcagatatgttgtaacgattcaaagtcccatgctttgcaaaaacccgttattccaggaagaaaaacgaaccctctccatccactgcaatgagttgcctgctagagcggaatccagcgcggaggatgactcgcttccaaaagaagctcagatttccatcatccccgatcaggatgagctacatgatttcccagcctatgctacttgatttgcctccaataattatgtttgatgtagaaaaaaaaacaccattttggaggcgcaggggcaactgagcaacactatgtattaactatctcgtagatactacagcagaggctccttgtaaagcaggttgagacgatcattctgcagttcttattatataggatgattacgaaggtgtgcgagcacttttacacgaagtaatattgctctggtgtgacgaacgatctgttgtcggttgagatgaaaaggcgttcgccttctattaagaatgtaaatggtacaaaaggatgtaaatggtacggatattatctgttcgtatttgaatttaatccggtttgagat

SEQ ID NO: 202360 - DNA, 1456 bp, Zea Mays
atcaaaggcgtaaactcggcgtagacggagactgcagacgcccggaccacaggaacaccgaagtaccgaacactaccggccacacgctcgagaataggcggcggtgcaggtcctcctccatctctgtcgtgactccagggttcaacttcactgtgaatacgctgacgctacgagaagtcatcacggaaggggtctcgaagcaaggtgcaaagactcacctgccgtctctgatgggctttgctggctgggtatccatgctgctcttcctcctggtcgccggtgctgtagcaaatgaccagatcttcaccacttcaggtgtgccatttgggcggagttcgcgtgagccaagttaccgcgtcgaattccatcctgttgattcaccattccatccagagaatggtcaagaatcggtaccaatggctagtcatgatgggaaacgttataaatgctttctaccagttgaagaaactaaaaccatgaagtcaatgcttccgcaaaatgcaactaatgttataatagaaagtgaaaggagaattaagccaaaggagccagatgagttacttgaggttctcaaggaccagtgcttctacaggcatgaaggttggtggtcgtatgaattctgttatcatgggaaaatcagacaggtccatgtagacgacgataaggttatccaagaatttgttctaggcgaattcgatgacgacgcgactgctgcataccatgaaaatatcacttctgagttagttgacgatgaccatcatgtgaaagatatatctcagaggtatcatgttcacttgtatacaaatgggactgtatgcgatctcacagatattccgcgggagacagaggttagatttgtctgctcggagcctactgtactgattagttcagtcaaggagatctcttcctgcagatatgttgtaacgattcaaagtcccatgctttgcaaaaacccgttattccaggaagaaaaacgaaccctctccatccactgcaatgagttgcctgctagagcggaatccagcgcggaggatgactcgcttccaaaagaagctcagatttccatcatccccgatcaggatgagctacatgatttcccagcctatgctacttgatttgcctccaataattatgtttgatgtagaaaaaaaaacaccattttggaggcgcaggggcaactgagcaacactatgtattaactatctcgtagatactacagcagaggctccttgtaaagcaggttgagacgatcattctgcagttcttattatataggatgattacgaaggtgtgcgagcacttttacacgaagtaatattgctctggtgtgacgaacgatctgttgtcggttgagatgaaaaggcgttcgccttctattaagaatgtaaatggtacaaaaggatgtaaatggtacggatattatctgttcgtatttgaatttaatccggtttgagat

SEQ ID NO: 202361 - DNA, 1495 bp, Zea Mays
atcaaaggcgtaaactcggcgtagacggagactgcagacgcccggaccacaggaacaccgaagtaccgaacactaccggccacacgctcgagaataggcggcggtgcaggtcctcctccatctctgtcgtgactattctagtttctgcgcatgccctcacggatctttagactccagggttcaacttcactgtgaatacgctgacgctacgagaagtcatcacggaaggggtctcgaagcaaggtgcaaagactcacctgccgtctctgatgggctttgctggctgggtatccatgctgctcttcctcctggtcgccggtgctgtagcaaatgaccagatcttcaccacttcaggtgtgccatttgggcggagttcgcgtgagccaagttaccgcgtcgaattccatcctgttgattcaccattccatccagagaatggtcaagaatcggtaccaatggctagtcatgatgggaaacgttataaatgctttctaccagttgaagaaactaaaaccatgaagtcaatgcttccgcaaaatgcaactaatgttataatagaaagtgaaaggagaattaagccaaaggagccagatgagttacttgaggttctcaaggaccagtgcttctacaggcatgaaggttggtggtcgtatgaattctgttatcatgggaaaatcagacaggtccatgtagacgacgataaggttatccaagaatttgttctaggcgaattcgatgacgacgcgactgctgcataccatgaaaatatcacttctgagttagttgacgatgaccatcatgtgaaagatatatctcagaggtatcatgttcacttgtatacaaatgggactgtatgcgatctcacagatattccgcgggagacagaggttagatttgtctgctcggagcctactgtactgattagttcagtcaaggagatctcttcctgcagatatgttgtaacgattcaaagtcccatgctttgcaaaaacccgttattccaggaagaaaaacgaaccctctccatccactgcaatgagttgcctgctagagcggaatccagcgcggaggatgactcgcttccaaaagaagctcagatttccatcatccccgatcaggatgagctacatgatttcccagcctatgctacttgatttgcctccaataattatgtttgatgtagaaaaaaaaacaccattttggaggcgcaggggcaactgagcaacactatgtattaactatctcgtagatactacagcagaggctccttgtaaagcaggttgagacgatcattctgcagttcttattatataggatgattacgaaggtgtgcgagcacttttacacgaagtaatattgctctggtgtgacgaacgatctgttgtcggttgagatgaaaaggcgttcgccttctattaagaatgtaaatggtacaaaaggatgtaaatggtacggatattatctgttcgtatttgaatttaatccggtttgagat

SEQ ID NO: 202362 - DNA, 1465 bp, Zea Mays
atcaaaggcgtaaactcggcgtagacggagactgcagacgcccggaccacaggaacaccgaagtaccgaacactaccggccacacgctcgagaataggcggcggtgcaggtcctcctccatctctgtcgtgactattctagtttctgcgcatgccctcacggatctttagactccagggttcaacttcactgtgaatacgctgacgctacgagaagtcatcacggaaggggtctcgaagcaaggtgtgccatttgggcggagttcgcgtgagccaagttaccgcgtcgaattccatcctgttgattcaccattccatccagagaatggtcaagaatcggtaccaatggctagtcatgatgggaaacgttataaatgctttctaccagttgaagaaactaaaaccatgaagtcaatgcttccgcaaaatgcaactaatgttataatagaaagtgaaaggagaattaagccaaaggagccagatgagttacttgaggttctcaaggaccagtgcttctacaggcatgaaggttggtggtcgtatgaattctgttatcatgggaaaatcagacaggtccatgtagacgacgataaggttatccaagaatttgttctaggcgaattcgatgacgacgcgactgctgcataccatgaaaatatcacttctgagttagttgacgatgaccatcatgtgaaagatatatctcagaggtatcatgttcacttgtatacaaatgggactgtatgcgatctcacagatattccgcgggagacagaggttagatttgtctgctcggagcctactgtactgattagttcagtcaaggagatctcttcctgcagatatgttgtaacgattcaaagtcccatgctttgcaaaaacccgttattccaggaagaaaaacgaaccctctccatccactgcaatgagttgcctgctagagcggaatccagcgcggaggatgactcgcttccaaaagaagctcagatttccatcatccccgatcaggatgagctacatgatttcccagcctatgctacttgatttgcctccaataattatgtttgatgtagaaaaaaaaacaccattttggaggcgcaggggcaactgagcaacactatgtattaactatctcgtagatactacagcagaggctccttgtaaagcaggttgagacgatcattctgcagttcttattatataggatgattacgaaggtaacatgtttgggacagtaacatttgcttgaaatgtatatagtctacaacaagaataatgccagcattcttgaaatgtaggtgtgcgagcacttttacacgaagtaatattgctctggtgtgacgaacgatctgttgtcggttgagatgaaaaggcgttcgccttctattaagaatgtaaatggtacaaaaggatgtaaatggtacggatattatctgttcgtatttgaatttaatccggtttgagat

SEQ ID NO: 202363 - DNA, 1353 bp, Zea Mays
atcaaaggcgtaaactcggcgtagacggagactgcagacgcccggaccacaggaacaccgaagtaccgaacactaccggccacacgctcgagaataggcggcggtgcaggtcctcctccatctctgtcgtggtgtgccatttgggcggagttcgcgtgagccaagttaccgcgtcgaattccatcctgttgattcaccattccatccagagaatggtcaagaatcggtaccaatggctagtcatgatgggaaacgttataaatgctttctaccagttgaagaaactaaaaccatgaagtcaatgcttccgcaaaatgcaactaatgttataatagaaagtgaaaggagaattaagccaaaggagccagatgagttacttgaggttctcaaggaccagtgcttctacaggcatgaaggttggtggtcgtatgaattctgttatcatgggaaaatcagacaggtccatgtagacgacgataaggttatccaagaatttgttctaggcgaattcgatgacgacgcgactgctgcataccatgaaaatatcacttctgagttagttgacgatgaccatcatgtgaaagatatatctcagaggtatcatgttcacttgtatacaaatgggactgtatgcgatctcacagatattccgcgggagacagaggttagatttgtctgctcggagcctactgtactgattagttcagtcaaggagatctcttcctgcagatatgttgtaacgattcaaagtcccatgctttgcaaaaacccgttattccaggaagaaaaacgaaccctctccatccactgcaatgagttgcctgctagagcggaatccagcgcggaggatgactcgcttccaaaagaagctcagatttccatcatccccgatcaggatgagctacatgatttcccagcctatgctacttgatttgcctccaataattatgtttgatgtagaaaaaaaaacaccattttggaggcgcaggggcaactgagcaacactatgtattaactatctcgtagatactacagcagaggctccttgtaaagcaggttgagacgatcattctgcagttcttattatataggatgattacgaaggtaacatgtttgggacagtaacatttgcttgaaatgtatatagtctacaacaagaataatgccagcattcttgaaatgtaggtgtgcgagcacttttacacgaagtaatattgctctggtgtgacgaacgatctgttgtcggttgagatgaaaaggcgttcgccttctattaagaatgtaaatggtacaaaaggatgtaaatggtacggatattatctgttcgtatttgaatttaatccggtttgagat

SEQ ID NO: 202364 - DNA, 1311 bp, Zea Mays
ctcatggagttaccgggtcacatatgttcgcattttcggattggtccccttagatgttggccaggtggtttatgcctctcaagatcgattggtgatcaggatgtaggtgaatttattattccggttccttatgtgaagcaaattaagctgtctaatgctggaggccgtcttattatttcaagcgacggtgtttgggatgctttgactgcagaaatggcttttaaatgtgcacgagggcttcctcctgaggccgcagctgagcaaattgttaaagaagcagttgaagcaaaaggattgagagatgatacaacttgcattgtcattgacataatatcaccagagaaaccaaaacgcactatacaatctcaaagaacgccaggaaaaggccttgtgcttctaaaaaatttctttttaaggaaaacaacatctgactcgttgtctctccctgataaggataattatcctgagccagatttagaggaggtctttgaggacggatgcccatccctttcaaggaggcttaattctgagtatcctgtccgagacatgttcaaactttttgcatgtgcaatttgtcaaattgacttggaatctggccaaggcatatccatacacgagggtttgtcaaggccagggaagctgcgtccctgggatggccctttcctttgtcacagctgccaggaaaagaaagaggcgatggaggggaagcgccattcacgagattcctcgtccagaaatagcgggtcaagtgaatcgtgactgaagccgagaatcatcttgaggcaaacgcctagcggtgtgacgagctaattatcgttgctgctgttatcttgcagcactttctcatggattaccattgaattgagacatgttggaagtcgccatgcctatatatatgttggagctgtacggtactggaccgtagagcaaatccaatcgcctctagataccacaccagcgtcttcggcagggcttgtgacagcagcttatgcagggaatgatgacaagaggttattattagtgaagaatgtcgacagtggccaacagtcatgtaaattattcgtcgtgtagaggtgcaagtgacaaatagccacggttttgtaattctcaactaggattaggtattgagacctgtaattcgtctgggcagacctcaaactgaaggtcaacaacgtagcctggccctattgtagaatgtatgttgccctacaatctaaatgattcaacgctgcaattaaatctaagatctttgcagaccaccataattctttttcggttactatactagtgtaatgtttgtccaatcatatt

SEQ ID NO: 202365 - DNA, 2088 bp, Zea Mays
gccgcgggctcccgtctcccccctcctgccgcttttcgggatttcgtttcgtttcactcgagggcgaggctggatttgcgcgtcctgtaccgagcgttccatgtgacaggtcgctcgcttgcccccgccccgccgctccccctcctcgtctcgcaaagcaaccgcaacgcgccgagccggcagcggggtccccccaaaagacgaggcagcgagcaaggtaggcaggcaggcaggcagcgggctggcggaaaagactagtgcgcgctcgtgctcgtgctggtgctccccgaccagactagaccagcttgctagcgccagcaaggcgagcggcgatgctcgcacgatctactacagctgccgccgcggccgccgccgggatctgcctgtgattaaggatgtcggcgtcgcggagcgggaggcggcggaccgctgttcgatgggcacaacgggagcgccgccgcggtgtacgccaaggagcacctcctcggcaacgtgctcagctgcgtcccgaccgatctggcctgggacgactggctcgccgcgctgccgagggccctcgtcgcggggttcgtcaagaccgacaaggatttccagactaaagctcattcctcggggacaaccgtgacgcttgccataattgatggctccgttgtaactgttgcatctgttggtgattcacgttgtgtccttgaagctgagggatccatctactatttgtcggctgaccatcgcttcgacgctaatgaagaggaggttggacgtgtaaccgaatgtggaggtgaagttggaagactaaatgtcgtcggtggtgctgagattggtccccttagatgttggccaggtggtttatgcctctcaagatcgattggtgatcaggatgtaggtgaatttattattccggttccttatgtgaagcaaattaagctgtctaatgctggaggccgtcttattatttcaagcgacggtgtttgggatgctttgactgcagaaatggcttttaaatgtgcacgagggcttcctcctgaggccgcagctgagcaaattgttaaagaagcagttgaagcaaaaggattgagagatgatacaacttgcattgtcattgacataatatcaccagagaaaccaaaacgcactatacaatctcaaagaacgccaggaaaaggccttgtgcttctaaaaaatttctttttaaggaaaacaacatctgactcgttgtctctccctgataaggataattatcctgagccagatttagaggaggtctttgaggacggatgcccatccctttcaaggaggcttaattctgagtatcctgtccgagacatgttcaaactttttgcatgtgcaatttgtcaaattgacttggaatctggccaaggcatatccatacacgagggtttgtcaaggccagggaagctgcgtccctgggatggccctttcctttgtcacagctgccaggaaaagaaagaggcgatggaggggaagcgccattcacgagattcctcgtccagaaatagcgggtcaagtgaatcgtgactgaagccgagaatcatcttgaggcaaacgcctagcggtgtgacgagctaattatcgttgctgctgttatcttgcagcactttctcatggattaccattgaattgagacatgttggaagtcgccatgcctatatatatgttggagctgtacggtactggaccgtagagcaaatccaatcgcctctagataccacaccagcgtcttcggcagggcttgtgacagcagcttatgcagggaatgatgacaagaggttattattagtgaagaatgtcgacagtggccaacagtcatgtaaattattcgtcgtgtagaggtgcaagtgacaaatagccacggttttgtaattctcaactaggattaggtattgagacctgtaattcgtctgggcagacctcaaactgaaggtcaacaacgtagcctggccctattgtagaatgtatgttgccctacaatctaaatgattcaacgctgcaattaaatctaagatctttgcagaccaccataattctttttcggttactatactagtgtaatgtttgtccaatcatatt

SEQ ID NO: 202366 - DNA, 2173 bp, Zea Mays
gtcttccgtacgcccacccgacaccaagctgtaaactcgagctcccccacactgcgagtccgccgaaaactccaaaagctctgcgctttctgccccctcctccactcctcgagatcccatccatggtggcggccttcgcacctcgcccccggatctgagcccctccagctactgcgggatattttctccagcgcctccgcttcgctggtccgaccgccgcacggttctctgccgtgcaagattcgccgctcagttttcgtggagtcggtagttgtccgtggctcggccatgtgttcctgaaacgggcctttgatgccagtggtgggcgcccacgctctcctgccgctatgtggaagcagtttctcggcaaaatctcgcggaagtcccccaaatcaggcgggcgcgggggctcgcggccggcgaagtcgccgtcgtcgcgtggcgccgccaatggggcgccgccggagctgagcgcttcgtcgccggcggcggcggcgtcgcccttccccccgccgtccggggcggagaccagggaggacgtgttcctccgcaagctcaacgtctgctgcgtggtgttcgacttcgcggccgagcgggggaaggactcgccggaggtggaaaggaagcggcaggtgctcgtgtccctcgtcgactgcgtctctgaggcggaggagcccctcacggaggcgatgctctcggcctgcgtacgcatgttcgccatcaacctcttcagggtcttcccgcccaagctccggtccggtgccagtgccgccaccgacgaggacgagccgttctttgacccctcgtggtaccacctccagggagagggaatgcttgaagacagtgctgcacaggatatacgggaaatttatgggcaatcgcccgttcattcgcaaggctgtgagcaacatcttctataggtttgtgtttgagacagatcaccacaatgggattgccgagctactggaggtgtttgggagtgtgattaccggctttgcgaagccattgaaggaggagcataagttgtttctatggaaggcattgattccacttcacaaaccaaagacggttggagtatatttaccacagttgacatactgcattacccagtttatcgagaaggaaccaaagctcacagggactgttatcagaggcctcctgaagtactggccggtgacgaacagtcagaaggagatgatgttcttaggagagttggaggaggtgctggagctgacagaaatggcagatttccagaagtgtgctgttcctttgtttcgcaggatcgcacagtgcctgaatagctctcattttcaggttgctgaaagggccttattcctgtggaataatgaacatttgttcgacctgatctcccaaaactgccaagttatcctgccaatcatctatccagctctggagaggaatgcccgttggcactggaaccagtcagttctaaatgttacaatgaatgtcaggaaaatgttctttgacatggatgagagattgctgctggcttgtcagaccaattttcaagaggaggaaaagaagcgggctgcatctgaggagcgaagaagacttgtgtgggagcatctcgagaggaatgccgcatttcatcctgtaaccggagacattggctttgcagttcctcctacatctgctcctctggttgctcccactatgacatgattaataatgggctcatatgtaattcataccgcctgattgttagctaggtttgggtgtttggtgttgccccaggaattttgttgcctttgtaagccccttgtgaagtctgtaattaatagatgctggtttgacaatgaatgcttgattctttggtgtactctcaagttatggtcatatctttgtatctcaagataatgcctagttctactttgctggaggggtgaaaaggtgtttccttagaaaatttccaggggagctgaacagctgatgctatgcacatattgatgcatttcttttatcttttgggttctcatggatctacacaaatgtcatgtttaatgggtgaacatgaaactgaggtaagttcatatcacttatcacgatttgataagtccaatgtttttttttcttttttactcgtaagggatcggaatttgcaactagaatttgtagttgttcatggaaattgtaagtcctgtcaggccatctt

SEQ ID NO: 202367 - DNA, 1741 bp, Zea Mays
caacagttggctagctttgtggtttgttggagctgtataagttgcaacaaccaaggcaattctcaactaatttcccattctgaatttggtctcttgcctgcattcttcaagattcagttgtctgcgtcagtttacccaattttacagccaagccaaccatctagtatttctctttgcctcgtgttggtgttggccaggagggagcgggagagcatgaagcaacgatttccaagcagcagcacgcgttccaagtctgaggcagctgtgcaaacgcgggcatcaagagcaccatcgcccaaagtcaatcctgctactccaggtccaggcccaggggtgaaggccagaccaagatcggctgccgccgccgccgccgccaccaccatggcagcgacgaggaggcagcctgccgtgcctatgcccgtgtggaagtcggagacggcagaggaggaggtggtgcggctgcgcggggaggttgatgccttgcagaaagaggtgcagcgtctgctccgcctcaacgcagagctccggaccaaccatgacgctgcagccagcaacagatcacaacctcccagcaagatttcggcttccggagtagtcgttgcaccgccgccgccgccgcccccgccgccaccgccaccgccaccgcacctaaagcagcgaggagtccgtttcccttcagctccgagcacaagcccggcgagcaaggccactgcgctggtcgacatgtacaactcgctgcaggccagcaacaagccgtcaaagcgcacagacaaaagtagcagccatagcagcatcgttgacgagctgcagaaccgctccaggcacttgctagcgacgtggaaacaaaagccgagttcatcaactatctcatcgacagaatccacactagtacctacaccggcgtggaacaagtactcacctttgtggactggctggaccaacaactctcgactctgactgatgagtcagccgtcttgaagcacttcaactggcctgagaggaaagccgatgcgcttcgtgaagcggcatctgaataccgacacatcaactgtcttctaacagagatctcttcctccttaagaagagacgaagacgatggtggtagcagtagcactctcaggaagatttcaagcttgctagataaattggagaagagcatgagcagactggtggatctaaggagatcggcgatgccgtcctacaaagagttgaggattccaacgaactggatgcttgattcagggatggcctcaaagatgagattggcatcggtgagtcttgcgaaactgtataccaagacagtcctcaaggaactggatgcaagtgggacgacggggaacaaggctgctctggttgctcagagcgtgcgcttcacctacagagtccaccagtttgctgggggccttgactgcgaagcaatgcatgcctttgaagagctaagaaggcgggttcagttgctctctcaataaccctattcatctctgtcttcttcttattataacagtatatgtcagatcaagtcttgtcggaaatggagagggggaaaatcatgctgtggtttctcatcgtgtatggaaaatctggttatccactgattttatttctctgatccatgtcaagtacatttggagtcggtactggtttctacagtgttttgtctctatagactgcagctgtagcagtccgaacagctgactttaagctgaaacgaacagcctaccagttctctagtagtagtatt

SEQ ID NO: 202368 - DNA, 2220 bp, Zea Mays
ccgcgtccacgctatgacgtcgccctcgtaatcaatctccgcctccctgcctgcttaccccgaccccgtcggcatctcggagaatcgcggcggtcaaagcccagcctaccccacctcgcgccgcgtcgccgcggtttccgcgggccagtgctctcgggagtcgggagctcagatcaggagggacgggctaggtagggttcgcgagcgagcgagggtgctgccgtccggcgccggtgtccgagtagcaagaggagagatggacgcgttcctgcagaggctcaagcggttggacgcgtaccccaaggtgaacgaggacttctacaagcggacgctctccggcggcatcgtcacgctcgtcgccgccgtcgtcatgctgcttctcttcatctccgagaccaggtcatatttttattcagcaacagagactaagttagttgtggacacatcaagaggagaaaggctacgagtaaattttgatattacttttctgagcattccttgcaccctcctcagcgttgatacaatggatattagtggagaacagcaccaggacattgtacgttctgaagttatctttctttgtgatgctttgttaatttattttttgatttttcatataatgattctattgttttcttttccttgtagaggcatgacatcgaaaagatacgattagatgcacatggtaatgttattgaagcaagaaaagttagcattggtggagcaaagatcgagagaccattgcaaaaacatggaggaaggctcgacaaaggtgaacaatattgtggtacgtgttatggtgctgaggagtcggatgaacaatgttgtaattcttgcgaagaagtccgggaggcatataagaagaaaggatgggctctgacaaatcctgacctaattgaccagtgcgcaagagaggattttgttgagagagttaaaactcagcaagatgaaggctgcaatgtccatggttttttagatgtcagtaaagttgctggaaattttcactttgccccaggcaaaggtttttatgaatcgaacatagatgtgcctgagctgtcattacttgaaggtggtttcaatattacccacaaaataaacaaactgtcctttgggacagaattccctggtgttgtcaatccacttgatggtgctcagtggacacagccagcttcagatgggacataccagtatttcataaaagtgcagtctttcttcgtacatgaatgtttcagttctatggtttaacgctgcataaagaacttaccgagttttctgtccaggttgtccctacaatatacactgatataagaggacacaatattcattcgaaccagggatggaaatgttcgtccgaaaccccaacctggagtttttttcttctatgatttctcacctataaaggtgatattcacagaagaaagtagatccctactccactacctgacaaacctttgtgctatagtgggaggtgtgttcactgtctcgggtatcatcgactcgtttatataccacggacagaaggcactcaagaagaaaatggagctaggtaaatacagatgatcaacatcgaccttgtactggccccatcgtttccaagttttgtggcatgtaaggaggggatatgcctgctaaatacgacaagatgccacttacattgctgaggttgcaatttgcaaggccatcagactgatgttattgcacgtgagctgatcagataacatgtaaaaagacaatgaatagcctggtctggggggagtgctttgatgtccatcattgttcactgacattgaaatggcccgaaccggtgcggtggagtaatttgagttcggaggtggatatatcatagatcatagaatgtttcttatgaaagtttcttcaaggaaacagcttcactcatggtgtcacccatactttgttcatttggtagtgctgctcttcaggaagaactggaacgattcgattgattatgttgcttttttcctaatgaccttggaggattcccttttctcgttttattttcagcagagctatccagtaaatatatattaactgtaatagtgattttttagttctacctacaattcattaggggtgggccaatgcaaaggtatactacaaattagaagatagcttattatgattgatttcattagattaatataagcctagctgtttggtaacctatattattggaggtgttgaaaagaaaaattaaaataa

SEQ ID NO: 202369 - DNA, 1155 bp, Zea Mays
ggctgtttcagaattaatagcccccaagatttttttattccacgcccgtttctaaaaagggagagtatggccgccccagcgtcgccgtactgttcccagtaaagacggctactccttccctctccccccttctccccctccgtcttcttcccccaggggcatccgtgttttcactttttgctcccccacgttgaaccttgatcctcgtgctccctttcttgattctttctccgtaggatctcttgctaggagtagcctgccccgtgtgcgcgctcgcacggacatgcttgtttccgcgtcttgaaaggcgagaaaaagtggagatgggcgcttgcgcttcggtacacaaggacccggggcaccccaagaagcagtttcttgactctcccaccaaggcgaaggccgccaacgggaagggtggcgggggcggcggtgttgctccggttggtgatggcttcggtgatctcaagtccaaggtcgacgctgaggctgagcagctgcgggcagagtttaaccccaagaacccggattctggtagcaaggatgaagtgttcttcgaatctcgagcctggttagattccgactgcgaggatgacttctacagcgtgaatggagatttcactccgtctcgtggcagcacacccgtctaccagcccagagcgcagacggtgatgagcagcatctttcagccagacacgcgcagttccaaatcaccggagccttctccgaccggacggaggaagctcgctgagctgctgcaggaggcaatgcaagacggtcccgaagaaagcgccgacgaggaggagcagcagcagcagtcgctatctgctgccgctgatgggaagccgccggtgtctgagtccacgtccagctccgcttgcagcaccgtgccgactccggtcgcagtcgccaagagccggaaggagaaggcgtggtacaccggacgctgttgcctgccgagctttgttcatagcctgaccttagacgagagtgagagggggcagaagatgagctctaggccatgtgctgtttgactgtggggctccagtgccctcctgagtcctgccctgagctgtatttagcgcgatatgttatctgaatgcccgattgggacgctgaagctactgtattgagagtactatatagtaaaaagaa

SEQ ID NO: 202370 - DNA, 1065 bp, Zea Mays
ggctgtttcagaattaatagcccccaagatttttttattccacgcccgtttctaaaaagggagagtatggccgccccagcgtcgccgtactgttcccagatctcttgctaggagtagcctgccccgtgtgcgcgctcgcacggacatgcttgtttccgcgtcttgaaaggcgagaaaaagtggagatgggcgcttgcgcttcggtacacaaggacccggggcaccccaagaagcagtttcttgactctcccaccaaggcgaaggccgccaacgggaagggtggcgggggcggcggtgttgctccggttggtgatggcttcggtgatctcaagtccaaggtcgacgctgaggctgagcagctgcgggcagagtttaaccccaagaacccggattctggtagcaaggatgaagtgttcttcgaatctcgagcctggttagattccgactgcgaggatgacttctacagcgtgaatggagatttcactccgtctcgtggcagcacacccgtctaccagcccagagcgcagacggtgatgagcagcatctttcagccagacacgcgcagttccaaatcaccggagccttctccgaccggacggaggaagctcgctgagctgctgcaggaggcaatgcaagacggtcccgaagaaagcgccgacgaggaggagcagcagcagcagtcgctatctgctgccgctgatgggaagccgccggtgtctgagtccacgtccagctccgcttgcagcaccgtgccgactccggtcgcagtcgccaagagccggaaggagaaggcgtggtacaccggacgctgttgcctgccgagctttgttcatagcctgaccttagacgagagtgagagggggcagaagatgagctctaggccatgtgctgtttgactgtggggctccagtgccctcctgagtcctgccctgagctgtatttagcgcgatatgttatctgaatgcccgattgggacgctgaagctactgtattgagagtactatatagtaatcaagtggataataggcactcgttaaatcctgtggagaccatgtgtaaaaagaa

SEQ ID NO: 202371 - DNA, 3281 bp, Zea Mays
tctttctatatcacccccttggtgtcaggtgtgcacgcacctaccggatgcgtaacgtatgcatgcaggatttccacggcatgtgttgagactgcatgcgcggccgactggtctggtcagcagcgcacccgtatgtaccagcagaagctgaatcgtgcacgtacgcatgtagccatcctttttttttttttggctaccccctcacctcacctcgcttcaattcactgatatatatgcttgcatagacgagcttccagatgacttgaccacccccggccggccctttcttcattctttccttcctttcttcctcctgctgctcttgccgtttcagtgattattagctgctgtacgtgcgtgcgtacattgttctctctgctgacacccatacacgctgtagcttctacacataccagttcgatcgcaagctatagcatggggcttcaatcatcgcccatgctgctgccagcgccgacggcaacggcggccggcggcgggtcacagtggcgcacggctgtggcaggcccatggagttcccgcatcaagaagaagacggatgcagtcgccgtccccgcggccgccggccggtggagggcgcgggcgcgggcccaggacaccagcgaatccgccgccgtcgccaaaggttcgtccctaacgcccatcgtgagaaccgatgccgaaagccgccgcacgagatggcctacggacgacgacgacgctgagccgctggtcgacgagatcagggcaatgctgacgtcgatgagcgacggggacatcagcgtgtcggcgtacgacaccgcctgggtcggtcttgtgcccaggctggacggcggcgagggcccgcagttcccggccgccgtgcggtggatccggaacaaccagctccccgacggctcgtggggcgacgcggccctgttctccgcgtacgaccgcctgatcaacacgctggcgtgcgtcgtcacgctcaccaggtggtcgctggagcccgagatgcgcggcagagggctctctttcctcggccggaacatgtggaagctagcgacggaggacgaggagtccatgccgatagggttcgagctcgcgttcccttccctcatcgaactagccaagagtctgggcgtccacgacttcccgtacgaccaccaggctctgcaggcaatatactcgagcagggagatcaaggtgaagaggattcctaaggaagtgatgcacacggttcccacatccattctccacagcctggaagggatgcccgggctagactgggcaaggcttctgaaactgcagtcgagcgacgggtccttcctcttctcacccgcggccaccgcgtacgctctcatgaacaccggcgacgacaggtgcttcagctacatcgacaggacagtcaagaaattcaacggaggagtgcccaacgtctaccccgtggaccttttcgagcacatatgggctgtcgatcgcctggagcgtctcgggatctcccgctacttccagaaagagattgagcagtgcatggactacgtgaacaggcactggactgaggacgggatctgctgggcgaggaactccgacgtgaaggaggtggacgacacggccatggctttccgcctgctacggctgcacggatacagcgtctcgccagatgtgttcaagaacttcgagaaggacggggagttcttcgccttcgtggggcagtcgaaccaggcggtgacggggatgtacaacctcaacagggcctcccagataagcttcccgggggaggacgtcctgcaccgtgcagggcctttctcgtacgagttcctcaggcggaaacaagccgagggagcgctccgtgacaaatggatcatatctaaggacctgcctggagaggtagtgtacaccctggacttcccttggtatgggaacctgccgcgcgtggaggccagagactatctcgaacagtacggcggcggcgacgatgtctggatcgggaagacgctctacaggatgcctcttgtgaataacgacgtgtatcttgagctggctaggatggacttcaaccattgccaagccctacatcagcttgagtggcaaggcctgaaaaagtggtacactgagaaccggctcatggatttcggagtggcgcaagaggatgctctgcgagcgtatttcctggccgccgcttccgtctacgagccgtgccgagccgcggagcggcttgcgtgggccagagcggcgatacttgccaacgccgtctctacccatctccgtaacagcccctcattcagagaacgcttggaacactccttgcgttgccgccccagtgaagaaacggatggatcatggttcaactcatcaagtggaagtgacgctgttcttgtgaaggcagttctgcggcttaccgactcgttagcgcgagaagcgcagccgattcacggcggtgatccggaggacatccacaagctactgagatcagcttgggctgaatgggtcagggagaaggcagatgcagcagacagcgtgtgtaatggatccagtgctgtggaacaagaagggtcgcgcatggttcatgacaagcaaacgtgtctgcttttagctcgaatgatcgagatcagcgctgggcgagctgcaggtgaggctgcgagcgaagatggtgaccgtcggattatccagctcactgggtctatatgtgacagtctcaagcagaagatgctagtatctcaggaccccgagaagaacgaagagatgatgagccatgtcgatgacgaattgaagctgcgtatacgagagttcgttcagtatcttctgagactcggtgagaagaaaaccggcagcagcgagacaaggcagacctttctgagcatcgtgaaaagctgttactacgctgctcactgcccgccgcatgtggtagacaggcatatttccagagttatttttgaacctgtttccgccgcaaaataatggtaatggtagatgtgaatgtgatatggagataagagagagagaaaatgttgatagtggaaattggcgttgatgtcgcctccacattctttacgcaaaagtagcgtctgttttggataaaaaaaatccagtttctgtaaattatagaataaatcaatcgctgtgtcccaaactctaaaatgttattctgtgaagtatggaataaatcggtcactatacctatcttgtggatgcaatccagatcctgaagttctaaaatatcgtttatgcgcttcatgaacttgtctccagtttggaactctcaaaatgccattttttggataccgaacttgtcagaaggatag

SEQ ID NO: 202372 - DNA, 1498 bp, Zea Mays
ctccgagatgcccgggcgacaccgcggatcgctcgccagtcgccacgcggctccaccgtcgccaaacgtccccgaccgacggacgcggcgacgcacgttctcacacaccttccgccgcgggccttcttctcctttccgctcgcctcttctccacctgtctgtccgctctactgtatagaggaaggccgaaggccgtttccatttctcgaagccgcggcagcacgcgtcctgcttgcctcccggtcccggatcttgcccaccccgcaacgcgccgccacctccgccaagcaagcttgatcatattcaagatggggaaggacaaagaagctgccaatctgaaggagggggagacagagatcaaggccaagtttgttgagaaggaagaggccaaagactcgggtggtggcgcagggtctgtgggaggaaagagtaaagaggggaagaaagacagagagagaaaggaggaggagaagtcggtggagcatgaatatggcgaaggcgatgagaaggcgatcaagaagaaggataaaaaggagaaagacaagaaaaagaaggaagatgatggagattcagggaaggcagagaaagataagaaggataagaaggctaaagagaaggacggatcagagttgaagggttcaagtggtgagaaacaagagaaaatcaaagataagaaagagacaggagatggcaaagatgtgggggaggaagataaacgcaagaagataggaaacaaggacaaagataagaaggataaaaaggccaaagaaaaggatggatcggaaccaaagggtgacaaggatgaagatggtaagaagaaagaggccgatggcgatgaagacgaagaaggtaagaaggaggacaaggaaaagaaagagaagaagaggaaacacaagggtgcaaaggagaagacgattgatccggtgaagctgaaggcaaaactggagaagattgatgccaaattgcatgacctacaggccaagagagaagacatcctgaggcagctgaaagagctggaagaaggcggcaagggaaacgcgaatgaagaggagcctgcacatgtgcaggaggacaaagggaaggatgttgtgcctgcacagatactggaacaggttggagagagcaaggtcgaggaacagaatcctgttgccacagcctgatcttgtggagatcctgtagcggttcatgtaacaataactctgatctggttttgcacacatgcattacacagtgtaaaggaatacagccatatagggcgtgtttgaatgcctggatgggctgagacacgtgcatcttcaattgtttgtttgcatagaccgcatgggagcttggagcttgtgcgctgcagccaggccatggggaaacgaaatctaggctcttgctcgacctccagcctccggtgcatgtggggtgggggtggattggtggttggggaaggccgggagggttgtctcttgtctgccgtgtaaatgcatgtactctgtttttttattagtcg

SEQ ID NO: 202373 - DNA, 1589 bp, Zea Mays
gacgtcttgtgcttccacgccggatgccacaatagacaaggaagaaaggttcagattgtgagacaaaggatatatgtaccatatcactgctcctctatcaagcatcagttctcattatgtatatagttttaccattatgacatccattttccttatcaaatgaatatccattttatccctaggaagaatgggataactgttagtattaattaggtatgtgatattcgtgaaaggcactgtgactttactacatgaatatgctcaaatcactttaatataaaacccttcatataacacatggtaacagaactgttacttatatttcctctaaccattctagacgatttaccctacaatctttcagttccttcattaatacttttcttttcaattcatgcctgtgttcttatacaacacacaaatgactacttatgttttatagctccgtctagtttagaatcgtagaatttcctgcccgtgcaagcattagattgttttttggattggttaactaacagttatcgataattatttgttgtagtcactgttgttttcttttttcctttttttacttgattcaaggactgctagtggccgaagggcactgcctcctccttttgcttttacgtgctgcaagaccattgttatgtatttcatgtttattattacttcgaatacggctagaatacaatgttttaacaaggtatggtgatggattactctcggttgttgattaatcttgtagcacgtcctttactaaatattgtgtttaaatggcgaaggatgatggagatacaatgaacacgaaagtcattattatttttagccttggcgctatatgtttgttagcagaggttacatgattcttctttcggaataggcggaaaaatgagagccttcactgttgtttatttagtagaggttgagatcgtatttcaaattattaagaacactattgttttagattctttcacatattcatacgtttgaaaaaaaaccgcattctccatgatgttttggtcatagagaatgtaataaaagtccattaaatagcattgatactcccatactatagtattttcctttgtgttgaggattaatgcaaccacagtgttgtggtttgaacactaatcgagaaggcctctttactgttgtctaggtcagttataactttcatatatgtgcttccatacactttaatgttagtagtacaattgctgttagcagattaaaaacttagttaaacatatgcgtactcacatatttattatttctctttacatcaaggattcccatggacatgtggttgtccattacacagatgttgatacaaatgttcagctcctttttaggtaccgttgctcatgttgcagcccgaggttgtagctacacaggaacacaaattcagaaagataaaagtacaagcgtgaagcacgagccagtacaagtcagcgtgaacagtacgggggtactgtttcatctatttataggcacaggacagagcatgtgaggaattacagttatgccctttacatttactattgacttatagaaaatctatgaggactagatagccttttcctctttaa

SEQ ID NO: 202374 - DNA, 2333 bp, Zea Mays
ccaccaacgtgtgcttgcaagcgcggcaggagggagcagagccggagatggggcggtgctggtgctgctgccggtacctaaagctgctatgcttggttctcctcccaccgctcaacttatgcctgcaccacagctgctgctccaatctgtccccattctcaccgccgaagattcgctccattttctatggcacctagagttggccttcaggggaagaccgctccacaggccaagaagtcgtggggttccgagattgccagtagcggtggccggagctcctccgatgtttccacgccatatgctacgacgtcttgtgcttccacgccggatgccacaatagacaagcatattaagactgtcatgtctctcaatctctgcccatacttgaagccaatctggctgatcacaaaagacagtcatcaccctttaccgcacgtagcagcccagtattcgagattaaatcctgaatttgattgttaaaagatatcatcatatcaacgaagctaggccacaagactagcctgatacactgtgatgcctgcaccacttaaggtactactttcctgaagaaagtcaatttgctgacaatgcaatgaccattcccttgcctattcacatggagaaacttgatgttcatatagaaataaatatttctagacacttcaagtaataaaaatacaaaacaacttaagactacgtatgaatggctcaaaataatcattagtcacaaagctgaaaatacaccgtgacctaacttttttaattgtggtctcacagtttgatgtatatagtgcaaaatttctttcaatctttgcttacttcaacttctttctataaagtggacataatctaactttccaggcacatgccctagaagatgagatcttttcttcattgcatgaattcttgagaacctttatttgaattctagtgttaatttcttttcaattgattttctccctgctgatatacatgcttataaagaaaaataaaattatttctttttcacttatatatgtttaaccttttcatgagagcagctttatatattcacgatttcttgttgggttgccaacgttatgtttatattgaccaactttattaggacactgcattctggtatttggcacttaacagttccactttgcaggaagaaaggttcagattgtgagacaaaggatatatgtaccatatcactgctcctctatcaagcatcagttctcattatgtatatagttttaccattatgacatccattttccttatcaaatgaatatccattttatccctaggaagaatgggataactgttagtattaattaggtatgtgatattcgtgaaaggcactgtgactttactacatgaatatgctcaaatcactttaatataaaacccttcatataacacatggtaacagaactgttacttatatttcctctaaccattctagacgatttaccctacaatctttcagttccttcattaatacttttcttttcaattcatgcctgtgttcttatacaacacacaaatgactacttatgttttatagctccgtctagtttagaatcgtagaatttcctgcccgtgcaagcattagattgttttttggattggttaactaacagttatcgataattatttgttgtagtcactgttgttttcttttttcctttttttacttgattcaaggactgctagtggccgaagggcactgcctcctccttttgcttttacgtgctgcaagaccattgttatgtatttcatgtttattattacttcgaatacggctagaatacaatgttttaacaaggtatggtgatggattactctcggttgttgattaatcttgtagcacgtcctttactaaatattgtgtttaaatggcgaaggatgatggagatacaatgaacacgaaagtcattattatttttagccttggcgctatatgtttgttagcagaggttacatgattcttctttcggaataggcggaaaaatgagagccttcactgttgtttatttagtagaggattcccatggacatgtggttgtccattacacagatgttgatacaaatgttcagctcctttttaggtaccgttgctcatgttgcagcccgaggttgtagctacacaggaacacaaattcagaaagataaaagtacaagcgtgaagcacgagccagtacaagtcagcgtgaacagtacgggggtactgtttcatctatttataggcacaggacagagcatgtgaggaattacagttatgccctttacatttactattgacttatagaaaatctatgaggactagatagccttttcctctttaa

SEQ ID NO: 202375 - DNA, 1487 bp, Zea Mays
atcacagaccgaaaaggaaaatagaggcgagacaaacgagagcgagcgagagagaaacagttcgagctcaccccggcgagagccgactctcaagcgataaggggcgtgggcgtcgtcggcatggagagcgagatggcggaggagtcaccggccgcagtctcagcggcggcggcgcgggcccggccactggaggcggtcgcggaggaagggcaggaggtggcggagcagcacgaggtggcagttggctccaccaagaccatggagcgcgtggcggccgcgaagaagttcatcgaggaccactaccgcgcgcagatgaagaacctccaagagcgcaaggagaggcgcttgattttggaacaacagctagcttcttcacaagttccgagggaggagcagataaacttaataaaggatttggagagaaaggagactgaatacatgagacttaaaagacacagaatttgtgtggatgactttgatctgctcactatcattggaaaaggtgcttatggacaggttcaactatgtcgggaaaaatccactggtaacatttatgccatgaaaaagctgaagaaaactgatatgcttgtgaggggtcaggtggagcatgttagagctgaaagaaacttactggcggaagttggtagccactgcattgtgaagctatattattctttccaagatgctgagtacctctatcttatcatggagtatcttcctggaggtgacatgatgaccctcctgatgagagaggatactctgactgaaaatgtggctcgattctacattgctgagactattcttgccattgaatccattcataaacataactacattcacagagatattaagcctgacaacctacttctagacaagaatggtcatatgaaattgtcagattttggattgtgtaagccaattgattgttcgaagttgtcaacactgaatgaaaatgaaccaatgactgatgaaaaccttagggagtctatggacatcgatcattctctctctgatactgcaaatggtaggaggtggagaagtccaaatgaacagcttcagcattggcagaacaacaggagaaaattggcattttcaacagtcgggacacctgattatattgctccagaggttctactaaagaagggatatggactagagtgtgactggtggtctcttggtgcaatcatgtatgaaatgcttgttggttatccaccattttattcagatgatccactagttacatgccaaaaggtttaagtcttggccactgaacggttcatctttccatggtgcatattatcacactgtaatagtatggttagattattttaattgctattgcagctaagttcatatcttataattactttcaccttttggccttactgaactttttcatgcaatttttatgtaagcaagtttatttcatgctcaggccactctaatctgttattgtgggaaataaaataaaaacgagtacctaaaga

SEQ ID NO: 202376 - DNA, 888 bp, Zea Mays
catttttgaaattggtcgtgagccgctgccgcacacggcgagaggaatagggttgctccccccgttgccgactcgccgccgcatcgccgcgagcgtcatgaagaccttcccgctgtccaggggaagcaccatctccctagccctcttctccgacgtctccaacagccgggagctcctggacttgatgcagtcagggaagctggagccggcggtcgctctcctcaacgcgtcactgataacagagtccctgaagcgctgtgggatctctgataatacaacttacatccttgctgcttgttttgatgcttccgacgaggagatgaaggcagtggagaagctcatcagtggcaccgagattgatctcacagaactggaaagaagagcaaaccagccacagatcttgaagcattacaagatacctccccaagaactatcgatatctacgttgccggacgcaattgtatgcaggattgctgctcgagatgctctctgaagtctcaataatcaccgtaagctatgtggtttcaggatgtaggtctctctctaccacatgtatggtgtgacattgacagcacaagtgcacaactagaattaggtatccgaaataccattgatgttcgcattccctgcaagcaacccagaagcacattgcgtggttaatttttcttgctaaactgtgctgcaaagcaacagttatgttaatttctcccttgaattcgatgaagcttatatgatacaatctagcaaaggaatgtatgatgtatctgatgtggcgtgtaagtttctggtgcatagtgctttgtctataggcgagatagttccctgtttttgtatggaaattggagttagattgtgattgctgtggtaattccatcgattgcatgtgtg

SEQ ID NO: 202377 - DNA, 1065 bp, Zea Mays
aaagatgacacagcagaatacagagccgacaggttaaatacatctcatccggggcatttttgaaattggtcgtgagccgctgccgcacacggcgagaggaatagggttgctccccccgttgccgactcgccgccgcatcgccgcgagcgtcatgaagaccttcccgctgtccaggggaagcaccatctccctagccctcttctccgacgtctccaacagccgggagctcctggacttgatgcagtcagggaagctggagccggcggtcgctctcctcaacgcgtcactggtgccggatgtgttccctatcctcgcggcagcgcttaaggcgctgttgtccaagactagggagtcactgaccacaaggactctgcactctgagctcgtctacaactactcggggtccaaacatataacagagtccctgaagcgctgtgggatctctgataatacaacttacatccttgctgcttgttttgatgcttccgacgaggagatgaaggcagtggagaagctcatcagtggcaccgagattgatctcacagaactggaaagaagagcaaaccagccacagatcttgaagcattacaagatacctccccaagaactatcgatatctacgttgccggacgcaattgtatgcaggattgctgctcgagatgctctctgaagtctcaataatcaccgtaagctatgtggtttcaggatgtaggtctctctctaccacatgtatggtgtgacattgacagcacaagtgcacaactagaattaggtatccgaaataccattgatgttcgcattccctgcaagcaacccagaagcacattgcgtggttaatttttcttgctaaactgtgctgcaaagcaacagttatgttaatttctcccttgaattcgatgaagcttatatgatacaatctagcaaaggaatgtatgatgtatctgatgtggcgtgtaagtttctggtgcatagtgctttgtctataggcgagatagttccctgtttttgtatggaaattggagttagattgtgattgctgtggtaattccatcgattgcatgtgtg

SEQ ID NO: 202378 - DNA, 2266 bp, Zea Mays
ggctctgcgacttctccgggcaccgcttgcacgccatcagcgccatccccgatacctcaacttgcatatcgcgcgccgccatccaccttgcccatcgtgtgtcgcatgcccaaatctcatatttttatgccccacgcagcctaggccatcccaccgcagagcaggaaaaccctagcgtacccacggaccattgctggcccacatggcatcccggcctgtggccacatccatctcggcgcctcgcccgccacacccaacacgctgcaccgccgctgccgcttctcctcccccaccgcaccatcgccctgagtaccaccgcacacgccgccggggccgcatctctccccgtcagggcccagccgaacactgtcgtcgcctccacctccgcgtttgggccaccgcaagagttcagggctcctctagggttcgagatcaaatccggccagtagagcagcatcctcagcaccacgctcaccatccccctctacctcggcaccggcgtcttcaccctcgggtacacaccacgccttttctcaccatctgagcattgccaaggagctcctctccatccccgatggcaccacttcagattcctgatcagcaggagagtcgttgaggctgagacgacggcacgaatgcggcaaggagcttcagattcactgccattagaaacttgcaggtgaggaaggagagggtccaagttcctgacctctgcatcgactgagagggtccaagttcctgacccctgcattgactaattatctttgagtttcatcattatgttgaaattggtatgcgttcaaaatactcaattgattctcacggctaccgtgcctcctagcgaaacttgcttttcgttggagtatctggcgtagtaatggaaaaaattaccttctccctttgagggttcagtccatttcgttctctataattgtcacctacccttcccgagcctacttttgttgctactataagaataagaatgaaataagcttcatctctatttgtttctgatatgaattgtgtagcttagagttgtctcttaacttacaatcttacattggtgtaaaacagtgaccacactaaaagcacaaatgcaaggttttacagaccagttgtgatgctactaccactaacatgtacaaataggaaaggcaagaaaatggcttagagcaagtatttttaaagaaaaagtgatccatttaagaaacctttttattaagttactcctgataccagctcctcattccgcgagtgtcttcagcttcactttctctatctgttgtacgcgggtgtctcttcgtcttgtgtgtgagttggatgagaactagacaactggtaggaaccactctctgtttcagtttctgtttgtgtttcacttcagttcaggttgtctgcgctcttctcttagggatcgagaatcatagggaggttcctcgcttctataagaaatatgtgcctttttgtttcattttccttgtggagttgtagttcagttcagttcatcttcgtgcatggggagtgcttggttcgattgttcacagccataggtgctacagattcgtctatggcgaagacagaagtttttgttttcatgatgttttcatggaagatggcgagaagctctccacccttatcatagttaactcttttgattaagtgattaaccaatttagtaacacatatttaatgttttagcttgtttggtttagatatggaggtccgtcagtaattttgtaattttttgtattatctttatctggaaactaagttgtatgtagtgacaggtaagaaatactgtggtggtttggacctcagttattggccagatgaagggcggaggccattatcagatcctcgtccacctttgggctactgctgataagaggacgagtgtcgtacacctctccaattccccccttcaatgtggtcagtgctgaatcatctacgtcatacagtgaacaagggcatactgatgagagaagggatgacatggatttttctcattcgagcatcaggttttgtgcgctgattatggtgtggtcgttgctccggcgaacgagaaggcgtaccgcagggccatgaagtgcgcctgcctagccgctgcggccgttctccacgaggtccggtcactgagcgtttaccattttatggcccactatctccctccttgtcatggcttggtatggcgtggcgcctggattttagccgctgatcggaattgtcgagtgcgtagggtacaattgggatcgggagattggggcac

SEQ ID NO: 202379 - DNA, 1543 bp, Zea Mays
cgacttctccgggcaccgcttgcacgccatcagcgccatccccgatacctcaacttgcatatcgcgcgccgccatccaccttgcccatcgtgtgtcgcatgcccaaatctcatatttttatgccccacgcagcctaggccatcccaccgcagagcaggaaaaccctagcgtacccacggaccattgctggcccacatggcatcccggcctgtggccacatccatctcggcgcctcgcccgccacacccaacacgctgcaccgccgctgccgcttctcctcccccaccgcaccatcgccctgagtaccaccgcacacgccgccggggccgcatctctccccgtcagggcccagccgaacactgtcgtcgcctccacctccgcgtttgggccaccgcaagagttcagggctcctctagggttcgagatcaaatccggccagtagagcagcatcctcagcaccacgctcaccatccccctctacctcggcaccggcgtcttcaccctcggattcctgatcagcaggagagtcgttgaggctgagacgacggcacgaatgcggcaaggagcttcagattcactgccattagaaacttgcaggtaagaaatactgtggtggtttggacctcagttattggccagatgaagggcggaggccattatcagatcctcgtccacctttgggctactgctgataagaggacgagtgtcgtacacctctccaattccccccttcaatgtggtcagtgctgaatcatctacgtcatacagtgaacaagggcatactgatgagagaagggatgacatggatttttctcattcgagcatcaggttttgtgcgctgattatggtgtggtcgttggtgagactgcaacgccctctgtaatcatctctctgacaagttagattatgtgctgaaatttctgttatttttgttggattgtattgttgtgaaagggggcatagtacgatgaattggggactgaaagagcatagcagagcagagggcctatgtaatataattttttatgtataaattgtgcaaaaacaaattacctcttttgggtttcaatcatttgacaacccttggaccctgacattatattagtttacttaccttgaccttgtgatgagttttggaatatttggaggaggttcacatggaccgaacagcctgtttagtagctttgcttcagcacagtaaactatatttagaacatttggatggtaaactattccaatcgttgttgttacatggtatcagaggatttggcagtcaagtcaatgcctcaattgtgagatatagaaatcgatgataatatatgtcagctccggcgaacgagaaggcgtaccgcagggccatgaagtgcgcctgcctagccgctgcggccgttctccacgaggtccggtcactgagcgtttaccattttatggcccactatctccctccttgtcatggcttggtatggcgtggcgcctggattttagccgctgatcggaattgtcgagtgcgtagggtacaattgggatcgggagattggggcac

SEQ ID NO: 202380 - DNA, 2404 bp, Zea Mays
caaccacgatgccaaggcacacgccatacccttctcgcaagcagtcaagctcctcccccaatccttccccgatgctgcggcgcaacagcgtgtgcgaaaccgagtccgaatcccgacgcgctccggctcccatggagcttagattttaggtgtgagctgctccccctgtatggatccagatgttctcgtggagccgtaagcagtcctcctccggctcgtcctccggccgccgccgcggcggggcggacgcctccatggactccagcagccgcggcggcggcgggagcgggagccgcggacggagcccgcggttggatcgccgcaacgcagtgaagcgcatcgagtacgaggcgagcgcgggggcgtccgcgtcgtggtcgtcctcgtcctccgcggagcagcagcgctcgccggggctccggccctcgcgctccctggaccttgcccccggcgcggacctccgaatcagcgggagcgtggagggggaggtcgacgagctctgccgcagcctggggctctcggggcccgaggatttcgccgtccccgtcgcggcctgggaggcgcgcaagtcgcggtctaactccgacctcctcccgcgctcccgcctcgacccgtccacacccgccgacgaaacctcgccgattgcgcgggcggtctcggcgcccggtgctcagccgactcgctccttccctgcccccattcccgaggagtcactccactcttcgcctgcttccaccgccaccgagtcggcggaggagcctaccgttgcggcgcccgaggagtcacccaacgctgcccctgcctctgctgtcgtggctcccgtcgggggtttgcccctgccttcgccaaggaggggaggcggggagtcgtttgctcccagggatcagggaagtgaactgggactgggaggaagtgtcgacagtcgttgcaattcggacaaagaggaagagaatgatgttgaggatggggacgcagcggtggagggcgagctgaaggaattgaggataggagagactttcgaggggttcactggaacttcttcattgtcgacgacgaatgatgatgacgcgtccagtacaaccacggaggccatgttcatcatttcaccgaatggcaagttcaagcggaacattaaatcatggatgcgtggtgctcttctgggaagcggctcatttgggatggtgtacgaggggatcagtgatgagggtgcattttttgctgtgaaggaagtatctttgcttgaccaaggaagcaacgcacaacaatctattgttgcacttgagcaggaaattgcactcctcagtcagtttgaacatgaaaatatagtccagtattatggaactgacaaggaagaatccaaactctatatttttattgagcttgtcacacaagggtctctttcatccctctatcaaaagtataaactacgagaatcacaagtctctgcatacacaaggcagattcttaatggattggtttatctccatgagagaaatgtggtccacagagatatcaaatgcgccaatatattggtccatgcaaatggatctgtaaagcttgcagattttggattggcaaaggagatgtcaaaaattaatatgctaaggtcatgcaaaggaagtgtttactggatggcacctgaggttattaatcctaaaaagatgtatgggccttcagctgatatatggagccttggctgcaccgtgttggaaatgctaacccggcaaataccatttcctaatgtcgagtggacaaatgctttcttcatgattggaagaggggaacagcctactattcccaactacctgtctaaggaggcacaagattttattggccagtgcgtaagagttgatcctgagagccggccttctgcgtcacaacttctggagcacccatttgttaacagaccactgcgagcttcatttgaatcttcgtctccaccagccatctgattctagtattgatataatggggtgtttctcgttgaggccaatgctcaggtcacgtactcacgtgttgatcttcatgatctacactactggttccagaatggaattacgtgggcttgtttaggatgtagtttagtagctgtagtccgtagggttggtgggcagcattgctctgtggttttgtattctttggggtgttcttcattgggcaaagggttttcttcctggttattacgtagatttgtgtaaacttgtaggtaaaagggctgcaattgcctctgggctctggtgtaggtttagccgatgtttgtgaatgtttgacatcgccattctttacgtaaatggttttgttgctcaaaaaagcatccggagcattgaatccccctggtgttacttttttcttcgtcgcatcggaaactgtttttttccttctaatttatcatccacgggattat

SEQ ID NO: 202381 - DNA, 1485 bp, Zea Mays
gtgctgacttctcactcggcagcccccctccccgctcctcttcctcgcacgtcttcgcgttccaacggatgtgacatttcctcgcgaatccacggctcctcggatgggatgtgaaaactagaagggaagaacagcctcctaatggataggaacaacgaactggaagaggtggtcccaaatgactcggaccctcttattgggagggagaacagggagtcagagtcatcggtagagctgtcaccgccacagccagcaactgtgaacctgctggagattgaggatgaagagaccgacggctcttctgctgcgtgctgccgcatttgccttgagaatgagtctgagataggtgatgagctaatatcaccttgcatgtgcaagggaactcagcagtttgttcaccgttcttgtcttgaccactggcgatctgttaaggaaggatttgcattttcacactgcacaacttgcaaagctcagtttcatcttcgagtggaaacctgggaggataactcatggcgtaaaatgaagttcaggatctttgttgcaagggatgttctactcgtgtttcttgctgtacagcttactattgctatcatcggtgcgattgcatactttttagacagggatggaagtttccggaacagttttagcgatggttgggaccgcttcttgtcaaagcacccaatacccttctactattgcataggtgttgtggttttctttgtgctgcttggattcttcgggctgatagtacactgctcatccttcaacgacaaccaggatccatgcctagctgggtgccggaactgctgctatggttggggcatcctagactgcctgcctgcttccctggaggcatgctttgccctggttttggttttcgtcgttgtgtttgccatccttggcatcgcctatggcttcctcgctgcaaccatggcggtccagaggatttggcagaggcactatcacatcctgaccaaaagggagttgacaaaggaatacgtggtggaagaccttcacggcaactacacagcgccgaagcttgatccggagcatgaggaacggctgaagatgctgaagcttctttagagagaaagaggtgcacgccttcctgtatccgtggcaagtgcatcaacatggggcaatcctctctgcgtgccagattagggaatggtcatcccataacactgtacaaaatgatgaaatcctgcttggacttgtatgaattctctatcagacgaaacaaacagaagttctcagttttaccttctcggtaaccttcctcgacaacttggtctccgaaagtgtacgtgttcttctttactctttcccctttttttacaattgaaagtttgttgtctgaattgatctagcgatttcaatgatttcaataccttttagcgtccgaagcgaagatctcttacaatgtgcggtttgtgtaagtactgtggtaatatgcattctcataccattctagtgcctttcgca

SEQ ID NO: 202382 - DNA, 1319 bp, Zea Mays
ctgatctttcttaacatgtgtgccattccatttctcgtcattgatccgcgaacggactcgaggagaattgtgttcaggttgatcgatgctctggaactgatgaggcatggagtgaagcgctttcttgttcgcaagagtgggagctggaaaggcattaccaagagattttcagtgctttataatggtaagtggctgaagaacatggaatcaacatctccaagtgcagccagcagcagcagcacgcagctatccccacgttctggttctgcagaaaagttctgctgcctatcaagggaagatgttctccggtttctcattggatgccttggtgctcttgctcccatcccgctgactcagatatcttcccttggagccatcaatccgcagtacagttacgtggaagcatctgcgcctgcgatggaagcaattcagaagatccctcaagacccatgcgccgttgctgtagtggagacgatgccagatggaactcgtagcatactaggagacatctctacttacaagctgtggaaatgtgactatgtttcagctgcatgggcactggcaaacctgtcagctgggcagtttgtcatcggtgccgacgagaatgggtcaacacccatctcagtcttcccagagcctcccatcagcccatcgtcaccggtggaggagatcagtcctgggcgctcgccaagggcgaagaagttcagcagcaggagcatcgggtttctgaacaacacccagatgtcagcgtggcggacacggagcatgtaccaccggggcaggagcaccccactgatgtgcaagaccacaagcaccctcgcggccgtcatggcgcagatgttgtcccatcgggccacacacgtctgggtgacggacgcagagtcggaggaggacggcgtcgtcgtcggcgtggtgggctacaccgagatcttcaatgccgccaccaggagcacctgcccaagtccgacagcatcttgatgcaccacatcgtgctgtacagtatactgctgttggttgatccgttggtgccccggtgcacgctgttgcactgaactgtacaatgtactttgctcatttgttggtttgtctggagagtttttagtcttttagatattcttggtctgcatggagcaggacttggtggtatattgttgcattcgttgtggacggtacgaataagaattcgggtttgcctcggagtctagtccattttgcatgctcgcctgcagcagtgcagctgtcgatgtactctatgactgtatatggaaatggaatgttctctgtttcctttcacatgcttgcagccttgcctgagagtc

SEQ ID NO: 202383 - DNA, 1270 bp, Zea Mays
atttcacattgtaatcagaaacaggaaggttgatcgatgctctggaactgatgaggcatggagtgaagcgctttcttgttcgcaagagtgggagctggaaaggcattaccaagagattttcagtgctttataatggtaagtggctgaagaacatggaatcaacatctccaagtgcagccagcagcagcagcacgcagctatccccacgttctggttctgcagaaaagttctgctgcctatcaagggaagatgttctccggtttctcattggatgccttggtgctcttgctcccatcccgctgactcagatatcttcccttggagccatcaatccgcagtacagttacgtggaagcatctgcgcctgcgatggaagcaattcagaagatccctcaagacccatgcgccgttgctgtagtggagacgatgccagatggaactcgtagcatactaggagacatctctacttacaagctgtggaaatgtgactatgtttcagctgcatgggcactggcaaacctgtcagctgggcagtttgtcatcggtgccgacgagaatgggtcaacacccatctcagtcttcccagagcctcccatcagcccatcgtcaccggtggaggagatcagtcctgggcgctcgccaagggcgaagaagttcagcagcaggagcatcgggtttctgaacaacacccagatgtcagcgtggcggacacggagcatgtaccaccggggcaggagcaccccactgatgtgcaagaccacaagcaccctcgcggccgtcatggcgcagatgttgtcccatcgggccacacacgtctgggtgacggacgcagagtcggaggaggacggcgtcgtcgtcggcgtggtgggctacaccgagatcttcaatgccgccaccaggagcacctgcccaagtccgacagcatcttgatgcaccacatcgtgctgtacagtatactgctgttggttgatccgttggtgccccggtgcacgctgttgcactgaactgtacaatgtactttgctcatttgttggtttgtctggagagtttttagtcttttagatattcttggtctgcatggagcaggacttggtggtatattgttgcattcgttgtggacggtacgaataagaattcgggtttgcctcggagtctagtccattttgcatgctcgcctgcagcagtgcagctgtcgatgtactctatgactgtatatggaaatggaatgttctctgtttcctttcacatgcttgcagccttgcctgagagtc

SEQ ID NO: 202384 - DNA, 2479 bp, Zea Mays
ggttaaacaactgttgtcttttgtgctatatcaagcacacaacgcatgtctattgtcccttccggaaactgaagctcagccccccaaaacctcaccgtcctcctgtggttcttgaaagtggcgagagatggatcgtgacgatgtggctggctttgtcagcggaggttgcaaacatttcttgcgggagacttctaatctaatataacccagcagcacagcacagtagatgacagtagcagtagtagggtttttggttcttttcgtttcgtctctggacatgtttcttgactggaatggacagggcctcctcctccctaagccttggatctggtggtaacgttgactcctcgaacgatccctgtcaccggcaggcagttcagtgcagatcgaggtactgccgtcggcacactactagtgtatcgtcccagcttctctggggacaagacaacccgagggctggtatggctggagttgaaggtcctggaaacccgctgctcacgcttggtctgggccggtcaccaagttcctctgagacgaacagcaaggtcagctcccccacagcctgcatgatgtctccatcttcagtgaaagaggctgacgaggagtcgtcgatggatcttggtctgagctttgatctctgtcttggtcatgacactgcacatcgtcacaagaagccatcggcaggtgctccgaagttggaccttcagttgagcctgtccacctgttcgcctgaatcagccttgaccaatgtaagtgccaatgatggcttagagacagtggcagatactactactactctggaaaagctagagccctggatcttcaggaattacatggcttcatcatcatcatatgcatatgcttctgaagcaacctacggcctttctttgccaaagatacctgaagatgtcgtggtcgtgccttcaacaacagacgtgtcatcagccgttacggtgagcgtgaaaagcccggctccgaaacggagcaatattagcacgaaatgctgccagttcccagggtgtgagaagggagcgagaggagcctctggttactgtatcgcccatggcggcggcaggcggtgccagaaacctggctgccagaagggagccgaggggaggaccatctactgcaaagcccacggtggcggcaggcggtgccagtacctgggctgcacgaagagcgccgaaggccgcaccgaccactgcatagcccacggcggcgggcggcgctgcagccaggacggctgctcgcgcgccgcgcgcgggaggtccggcctgtgcatcaagcacggcggcggcaagcggtgccagagggagagctgcaggaggagcgcggaggggcactcgggcctctgcatctcgcacggcggcgggaggcggtgccagttcccggagtgcgccaagggcgcccaggggagcacggggctgtgcaaggcgcacggcggcgggaagcgctgcacgttccccggatgcaccaggggagccgaaggcagcacctggctctgcaaggcgcacggcggagggaagcgctgcgcccaccagggcggcggcggcggcggcgcgtgccccaagagcgtccacggcgggacgcggtactgcgtcgcgcacggcggcgggaagcggtgcctggtcgcgggctgtaccaggagcgcgcgagggaggacggagcactgcgtccgccacggcggcggcaggcggtgcagggccgagggctgcgccaagagcgcgcaggggagcaccgacttctgcaaggctcatggcggagggaaacgctgcgtgtggggccaggagggctcgagcctcggggccggcgggccgccgtgcgataggttcgcgcggagcagggtcggtctctgtgcgggtcacggcgctctggtcgaggaccgctgcgtacacggtggcggctcgttgggccctgcccctgctatcgggcagctgacaaccgattgtgagcctgctgctgctgctgcaacgaggggcgatgctgatatggcggacggagacgaggaagcgttcctgacgctgggatggaacggcgacggtgagtctgctggcgccacggccccggccccgttcatggagggcagggtccatggcagcgggctgcttgctctgctcagctgctctggtaatggcggcgcctcggcggcttcgtcgactggcatgcgcacctggatgtgatgttgtaggttcgagtagtgacagtgtcttgtcgcaatgcctgaatccggcggcataaacggctgccccgtgtagcagaaataataaggggtagccagcaggggtcatagtgtgttattgctatcgttggtgaagtgtttatctgactgactgtgtgtattgcccgtgattgattgaaagtctgtcttatacattgtgaagtggtagccttgtttcgttcagtagacgcgcgagtaccaggaaatgtgggacaggcagccttgggatttgatgtggactcgccatggtccatgcatcca

SEQ ID NO: 202385 - DNA, 1777 bp, Zea Mays
ccggccctcccagcggccagcagcagcacgcaccgcgccatcaatccatcgacaagccatctcagctgcccacggctgcactgccactgccacgccatggccctggacgacgcctgcgcctacgactgttgcgcgttacctccaccgctccattgcttggactgggactgggactcggagctgcttcacactcatcgtcacactaccagtgccggaggtgccgccgtccaagcagagccgcccaccttcttcgtcccggcgacgccaggtgtgcagccgtcggcggcgtccagtggcggctacctgcacgacgccatcactcactggagcgacgaccgtcgcagcaagcggcagcggatggcggcggcggtggcaacgacgacgacgcctcccgctcggcgtccggcgaccaccgtcagcgaggaccttcagtgccttcttgcgggcttctgggattcaacaagcgaggccgagggaggagcagacttccgccatgatctgaacaccacgaccccggagccggagccggagacgacgacggagatacgctgcagttttgcctcagtacgccggtgctgcaagcagagcagaggaggaagcagacaatgggagcggtaggcaccaacagctacgggacaaaacagtggttactggtcgtacttgctctcgccagttctgattctggtcgactgatagatggccggcccattagcccactgggctgctgcagcctgcatatgcacagcagtacagcactcgatctgctcctagattaattgcttgcgtagcgtagcgtagcgactagcgaaggtgtttgttaatttccttaggcagcagcaatagtcgcactactgtgcctccatacaaacagtttggacatgcatgaaactcactccagtttgaagctcgggcgtgcaggcgaggacgaggcagttgcgtcgggcagggaggaccagcagaggggggccagcgcgcaggtgctgctgccagcgccagcggcagtggcgcagcgcggagaggaggaggaggaggaggcaaaggcgaccgcggtagtcccccctcctcggttccccgccaccgcgccagccgctgctcccgtgcagcggcagctgcagctgcaaaaggcggccgagggtgcagccgccacgacgacggcgcccgcctctgcctgctcctctttgctgtcactgtcaggggaggacagggagaagagaggcgtcggggtgctgtaccccttcgcggtggtcaagccgctggggctagacgacggccgcatgacgacgctcagcgacgtgaaccacagaatcctcaagagaccggcaaggccggtccggcaccccgtcggcccgttcgcgtgcggccccgccgtgtcggcccacggcctcggcctgtccgggaaggtggtcgtcagcctcaccaagatcaggacgggagggaacggcaccataaccatcatcagaacaagaggctgatggatcatggatgtcatcaaccgtttccgatcccgcttcttttttttttgttcttgtttttaggtcgccatgcctgttgtccagggtaatcatggtacattggctgctacggttgtaaatacaccctccgggttggttttcagtgcaggcttctgccttctctactactagtaattaactagctaaaactcccactacatttgaattgaacgtacatcgtacataatatgctgcagaaaagttttttttttaaaaaaaatgcagcctaggaattttaggtaaatataagggatgtccaacctgaa

SEQ ID NO: 202386 - DNA, 1149 bp, Zea Mays
cccggccctcccagcggccagcagcagcacgcaccgcgccatcaatccatcgacaagccatctcagctgcccacggctgcactgccactgccacgccatggccctggacgacgcctgcgcctacgactgttgcgcgttacctccaccgctccattgcttggactgggactgggactcggagctgcttcacactcatcgtcacactaccagtgccggaggtgccgccgtccaagcagagccgcccaccttcttcgtcccggcgacgccaggtgtgcagccgtcggcggcgtccagtggcggctacctgcacgacgccatcactcactggagcgacgaccgtcgcagcaagcggcagcggatggcggcggcggtggcaacgacgacgacgcctcccgctcggcgtccggcgaccaccgtcagcgaggaccttcagtgccttcttgcgggcttctgggattcaacaagcgaggccgagggaggagcagacttccgccatgatctgaacaccacgaccccggagccggagccggagacgacgacggagatacgctgcagttttgcctcaggggaggacagggagaagagaggcgtcggggtgctgtaccccttcgcggtggtcaagccgctggggctagacgacggccgcatgacgacgctcagcgacgtgaaccacagaatcctcaagagaccggcaaggccggtccggcaccccgtcggcccgttcgcgtgcggccccgccgtgtcggcccacggcctcggcctgtccgggaaggtggtcgtcagcctcaccaagatcaggacgggagggaacggcaccataaccatcatcagaacaagaggctgatggatcatggatgtcatcaaccgtttccgatcccgcttcttttttttttgttcttgtttttaggtcgccatgcctgttgtccagggtaatcatggtacattggctgctacggttgtaaatacaccctccgggttggttttcagtgcaggcttctgccttctctactactagtaattaactagctaaaactcccactacatttgaattgaacgtacatcgtacataatatgctgcagaaaagttttttttttaaaaaaaatgcagcctaggaattttaggtaaatataagggatgtccaacctgaa

SEQ ID NO: 202387 - DNA, 2736 bp, Zea Mays
gatagaggaagatcctgaaggtgcaggtactgctcacttgtattcagtgacacaaaaaattagtggtgtggcgaatcgtgcatttgagcctctatttgagaggcaggcccaagctgaaaagatcagatctgttcagggaatgcttcaaagatttcggacactatttaacctcccaagtgcaatccgtgggaacattagaaaaggagaatatgatcttgctgtcagagagtaccaaaaagcaaagtcaattgttcttccttcccatgtggggatactaaaacgtgtactcgaagaggtcgaaaaggtgatgcaggaattcagaggcatgctttataagtccatggaggatcctcaccttgactttgctgagcttgagaacattgttcgtctactgttggagctggaacctgaaacagatccagtgtggcattatctaaatattcagaatagcaggattcatggattgtttgaaaagtgtactcaagatcatgaattgcgaatggaagttttgcaaaataaaattcgtgaaaaagtgctctctgattcaaagtggaggcagctgcaacaagattcaaataaatctctggaagttgattctgccatttgtgattctcctcgagctgatcagttgtcaacaaactttatggctgaggaagctgatagtttaagggccacctacactcgtaggctaacttctgtgcttatacagcatgttccagctttctggagattagctttatctgttttcagtggaaagtttgccaagacagcttctggtaatgtagtttctgattctgacatgaatgcaaagccgtctgcaaataagaacgatgacaaaggtggagatgtgaagtacacaaaccacactctcgatgaagttgctagtatggttcgggatactatatcggcttttgacactaaggttcagagtaccttccgtgatttcgaggaatgcaacattctttgtccatacatgagtgacactataaaagaaatagctaaggcctgtcagactcttgaagggaaggattcatctccaactgctgtaaaattgttgcgcacccttcattttcaaatgacgaagctttacgttctacggctttgttcatggatgcgggcaacaactaaggagatatcaaaagatgatacttgggttattttatccacccttgagagaaacaagtctccatatgcaatttcatgcatgcccctggaattccgtgacataataatttcagcaatggaccggattgatactatgattcttaatctgatgagcgagactgcgaagtcatatgacatttctcaaccacttcaggaaattaatgagtctgtcagacttgcatttttgaattcctttctggattttgctggttatctggagaggtttggaggtgaactaactgagaacaggccaaacaatgaaaacaattatgttcaaaatggatacataaatggtactagagaaacatctgctaacacagatggagatttgcacaaaaagctgctggttgttttgagtaacattggatattgtaaagctgaactttcagaagaactgtacaccacatatagacacatttggtctccagtcaggaataatgatgagcgaagttctgacatgcgagatctgatgacttctttctctgcgcttgaagagaaagtcctggaccaatatacttttgcaaagtcaaacttgatcagaagttctgcacaaagttatcttttggatcctgggatttattggggagcagcaccaatggtaaagagcattcgagatgcaactcttgacttgctgcacatccttgtagcagtacatgcagagatatactctggtgctcggcctttgttggagaagacaatgaaaattttggttgagggtttggtcgacatctttcttagtgtttttcatgagaataagaccaaaggtattaggttgttggatgcaaatggtttttgtcaactcatgcttgagcttgagtattttgagactgtgctacacacatacttctcacccgaggcacagcaggctatgaaatccttacaagagaatttgttggaaaaggcctgtgaaagtattgcagaagccatggaaaatcctggacaccaacggcgaccaacccgtggcagtgaagatgcatcgtcagatgatagacagccatcagtatcacctgatgatttgcttttgcttgctcaacagtacagtagtgatctgctgcaaggggagctggagaggactcgattgaacatagcctgcttcatggagtcagcccttcaatcaacgtctgcgccagcaggctcaaagcctgctgcatattcttcttaccatgcgcaagtaccacagcacgcccccattcaaacgtcctcgcctagttttagaaggcagcagactggtacaagctctcctgtagtctccagacggcgacgataaaaatggtggtcaagtgcttctgcacgggaacataaaattgtataatatgcccacgaatcaaatactgccttgctgactgaagatagcaccacagctgtatctgctgcgccagtctccttcggtcctcactgcttgtttgtatattcatttggacagtttatgtatcccgacatttgttaatgttgtatcaggtggttcaactagcatcgggataattttcttatatcgaaagcggctgaagtgattgagattcaactagcatcgggataattttcttatatcgaactgttattaaatgcacgcgg

SEQ ID NO: 202388 - DNA, 1424 bp, Zea Mays
caatttccaatccatccatccattccgttccatctgaaggcgagagttatctcgtgcctgccccgctgttctcctctcccgccgcatccgatagttcagcgcaacaaaacctccctctccgcgcacgctccccacccccaccggtgaccgcgcgcgcatggctgccttacttcggacggccgcggccctcgcgcccccgccctcgtctcccccgtccgcacgggagccgcgtgggcggtgcctgcggctggcctgctcccggcgcgcgccggtccgaccgctccgggcgtggccgctgccgactccgcacgtcttctgtctcgccggggggcggctccggcgcctgggcgccaccgaggccgacgaggccgcgcagacggcgacgcaggaggatttagaaaccgaagttactggagactctgctgcagatgacagtgctggaagcacagatgaaactccatctattattgtgacaaccctgcagtcgtacagagaagctcttattaatgatgatgaagcaaaagctgctgagatagagtcctttttactttctatcgaggatgagaaaaactctcttttgaacaaaatcactgctctagatgccgaactagcaactcaacgagaacgtatcttgaggatcagtgctgattttgacaatttcaggaaaaggacagaaaatgagaagcttaacatgatggaaaatgtgcaaggggaacttatagagagctttttgcctgttctcgacaactttgaaagagcgaaagtgcaaataaaggtggaaacagagggagaggagaaaataaataatagctaccagagcatttataagcaattcatcgagattttgaattcattgggcgttgaagatgttgaaacggtcggcaaaccatttgatcccatggaattccgaaaaggtttcaaactcggggaaagactgcttcgcccagcaatggtcaaagtgtctgcaggaccaggccctgaaaagtttggagatgatgacccaacagctgtcgaaggtagtgtggcacctcaaaaggttgacgaagtcgaagacgacggttttggtgccggcgatgcagaataggtggctggagcttgatctgtgaatcaacaagaacaggtccagaaattttgatgcttttctggagcgtgccaagcaggaaataggatggtaccaattcgttcaagctatagagttaggtcccaaaatgtgctgttatttcctcctgctgacatggggtgttggtattgcgacaaatttgtgcttctatccgccgtggtcgaccttttgttcttgcaatgaggaattttcgtgatcaattgatgcaacatgatattgtaagggctaaatggctcagatttgcgattgatgcaacagagtgcttgagtatatagcatgataatatagaaacaaaatcggacat

SEQ ID NO: 202389 - DNA, 2481 bp, Zea Mays
atcgtcaccgcagaaaagaatttctgtttcccttcaatgagatggagaatccgagaatgggataagaccgcgccgcgcgcgctctcctctccgccactctcaccgtcgcctgccccgccatgacttccttgctgttgccgccgccgcaggcggctgccgcagcgtacggatgctgccactgtctcctgctcgcttctaccaccgtgccggcgaggagtgggtgcgtgggacgcgccagcagaatcacgctcgcgctccgctgcctcccgattaccgggcacaggctgaggagtcgaaaggttgcgtgccaagcgacgactgagaccgagcccgagggcaatggcgacgaggaggataagaaagagtttggagatgatgcttcatcaccttcagtttataatgttgcagaagcaaatgggccgggagaaaatgactcgagtttagacaatctttcccatgactcgccagaagaaagatgaaaccacgaatgcagaagcagcactgctgagctccggcgacacggtccaggacatggatgcagatgctacttctaccaatggcatacaagaaaatgtggaagttattgaagttgctagtggatctccattgccaggaatgaagcaacagcttgatgattctgtcaggatccccaaggctacaatagacattctaaaggatcaggtttttggatttgacacattttttgtaacaagtcaggagccttacgaggtaaatatatgagatgccatggattaacttctgtataaatcagatttttaccttactaactgtgtttatacaagacaaactcatactcaaatactcaattgatgcatgctacaccagtaagtatgctcttggtctgactaagccaagtgctctcacagaatattgtttaactttactctaggttgacattttgtcatgtaaaataaaggtctcaagtataatggccttgaatgactaagttctatttaccaacttactttgtctgaataagggtggagtattattcaagggaaatcttcgtggtaaaccagccaaaagttatgagaagatcacaagtcggctacagaacaaatttggtgatgaatataagctttttcttctcatcaacccagaggatgagaagccagttgctgtggttatacccaagcagacattacagcctgaaactacaggtgacaaaaatttatcagtaccttcggtggcgtcggtagtgctcagagtgcggtcccagaatggtttgctgctgctgcatttggattagttaccatcttcactctgctacttcgaaatgtacctgttctacaggagaacttgctatcaacatttgacaaccttgagttgttgaaagacggactatccggtgctctagtaactggccttataataggggtgcacgaaattggacatatccttgctgccagggaaagtggaatcaagctcggcgtgccatattttgttcctagctggcagataggatctttcggcgggattaccagaatcgtcaatatcgtccgcaaccgtgaggacctactgaagctagcggctgctggaccattggccgggttttccttgggattcgttcttctgctgctgggcttcgtcttgcctccaagtgatggccttggccttgtgatagatccaaccgtcttccatgaatcgttcctcgttggtggtctcgcgaaacttcttctcggagatgttttgaaagaagggacgcagttatccataaacccgcttgttctatgggcctgggccggtctcctgatcaacgctatcaacagcatacccgctggggagcttgacggcggccgcatagcgttggccatgtggggaagaaaggtatcgtcccggatcagcagcctcgccatcgggctgctcggggtcgcggctctcttcaacgacgtcgccttctactgggtggtgctgatcttcttcctgcagaggggccccattgctcctctctccgaggaaatcacagaccctgagaacagctacatcggcatcggtgctgccattttgctgtttgggcttctggtctgcctgccctacccgttcccctttgacccgtcgcagttaactgatatggatttcaacttctgagaaaaggaaaccaaaaaaaaagcagttacaactcaccggatgagatgtatttaacctgtcggctctgtattctgctgtgtcatcttttgctccattgctccttgtagtagccaataaaagcagagctttcttgtgtaagcttgcctgttgtattagtaggatgctcgatcagagtagaatatagatgttattttggctgtaactgttacctgtcagttgtggcttatcaacaataggttccttgtcagagtatgatctatcagattcatacgcgatacttagcgttttggataagaataagcagacctaggacattgtgcgattgttgtgccagagccattcaaactgatactgctactaccttatataaaa

SEQ ID NO: 202390 - DNA, 3323 bp, Zea Mays
ccttcctccgccttccgcgcgcagcgcagagcgcacgggacacccgccgcccacgccttccgccccagacccactgcacgtgcacggccacgcgacccagcccacacatccactccgctttttccaaccgccgcccacgcgaaccccgacgcggccgcctcgagctccactccgtttaccctgcaaccccatcctcctcggcttcccatgtcgtgctcggcggcggcgggcgccgaggccaccgctctcctgttccgcagcgccgctccgtccacgatcgtcgggcgtcaccgcctcgctatgtctcgccggacttcgcgccgaaacctcaggactggtgtgcaccctcatcagaagagtgcacctagtgctaaccatcgtaacagggctagcattcagagagatagagcatcagcttccattgatgaagaacagaaacagatgtctgaagatgaaaatggcctactagacattcaactggaagatctggtaggaatgatacagaatacccagaagaatatattgcttctgaatcaagctcgtcttcaagcattggaacgtgctgacaaaattcttaaagagaaagaaactttgcaacagaagataaacattttagagatgaaactgtcagaaacaggtaaacaatctgtgctttctagtgaagtaaagtctgatgaagagagtctggagtttgatgtcgtaaaggaagagaatatgctactgaaggatgagatgaattttctaaaaggaaagcttattgagataactgagacagaggagagtctattcaagttggagaaagagtgtgctcttctaaatgcttcccttagggagctcgagtgtacatccacttctgcccaatctgatgtgttgaaacttggccctctgcaacaagatgcctggtgggagaaagtagaaaatttggaagacttgcttgattccacagcaaaccaagtggagcatgcttctttgacgctagatggttaccgtgatttccaggataaggttgacaaactaaaagcatcattgggaacaacaaacgtatcagagttctgtctttatttggttgatattttgcagcaaagggtaaaatcagtagaagagcgctttcaagcatgtaatcatgaaatgcattcacaaattgaactttatgaacactcaatagtggagtttcatggtactctcagcaaactaataaatgaaagtgagaaaaagtcaatggagcattatgcagaaggcatgccatcagagttctggagtaggatctctcttctgattgatgggtggtcgcttgagaagaaaatatccattaatgatgcaagtatgttgagagaaatggcttggaaaagggataatcgcctccgggaagcttacttgtcatccagaggaatggaagagagggaactgatagatagttttctaaagatggcactaccaggaacaagttctggtttgcacattgtccacatagcagcagagatggctcctgtcgcaaaggttggtggtctggcagatgtgatctctggtcttgggaaggcacttcaaaaaaaggggcaccttgtagagattattcttcccaaatatgattgcatgcagcataaccaaataaataatcttaaggttctagatgttgtggtgaagtcttactttgaaggaaatatgtttgccaacaagatatggactggaactgttgaaggtcttccggtctactttattgaaccgcaacatccaggcacctctttactgggatgtatatgcaaacctgggcttcaactcagctagaatttgttttacctgtcacaattttgaatatcaaggaatcgctccagctcaggacttagcatattgtggtcttgatgttgatcacctggatagaccagacagaatgcgggataattcacatggcagaataaatgttgttaagggtgcagttgtatattccaacattgtgacaactgtatcaccaacatatgcacaagaggttcgctcagagggtgggcgtgggctccaagatacactcaaagtgcactccaagaaatttgttggaatacttaatggcattgacacagatacttggaatccgtctacggataggtttctcaaggttcaatacagtgctaatgatctatatggaaagtcagcaaacaaagcagctcttaggaagcagttgaagcttgcttccacacaagcttctcaaccattagttggttgcattacgaggctagttcctcaaaagggtgtacatctcatcaggcatgcaatatataaaataactgagttgggtggtcaatttgttctgctgggttcaagtccagtacagcatatccagagagagttcgagggtattgcggaccaatttcagaacaacaacaatgtcaggctgcttttgaagtatgatgatgctctggcacatatgatctttgcagcatcagacatgttcattgttccttctatgtttgaaccatgtggcctcactcagatggtagctatgcgatatggttctgtgccagttgttcggagaaccggcggtttgaatgacagtgtcttcgatttggacgatgaaacgatacccatggaggtgcgaaatggcttcacctttttgaaggctgatgagcaggattttggtaatgcactggaaagagctttcaactactaccacagaaaacctgaagtttggaaacagttggtgcagaaagacatgaagatagatttcagctgggatacttcagtttctcaatacgaagaaatctatcagaaaacagccactcgagccagggcagcggcataaacagcagagacattgagacagttccctgctgtctccatgaagtctcctagatgctgtgcttaaccgtatggtaaagaaatatggtctgtatcagctcagaattaagcatctgccgaggaagcgcggtgcatccggactcgggtgtacaaggggcgacgtggcgttacgtgcagtccccaacgaagcaaagagacagaagtacagctgtacagaacggatatcttgtgaagcacacattgggatcaggacgtttggtgctgcagctactttcggtgcagaagcacatatatacgagacctgccagggcgagcaaatacccagttatacacgcgattgctcagctctatcaagctgtgaattgaaagatttctatagtgtattcacgcgacgttttcataaactagtgtgagttatgtactctgaccagtgaccagtgcgaagtctgtgttgtctcaacaatgttgcttggtataaaatgctaaaatgacgtttaagacgagaggggtttttagaaaagagagaaaataagagtttt

SEQ ID NO: 202391 - DNA, 3472 bp, Zea Mays
tccgcgcgcagcgcagagcgcacgggacacccgccgcccacgccttccgccccagacccactgcacgtgcacggccacgcgacccagcccacacatccactccgctttttccaaccgccgcccacgcgaaccccgacgcggccgcctcgagctccactccgtttaccctgcaaccccatcctcctcggcttcccatgtcgtgctcggcggcggcgggcgccgaggccaccgctctcctgttccgcagcgccgctccgtccacgatcgtcgggcgtcaccgcctcgctatgtctcgccggacttcgcgccgaaacctcaggactggtgtgcaccctcatcagaagagtgcacctagtgctaaccatcgtaacagggctagcattcagagagatagagcatcagcttccattgatgaagaacagaaacagatgtctgaagatgaaaatggcctactagacattcaactggaagatctggtaggaatgatacagaatacccagaagaatatattgcttctgaatcaagctcgtcttcaagcattggaacgtgctgacaaaattcttaaagagaaagaaactttgcaacagaagataaacattttagagatgaaactgtcagaaacaggtaaacaatctgtgctttctagtgaagtaaagtctgatgaagagagtctggagtttgatgtcgtaaaggaagagaatatgctactgaaggatgagatgaattttctaaaaggaaagcttattgagataactgagacagaggagagtctattcaagttggagaaagagtgtgctcttctaaatgcttcccttagggagctcgagtgtacatccacttctgcccaatctgatgtgttgaaacttggccctctgcaacaagatgcctggtgggagaaagtagaaaatttggaagacttgcttgattccacagcaaaccaagtggagcatgcttctttgacgctagatggttaccgtgatttccaggataaggttgacaaactaaaagcatcattgggaacaacaaacgtatcagagttctgtctttatttggttgatattttgcagcaaagggtaaaatcagtagaagagcgctttcaagcatgtaatcatgaaatgcattcacaaattgaactttatgaacactcaatagtggagtttcatggtactctcagcaaactaataaatgaaagtgagaaaaagtcaatggagcattatgcagaaggcatgccatcagagttctggagtaggatctctcttctgattgatgggtggtcgcttgagaagaaaatatccattaatgatgcaagtatgttgagagaaatggcttggaaaagggataatcgcctccgggaagcttacttgtcatccagaggaatggaagagagggaactgatagatagttttctaaagatggcactaccaggaacaagttctggtttgcacattgtccacatagcagcagagatggctcctgtcgcaaaggttggtggtctggcagatgtgatctctggtcttgggaaggcacttcaaaaaaaggggcaccttgtagagattattcttcccaaatatgattgcatgcagcataaccaaataaataatcttaaggttctagatgttgtggtgaagtcttactttgaaggaaatatgtttgccaacaagatatggactggaactgttgaaggtcttccggtctactttattgaaccgcaacatccaggtaagttcttctggagggcacaatactacggagagcatgatgacttcaaacgtttttcgtactttagccgtgttgcactggaattgctttaccaatctgggaagaaagttgacataattcactgccatgactggcagactgcatttgttgcacctctttactgggatgtatatgcaaacctgggcttcaactcagctagaatttgttttacctgtcacaattttgaatatcaaggaatcgctccagctcaggacttagcatattgtggtcttgatgttgatcacctggatagaccagacagaatgcgggataattcacatggcagaataaatgttgttaagggtgcagttgtatattccaacattgtgacaactgtatcaccaacatatgcacaagaggttcgctcagagggtgggcgtgggctccaagatacactcaaagtgcactccaagaaatttgttggaatacttaatggcattgacacagatacttggaatccgtctacggataggtttctcaaggttcaatacagtgctaatgatctatatggaaagtcagcaaacaaagcagctcttaggaagcagttgaagcttgcttccacacaagcttctcaaccattatttcctcaagcaggttggttgcattacgaggctagttcctcaaaagggtgtacatctcatcaggcatgcaatatataaaataactgagttgggtggtcaatttgttctgctgggttcaagtccagtacagcatatccagagagagttcgagggtattgcggaccaatttcagaacaacaacaatgtcaggctgcttttgaagtatgatgatgctctggcacatatgatctttgcagcatcagacatgttcattgttccttctatgtttgaaccatgtggcctcactcagatggtagctatgcgatatggttctgtgccagttgttcggagaaccggcggtttgaatgacagtgtcttcgatttggacgatgaaacgatacccatggaggtgcgaaatggcttcacctttttgaaggctgatgagcaggattttggtaatgcactggaaagagctttcaactactaccacagaaaacctgaagtttggaaacagttggtgcagaaagacatgaagatagatttcagctgggatacttcagtttctcaatacgaagaaatctatcagaaaacagccactcgagccagggcagcggcataaacagcagagacattgagacagttccctgctgtctccatgaagtctcctagatgctgtgcttaaccgtatggtaaagaaatatggtctgtatcagctcagaattaagcatctgccgaggaagcgcggtgcatccggactcgggtgtacaaggggcgacgtggcgttacgtgcagtccccaacgaagcaaagagacagaagtacagctgtacagaacggatatcttgtgaagcacacattgggatcaggacgtttggtgctgcagctactttcggtgcagaagcacatatatacgagacctgccagggcgagcaaatacccagttatacacgcgattgctcagctctatcaagctgtgaattgaaagatttctatagtgtattcacgcgacgttttcataaactagtgtgagttatgtactctgaccagtgaccagtgcgaagtctgtgttgtctcaacaatgttgcttggtataaaatgctaaaatgacgtttaagacgagaggggtttttagaaaagagagaaaataagagtttt

SEQ ID NO: 202392 - DNA, 3317 bp, Zea Mays
ccgccgcccacgcgaaccccgacgcggccgcctcgagctccactccgtttaccctgcaaccccatcctcctcggcttcccatgtcgtgctcggcggcggcgggcgccgaggccaccgctctcctgttccgcagcgccgctccgtccacgatcgtcgggcgtcaccgcctcgctatgtctcgccggacttcgcgccgaaacctcaggactggtgtgcaccctcatcagaagagtgcacctagtgctaaccatcgtaacagggctagcattcagagagatagagcatcagcttccattgatgaagaacagaaacagatgtctgaagatgaaaatggcctactagacattcaactggaagatctgatatattgcttctgaatcaagctcgtcttcaagcattggaacgtgctgacaaaattcttaaagagaaagaaactttgcaacagaagataaacattttagagatgaaactgtcagaaacaggtaaacaatctgtgctttctagtgaagtaaagtctgatgaagagagtctggagtttgatgtcgtaaaggaagagaatatgctactgaaggatgagatgaattttctaaaaggaaagcttattgagataactgagacagaggagagtctattcaagttggagaaagagtgtgctcttctaaatgcttcccttagggagctcgagtgtacatccacttctgcccaatctgatgtgttgaaacttggccctctgcaacaagatgcctggtgggagaaagtagaaaatttggaagacttgcttgattccacagcaaaccaagtggagcatgcttctttgacgctagatggttaccgtgatttccaggataaggttgacaaactaaaagcatcattgggaacaacaaacgtatcagagttctgtctttatttggttgatattttgcagcaaagggtaaaatcagtagaagagcgctttcaagcatgtaatcatgaaatgcattcacaaattgaactttatgaacactcaatagtggagtttcatggtactctcagcaaactaataaatgaaagtgagaaaaagtcaatggagcattatgcagaaggcatgccatcagagttctggagtaggatctctcttctgattgatgggtggtcgcttgagaagaaaatatccattaatgatgcaagtatgttgagagaaatggcttggaaaagggataatcgcctccgggaagcttacttgtcatccagaggaatggaagagagggaactgatagatagttttctaaagatggcactaccaggaacaagttctggtttgcacattgtccacatagcagcagagatggctcctgtcgcaaaggttggtggtctggcagatgtgatctctggtcttgggaaggcacttcaaaaaaaggggcaccttgtagagattattcttcccaaatatgattgcatgcagcataaccaaataaataatcttaaggttctagatgttgtggtgaagtcttactttgaaggaaatatgtttgccaacaagatatggactggaactgttgaaggtcttccggtctactttattgaaccgcaacatccaggtaagttcttctggagggcacaatactacggagagcatgatgacttcaaacgtttttcgtactttagccgtgttgcactggaattgctttaccaatctgggaagaaagttgacataattcactgccatgactggcagactgcatttgttgcacctctttactgggatgtatatgcaaacctgggcttcaactcagctagaatttgttttacctgtcacaattttgaatatcaaggaatcgctccagctcaggacttagcatattgtggtcttgatgttgatcacctggatagaccagacagaatgcgggataattcacatggcagaataaatgttgttaagggtgcagttgtatattccaacattgtgacaactgtatcaccaacatatgcacaagaggttcgctcagagggtgggcgtgggctccaagatacactcaaagtgcactccaagaaatttgttggaatacttaatggcattgacacagatacttggaatccgtctacggataggtttctcaaggttcaatacagtgctaatgatctatatggaaagtcagcaaacaaagcagctcttaggaagcagttgaagcttgcttccacacaagcttctcaaccattagttggttgcattacgaggctagttcctcaaaagggtgtacatctcatcaggcatgcaatatataaaataactgagttgggtggtcaatttgttctgctgggttcaagtccagtacagcatatccagagagagttcgagggtattgcggaccaatttcagaacaacaacaatgtcaggctgcttttgaagtatgatgatgctctggcacatatgatctttgcagcatcagacatgttcattgttccttctatgtttgaaccatgtggcctcactcagatggtagctatgcgatatggttctgtgccagttgttcggagaaccggcggtttgaatgacagtgtcttcgatttggacgatgaaacgatacccatggaggtgcgaaatggcttcacctttttgaaggctgatgagcaggattttggtaatgcactggaaagagctttcaactactaccacagaaaacctgaagtttggaaacagttggtgcagaaagacatgaagatagatttcagctgggatacttcagtttctcaatacgaagaaatctatcagaaaacagccactcgagccagggcagcggcataaacagcagagacattgagacagttccctgctgtctccatgaagtctcctagatgctgtgcttaaccgtatggtaaagaaatatggtctgtatcagctcagaattaagcatctgccgaggaagcgcggtgcatccggactcgggtgtacaaggggcgacgtggcgttacgtgcagtccccaacgaagcaaagagacagaagtacagctgtacagaacggatatcttgtgaagcacacattgggatcaggacgtttggtgctgcagctactttcggtgcagaagcacatatatacgagacctgccagggcgagcaaatacccagttatacacgcgattgctcagctctatcaagctgtgaattgaaagatttctatagtgtattcacgcgacgttttcataaactagtgtgagttatgtactctgaccagtgaccagtgcgaagtctgtgttgtctcaacaatgttgcttggtataaaatgctaaaatgacgtttaagacgagaggggtttttagaaaagagagaaaataagagtttt

SEQ ID NO: 202393 - DNA, 3297 bp, Zea Mays
actccgtttaccctgcaaccccatcctcctcggcttcccatgtcgtgctcggcggcggcgggcgccgaggccaccgctctcctgttccgcagcgccgctccgtccacgatcgtcgggcgtcaccgcctcgctatgtctcgccggacttcgcgccgaaacctcaggactggtgtgcaccctcatcagaagagtgcacctagtgctaaccatcgtaacagggctagcattcagagagatagagcatcagcttccattgatgaagaacagaaacagatgtctgaagatgaaaatggcctactagacattcaactggaagatctggtaggaatgatacagaatacccagaagaatatattgcttctgaatcaagctcgtcttcaagcattggaacgtgctgacaaaattcttaaagagaaagaaactttgcaacagaagataaacattttagagatgaaactgtcagaaacaggtaaacaatctgtgctttctagtgaagtaaagtctgatgaagagagtctggagtttgatgtcgtaaaggaagagaatatgctactgaaggatgagatgaattttctaaaaggaaagcttattgagataactgagacagaggagagtctattcaagttggagaaagagtgtgctcttctaaatgcttcccttagggagctcgagtgtacatccacttctgcccaatctgatgtgttgaaacttggccctctgcaacaagatgcctggtgggagaaagtagaaaatttggaagacttgcttgattccacagcaaaccaagtggagcatgcttctttgacgctagatggttaccgtgatttccaggataaggttgacaaactaaaagcatcattgggaacaacaaacgtatcagagttctgtctttatttggttgatattttgcagcaaagggtaaaatcagtagaagagcgctttcaagcatgtaatcatgaaatgcattcacaaattgaactttatgaacactcaatagtggagtttcatggtactctcagcaaactaataaatgaaagtgagaaaaagtcaatggagcattatgcagaaggcatgccatcagagttctggagtaggatctctcttctgattgatgggtggtcgcttgagaagaaaatatccattaatgatgcaagtatgttgagagaaatggcttggaaaagggataatcgcctccgggaagcttacttgtcatccagaggaatggaagagagggaactgatagatagttttctaaagatggcactaccaggaacaagttctggtttgcacattgtccacatagcagcagagatggctcctgtcgcaaaggttggtggtctggcagatgtgatctctggtcttgggaaggcacttcaaaaaaaggggcaccttgtagagattattcttcccaaatatgattgcatgcagcataaccaaataaataatcttaagatgttgtggtgaagtcttactttgaaggaaatatgtttgccaacaagatatggactggaactgttgaaggtcttccggtctactttattgaaccgcaacatccaggtaagttcttctggagggcacaatactacggagagcatgatgacttcaaacgtttttcgtactttagccgtgttgcactggaattgctttaccaatctgggaagaaagttgacataattcactgccatgactggcagactgcatttgttgcacctctttactgggatgtatatgcaaacctgggcttcaactcagctagaatttgttttacctgtcacaattttgaatatcaaggaatcgctccagctcaggacttagcatattgtggtcttgatgttgatcacctggatagaccagacagaatgcgggataattcacatggcagaataaatgttgttaagggtgcagttgtatattccaacattgtgacaactgtatcaccaacatatgcacaagaggttcgctcagagggtgggcgtgggctccaagatacactcaaagtgcactccaagaaatttgttggaatacttaatggcattgacacagatacttggaatccgtctacggataggtttctcaaggttcaatacagtgctaatgatctatatggaaagtcagcaaacaaagcagctcttaggaagcagttgaagcttgcttccacacaagcttctcaaccattagttggttgcattacgaggctagttcctcaaaagggtgtacatctcatcaggcatgcaatatataaaataactgagttgggtggtcaatttgttctgctgggttcaagtccagtacagcatatccagagagagttcgagggtattgcggaccaatttcagaacaacaacaatgtcaggctgcttttgaagtatgatgatgctctggcacatatgatctttgcagcatcagacatgttcattgttccttctatgtttgaaccatgtggcctcactcagatggtagctatgcgatatggttctgtgccagttgttcggagaaccggcggtttgaatgacagtgtcttcgatttggacgatgaaacgatacccatggaggtgcgaaatggcttcacctttttgaaggctgatgagcaggattttggtaatgcactggaaagagctttcaactactaccacagaaaacctgaagtttggaaacagttggtgcagaaagacatgaagatagatttcagctgggatacttcagtttctcaatacgaagaaatctatcagaaaacagccactcgagccagggcagcggcataaacagcagagacattgagacagttccctgctgtctccatgaagtctcctagatgctgtgcttaaccgtatggtaaagaaatatggtctgtatcagctcagaattaagcatctgccgaggaagcgcggtgcatccggactcgggtgtacaaggggcgacgtggcgttacgtgcagtccccaacgaagcaaagagacagaagtacagctgtacagaacggatatcttgtgaagcacacattgggatcaggacgtttggtgctgcagctactttcggtgcagaagcacatatatacgagacctgccagggcgagcaaatacccagttatacacgcgattgctcagctctatcaagctgtgaattgaaagatttctatagtgtattcacgcgacgttttcataaactagtgtgagttatgtactctgaccagtgaccagtgcgaagtctgtgttgtctcaacaatgttgcttggtataaaatgctaaaatgacgtttaagacgagaggggtttttagaaaagagagaaaataagagtttt

SEQ ID NO: 202394 - DNA, 636 bp, Zea Mays
gagtagcagtattaacagacagtcatcacgatggccaccggcgacgacagaaaggacttcctcttcttcattgatgtggtgacgaatgaaatcaagcaatggggacggggctctctaggccattcgggacaaacgactggaacacgtccccttatcctccaaacgggaaccccgggctggagctctccagcgagaagagcaagcttgctgaagggccgcaggcttggaacatctagattttgttttgctagggggagcgctatgtgagggtgggcaggttgctcaggtcaagtgggttcacggttgcgagcttcatggagagactatcgagagcagttgtgtcttgcaacattctttgatcaagattgatgagggcaagatcagtatgccgaggatgggcccgggttgtagcttgcgagcagcaatgctagatctgctcatcatgaaacccatcatgactaatgcctttatctgccatttaagtgtacattggattctttgtatgtttgctgcttactgtgcaaaatggcagctaaaagaagccctaaagcatgcgagctgcactcagacctctaccggtttagtggccaaactggctgttactacgtttcagtataaactggatcatcatcttat

SEQ ID NO: 202395 - DNA, 1663 bp, Zea Mays
aaattccccatctccaaaggcttcctcttcccgaccgttgcgccccaactatggagaagcagaagttcctcggagccaactcgacggcgcggcggcgcccgctcagctccctctccggaaacaagccgagcccggcgctgcaatccctgatctgcaaggcccaccctcacgccgaccccgccgcccaagcgaccaccgccgagattgacgaattgatctctgaagccttaaaatgccaaaatgtgtccaaaaaagcaacacgagagatagaatccttcaatggcttcttaacagacactaaggcttccttcaagcaatggtcttcaagactgaagcaagcactagagaccggtctggtgaaaaccgaagctatcccaaaaaacacaccgggaacttgcttaaatactgctgcaaaagggaatgacaagttgatcagctgcagtaccaagctacctgatacaggtagctcaaaaaacacaccaggaacatgcttaaataatgctgcaaaagggaatgacaagttgatcagaggcagcagcaagctacctgatacatatagttcacaaaacacaccaggaacatgcctacatactgctgtaaaagggagtggcaagttgatcagcggcagcagcaagctacctgatacagatccactggagtcaccttgcagcaactttactgaggtcgacatgattgtctcaccttcaccacttgtctcatggaacactggatcttgtatagttgagagcggaaagcagttgtttctcttgacaccactgccaaaaacaaaagcatgctcgtcaaggtgccaaacatcaaaaacccagatgaagacagtttctagcactgaccaattgaacaatcttctaaggcctgtttcaaagctaaccatttctgataataatcatcctgatctagagcaaagtgtgaaggtaaaggaatcatggactagcactacgacacctcatgttgctctagcaaacaaggcctcactagaagacaagctctgttcgcctcgtactttctcagttcagaagagcagaacactgcctagatcatgcctgaagacagcattatctagcaagcagcagctgttctctccaatcccggagggaaggaaggaggaagacattgacagcaatggttcaattggggatgacaaatgctcatctgataaaatctcaaaggatttagcatcaagatatgatatttatgggcttaatcaatcaaacagacaagtcgaagatcctcttcagtggtttctgtcaccactgaagacaatggtgttaatagatccatcagaggataatcaacttccaactccagcgaggagtaacatgggggaaagattggatattgccgatgacaagcccatccacactcctgctgtgcatagcaaggccttacttggtaccccctggaaaggcttggagagcacgaacctgaagggaaggtgtgctggagaaactactcttaagaaagaactgtggactcgatttgaggcggcttcaaccaatgagctgcactttgataaggtgcgcttccagcagacagacgcaaaatgttttctggacatgcttgaagaagaggcgtcgtgattctagaatgtacagtaggtcggttggcacttgggttagttttttttttttgcaaaaaaaccgaa

SEQ ID NO: 202396 - DNA, 808 bp, Zea Mays
gaaccaacccctctcgctccgctatttataggattgctccctagggtttccgccgcgccgccacttcccctccgagcctcagttcgcatccacgcgcgccgccgccgcctcgcagctcgacgctcaccgcgcagccatggcggaacagactgagaaggctttcctcaagcagccaaaggttttcctcagctcaaagaaatccggcaaaggtaagaagcctggcaagggcggcaaccgattctggaagagcattggccttggcttcaagactcccagggaagcaattgaagggacctacattgacaagaaatgcccattcactggaactgtttctatcagaggcagaattattgctgggacatgccacagtgctaagatgaacagaactatcattgttcgcaggaactacctccactttgtaaagaaataccagaggtatgagaagaggcactccaacattcctgctcacatctccccatgcttccgtgtgaaggaaggtgaccatgtcatcattggccagtgcaggcccctgtcaaaaactgtgaggttcaatgtcgttaaagtcattccagctggatccgcagctgctggaaagaaggccttcacagcagcctgagtttatagactatgttccatgagtagtctatagaatgtctttttaattcaaaagaaatctctcttctaggctggtgcttttcgactataatttggagattgttccatgtccgtgcaatcatctgaacatgttactacttattgtaccttgtcgtgcaaagttttgctaagatctctattgtttcatgtaaaa

SEQ ID NO: 202397 - DNA, 1067 bp, Zea Mays
aaggaaagcaacgactccgcgtccgcctgacctgacgtccgcctgatgaccgattatcttccttctccgtccgagtaaaggaaagcaacgactccgcgtcccgcttccctttccccgcacggcggagttcacaatccccaccggccggcgtagcggatattgcgagttacgacggggaaggagaggaagatccgtcgatccgcgcagattcgtttcgatcgtggtttggtgacttggtaagaggggaggggagaagcggcgatgtcgggcgtgttcggcagggtgttcgggaagtccaaggagcagagccaggcgaccgcgctggcctcgctcgacaagctcaacgagacacttgaaatgttggaaaagaaggaaaacttgctagtgaaaaaggccaatcttgaggtcgagaaggctaagaattttaccaaagccaagaataaaagagctgcaatacagtgcttgaagaggaaaagactatacgagcaacagattgagcagcttggaaatttccagcttaggatacatgatcagatgattatgctggaagcagcaaaagctacaacagagaccgtggatgcattgagaactggagcatcagcaatgaaagctatgcataagtcaacaaatattgatgatgttgataaaaccatggatgaaattaatgacaatatggagaacatgagacaaattcaggatctgttgtcagcgcctatgggagcagcagctgattttgatgaggatgaactagaagctgaacttgcggatcttgagggggaggagttggaggcagagctgcttgcacctaccacaacagctccgtccacagctccagtgcgtgtgcgtgtacctactgctcagcagtccactaggccatctggtcagagtagcaaagctgaagacgacgagctggcagcactacaggcagaaatggctatgtaaatatagctcacaaggagatcaagatgtcaaatccccatgaaataaattattttacagaatactaaaatctgcaataggttagtttctttatcgccataggctgtgtggctccaaccagttatcat

SEQ ID NO: 202398 - DNA, 1273 bp, Zea Mays
tttctataacgagtgctggaaaaaagttgcttctcattactaattcagatttccattatacaaacaaaatgatgaatcatgcattcaatcgctttcttcctaatgatgtgggatggagagatctgtttgaaatggttatagtctctgcaaggaagccagaatttttccagctttcacatccattgtatgaggttgtaacagatgatggactgatgcgtccctgttttaaagtaaattcaggtggcttatattctggtggtagtgctcagatggttgagaaatcactagacattcatggggatgagatattatatgttggggaccatatttacacagatgtaagccagtcaaaagttcatttacgatggaggacggcattaatctgcagagaactagaagatgagtttaatgcactggtcaaaagccatgatcagaaagaaaagcttgttacacttatacaacaaaaagaaattgtgggggatcttttcaaccagcttcgcctggctctgcagaggcgctctaattcacgtcctgcacagacgcttgctgcaacttgtatggatgaccaggagcttacggagagtatgcaaaagttgctcattgttatgcaaagattagatgaaaagatcgggccaatgctagaagcagatggagaacttttcaataaaagatggggttggttgtcacgtgctggtctatgggataagagtcatcttaccaggcaaattgaaaaatatgctgatatatacacatcaagggtttcaaattttctgcactatactccattcatgtatttccaatctcaagaacagacacttgcgcatgatgcccattcctattctggaggaaaggacatcaaagttcattgagcatccgttcgtcacaatctggagattaggcaggaaagagcgaacgtgatcattgtgattatggctgcgatggctacacaataacaattgtcgttttgaacaaattaattaatacaccttgtaagattgtatttatatataagtaaatctttagctatagcatgctgaatgattgttctgatagtcagtttgtttgtcgtggcctacctagagtttcatattgggaggcacagtacctgttttggtgtacctgctgctatttgcattgtatatgtgaaatgcgaagtgaagtatgacaaggtaacgataagtgacaaatcacgtcatttgatcctgcgcaagtcgatattatgtcttttaggttgcgtttggattgagcaaagttggataagatttgatcgacg

SEQ ID NO: 202399 - DNA, 2049 bp, Zea Mays
cggtgcgtcgtagtcgtctcgctgacgtccccatatcacccggcggccgcgtttatttgttggcgggtcagtgtactccgtattcattagtcgcagtaagcggcagtcagccagacagccagtcggccgtggacagtggcgacggcgaggcgaagccgtatttggaacttggaagcaaccgccccgcaggcgcgagcgccgtcgtccgtctcgcctcgcctcgcctcgcctggcactgcacgcgcaaaatcgcatcgcatcacgagctctactctccccggctccactgcccgctcgctctccgactccatacaggcaaaccgcgccgccgcgcttctaacccccacccaactctgcctccgatcccaccctcccagcccagcgcgtcaagtaccccgcctcggttcgctccccgtgtgatctggttcccacccgcggccatcgcatcgccgccgccgccgccgccgccgcagaacctcgcgctcccggcgcgggatctcgcgggccccggccccacggtccggcgatcgggatgacagcggcgcgccggcgatgaccggctcggcggcctcgctgggcctgcggtccgggagctacggctccctcgcggccgccgccgtcgtcggcagcggcgggaggaaggccggcgccaccgcctgccgcacgctgcgcgtggagaaggagcgcctgcaccgcgcgctgcggctggtcggacgccgcaggaccggcgtcctgctgctgctcgccgtcgcgtccgccgctctcttctgctccctcttcgccgtcgtcaaagatgacgccaattcaactagtattgtaaataattacgaagtcccaaatgccatacagaagtcagtgtatcccagcagaacacgacctctaatgatgtctggaaaccaagagtccaccagtgttgtcaacaaaattgattttccaaatcggcttcatctttcatttgcaaacttcacacatccttgtgaaggtttctcagttcctcctcccctggttgataagaaacgcactggaccccggccatgccctgtttgctatgtttccgtggaccaggcatttgccttgatgcccctacaagcttcaccatcacctgtcctaaaggacttaaactatgtatcagaagatggtgttactgcaaatttatcaaatcagggatctggatttggagggcatccatccctggatcagagaaacgattctttcaacattaatgagtcaatgactgtccactgcggctttgtcagaggaaagaagcctggccaaggtactggattcgatatcaaggatgacgatctgctagagatggagcaatgccacgatctagtcgtagcttctgctatttttggaaattatgatatgattcagcatccgaggaacatcagtgatttttcaaaggcaaatgcatgcttttatatgtttgtagatgaagaaacagaggcttatgtcaagaattctagttctctgtacaacaataataaagttggactgtggaggctggtggttgtccgaaacctcccttatgaagacccaaggcgtacgggaaagattccaaaacttctgctccataggctttttccaaatgtgagattttcagtttggatagatgcaaaacttgagcttgttgtggatccctatctcctgcttgagaggttcctttggaggaagaataccacttttgcaatctctcggcattacaaacgctttgatgtgtttgaagaagcagaagcgaacaaagctgctggaaagtacgacaacgcgtcaatcgattaccaaatagagttctacagaaacgagggcctaacgcattattcttctgctaagcttcccatcacaagcgatgtccccgaaggctgtgtgatcatcagagagcacatccccatcacgaacctgttcacgtgcgtatggttcaatgaggttgatcgcttcacctccagggaccagatcagtttcagcacggtccgggacaaaatcagggctagagttggctggatgcctgagatgttcatggactgcgaaaggcgcaactttgtcgttcag

SEQ ID NO: 202400 - DNA, 1356 bp, Zea Mays
gaaagaggcatgttgttgtcagatgattaaaatatggtatactctgcgaaatgctgaatacaggctttcttttgaaagaaatcttgaactgtctgaagaagttgcagaatgccaaaaaagtgatgtcattgaagataatcatcatgacatcaatttgggtacacctgtcactatttttagattagcagaagaagacatgccccaggaccctgaaaaaactgatgacgaatcatcatatgaaaatatgggagaagagctcggcgacttaaccctgcaggcagaagagtatattattcagatgcaatctcgtttggatgccatgaaaaaagagctacatgatctcaggagaaagaattctgctctgcagatgcaacggtttgttggggaggaaaaaaacgacttgctggactatttgagatcactaacaccagagaaggttgctgaactatcagagtcttcatgtcccggcgtgcaagaagcaatccattctgtggttcatggtctgctggctactctttcccccaagatacactcaaaggcccctccaccgctagataacacttctggaggggtcttaaaccttgggggcgaggatgatgactgtgcagaacttgtggagaatgcttccctcccatttcagcccctaatatctgttccccgtgattatcttgcacgcttgctcttctggtattgtgaagctgacttaataggcattgttatgttcatatatcatgtagcaactgaacaccgacattttcaattgtttaggtgcatgctgctgggtcactacatccggggtctggagtaccggttagagcttgctcagcttctgcgaatatccagcgacgtgggttctttctctggtggtgatgatcatgttgtttgagggtaccacgtttactggtattcctcaccgggaagaatggaaagatctggccaagcaatgcagaggtggccgttacactgcgttccctctctgaaatgatgccccaagcccccaatacaggtggcgctgctgagctatatattagttgtagttcctgtaaattcagaaaacagtcactcgggtcgggtgtaaagctagtgttacatatgcacgtgaagcactttctttttttcttcctttgatgttgtgccgtataaaaaaggtttggtggttagttggtgtttatctactggtagcatgataggcttccttgtattctagttgtatgtatctggtggttgtgattgatgtccagcgtccatttagcttgtgtggcttcttgattcgaataaagtttaacttattttttggaactcacgagcacatactttcattggaattatatttacattgttgtccaatgtccattt

SEQ ID NO: 202401 - DNA, 1558 bp, Zea Mays
tcaacttgtaaaaaatgaacaaaactcaactgaaatccatgctctggaacttgatccaggacatagagcctctggaccttagtgtcattcagaaagatgttgctcctgaaacggtagatgcaatgaagaggactatttcgggcatgttgggtctgcttccatctgatcagttccgtgtcattgtagaagctctttggaatcccttcttcaaattattggtatcttcaattatgactgggtatactctgcgaaatgctgaatacaggctttcttttgaaagaaatcttgaactgtctgaagaagttgcagaatgccaaaaaagtgatgtcattgaagataatcatcatgacatcaatttgggtacacctgtcactatttttagattagcagaagaagacatgccccaggaccctgaaaaaactgatgacgaatcatcatatgaaaatatgggagaagagctcggcgacttaaccctgcaggcagaagagtatattattcagatgcaatctcgtttggatgccatgaaaaaagagctacatgatctcaggagaaagaattctgctctgcagatgcaacggtttgttggggaggaaaaaaacgacttgctggactatttgagatcactaacaccagagaaggttgctgaactatcagagtcttcatgtcccggcgtgcaagaagcaatccattctgtggttcatggtctgctggctactctttcccccaagatacactcaaaggcccctccaccgctagataacacttctggaggggtcttaaaccttgggggcgaggatgatgactgtgcagaacttgtggagaatgcttccctcccatttcagcccctaatatctgttccccgtgattatcttgcacgcttgctcttctggtattgtgaagctgacttaataggcattgttatgttcatatatcatgtagcaactgaacaccgacattttcaattgtttaggtgcatgctgctgggtcactacatccggggtctggagtaccggttagagcttgctcagcttctgcgaatatccagcgacgtgggttctttctctggtggtgatgatcatgttgtttgagggtaccacgtttactggtattcctcaccgggaagaatggaaagatctggccaagcaatgcagaggtggccgttacactgcgttccctctctgaaatgatgccccaagcccccaatacaggtggcgctgctgagctatatattagttgtagttcctgtaaattcagaaaacagtcactcgggtcgggtgtaaagctagtgttacatatgcacgtgaagcactttctttttttcttcctttgatgttgtgccgtataaaaaaggtttggtggttagttggtgtttatctactggtagcatgataggcttccttgtattctagttgtatgtatctggtggttgtgattgatgtccagcgtccatttagcttgtgtggcttcttgattcgaataaagtttaacttattttttggaactcacgagcacatactttcattggaattatatttacattgttgtccaatgtccattt

SEQ ID NO: 202402 - DNA, 2386 bp, Zea Mays
acccaacaccccagtatcctgaattcctgaatcctgatgcggtttagcgcaccgaggtagaccgagcgagacagccagccagcggggcaagctgaaaaacctatcttctatcaccacctcggagcccgagtggaaggggaaggcaggaatcgccccgcacgcgcccccatccgcctgccggcgacggcccacatgccgaccgcctacagcctccgcgcgccgccctccaccgcgcagcagcgcctcaggctgcccccgccgccgctgccgctttgcccggcgggtggaggggccgcccgccggaggagggttgtcggggtagcgtccgcgtccgcgtcgcccttcgacgagctgtacgcgcgggggaggcccgcacatggaccctccaagaaatccatgctctggaacttgatccaggacatagagcctctggaccttagtgtcattcagaaagatgttgctcctgaaacggtagatgcaatgaagaggactatttcgggcatgttgggtctgcttccatctgatcagttccgtgtcattgtagaagctctttggaatcccttcttcaaattattggtatcttcaattatgactgggtatactctgcgaaatgctgaatacaggctttcttttgaaagaaatcttgaactgtctgaagaagttgcagaatgccaaaaaagtgatgtcattgaagataatcatcatgacatcaatttgggtacacctgtcactatttttagattagcagaagaagacatgccccaggaccctgaaaaaactgatgacgaatcatcatatgaaaatatgggagaagagctcggcgacttaaccctgcaggcagaagagtatattattcagatgcaatctcgtttggatgccatgaaaaaagtaactacagtctgttgctttattagccaacccgtttcatttactactatgctacgttatttgacattatatttaccgcagctatgcatttatttattagttcataaattcaaattataaatgagtgatgcgtataccagaggaagatcaggaatagcatgggagtatgctcattatacacaggctagagttaacacttctgtaattcagttgaacttacccactatatgtttgtgctatctgaacttgtgcacgtcagcttttccatatttatggaacacaatattttgcacactgtacatacaattttgttttatgtatcatatctgactaaaaaaaagaactccagtttctaatcggacaagtactcagggcaggtgtttatatgtactctgggctgaagtgtggatgaagaaataaatctaaatcaattgtacctctatttcgtgtagttggacctgtaataaaacatttgtcattttgaatctgacaacttgtgttgcgtgatatatttcaactttccaggcttattgcttttattgacattgcaggagctacatgatctcaggagaaagaattctgctctgcagatgcaacggtttgttggggaggaaaaaaacgacttgctggactatttgagatcactaacaccagagaaggttgctgaactatcagagtcttcatgtcccggcgtgcaagaagcaatccattctgtggttcatggtctgctggctactctttcccccaagatacactcaaaggcccctccaccgctagataacacttctggaggggtcttaaaccttgggggcgaggatgatgactgtgcagaacttgtggagaatgcttccctcccatttcagcccctaatatctgttccccgtgattatcttgcacgcttgctcttctggtgcatgctgctgggtcactacatccggggtctggagtaccggttagagcttgctcagcttctgcgaatatccagcgacgtgggttctttctctggtggtgatgatcatgttgtttgagggtaccacgtttactggtattcctcaccgggaagaatggaaagatctggccaagcaatgcagaggtggccgttacactgcgttccctctctgaaatgatgccccaagcccccaatacaggtggcgctgctgagctatatattagttgtagttcctgtaaattcagaaaacagtcactcgggtcgggtgtaaagctagtgttacatatgcacgtgaagcactttctttttttcttcctttgatgttgtgccgtataaaaaaggtttggtggttagttggtgtttatctactggtagcatgataggcttccttgtattctagttgtatgtatctggtggttgtgattgatgtccagcgtccatttagcttgtgtggcttcttgattcgaataaagtttaacttattttttggaactcacgagcacatactttcattggaattatatttacattgttgtccaatgtccattt

SEQ ID NO: 202403 - DNA, 1762 bp, Zea Mays
acccaacaccccagtatcctgaattcctgaatcctgatgcggtttagcgcaccgaggtagaccgagcgagacagccagccagcggggcaagctgaaaaacctatcttctatcaccacctcggagcccgagtggaaggggaaggcaggaatcgccccgcacgcgcccccatccgcctgccggcgacggcccacatgccgaccgcctacagcctccgcgcgccgccctccaccgcgcagcagcgcctcaggctgcccccgccgccgctgccgctttgcccggcgggtggaggggccgcccgccggaggagggttgtcggggtagcgtccgcgtccgcgtcgcccttcgacgagctgtacgcgcgggggaggcccgcacatggaccctccaagaaatccatgctctggaacttgatccaggacatagagcctctggaccttagtgtcattcagaaagatgttgctcctgaaacgaagctctttggaatcccttcttcaaattattggtatcttcaattatgactgggtatactctgcgaaatgctgaatacaggctttcttttgaaagaaatcttgaactgtctgaagaagttgcagaatgccaaaaaagtgatgtcattgaagataatcatcatgacatcaatttgggtacacctgtcactatttttagattagcagaagaagacatgccccaggaccctgaaaaaactgatgacgaatcatcatatgaaaatatgggagaagagctcggcgacttaaccctgcaggcagaagagtatattattcagatgcaatctcgtttggatgccatgaaaaaagagctacatgatctcaggagaaagaattctgctctgcagatgcaacggtttgttggggaggaaaaaaacgacttgctggactatttgagatcactaacaccagagaaggttgctgaactatcagagtcttcatgtcccggcgtgcaagaagcaatccattctgtggttcatggtctgctggctactctttcccccaagatacactcaaaggcccctccaccgctagataacacttctggaggggtcttaaaccttgggggcgaggatgatgactgtgcagaacttgtggagaatgcttccctcccatttcagcccctaatatctgttccccgtgattatcttgcacgcttgctcttctggtgcatgctgctgggtcactacatccggggtctggagtaccggttagagcttgctcagcttctgcgaatatccagcgacgtgggttctttctctggtggtgatgatcatgttgtttgagggtaccacgtttactggtattcctcaccgggaagaatggaaagatctggccaagcaatgcagaggtggccgttacactgcgttccctctctgaaatgatgccccaagcccccaatacaggtggcgctgctgagctatatattagttgtagttcctgtaaattcagaaaacagtcactcgggtcgggtgtaaagctagtgttacatatgcacgtgaagcactttctttttttcttcctttgatgttgtgccgtataaaaaaggtttggtggttagttggtgtttatctactggtagcatgataggcttccttgtattctagttgtatgtatctggtggttgtgattgatgtccagcgtccatttagcttgtgtggcttcttgattcgaataaagtttaacttattttttggaactcacgagcacatactttcattggaattatatttacattgttgtccaatgtccattt

SEQ ID NO: 202404 - DNA, 1763 bp, Zea Mays
acccaacaccccagtatcctgaattcctgaatcctgatgcggtttagcgcaccgaggtagaccgagcgagacagccagccagcggggcaagctgaaaaacctatcttctatcaccacctcggagcccgagtggaaggggaaggcaggaatcgccccgcacgcgcccccatccgcctgccggcgacggcccacatgccgaccgcctacagcctccgcgcgccgccctccaccgcgcagcagcgcctcaggctgcccccgccgccgctgccgctttgcccggcgggtggaggggccgcccgccggaggagggttgtcggggtagcgtccgcgtccgcgtcgcccttcgacgagctgtacgcgcgggggaggcccgcacatggaccctccaagaaatccatgctctggaacttgatccaggacatagagcctctggaccttagtgtcattcagaaagatgttgctcctgaaacggaagctctttggaatcccttcttcaaattattggtatcttcaattatgactgggtatactctgcgaaatgctgaatacaggctttcttttgaaagaaatcttgaactgtctgaagaagttgcagaatgccaaaaaagtgatgtcattgaagataatcatcatgacatcaatttgggtacacctgtcactatttttagattagcagaagaagacatgccccaggaccctgaaaaaactgatgacgaatcatcatatgaaaatatgggagaagagctcggcgacttaaccctgcaggcagaagagtatattattcagatgcaatctcgtttggatgccatgaaaaaagagctacatgatctcaggagaaagaattctgctctgcagatgcaacggtttgttggggaggaaaaaaacgacttgctggactatttgagatcactaacaccagagaaggttgctgaactatcagagtcttcatgtcccggcgtgcaagaagcaatccattctgtggttcatggtctgctggctactctttcccccaagatacactcaaaggcccctccaccgctagataacacttctggaggggtcttaaaccttgggggcgaggatgatgactgtgcagaacttgtggagaatgcttccctcccatttcagcccctaatatctgttccccgtgattatcttgcacgcttgctcttctggtgcatgctgctgggtcactacatccggggtctggagtaccggttagagcttgctcagcttctgcgaatatccagcgacgtgggttctttctctggtggtgatgatcatgttgtttgagggtaccacgtttactggtattcctcaccgggaagaatggaaagatctggccaagcaatgcagaggtggccgttacactgcgttccctctctgaaatgatgccccaagcccccaatacaggtggcgctgctgagctatatattagttgtagttcctgtaaattcagaaaacagtcactcgggtcgggtgtaaagctagtgttacatatgcacgtgaagcactttctttttttcttcctttgatgttgtgccgtataaaaaaggtttggtggttagttggtgtttatctactggtagcatgataggcttccttgtattctagttgtatgtatctggtggttgtgattgatgtccagcgtccatttagcttgtgtggcttcttgattcgaataaagtttaacttattttttggaactcacgagcacatactttcattggaattatatttacattgttgtccaatgtccattt

SEQ ID NO: 202405 - DNA, 748 bp, Zea Mays
ctgacgtgcgcggcttgatgtggcatggctgcatcaccaccaaggaacttggaactgtgatgcgctcgttggggcagaaccctactgaggctgagcttcaggacatgatcaacgaggttgatgctgatggcaatggaaccatcgacttccctgagtttctcaacctgatggcacgcaagatgaaggacaccgactctgaggaggagctcaaggaggccttccgcgtgttcgacaaggaccagaacggcttcatctctgctgctgagcttcgacatgtcatgaccaacctaggtgagaagctgacggacgaggaggtggatgagatgattcgtgaagccgacgtggacggtgatggccagatcaactacgaggagttcgtgaaggtgatgatggccaagtgagatgatgtgcctgttttgaagctagttcctctcttgatggtagtagctagtctagtgttggagactgactgcatttggtccgccttgttcctctcgctgcatcaatggacatatccgtttgttttctcccaagggattttaccatgtcggtaatttcgttcaaatttgtttatggttgtattaacatttgtgttatcttggtacaatgatcatgcctttcccttctaaatttaggtgttgaatttcttgtagaaatacgtggcatgcatgtgcagatatatccgattttgtttggttttctcgttacttgtgctgtaattctttcgcagcattattacccaacgatt

SEQ ID NO: 202406 - DNA, 3559 bp, Zea Mays
cccgaccccgtcgaggcaaaaagccctggccgttccctcctcgccccgtgccgccgccgcctccgtgcgcgcccaggcttcctcctgtgacttcgctacaatgggtcatgccgtaatcaaaagaaggactacattttcatgccaacattgaagataccgccttccattattgctgggtaagttggaacagaggagtgcgtattcaagatgatggacatgaggcgccactctgtgtctgtggatgccccactgtcaagaaccttggtgcagctcaagcgagtgaggtcgctgcgggatccagcgacaaactcgatgagcaagtacgcgtctccttccgatcacatgatctgggagactgcttctagcaatggggtgactccggagcttggcaggtcagcacaccatcacctggttggggaagacgaagatgtgggagctgagcctactacaatggggtcagagcggagtttccggggaccaagcgcaaggactgcatcgtataggaaatcttctgctgtcaggatcagaggactgaacccaccaagaagcaagcaggttcaccgtgtccgccaagacggccaccgcaagtcattggattctaaccactcaaaccatagctctatccgtcaattggcagacaatatggtcagcaatgtggatgcagataaggaagagggggaagtgaattcctatgaaagaccaaaacttgcaatgccagataagtctgacgaagaggtgaaaatgccaggctgctccaaatccaggagcaagtcttctgctgcaatgagccgtgttgggagcccctgcatgtcagccagtgaggcacgctcagttgggtcaagaagaagcactttggggcatggaaccgaggatacacgactgaggtcaaatgatgtcgtgggatccaatttcagtggctgtggtataagctactgctggtcaggagcgtcaaagtaccgggagctttattctgacagcgatggtccagaccaacctctcttatccacagatgggattgaggcagcattccaaggcaatgtaccatacactgagacactgaggtgtctaagccagaagttccgccctcgttccttcagtgaactgattggcctaaatgtcgttgcccagtccctcctatattccacttgcaaaggaaaagttgctccaatgtacttgttccatggcccccggggtacaggcaagacatccacggcaaggatttttgccgcggcactgaactgtgtatctcttgaggagcaaaggccgtgtgggttctgtaaagagtgtgtcattcttttctctgggaagagcagagatgtgaaagagcttgacgctgcgaaaatggatcgtctaggccgagtgaaggcacttctcaagagcgcatcgctcgtgccatactcctcgcgcttcaaggtcttcatagtagatgagtgccacctcttgcgagaagatgcatggtcagcaatactgaagagccttgacgagccataccggcacacggtgtacattatgatcacttctgacatagaaagcctgcctcgcgcttccatcacacattgtcagaagttccattttccaaagataaaggtggcggatattgtctacaggttggagaggatctgtatagaagaaggattggaatttgaccatgatgggttgtacttcattgctgcaaagtctaatggttctcttagagattcagaaataatgcttgatcaactcagtttgcttgggaagaaggtcacaatttctcttgtgcatgaacttgtaggatctgtgtctgatgatgagttgattgaattgcttgatctagcgttgtcatccgacacaaccaataccgtaagacgagctcgagaacttatggggtcagcaatcgatcctctgcagctggtgtctcagttggccaaccttattatggacattctctcagggagatgtcaatctgcagtcacggaagtcagcaaaagtttcttggtatcagaggttggaataaagaaactaagacatgcactgaagatactatcagaaactgaaaaacaattgagaacatcaaggaatcaggctacttgggttacagttgcgcttttgcagtttagcaccaatgaacctaaccctgttgctgaaacaaatgatatgcatgcacattcagtaactggatatacagatgactgggtttccaaggtgcactcaagtgccaatttttgccaggcatgtaacagcagcaagtccaactgttctgagagacactgtaggcggcttaagctcgagaacatatggaggagagccattggaaagtgtcgatctaggtcagctaaaagtttcctcaggaaagaaggcttcttatcgtcggttcacgtcaccgaagagctggccatagcagaagttggttttgaacacccagatcacctgtcaagagcggagaaaatgcaaagcctaatagaatcctctttgcaacacgttcttgggtgcaatgtggagatcagattcaaactcgtgccatgcccagtgagcaaagatgctaggttgaagagacagccgttcagctttctcaactgctctggccggaagcaagagctgtcagattcagtcgtgactgatgaagacgaagctgcgagggggcctggagcaagagagacaccgcttaaaggctacacctctagccagcaggaatcaccatacaccatgcgacgtgtcgattcgaaaccaacaacggtccacggttgcgaggatgacgcccggagtaccttgacgtcaagcagatccacggcagatgacctgacaaggacgtgcaggtcggagactggctacccaaagggtgtgcgtgagcagggccgctctgatggcacgcagcaggagcctgacctacagccgaactgcttctcgcgaacgctcaagcttcagaagaagctgctgtcttctggcgcagcgcacaccatctgtctgagggtccagccacataacaagatggatttcctgcctaagaaagagttcgatacgtacttctgcgcgtatgagccctacgagcagtgtccaagatcagattcaagagctacttacagttcaagagacgatgacttgtggagcaagaattcacgctttggctcgaatctactctgctggagagccccaaaacagtccatgtaatggaggaaagaacgagtgaactgggtggaacaaatcgattctgctacgagattttaccaattttgcccgaagctggagacatggacaccacccgcagctgcggggacaaattttgaagggaagtctaggaggggtctgtgctattcttgatcttggtaggcagctgaggattgaggaactatttagtgatgttttcttggaaatgcagatcctttataatgctagtgggcagttgtacagcgcgccagcgacgaaaccctgtgaattgttctgttattctgaattttgtaggacgatttgatgctctctctctgaatttacatgatctttttattagctgaatgattacagtgtccagaaaataggccaccacgaaacctgatagtccagaatctaatctaaaacaaggcaaaat

SEQ ID NO: 202407 - DNA, 1117 bp, Zea Mays
ggctataaataacccttaaacattattttataagcctcttgattacataatttgattatgaactcactaatgaaagtttttaacatgcaatacgccaccagcacagaactcaaagcatcctggatacattattgaatcgtgtgatgaacaaaagatgttagaaataaaaaattaaaaagaaaaaaaggcccatctaaaagtccattacttgagaaacccaatttccaccagaccctaacctttccattgttccagcgaacgcacacagccgccgctgtttcttcatcttcctcgcagcgccggcgctgaggctcgggctctcagcgacggcggcagcggcagcggcttcccctcccgcctctcgccagtcgcctcgcgccctcgcctccggtcctccgcacaccggataatggctcatcgtggacatctagatggactgactggccaagctcctgctcttatgcgccatggttccttcgctgcaggcagcctctctagccgctcacctttgcagtcttcatccacactggagatgctggagaacaagcttgccatgcaaactacagaagtggaaaagcttatcacggagaatcagcggttagcatcaagccatgtggtcttgaggcaggacattgttgatacggagaaagagatgcaaatgatccgcacccacctaggtgaagttcagacagagactgatttgcagattagagatttgttggagagaatcagattaatggaggtagatatacatagtggtaatgtagtgaacaaggagcttcaccaaatgcatatggaggcaaagagacttattactgaaaggcagatgctaacccttgagatagaggatgtgactaaagaattacagaaactctctgcctctggggacaataaaagccttcctgaattgctttctgagctagataggctacggaaagagcatcataatttacgatctcagtttgaatttgagaaaaatacaaacgtcaagcaagttgagcagatgcggacaatggaaatgaacttgataaccatgaccaaacaagctgagaagttacgtgttgatgtggcaaatgctgaaagacgggcacaagagaggatctatggaacctaggac

SEQ ID NO: 202408 - DNA, 1373 bp, Zea Mays
ggctataaataacccttaaacattattttataagcctcttgattacataatttgattatgaactcactaatgaaagtttttaacatgcaatacgccaccagcacagaactcaaagcatcctggatacattattgaatcgtgtgatgaacaaaagatgttagaaataaaaaattaaaaagaaaaaaaggcccatctaaaagtccattacttgagaaacccaatttccaccagaccctaacctttccattgttccagcgaacgcacacagccgccgctgtttcttcatcttcctcgcagcgccggcgctgaggctcgggctctcagcgacggcggcagcggcagcggcttcccctcccgcctctcgccagtcgcctcgcgccctcgcctccggtcctccgcacaccggtcggtgaccctgcgtgcgtgcctctctagtggctcctggttcagatggcgggctgctgacacggccgcgccgcccgcggcctgagggcagcgggagccaccagctgctgctccaccaaggcggtctcgccgctttgaggagcgcttatgcccaaagcgaagcgttagcgcttcagcgcgctgaagcgtgcgcttagtgctgttttttagaaccctgatctttttcatcattccctaccattttttgtattttcaggataatggctcatcgtggacatctagatggactgactggccaagctcctgctcttatgcgccatggttccttcgctgcaggcagcctctctagccgctcacctttgcagtcttcatccacactggagatgctggagaacaagcttgccatgcaaactacagaagtggaaaagcttatcacggagaatcagcggttagcatcaagccatgtggtcttgaggcaggacattgttgatacggagaaagagatgcaaatgatccgcacccacctaggtgaagttcagacagagactgatttgcagattagagatttgttggagagaatcagattaatggaggtagatatacatagtggtaatgtagtgaacaaggagcttcaccaaatgcatatggaggcaaagagacttattactgaaaggcagatgctaacccttgagatagaggatgtgactaaagaattacagaaactctctgcctctggggacaataaaagccttcctgaattgctttctgagctagataggctacggaaagagcatcataatttacgatctcagtttgaatttgagaaaaatacaaacgtcaagcaagttgagcagatgcggacaatggaaatgaacttgataaccatgaccaaacaagctgagaagttacgtgttgatgtggcaaatgctgaaagacgggcacaagagaggatctatggaacctaggac

SEQ ID NO: 202409 - DNA, 1300 bp, Zea Mays
ataaaaatgtaataaaatagtccaatcgccttgactaccgcttccggttccggatccgaatctcgccctcccctctctttcttgcctccaggtccggccgtccgggcggcgccgggaggagagaatggcctccacggcgtcgccgccggtgttcgagagggtggccgggatccgagccattgccgagtccggccgcttcaaggcatggttgctggaccagtttggcgttcttcatgacgggaagaagccgtaccccggcgccattctggcattggagaagctagcggagaatggggcaaagatggtgataatcagcaattcctctaggcggtcatctgtgacaatgaagaagctcaagagcctggggttcgacacgtcctgtttcctcgcgaccatcaccagtggggagctcacacatcagcaccttcagaagagagacgacccatggtttgctgctcttggaaggaagtgtatccatatcacttgggacgatcgaggggcaatttctctcgagggccttggtttgcaagttgtgaacaatgttgatgatgcagagttcatattagcccacgaaaagcgacttccaatggtggtagctaatccagattatgtcactgtcgaagctcgagatctccgtgtcatgcctggcactctggcagctaaatatgagagtcttggtggtgaagtgaaatggatggggaagcctgataaggtgatctatacatcagcgatgtccctagcgggcgttgatgcccgtgaatgtatcatggtgggtgattcgctgcaccacgacatcaaaggagccaatgcgtcagggatggcatccgcgttcgtcactggaggggtccatgcggacgaacttggactcggtgaatttggagaaactgctggggaggatgctgtcagttcgctgtgcagcaagcacggatcgtacccttcttatgttctgccttcattcgcgtggtagagatgcggcctagaatttttttttgttttaggtgcacgggaaagtgattttaggcagatattgttgttatggaaataagtgccacgcaatgatcaagccgctggaggtgtcattcttcttaataaataataagtgacacgcaatgctcaagccgctggaggcagatttgtatttgcatttgtagtgtgtgtgtgtctatatatgctgcctgtggtgtatataccgcctgtgctgcaatgttcggttgagactttagacagcgatactgtatgaaggattcacattgttctgctcaattatgtaaacccgctctattacttttcaaaaaaatta

SEQ ID NO: 202410 - DNA, 1561 bp, Zea Mays
gcaaggggaggacgacaattgaaaacaatatgtcatgggatggtttcttgcttattttgcacatttgtgtgttgcgttttcttgcttattttgcacatccgtttcagtttgatgtaaaaaaggtaaccctagctaacgtggcagacctcaaagcatcactcacacaccatcgtcctctccttttgccagcaccgcgaacccgccaccagccttctcccacccacgaagtacggaaggctgccggaaggagctctcacctcacatccatctctgtcgcgcccgtcatcctcctcctcctcccctcctcaactgctatcggatttgcgctgcagtggagatcgacccgggctgggaatttctttcgttggtaaggaaccctaatttggtcggatgggattttcatcttcgacgaagcccgcgagattgatcgaccttagctgacgcgagggattggaaagcgaacgctcgggcgtagttaattttctaggaagattggggtttcagctcaaacccccatgctcgatgctgaggacgaccctggcgggagatgacgaggatcttcgtgcagcgcgggaccgccggctcctcgtccagctccggccgctcgggctcgcaatcagcgcagcagccggcagcagctgcccgggaggagttgccgttgcaacctcagccacagctaccagaactattggctatagatgatgtaactgagcatttaaatgagggcaacgagaacaacagtagcagaattaagtttttgaggacggatgacaccatttcagagagctcgagctacgcagaggagagggctgccagggagaagcctcctaaggatgactctaatgtaatcaaccccacttccttggtagaggaaccgatagtgctccatacccctgatcagattgaacatggaaattctgtgccgtcaggaactaattcatcacagatggtgggtgcagcatcgcacccgccgccaccgccagctccgcctccaaaatcattgttggggaatagtgggttgtggagaatgggacctggaagttccaacagtgtgcggattggatctccaagaagaccagtagcttggccaccagtggcagctcggacatctgcttcaggttctcgtccttcttcgcctaggtcactcgttgatggtgaaggttacaatagtgctgatgaacagggtccctgttacgcctcgagttatgatgattcggaaagagagcgtatgtttgagcatgacctaaggcgagtgaaagggttggaaatcagaaagacggccgaagatgggaactgtctattcagagctgttgctgatcaagtttatggagatgcagaagcttatgacatggctaggcagatgtgtgttgattatatggaaagggaacgggatcatttctctcagtttataactgaaagttttacattatactgcaagaggaaaaggagagacaaggtttatggcaacaatgttgagatccaagcatttgcagagatgtacaatcgtcccattcacatatattcctacagtacagctctttacatgtttgctgttatcaca

SEQ ID NO: 202411 - DNA, 1272 bp, Zea Mays
gctaacgtggcagacctcaaagcatcactcacacaccatcgtcctctccttttgccagcaccgcgaacccgccaccagccttctcccacccacgaagtacggaaggctgccggaaggagctctcacctcacatccatctctgtcgcgcccgtcatcctcctcctcctcccctcctcaactgctatcggatttgcgctgcagtggagatcgacccgggctgggaatttctttcgttggtaaggaaccctaatttggtcggatgggattttcatcttcgacgaagcccgcgagattgatcgaccttagctgacgcgagggattggaaagcgaacgctcgggcgtagttaattttctaggaagattggggtttcagctcaaacccccatgctcgatgctgaggacgaccctggcgggagatgacgaggatcttcgtgcagcgcgggaccgccggctcctcgtccagctccggccgctcgggctcgcaatcagcgcagcagccggcagcagctgcccgggaggagttgccgttgcaacctcagccacagctaccagaactattggctatagatgatgtaactgagcatttaaatgagggcaacgagaacaacagtagcagaattaagtttttgaggacggatgacaccatttcagagagctcgagctacgcagaggagagggctgccagggagaagcctcctaaggatgactctaatgtaatcaaccccacttccttggtagaggaaccgatagtgctccatacccctgatcagattgaacatggaaattctgtgccgtcaggaactaattcatcacagatggtgggtgcagcatcgcacccgccgccaccgccagctccgcctccaaaatcattgttggggaatagtgggttgtggagaatgggacctggaagttccaacagtgtgcggattggatctccaagaagaccagtagcttggccaccagtggcagctcggacatctgcttcaggttctcgtccttcttcgcctaggtcactcgttgatggtgaaggttacaatagtgctgatgaacagggtccctgttacgcctcgagttatgatgattcggaaagagagcgtatgtttgagcatgacctaaggcgagtgaaagggttggaaatcagaaagacggccgaagatgggaactgtctattcagagctgttgctgatcaagtttatggagatgcagaagcttatgacatggctaggcagatgtgtgttgattatatgatatctgcctgcgctgccatgaatt

SEQ ID NO: 202412 - DNA, 557 bp, Zea Mays
atggtgacaagttttgctggacgctgcaagaaaggtgggcatagaaggggccgaagaactgtttcaagaccctaccaaaggagtcgatgagatcaatgataaatatcaactcagtggtggccagcctccaaatgtattcatgagggcgtttgagatggctgcaaaagatggagcttaatggcatttaaaaggagctcctccagtagtcttcgcatatgttaaaaaggaataggagccgaatttaacaataaagttccagcacagctcatcgctgatttgcgaaaaatatgtggaatcagttgtatttccgtagttctgatatggtgataattagtggtgaagatggtgtggatgttcactttcgaataaaattctaggcgatcggatatggcatatgggttagaatgccccatcatcagagcccggtctgtatttacatttggttcgataggatgtgtgcaagatatcagaaaacaacaaagttcagatttgatattcgaaaggaataaaaaaaaagctagcatacacagctgcatttagattgattgttaccattt

SEQ ID NO: 202413 - DNA, 1189 bp, Zea Mays
gggaccgtgaaggcgtgaaccgagcccacccaccaaccaaattccgcgagaccgcgactgcttctccatccttccacgaactagacgagggaagagcgctgaagctgtggaggaaaacgaaggatctccccgtgcttgtgtatgccaggtcgcctgctctccgtccgcatcccgtccctcgcgaaactcggcgctcccaggtgtgcaaaatccatggcttcagacactggcaagaagctcatccagatcgatgtgagctcggacacagtatgcccttggtgctttgtcggcaaaaagaacctcgagaaagcgatggagcaaagcagggacaagtttgacttcgaggtccgctggcatccgttctttctaaaccctgatgcgcctaaggagggcgtcaggaaatctgacttctacaaggcgaagtttggtcctgttcagtatgagcgtgtcatttctcgcatggccgagatatttcgaggactcgggcttgagtatgacatgtcggggctgacaggggatacgatggatagtcataggctcatagcacttgctggacaccaaggctatgacaagcaaaatgctcttgttggagaattattccttaattacttttgtgaaggaaagtatattggtgacaagcaggttttgctggacgctgcaagaaaggtgggcatagaaggggccgaagaactgtttcaagaccctaccaaaggagtcgatgagatcaatgataaatatcaactcagtggtggccagcctccaaatgtattcatgagggcgtttgagatggctgcaaaagatggagcttaatggcatttaaaaggagctcctccagtagtcttcgcatatgttaaaaaggaataggagccgaatttaacaataaagttccagcacagctcatcgctgatttgcgaaaaatatgtggaatcagttgtatttccgtagttctgatatggtgataattagtggtgaagatggtgtggatgttcactttcgaataaaattctaggcgatcggatatggcatatgggttagaatgccccatcatcagagcccggtctgtatttacatttggttcgataggatgtgtgcaagatatcagaaaacaacaaagttcagatttgatattcgaaaggaataaaaaaaaagctagcatacacagctgcatttagattgattgttaccattt

SEQ ID NO: 202414 - DNA, 1241 bp, Zea Mays
gtggaccaggtccaggggtgggttggcaggttgctgagactgagagcacgggaccgtgaaggcgtgaaccgagcccacccaccaaccaaattccgcgagaccgcgactgcttctccatccttccacgaactagacgagggaagagcgctgaagctgtggaggaaaacgaaggatctccccgtgcttgtgtatgccaggtcgcctgctctccgtccgcatcccgtccctcgcgaaactcggcgctcccagcaggtgtgcaaaatccatggcttcagacactggcaagaagctcatccagatcgatgtgagctcggacacagtatgcccttggtgctttgtcggcaaaaagaacctcgagaaagcgatggagcaaagcagggacaagtttgacttcgaggtccgctggcatccgttctttctaaaccctgatgcgcctaaggagggcgtcaggaaatctgacttctacaaggcgaagtttggtcctgttcagtatgagcgtgtcatttctcgcatggccgagatatttcgaggactcgggcttgagtatgacatgtcggggctgacaggggatacgatggatagtcataggctcatagcacttgctggacaccaaggctatgacaagcaaaatgctcttgttggagaattattccttaattacttttgtgaaggaaagtatattggtgacaagcaggttttgctggacgctgcaagaaaggtgggcatagaaggggccgaagaactgtttcaagaccctaccaaaggagtcgatgagatcaatgataaatatcaactcagtggtggccagcctccaaatgtattcatgagggcgtttgagatggctgcaaaagatggagcttaatggcatttaaaaggagctcctccagtagtcttcgcatatgttaaaaaggaataggagccgaatttaacaataaagttccagcacagctcatcgctgatttgcgaaaaatatgtggaatcagttgtatttccgtagttctgatatggtgataattagtggtgaagatggtgtggatgttcactttcgaataaaattctaggcgatcggatatggcatatgggttagaatgccccatcatcagagcccggtctgtatttacatttggttcgataggatgtgtgcaagatatcagaaaacaacaaagttcagatttgatattcgaaaggaataaaaaaaaagctagcatacacagctgcatttagattgattgttaccattt

SEQ ID NO: 202415 - DNA, 1349 bp, Zea Mays
attggacgtacaggaacggcagagaaagacagagcgcctcacgtgcctaccgtggaccaggtccaggggtgggttggcaggttgctgagactgagagcacgggaccgtgaaggcgtgaaccgagcccacccaccaaccaaattccgcgagaccgcgactgcttctccatccttccacgaactagacgagggaagagcgctgaagctgtggaggaaaacgaaggatctccccgtgcttgtgtatgccaggtcgcctgctctccgtccgcatcccgtccctcgcgaaactcggcgctcccagcaggtgtgcaaaatccatggcttcagacactggcaagaagctcatccagatcgatgtgagctcggacacagtatgcccttggtgctttgtcggcaaaaagaacctcgagaaagcgatggagcaaagcagggacaagtttgacttcgaggtccgctggcatccgttctttctaaaccctgatgcgcctaaggagggcgtcaggaaatctgacttctacaaggcgaagtttggtcctgttcagtatgagcgtgtcatttctcgcatggccgagatatttcgaggactcgggcttgagtatgacatgtcggggctgacaggggatacgatggatagtcataggctcatagcacttgctggacaccaaggctatgacaagcaaaatgctcttgttggagaattattccttaattacttttgtgaaggaaagtatattggtgacaagcaggttttgctggacgctgcaagaaaggtgggcatagaaggggccgaagaactgtttcaagaccctaccaaaggagtcgatgaggttcaggaagaactcaagaagtattcatctggcatctccggggtaccacattttgtgatcaatgataaatatcaactcagtggtggccagcctccaaatgtattcatgagggcgtttgagatggctgcaaaagatggagcttaatggcatttaaaaggagctcctccagtagtcttcgcatatgttaaaaaggaataggagccgaatttaacaataaagttccagcacagctcatcgctgatttgcgaaaaatatgtggaatcagttgtatttccgtagttctgatatggtgataattagtggtgaagatggtgtggatgttcactttcgaataaaattctaggcgatcggatatggcatatgggttagaatgccccatcatcagagcccggtctgtatttacatttggttcgataggatgtgtgcaagatatcagaaaacaacaaagttcagatttgatattcgaaaggaataaaaaaaaagctagcatacacagctgcatttagattgattgttaccattt

SEQ ID NO: 202416 - DNA, 2497 bp, Zea Mays
ctggattcctttgtttctgagcaccaatcttacgactgccttgcctttggcatgtctctaatttcgacagcttcgatactcctcctcctccacgcctgctccctgtccctgctcgccgccgcaagagtccccgacccggtagaacatggcgacgtgaacacggcgatgcttaccaacggctcggcctcggcgacgccgtcgtcccctgacagcagcagcaacggcaacttcgacatgtacttctgcttcctctgctcggggcgcgacccgctgctcattcaccactgccccatctactgggacgagtgccacctcatctgcgacgatgacatgtccaccgccactcctactccacctgctgttgcagtgtcgtcgtcgtcgtcgtcccgccccgtccccatggtgcaggtgcagggcgatgatgactgctacgtcatgaagctctacatgtccggccgctacgtcatcgtcgaacaccggccatgcaaatacatcgcctggtgcttcctcacctgcggcggcggggagctggcggcggccgaccggaaagccgtcacggccactgcgatccaggggacctctctgcctgccgagctatgcggcacgcaggtggtcaatgctccaccatctgctgccgctggtggtgcgcaccgacggcgctagctgcctacttatccgcgaactaaggcggctttacgcagaaggccctagaagcaagagtacctactgcaaagcgctatgaagagctctaccatgtcacatcacactcgttgttatgacacaccagaggtgtgcactatatatgacacaacaactacagtaagacggtagtagttggacgagtggggctagacgtctagacagagatgtaagtctctaatctcttgtgctataaaagagaagtgtagagcaacatagaaacagtttgttaacatcactaatgtgctaatttgttgttgtttggattggttttatgttgaacagagtggttctaaaaaagaaaattatgctcaaatgctgaaccatcctctcaaatcttccagagccgctccatctcaaccggctctggaaccaaacactacaaatgcagatatggagtaataattaatgatggtcgttaggattttttttttttttgctaatactcctagttagaaagtctgttaccccaatttgtttcattcagtgcagcgactttcggctgcgaataactcgttgctttagcgcacgcacactccatggtcagggatgctgcctattttgctaggtgtctctacaactctagcgggcttggtttcgcgcgcggtcgatcaggtaattctcaccaactctctattatgttcgaattgggaatagtgtcaggttcgatgtctagcaattctattacaagggtattcatacccatcctttcccccctcacatacttatgcataatacctctcctaagtactccattcagcgccactaatctgacgttaggcttaaccatcctctggctgtgtcttcgtggaccatcagctgtagcatcagtgtcttcttctgtccatcactgttgtaaccatgtgaaagctttgcttgatggcctactcatcctcccatgtagatagtgatttcggccagctggtatatgcaaacgagagtctagtacttcttcaggcatatgcaaacctgtggatagatctataaatgaatcactcaccggtgtgcgtacacccaatgcttcgaagatgggctattttgcataaggcgaagttgccacctatggttatgggggctatacaatatttagtgcagatggccaaggactttttcttctaacacacgtgtggcggactagtcatagtagggttgattaccattagagtgtgtgtgggttctttcgttctgtgtgctgtttaagcataggctgaaagacgtttcaaaggcttgtattagctcgatgtaatgcttgaaattatgaataaaatcttcctttataaaaaaagaaagaaagaaagaaagaaacgacatatagtaagcatgttggtatatattttttactgtgatgaacctaaagcacaagccggctgaagccggctgcgggctaattaaatagatctgtatacattgtgctactagcatgaatgaaatatatggctcatcattgaggccacaaacaaacaacaacttttcaactacaaggacaaatcgagtaggttcaacaacctttgcaaagaattagcacaacatctttgaatgtttgaaactaaccccgctagctattttattcatccacttgatataccaaaagaggtcccagatccactgaaatcggacatataatatttatcttggctgaactgctgagctcctgtcccttatactgaatttgaatggtttgaggtgatgtaaaacttgttcttaccaaggacagcattaagttgagttgtttgctttgctttgcttagttggtcaaaagatcgaacatgtcatcaactccgatcctcgtcgagaagtg

SEQ ID NO: 202417 - DNA, 389 bp, Zea Mays
atggcgccgccgcttgttccggcggctgttcccgccaacgcggtgggcctacgagttcaacgcggcgctgaccgtgccctttttccactggcttgtgggcccctcagaggtggtggaggtggaggtcggcggcgtccgacagcgcagggggagcgcatcgagaagtgccagtacctggagagcagcggctgcgtggggatgtgcgtcaacatgtgcaaggtccctacgcaagacttcttcaccaacgagttcgggctccccctcaccatgaacccaaatttcgaagacatgagctgcgagatgatatacggccaggtgccgcctctattggaagaggacccagcgtcgaagcaagcttgctacccgagccactgtgagttccatgtcga

SEQ ID NO: 202418 - DNA, 2327 bp, Zea Mays
gcggcatgcagatccgcagagcacacacgggcaccgggcgcaccagtgcaccaccgcatacggccgtgcgcttcctttccttcccccgccgccgcagatcttccccgcagtcccggttcccgttcaccacctccgaaccagaggaggaatggccatctactccttcctttctgttcgcaagcgcccagttgttgtcgtcgccgccgtcaccctcttcattgtcgtatcctctctcttcctcctcttcagccccgcaccgacagcgctcccgtttttctcctcctcctcttcccacctctcctctcaagcttcaattgctgccgtctcctctaacgcatttccacctgagaccccaacctctgttgtctccaactgggtcagcagcaacacttctgctgatcgcgtctctgctgacgcatctccgcccgtagtcggaaccgccatcgcgtctgatgcggtcagcaacagcacggctgacccgcctaggccagataccaccgccgctgctggcgacgcgaaggctgatgtgtcccaaccagatcacggcatgccccctgccgccactgaagcgagtggatcggcaggcaacggtgagacagccgcgggagtctcgagcgagagggatgaggaggggcaaggcggcggcggcgccgtggaggagctaccatcgtgggagctgtgcaaggtggggaagggggtggcggccgcggactacatcccctgcctcgacaacgtgaaggcggtcaaggcactcaagtcgctgcggcacatggagcaccgggagaggcactgcccgacagatccgaggccgaggtgcctcgtgccgctgcccgagaggtaccggcgtccggtgccgtggccacgcagccgtgacatgatttggtataataatgttcctcatccaaagttagtggaatacaagaaggaccagaactgggtcaggaagtctggtaactattttgttttccctggaggtgggactcaattcaaaaatggcgtggcttcatacattaaattcattgaacagattttaccaaacattcaatggggaatccatacaagaactgtccttgatgttggatgtggtgtggccagctttggtggatatttgcttgataggaatgtcattaccatgtctgttgcacccaaagatgagcatgaagctcagatacagtttgcactggagcgtgggattccagcatttttggcagtgattggaacacaaaagcttcctttccctgataattcatttgatgtcatccactgtgcaaggtgtagggtccactggtggaaaaccattgttggagctcaatagagtactcaggcctggagggtattacatttggtctgcaacacctgtctatcgcaaaaacccaagagatatagatgattggaatgcggtggtagctctgaccaaatcgatctgctggaggacagtggtaaggtctcgagatatcaataagatcggagttgttatataccaaaagccgacatcaaattcatgctcccttgagagaaaaaataatgaaccacctctgtgctctgagagtgatggatcacgtttcccttgttgcctctttcctgcagttccgagttcaggtgaagggaatagttgggccgtctcgtggcctgaaagacttaatattaagcactcggctacatctaacaattcttccattcagtttcctcaagaaaaaattgattctgatacaagttattggaaggaccttgtttcagaaatatatctcaacgaatttgcagttaattggtctagtgttcgcaatgttatggacatgaatgcgggttttggaggatttgcagcatcaattatcaatcgaccgttgtgggttatgaatgttgtacctgttgatcagccagatacattgcacatcattttcaacagaggtctgattggggtatatcatgactggtgtgaatcttttaacacatacccacgaacttatgatcttattcacatgagttatctcttagggccccttacgaaaaggtgccacatcattgaagttgcagctgaaattgacagaatacttagacctggtagatggtttgtgctgcaagacactatagacatgataagaaagatggaccctgttctcaggtctttgcattacaagactacaattgtcaaacatcaatttcttcttgccaccaagggtttctggcgccctggcagtataggttcttagtcatgatgattccggcttccacccaaaatgtgaatttgtacgaggtggatcgcaagatcgagaaccgacgacggtaaacgcacaaacgacacgagtttagacaagtccgaggtctcaatg

SEQ ID NO: 202419 - DNA, 2755 bp, Zea Mays
cggcatgcagatccgcagagcacacacgggcaccgggcgcaccagtgcaccaccgcatacggccgtgcgcttcctttccttcccccgccgccgcagatcttccccgcagtcccggttcccgttcaccacctccgaaccagaggaggaatggccatctactccttcctttctgttcgcaagcgcccagttgttgtcgtcgccgccgtcaccctcttcattgtcgtatcctctctcttcctcctcttcagccccgcaccgacagcgctcccgtttttctcctcctcctcttcccacctctcctctcaagcttcaattgctgccgtctcctctaacgcatttccacctgagaccccaacctctgttgtctccaactgggtcagcagcaacacttctgctgatcgcgtctctgctgacgcatctccgcccgtagtcggaaccgccatcgcgtctgatgcggtcagcaacagcacggctgacccgcctaggccagataccaccgccgctgctggcgacgcgaaggctgatgtgtcccaaccagatcacggcatgccccctgccgccactgaagcgagtggatcggcaggcaacggtgagacagccgcgggagtctcgagcgagagggatgaggaggggcaaggcggcggcggcgccgtggaggagctaccatcgtgggagctgtgcaaggtggggaagggggtggcggccgcggactacatcccctgcctcgacaacgtgaaggcggtcaaggcactcaagtcgctgcggcacatggagcaccgggagaggcactgcccgacagatccgaggccgaggtgcctcgtgccgctgcccgagaggtaccggcgtccggtgccgtggccacgcagccgtgacatgatttggtataataatgttcctcatccaaagttagtggaatacaagaaggaccagaactgggtcaggaagtctggtaactattttgttttccctggaggtgggactcaattcaaaaatggcgtggcttcatacattaaattcattgaacagattttaccaaacattcaatggggaatccatacaagaactgtccttgatgttggatgtggtgtggccagctttggtggatatttgcttgataggaatgtcattaccatgtctgttgcacccaaagatgagcatgaagctcagatacagtttgcactggagcgtgggattccagcatttttggcagtgattggaacacaaaagcttcctttccctgataattcatttgatgtcatccactgtgcaaggtgtagggtccactggtatgctgatggtggaaaaccattgttggagctcaatagagtactcaggcctggagggtattacatttggtctgcaacacctgtctatcgcaaaaacccaagagatatagatgattggaatgcggtggtagctctgaccaaatcgatctgctggaggacagtggtaaggtctcgagatatcaataagatcggagttgttatataccaaaagccgacatcaaattcatgctcccttgagagaaaaaataatgaaccacctctgtgctctgagagtgatggatcacgtttcccttgttccgagttcaggtgaagggaatagttgggccgtctcgtggcctgaaagacttaatattaagcactcggctacatctaacaattcttccattcagtttcctcaagaaaaaattgattctgatacaagttattggaaggaccttgtttcagaaatatatctcaacgaatttgcagttaattggtctagtgttcgcaatgttatggacatgaatgcgggttttggaggatttgcagcatcaattatcaatcgaccgttgtgggttatgaatgttgtacctgttgatcagccagatacattgcacatcattttcaacagaggtctgattggggtatatcatgactggtgtgaatcttttaacacatacccacgaacttatgatcttattcacatgagttatctcttagggccccttacgaaaaggtgccacatcattgaagttgcagctgaaattgacagaatacttagacctggtagatggtttgtgctgcaagacactatagacatgataagaaagatggaccctgttctcaggtctttgcattacaagactacaattgtcaaacatcaatttcttcttgccaccaagggtttctggcgccctggcagtataggttcttagtcatgatgattccggcttccacccaaaatggtattggctccatggactcattgtgttgattcttcttattctttttacgtcgattcttctcatagcatagattagatgcttcattgaagccccatatcaagttgagtttcatgttccaattttcccgctttgttttactattttaaaaatgttttggccttggtcatgcaaatttctgtttgttattgcaaacaggttaaatcaataggttagtgctaaaaattctgttaggcgaattctattttttttcaatatatatttagctataaacttctactgtatgacatcaatattgtccatttagccatgattcttgccttcttgcaaaagaacaagtataacctttgaattatttctttactactcaattttatgcttcctccatcacataatataagggattctgagtttgttcaaagttgaactattctaagttagaccttgtctgtactatccgttataagttgcttttacttttttggtatgtgcattttgctatgtatctagacatactttatctctagg

SEQ ID NO: 202420 - DNA, 2663 bp, Zea Mays
ctgcggcatgcagatccgcagagcacacacgggcaccgggcgcaccagtgcaccaccgcatacggccgtgcgcttcctttccttcccccgccgccgcagatcttccccgcagtcccggttcccgttcaccacctccgaaccagaggaggaatggccatctactccttcctttctgttcgcaagcgcccagttgttgtcgtcgccgccgtcaccctcttcattgtcgtatcctctctcttcctcctcttcagccccgcaccgacagcgctcccgtttttctcctcctcctcttcccacctctcctctcaagcttcaattgctgccgtctcctctaacgcatttccacctgagaccccaacctctgttgtctccaactgggtcagcagcaacacttctgctgatcgcgtctctgctgacgcatctccgcccgtagtcggaaccgccatcgcgtctgatgcggtcagcaacagcacggctgacccgcctaggccagataccaccgccgctgctggcgacgcgaaggctgatgtgtcccaaccagatcacggcatgccccctgccgccactgaagcgagtggatcggcaggcaacggtgagacagccgcgggagtctcgagcgagagggatgaggaggggcaaggcggcggcggcgccgtggaggagctaccatcgtgggagctgtgcaaggtggggaagggggtggcggccgcggactacatcccctgcctcgacaacgtgaaggcggtcaaggcactcaagtcgctgcggcacatggagcaccgggagaggcactgcccgacagatccgaggccgaggtgcctcgtgccgctgcccgagaggtaccggcgtccggtgccgtggccacgcagccgtgacatgatttggtataataatgttcctcatccaaagttagtggaatacaagaaggaccagaactgggtcaggaagtctggtaactattttgttttccctggaggtgggactcaattcaaaaatggcgtggcttcatacattaaattcattgaacagattttaccaaacattcaatggggaatccatacaagaactgtccttgatgttggatgtggtgtggccagctttggtggatatttgcttgataggaatgtcattaccatgtctgttgcacccaaagatgagcatgaagctcagatacagtttgcactggagcgtgggattccagcatttttggcagtgattggaacacaaaagcttcctttccctgataattcatttgatgtcatccactgtgcaaggtgtagggtccactggtatgctgatggtggaaaaccattgttggagctcaatagagtactcaggcctggagggtattacatttggtctgcaacacctgtctatcgcaaaaacccaagagatatagatgattggaatgcggtggtagctctgaccaaatcgatctgctggaggacagtggtaaggtctcgagatatcaataagatcggagttgttatataccaaaagccgacatcaaattcatgctcccttgagagaaaaaataatgaaccacctctgtgctctgagagtgatggatcacgtttcccttgtttcctcaagaaaaaattgattctgatacaagttattggaaggaccttgtttcagaaatatatctcaacgaatttgcagttaattggtctagtgttcgcaatgttatggacatgaatgcgggttttggaggatttgcagcatcaattatcaatcgaccgttgtgggttatgaatgttgtacctgttgatcagccagatacattgcacatcattttcaacagaggtctgattggggtatatcatgactggtgtgaatcttttaacacatacccacgaacttatgatcttattcacatgagttatctcttagggccccttacgaaaaggtgccacatcattgaagttgcagctgaaattgacagaatacttagacctggtagatggtttgtgctgcaagacactatagacatgataagaaagatggaccctgttctcaggtctttgcattacaagactacaattgtcaaacatcaatttcttcttgccaccaagggtttctggcgccctggcagtataggttcttagtcatgatgattccggcttccacccaaaatggtattggctccatggactcattgtgttgattcttcttattctttttacgtcgattcttctcatagcatagattagatgcttcattgaagccccatatcaagttgagtttcatgttccaattttcccgctttgttttactattttaaaaatgttttggccttggtcatgcaaatttctgtttgttattgcaaacaggttaaatcaataggttagtgctaaaaattctgttaggcgaattctattttttttcaatatatatttagctataaacttctactgtatgacatcaatattgtccatttagccatgattcttgccttcttgcaaaagaacaagtataacctttgaattatttctttactactcaattttatgcttcctccatcacataatataagggattctgagtttgttcaaagttgaactattctaagttagaccttgtctgtactatccgttataagttgcttttacttttttggtatgtgcattttgctatgtatctagacatactttatctctagg

SEQ ID NO: 202421 - DNA, 2575 bp, Zea Mays
cgcgttctgcggcgcagcggctgggctgaggacggcgatgctcacacacatgcttgaaacaggtacacattgggaattcaccaacctatagacttgaaaggaagcttggaaagggaggatttggacaagtatacgttggtcgacgtatttcagctcctcgtctcagtgaccgtaaccctggttcaaatgctttagaggttgcactgaaatttgaacaccaatccagcaaaggttgcaactttggagctccttatgagtggcaagtttacaacactcttagtgggaaccatggtgtcccacgggtacactacaaaggaaagcagggagagttttacatcatggttatggatattttgggaccaagcctatgggatgtttggaataataattcccactcgatgtctgttgagatggttgcttgcataggtatagaggcaatctccatactggaaaagatgcactctaaagggtatgtccatggtgatgtgaagcctgagaacttcttgcttggtcctcctggtaccccagaggagaagaagctttttcttgttgaccttggattggcaactaaatggaaggatgctggtacggggcaccatgttgaatatgatcagagacctgatatttttaggggaactgttcgctatgctagcgtgcatgcccacttgggaagaactgggagtaggagagatgatcttgaatccctcgcatacactcttatttttcttctccgtggccgcctcccttggcaaggataccaaggagagaacaaaggttttcttgtctgcaagaaaaagatggcgacatctccggagtctctgtgcatctctctttttgatggtattgttggcccaaatccagacataagaccgataaacactgatggtgcccaaaagctagtatatcaggttgggcagaagagaggtcgcttaatagtggacgaaaatgatgatgagcaacctaagaaaaagatcagaatggggatgccggcaactcagtggattagtgtctacaatgcccgtcgacctatgaaacagaggtaccactacaacgtagccgataatagattggtgcagcatattcaaaaggggaacgaagatggcttgtttattagttcagttgcctccagctcaaacctgtgggctttaattatggatgctggcactggttttacatctcaagtatacgaactttctagttactttcttcacaaggaatggataatggaacagtgggagagaaatttctatatcactgcactggctggtgcgaataatggaagctctttggtgattatgtcaagaggaacacaatatgcccagcagtcctacaaagtaagtgatacatttcctttcaaatggataaacaaaaagtggaaggagggcttctatgtcactgctatggcaacagctggaagccgatgggcagttgtcatgtcccgcaatgctggtttcacttctcaggtagtggagcttgatttcttatatccaagtgagggcatccacatgcgttgggacaatggctatcgcattacggcaacggctgccacatgggaccaggcggcctttatcttgagcataccaaggagaaagcctactgatgaaacacaggagaccctgagaacatctgcttttcctagccagcatgtgaaggacaaatggtccaacaacctatacctagcttccatctgttatggaagatcggtgtcctgaagcccgttttcacgatttggtctggttgctgagaggtatattgatatcaaatacaggtggttttatgatatcaatggggcattttgaagctgaaaactctgctaacctacttacctgcaactaacaaaaggtaacctatatatgaggaaaaaagaaagcaaagtctgttgtgtttcgctaatctctaccatggagcaaaagaacattgcggtatgcctttttttttaattgggctgtgtataaattatccaaagtattaggttgtgctgtaaagaatgtagaagtgtacctgctggacggttgccatgtatataaagtcgaattttttacaatgttgtttcgaattacaaagatggaatttgtagctttttcttcattcatctattcaagttacagatcaatagctactcccctccccccaaattataaaaggttcttgtcttttgaagatcattgcttttgtaatgtatctagatatatgctatgttgagatatatagcaaaaaactatctaaaaaaagtagaacgtcttacatttttaaaaaaaagatgtggtatgatgtagttcgtttgggtacatcacccaggatacaaaaaaatgcttgtatgtatgtcgttgatggtccgacaagttcgctttctctcttcgatcccagaactagagttggactgctatagcaatacctaaaagcagtatgatagcaacacacacaaaaggaagtcttgtttttcactatgaatcaattgtcctgttgttccattggacatctacagtgttgctgcatttgctgcaaaacacagaacagtcagaaagaaaaaaacgaagaaacaaggggcgccttctcgttgggcttgggcaggagg

SEQ ID NO: 202422 - DNA, 2737 bp, Zea Mays
cgcgttctgcggcgcagcggctgggctgaggacggcgatgctcacacacatgcttgaaacaggtacacattgggaattcaccaacctatagacttgaaaggaagcttggaaagggaggatttggacaagtatacgttggtcgacgtatttcagctcctcgtctcagtgaccgtaaccctggttcaaatgctttagaggttgcactgaaatttgaacaccaatccagcaaaggttgcaactttggagctccttatgagtggcaagtttacaacactcttagtgggaaccatggtgtcccacgggtacactacaaaggaaagcagggagagttttacatcatggttatggatattttgggaccaagcctatgggatgtttggaataataattcccactcgtgggatgtctgttgagatggttgcttgcataggtatagaggcaatctccatactggaaaagatgcactctaaagggtatgtccatggtgatgtgaagcctgagaacttcttgcttggtcctcctggtaccccagaggagaagaagctttttcttgttgaccttggattggcaactaaatggaaggatgctggtacggggcaccatgttgaatatgatcagagacctgatatttttaggggaactgttcgctatgctagcgtgcatgcccacttgggaagaactgggagtaggagagatgatcttgaatccctcgcatacactcttatttttcttctccgtggccgcctcccttggcaaggataccaaggagagaacaaaggttttcttgtctgcaagaaaaagatggcgacatctccggagtctctgtgtggaatctgtccacaacctttccggaattttgttgagtatgtcgtgaacttgaaatttgatgaagaaccaaattatgctaggtgcatctctctttttgatggtattgttggcccaaatccagacataagaccgataaacactgatggtgcccaaaagctagtatatcaggttgggcagaagagaggtcgcttaatagtggacgaaaatgatgatgagcaacctaagaaaaagatcagaatggggatgccggcaactcagtggattagtgtctacaatgcccgtcgacctatgaaacagaggtcagcatgatgcacatatctgcataatggcagtaacatgaattttccattgtcttgccacatttgtttatcaggtaccactacaacgtagccgataatagattggtgcagcatattcaaaaggggaacgaagatggcttgtttattagttcagttgcctccagctcaaacctgtgggctttaattatggatgctggcactggttttacatctcaagtatacgaactttctagttactttcttcacaaggaatggataatggaacagtgggagagaaatttctatatcactgcactggctggtgcgaataatggaagctctttggtgattatgtcaagaggaacacaatatgcccagcagtcctacaaagtaagtgatacatttcctttcaaatggataaacaaaaagtggaaggagggcttctatgtcactgctatggcaacagctggaagccgatgggcagttgtcatgtcccgcaatgctggtttcacttctcaggtagtggagcttgatttcttatatccaagtgagggcatccacatgcgttgggacaatggctatcgcattacggcaacggctgccacatgggaccaggcggcctttatcttgagcataccaaggagaaagcctactgatgaaacacaggagaccctgagaacatctgcttttcctagccagcatgtgaaggacaaatggtccaacaacctatacctagcttccatctgttatggaagatcggtgtcctgaagcccgttttcacgatttggtctggttgctgagaggtatattgatatcaaatacaggtggttttatgatatcaatggggcattttgaagctgaaaactctgctaacctacttacctgcaactaacaaaaggtaacctatatatgaggaaaaaagaaagcaaagtctgttgtgtttcgctaatctctaccatggagcaaaagaacattgcggtatgcctttttttttaattgggctgtgtataaattatccaaagtattaggttgtgctgtaaagaatgtagaagtgtacctgctggacggttgccatgtatataaagtcgaattttttacaatgttgtttcgaattacaaagatggaatttgtagctttttcttcattcatctattcaagttacagatcaatagctactcccctccccccaaattataaaaggttcttgtcttttgaagatcattgcttttgtaatgtatctagatatatgctatgttgagatatatagcaaaaaactatctaaaaaaagtagaacgtcttacatttttaaaaaaaagatgtggtatgatgtagttcgtttgggtacatcacccaggatacaaaaaaatgcttgtatgtatgtcgttgatggtccgacaagttcgctttctctcttcgatcccagaactagagttggactgctatagcaatacctaaaagcagtatgatagcaacacacacaaaaggaagtcttgtttttcactatgaatcaattgtcctgttgttccattggacatctacagtgttgctgcatttgctgcaaaacacagaacagtcagaaagaaaaaaacgaagaaacaaggggcgccttctcgttgggcttgggcaggagg

SEQ ID NO: 202423 - DNA, 2690 bp, Zea Mays
cgcgttctgcggcgcagcggctgggctgaggacggcgatgctcacacacatgcttgaaacaggtacacattgggaattcaccaacctatagacttgaaaggaagcttggaaagggaggatttggacaagtatacgttggtcgacgtatttcagctcctcgtctcagtgaccgtaaccctggttcaaatgctttagaggttgcactgaaatttgaacaccaatccagcaaaggttgcaactttggagctccttatgagtggcaagtttacaacactcttagtgggaaccatggtgtcccacgggtacactacaaaggaaagcagggagagttttacatcatggttatggatattttgggaccaagcctatgggatgtttggaataataattcccactcgatgtctgttgagatggttgcttgcataggtatgtccatggtgatgtgaagcctgagaacttcttgcttggtcctcctggtaccccagaggagaagaagctttttcttgttgaccttggattggcaactaaatggaaggatgctggtacggggcaccatgttgaatatgatcagagacctgatatttttaggggaactgttcgctatgctagcgtgcatgcccacttgggaagaactgggagtaggagagatgatcttgaatccctcgcatacactcttatttttcttctccgtggccgcctcccttggcaaggataccaaggagagaacaaaggttttcttgtctgcaagaaaaagatggcgacatctccggagtctctgtgtggaatctgtccacaacctttccggaattttgttgagtatgtcgtgaacttgaaatttgatgaagaaccaaattatgctaggtgcatctctctttttgatggtattgttggcccaaatccagacataagaccgataaacactgatggtgcccaaaagctagtatatcaggttgggcagaagagaggtcgcttaatagtggacgaaaatgatgatgagcaacctaagaaaaagatcagaatggggatgccggcaactcagtggattagtgtctacaatgcccgtcgacctatgaaacagaggtcagcatgatgcacatatctgcataatggcagtaacatgaattttccattgtcttgccacatttgtttatcaggtaccactacaacgtagccgataatagattggtgcagcatattcaaaaggggaacgaagatggcttgtttattagttcagttgcctccagctcaaacctgtgggctttaattatggatgctggcactggttttacatctcaagtatacgaactttctagttactttcttcacaaggaatggataatggaacagtgggagagaaatttctatatcactgcactggctggtgcgaataatggaagctctttggtgattatgtcaagaggaacacaatatgcccagcagtcctacaaagtaagtgatacatttcctttcaaatggataaacaaaaagtggaaggagggcttctatgtcactgctatggcaacagctggaagccgatgggcagttgtcatgtcccgcaatgctggtttcacttctcaggtagtggagcttgatttcttatatccaagtgagggcatccacatgcgttgggacaatggctatcgcattacggcaacggctgccacatgggaccaggcggcctttatcttgagcataccaaggagaaagcctactgatgaaacacaggagaccctgagaacatctgcttttcctagccagcatgtgaaggacaaatggtccaacaacctatacctagcttccatctgttatggaagatcggtgtcctgaagcccgttttcacgatttggtctggttgctgagaggtatattgatatcaaatacaggtggttttatgatatcaatggggcattttgaagctgaaaactctgctaacctacttacctgcaactaacaaaaggtaacctatatatgaggaaaaaagaaagcaaagtctgttgtgtttcgctaatctctaccatggagcaaaagaacattgcggtatgcctttttttttaattgggctgtgtataaattatccaaagtattaggttgtgctgtaaagaatgtagaagtgtacctgctggacggttgccatgtatataaagtcgaattttttacaatgttgtttcgaattacaaagatggaatttgtagctttttcttcattcatctattcaagttacagatcaatagctactcccctccccccaaattataaaaggttcttgtcttttgaagatcattgcttttgtaatgtatctagatatatgctatgttgagatatatagcaaaaaactatctaaaaaaagtagaacgtcttacatttttaaaaaaaagatgtggtatgatgtagttcgtttgggtacatcacccaggatacaaaaaaatgcttgtatgtatgtcgttgatggtccgacaagttcgctttctctcttcgatcccagaactagagttggactgctatagcaatacctaaaagcagtatgatagcaacacacacaaaaggaagtcttgtttttcactatgaatcaattgtcctgttgttccattggacatctacagtgttgctgcatttgctgcaaaacacagaacagtcagaaagaaaaaaacgaagaaacaaggggcgccttctcgttgggcttgggcaggagg

SEQ ID NO: 202424 - DNA, 2674 bp, Zea Mays
tgataacccaaggatggcgagatactgagatggtacacattgggaattcaccaacctatagacttgaaaggaagcttggaaagggaggatttggacaagtatacgttggtcgacgtatttcagctcctcgtctcagtgaccgtaaccctggttcaaatgctttagagcaaaggttgcaactttggagctccttatgagtggcaagtttacaacactcttagtgggaaccatggtgtcccacgggtacactacaaaggaaagcagggagagttttacatcatggttatggatattttgggaccaagcctatgggatgtttggaataataattcccactcgatgtctgttgagatggttgcttgcataggtatagaggcaatctccatactggaaaagatgcactctaaagggtatgtccatggtgatgtgaagcctgagaacttcttgcttggtcctcctggtaccccagaggagaagaagctttttcttgttgaccttggattggcaactaaatggaaggatgctggtacggggcaccatgttgaatatgatcagagacctgatatttttaggggaactgttcgctatgctagcgtgcatgcccacttgggaagaactgggagtaggagagatgatcttgaatccctcgcatacactcttatttttcttctccgtggccgcctcccttggcaaggataccaaggagagaacaaaggttttcttgtctgcaagaaaaagatggcgacatctccggagtctctgtgtggaatctgtccacaacctttccggaattttgttgagtatgtcgtgaacttgaaatttgatgaagaaccaaattatgctaggtgcatctctctttttgatggtattgttggcccaaatccagacataagaccgataaacactgatggtgcccaaaagctagtatatcaggttgggcagaagagaggtcgcttaatagtggacgaaaatgatgatgagcaacctaagaaaaagatcagaatggggatgccggcaactcagtggattagtgtctacaatgcccgtcgacctatgaaacagaggtcagcatgatgcacatatctgcataatggcagtaacatgaattttccattgtcttgccacatttgtttatcaggtaccactacaacgtagccgataatagattggtgcagcatattcaaaaggggaacgaagatggcttgtttattagttcagttgcctccagctcaaacctgtgggctttaattatggatgctggcactggttttacatctcaagtatacgaactttctagttactttcttcacaaggaatggataatggaacagtgggagagaaatttctatatcactgcactggctggtgcgaataatggaagctctttggtgattatgtcaagaggaacacaatatgcccagcagtcctacaaagtaagtgatacatttcctttcaaatggataaacaaaaagtggaaggagggcttctatgtcactgctatggcaacagctggaagccgatgggcagttgtcatgtcccgcaatgctggtttcacttctcaggtagtggagcttgatttcttatatccaagtgagggcatccacatgcgttgggacaatggctatcgcattacggcaacggctgccacatgggaccaggcggcctttatcttgagcataccaaggagaaagcctactgatgaaacacaggagaccctgagaacatctgcttttcctagccagcatgtgaaggacaaatggtccaacaacctatacctagcttccatctgttatggaagatcggtgtcctgaagcccgttttcacgatttggtctggttgctgagaggtatattgatatcaaatacaggtggttttatgatatcaatggggcattttgaagctgaaaactctgctaacctacttacctgcaactaacaaaaggtaacctatatatgaggaaaaaagaaagcaaagtctgttgtgtttcgctaatctctaccatggagcaaaagaacattgcggtatgcctttttttttaattgggctgtgtataaattatccaaagtattaggttgtgctgtaaagaatgtagaagtgtacctgctggacggttgccatgtatataaagtcgaattttttacaatgttgtttcgaattacaaagatggaatttgtagctttttcttcattcatctattcaagttacagatcaatagctactcccctccccccaaattataaaaggttcttgtcttttgaagatcattgcttttgtaatgtatctagatatatgctatgttgagatatatagcaaaaaactatctaaaaaaagtagaacgtcttacatttttaaaaaaaagatgtggtatgatgtagttcgtttgggtacatcacccaggatacaaaaaaatgcttgtatgtatgtcgttgatggtccgacaagttcgctttctctcttcgatcccagaactagagttggactgctatagcaatacctaaaagcagtatgatagcaacacacacaaaaggaagtcttgtttttcactatgaatcaattgtcctgttgttccattggacatctacagtgttgctgcatttgctgcaaaacacagaacagtcagaaagaaaaaaacgaagaaacaaggggcgccttctcgttgggcttgggcaggagg

SEQ ID NO: 202425 - DNA, 2690 bp, Zea Mays
tcgattgataacccaaggatggcgagatactgagatggtacacattgggaattcaccaacctatagacttgaaaggaagcttggaaagggaggatttggacaagtatacgttggtcgacgtatttcagctcctcgtctcagtgaccgtaaccctggttcaaatgctttagaggttgcactgaaatttgaacaccaatccagcaaaggttgcaactttggagctccttatgagtggcaagtttacaacactcttagtgggaaccatggtgtcccacgggtacactacaaaggaaagcagggagagttttacatcatggttatggatattttgggaccaagcctatgggatgtttggaataataattcccactcgatgtctgttgagatggttgcttgcataggtatagaggcaatctccatactggaaaagatgcactctaaagggtatgtccatggtgatgtgaagcctgagaacttcttgcttggtcctcctggtaccccagaggagaagaagctttttcttgttgaccttggattggcaactaaatggaaggatgctggtacggggcaccatgttgaatatgatcagagacctgatatttttaggggaactgttcgctatgctagcgtgcatgcccacttgggaagaactgggagtaggagagatgatcttgaatccctcgcatacactcttatttttcttctccgtggccgcctcccttggcaaggataccaaggagagaacaaaggttttcttgtctgcaagaaaaagatggcgacatctccggagtctctgtgtggaatctgtccacaacctttccggaattttgttgagtatgtcgtgaacttgaaatttgatgaagaaccaaattatgctaggtgcatctctctttttgatggtattgttggcccaaatccagacataagaccgataaacactgatggtgcccaaaagctagtatatcaggttgggcagaagagaggtcgcttaatagtggacgaaaatgatgatgagcaacctaagaaaaagatcagaatggggatgccggcaactcagtggattagtgtctacaatgcccgtcgacctatgaaacagaggtcagcatgatgcacatatctgcataatggcagtaacatgaattttccattgtcttgccacatttgtttatcaggtaccactacaacgtagccgataatagattggtgcagcatattcaaaaggggaacgaagatggcttgtttattagttcagttgcctccagctcaaacctgtgggctttaattatggatgctggcactggttttacatctcaagtatacgaactttctagttactttcttcacaagtgggagagaaatttctatatcactgcactggctggtgcgaataatggaagctctttggtgattatgtcaagaggaacacaatatgcccagcagtcctacaaagtaagtgatacatttcctttcaaatggataaacaaaaagtggaaggagggcttctatgtcactgctatggcaacagctggaagccgatgggcagttgtcatgtcccgcaatgctggtttcacttctcaggtagtggagcttgatttcttatatccaagtgagggcatccacatgcgttgggacaatggctatcgcattacggcaacggctgccacatgggaccaggcggcctttatcttgagcataccaaggagaaagcctactgatgaaacacaggagaccctgagaacatctgcttttcctagccagcatgtgaaggacaaatggtccaacaacctatacctagcttccatctgttatggaagatcggtgtcctgaagcccgttttcacgatttggtctggttgctgagaggtatattgatatcaaatacaggtggttttatgatatcaatggggcattttgaagctgaaaactctgctaacctacttacctgcaactaacaaaaggtaacctatatatgaggaaaaaagaaagcaaagtctgttgtgtttcgctaatctctaccatggagcaaaagaacattgcggtatgcctttttttttaattgggctgtgtataaattatccaaagtattaggttgtgctgtaaagaatgtagaagtgtacctgctggacggttgccatgtatataaagtcgaattttttacaatgttgtttcgaattacaaagatggaatttgtagctttttcttcattcatctattcaagttacagatcaatagctactcccctccccccaaattataaaaggttcttgtcttttgaagatcattgcttttgtaatgtatctagatatatgctatgttgagatatatagcaaaaaactatctaaaaaaagtagaacgtcttacatttttaaaaaaaagatgtggtatgatgtagttcgtttgggtacatcacccaggatacaaaaaaatgcttgtatgtatgtcgttgatggtccgacaagttcgctttctctcttcgatcccagaactagagttggactgctatagcaatacctaaaagcagtatgatagcaacacacacaaaaggaagtcttgtttttcactatgaatcaattgtcctgttgttccattggacatctacagtgttgctgcatttgctgcaaaacacagaacagtcagaaagaaaaaaacgaagaaacaaggggcgccttctcgttgggcttgggcaggagg

SEQ ID NO: 202426 - DNA, 2908 bp, Zea Mays
gggaaaggctaaaatttatttgcaggttcatttgttatgacctttatatgtatcctggctgtaatgatatgcttgggggggggaggtccagaggacaaccatgtaacaataaccagcaagaaatcagttactttgcaaatacggtgatagaaaggtagctacttgagaagaaatccaggggctgcccgcactcatgattctctgtccttattctctcaccattttgcggggtaaagcagtgagcaaagaaagaattgagattttgacccttaggtttatggttatgacaggacgctgttccagcccttcgacgtgccttcaaatgagcctcctcgttcatctgaaaagttcaaaggaaacactatcaacgggcagtctaatagtacaagaagagaacctttgaggatgtcctcacagaccaagaacaaggacgtctgtgcttcaaaatcaattgccaagtgcacctcacagcatagagtgggcaacaccatcatgtcttctggaaagaaagtggtcagtgatgatgaatttatggttccttccatctgttatcctagattttatcgacagtctactcaagatcatgcagataaatcaaaaccccaatctactacaaacccacacaaaagtcctgcaatgtccaaatcatctgtagagtgctatagtactgtgaacaagcacttggacaaaatcaatgaagctgataggaggttaatgaactctccaaaggttaaggagaaagaagcagtgcaaggatcaaaagctgtggaagttaaagaaaagagttcatcatttcaggcatcagaaaagttcaaagacaaatatgctaagctatgtcaaatgaggaataaggcaagtaatataaatcattgtgacaacaacggttgccaacctgcaagcgtgaatggaaatttcacagaagcaaagaaccctacagcagctagaaatacatcttcctgtaaaccatgtactgatgtagatagctctaacaggaagtctaatttactggaaagaagcccacgggaagttggtgctaagagaaaaagaggacatcacaatggagagcaaaatgatgatttatctgactcctcagtggaatgcatacctgggggggagatctctccagatgaaattgttgctgctattggtccaaagcatttctggaaagcaagaagagctattcagaatcagcagagggtttttgctgtccaagtgttcgagctgcataagctgataaaagtgcagaaattaatcgcggcatctccacatctgcttattgaaggtgatcctgtccttggcaatgcattaacaggaaaaaggaacaaacttcctaaaggaaattcgaaagttcagaccctgtcaatcacaaacaaagatgatatccagccaaccctagagcaaccagagttatcaaaacaagacacagaaggaaacttattggcccattctcatgatgatggacttggtgacaaccatcataatcaagctgcaacaaatgaaacctttacaagcaaccctccagctatgcatgttgctcctgacaacaaacagaataactggtgcatgaatccaccgcagaatcaatggcttgtcccagttatgtcgccttctgaaggtcttgtctataagccttttgccggcccttgtcccccagttggaaatctgctgacaccattttacgccaactgtgctccgtcaaggctgccttctacaccatatggcgttcctattcctcaccagccacagcacatggtccctcctggtgcccctgccatgcatatgaactacttcccgcctttcagtatgccagtgatgaatccaggaacaccagcatctgcagtggagcaagggagccatgctgctgcgccacagcctcatgggcacatggaccagcagtcgctgatctcatgtaacatgtcacacccgagtggcgtttggaggtttcttgcatcaagggacagcgagccacaggccagcagcgccaccagccctttcgacaggctccaagtccaaggtgatggaagtgctccgttgtcattctttcccacggcttcagctccgaatgtccagcctccgccctcatctggaggccgggaccgggaccagcagaaccatgtaatcagggttgttccgcgtaacgcacagactgcttcagtcccgaaagcccaacctcagccgtcatccggaggccgggaccaaaagaaccatgtaatcagggttgttccgcataacgcgcagactgcttcggagtcagcagcgtggatcttccggtcaatacaaatggagaggaaccaaaatgattcgtagctggttaccatatactttcgtgtcatccgatggcagcttagtgcagcattgcagtttacagggctacccgagctgcagattatggtggctcctgtattctgaccactgattgcgctttacccgatcgtcatagatattggatgatatgatcttgtgttctatgcagagttgtaagccaaagttgtgcccctgaagactgaagtgacagccctgaagttgggagtccttcctgattgtgctatgactggaattggtatatatataggttacttgaacggtttcactgtgttgagctcaccacacggccgcgcttctgtaacatacaatacaatagactatgagtggtacagtaggaagcagcagtcagaaaatgactgctggtaccatgctacggggtcgctatagattgatgtgtaccggtactctggttctggtagtatatgctgctgtataattcagtgtttaattatctatatattgtacattagctgtcaagcctgtaaggcattgtattgtgggcaatgaatttggttgcaaatgttcgtgtactgggaaccatcttttgattgtttgtgtttttgaacattgctttgcgcctttg

SEQ ID NO: 202427 - DNA, 3114 bp, Zea Mays
ccaaaaaaacctgcttgcacatactcaaccgccagcgtctccactctccggtctccctctcatggtggagcccacctccgcctttgtggatcagagcgagcattcctttcccttcccttccctggcatcagaatcaaacgtgtccccgcagacgctcccaatcccatgcgcccctctgctctcacggtttgatttccctttcagttgggccgccatggccgcggtagcagctgtgcgcctgcaccccggcctcccccatcgccggccctgacactgggtaaacgtggtggctgaagctgctgctgaggattcgggatcttcttgctgccgccacgagctgcctgcgtgatattgacacggcgcgctcccctggctcctgggcatgacgaggggaggcggtggacaaggaggcaaggaggagccggggaaggtgatgggtccgctgttcccgcggctccacgtcagcgacgcaggcaagggcggcggcccgcgggctccgccaaggaacaagatggcgctctacgagcagttcaccgtgccgtccaaccgcttcagctcccccgcggcctccgcccgcgccgcgggggccagcctcgtgccctccacggcggctgcccaggtttatggttatgacaggacgctgttccagcccttcgacgtgccttcaaatgagcctcctcgttcatctgaaaagttcaaaggaaacactatcaacgggcagtctaatagtacaagaagagaacctttgaggatgtcctcacagaccaagaacaaggacgtctgtgcttcaaaatcaattgccaagtgcacctcacagcatagagtgggcaacaccatcatgtcttctggaaagaaagtggtcagtgatgatgaatttatggttccttccatctgttatcctagattttatcgacagtctactcaagatcatgcagataaatcaaaaccccaatctactacaaacccacacaaaagtcctgcaatgtccaaatcatctgtagagtgctatagtactgtgaacaagcacttggacaaaatcaatgaagctgataggaggttaatgaactctccaaaggttaaggagaaagaagcagtgcaaggatcaaaagctgtggaagttaaagaaaagagttcatcatttcaggcatcagaaaagttcaaagacaaatatgctaagctatgtcaaatgaggaataaggaagtctaatttactggaaagaagcccacgggaagttggtgctaagagaaaaagaggacatcacaatggagagcaaaatgatgatttatctgactcctcagtggaatgcatacctgggggggagatctctccagatgaaattgttgctgctattggtccaaagcatttctggaaagcaagaagagctattcagaatcagcagagggtttttgctgtccaagtgttcgagctgcataagctgataaaagtgcagaaattaatcgcggcatctccacatctgcttattgaaggtgatcctgtccttggcaatgcattaacaggaaaaaggaacaaacttcctaaaggaaattcgaaagttcagaccctgtcaatcacaaacaaagatgatatccagccaaccctagagcaaccagagttatcaaaacaagacacagaaggaaacttattggcccattctcatgatgatggacttggtgacaaccatcataatcaagctgcaacaaatgaaacctttacaagcaaccctccagctatgcatgttgctcctgacaacaaacagaataactggtgcatgaatccaccgcagaatcaatggcttgtcccagttatgtcgccttctgaaggtcttgtctataagccttttgccggcccttgtcccccagttggaaatctgctgacaccattttacgccaactgtgctccgtcaaggctgccttctacaccatatggcgttcctattcctcaccagccacagcacatggtccctcctggtgcccctgccatgcatatgaactacttcccgcctttcagtatgccagtgatgaatccaggaacaccagcatctgcagtggagcaagggagccatgctgctgcgccacagcctcatgggcacatggaccagcagtcgctgatctcatgtaacatgtcacacccgagtggcgtttggaggtttcttgcatcaagggacagcgagccacaggccagcagcgccaccagccctttcgacaggctccaagtccaaggtgatggaagtgctccgttgtcattctttcccacggcttcagctccgaatgtccagcctccgccctcatctggaggccgggaccgggaccagcagaaccatgtaatcagggttgttccgcgtaacgcacagactgcttcagtcccgaaagcccaacctcagccgtcatccggaggccgggaccaaaagaaccatgtaatcagggttgttccgcataacgcgcagactgcttcggagtcagcagcgtggatcttccggtcaatacaaatggagaggaaccaaaatgattcgtagctggttaccatatactttcgtgtcatccgatggcagcttagtgcagcattgcagtttacagggctacccgagctgcagattatggtggctcctgtattctgaccactgattgcgctttacccgatcgtcatagatattggatgatatgatcttgtgttctatgcagagttgtaagccaaagttgtgcccctgaagactgaagtgacagccctgaagttgggagtccttcctgattgtgctatgactggaattggtatatatataggttacttgaacggtttcactgtgttgagctcaccacacggccgcgcttctgtaacatacaatacaatagactatgagtggtacagtaggaagcagcagtcagaaaatgactgctggtaccatgctacggggtcgctatagattgatgtgtaccggtactctggttctggtagtatatgctgctgtataattcagtgtttaattatctatatattgtacattagctgtcaagcctgtaaggcattgtattgtgggcaatgaatttggttgcaaatgttcgtgtactgggaaccatcttttgattgtttgtgtttttgaacattgctttgcgcctttg

SEQ ID NO: 202428 - DNA, 3648 bp, Zea Mays
ccaaaaaaacctgcttgcacatactcaaccgccagcgtctccactctccggtctccctctcatggtggagcccacctccgcctttgtggatcagagcgagcattcctttcccttcccttccctggcatcagaatcaaacgtgtccccgcagacgctcccaatcccatgcgcccctctgctctcacggtttgatttccctttcagttgggccgccatggccgcggtagcagctgtgcgcctgcaccccggcctcccccatcgccggccctgacactgggtaaacgtggtggctgaagctgctgctgaggattcgggatcttcttgctgccgccacgagctgcctgcgtgatattgacacggcgcgctcccctggctcctgggcatgacgaggggaggcggtggacaaggaggcaaggaggagccggggaaggtgatgggtccgctgttcccgcggctccacgtcagcgacgcaggcaagggcggcggcccgcgggctccgccaaggaacaagatggcgctctacgagcagttcaccgtgccgtccaaccgcttcagctcccccgcggcctccgcccgcgccgcgggggccagcctcgtgccctccacggcggctgcccaggtttatggttatgacaggacgctgttccagcccttcgacgtgccttcaaatgagcctcctcgttcatctgaaaagttcaaaggaaacactatcaacgggcagtctaatagtacaagaagagaacctttgaggatgtcctcacagaccaagaacaaggacgtctgtgcttcaaaatcaattgccaagtgcacctcacagcatagagtgggcaacaccatcatgtcttctggaaagaaagtggtcagtgatgatgaatttatggttccttccatctgttatcctagattttatcgacagtctactcaagatcatgcagataaatcaaaaccccaatctactacaaacccacacaaaagtcctgcaatgtccaaatcatctgtagagtgctatagtactgtgaacaagcacttggacaaaatcaatgaagctgataggaggttaatgaactctccaaaggttaaggagaaagaagcagtgcaaggatcaaaagctgtggaagttaaagaaaagagttcatcatttcaggcatcagaaaagttcaaagacaaatatgctaagctatgtcaaatgaggaataaggcaagtaatataaatcattgtgacaacaacggttgccaacctgcaagcgtgaatggaaatttcacagaagcaaagaaccctacagcagctagaaatacatcttcctgtaaaccatgtactgatgtagatagctctaacaggaagtctaatttactggaaagaagcccacgggaagttggtgctaagagaaaaagaggacatcacaatggagagcaaaatgatgatttatctgactcctcagtggaatgcatacctgggggggagatctctccagatgaaattgttgctgctattggtccaaagcatttctggaaagcaagaagagctattcagaagtaagtatatggtgcttgagtagctgttttgtagttttgtaccaagtatttgtagcattctttagacaatactattcatatgtttcactctgcttatttcctttttcttttagttttcagttaattgtcatatggaagacaaaagtatgaagatgataagtctgttgtttggttttcagtacctaactattctgttgtactattaaatataaactgtggataataatgaatgccttcaattttgattcttttaagtagaaaacatggtagtttcatccaaaagaatagtatgttgcttgtaagactgatattgtgaatatttctttcttgctttctggattgctgcataatgcctttttttatgttttacactctgtcctgttaaaatctacagtcagcagagggtttttgctgtccaagtgttcgagctgcataagctgataaaagtgcagaaattaatcgcggcatctccacatctgcttattgaaggtgatcctgtccttggcaatgcattaacaggaaaaaggaacaaacttcctaaaggaaattcgaaagttcagaccctgtcaatcacaaacaaagatgatatccagccaaccctagagcaaccagagttatcaaaacaagacacagaaggaaacttattggcccattctcatgatgatggacttggtgacaaccatcataatcaagctgcaacaaatgaaacctttacaagcaaccctccagctatgcatgttgctcctgacaacaaacagaataactggtgcatgaatccaccgcagaatcaatggcttgtcccagttatgtcgccttctgaaggtcttgtctataagccttttgccggcccttgtcccccagttggaaatctgctgacaccattttacgccaactgtgctccgtcaaggctgccttctacaccatatggcgttcctattcctcaccagccacagcacatggtccctcctggtgcccctgccatgcatatgaactacttcccgcctttcagtatgccagtgatgaatccaggaacaccagcatctgcagtggagcaagggagccatgctgctgcgccacagcctcatgggcacatggaccagcagtcgctgatctcatgtaacatgtcacacccgagtggcgtttggaggtttcttgcatcaagggacagcgagccacaggccagcagcgccaccagccctttcgacaggctccaagtccaaggtgatggaagtgctccgttgtcattctttcccacggcttcagctccgaatgtccagcctccgccctcatctggaggccgggaccgggaccagcagaaccatgtaatcagggttgttccgcgtaacgcacagactgcttcagtcccgaaagcccaacctcagccgtcatccggaggccgggaccaaaagaaccatgtaatcagggttgttccgcataacgcgcagactgcttcggagtcagcagcgtggatcttccggtcaatacaaatggagaggaaccaaaatgattcgtagctggttaccatatactttcgtgtcatccgatggcagcttagtgcagcattgcagtttacagggctacccgagctgcagattatggtggctcctgtattctgaccactgattgcgctttacccgatcgtcatagatattggatgatatgatcttgtgttctatgcagagttgtaagccaaagttgtgcccctgaagactgaagtgacagccctgaagttgggagtccttcctgattgtgctatgactggaattggtatatatataggttacttgaacggtttcactgtgttgagctcaccacacggccgcgcttctgtaacatacaatacaatagactatgagtggtacagtaggaagcagcagtcagaaaatgactgctggtaccatgctacggggtcgctatagattgatgtgtaccggtactctggttctggtagtatatgctgctgtataattcagtgtttaattatctatatattgtacattagctgtcaagcctgtaaggcattgtattgtgggcaatgaatttggttgcaaatgttcgtgtactgggaaccatcttttgattgtttgtgtttttgaacattgctttgcgcctttg

SEQ ID NO: 202429 - DNA, 1192 bp, Zea Mays
gtcgtgacaggcagcccgcgcaccgcgccgcgcgtctctcgtcttctctctcatgaaagggcaagtgtcgagcagcggccgggcgcacgcacgcaccccacgaaaccacaggcttgtcacgggagatcgatgccaaagcaatagctagccggagcgaaagaaagcggacaccgcgattatattactgcggagcggcagggcagcagcatggcggagcggaagatcggcgtggcgatggacttctcgccgagcagcaagaaggcgctgcgttgggcgatcgacaacctggtccgcaggggcgacaccctcgtgctcctccacgtccggcaccacggccgtgaggagggcaagaacgtcctctggtcccgcaccggatcgcgtaaaagcttgctcgactgccttgccttgtcgctggtcccgctggaggagctcatggagccgcccgtgaggcagcgctacgacgtgccgtatgacgcggaggtgttcgacatgctcaacgccgcggcccggcagaaagagatgcgcgtggtggtcaagatgtactggggtgacccgagggagaaggtgtgcgacgcggtggaggagctccagatcgagtcgctcgtcatgggcagccgcggcctcggccagatccaaaggattctgctgggaagtgtgacgaactacgtgctgtccaatgcgtcatgccccgtgaccgtcgtcaagtcgaagtagtggctctggcctttcatttccagaaagatgaatctgcagctaacctatacgcaaaccgaaacaactaaatccgatatattgcaccttacgtttcagctgttttcactccatgatttgttttatttttctagatgtacctggacactgttgttttcgtgaaaaaggctgccagataaactgccagcttgtatcactacatgagaaagtcactggacagcatcactataccatttctttttaacaagggatagaatggttctgcgtgtggtctaaattatcctctttgctgcctacagatctgcaaactgataaggtactaccgatagctgatttcccgtcctaaggccttgtttggataaagagggattgaagtgtattttagggattgaaagggaaattagttcatattacacttcaatacactttataccacctcaatccactccaatacaagattacccaaacaagccctaaagga

SEQ ID NO: 202430 - DNA, 1550 bp, Zea Mays
ctaggctcacagctcgcgactcgcaaggaggagcttgcggcagctcggtatgaaaaagggcatctgtcttctttatccatcgtccgtctccttccacccagacacaggccaggcgggcccattgttgcccaagaccctggaatccggagcaggagtcctctctctctctgactctctcctgagggggaggaggaggaggaggaggcagaggcggaagagcaaccaccaagcagcagagcgcgaggcgacacggggacggagccctggaggtctctcgcgagtccagaggcgatcgacggagtcgcgattcgtctcccagtaccgactaatctctcgctcccgcttccgcttccgcttcgatcccgtgctgcttgcccactgctgtaatctcgtgcttgcccagtgctctagttcgagcactctcttgcttctcgcttcgcttcgctgcctgccgcgctgcgtcgagagctttcgccttgcaccggcgattgccccgacacgattgcgtccggtttttcttctaggttctgcgtagatagatagataggtatatatttttcgagtccaattacggggtgcttctggcactggtgaggaaggctattagggttgcctgcctgtgtgtgctgaccgtgaacggaagcgaaggtttctcgcgctaatctgccaggacgctttgttctttcctggcccttggtagttagcagggtgtctccaaccattacactgtcaagtctggactctggaagggttaaaatctcatgaaagtaacgacgccaatcgtgccagcactgctacgctacgagccattgcaccgttctgtgtctctgcgtgaaccaacaatttccatgggttcggccaaaaattcctgccctccgattatcctggttcttcctactactgtaagcagtttactccgtgatatttagaaccgtctccattgcggtactacttagatattgctgcattgttaagctctttccgcaccattcgtatttatcacatgattccctgtccttcttgcatcagcacagggtttctctttgtagggatatgaacaacgggactttggtttttaacggcagctagagggtagcctggagtgagcatttcattctggagatacaatgggtggctgctgctgctgctgctgttctgcaagggcatctgattcagatagagcaccggtgcgcatctatatgtggagaagtcaggcattaaaatcaaaactgacgggcagcagtccccaaaagtggacgaatttgagtcgtgcgaaaaaggtgcccctgaggataaggctgatgaggaggaggatgtttgtccaatatgtcttgaaggcttaagaattttggagctcatctgtggatatacattcagttgggtgaaacacgaaatggattgcatttctgaactaggtagtttgaacaagtgctgctgctgtgaagtgtctttgatagatgttatatgtgttccatatcctttcttagtgtaggagtatttgtattctctctccgcatgtacgatatgctctagcagttcagtagtgggta

SEQ ID NO: 202431 - DNA, 628 bp, Zea Mays
ctaggctcacagctcgcgactcgcaaggaggagcttgcggcagctcggtatgaaaaagggcatctgtcttctttatccatcgtccgtctccttccacccagacacaggccaggcgggcccattgttgcccaagaccctggaatccggagcaggagtcctctctctctctgactctctcctgagggggaggaggaggaggaggaggcagaggcggaagagcaaccaccaagcagcagagcgcgaggcgacacggggacggagccctggaggtctctcgcgagtccagaggcgatcgacggagtcgcgattcgtctcccaggatatgaacaacgggactttggtttttaacggcagctagagggtagcctggagtgagcatttcattctggagatacaatgggtggctgctgctgctgctgctgttctgcaagggcatctgattcagatagagcaccggtgcgcatctatatgtggagaagtcaggcattaaaatcaaaactgacgggcagcagtccccaaaagtggacgaatttgagtcgtgcgaaaaaggtgcccctgaggataaggctgatgaggaggaggatgtttgtccaatatgtcttgaaggcctgcattcttcttgttacta

SEQ ID NO: 202432 - DNA, 1341 bp, Zea Mays
caagcacgtatacattacagggacagggaagaagaaggacatgcatgcgtcgccatagctcagactcagtgcgcgagcacaacgaacgagcacacgcgccagacgtctcactgacagttgcggcccacaccatgactttcacctggacgcctagtcagccaagacctgacccatcctggccatccaaccaatccggtcaacgggagaacatgtacgaggcgatgtcgccgcgccgggcgctcctcgccatcctcctcgccgtcgccctcgcctccgcttcctcggcaccccagcccccgccgtgcagccgctcgtgcgcggccctcaactgcgactccctcgggatccgctacggcaagtactgcggcgtgggctggagcggctgcgacggcgaggagccctgcgacgacctcgacgcctgctgccgcgaccacgaccgctgcgtcgagaggaaaggttacgtttccttcatccccggcctgcgtttgttgtgctcgttaattagggtctgagtgagatgggtggatggatcatgatcaagttcctagcttgcaactcatcggtagcaaaggaatttttcattggatttgatttcgcgttgcaatctgatcactacacttgctcactccgttttttttatttgtcgcgttttagttaaaaaaaataaactagccggtaacaaatattgaagaatagagtcagttttctttatttattttctgcttgtggtgtggttggaatgcagtgccttcaagcaccattaccacaaaattttgcatttaccatccacgaaaaggatgaccacagttattctcccaacctgaacattacatgtaatcagtcagtcactcagcctcagcctgatgggaatagaaatgaaaatagtgatcaacagcggattagcatgaggatatggtatgatgagcgtgaaatgccatgagaaattcaaaaactgcatgaggaaagtgaaaaaggcaggcaaggttggcttctccaagaaatgcccgtacgagatggctatggctacaatgactcaggggatggatatggccatcatccttagccagttgggcacccagaaggtggaactctagcgttagctagctccgcctcagctgcatgttgatttattctcacggaaatatttatatactccactgaagaatagaatttgcttccatatgattactgttgtttcatcgaagtcagagggatgcatagcttatctttcttctgccaaattgaaaaagaaaggaaaagacttcagtttattttctgtagcttgaatagtttttagtgctaatatcattttctaagaacgcattctcgtcaagacccttt

SEQ ID NO: 202433 - DNA, 1367 bp, Zea Mays
cttgctgaaaatgaaaatcaggctaaactcctgaatgtgcgggatcaccttgatgcattgagttcacatacttctgcccatgtgtaccctgccagtggaccggctgtaccaagtaatcaaactaatgctgctacagaaccatccgaagatgtccagatgagggagaacataaccacgccaaatggcagtgctgtcactgtggatccaaatgcatcaacacatgccgataggctgacaaaaatcaagggtatactgtcaggagagacatctattcagttgacgctgcagttcctatacagccataataggtctgatcttcaaattttgaagactataaagcaagctgtggaaatgaggaacagtgtctgccacagtgcaacaatatgctccaatgcaatcatgcatgcagggacaacagttgataccttcctcagagaaaacttggaatggctaggtagggcaaccaactgggccaagttcagtgccactgctggactaggcgtcattcataggggccatcttcaacaaggccgcgcattgatggccccctacctaccacagaatggtgctggtggcagtggtagcccatactcggaaggaggtgccctctatgctcttggtttgattcatgccaaccatggtgaaggaatcaaagagtttcttcgtgagagtcttcgcaacaccacttctgaggtggtccagcatggtgcttgtctgggactcgggcttgcagcattaggtacatcagacgaggaaatatgcgaggacataaagaacattctttacacggatagtgctgtggctggtgaagcagctggtattggcttgggtttgctcatggttggcacggccagtgagaaggccacagagatgcttgcctatgctcatgatacacagcatgagaaaattatcaggggcttgtcacttggaattgcattgacggtgtatggcagggaagaagaagctgacaccttgatcgagcaaatgacgagagaccaagatcccatacttcgttacggcggtatgtatgcattggctctagcatacagagggactgcaaataacaaagccatccaccagcttctgcattttgctgtgtcggatgtgagcgatgatgtgcgaaggactgcagtgttggctcttggctttgtcctgtacaatgagcctgaacagacacccagaattgtgtccctactatcagaatcatacaatccacatgtccgttacggggcagccctggccgtcggaatctcctgtgccggatcaggattaagcgaagccatctccctactggagcctctgacatcagacgtcgtcgacttcgtgcgccagggtgctctcattgccatggcaatgagagagagagg

SEQ ID NO: 202434 - DNA, 2037 bp, Zea Mays
tccacaagcagttcattactcccgcggtttagcacctcctgattaccaaaaccaggctctccgaatccgaaatcgtgcgcggagacaggaaacggctcaccgtcgctgccaaagtagaatccgtctccgataataaaacacggcagtcagcggcacacttatcgcaaagccagccagccagccagccagcagcggctgtcccaagctgtccaaagccaagccaagcgcggcgcggcggcagtcctctcctcgcagtcgcagcagggccgagccgaccggtcaaaagcactgctgccccaccccaacccaccaccatccccgttccccaacccccaaagccgagagccatcccgcccgcagccgcaaccaggcaagcaagcgggagccgccaactcgtgcctctcggcagcggcgtctgaactctgaaccgaccgaccgaccgaccgttccgttccgttcaccccaccatggaggcgccgccgggaccggggcccatggagctggacgccccacctcccgccgccgccgccgcggcgattcctcccgccggcagcgacaagcacaaggacggggaagggggagacgctgtgacgggccatatcatctccaccaccatcggcgggaagaacggcgagcccaagcggaccatcagttacatggcagaacgtgtcgtgggcacaggctcatttgggatcgtcttccaggctaagtgtctggaaacaggagagaccttcgccatcaagaaggtgctgcaagatcggcgttacaagaaccgggagctgcaacttatgcgtgccatggagcaccccaacgtcatctgcctgaagcactgcttcttctcgacaacgagcagggacgaattgtttttaaaccttgtcatggaattcgtccctgagactctataccgagtcctgaagcactacagcaatgcgaaccagaggatgcctcttatctacgtcaagctctacatgtatcagctttttagaggcctagcttatattcataatgtaccaggagtctgccatagggatgtgaagccacaaaacgttttggttgatcctctcacccaccaggtcaagctctgtgactttggtagtgcaaaagttctgattcctggtgaaccgaacatatcttacatatgctctcgttactatcgtgcccctgagctcatatttggtgcgacggagtatacaagttcaatagacatatggtcagctggttgtgttctagctgagttgcttcttggacagccactatttccaggagagagcgctgttgatcagttggtagagatcatcaaggttcttggtactccaacccgtgaggagatacggtgcatgaatcccaactatactgagttcaggtttcctcagataaaggctcatccatggcacaagattttccacaagagaatgcctcctgaagccatagaccttgcttctcgtctccttcagtattcaccaagtcttcgctgctctgctcttgacgcatgtgctcatcccttcttcgatgagctgcggacaccgaacgcacgcctaccaaacggccgcccgttccctccgctctttaacttcaagcacgaactagcaaatgcctctccggacctcgtcagcaggcttgtgccggagcacattagacggcagatcggtgtcaacttcgggagcagctaggagggcaggcgctgtgatggtcgaagttttcggtcttggtttccccttctggagagtgggaggggctcaagcagtacctgagaaaagtagtgaaaccgtgtaaattatctgaccgtgaaggagtactaccgccagtaactggcgcatgttcgtccagtagttatggtaagaatgtaggaggtggagactggttaatgtgtagggtcgttttttttgttttgttttgatattactaccattttgttgtaatgttcgtcggtacttccagcagtagtgtagctggccacgttttgttcgtccgccatgatgtaaatgatcatcgcccaactgtaatgcatgttctctctgatcgtttcgtaaaaaaaat

SEQ ID NO: 202435 - DNA, 1904 bp, Zea Mays
tccacaagcagttcattactcccgcggtttagcacctcctgattaccaaaaccaggctctccgaatccgaaatcgtgcgcggagacaggaaacggctcaccgtcgctgccaaagtagaatccgtctccgataataaaacacggcagtcagcggcacacttatcgcaaagccagccagccagccagccagcagcggctgtcccaagctgtccaaagccaagccaagcgcggcgcggcggcagtcctctcctcgcagtcgcagcagggccgagccgaccggtcaaaagcactgctgccccaccccaacccaccaccatccccgttccccaacccccaaagccgagagccatcccgcccgcagccgcaaccaggcaagcaagcgggagccgccaactcgtgcctctcggcagcggcgtctgaactctgaaccgaccgaccgaccgaccgttccgttccgttcaccccaccatggaggcgccgccgggaccggggcccatggagctggacgccccacctcccgccgccgccgccgcggcgattcctcccgccggcagcgacaagcacaaggacggggaagggggagacgctgtgacgggccatatcatctccaccaccatcggcgggaagaacggcgagcccaagcggaccatcagttacatggcagaacgtgtcgtgggcacaggctcatttgggatcgtcttccaggctaagtgtctggaaacaggagagaccttcgccatcaagaaggtgctgcaagatcggcgttacaagaaccgggagctgcaacttatgcgtgccatggagcaccccaacgtcatctgcctgaagcactgcttcttctcgacaacgagcagggacgaattgtttttaaaccttgtcatggaattcgtccctgagactctataccgagtcctgaagcactacagcaatgcgaaccagaggatgcctcttatctacgtcaagctctacatgtatcagctttttagaggcctagcttatattcataatgtaccaggagtctgccatagggatgtgaagccacaaaacgttttggttgatcctctcacccaccaggtcaagctctgtgactttggtagtgcaaaagttctgattcctggtgaaccgaacatatcttacatatgctctcgttactatcgtgcccctgagctcatatttggtgcgacggagtatacaagttcaatagacatatggtcagctggttgtgttctagctgagttgcttcttggacagccactatttccaggagagagcgctgttgatcagttggtagagatcatcaaggttcttggtactccaacccgtgaggagatacggtgcatgaatcccaactatactgagttcaggtttcctcagataaaggctcatccatggcacaagattttccacaagagaatgcctcctgaagccatagaccttgcttctcgtctccttcagtattcaccaagtcttcgctgctctgctcttgacgcatgtgctcatcccttcttcgatgagctgcggacaccgaacgcacgcctaccaaacggccgcccgttccctccgctctttaacttcaagcacgaactagcaaatgcctctccggacctcgtcagcaggcttgtgccggagcacattagacggcagatcggtgtcaacttcgggagcagctaggagggcaggcgctgtgatggtcgaagttttcggtcttggtttccccttctggagagtgggaggggctcaagcagtacctgagaaaagtagtgaaaccgtgtaaattatctgaccgtgaaggagtactaccgccagtaactggcgcatgttcgtccagtagttatggtaagaatgtaggaggtggagactggttaatgtgtagggtcgttttttttgtttttgtaattgcaaaga

SEQ ID NO: 202436 - DNA, 1711 bp, Zea Mays
gcagtcgcagcagggccgagccgaccggtcaaaagcactgctgccccaccccaacccaccaccatccccgttccccaacccccaaagccgagagccatcccgcccgcagccgcaaccaggcaagcaagcgggagccgccaactcgtgcctctcggcagcggcgtctgaactctgaaccgaccgaccgaccgaccgttccgttccgttcaccccaccatggaggcgccgccgggaccggggcccatggagctggacgccccacctcccgccgccgccgccgcggcgattcctcccgccggcagcgacaaggacggggaagggggagacgctgtgacgggccatatcatctccaccaccatcggcgggaagaacggcgagcccaagcggaccatcagttacatggcagaacgtgtcgtgggcacaggctcatttgggatcgtcttccaggctaagtgtctggaaacaggagagaccttcgccatcaagaaggtgctgcaagatcggcgttacaagaaccgggagctgcaacttatgcgtgccatggagcaccccaacgtcatctgcctgaagcactgcttcttctcgacaacgagcagggacgaattgtttttaaaccttgtcatggaattcgtccctgagactctataccgagtcctgaagcactacagcaatgcgaaccagaggatgcctcttatctacgtcaagctctacatgtatcagctttttagaggcctagcttatattcataatgtaccaggagtctgccatagggatgtgaagccacaaaacgttttggttgatcctctcacccaccaggtcaagctctgtgactttggtagtgcaaaagttctgattcctggtgaaccgaacatatcttacatatgctctcgttactatcgtgcccctgagctcatatttggtgcgacggagtatacaagttcaatagacatatggtcagctggttgtgttctagctgagttgcttcttggacagccactatttccaggagagagcgctgttgatcagttggtagagatcatcaaggttcttggtactccaacccgtgaggagatacggtgcatgaatcccaactatactgagttcaggtttcctcagataaaggctcatccatggcacaagattttccacaagagaatgcctcctgaagccatagaccttgcttctcgtctccttcagtattcaccaagtcttcgctgctctgctcttgacgcatgtgctcatcccttcttcgatgagctgcggacaccgaacgcacgcctaccaaacggccgcccgttccctccgctctttaacttcaagcacgaactagcaaatgcctctccggacctcgtcagcaggcgctgtgatggtcgaagttttcggtcttggtttccccttctggagagtgggaggggctcaagcagtacctgagaaaagtagtgaaaccgtgtaaattatctgaccgtgaaggagtactaccgccagtaactggcgcatgttcgtccagtagttatggtaagaatgtaggaggtggagactggttaatgtgtagggtcgttttttttgttttgttttgatattactaccattttgttgtaatgttcgtcggtacttccagcagtagtgtagctggccacgttttgttcgtcaacaagaaaaagcttcttctcctctggggtaccaggaggaccaagcaagaagttctcaggct

SEQ ID NO: 202437 - DNA, 1762 bp, Zea Mays
tgcagagctatcgccacactgtccgatctcactggccgctcgatctcatccgtccgctggtaagccataagccaaagaccacaatagatctcgtctccctccgttcccctcctgtccgtcattttctcgtcacctacatatctccggctcgccgtcggcgtcgccgcctcctcctccttcgcccgctggaggcgcccatagcgacctcaccggtgggtttgctgaagtgacatcggccgaggtggaactggttggggggagtccatttcgggttcgagcagcctgagccggcgcgccggcagcgacggaggggcctcgcctccgtccccctctccgatggctggcagcagcagcggccccgccccgggccaggcagccaaggacaagaagatggcgtccgcggaacagctggtcctggaactctgcgaccctgaactgcgcgagaacgctttacttgagctctccaagaaaagggagatttttcaagatcttgctccgctgctttggcactcatttggcacaattgctgcgttactccaggagattatatccatttacccgtcactatcaccccccacactgtcacctggagcatcaaaccgagtttgcaatgctcttgcacttctgcagtgtgttgcatcgcaccctgagaccaggatccttttcctaaatgctcatattccattgtacctgtaccctttcctcaacactaccagcaaaacgagaccttttgagtacctaaggcttactagcttgggggtcattggtgctcttgtcaaggttgatgatactgaagtcatcagttttttgctgcaaactgaaataattcctctgtgcttgcgaaccatggagatgggtagtgagctatccaaaactgtggcaactttcatcgtccaaaagattcttctagatgatgttgggctgcgctacatttgcgccactgctgagcgtttctttgccgtaggcagtgttttagcaaacatggttgtttcacttgctgatcagccctccacaaggctgctgaagcacatcattcgttgttacctccggctgtcagataaccctagggcttgtgctgcattgcagagctgccttccagacatgctcaaagatgggaccttcaataactgccttagggatgatccagcgacaaggcgctggctccaacagctcctgcacaatgtgactggcggaggcatgggaggtgctcctcaaccaggaatggatcccatgaacatgggaatgtgatgtgcattctagttgttgcaattcactgcaataacacatcacctctcagtgaattacaactagagaagatctggccactgtccagatgaaacttagtatggtgtagcctgactttctgccggggtaaaaataggaatgttgtttggtattgccataagctaagctgtagaaacaagatcggcaggcttctgttattgtgttcttgcaccggagctcttgtgcgttgacccttcagaacctgagaacaaaggaggaaacccccgtcccgtgaagctttgtcgcagtgccgatcgatcaagatcttgaattgcttcagatgatgccataagaaagcatactgaaaagaagtgtatgccgtgtgctatattttacgagtttatgggttgcttttgtctttctagtggcgtcgtgtaacaaagtccgctgttcttaatttgttcaggtaacaattaattaatccagcaatattttttcccaggttaccaataataatataaaaatatattctataaaa

SEQ ID NO: 202438 - DNA, 1701 bp, Zea Mays
cgccacactgtccgatctcactggccgctcgatctcatccgtccgctggtaagccataagccaaagaccacaatagatctcgtctccctccgttcccctcctgtccgtcattttctcgtcacctacatatctccggctcgccgtcggcgtcgccgcctcctcctccttcgcccgctggaggcgcccatagcgacctcaccggtgggtttgctgaagtgacatcggccgaggtggaactggttggggggagtccatttcgggttcgagcagcctgagccggcgcgccggcagcgacggagtcgtgcagttgagttgagatggcaaacattccccactccttcgcaggggcctcgcctccgtccccctctccgatggctggcagcagcagcggccccgccccgggccaggcagccaaggacaagaagatggcgtccgcggaacagctggtcctggaactctgcgaccctgaactgcgcgagaacgctttacttgagctctccaagaaaagggagatttttcaagatcttgctccgctgctttggcactcatttggcacaattgctgcgttactccaggagattatatccatttacccgtcactatcaccccccacactgtcacctggagcatcaaaccgagtttgcaatgctcttgcacttctgcagtgtgttgcatcgcaccctgagaccaggatccttttcctaaatgctcatattccattgtacctgtaccctttcctcaacactaccagcaaaacgagaccttttgagtacctaaggcttactagcttgggggtcattggtgctcttgtcaaggtggcaactttcatcgtccaaaagattcttctagatgatgttgggctgcgctacatttgcgccactgctgagcgtttctttgccgtaggcagtgttttagcaaacatggttgtttcacttgctgatcagccctccacaaggctgctgaagcacatcattcgttgttacctccggctgtcagataaccctagggcttgtgctgcattgcagagctgccttccagacatgctcaaagatgggaccttcaataactgccttagggatgatccagcgacaaggcgctggctccaacagctcctgcacaatgtgactggcggaggcatgggaggtgctcctcaaccaggaatggatcccatgaacatgggaatgtgatgtgcattctagttgttgcaattcactgcaataacacatcacctctcagtgaattacaactagagaagatctggccactgtccagatgaaacttagtatggtgtagcctgactttctgccggggtaaaaataggaatgttgtttggtattgccataagctaagctgtagaaacaagatcggcaggcttctgttattgtgttcttgcaccggagctcttgtgcgttgacccttcagaacctgagaacaaaggaggaaacccccgtcccgtgaagctttgtcgcagtgccgatcgatcaagatcttgaattgcttcagatgatgccataagaaagcatactgaaaagaagtgtatgccgtgtgctatattttacgagtttatgggttgcttttgtctttctagtggcgtcgtgtaacaaagtccgctgttcttaatttgttcaggtaacaattaattaatccagcaatattttttcccaggttaccaataataatataaaaatatattctataaaa

SEQ ID NO: 202439 - DNA, 2012 bp, Zea Mays
ccaagttccactcccaaaccccctcgattcgtccatccctcgcacgcgctggccgcccgccccccatctccacttctcctcgccgctctcctgaatccttcgcccgaaagcctccgaccgcagaaccttagcgttgccgtccacctccatggaatcgaagcctcacgcgccggcgtctgggctggcaacgccgcggttcaggctgggtaaacagtcgtcgctggcgcccgagcgcggcggcgagggcggtggtgcggggtcggcagatgggtcggccgaggcgaacggcgtcatgagcttccagctcatgtacctggcccacgagggcagcgcggaggggatccgcgagctcctcgacggcggcgtcgaccccaatttccgcgactccgacggccgcacggcgctgcacatcgccgcctgcgagggccacgccgaggtcgtcgagctgctgcttcagagcggcgcggaggccgccgtggaggaccagtggggcagcacgcctttggcggatgcaatgcattatcagaatcatgatgtgatcaagatctttgagaagcatggctccaagcataagattgctccgatgcatgtgaacaatgttcgtgaagttcctgaatatgagattgacccggctgagcttgatttcagtaatggcaatgatttatccaagggcacatttagaaaagcaacatggaggggcattccggttgctgttaagaagctggacgatgatctaattgcggacggcagcaaagtgcaggcattcagagacgagcttgatgtgctgcaacttatacgtcatccaaatgttgtgcaatttttgggcgctgtgacacaaagcaatccaatgatgattgtcatggaatttatgcgcaagggtgacttgcgcactcacttgagtaagaaaggagctctgccaccatcatatgctgtgaagttagctcttgatattgcaagaggaatgaattacttgcatgagcataaacctcaggctatcatccatcgtgatcttgaaccttcgtggcagattttgatctatgtaagatgctaaaatggagaagaaaagttagagaagataaagcagtcacttctccaggcaatgcttgtaaatatgtggctccagaagtcctgcgaaatgaagagtatgataccaaagtggatgtcttctcattcgctctgatacttcaggagatgattgaaggatgccttccttattatgataagaaaaatgatgaaattgagaaggcacataattctaaagaaaggcctccttttcgagctcctccaaagcattatgcccatgggttaagagagttgattgaacagtgctggagcgaaaattctgcagacaggcctgattttagagtaattatcaaccggctgtctgctatccaaaatgagatagctcacagaaaccgttggaaggcgagacctctcaagtgtttcctgagcattgaaggaatgtggaagaaagatcgcaatgagggcagcaccacccgttcatcacgctcatcgcgatcctatttttaaccaccagcacaagctattgatttcaatcgcaagatcatattggtgattgctagaaaatatactcaaatgtatatcatattttcgttttctaaaactatgaaaaaagatggttctgcaactggttgattctcagctgatcatagttttgattgtatatcaggcatgccccttggccccaacccctgctttggcattcccctgggttgggacaatatggataatgccaacttaattatatttatataataatgtgttttgatgtaaatgagatatgttatatatcgtagctattcatacatgttgtattttttcgaaagtaaatattaaatggcttaagttatatgaaatgttcataactaaaaggtgactaatctaactttgatttctaataaatataacttaaaataatacctactaagatgcttctctaaaacatattgtgtatttgttttactaaactataaaaaatacacaacatagaa

SEQ ID NO: 202440 - DNA, 2053 bp, Zea Mays
ccaagttccactcccaaaccccctcgattcgtccatccctcgcacgcgctggccgcccgccccccatctccacttctcctcgccgctctcctgaatccttcgcccgaaagcctccgaccgcagaaccttagcgttgccgtccacctccatggaatcgaagcctcacgcgccggcgtctgggctggcaacgccgcggttcaggctgggtaaacagtcgtcgctggcgcccgagcgcggcggcgagggcggtggtgcggggtcggcagatgggtcggccgaggcgaacggcgtcatgagcttccagctcatgtacctggcccacgagggcagcgcggaggggatccgcgagctcctcgacggcggcgtcgaccccaatttccgcgactccgacggccgcacggcgctgcacatcgccgcctgcgagggccacgccgaggtcgtcgagctgctgcttcagagcggcgcggaggccgccgtggaggaccagtggggcagcacgcctttggcggatgcaatgcattatcagaatcatgatgtgatcaagatctttgagaagcatggctccaagcataagattgctccgatgcatgtgaacaatgttcgtgaagttcctgaatatgagattgacccggctgagcttgatttcagtaatggcaatgatttatccaagggcacatttagaaaagcaacatggaggggcattccggttgctgttaagaagctggacgatgatctaattgcggacggcagcaaagtgcaggcattcagagacgagcttgatgtgctgcaacttatacgtcatccaaatgttgtgcaatttttgggcgctgtgacacaaagcaatccaatgatgattgtcatggaatttatgcgcaagggtgacttgcgcactcacttgagtaagaaaggagctctgccaccatcatatgctgtgaagttagctcttgatattgcaagaggaatgaattacttgcatgagcataaacctcaggctatcatccatcgtgatcttgaaccttcataacagtaacatattgagggatgacactggacatctgaaggtggcagattttgatctatgtaagatgctaaaatggagaagaaaagttagagaagataaagcagtcacttctccaggcaatgcttgtaaatatgtggctccagaagtcctgcgaaatgaagagtatgataccaaagtggatgtcttctcattcgctctgatacttcaggagatgattgaaggatgccttccttattatgataagaaaaatgatgaaattgagaaggcacataattctaaagaaaggcctccttttcgagctcctccaaagcattatgcccatgggttaagagagttgattgaacagtgctggagcgaaaattctgcagacaggcctgattttagagtaattatcaaccggctgtctgctatccaaaatgagatagctcacagaaaccgttggaaggcgagacctctcaagtgtttcctgagcattgaaggaatgtggaagaaagatcgcaatgagggcagcaccacccgttcatcacgctcatcgcgatcctatttttaaccaccagcacaagctattgatttcaatcgcaagatcatattggtgattgctagaaaatatactcaaatgtatatcatattttcgttttctaaaactatgaaaaaagatggttctgcaactggttgattctcagctgatcatagttttgattgtatatcaggcatgccccttggccccaacccctgctttggcattcccctgggttgggacaatatggataatgccaacttaattatatttatataataatgtgttttgatgtaaatgagatatgttatatatcgtagctattcatacatgttgtattttttcgaaagtaaatattaaatggcttaagttatatgaaatgttcataactaaaaggtgactaatctaactttgatttctaataaatataacttaaaataatacctactaagatgcttctctaaaacatattgtgtatttgttttactaaactataaaaaatacacaacatagaa

SEQ ID NO: 202441 - DNA, 2042 bp, Zea Mays
ccaagttccactcccaaaccccctcgattcgtccatccctcgcacgcgctggccgcccgccccccatctccacttctcctcgccgctctcctgaatccttcgcccgaaagcctccgaccgcagaaccttagcgttgccgtccacctccatggaatcgaagcctcacgcgccggcgtctgggctggcaacgccgcggttcaggctgggtaaacagtcgtcgctggcgcccgagcgcggcggcgagggcggtggtgcggggtcggcagatgggtcggccgaggcgaacggcgtcatgagcttccagctcatgtacctggcccacgagggcagcgcggaggggatccgcgagctcctcgacggcggcgtcgaccccaatttccgcgactccgacggccgcacggcgctgcacatcgccgcctgcgagggccacgccgaggtcgtcgagctgctgcttcagagcggcgcggaggccgccgtggaggaccagtggggcagcacgcctttggcggatgcaatgcattatcagaatcatgatgtgatcaagatctttgagaagcatggctccaagcataagattgctccgatgcatgtgaacaatgttcgtgaagttcctgaatatgagattgacccggctgagcttgatttcagtaatggcaatgatttatccaagggcacatttagaaaagcaacatggaggggcattccggttgctgttaagaagctggacgatgatctaattgcggacggcagcaaagtgcattcagagacgagcttgatgtgctgcaacttatacgtcatccaaatgttgtgcaatttttgggcgctgtgacacaaagcaatccaatgatgattgtcatggaatttatgcgcaagggtgacttgcgcactcacttgagtaagaaaggagctctgccaccatcatatgctgtgaagttagctcttgatattgcaagaggaatgaattacttgcatgagcataaacctcaggctatcatccatcgtgatcttgaaccttctaacatattgagggatgacactggacatctgaaggtggcagattttgatctatgtaagatgctaaaatggagaagaaaagttagagaagataaagcagtcacttctccaggcaatgcttgtaaatatgtggctccagaagtcctgcgaaatgaagagtatgataccaaagtggatgtcttctcattcgctctgatacttcaggagatgattgaaggatgccttccttattatgataagaaaaatgatgaaattgagaaggcacataattctaaagaaaggcctccttttcgagctcctccaaagcattatgcccatgggttaagagagttgattgaacagtgctggagcgaaaattctgcagacaggcctgattttagagtaattatcaaccggctgtctgctatccaaaatgagatagctcacagaaaccgttggaaggcgagacctctcaagtgtttcctgagcattgaaggaatgtggaagaaagatcgcaatgagggcagcaccacccgttcatcacgctcatcgcgatcctatttttaaccaccagcacaagctattgatttcaatcgcaagatcatattggtgattgctagaaaatatactcaaatgtatatcatattttcgttttctaaaactatgaaaaaagatggttctgcaactggttgattctcagctgatcatagttttgattgtatatcaggcatgccccttggccccaacccctgctttggcattcccctgggttgggacaatatggataatgccaacttaattatatttatataataatgtgttttgatgtaaatgagatatgttatatatcgtagctattcatacatgttgtattttttcgaaagtaaatattaaatggcttaagttatatgaaatgttcataactaaaaggtgactaatctaactttgatttctaataaatataacttaaaataatacctactaagatgcttctctaaaacatattgtgtatttgttttactaaactataaaaaatacacaacatagaa

SEQ ID NO: 202442 - DNA, 2053 bp, Zea Mays
caggtctccaagttccactcccaaaccccctcgattcgtccatccctcgcacgcgctggccgcccgccccccatctccacttctcctcgccgctctcctgaatccttcgcccgaaagcctccgaccgcagaaccttagcgttgccgtccacctccatggaatcgaagcctcacgcgccggcgtctgggctggcaacgccgcggttcaggctgggtaaacagtcgtcgctggcgcccgagcgcggcggcgagggcggtggtgcggggtcggcagatgggtcggccgaggcgaacggcgtcatgagcttccagctcatgtacctggcccacgagggcagcgcggaggggatccgcgagctcctcgacggcggcgtcgaccccaatttccgcgactccgacggccgcacggcgctgcacatcgccgcctgcgagggccacgccgaggtcgtcgagctgctgcttcagagcggcgcggaggccgccgtggaggaccagtggggcagcacgcctttggcggatgcaatgcattatcagaatcatgatgtgatcaagatctttgagaagcatggctccaagcataagattgctccgatgcatgtgaacaatgttcgtgaagttcctgaatatgagattgacccggctgagcttgatttcagtaatggcaatgatttatccaagggcacatttagaaaagcaacatggaggggcattccggttgctgttaagaagctggacgatgatctaattgcggacggcagcaaagtgcaggcattcagagacgagcttgatgtgctgcaacttatacgtcatccaaatgttgtgcaatttttgggcgctgtgacacaaagcaatccaatgatgattgtcatggaatttatgcgcaagggtgacttgcgcactcacttgagtaagaaaggagctctgccaccatcatatgctgtgaagttagctcttgatattgcaagaggaatgaattacttgcatgagcataaacctcaggctatcatccatcgtgatcttgaaccttctaacatattgagggatgacactggacatctgaaggtggcagattttgatctatgtaagatgctaaaatggagaagaaaagttagagaagataaagcagtcacttctccaggcaatgcttgtaaatatgtggctccagaagtcctgcgaaatgaagagtatgataccaaagtggatgtcttctcattcgctctgatacttcaggagatgattgaaggatgccttccttattatgataagaaaaatgatgaaattgagaaggcacataattctaaagaaaggcctccttttcgagctcctccaaagcattatgcccatgggttaagagagttgattgaacagtgctggagcgaaaattctgcagacaggcctgattttagagtaattatcaaccggctgtctgctatccaaaatgagatagctcacagaaaccgttggaaggcgagacctctcaagtgtttcctgagcattgaaggaatgtggaagaaagatcgcaatgagggcagcaccacccgttcatcacgctcatcgcgatcctatttttaaccaccagcacaagctattgatttcaatcgcaagatcatattggtgattgctagaaaatatactcaaatgtatatcatattttcgttttctaaaactatgaaaaaagatggttctgcaactggttgattctcagctgatcatagttttgattgtatatcaggcatgccccttggccccaacccctgctttggcattcccctgggttgggacaatatggataatgccaacttaattatatttatataataatgtgttttgatgtaaatgagatatgttatatatcgtagctattcatacatgttgtattttttcgaaagtaaatattaaatggcttaagttatatgaaatgttcataactaaaaggtgactaatctaactttgatttctaataaatataacttaaaataatacctactaagatgcttctctaaaacatattgtgtatttgttttactaaactataaaaaatacacaacatagaa

SEQ ID NO: 202443 - DNA, 673 bp, Zea Mays
ctacttgtatgcaatgaactgttaagatttgggccatatttctgccagccagtcattgctggacttggagatgacaacgtaccattcatttgtaccatggactgcctcggtgcaaaggagctggccaaggattttgttgtttctggaacagcatcagaatctttgtatggtgcttgtgaatccatgtacaagccggacatgcaacctgatgaactcttcgagactatatcccaagccctgaattcatcagtagaccgtgactgccttagcggatggggtggctatgtgttgattgtgacaccgactgaagtgagggagcatgtgattaagagcaggatggactaaataatggccactagaattattagctggtttccaatgcttaagaccaatgttgtgtttgtattctggagtaacattgtatcatcacagttggtatgagaaggaacgtttgttttctttatctctgttttacaacacttctgtttggtggaatactgagttggtaatatcctagattgcctgttttacaacacttctgcttggatttcaactgaatggtggaataatgagttggtaatattctagattgaggaattgctctctcgcagtaatgtgaatgcggttaacatgtgctgtatcgcattctatggttgcctatcgcagatcctca

SEQ ID NO: 202444 - DNA, 2601 bp, Zea Mays
cgaaggtgtatttgttcgacaggcatcttctctcatcagcggcggcggcgaggcaggcagaagtggcgaagcctgaaagtgagctctacgatagagggaggggccaaccaaaagcaaagctagcgcctagaggtagctggtagcaggagggctccgaccaatatctgctccaggaccttgttcttgttccctctcgctcatcactgggtgggccgttgtggtggctgcctggctgtggctggtgcgagaaaaaaagtagccagtatcaggcgcaagttgcgattctcgggagttcgttgaggagtcacagagaaagtttggtggtactggtgaggcaaaggtttccttccagggttcgtcaggaacgaggcgtgtcgcaatctgaagcctttcgtcggttccgtctagctgcccccctcggattcggccatggagcggcagtccagcatccggctgggcgcgctggagaagctgaggagcttccgggggatggagaagcagaagagcttccgcgggatcatgtccctggagcggcggagcagggacagcccggggaaacgcggcgacacgccgctccacctcgcggcgagggccgggagcagaaccaggacggcgagacgccgctgtacgtcgccgccgagaagggccacgcggaggtcgtgcgcgagatcctcaaggtctgtggcgtgcagacggccggcatcaaggccagcaatagtttcgacgcgttccacatcgccgccaagcagggccaccttgaagttctgaaggagatgctgcaggctcttcctgctcttgctatgacaacaaattctgtaaacgctacggccctggacaccgccgcgattcagggccatgttgacatcgtcaatctcctgctggaaaccgatgctagcctcgccaggatcacgaggaacaacgggaaaacggttttacactcagcagcaagaatgggccacgtggaagttgtaagatcgttgctgaataaggatcccaggattggtttgaggacagacaagaaggggcaaactgcgctgcatatggcttcgaaagcgcagaatgctgagatcgtggtcgagttgttgaagccagatgtctcggtcatccatatcgaagacaacaagggaaacaggcccttgcatgttgctactcggaaggggaatatcattatagtgcagactctgttatcagttgaggggatcgatgtcaatgcagttaacaggtctggagagactgcatttgccattgccgagaaaatggacagtgtagaactcgtgaacatcctgaaagaggctggtggagaagccgcaaagcagcaagtacatcctccgaattcggcgaagcagctgaaggaaacagtcagcgatatcagacacgacgtccagtcccagttcaagcaaacacgtcagaccaagatgcaagtcaaccagatcaagaagaggctggagaagctccacatcggcgggctgaacaacgccatcaactccaacaccgtcgtcgcggtgctcatcgccacggtcgccttcgccgccatattcacggtcccgggaaacttcgtggaggagctgagccaggcgcctccgggcatgtccctggggcaggcgtacgtggcgagcaacccggcgttcatcgtcttcctggtcttcgacgcgctggccctcttcatctcgctcgcggtggtcgtggtgcagacctcgctgatcgtggtggagcggagggcgaagaagcggatggtgttcgtgatgaacaagctcatgtggctggcgtgcctcttcatctcggtggccttcatcgcgctgacctacgtggtggtggggcgcgacgactggtggctggcctggtgcaccatgggcatcggcgccgcgatcatgctcactaccctcggctccatgtgctactgcatcgtcgcgcacaggctggaggagaagaacaccaggaagatcaggagggcctccgcgagccagtcccgcggctcgtggtcccgatcggtcgactcggacgaggagatacttaacagcgagtacaagacgaagatgtacgcgctgtagcctgtaggatggatagcaagtgtaacatgacggattcttttgtacataccagtgctttgtttcgccagaggctgctccatggcatgcggcaccacatcagtcttcttcaaccaaagggactgaaggtccttcctgcggaaccaagttcaggtcacttgaccggtgtgcctgttcctggggagtgagagtctgctcaactgtgtggttcttagcgcctgaaaccgtcaatggtgatggagataatccagctagaaatttagaatagaataaagtgtccggtacaaaatgcattgtgtcgtgcagtagatatgatgatcttgtacacgaggatctcatcggagagagtgatttgttgaactcttgtgggcagttttttttttcccttgggagttgggacttgggcttgtggtctgtgacgcagggaatatatgtgttgacaagatgaaaactgtcattgatcggccatttccgagactaaatttgtgtaacttgtcgaccaccggagtgaaatgtgtatctgcgaataacgatatagagtatgtgtttgttagcg

SEQ ID NO: 202445 - DNA, 3245 bp, Zea Mays
ctcgtctaaaaacttaattccgaatccatcccagcacacgcacgtttctcttctgcccggcgcgtgacgcgtctccaaaaaaaaaattccccagctccttcgccaccggcgaaccctggcttcccgtcctcccacggttcctccgcatcgtgctacatggcggattcgcgaggaatagcttccaagagcgctgacaaggatagcacctccactcgcccggcgcgcctccgcgtcatgcgccaggaagtcaaggattttttgacgagtcctcgccgtagccgccccaagaagcagccgcctccgcctcatcccccgccgccactggaggagaaggtgaaggagaggaagaagggaaaggagaaggcagcgacggaggaagagaaattcgagcgcgcgcaatacagctgtgccttccaggacgagggcgatgggggccgcgacttcgcgccgccggagctggtctggggtaaggtgcggagccacccctggtggcccggacaggtattcgacgccgccgatgcgtcagagatcgcactgcagcaccggaaagccggcgccccgctcatcgcctacttctgggacaggaccttcgcgtggagcgactcttctgcgctgctccccttctgcgccaactttacgcgactatccacccagagtactatgtctagcttcgtctccgccatcgactccgcgctgttggaggttgagcgacgcgtagaggctggcctctcgtgcggttgcttcagttccaacattgccacgaagcaggaggttcaaaactccggtatccggcaaggggcgtatggtgcggcgatagactctgtctacacgagggatgccttccatggcaaaacatttcttgactacatctcagcactaggaaagaagccactagccggtgctgatcttcttgacctagccaccgccaaagcacagttgagggcattcaatcgttcaaggggttcaagggaccttcctgagtttgtgatgtttgagggcattgcggagattacagagatgacacacacaaagggagaaaggatgcacaagagtgaggatgatgttctgagcaaggagaagaaatcgaggcgcgctgggagttcacgtagaaaaggagaggctttaccagaggctgcaaatgatgatgctatagatgaagacagcaatggaggggcaggaaatgatacgttgagtcagggggaaaagtcaaagcgtgtgaagagttcatcgaagaagaaaacagacatttacaaacatttatatggactcaaaactgattctgttgctgacagcagaacactggacaagaagggagtagatgatgttttgagcgagagaaaatctgggcgcacactgcgatccacgagcaagaaggaagatgcattagagggtttgaaaaggctggcaaagcatggaattgaggaattagcaggaaaaagcaaagatgcccccgttcttaaagaaaacaatcagaggcatggtgcaggctctgcacacaagggtagaatcacagaggatgggtatcatagacttggagattgcaatgctgaggatctaacttctccaagcaagagaagattggggcataatgaaaactcaataatcaagccagtgaccatctccgagcatggtaggaagaagaagaaactttctgaactcatggcagctataggcaggcctaattctgtatcgggtggtaagagcaaagctcgagggaagcgttcgttgcatggtttagctgagaaacctgaggatgctgatcgccactctaaggatacattgatgactaggaaaagaaagaagctcaacacattaggggatttatcttcacagtcagagcctctctctcctaagaagtccacaaaggttggagaactgatgagcaaagcagctgggagcaacatgttacaggcagcacctgctgtcaaagctattagtgcagtgtctcagacgaaaccacgtagggctaagcacaggcaagtaaatgctgcagacaaatctccacgtcatatgaaggtaaatcgggggaacagcaaagccgctagtaaggagtctctatcttgtggagaaatgctacggcagatctcattagcagcatgtggtcttaagcagagagaggaaattgctccttcaagtgttaatttctttaccgattttaggaagaactccattttttctagttctgatgtcgatgagaggatgcctgagaaggcaaccaacgccgagtccactccttcagaacagcccattgttgatcatatgcaggatgactattggtccgacattctcattaatgtggaggagccgttatctagcctcaaaaagaagatatataagagtaagaaaagagcaaacaagaaggcacctcaggttaagaaacctcctgttaattcattggcgactgcagaaaatgcggatgagccaaggagtgaaggcaaccaagatacagaaaatggggaacaacttaggaacaaaacgaagctgttttctgcaaatggatctcaacagaatgggacaaaatctggtgaagagatggaaaatagctttctgtctggactggtgctgcacttcagcaggccaagtgatgttccatcatgcagtgaccttatcaagatctttagccaatacggtcctgttaatgaagccaaggcagaggttgcaaacagtaccagctctgctcaggtgatcttcaagaggcgcatggatgctgaggcagcgtttgcaggtgctgggaagatcagtgcccttggaccagcccttacgagctttcgtctcaccgacttcccagcaagtgcttcaggaaataaagcttcacatggtgcatgaaagagcgaatagagtgttgcatggcagtgagggaaaccagatgagggagttagagaaaaaggtatactctactgtatgtggtagctaggttgttgcaggattaattcataggaacagcgatgacacttgtgtcgtccagtgttgtggaggtgtcatatactgcagatcacttgacatgagttgccaagaaccaataggtgttgtaaaagcatgtttgttttaaactgagttttggtacttaaaaagtgtgctttgtttcttaataatccaagtactggatattgttgcgggtgcagttggatgtttcttaacaatagcatgtagaagtattatgtttgtgcatgccgagcgatcacctggcgtctggcagtctttatactgactgttcgtgtaatcgtgtattgggctataggctgccg

SEQ ID NO: 202446 - DNA, 2663 bp, Zea Mays
accccacaccaactggggtgatctcattccatttcgcaagtgtctcgggggtatctcggtcggaaagctggggcctattctttaggattaggaggagccgtatgaagcaagcttggttcctctagattcagtttggtggcaatccgtgccggcggcagagcgcggcagctggttttttcgttagattcctcccaccttgtttgcattgcccctgacgcgtgcagtaatgcttacctagccttccgatcgttcagctcaagagaagaatgagagatccgttcttcagtggggagatatccaatcatcgatatgcgctccaaaatgtggcagattggtgaagacaaatgccgtgtttggatttagcctaggcgatgatttggttcgggtagcacagggttgcctgcttgctttgtgctgctggaacggaaatgcgtttttcgtagtggtccgttgatctttcaccagtgtacatattacattcagattcggatttttgccacaccctcggcaagatagagaatctggagcactcttgaatgctaatcagacaccctgcccatttctttctctgtcttagacacaaggccttctcatggccagagacttgcctcatctgcccgtaactagacggaaaatcctgcaattcaagttcctgataccgtttgttcttgttctttctgtgtctgttattgctgtcacccagtacttccaaagtatctcctaccttctacgcccactgtgggacacgccgcctaaaccattcacccgcatcccacactactatgcacccaacatctccatggcccagctgtgccaactccatggctgggacatcctccccgcccctcgccgcgtcttcgacgctgtcctcttcagcaacgagcttgatattctagaaatccgctaccacgagctccttccacatgttgacaggtttgtcatccttgaggccaattccaccttcaccggcatccccaagtcactctccttttacgaaaacttcagccgttttgggtttgctggatcaaagattgtctacgacatgctttctattggagagctggataccggttctcgtcgccaaccattccatgtcgaggcctatcaccgtcgctcactcaatatgctgatacgaagatcgggtattgctgccggtgatatcctgatcatggctgatgctgacgagatccctacccccgagaccgtgcagttgctcaagtggtgcgacgggataccaccggtaatgcaccttgggatgaagaactatatgtactccttcgaatttcctgtggacgacaacagctggagggcgacggcacacgtgtacaacgagcacacatcgtaccgccattcccgccagagcaacttcatcctggccgacgccggctggcactgcagcttctgcttcagggagatcaaggagtttgttttcaagatgaaggcgtacagccatgcagaccgagtgaagcagaaaagcttcctgaacccagacagaatccagaagatcatatgcaacggggacgacctgttcgacatgctgcctgaagagtacacattcgccgacctcttcaagaagatggggccgatacccaagtcagggtccgccgtgcatctgccttcccatctgatcaagaatgcagacaagttcaggttcttgcttcccggtgggtgcttgagatcggagtagatcagagattagctttttttttgttagccgacagtatttcttttagctgcaatactgttgttcctggagaaacgatttcttttgggagtttcgtatgatatggtattgttactttttagatagggtgctaggagctgttttggtgtgggcttgaggaagttttcatgttgtatctgtagcggtgggcttatcagcccctgaatttacagcaagtaacgtacaggtcaaattgctatagtaaattggtaccttttgggtgcatcctgatcttctccaggcaactggaggttgtttgtcacctgtcgtcactgcttaaacttcatctgaaatatttgtttctctacatgcctgtctgctgctactcctggttccaaggctaatccaggggtcaacggatgcaaggcaaagctcacttccagatcttttgcaagcctatccaaagctgtcagttctctgccttatgttcctgctgatgagaattgcatgcatgattcaagacggaggaaccttgcaaatgacccatcaaagttgagatttgatagggctgatgcctccaaaagaattcggcattatcgtggagcagaatatagaccttacatgattgcatggcctacaattgatgttactttaatcaatgcaaggtaatgttgtgcatggttgaacttttgagaaatgtttctgccaccaaaaaaacataaagtcaaccaatcaaataaaaaactgaagctgtcttttttagaagcagctacttttgtgtagtactattttaaagaggtggcataagaagttttaaatgatgtccctgcgaggacgattttctagctccaagttagtgttccaaactaatgttcatctggatgaagtaaaatgatttttcttctatacaattttgagaaaaaatgttacaatgtaatgttcaattgaatgctttgctagtgttggaacttagtgaaaacgagatttagtagatagagag

SEQ ID NO: 202447 - DNA, 3652 bp, Zea Mays
cacacacccgcacacatacacacactcgtcccttccctccccctccatctccattctccaatctccccttcgacgctctcccctcgcttctcgcgcacactaaccaatccgagcgcccgacgctgccccccgatcgaatccaccggagccgcccacctagggctcgcccgcgccattgtcgaaccaggagggttcgtccgcccgcgcctgctgccccgcactcccgcgccgtggcggtggcgttggcggtatgtatgatcgctagagggagaggaggaggtggcagcaccggtggggattagggtggcggcagtgctggtgccgggaggaggaggaggaggaggaggaggaggaggcgtagcccatgaaggcgacggcgccgccggcaaagcggcggaggggcccgcggctggcggtgctggcgctcgtgttctgttcgctgctcgtgccgatcgccttcctcttcaaccgcttccccgccgtgtatgtgacggatgagcgccctcagcaggagattgacttgccttcattcgatcgcgtggcatttgaaagtggtggatctgtaaatgaagatgtgttcaagaagacttctgggagcagtagtgtgtcgcaccatgttctcccgcctccaaaaattgaactagtcctcccccctccaaaagttgaacccaaaccagaagtgaagccagtaccagtatcagttccagttcatcataacaaaaaaattaacgttgacaagattaggcctcctagagttcaaagtgctgatgaggtggaaaaggctaaggcttgtcaacttgagtttgggagttactgtctctggtccatagagcacaaagaagttatgatagataccattgtgaaaaggctgaaagatcagctgtttgtagcccgatcttactacccaagcattgcgaaacttaaaggaaaggagacattgactcgtgaactgaagcaaaatattcaagagcacgagagggtccttagtgaatccatcgttgatgctgatctaccatcctttataaaaacgaaggtcgagaggatggaccaatcaatagcaagagccaaatcatgcactgtggattgcaacaatgttgacagaaagcttcgtcaaattcttcatatgacagaggatgaagctcattttcatatgaagcagagcgcatacctgtacaaccttggtgttcacaccatgcctaaaagtcatcattgtcttaatatgagattgacagtagagtacttcaaatccatgccattggatccaaatgactcttctgcccatacgtttaacattccagacaataggcactatgttatattgtctaaaaatgtccttgctgcttctgttgtcatcaactcaactgttagtagctctgaggatactgaaaatatagtctttcatgtactaactgatgctcaaaatttttatgccatgaagcactggtttgcaagaaactcctacagggaatcagctgtgaatgtcataaattatgaacaaattattttcgagaatttccctgagtttggaacccagcagttatatttgcctgaggaatttcgtgttttcatcagtagccttgagcggcctactgagaagagtagaatggagtatttatcagtgttcagtcactcacatttctttcttgccgaaatattcaaagatttaaagaaggtaattgtgttggatgatgatttggtcgttcaacatgatctctctttcttgtggaatcttgatatgggagataaggtccatggtgctgtcagattttgtggtttgaaacttggccaactgaggaaccttctgggtaggacaatgtacgatcaacagtcatgtgcatggatgtcgggggttaatgtgattgatttggaaaaatggagagatcataatgttacagagaattacctgcaactcctgagaaagtttgggaacaatggtgatgaggcctcattgcgatcttcagctttgcctataagtttgttgttgttccagcatcttctttatccccttgatgagagattgactttatctggacttggatatgactatggaattaaagaaaaacttgttcagagttctgcatcattgcattacaatggaaatatgaaaccttggcttgagttgggcataccagattataggaagtactggaagaggtttcttacacgagacgagagattcatggatgagtgcaatgtaagtccatagtgcacttgagcttgagagccggatcatttttgacagtagatttcagtctacactgctgtaatatatactaagaggaccaacacttccattgagaaaagacttgggaagcagtcactagccatcaattttgacagagtagatccagcgccatctgttgagtgaacttgtgagctcgatggatggttttttctgcagttagaggactttagtgttaagtttgaaggataatgcagtagacaacgttggtggtgtgtggtggtgaggctccacgtaagagggagcatcacactacgtaacaggaatgatctttggtggattggggcgtcttaattcaaattggtgccttccatctcatcgattcagtaaatttgaatctccatatatggtcgtgactgggtttaactgccgacataggtttcctctgtgtgctccactgtggcctagaaagaattaaaaagtgcagtgcggttcatagcaatacatatacttgacattgcagaagtaaaaacgtgttccgggcacttggtgaatggagaaccttgtcactgtaaattggttcttaaaccttgttgcgatgtaataatcatgtaaacactgtaaaacatgcgaattttccaaggcagcaataagcttcagagttgaagaaaccgttaacctggatgaacatgcgaggacgcttcttatctttgagtaaaaggtggcttagggtttgtttggatgacgtgtggattttgaaaaagtgaaaaaaccgttgtaaggtatagaccatgagaattcaaataattctacgtctcctttgatgacttcacaaagaatcagatctctttcgatccttttctcaagcgatcaccaagatcgagcttcagttctcttatcaaatcaaatggtgagtgcaatctctcccacaaggtactccacaaaaagtcggaagctcttgtttgctttacaatttggagcagcaactctatacaagaatgatagtaaatcttctctcttttctcggagtcaaaactcaacacaagtgttctagccactcttttgctaccttaggctcttgcaagatgctatgctaagcacacgatggttttgtaagcacttaagatggtttggatgctatggagatgatcctctaacttgtatatgatgtttgtttgttaatggattgagttgtttttggttggaggggtatatataggttgtccatctcaaaatagctgttggaaccccactttagcttctgcgtacccattagacatgtccaatgcctctcataggtttttttttaaaaaagttgtcaaccttcatcagtctatcagaacttacctgatatatccggtgtgggcactgaacatgtcaagttagctagctattggagtctttatgttgttgacccttgtgcattatgtattcggtgcaccatccggtgttacaccagacaaatatgat

SEQ ID NO: 202448 - DNA, 3584 bp, Zea Mays
cacactcgtcccttccctccccctccatctccattctccaatctccccttcgacgctctcccctcgcttctcgcgcacactaaccaatccgagcgcccgacgctgccccccgatcgaatccaccggagccgcccacctagggctcgcccgcgccattgtcgaaccaggagggttcgtccgcccgcgcctgctgccccgcactcccgcgccgtggcggtggcgttggcggtatgtatgatcgctagagggagaggaggaggtggcagcaccggtggggattagggtggcggcagtgctggtgccgggaggaggaggaggaggaggaggaggaggaggcgtagcccatgaaggcgacggcgccgccggcaaagcggcggaggggcccgcggctggcggtgctggcgctcgtgttctgttcgctgctcgtgccgatcgccttcctcttcaaccgcttccccgccgtgtatgtgacggatgagcgccctcagcaggagattgacttgccttcattcgatcgcgtggcatttgaaagtggtggatctgtaaatgaagatgtgttcaagaagacttctgggagcagtagtgtgtcgcaccatgttctcccgcctccaaaaattgaactagtcctcccccctccaaaagttgaacccaaaccagaagtgaagccagtaccagtatcagttccagttcatcataacaaaaaaattaacgttgacaagattaggcctcctagagttcaaagtgctgatgaggtggaaaaggctaaggcttgtcaacttgagtttgggagttactgtctctggtccatagagcacaaagaagttatgatagataccattgtgaaaaggctgaaagatcagctgtttgtagcccgatcttactacccaagcattgcgaaacttaaaggaaaggagacattgactcgtgaactgaagcaaaatattcaagagcacgagagggtccttagtgaatccatcgttgatgctgatctaccatcctttataaaaacgaaggtcgagaggatggaccaatcaatagcaagagccaaatcatgcactgtggattgcaacaatgttgacagaaagcttcgtcaaattcttcatatgacagaggatgaagctcattttcatatgaagcagagcgcatacctgtacaaccttggtgttcacaccatgcctaaaagtcatcattgtcttaatatgagattgacagtagagtacttcaaatccatgccattggatccaaatgactcttctgcccatacgtttaacattccagacaataggcactatgttatattgtctaaaaatgtccttgctgcttctgttgtcatcaactcaactgttagtagctctgaggatactgaaaatatagtctttcatgtactaactgatgctcaaaatttttatgccatgaagcactggtttgcaagaaactcctacagggaatcagctgtgaatgtcataaattatgaacaaattattttcgagaatttccctgagtttggaacccagcagttatatttgcctgaggaatttcgtgttttcatcagtagccttgagcggcctactgagaagagtagaatggagtatttatcagtgttcagtcactcacatttctttcttgccgaaatattcaaagatttaaagaaggtaattgtgttggatgatgatttggtcgttcaacatgatctctctttcttgtggaatcttgatatgggagataaggtccatggtgctgtcagattttgtggtttgaaacttggccaactgaggaaccttctgggtaggacaatgtacgatcaacagtcatgtgcatggatgtcgggggttaatgtgattgatttggaaaaatggagagatcataatgttacagagaattacctgcaactcctgagaaagtttgggaacaatggtgatgaggcctcattgcgatcttcagctttgcctataagtttgttgttgttccagcatcttctttatccccttgatgagagattgactttatctggacttggatatgactatggaattaaagaaaaacttgttcagagttctgcatcattgcattacaatggaaatatgaaaccttggcttgagttgggcataccagattataggaagtactggaagaggtttcttacacgagacgagagattcatggatgagtgcaatgtaagtccatagtgcacttgagcttgagagccggatcatttttgacagtagatttcagtctacactgctgtaatatatactaagaggaccaacacttccattgagaaaagacttgggaagcagtcactagccatcaattttgacagagtagatccagcgccatctgttgagtgaacttgtgagctcgatggatggttttttctgcagttagaggactttagtgttaagtttgaaggataatgcagtagacaacgttggtggtgtgtggtggtgaggctccacgtaagagggagcatcacactacgtaacaggaatgatctttggtggattggggcgtcttaattcaaattggtgccttccatctcatcgattcagtaggtttcctctgtgtgctccactgtggcctagaaagaattaaaaagtgcagtgcggttcatagcaatacatatacttgacattgcagaagtaaaaacgtgttccgggcacttggtgaatggagaaccttgtcactgtaaattggttcttaaaccttgttgcgatgtaataatcatgtaaacactgtaaaacatgcgaattttccaaggcagcaataagcttcagagttgaagaaaccgttaacctggatgaacatgcgaggacgcttcttatctttgagtaaaaggtggcttagggtttgtttggatgacgtgtggattttgaaaaagtgaaaaaaccgttgtaaggtatagaccatgagaattcaaataattctacgtctcctttgatgacttcacaaagaatcagatctctttcgatccttttctcaagcgatcaccaagatcgagcttcagttctcttatcaaatcaaatggtgagtgcaatctctcccacaaggtactccacaaaaagtcggaagctcttgtttgctttacaatttggagcagcaactctatacaagaatgatagtaaatcttctctcttttctcggagtcaaaactcaacacaagtgttctagccactcttttgctaccttaggctcttgcaagatgctatgctaagcacacgatggttttgtaagcacttaagatggtttggatgctatggagatgatcctctaacttgtatatgatgtttgtttgttaatggattgagttgtttttggttggaggggtatatataggttgtccatctcaaaatagctgttggaaccccactttagcttctgcgtacccattagacatgtccaatgcctctcataggtttttttttaaaaaagttgtcaaccttcatcagtctatcagaacttacctgatatatccggtgtgggcactgaacatgtcaagttagctagctattggagtctttatgttgttgacccttgtgcattatgtattcggtgcaccatccggtgttacaccagacaaatatgat

SEQ ID NO: 202449 - DNA, 1655 bp, Zea Mays
ctctcttcttctccccttccacccaaagccttgacctcacgtctgagagcaaaccagacgaaacaaaccctcctgggctgcttccccttttcgatccccatggcgcaggacgacatcccggagtcctccgcctccggatcccccacctcctccaccccggcggctcgcctcaacgccgccgcgcccgagtttaccccccgatccgccgcccagcaccacggcaacaacgcccatcgccgcggcccgcaccaccaccatcagccgcaccaccacccccactaccaccctcaccagcactaccagccgcggcaccagcaccatcaggcccaggccgaggatgaggggagcgccgccgcgacggcggaggatagggagggccccgctggtgcggtgcagccgcagcaccggctgcccgaacccgaggcccgcaagctcgtcaagcagcgatatcaatttggccacaactgaacatctgatgaagttcatcgctaaggatccagatggatttgtgccaatttctgtagttgcatcttttaggaagatccgagagatagtttatgatagatccttgttggttgctgcattacgcacgtcatctgagctggttgtttcagaggatgggaaacatgttaaacgcttacagcccttcaatgccgaagaagttcagtctcgtattgttgttgctgaaaatttacctgaggatcaaaagcatcagactctgatgaagattttctcagctgttgggaatgtgaaatctatacgtacctgttatccacaagatatttctccagcagcagctaacagaacatcaaggattgagatgatttttgctaataagcttcattcttttgtggagtattcaactgttgaagatgctgaaaaagcagttgctgaattcggtggtgggggaaactggagagaggggattagagttcgttcactgcttggatgtctgaaacatgggttaggtcaaggaagaaaaggtggggatgaggagtatgctgcagatgaagatggccctgacacaactgatcatccacgagactttggaacagatgttactgcccaaatctcagaagcacatttcgatcaccaggccgaagatggcacccatgacaagggtggaatgaggcagcaggggagagggagaggccgtggaggtagaggcagaggccgtggtcagcattatggccacaacagccgagatggccaccatccaattggcactcccccgtcagagcatccagctgtgccgaagccgcccccgggcccccgcatgccggatggcacaaaagggttcaccatgggccgagggaagccgctcagcattaccattgatgctgcggctaaccctaccaccacggatgctgcttagccgcagcgtctatgctggtaccggcctattgccctgatcatcagtcttttgcaaaccgattgcagtggtcatttactcatgttctaaaccgtttactgtggcgtgttggttcattttgtctgggatttaaaaggaaaggagatggctggtactatgatacatgagtgtatactaacacccgaagtttagacatgtggacatgtactgtgatatgtagctcttaaattagaaaaatgcatacttttgatgagaaagaggggtggttttatgatctgtctcc

SEQ ID NO: 202450 - DNA, 2233 bp, Zea Mays
ccgactcctgtcctccttcttggcccagtcctcacatctatctgtccaactctattcttcccgacgttgctcgggtccattcgccctaacatcctgttctcgaagccgtctgaccttgcccctaccccgctcattatcgttgcgacgttggcccgtccgacatgtccgatctcgctcgtcgtgacaacgcgacccatcctcgacggccagtgagcccatgcactcaaccaatgagatgatattggaaaaaaggaacctatcttgtgagattcagattcctgttgcatgttctgctgtcgatgccctcaaattactggatcacattattgaagctgctagagtagtgtacatggacgagctagaactttattttgcaggagatgatgtcggtccattctctgcgaggaatgaacttgaatctctaaatcttttgttgaaaacaatgaaaaaattgcttctaacttccaacacggctgccaaggaagtactgcagatactacatgatgagatagttgttaagctcaaatctgttggaaagtctgacaatgcttggatggttgttcaaacacagaaccatgatgctgaggattctcttctgaaatggggggagcatcttggtattaaatctagattgcagatagcctattttcagggagctggaagaggaatgatagcttctgaaagtataggtgtgggggatattgctcttgaaattccagagtccctcattatatctgatgaacttctttgtcaatctgaagtgtttctttcattaaaagattttaataacatcacatctgagactatgttattattgtggagcatgagagagcggtataatctaggttcaaagtttaaaccatattttgatacgctcccggcaaattttaatacaggtttgagttttggaatcgatgcacttgctgcattagaaggaacccttctttttgatgagataatacaggctaggcagcacttgcgccagcagtatgatgaattatttcccttgctatgcacaaatttccctgagatattccggaaggatgtgtgcacatgggacgattttctgtgggcatgtgaactatggtattcgaacagtatgatgattgttctaagcagtgggaaattatcgacttgcctggttcctgtcgctggacttctgaaccactcggtctgtagttctgcccccctggaagttttcttttattagtcttcaggggagcaatgctttctcagttatgggaaacatccagggtcgcatcttcttacgttctatggattcctaccaagaggagacaacccttatgatgttatacctttagatcttgacacatccgcggatgacgaggacatcacagctcagtcttcggcgactacaagccaaacaactcatatggttcgtgggacatggctgtcgacatccggaggattccccacgtatggcctgccccagcccttgctgacctatctccgtgctgctctaggctgtgaggtagacgaacccgctgcagaggctgatatgaaggaaagcgacaaggtggtgctggagacaatcctgtccatattcagtcccatgcttgaagcgttgttgcctgagcaagatgatcccaaccgggagagcgccagttgggatgtgaagcttgcatcggactacaaagacctgcagaggaagatagtatcgtccatcgtcacttcctgtacctcagccttggaaaatctgtagctcttgctggatggaagtgcttcactgatgaattgcaagagcacacgccctgggggccctgttggaatgcctctgctggcgtgtagatggccaagctattgcagcaactgcaatctgtgaccatctctacaaaccgaagctgctcgtcgtgagttgcttcatccgaggaatgcggagacacggggtcgtgctcccgaggctggcttgtgtgattttatccgcacctgattgttaccgcatactgtagttgcgtttggtgaaagaaagctacttttgagctagttcattgggagccaaacttgctttttggtgaacgaaagctactttggaactaatttcgtcgcaatgtggttgtggtccatgtgctcctgaaatcgctatagcaacactagattcgaaatacgtattgccggtgccggctccagttctaaggaactaatttttagtctctagtttcttaacaggtgactaaaaaaaactaaaatatattatatttcatttaatgataag

SEQ ID NO: 202451 - DNA, 2303 bp, Zea Mays
cgactcctgtcctccttcttggcccagtcctcacatctatctgtccaactctattcttcccgacgttgctcgggtccattcgccctaacatcctgttctcgaagccgtctgaccttgcccctaccccgctcattatcgttgcgacgttggcccgtccgacatgtccgatctcgctcgtcgtgacaacgcgacccatcctcgacggccagtgagcccatgcactcaaccaatgagatgatattggaaaaaaggaacctatcttgtgagattcagattcctgttgcatgttctgctgtcgatgccctcaaattactggatcacattattgaagctgctagagtagtgtacatggacgagctagaactttattttgcaggagatgatgtcggtccattctctgcgaggaatgaacttgaatctctaaatcttttgttgaaaacaatgaaaaaattgcttctaacttccaacacggctgccaaggaagtactgcagatactacatgatgagatagttgttaagctcaaatctgttggaaagtctgacaatgcttggatggttgttcaaacacagaaccatgatgctgaggattctcttctgaaatggggggagcatcttggtattaaatctagattgcagatagcctattttcagggagctggaagaggaatgatagcttctgaaagtataggtgtgggggatattgctcttgaaattccagagtccctcattatatctgatgaacttctttgtcaatctgaagtgtttctttcattaaaagattttaataacatcacatctgagactatgttattattgtggagcatgagagagcggtataatctaggttcaaagtttaaaccatattttgatacgctcccggcaaattttaatacaggtttgagttttggaatcgatgcacttgctgcattagaaggaacccttctttttgatgagataatacaggctaggcagcacttgcgccagcagtatgatgaattatttcccttgctatgcacaaatttccctgagatattccggaaggatgtgtgcacatgggacgattttctgtgggcatgtgaactatggtattcgaacagtatgatgattgttctaagcagtgggaaattatcgacttgcctggttcctgtcgctggacttctgaaccactcggtatcccctcatatcttgaactatggtcgagtagatgaagctacaaaatcgttgaagtttcccttgtctcgaccctgtgatgcaggggagcaatgctttctcagttatgggaaacatccagggtcgcatcttcttacgttctatggattcctaccaagaggagacaacccttatgatgttatacctttagatcttgacacatccgcggatgacgaggacatcacagctcagtcttcggcgactacaagccaaacaactcatatggttcgtgggacatggctgtcgacatccggaggattccccacgtatggcctgccccagcccttgctgacctatctccgtgctgctctaggctgtgaggtagacgaacccgctgcagaggctgatgtaagggtgctgtgatgttcccatgaatcacgatgaaggaaagcgacaaggtggtgctggagacaatcctgtccatattcagtcccatgcttgaagcgttgttgcctgagcaagatgatcccaaccgggagagcgccagttgggatgtgaagcttgcatcggactacaaagacctgcagaggaagatagtatcgtccatcgtcacttcctgtacctcagccttggaaaatctgtagctcttgctggatggaagtgcttcactgatgaattgcaagagcacacgccctgggggccctgttggaatgcctctgctggcgtgtagatggccaagctattgcagcaactgcaatctgtgaccatctctacaaaccgaagctgctcgtcgtgagttgcttcatccgaggaatgcggagacacggggtcgtgctcccgaggctggcttgtgtgattttatccgcacctgattgttaccgcatactgtagttgcgtttggtgaaagaaagctacttttgagctagttcattgggagccaaacttgctttttggtgaacgaaagctactttggaactaatttcgtcgcaatgtggttgtggtccatgtgctcctgaaatcgctatagcaacactagattcgaaatacgtattgccggtgccggctccagttctaaggaactaatttttagtctctagtttcttaacaggtgactaaaaaaaactaaaatatattatatttcatttaatgataag

SEQ ID NO: 202452 - DNA, 2124 bp, Zea Mays
atcctgttctcgaagccgtctgaccttgcccctaccccgctcattatcgttgcgacgttggcccgtccgacatgtccgatctcgctcgtcgtgacaacgcgacccatcctcgacggccagtgagcccatgcactcaaccaatgagatgatattggaaaaaaggaacctatcttgtgagattcagattcctgttgcatgttctgctgtcgatgccctcaaattactggatcacattattgaagctgctagagtagtgtacatggacgaggagatgatgtcggtccattctctgcgaggaatgaacttgaatctctaaatcttttgttgaaaacaatgaaaaaattgcttctaacttccaacacggctgccaaggaagtactgcagatactacatgatgagatagttgttaagctcaaatctgttggaaagtctgacaatgcttggatggttgttcaaacacagaaccatgatgctgaggattctcttctgaaatggggggagcatcttggtattaaatctagattgcagatagcctattttcagggagctggaagaggaatgatagcttctgaaagtataggtgtgggggatattgctcttgaaattccagagtccctcattatatctgatgaacttctttgtcaatctgaagtgtttctttcattaaaagattttaataacatcacatctgagactatgttattattgtggagcatgagagagcggtataatctaggttcaaagtttaaaccatattttgatacgctcccggcaaattttaatacaggtttgagttttggaatcgatgcacttgctgcattagaaggaacccttctttttgatgagataatacaggctaggcagcacttgcgccagcagtatgatgaattatttcccttgctatgcacaaatttccctgagatattccggaaggatgtgtgcacatgggacgattttctgtgggcatgtgaactatggtattcgaacagtatgatgattgttctaagcagtgggaaattatcgacttgcctggttcctgtcgctggacttctgaaccactcggtctgtagttctgcccccctggaagttttcttttattagtcttcaggggagcaatgctttctcagttatgggaaacatccagggtcgcatcttcttacgttctatggattcctaccaagaggagacaacccttatgatgttatacctttagatcttgacacatccgcggatgacgaggacatcacagctcagtcttcggcgactacaagccaaacaactcatatggttcgtgggacatggctgtcgacatccggaggattccccacgtatggcctgccccagcccttgctgacctatctccgtgctgctctaggctgtgaggtagacgaacccgctgcagaggctgatatgaaggaaagcgacaaggtggtgctggagacaatcctgtccatattcagtcccatgcttgaagcgttgttgcctgagcaagatgatcccaaccgggagagcgccagttgggatgtgaagcttgcatcggactacaaagacctgcagaggaagatagtatcgtccatcgtcacttcctgtacctcagccttggaaaatctgtagctcttgctggatggaagtgcttcactgatgaattgcaagagcacacgccctgggggccctgttggaatgcctctgctggcgtgtagatggccaagctattgcagcaactgcaatctgtgaccatctctacaaaccgaagctgctcgtcgtgagttgcttcatccgaggaatgcggagacacggggtcgtgctcccgaggctggcttgtgtgattttatccgcacctgattgttaccgcatactgtagttgcgtttggtgaaagaaagctacttttgagctagttcattgggagccaaacttgctttttggtgaacgaaagctactttggaactaatttcgtcgcaatgtggttgtggtccatgtgctcctgaaatcgctatagcaacactagattcgaaatacgtattgccggtgccggctccagttctaaggaactaatttttagtctctagtttcttaacaggtgactaaaaaaaactaaaatatattatatttcatttaatgataag

SEQ ID NO: 202453 - DNA, 869 bp, Zea Mays
aagaaaagcatcgatctctagcagcatcggagatggagctaaatggatggtcaacaaaatcaaagggaagatgcagaaaccgctgccggagttcctcaaggagtacgacctcccagcaggcctgttcccgcaggacgcgacgaactacgagctgaacgaggacaccaagctcctgacggtgtacatcgcgtcgccgtgcgaggtgggctacaacgactcgtcggtgctgcgcttcgccaccaccgtgacggggtacctggagaaggggaggatgacccacgtcgagggcctcaagaccaagatcctcatctggaccaaggtgacggaggtacggaccgaggccaccaaggtgcacttcgccgccggcatgaacaaggccaggaaccgggacgcgtacgaggtcgtcagggacggcatcgccgtagacaagttctagcagaccttgttaattaggcgcgtaatataacagctcgagcgagcggagccaccagcagggtgtatgcgtgcgtgcagtgcaatgcagctatagtggacgtgaagcttttcctttccatgattaggaaagcgtgaaccacggcgaccctctggacaggcggctgtaccaatacatacatgttcttgctagtctgtgacaattgacaaagctgtactgttcgtcattgcgagagtgatcatttaggcatgtctgctctgtaccgccgaaagaaagaaatgatgtgtacattgaccaacctgtagattgggttgtttgaccacctgtagattggattgtttgacctgtataatatttactagatcgttcttacttatgcattgtgtagttaggttaacaagacttatacctggattttttttcatataccttgttt

SEQ ID NO: 202454 - DNA, 1625 bp, Zea Mays
cctctgcttcccaacaccttcgcctccactccatttgtgtcggatctaaaacctcgcaagccaaggtacacgacgagcgaccatgtcctcctccttcgactccatcacggccgtcgtaggagatgacgacgagctaccgccagccccgttcgacactgccgtcgacgggaccgcagcggagtacggcggcgagcagcagggcttcggcatgcgccgcggtcaccgttttgccgcgtcctactcgtccttcggcaccgccgtctcggaggacgatctgggcggcgccggcggagaaggcggcggtgggtacggaggcttcggcatcccgccgtactccaacggcggccccgcgtacgggtacgccgacaacgacgcgaacggcgtggagcatgtcatgggcgcccaggacgtgatggatggcgcggcgcacgcggcaggggacatcagcggtggccgactcgatgaggacctgttcagtggtgcggccgacgacgacgacggggccgtcctgccgccgccggaggccatgcgggaggagggcattctccgccgagagtggcgccgaatgcactgatgctggaggagaaggaacggaaggagagggagcgtcgcaacgagattatcgcagaagcggaggagttcaagaggtccttccttgacaagcgcaggctcaactgcgagacgaaccgaacgcagaacagagacagggagaagctgtccctggcgaaccaagagaggttccacaaggaggcagaccagcagtactactggaaggcgatcgcggagctggtgccgcgcgagatcccggggctggagaagaggggcaagaggaaggagcaggagcgaaagccgggcatcgtggtggtgcagggtcccaagcccggcaaggccaccgacctctcccgcatgcgccaggtgctcctgaaactcaaggacaaaccaccatcgcacatggtgccgcctccaccgcaggccaaggaggagaaggagaaggatggagataaggacgccaagaaagatggcaacaagcaggaagaaaagaaggatggtaagcagcaggcagctggaccggccgagaagaagactgatggccctgagatggccagtgctgctggatctccgccgtagccaactgaaaggccggtagcaaaggcaccagagcattagagcaagcggtgaagtgattgccatgtgcccatgatgataatgctatctagtcgcttctagtaataagaacatcgggaaataatgtccttgagctgtggttcaaggaaaactacgctggataaattaaggcatgtttggttcgttacctcaattgccacattttgcctaacttttttgcctaaaattagttattcaattcgaacgactaaccttaggcaaattgtggcacatttagccacaaaccaaacatgcctttaatctgtctggagtttgagcgcagttttggtggcaggggtagctatctgcctatctctatgtttggtatttaaaggttagaggctgatgctgcttagattcagataatactagtgataatatacttttgctcactggaccactaaaggatggattcatcatattttggttgcctttgaaaataagatggcactcgagtcttc

SEQ ID NO: 202455 - DNA, 408 bp, Zea Mays
taagaatatgactgagagtgaagaatattcctgcaccagagtttgggagtctacaaacatgggaaagagcaaatattggtgcttttgcaattggtgaccctgctgcagctgattcttctaggaattcacaagggcagtatggtacaccaatgccatacattggagagacaaaggttgaagttgatctgttgagtgatggtgtgaaagaaggtgctgaatcaggtaaaactgattctgaactgaaagttttacctccatggatgatcaaggatggcatgaatcttactaaggaacaaagaggagagataattgcgccacaaaaacttgagaaatctgatgccggagatgacaagaagcatgacttgaaagatgatgattgttttcgctcagctcaggaatgaacacata

SEQ ID NO: 202456 - DNA, 458 bp, Zea Mays
caaatattatggaaggaaacaaaaatgtcaggagcaattgaagccattggttgcacaacttgatagagtgaagaatattcctgcaccagagtttgggagtctacaaacatgggaaagagcaaatattggtgcttttgcaattggtgaccctgctgcagctgattcttctaggaattcacaagggcagtatggtacaccaatgccatacattggagagacaaaggttgaagttgatctgttgagtgatggtgtgaaagaaggtgctgaatcaggtaaaactgattctgaactgaaagttttacctccatggatgatcaaggatggcatgaatcttactaaggaacaaagaggagagataattgcgccacaaaaacttgagaaatctgatgccggagatgacaagaagcatgacttgaaagatgatgattgttttcgctcagctcaggaatgaacacata

SEQ ID NO: 202457 - DNA, 435 bp, Zea Mays
ctagaatggagcaattgaagccattggttgcacaacttgatagagtgaagaatattcctgcaccagagtttgggagtctacaaacatgggaaagagcaaatattggtgcttttgcaattggtgaccctgctgcagctgattcttctaggaattcacaagggcagtatggtacaccaatgccatacattggagagacaaaggttgaagttgatctgttgagtgatggtgtgaaagaaggtgctgaatcaggtaaaactgattctgaactgaaagttttacctccatggatgatcaaggatggcatgaatcttactaaggaacaaagaggagagataattgcgccacaaaaacttgagaaatctgatgccggagatgacaagaagcatgacttgaaagatgatgattgttttcgctcagctcaggaatgaacacata

SEQ ID NO: 202458 - DNA, 732 bp, Zea Mays
ggcgggagagggggagcaggactcaccaagtcactaggttcctgcagattgatgagggcggcgtgcagactgcagaggaggggcggcgtgagaggaggggcggccggcggcgtgaggactgagggacgaccgtgggttcgggaggaagatttggctaaagcattgaagctccactcgaaacagctgcgtcgcattctccgtttctttgaagaggagaaactagtcacgagggatcatcgaaaggagtcagcaaaaaacgcaaaagcacataatgctgcagctgctaatgatggtcaaccaattgctaaggagggagaagagaaagtaaagctgcacacacattcatactgttgcttggattatgctcagatctgtgatgttgtaaggtaccggattcaccgcatgaagaaaaaattgaaggatgaattggacagcagaaatacaattcaacactatatatgtcctagctgcaataaaagatactcagccttcgatgcactacaactggtaagctacacggatgagtacttccattgtgaaacttgcaatggtgaactggttgcagagagtgacaagcttgcttctgaggaaatgggagatggcgatgacaatgttagaaagcgcaggcgtgagaaattaaaggacatgcagcaaagaatagaaattatacatagtctgtttgcccagagtcaagaaaaaaattgactgataccagtacaagtctttggtgag

SEQ ID NO: 202459 - DNA, 1998 bp, Zea Mays
gttactgcttctataacacgcgatcccgcttccactcggcgaccaccgggcaccgccgccggtacaccgcgcatcgaatcgccaccagtgccgattctgctgacccctcgccatcgctggcgggcgaatcgacgccatggccgccgcgcgccggggccgcgccgacggtgccaacggcgtcgtccgtccccgcccccgcgaccgtgtcgtcggcgtcagcggaagcatggcggggcgcgtggcggtcctcgctttctgtgtcgccgggatctggtccgcctacatctaccagggcgtcctccaggagactctatccacgaagcggttcaggccggaggcgcggcggttcgaggcttcgagcaccttgcgttcctcaacttcgcgcagaatgtcgtatgcttcgtctggtccttcctaatgattaagttgtggtcgagcgggagcgggagtagctccgacggccgtgcgccgctatcgaagtactggggcgtcagcgtaaccaataccatcgggccgaccatggggatcgaggcgctcaagtacattaactatccggctcaggtttggttccgcctgctattgccgtctcaccttggttgttatatgcactgtcccggacattgtgtcatgttaatgttaggttcctgtcgcgggcacatgggtaatattgtcactgacgcttatggattgagatgttccgatagagttaattgactatatagggagctctttggaagtgcttcctcaagtgaacatttaggaagaacattgcatagattggattgtatgcgatatggcgactggcgagcgtgtgcggtatcgaccatcggcaatccatctctagagagcattgatccaagcatcgttcttgctcaacggatttgtttttttctcttgacaagctcgaagatatgtggcgcgaggtttctttacgcaatcccgactaatttctgttggtgtgaacaggtgttggcaaaatcttctaagatgatcccttaatgctgatgggaacccttctctatagtgtgaagtacacacttccagagtatttttgtacctttcttgttgctggcggtgtgtcctcctttgcgttgttgaagacaagctccaagacagttaagaagcttgtcaaccctaatgcacctcttggctatacattgtgcttcctcaacttagcttttgatgggtatactaactcgacccaagatataataaagtcaaggtacccaaacacgaatccatgggatataatgcttggcatgaacctctgggggaccatatataatgctgtagttatgtttgttgcgccattactattcagtaactggccatatgcagatggtttcgaggcattgagattttgccaggagaacccagaggtggcctgggacatttttctgttctgcctatgtggcgccgtgcgtcagaattatatcttcttaaccatcagcaggttcggcgctcttactaacacaacgatcactaccacccgtaaattcatgagcatcgtggtttcatctgtcatcagtggcaatccattatcttcaaagcaacggggtagtgttacgatggtcttcttaggcctctctgtccaaatatatctcaaatggaagagagagaagggcagacaccccagtgagtaagctcgattgttgactcttgtacctgttccgatttgtaacttcaattggacagatctgttgtgaggttgaccaggataatgttaatgtagtctgctgaaattatgagctatgcctagagcgatacgtaatgtgaggctgtgagagccttattcatgtagatatgtaaattggtctaggaatgtttatagtaaggatttaggttatgttcccaatcgtaatgaatatttgttgtcaggagatgttatgagagccttattcatgtagatatgcgaatacaatgggtgctcaatgctccattacgaaatgtaaatgacagactgatactggtaaattccatattttcgttgcacgtcca

SEQ ID NO: 202460 - DNA, 2039 bp, Zea Mays
ctcttacgtgctcttcgctccttccccacggttacgctgggcttctataacacgcgatcccgcttccactcggcgaccaccgggcaccgccgccggtacaccgcgcatcgaatcgccaccagtgccgattctgctgacccctcgccatcgccggcgggcgaatcgacaccatggccgccgcacgccggggccgcgccgacggtgccaacggcgtcgtccgtccccgcccccgcgaccgtgtcgtcggcgtcagcggaagcatggcggggcgcgtggccgtcctcgccttctgtgtcgccgggatctggtccgcctacatctaccagggcgtcctccaggagactctatccacgaagcggttcgggccggaggcgcggcggttcgagcaccttgcgttcctcaacttcgcgcagaatgtcgtatgcttcgtctggtccttcctaagtgagagctcactccctccgaccctccctctcgcgccgcatggctgtctgattgcgcatttcgcgcaacgtcgtggactctgactaagttgtggtcgggcgggagcgggagcagctccgacggccgtgcgccgctatcgaagtactggggcgtcagcgtaaccaataccatcgggccgaccatggggatcgaggcgctcaagtacattaactatccggctcaggttcctgtcgcgggcacatgggtaatattgtcactgacgcttatggattgagatgttccgatagagttaattgactatatagggagctctttggaagtgcttcctcaagtgaacatttaggaagaacattgcattgattggattgtatgtgatatggcgactggcgatcgtgtgcggtatcgaccatcggcaatccatctctagctatcttattgcagagagcattgatccaagcatcgttcttgctcaacggatttgtttttttctcttgacaagctcgaagatatgtggcgcgaggtttctttacgcaatcccgactaatttctgttggtgtgaacaggtgttggcaaaatcttctaagatgatcccttaatgctgatgggaacccttctctatagtgtgaagtacacacttccagagtatttttgtacctttcttgttgctggcggtgtgtcctcctttgcgttgttgaagacaagctccaagacagttaagaagcttgtcaaccctaatgcacctcttggctatacattgtgcttcctcaacttagcttttgatgggtatactaactcgacccaagatataataaagtcaaggtacccaaacacgaatccatgggatataatgcttggcatgaacctctgggggaccatatataatgctgtagttatgtttgttgcgccattactattcagtaactggccatatgcagatggtttcgaggcattgagattttgccaggagaacccagaggtggcctgggacatttttctgttctgcctatgtggcgccgtgcgtcagaattatatcttcttaaccatcagcaggttcggcgctcttactaacacaacgatcactaccacccgtaaattcatgagcatcgtggtttcatctgtcatcagtggcaatccattatcttcaaagcaacggggtagtgttacgatggtcttcttaggcctctctgtccaaatatatctcaaatggaagagagagaagggcagacaccccagtgagtaagctcgattgttgactcttgtacctgttccgatttgtaacttcaattggacagatctgttgtgaggttgaccaggataatgttaatgtagtctgctgaaattatgagctatgcctagagcgatacgtaatgtgaggctgtgagagccttattcatgtagatatgtaaattggtctaggaatgtttatagtaaggatttaggttatgttcccaatcgtaatgaatatttgttgtcaggagatgttatgagagccttattcatgtagatatgcgaatacaatgggtgctcaatgctccattacgaaatgtaaatgacagactgatactggtaaattccatattttcgttgcacgtcca

SEQ ID NO: 202461 - DNA, 2201 bp, Zea Mays
tatactatctattcatatagagatggaatcaccgcccctcacagctgaagcaattgcttatacagagaaaaagatggacatggctttggaggatataattaaaatgtcaaagaaaaagaatcctggaggcaagaaacccccgaggcagccgataaaaaagcatccattccagaatggcaactctaataaagggaatggcaaggttcaaagttttatggagtctagatcaaccattagacaaggtgttcttgcacagagaaggtcaaatcttggtggaaatcagttccctgctacaaagcaggctgcgaagaaggctgctgttatgccaatgcacaagggggctatccgttggaacaagccaagtttcatggtgtaatttatagctgctggatgagtgttattttggacaccagcattaactgtctgtgagggtttcattagtgttatttgtcaactattgttggaaggactgaaggagatgtgataatggttagcgtctcatgccactggtgacggatcatccatatacagggacgttacatgcctgagtttgaattggttttgactactggctccttggcagtgttcagtgtttatttgttgaatgatgaatgcagtgtaaatctagggtagtgctgctaattggacaattgttgtatgcctccaagggagtatattttgctactgcctcatattcaagttggctgtatccgtaacatcatgccagttttgagcatcctatcataatctgctatatgctccccttgttcactgcgtcccacagagataatgcttgcctgcatttctactggataagagtaaatcatggtatcttacgatttatctcagtatgctgggctgtatggatgctatcttttcaaggtcaactgttgggatttattttcatgattccttatgtgaccttgtttgttctggatcagtggtcactatttacatggcttgagttttatcagtttaatcaatcaataagttgtgtcaacttgggacattgttgaaccatgtgcattgaaatttgggtggaactaaacagtctagactccaaaatgtgagggccttggaaaccaagaggatgcactagatattttcaatgaacactttattgtttctgtttcattttatttcaaaacatggtatgtactccctgacttcacttgagaagcgagaattgtatccttgttttgatgggggtatggtgagtttgctcagaaaacaatatggctcttggttctccgttgcttatgattcttggtactcgagcactcctgctcatgtgagatactaatgttttgattttgatacagtgcaagtaccttagtgcagaggaggcctgtaggtggtgcttttcagaatgccaaggtcaaggagtccaaccaggcagcaccaaggacgatggatgcactctttgcacagatgaaggcgcaacgcttgaggacggtacctcaacagcaggcaaattcttccccctggagtcatttcaaccagcatcgacgtgttcagcagcagcagaggcgaggcagagggtatggtggccgtaatgttggcaaccaatgaatccaactagacatatctactgcatcggagccctttctcttcactggtcttttggaccttggaagaaaggacgccccttggaaaatcaaacttggctttgtttattggaggggtgacaatgggctctaacttggctttgtttattggaggggtgacatcgggctctaaattttacactaagatttaaggatctgattaagatcaggccctatttctattcatttttaaactaaaatttatttagtgtcctactattttgtgaagcgtttggatcgtgatccattaccacctcacctttggacgtggacaggatatgaagcgaagtttgtttgagttttctagttgtgtgcagtctgcttccgtttcagcatgtataatgacatggaaattatttggtcagagattatgatgtcttgtttcttggcttgattagcttcatccccaactaagagtaattcaccttacctagggatgacaacaggtcaggtttagatagggtagaataaatatccgtccgctataatatttgcgaagattatttatatctgtctatgactatactcgcggataacttgtaccggtatccgtagctattcgtttgattggttatctgtactatttcatcttag

SEQ ID NO: 202462 - DNA, 2455 bp, Zea Mays
gattaccttcctcggatggtgtaattttacaggacagagatggaatcaccgcccctcacagctgaagcaattgcttatacagagaaaaagatggacatggctttggaggatataattaaaatgtcaaagaaaaagaatcctggaggcaagaaacccccgaggcagccgataaaaaagcatccattccagaatggcaactctaataaagggaatggcaaggttcaaagttttatggagtctagatcaaccattagacaaggtgttcttgcacagagaaggtcaaatcttggtggaaatcagttccctgctacaaagcaggctgcgaagaaggctgctgttatgccaatgcacaagggggctatccgttggaacaagccaaggtaaacaatgatgttcttttattgcttatgagaaagtttactgcattcaaggggttgttcaatttattgagtcatgcaccttggattatattggctgagaatgattgtgatgctggtgtttacatggaactgccttaacttctctggttatacacacacaagcttataaagaacaatcgatttcatattcttgtggcacaaggcctgttttcttggttgaactgctacaaatatatgtttcatggtgtaatttatagctgctggatgagtgttattttggacaccagcattaactgtctgtgagggtttcattagtgttatttgtcaactattgttggaaggactgaaggagatgtgataatggttagcgtctcatgccactggtgacggatcatccatatacagggacgttacatgcctgagtttgaattggttttgactactggctccttggcagtgttcagtgtttatttgttgaatgatgaatgcagtgtaaatctagggtagtgctgctaattggacaattgttgtatgcctccaagggagtatattttgctactgcctcatattcaagttggctgtatccgtaacatcatgccagttttgagcatcctatcataatctgctatatgctccccttgttcactgcgtcccacagagataatgcttgcctgcatttctactggataagagtaaatcatggtatcttacgatttatctcagtatgctgggctgtatggatgctatcttttcaaggtcaactgttgggatttattttcatgattccttatgtgaccttgtttgttctggatcagtggtcactatttacatggcttgagttttatcagtttaatcaatcaataagttgtgtcaacttgggacattgttgaaccatgtgcattgaaatttgggtggaactaaacagtctagactccaaaatgtgagggccttggaaaccaagaggatgcactagatattttcaatgaacactttattgtttctgtttcattttatttcaaaacatggtatgtactccctgacttcacttgagaagcgagaattgtatccttgttttgatgggggtatggtgagtttgctcagaaaacaatatggctcttggttctccgttgcttatgattcttggtactcgagcactcctgctcatgtgagatactaatgttttgattttgatacagtgcaagtaccttagtgcagaggaggcctgtaggtggtgcttttcagaatgccaaggtcaaggagtccaaccaggcagcaccaaggacgatggatgcactctttgcacagatgaaggcgcaacgcttgaggacggtacctcaacagcaggcaaattcttccccctggagtcatttcaaccagcatcgacgtgttcagcagcagcagaggcgaggcagagggtatggtggccgtaatgttggcaaccaatgaatccaactagacatatctactgcatcggagccctttctcttcactggtcttttggaccttggaagaaaggacgccccttggaaaatcaaacttggctttgtttattggaggggtgacaatgggctctaacttggctttgtttattggaggggtgacatcgggctctaaattttacactaagatttaaggatctgattaagatcaggccctatttctattcatttttaaactaaaatttatttagtgtcctactattttgtgaagcgtttggatcgtgatccattaccacctcacctttggacgtggacaggatatgaagcgaagtttgtttgagttttctagttgtgtgcagtctgcttccgtttcagcatgtataatgacatggaaattatttggtcagagattatgatgtcttgtttcttggcttgattagcttcatccccaactaagagtaattcaccttacctagggatgacaacaggtcaggtttagatagggtagaataaatatccgtccgctataatatttgcgaagattatttatatctgtctatgactatactcgcggataacttgtaccggtatccgtagctattcgtttgattggttatctgtactatttcatcttag

SEQ ID NO: 202463 - DNA, 2634 bp, Zea Mays
gtctctctccctttctcgagttgacgagccctcgacggcgcctacccgcttggtccttgcaatctattgcgtgtctgctttcggtctagggtcgcggagacaggggaatcgattgtgaaaggtggaactgagatggaatcaccgcccctcacagctgaagcaattgcttatacagagaaaaagatggacatggctttggaggatataattaaaatgtcaaagaaaaagaatcctggaggcaagaaacccccgaggcagccgataaaaaagcatccattccagaatggcaactctaataaagggaatggcaaggttcaaagttttatggagtctagatcaaccattagacaaggtgttcttgcacagagaaggtcaaatcttggtggaaatcagttccctgctacaaagcaggctgcgaagaaggctgctgttatgccaatgcacaagggggctatccgttggaacaagccaaggtaaacaatgatgttcttttattgcttatgagaaagtttactgcattcaaggggttgttcaatttattgagtcatgcaccttggattatattggctgagaatgattgtgatgctggtgtttacatggaactgccttaacttctctggttatacacacacaagcttataaagaacaatcgatttcatattcttgtggcacaaggcctgttttcttggttgaactgctacaaatatatggtgaatatagcatatgagccttgaagcttcattgaaagttatggccttctcctttatctgctgttgcctgacatttttctatgcagtttcatggtgtaatttatagctgctggatgagtgttattttggacaccagcattaactgtctgtgagggtttcattagtgttatttgtcaactattgttggaaggactgaaggagatgtgataatggttagcgtctcatgccactggtgacggatcatccatatacagggacgttacatgcctgagtttgaattggttttgactactggctccttggcagtgttcagtgtttatttgttgaatgatgaatgcagtgtaaatctagggtagtgctgctaattggacaattgttgtatgcctccaagggagtatattttgctactgcctcatattcaagttggctgtatccgtaacatcatgccagttttgagcatcctatcataatctgctatatgctccccttgttcactgcgtcccacagagataatgcttgcctgcatttctactggataagagtaaatcatggtatcttacgatttatctcagtatgctgggctgtatggatgctatcttttcaaggtcaactgttgggatttattttcatgattccttatgtgaccttgtttgttctggatcagtggtcactatttacatggcttgagttttatcagtttaatcaatcaataagttgtgtcaacttgggacattgttgaaccatgtgcattgaaatttgggtggaactaaacagtctagactccaaaatgtgagggccttggaaaccaagaggatgcactagatattttcaatgaacactttattgtttctgtttcattttatttcaaaacatggtatgtactccctgacttcacttgagaagcgagaattgtatccttgttttgatgggggtatggtgagtttgctcagaaaacaatatggctcttggttctccgttgcttatgattcttggtactcgagcactcctgctcatgtgagatactaatgttttgattttgatacagtgcaagtaccttagtgcagaggaggcctgtaggtggtgcttttcagaatgccaaggtcaaggagtccaaccaggcagcaccaaggacgatggatgcactctttgcacagatgaaggcgcaacgcttgaggacggtacctcaacagcaggcaaattcttccccctggagtcatttcaaccagcatcgacgtgttcagcagcagcagaggcgaggcagagggtatggtggccgtaatgttggcaaccaatgaatccaactagacatatctactgcatcggagccctttctcttcactggtcttttggaccttggaagaaaggacgccccttggaaaatcaaacttggctttgtttattggaggggtgacaatgggctctaacttggctttgtttattggaggggtgacatcgggctctaaattttacactaagatttaaggatctgattaagatcaggccctatttctattcatttttaaactaaaatttatttagtgtcctactattttgtgaagcgtttggatcgtgatccattaccacctcacctttggacgtggacaggatatgaagcgaagtttgtttgagttttctagttgtgtgcagtctgcttccgtttcagcatgtataatgacatggaaattatttggtcagagattatgatgtcttgtttcttggcttgattagcttcatccccaactaagagtaattcaccttacctagggatgacaacaggtcaggtttagatagggtagaataaatatccgtccgctataatatttgcgaagattatttatatctgtctatgactatactcgcggataacttgtaccggtatccgtagctattcgtttgattggttatctgtactatttcatcttag

SEQ ID NO: 202464 - DNA, 2805 bp, Zea Mays
gcggcccgcagccacggccttccgtaatgtcataactccccttctcgagtccatctccaacctcatccctcccaccccaataatacatccagccggcgccatcaggcccggcaacgcgcaagcggggctgaccatcgaaccctagtccccggccgagccgccctccgccgagccttgcggccgctctgcgtcatccctcttagtctccctccgttcgacacggcttggatccgagatggaatcaccgcccctcacagctgaagcaattgcttatacagagaaaaagatggacatggctttggaggatataattaaaatgtcaaagaaaaagaatcctggaggcaagaaacccccgaggcagccgataaaaaagcatccattccagaatggcaactctaataaagggaatggcaaggttcaaagttttatggagtctagatcaaccattagacaaggtgttcttgcacagagaaggtcaaatcttggtggaaatcagttccctgctacaaagcaggctgcgaagaaggctgctgttatgccaatgcacaagggggctatccgttggaacaagccaaggtaaacaatgatgttcttttattgcttatgagaaagtttactgcattcaaggggttgttcaatttattgagtcatgcaccttggattatattggctgagaatgattgtgatgctggtgtttacatggaactgccttaacttctctggttatacacacacaagcttataaagaacaatcgatttcatattcttgtggcacaaggcctgttttcttggttgaactgctacaaatatatggtgaatatagcatatgagccttgaagcttcattgaaagttatggccttctcctttatctgctgttgcctgacatttttctatgcagtttcatggtgtaatttatagctgctggatgagtgttattttggacaccagcattaactgtctgtgagggtttcattagtgttatttgtcaactattgttggaaggactgaaggagatgtgataatggttagcgtctcatgccactggtgacggatcatccatatacagggacgttacatgcctgagtttgaattggttttgactactggctccttggcagtgttcagtgtttatttgttgaatgatgaatgcagtgtaaatctagggtagtgctgctaattggacaattgttgtatgcctccaagggagtatattttgctactgcctcatattcaagttggctgtatccgtaacatcatgccagttttgagcatcctatcataatctgctatatgctccccttgttcactgcgtcccacagagataatgcttgcctgcatttctactggataagagtaaatcatggtatcttacgatttatctcagtatgctgggctgtatggatgctatcttttcaaggtcaactgttgggatttattttcatgattccttatgtgaccttgtttgttctggatcagtggtcactatttacatggcttgagttttatcagtttaatcaatcaataagttgtgtcaacttgggacattgttgaaccatgtgcattgaaatttgggtggaactaaacagtctagactccaaaatgtgagggccttggaaaccaagaggatgcactagatattttcaatgaacactttattgtttctgtttcattttatttcaaaacatggtatgtactccctgacttcacttgagaagcgagaattgtatccttgttttgatgggggtatggtgagtttgctcagaaaacaatatggctcttggttctccgttgcttatgattcttggtactcgagcactcctgctcatgtgagatactaatgttttgattttgatacagtgcaagtaccttagtgcagaggaggcctgtaggtggtgcttttcagaatgccaaggtatggagtatggactttgtcaaatcttgaccttaatgctgagtaaataggacaaactggccgaaaaggtcaaggagtccaaccaggcagcaccaaggacgatggatgcactctttgcacagatgaaggcgcaacgcttgaggacggtacctcaacagcaggcaaattcttccccctggagtcatttcaaccagcatcgacgtgttcagcagcagcagaggcgaggcagagggtatggtggccgtaatgttggcaaccaatgaatccaactagacatatctactgcatcggagccctttctcttcactggtcttttggaccttggaagaaaggacgccccttggaaaatcaaacttggctttgtttattggaggggtgacaatgggctctaacttggctttgtttattggaggggtgacatcgggctctaaattttacactaagatttaaggatctgattaagatcaggccctatttctattcatttttaaactaaaatttatttagtgtcctactattttgtgaagcgtttggatcgtgatccattaccacctcacctttggacgtggacaggatatgaagcgaagtttgtttgagttttctagttgtgtgcagtctgcttccgtttcagcatgtataatgacatggaaattatttggtcagagattatgatgtcttgtttcttggcttgattagcttcatccccaactaagagtaattcaccttacctagggatgacaacaggtcaggtttagatagggtagaataaatatccgtccgctataatatttgcgaagattatttatatctgtctatgactatactcgcggataacttgtaccggtatccgtagctattcgtttgattggttatctgtactatttcatcttag

SEQ ID NO: 202465 - DNA, 2742 bp, Zea Mays
gacgcggcccgcagccacggccttccgtaatgtcataactccccttctcgagtccatctccaacctcatccctcccaccccaataatacatccagccggcgccatcaggcccggcaacgcgcaagcggggctgaccatcgaaccctagtccccggccgagccgccctccgccgagccttgcggccgctctgcgtcatccctcttagtctccctccgttcgacacggcttggatccgagagatggaatcaccgcccctcacagctgaagcaattgcttatacagagaaaaagatggacatggctttggaggatataattaaaatgtcaaagaaaaagaatcctggaggcaagaaacccccgaggcagccgataaaaaagcatccattccagaatggcaactctaataaagggaatggcaaggttcaaagttttatggagtctagatcaaccattagacaaggtgttcttgcacagagaaggtcaaatcttggtggaaatcagttccctgctacaaagcaggctgcgaagaaggctgctgttatgccaatgcacaagggggctatccgttggaacaagccaaggtaaacaatgatgttcttttattgcttatgagaaagtttactgcattcaaggggttgttcaatttattgagtcatgcaccttggattatattggctgagaatgattgtgatgctggtgtttacatggaactgccttaacttctctggttatacacacacaagcttataaagaacaatcgatttcatattcttgtggcacaaggcctgttttcttggttgaactgctacaaatatatggtgaatatagcatatgagccttgaagcttcattgaaagttatggccttctcctttatctgctgttgcctgacatttttctatgcagtttcatggtgtaatttatagctgctggatgagtgttattttggacaccagcattaactgtctgtgagggtttcattagtgttatttgtcaactattgttggaaggactgaaggagatgtgataatggttagcgtctcatgccactggtgacggatcatccatatacagggacgttacatgcctgagtttgaattggttttgactactggctccttggcagtgttcagtgtttatttgttgaatgatgaatgcagtgtaaatctagggtagtgctgctaattggacaattgttgtatgcctccaagggagtatattttgctactgcctcatattcaagttggctgtatccgtaacatcatgccagttttgagcatcctatcataatctgctatatgctccccttgttcactgcgtcccacagagataatgcttgcctgcatttctactggataagagtaaatcatggtatcttacgatttatctcagtatgctgggctgtatggatgctatcttttcaaggtcaactgttgggatttattttcatgattccttatgtgaccttgtttgttctggatcagtggtcactatttacatggcttgagttttatcagtttaatcaatcaataagttgtgtcaacttgggacattgttgaaccatgtgcattgaaatttgggtggaactaaacagtctagactccaaaatgtgagggccttggaaaccaagaggatgcactagatattttcaatgaacactttattgtttctgtttcattttatttcaaaacatggtatgtactccctgacttcacttgagaagcgagaattgtatccttgttttgatgggggtatggtgagtttgctcagaaaacaatatggctcttggttctccgttgcttatgattcttggtactcgagcactcctgctcatgtgagatactaatgttttgattttgatacagtgcaagtaccttagtgcagaggaggcctgtaggtggtgcttttcagaatgccaaggtcaaggagtccaaccaggcagcaccaaggacgatggatgcactctttgcacagatgaaggcgcaacgcttgaggacggtacctcaacagcaggcaaattcttccccctggagtcatttcaaccagcatcgacgtgttcagcagcagcagaggcgaggcagagggtatggtggccgtaatgttggcaaccaatgaatccaactagacatatctactgcatcggagccctttctcttcactggtcttttggaccttggaagaaaggacgccccttggaaaatcaaacttggctttgtttattggaggggtgacaatgggctctaacttggctttgtttattggaggggtgacatcgggctctaaattttacactaagatttaaggatctgattaagatcaggccctatttctattcatttttaaactaaaatttatttagtgtcctactattttgtgaagcgtttggatcgtgatccattaccacctcacctttggacgtggacaggatatgaagcgaagtttgtttgagttttctagttgtgtgcagtctgcttccgtttcagcatgtataatgacatggaaattatttggtcagagattatgatgtcttgtttcttggcttgattagcttcatccccaactaagagtaattcaccttacctagggatgacaacaggtcaggtttagatagggtagaataaatatccgtccgctataatatttgcgaagattatttatatctgtctatgactatactcgcggataacttgtaccggtatccgtagctattcgtttgattggttatctgtactatttcatcttag

SEQ ID NO: 202466 - DNA, 3086 bp, Zea Mays
cgacgcggcccgcagccacggccttccgtaatgtcataactccccttctcgagtccatctccaacctcatccctcccaccccaataatacatccagccggcgccatcaggcccggcaacgcgcaagcggggctgaccatcgaaccctagtccccggccgagccgccctccgccgagccttgcggccgctctgcgtcatccctcttagtctccctccgttcgacacggcttggatccgagatggaatcaccgcccctcacagctgaagcaattgcttatacagagaaaaagatggacatggctttggaggatataattaaaatgtcaaagaaaaagaatcctggaggcaagaaacccccgaggcagccgataaaaaagcatccattccagaatggcaactctaataaagggaatggcaaggttcaaagttttatggagtctagatcaaccattagacaaggtgttcttgcacagagaaggtcaaatcttggtggaaatcagttccctgctacaaagcaggctgcgaagaaggctgctgttatgccaatgcacaagggggctatccgttggaacaagccaaggtaaacaatgatgttcttttattgcttatgagaaagtttactgcattcaaggggttgttcaatttattgagtcatgcaccttggattatattggctgagaatgattgtgatgctggtgtttacatggaactgccttaacttctctggttatacacacacaagcttataaagaacaatcgatttcatattcttgtggcacaaggcctgttttcttggttgaactgctacaaatatatggtgaatatagcatatgagccttgaagcttcattgaaagttatggccttctcctttatctgctgttgcctgacatttttctatgcagtttcatggtgtaatttatagctgctggatgagtgttattttggacaccagcattaactgtctgtgagggtttcattagtgttatttgtcaactattgttggaaggactgaaggagatgtgataatggttagcgtctcatgccactggtgacggatcatccatatacagggacgttacatgcctgagtttgaattggttttgactactggctccttggcagtgttcagtgtttatttgttgaatgatgaatgcagtgtaaatctagggtagtgctgctaattggacaattgttgtatgcctccaagggagtatattttgctactgcctcatattcaagttggctgtatccgtaacatcatgccagttttgagcatcctatcataatctgctatatgctccccttgttcactgcgtcccacagagataatgcttgcctgcatttctactggataagagtaaatcatggtatcttacgatttatctcagtatgctgggctgtatggatgctatcttttcaaggtcaactgttgggatttattttcatgattccttatgtgaccttgtttgttctggatcagtggtcactatttacatggcttgagttttatcagtttaatcaatcaataagttgtgtcaacttgggacattgttgaaccatgtgcattgaaatttgggtggaactaaacagtctagactccaaaatgtgagggccttggaaaccaagaggatgcactagatattttcaatgaacactttattgtttctgtttcattttatttcaaaacatggtatgtactccctgacttcacttgagaagcgagaattgtatccttgttttgatgggggtatgtgcaagtaccttagtgcagaggaggcctgtaggtggtgcttttcagaatgccaaggtatggagtatggactttgtcaaatcttgaccttaatgctgagtaaataggacaaactggccgaaaaggtaaactgtttcctaatgtattgtatctgatgcataataatcaacttaagatgtaatgggtgatcttttggcctatcaatataatgacatcttggaaaaccattgctattgtaattgatattttgtgttctttcttgatatgttttaatgcatagacagcatagttttctcacataatccatcttttttctggtatcctcgtgtcacttcataatcatctgtagtagtttcagagccgtgatcagtgctatactcgagtccatttttatttttagaagttgcgtgatacatgaacttctatttgtttgattaatatattcgttgaattatcatgtcctgtagttttttttgtcgctgctgatcatacgcccgtaatctatttgtaggtcaaggagtccaaccaggcagcaccaaggacgatggatgcactctttgcacagatgaaggcgcaacgcttgaggacggtacctcaacagcaggcaaattcttccccctggagtcatttcaaccagcatcgacgtgttcagcagcagcagaggcgaggcagagggtatggtggccgtaatgttggcaaccaatgaatccaactagacatatctactgcatcggagccctttctcttcactggtcttttggaccttggaagaaaggacgccccttggaaaatcaaacttggctttgtttattggaggggtgacaatgggctctaacttggctttgtttattggaggggtgacatcgggctctaaattttacactaagatttaaggatctgattaagatcaggccctatttctattcatttttaaactaaaatttatttagtgtcctactattttgtgaagcgtttggatcgtgatccattaccacctcacctttggacgtggacaggatatgaagcgaagtttgtttgagttttctagttgtgtgcagtctgcttccgtttcagcatgtataatgacatggaaattatttggtcagagattatgatgtcttgtttcttggcttgattagcttcatccccaactaagagtaattcaccttacctagggatgacaacaggtcaggtttagatagggtagaataaatatccgtccgctataatatttgcgaagattatttatatctgtctatgactatactcgcggataacttgtaccggtatccgtagctattcgtttgattggttatctgtactatttcatcttag

SEQ ID NO: 202467 - DNA, 2943 bp, Zea Mays
gccgcgacgcggcccgcagccacggccttccgtaatgtcataactccccttctcgagtccatctccaacctcatccctcccaccccaataatacatccagccggcgccatcaggcccggcaacgcgcaagcggggctgaccatcgaaccctagtccccggccgagccgccctccgccgagccttgcggccgctctgcgtcatccctcttagtctccctccgttcgacacggcttggatccgagatggaatcaccgcccctcacagctgaagcaattgcttatacagagaaaaagatggacatggctttggaggatataattaaaatgtcaaagaaaaagaatcctggaggcaagaaacccccgaggcagccgataaaaaagcatccattccagaatggcaactctaataaagggaatggcaaggttcaaagttttatggagtctagatcaaccattagacaaggtgttcttgcacagagaaggtcaaatcttggtggaaatcagttccctgctacaaagcaggctgcgaagaaggctgctgttatgccaatgcacaagggggctatccgttggaacaagccaaggtaaacaatgatgttcttttattgcttatgagaaagtttactgcattcaaggggttgttcaatttattgagtcatgcaccttggattatattggctgagaatgattgtgatgctggtgtttacatggaactgccttaacttctctggttatacacacacaagcttataaagaacaatcgatttcatattcttgtggcacaaggcctgttttcttggttgaactgctacaaatatatggtgaatatagcatatgagccttgaagcttcattgaaagttatggccttctcctttatctgctgttgcctgacatttttctatgcagtttcatggtgtaatttatagctgctggatgagtgttattttggacaccagcattaactgtctgtgagggtttcattagtgttatttgtcaactattgttggaaggactgaaggagatgtgataatggttagcgtctcatgccactggtgacggatcatccatatacagggacgttacatgcctgagtttgaattggttttgactactggctccttggcagtgttcagtgtttatttgttgaatgatgaatgcagtgtaaatctagggtagtgctgctaattggacaattgttgtatgcctccaagggagtatattttgctactgcctcatattcaagttggctgtatccgtaacatcatgccagttttgagcatcctatcataatctgctatatgctccccttgttcactgcgtcccacagagataatgcttgcctgcatttctactggataagagtaaatcatggtatcttacgatttatctcagtatgctgggctgtatggatgctatcttttcaaggtcaactgttgggatttattttcatgattccttatgtgaccttgtttgttctggatcagtggtcactatttacatggcttgagttttatcagtttaatcaatcaataagttgtgtcaacttgggacattgttgaaccatgtgcattgaaatttgggtggaactaaacagtctagactccaaaattgcaagtaccttagtgcagaggaggcctgtaggtggtgcttttcagaatgccaaggtatggagtatggactttgtcaaatcttgaccttaatgctgagtaaataggacaaactggccgaaaaggtaaactgtttcctaatgtattgtatctgatgcataataatcaacttaagatgtaatgggtgatcttttggcctatcaatataatgacatcttggaaaaccattgctattgtaattgatattttgtgttctttcttgatatgttttaatgcatagacagcatagttttctcacataatccatcttttttctggtatcctcgtgtcacttcataatcatctgtagtagtttcagagccgtgatcagtgctatactcgagtccatttttatttttagaagttgcgtgatacatgaacttctatttgtttgattaatatattcgttgaattatcatgtcctgtagttttttttgtcgctgctgatcatacgcccgtaatctatttgtaggtcaaggagtccaaccaggcagcaccaaggacgatggatgcactctttgcacagatgaaggcgcaacgcttgaggacggtacctcaacagcaggcaaattcttccccctggagtcatttcaaccagcatcgacgtgttcagcagcagcagaggcgaggcagagggtatggtggccgtaatgttggcaaccaatgaatccaactagacatatctactgcatcggagccctttctcttcactggtcttttggaccttggaagaaaggacgccccttggaaaatcaaacttggctttgtttattggaggggtgacaatgggctctaacttggctttgtttattggaggggtgacatcgggctctaaattttacactaagatttaaggatctgattaagatcaggccctatttctattcatttttaaactaaaatttatttagtgtcctactattttgtgaagcgtttggatcgtgatccattaccacctcacctttggacgtggacaggatatgaagcgaagtttgtttgagttttctagttgtgtgcagtctgcttccgtttcagcatgtataatgacatggaaattatttggtcagagattatgatgtcttgtttcttggcttgattagcttcatccccaactaagagtaattcaccttacctagggatgacaacaggtcaggtttagatagggtagaataaatatccgtccgctataatatttgcgaagattatttatatctgtctatgactatactcgcggataacttgtaccggtatccgtagctattcgtttgattggttatctgtactatttcatcttag

SEQ ID NO: 202468 - DNA, 2254 bp, Zea Mays
ccggccgcgacgcggcccgcagccacggccttccgtaatgtcataactccccttctcgagtccatctccaacctcatccctcccaccccaataatacatccagccggcgccatcaggcccggcaacgcgcaagcggggctgaccatcgaaccctagtccccggccgagccgccctccgccgagccttgcggccgctctgcgtcatccctcttagtctccctccgttcgacacggcttggatccgagatggaatcaccgcccctcacagctgaagcaattgcttatacagagaaaaagatggacatggctttggaggatataattaaaatgtcaaagaaaaagaatcctggaggcaagaaacccccgaggcagccgataaaaaagcatccattccagaatggcaactctaataaagggaatggcaaggttcaaagttttatggagtctagatcaaccattagacaaggtgttcttgcacagagaaggtcaaatcttggtggaaatcagttccctgctacaaagcaggctgcgaagaaggctgctgttatgccaatgcacaagggggctatccgttggaacaagccaaggtaaacaatgatgttcttttattgcttatgagaaagtttactgcattcaaggggttgttcaatttattgagtcatgcaccttggattatattggctgagaatgattgtgatgctggtgtttacatggaactgccttaacttctctggttatacacacacaagcttataaagaacaatcgatttcatattcttgtggcacaaggcctgttttcttggttgaactgctacaaatatatggtgaatatagcatatgagccttgaagcttcattgaaagttatggccttctcctttatctgctgttgcctgacatttttctatgcagtttcatggtgtaatttatagctgctggatgagtgttattttggacaccagcattaactgtctgtgagggtttcattagtgttatttgtcaactattgttggaaggactgaaggagatgtgataatggttagcgtctcatgccactggtgacggatcatccatatacagggacgttacatgcctgagtttgaattggttttgactactggctccttggcagtgttcagtgtttatttgttgaatgatgaatgcagtgtaaatctagggtagtgctgctaattggacaattgttgtatgcctccaagggagtatattttgctactgcctcatattcaagttggctgtatccgtaacatcatgccagttttgagcatcctatcataatctgctatatgctccccttgttcactgcgtcccacagagataatgcttgcctgcatttctactggataagagtaaatcatgtgcaagtaccttagtgcagaggaggcctgtaggtggtgcttttcagaatgccaaggtcaaggagtccaaccaggcagcaccaaggacgatggatgcactctttgcacagatgaaggcgcaacgcttgaggacggtacctcaacagcaggcaaattcttccccctggagtcatttcaaccagcatcgacgtgttcagcagcagcagaggcgaggcagagggtatggtggccgtaatgttggcaaccaatgaatccaactagacatatctactgcatcggagccctttctcttcactggtcttttggaccttggaagaaaggacgccccttggaaaatcaaacttggctttgtttattggaggggtgacaatgggctctaacttggctttgtttattggaggggtgacatcgggctctaaattttacactaagatttaaggatctgattaagatcaggccctatttctattcatttttaaactaaaatttatttagtgtcctactattttgtgaagcgtttggatcgtgatccattaccacctcacctttggacgtggacaggatatgaagcgaagtttgtttgagttttctagttgtgtgcagtctgcttccgtttcagcatgtataatgacatggaaattatttggtcagagattatgatgtcttgtttcttggcttgattagcttcatccccaactaagagtaattcaccttacctagggatgacaacaggtcaggtttagatagggtagaataaatatccgtccgctataatatttgcgaagattatttatatctgtctatgactatactcgcggataacttgtaccggtatccgtagctattcgtttgattggttatctgtactatttcatcttag

SEQ ID NO: 202469 - DNA, 1942 bp, Zea Mays
gagaatccaaatccaaacctcaccggccgcgacgcggcccgcagccacggccttccgtaatgtcataactccccttctcgagtccatctccaacctcatccctcccaccccaataatacatccagccggcgccatcaggcccggcaacgcgcaagcggggctgaccatcgaaccctagtccccggccgagccgccctccgccgagccttgcggccgctctgcgtcatccctcttagtctccctccgttcgacacggcttggatccgagatggaatcaccgcccctcacagctgaagcaattgcttatacagagaaaaagatggacatggctttggaggatataattaaaatgtcaaagaaaaagaatcctggaggcaagaaacccccgaggcagccgataaaaaagcatccattccagaatggcaactctaataaagggaatggcaaggttcaaagttttatggagtctagatcaaccattagacaaggtgttcttgcacagagaaggtcaaatcttggtggaaatcagttccctgctacaaagcaggctgcgaagaaggctgctgttatgccaatgcacaagggggctatccgttggaacaagccaagtgcaagtaccttagtgcagaggaggcctgtaggtggtgcttttcagaatgccaaggtatggagtatggactttgtcaaatcttgaccttaatgctgagtaaataggacaaactggccgaaaaggtaaactgtttcctaatgtattgtatctgatgcataataatcaacttaagatgtaatgggtgatcttttggcctatcaatataatgacatcttggaaaaccattgctattgtaattgatattttgtgttctttcttgatatgttttaatgcatagacagcatagttttctcacataatccatcttttttctggtatcctcgtgtcacttcataatcatctgtagtagtttcagagccgtgatcagtgctatactcgagtccatttttatttttagaagttgcgtgatacatgaacttctatttgtttgattaatatattcgttgaattatcatgtcctgtagttttttttgtcgctgctgatcatacgcccgtaatctatttgtaggtcaaggagtccaaccaggcagcaccaaggacgatggatgcactctttgcacagatgaaggcgcaacgcttgaggacggtacctcaacagcaggcaaattcttccccctggagtcatttcaaccagcatcgacgtgttcagcagcagcagaggcgaggcagagggtatggtggccgtaatgttggcaaccaatgaatccaactagacatatctactgcatcggagccctttctcttcactggtcttttggaccttggaagaaaggacgccccttggaaaatcaaacttggctttgtttattggaggggtgacaatgggctctaacttggctttgtttattggaggggtgacatcgggctctaaattttacactaagatttaaggatctgattaagatcaggccctatttctattcatttttaaactaaaatttatttagtgtcctactattttgtgaagcgtttggatcgtgatccattaccacctcacctttggacgtggacaggatatgaagcgaagtttgtttgagttttctagttgtgtgcagtctgcttccgtttcagcatgtataatgacatggaaattatttggtcagagattatgatgtcttgtttcttggcttgattagcttcatccccaactaagagtaattcaccttacctagggatgacaacaggtcaggtttagatagggtagaataaatatccgtccgctataatatttgcgaagattatttatatctgtctatgactatactcgcggataacttgtaccggtatccgtagctattcgtttgattggttatctgtactatttcatcttag

SEQ ID NO: 202470 - DNA, 1591 bp, Zea Mays
gtatttagctaggatttataaggtgcttttaggtagagaatccaaatccaaacctcaccggccgcgacgcggcccgcagccacggccttccgtaatgtcataactccccttctcgagtccatctccaacctcatccctcccaccccaataatacatccagccggcgccatcaggcccggcaacgcgcaagcggggctgaccatcgaaccctagtccccggccgagccgccctccgccgagccttgcggccgctctgcgtcatccctcttagtctccctccgttcgacacggcttggatccgagatggaatcaccgcccctcacagctgaagcaattgcttatacagagaaaaagatggacatggctttggaggatataattaaaatgtcaaagaaaaagaatcctggaggcaagaaacccccgaggcagccgataaaaaagcatccattccagaatggcaactctaataaagggaatggcaaggttcaaagttttatggagtctagatcaaccattagacaaggtgttcttgcacagagaaggtcaaatcttggtggaaatcagttccctgctacaaagcaggctgcgaagaaggctgctgttatgccaatgcacaagggggctatccgttggaacaagccaagtgcaagtaccttagtgcagaggaggcctgtaggtggtgcttttcagaatgccaaggtatggagtatggactttgtcaaatcttgaccttaatgctgagtaaataggacaaactggccgaaaaggtcaaggagtccaaccaggcagcaccaaggacgatggatgcactctttgcacagatgaaggcgcaacgcttgaggacggtacctcaacagcaggcaaattcttccccctggagtcatttcaaccagcatcgacgtgttcagcagcagcagaggcgaggcagagggtatggtggccgtaatgttggcaaccaatgaatccaactagacatatctactgcatcggagccctttctcttcactggtcttttggaccttggaagaaaggacgccccttggaaaatcaaacttggctttgtttattggaggggtgacaatgggctctaacttggctttgtttattggaggggtgacatcgggctctaaattttacactaagatttaaggatctgattaagatcaggccctatttctattcatttttaaactaaaatttatttagtgtcctactattttgtgaagcgtttggatcgtgatccattaccacctcacctttggacgtggacaggatatgaagcgaagtttgtttgagttttctagttgtgtgcagtctgcttccgtttcagcatgtataatgacatggaaattatttggtcagagattatgatgtcttgtttcttggcttgattagcttcatccccaactaagagtaattcaccttacctagggatgacaacaggtcaggtttagatagggtagaataaatatccgtccgctataatatttgcgaagattatttatatctgtctatgactatactcgcggataacttgtaccggtatccgtagctattcgtttgattggttatctgtactatttcatcttag

SEQ ID NO: 202471 - DNA, 1664 bp, Zea Mays
gttatatatattctctcactagaaatttatctatattttttagagccctcaatattttatactatctccgtttttaatatataacgagtggttaaaactttaaaaaacgtcaacgacatcatttatttaagaaaggaagtagtatttagctaggatttataaggtgcttttaggtagagaatccaaatccaaacctcaccggccgcgacgcggcccgcagccacggccttccgtaatgtcataactccccttctcgagtccatctccaacctcatccctcccaccccaataatacatccagccggcgccatcaggcccggcaacgcgcaagcggggctgaccatcgaaccctagtccccggccgagccgccctccgccgagccttgcggccgctctgcgtcatccctcttagtctccctccgttcgacacggcttggatccgagatggaatcaccgcccctcacagctgaagcaattgcttatacagagaaaaagatggacatggctttggaggatataattaaaatgtcaaagaaaaagaatcctggaggcaagaaacccccgaggcagccgataaaaaagcatccattccagaatggcaactctaataaagggaatggcaaggttcaaagttttatggagtctagatcaaccattagacaaggtgttcttgcacagagaaggtcaaatcttggtggaaatcagttccctgctacaaagcaggctgcgaagaaggctgctgttatgccaatgcacaagggggctatccgttggaacaagccaagtgcaagtaccttagtgcagaggaggcctgtaggtggtgcttttcagaatgccaaggtcaaggagtccaaccaggcagcaccaaggacgatggatgcactctttgcacagatgaaggcgcaacgcttgaggacggtacctcaacagcaggcaaattcttccccctggagtcatttcaaccagcatcgacgtgttcagcagcagcagaggcgaggcagagggtatggtggccgtaatgttggcaaccaatgaatccaactagacatatctactgcatcggagccctttctcttcactggtcttttggaccttggaagaaaggacgccccttggaaaatcaaacttggctttgtttattggaggggtgacaatgggctctaacttggctttgtttattggaggggtgacatcgggctctaaattttacactaagatttaaggatctgattaagatcaggccctatttctattcatttttaaactaaaatttatttagtgtcctactattttgtgaagcgtttggatcgtgatccattaccacctcacctttggacgtggacaggatatgaagcgaagtttgtttgagttttctagttgtgtgcagtctgcttccgtttcagcatgtataatgacatggaaattatttggtcagagattatgatgtcttgtttcttggcttgattagcttcatccccaactaagagtaattcaccttacctagggatgacaacaggtcaggtttagatagggtagaataaatatccgtccgctataatatttgcgaagattatttatatctgtctatgactatactcgcggataacttgtaccggtatccgtagctattcgtttgattggttatctgtactatttcatcttag

SEQ ID NO: 202472 - DNA, 2775 bp, Zea Mays
gttatatatattctctcactagaaatttatctatattttttagagccctcaatattttatactatctccgtttttaatatataacgagtggttaaaactttaaaaaacgtcaacgacatcatttatttaagaaaggaagtagtatttagctaggatttataaggtgcttttaggtagagaatccaaatccaaacctcaccggccgcgacgcggcccgcagccacggccttccgtaatgtcataactccccttctcgagtccatctccaacctcatccctcccaccccaataatacatccagccggcgccatcaggcccggcaacgcgcaagcggggctgaccatcgaaccctagtccccggccgagccgccctccgccgagccttgcggccgctctgcgtcatccctcttagtctccctccgttcgacacggcttggatccgagatggaatcaccgcccctcacagctgaagcaattgcttatacagagaaaaagatggacatggctttggaggatataattaaaatgtcaaagaaaaagaatcctggaggcaagaaacccccgaggcagccgataaaaaagcatccattccagaatggcaactctaataaagggaatggcaaggttcaaagttttatggagtctagatcaaccattagacaaggtgttcttgcacagagaaggtcaaatcttggtggaaatcagttccctgctacaaagcaggctgcgaagaaggctgctgttatgccaatgcacaagggggctatccgttggaacaagccaaggtaaacaatgatgttcttttattgcttatgagaaagtttactgcattcaaggggttgttcaatttattgagtcatgcaccttggattatattggctgagaatgattgtgatgctggtgtttacatggaactgccttaacttctctggttatacacacacaagcttataaagaacaatcgatttcatattcttgtggcacaaggcctgttttcttggttgaactgctacaaatatatggtgaatatagcatatgagccttgaagcttcattgaaagttatggccttctcctttatctgctgttgcctgacatttttctatgcagtttcatggtgtaatttatagctgctggatgagtgttattttggacaccagcattaactgtctgtgagggtttcattagtgttatttgtcaactattgttggaaggactgaaggagatgtgataatggttagcgtctcatgccactggtgacggatcatccatatacagggacgttacatgcctgagtttgaattggttttgactactggctccttggcagtgttcagtgtttatttgttgaatgatgaatgcagtgtaaatctagggtagtgctgctaattggacaattgttgtatgcctccaagggagtatattttgctactgcctcatattcaagttggctgtatccgtaacatcatgccagttttgagcatcctatcataatctgctatatgctccccttgttcactgcgtcccacagagataatgcttgcctgcatttctactggataagagtaaatcatggtatcttacgatttatctcagtatgctgggctgtatggatgctatcttttcaaggtcaactgttgggatttattttcatgattccttatgtgaccttgtttgttctggatcagtggtcactatttacatggcttgagttttatcagtttaatcaatcaataagttgtgtcaacttgggacattgttgaaccatgtgcattgaaatttgggtggaactaaacagtctagactccaaaatgtgagggccttggaaaccaagaggatgcactagatattttcaatgaacactttattgtttctgtttcattttatttcaaaacatgtgcaagtaccttagtgcagaggaggcctgtaggtggtgcttttcagaatgccaaggtcaaggagtccaaccaggcagcaccaaggacgatggatgcactctttgcacagatgaaggcgcaacgcttgaggacggtacctcaacagcaggcaaattcttccccctggagtcatttcaaccagcatcgacgtgttcagcagcagcagaggcgaggcagagggtatggtggccgtaatgttggcaaccaatgaatccaactagacatatctactgcatcggagccctttctcttcactggtcttttggaccttggaagaaaggacgccccttggaaaatcaaacttggctttgtttattggaggggtgacaatgggctctaacttggctttgtttattggaggggtgacatcgggctctaaattttacactaagatttaaggatctgattaagatcaggccctatttctattcatttttaaactaaaatttatttagtgtcctactattttgtgaagcgtttggatcgtgatccattaccacctcacctttggacgtggacaggatatgaagcgaagtttgtttgagttttctagttgtgtgcagtctgcttccgtttcagcatgtataatgacatggaaattatttggtcagagattatgatgtcttgtttcttggcttgattagcttcatccccaactaagagtaattcaccttacctagggatgacaacaggtcaggtttagatagggtagaataaatatccgtccgctataatatttgcgaagattatttatatctgtctatgactatactcgcggataacttgtaccggtatccgtagctattcgtttgattggttatctgtactatttcatcttag

SEQ ID NO: 202473 - DNA, 2751 bp, Zea Mays
gttatatatattctctcactagaaatttatctatattttttagagccctcaatattttatactatctccgtttttaatatataacgagtggttaaaactttaaaaaacgtcaacgacatcatttatttaagaaaggaagtagtatttagctaggatttataaggtgcttttaggtagagaatccaaatccaaacctcaccggccgcgacgcggcccgcagccacggccttccgtaatgtcataactccccttctcgagtccatctccaacctcatccctcccaccccaataatacatccagccggcgccatcaggcccggcaacgcgcaagcggggctgaccatcgaaccctagtccccggccgagccgccctccgccgagccttgcggccgctctgcgtcatccctcttagtctccctccgttcgacacggcttggatccgagatggaatcaccgcccctcacagctgaagcaattgcttatacagagaaaaagatggacatggctttggaggatataattaaaatgtcaaagaaaaagaatcctggaggcaagaaacccccgaggcagccgataaaaaagcatccattccagaatggcaactctaataaagggaatggcaaggttcaaagttttatggagtctagatcaaccattagacaaggtgttcttgcacagagaaggtcaaatcttggtggaaatcagttccctgctacaaagcaggctgcgaagaaggctgctgttatgccaatgcacaagggggctatccgttggaacaagccaaggtaaacaatgatgttcttttattgcttatgagaaagtttactgcattcaaggggttgttcaatttattgagtcatgcaccttggattatattggctgagaatgattgtgatgctggtgtttacatggaactgccttaacttctctggttatacacacacaagcttataaagaacaatcgatttcatattcttgtggcacaaggcctgttttcttggttgaactgctacaaatatatgtttcatggtgtaatttatagctgctggatgagtgttattttggacaccagcattaactgtctgtgagggtttcattagtgttatttgtcaactattgttggaaggactgaaggagatgtgataatggttagcgtctcatgccactggtgacggatcatccatatacagggacgttacatgcctgagtttgaattggttttgactactggctccttggcagtgttcagtgtttatttgttgaatgatgaatgcagtgtaaatctagggtagtgctgctaattggacaattgttgtatgcctccaagggagtatattttgctactgcctcatattcaagttggctgtatccgtaacatcatgccagttttgagcatcctatcataatctgctatatgctccccttgttcactgcgtcccacagagataatgcttgcctgcatttctactggataagagtaaatcatggtatcttacgatttatctcagtatgctgggctgtatggatgctatcttttcaaggtcaactgttgggatttattttcatgattccttatgtgaccttgtttgttctggatcagtggtcactatttacatggcttgagttttatcagtttaatcaatcaataagttgtgtcaacttgggacattgttgaaccatgtgcattgaaatttgggtggaactaaacagtctagactccaaaatgtgagggccttggaaaccaagaggatgcactagatattttcaatgaacactttattgtttctgtttcattttatttcaaaacatggtatgtactccctgacttcacttgagaagcgagaattgtatccttgttttgatgggggtatgtgcaagtaccttagtgcagaggaggcctgtaggtggtgcttttcagaatgccaaggtcaaggagtccaaccaggcagcaccaaggacgatggatgcactctttgcacagatgaaggcgcaacgcttgaggacggtacctcaacagcaggcaaattcttccccctggagtcatttcaaccagcatcgacgtgttcagcagcagcagaggcgaggcagagggtatggtggccgtaatgttggcaaccaatgaatccaactagacatatctactgcatcggagccctttctcttcactggtcttttggaccttggaagaaaggacgccccttggaaaatcaaacttggctttgtttattggaggggtgacaatgggctctaacttggctttgtttattggaggggtgacatcgggctctaaattttacactaagatttaaggatctgattaagatcaggccctatttctattcatttttaaactaaaatttatttagtgtcctactattttgtgaagcgtttggatcgtgatccattaccacctcacctttggacgtggacaggatatgaagcgaagtttgtttgagttttctagttgtgtgcagtctgcttccgtttcagcatgtataatgacatggaaattatttggtcagagattatgatgtcttgtttcttggcttgattagcttcatccccaactaagagtaattcaccttacctagggatgacaacaggtcaggtttagatagggtagaataaatatccgtccgctataatatttgcgaagattatttatatctgtctatgactatactcgcggataacttgtaccggtatccgtagctattcgtttgattggttatctgtactatttcatcttag

SEQ ID NO: 202474 - DNA, 920 bp, Zea Mays
tgaagttacacaacaatcagcaaatcaatcaaatagacgcggttcaagaagccgttgccagttgccacggttttgcccgtatcccagcaccagcaggccagaaaagcccagccaagcggagccaaccatccccgcggcagtcaaccccccaactccgttcattgcggcagccaaatcgagatctcgcccgtgctgaatcccaccactctcgccgacccggccggccgcagcaagcgcagcgcatcgacaggagccgaagaaccgaagaggagatggcgtcggcgctgtcctccctgcgctacggcgacagcctctcggtggtgggcatctccgccgcgacggccgtgctctgcgaggccatgtcctggctcctcatctaccgcaccgccacctacaactccctccgcgcctccatcgagcgccactcccgcaagctagacgccatgaagtccggctccacctccgcctcctccggcaccgctgcctcctccgcgcagcccgcatcgtcgcgggctaagaagatggaccgcgtcgagaccagcctcaaggacgctgcgcgggagctctcgctcgccaagctcaagtcgggcgccgtcgtcgctgtcatgctcttcgtcgtcttcggcctgctcaactccctcttcgagggccgcaccgttgccaagctgcccttcgcgcccatcccgctcgtccagcggatgagccaccgcggactgcccgggaacgatcccaccgactgctccatggttttcctctacttcctctgctccatgagcatccgaaccaacctgcagaaactgcttggcttcgcgccgccacgcgcggctgctgcagccggcggtggcctcttccccatgcccgatccgaaagttaattgaggagaatcaagaggatcagctcctcacgaggataagatctag

SEQ ID NO: 202475 - DNA, 602 bp, Zea Mays
tctgcatttgggaagaatctcagatttcaaacaaaagaagctttggagacccaaactatgacaaacaagaaacaactgatgacaaagatgaccttccacaattcaagaaaatcaggagtacccactctcaaggaaaaagcaaaaaatgatgcatgatagactaagaagacaaagtaaagtagtagactttaaaagatcttgactaaagtaatatatctatattttctgtttcgataaacaacgatagcgctagtgctacatcttttaatgtatataaccatgtagtatcaatagcgctacatcttaagcgtgtagcaccagcagcgctacatattttgatgtatataagcatgtagcatcaatagcgctacatcttttgttaaatataagcacatcttttgatatatataagcatgtagcatcaatagtgctagctatggtgctaatcttacattatatggcgtatatgttagttaatatctaacgttgattttttctacactagaatatcttaccatttgcatagttgcgcggcaacgccgcgcttggttttctagtatattttctaaaatgatggatataaattcggatacaatttgaac

SEQ ID NO: 202476 - DNA, 2118 bp, Zea Mays
aacaacacacggttctcattggcctttcacattatgtagacgacaatttccaataaagatggaaattactccaatatcacaactacgtccaggaaagttaaattatgctttacatgtgcgaatatctagaatgtgggagtttagaggcacaaatgaacagaacgacatcaaacaccttgaccttgttctcatcgatcaaaagggaaattcaatatatgcagagattccaccagatgcaattgctgtcttaaaaagccacatctacacgaaaaaaagattgtatacatatccaaaataacaattgaacgagctaaactgggattcagagttgttgacaatccttatatggtaaagctcaacaagagaaccattgtgcttgaagataaggatcaaattcaaggttttcctaaatatacattctcactaacacccttagataagttggaccaatacaaaaacaagaccgatcgttttatagatgtcattgctaagatcagtggagtatcaaatgtagcaaaggttcctacaacctcaggagatcagcaaatgaggagagttgtattattagaagaccttaagggaaacatgattgagctatcactatcaggaaaaagagctttggaatttgacggagatcaagttttagatgtgggtcagcaacatcatgttattgcaatatttgtaggaaccttagtcaaactttacaaaggtgaatatacattcttgagtggaacatcagcatgccggtggtacatcaacgaaaatgacattgctgaaatcaaggctttccagaaaagtttgccaagtgaacctgtacctatcaaaaagacctatctccaaaatgatgatgcaactcacaaatttgaggagaaaagtctggaacagctcaagcatgtagaccctttccttgacatgggacaaagatatcagtgcacagctactataattggtatcacagaaaaccaaacatggtgttacaaagcatgcaagatctgtaactcagcaatcattcaaaaggaaaatggttataaatgcacaaaggaaggatgtccatctacacaatttgaatggaagtacaagataccattcattgcaagtgaccacacctataatctagagtttatgttctttgaaaaaaagggaatggagcttataggaaagagtgcatcgactcttcgaaaacaatatgaaccaaaggagataccaccggatataacatcttggataggttataaattcacttttgttgttagagtcctatcaaagaaaagtgtcaagactattgatccatcctttgaagtgcttatgataaaagaaaaataccagaaggaacctattatatcatttatcagctcaagtggagttgtaccagcagaatcatcttcctctacaatggcagaatacaaggaattaccattgctagtgccaattacctccaaagacatagaaaaaaaggagcgatccacttcacaaccagaacacaccgaagaaactcaagatatggacattgaaccatctggcatttgggaagaatctcagatttcaaacaaaagaagctttggagacccaaactatgacaaacaagaaacaactgatgacaaagatgaccttccacaattcaagaaaatcaggagtacccactctcaaggaaaaagcaaaaaatgatgcatgatagactaagaagacaaagtaaagtagtagactttaaaagatcttgactaaagtaatatatctatattttctgtttcgataaacaacgatagcgctagtgctacatcttttaatgtatataaccatgtagtatcaatagcgctacatcttaagcgtgtagcaccagcagcgctacatattttgatgtatataagcatgtagcatcaatagcgctacatcttttgttaaatataagcacatcttttgatatatataagcatgtagcatcaatagtgctagctatggtgctaatcttacattatatggcgtatatgttagttaatatctaacgttgattttttctacactagaatatcttaccatttgcatagttgcgcggcaacgccgcgcttggttttctagtatattttctaaaatgatggatataaattcggatacaatttgaac

SEQ ID NO: 202477 - DNA, 1618 bp, Zea Mays
ggaacttcacaaagcaaaggttcctacaacctcaggagatcagcaaatgaggagagttgtattattagaagaccttaagggaaacatgattgagctatcactatcaggaaaaagagctttggaatttgacggagatcaagttttagatgtgggtcagcaacatcatgttattgcaatatttgtaggaaccttagtcaaactttacaaaggtgaatatacattcttgagtggaacatcagcatgccggtggtacatcaacgaaaatgacattgctgaaatcaaggctttccagaaaagtttgccaagtgaacctgtacctatcaaaaagacctatctccaaaatgatgatgcaactcacaaatttgaggagaaaagtctggaacagctcaagcatgtagaccctttccttgacatgggacaaagatatcagtgcacagctactataattggtatcacagaaaaccaaacatggtgttacaaagcatgcaagatctgtaactcagcaatcattcaaaaggaaaatggttataaatgcacaaaggaaggatgtccatctacacaatttgaatggaagtacaagataccattcattgcaagtgaccacacctataatctagagtttatgttctttgaaaaaaagggaatggagcttataggaaagagtgcatcgactcttcgaaaacaatatgaaccaaaggagataccaccggatataacatcttggataggttataaattcacttttgttgttagagtcctatcaaagaaaagtgtcaagactattgatccatcctttgaagtgcttatgataaaagaaaaataccagaaggaacctattatatcatttatcagctcaagtggagttgtaccagcagaatcatcttcctctacaatggcagaatacaaggaattaccattgctagtgccaattacctccaaagacatagaaaaaaaggagcgatccacttcacaaccagaacacaccgaagaaactcaagatatggacattgaaccatctggcatttgggaagaatctcagatttcaaacaaaagaagctttggagacccaaactatgacaaacaagaaacaactgatgacaaagatgaccttccacaattcaagaaaatcaggagtacccactctcaaggaaaaagcaaaaaatgatgcatgatagactaagaagacaaagtaaagtagtagactttaaaagatcttgactaaagtaatatatctatattttctgtttcgataaacaacgatagcgctagtgctacatcttttaatgtatataaccatgtagtatcaatagcgctacatcttaagcgtgtagcaccagcagcgctacatattttgatgtatataagcatgtagcatcaatagcgctacatcttttgttaaatataagcacatcttttgatatatataagcatgtagcatcaatagtgctagctatggtgctaatcttacattatatggcgtatatgttagttaatatctaacgttgattttttctacactagaatatcttaccatttgcatagttgcgcggcaacgccgcgcttggttttctagtatattttctaaaatgatggatataaattcggatacaatttgaac

SEQ ID NO: 202478 - DNA, 1713 bp, Zea Mays
cgaaagaggaaaaagagaggagtgcaccgcgagtgtacagctcgaagatccacttccaagtgcttccttttagatgtcattgctaagatcagtggagtatcaaatgtagcaaaggttcctacaacctcaggagatcagcaaatgaggagagttgtattattagaagaccttaagggaaacatgattgagctatcactatcaggaaaaagagctttggaatttgacggagatcaagttttagatgtgggtcagcaacatcatgttattgcaatatttgtaggaaccttagtcaaactttacaaaggtgaatatacattcttgagtggaacatcagcatgccggtggtacatcaacgaaaatgacattgctgaaatcaaggctttccagaaaagtttgccaagtgaacctgtacctatcaaaaagacctatctccaaaatgatgatgcaactcacaaatttgaggagaaaagtctggaacagctcaagcatgtagaccctttccttgacatgggacaaagatatcagtgcacagctactataattggtatcacagaaaaccaaacatggtgttacaaagcatgcaagatctgtaactcagcaatcattcaaaaggaaaatggttataaatgcacaaaggaaggatgtccatctacacaatttgaatggaagtacaagataccattcattgcaagtgaccacacctataatctagagtttatgttctttgaaaaaaagggaatggagcttataggaaagagtgcatcgactcttcgaaaacaatatgaaccaaaggagataccaccggatataacatcttggataggttataaattcacttttgttgttagagtcctatcaaagaaaagtgtcaagactattgatccatcctttgaagtgcttatgataaaagaaaaataccagaaggaacctattatatcatttatcagctcaagtggagttgtaccagcagaatcatcttcctctacaatggcagaatacaaggaattaccattgctagtgccaattacctccaaagacatagaaaaaaaggagcgatccacttcacaaccagaacacaccgaagaaactcaagatatggacattgaaccatctggcatttgggaagaatctcagatttcaaacaaaagaagctttggagacccaaactatgacaaacaagaaacaactgatgacaaagatgaccttccacaattcaagaaaatcaggagtacccactctcaaggaaaaagcaaaaaatgatgcatgatagactaagaagacaaagtaaagtagtagactttaaaagatcttgactaaagtaatatatctatattttctgtttcgataaacaacgatagcgctagtgctacatcttttaatgtatataaccatgtagtatcaatagcgctacatcttaagcgtgtagcaccagcagcgctacatattttgatgtatataagcatgtagcatcaatagcgctacatcttttgttaaatataagcacatcttttgatatatataagcatgtagcatcaatagtgctagctatggtgctaatcttacattatatggcgtatatgttagttaatatctaacgttgattttttctacactagaatatcttaccatttgcatagttgcgcggcaacgccgcgcttggttttctagtatattttctaaaatgatggatataaattcggatacaatttgaac

SEQ ID NO: 202479 - DNA, 2164 bp, Zea Mays
caacctgctccattcttggcgagcgttcaggcgaaagaggaaaaagagaggagtgcaccgcgagtgtacagctcgaagatccacttccaagtgcttccttttagatggaaattactccaatatcacaactacgtccaggaaagttaaattatgctttacatgtgcgaatatctagaatgtgggagtttagaggcacaaatgaacagaacgacatcaaacaccttgaccttgttctcatcgatcaaaagggaaattcaatatatgcagagattccaccagatgcaattgctgtcttaaaaagccacatctacacgaaaaaaagattgtatacatatccaaaataacaattgaacgagctaaactgggattcagagttgttgacaatccttatatggtaaagctcaacaagagaaccattgtgcttgaagataaggatcaaattcaaggttttcctaaatatacattctcactaacacccttagataagttggaccaatacaaaaacaagaccgatcgttttatagatgtcattgctaagatcagtggagtatcaaatgtagcaaaggttcctacaacctcaggagatcagcaaatgaggagagttgtattattagaagaccttaagggaaacatgattgagctatcactatcaggaaaaagagctttggaatttgacggagatcaagttttagatgtgggtcagcaacatcatgttattgcaatatttgtaggaaccttagtcaaactttacaaaggtgaatatacattcttgagtggaacatcagcatgccggtggtacatcaacgaaaatgacattgctgaaatcaaggctttccagaaaagtttgccaagtgaacctgtacctatcaaaaagacctatctccaaaatgatgatgcaactcacaaatttgaggagaaaagtctggaacagctcaagcatgtagaccctttccttgacatgggacaaagatatcagtgcacagctactataattggtatcacagaaaaccaaacatggtgttacaaagcatgcaagatctgtaactcagcaatcattcaaaaggaaaatggttataaatgcacaaaggaaggatgtccatctacacaatttgaatggaagtacaagataccattcattgcaagtgaccacacctataatctagagtttatgttctttgaaaaaaagggaatggagcttataggaaagagtgcatcgactcttcgaaaacaatatgaaccaaaggagataccaccggatataacatcttggataggttataaattcacttttgttgttagagtcctatcaaagaaaagtgtcaagactattgatccatcctttgaagtgcttatgataaaagaaaaataccagaaggaacctattatatcatttatcagctcaagtggagttgtaccagcagaatcatcttcctctacaatggcagaatacaaggaattaccattgctagtgccaattacctccaaagacatagaaaaaaaggagcgatccacttcacaaccagaacacaccgaagaaactcaagatatggacattgaaccatctggcatttgggaagaatctcagatttcaaacaaaagaagctttggagacccaaactatgacaaacaagaaacaactgatgacaaagatgaccttccacaattcaagaaaatcaggagtacccactctcaaggaaaaagcaaaaaatgatgcatgatagactaagaagacaaagtaaagtagtagactttaaaagatcttgactaaagtaatatatctatattttctgtttcgataaacaacgatagcgctagtgctacatcttttaatgtatataaccatgtagtatcaatagcgctacatcttaagcgtgtagcaccagcagcgctacatattttgatgtatataagcatgtagcatcaatagcgctacatcttttgttaaatataagcacatcttttgatatatataagcatgtagcatcaatagtgctagctatggtgctaatcttacattatatggcgtatatgttagttaatatctaacgttgattttttctacactagaatatcttaccatttgcatagttgcgcggcaacgccgcgcttggttttctagtatattttctaaaatgatggatataaattcggatacaatttgaac

SEQ ID NO: 202480 - DNA, 2241 bp, Zea Mays
tacacaacctgctccattcttggcgagcgttcaggcgaaagaggaaaaagagaggagtgcaccgcgagtgtacagctcgaagatccacttccaagtgcttccttttagtgctaacacagtaggaacgaggataatcttatataccttcaagcaaatagacaatcggaggaacttcacaaagatggaaattactccaatatcacaactacgtccaggaaagttaaattatgctttacatgtgcgaatatctagaatgtgggagtttagaggcacaaatgaacagaacgacatcaaacaccttgaccttgttctcatcgatcaaaagggaaattcaatatatgcagagattccaccagatgcaattgctgtcttaaaaagccacatctacacgaaaaaaagattgtatacatatccaaaataacaattgaacgagctaaactgggattcagagttgttgacaatccttatatggtaaagctcaacaagagaaccattgtgcttgaagataaggatcaaattcaaggttttcctaaatatacattctcactaacacccttagataagttggaccaatacaaaaacaagaccgatcgttttatagatgtcattgctaagatcagtggagtatcaaatgtagcaaaggttcctacaacctcaggagatcagcaaatgaggagagttgtattattagaagaccttaagggaaacatgattgagctatcactatcaggaaaaagagctttggaatttgacggagatcaagttttagatgtgggtcagcaacatcatgttattgcaatatttgtaggaaccttagtcaaactttacaaaggtgaatatacattcttgagtggaacatcagcatgccggtggtacatcaacgaaaatgacattgctgaaatcaaggctttccagaaaagtttgccaagtgaacctgtacctatcaaaaagacctatctccaaaatgatgatgcaactcacaaatttgaggagaaaagtctggaacagctcaagcatgtagaccctttccttgacatgggacaaagatatcagtgcacagctactataattggtatcacagaaaaccaaacatggtgttacaaagcatgcaagatctgtaactcagcaatcattcaaaaggaaaatggttataaatgcacaaaggaaggatgtccatctacacaatttgaatggaagtacaagataccattcattgcaagtgaccacacctataatctagagtttatgttctttgaaaaaaagggaatggagcttataggaaagagtgcatcgactcttcgaaaacaatatgaaccaaaggagataccaccggatataacatcttggataggttataaattcacttttgttgttagagtcctatcaaagaaaagtgtcaagactattgatccatcctttgaagtgcttatgataaaagaaaaataccagaaggaacctattatatcatttatcagctcaagtggagttgtaccagcagaatcatcttcctctacaatggcagaatacaaggaattaccattgctagtgccaattacctccaaagacatagaaaaaaaggagcgatccacttcacaaccagaacacaccgaagaaactcaagatatggacattgaaccatctggcatttgggaagaatctcagatttcaaacaaaagaagctttggagacccaaactatgacaaacaagaaacaactgatgacaaagatgaccttccacaattcaagaaaatcaggagtacccactctcaaggaaaaagcaaaaaatgatgcatgatagactaagaagacaaagtaaagtagtagactttaaaagatcttgactaaagtaatatatctatattttctgtttcgataaacaacgatagcgctagtgctacatcttttaatgtatataaccatgtagtatcaatagcgctacatcttaagcgtgtagcaccagcagcgctacatattttgatgtatataagcatgtagcatcaatagcgctacatcttttgttaaatataagcacatcttttgatatatataagcatgtagcatcaatagtgctagctatggtgctaatcttacattatatggcgtatatgttagttaatatctaacgttgattttttctacactagaatatcttaccatttgcatagttgcgcggcaacgccgcgcttggttttctagtatattttctaaaatgatggatataaattcggatacaatttgaac

SEQ ID NO: 202481 - DNA, 1696 bp, Zea Mays
atttgcttctcccgtacacaacctgctccattcttggcgagcgttcaggcgaaagaggaaaaagagaggagtgcaccgcgagtgtacagctcgaagatccacttccaagtgcttccttttaggataatcttatataccttcaagcaaatagacaatcggaggaacttcacaaagatgtcattgctaagatcagtggagtatcaaatgtagcaaaggttcctacaacctcaggagatcagcaaatgaggagagttgtattattagaagaccttaagggaaacatgattgagctatcactatcaggaaaaagagctttggaatttgacggagatcaagttttagatgtgggtcagcaacatcatgttattgcaatatttgtaggaaccttagtcaaactttacaaaggtgaatatacattcttgagtggaacatcagcatgccggtggtacatcaacgaaaatgacattgctgaaatcaaggctttccagaaaagggacaaagatatcagtgcacagctactataattggtatcacagaaaaccaaacatggtgttacaaagcatgcaagatctgtaactcagcaatcattcaaaaggaaaatggttataaatgcacaaaggaaggatgtccatctacacaatttgaatggaagtacaagataccattcattgcaagtgaccacacctataatctagagtttatgttctttgaaaaaaagggaatggagcttataggaaagagtgcatcgactcttcgaaaacaatatgaaccaaaggagataccaccggatataacatcttggataggttataaattcacttttgttgttagagtcctatcaaagaaaagtgtcaagactattgatccatcctttgaagtgcttatgataaaagaaaaataccagaaggaacctattatatcatttatcagctcaagtggagttgtaccagcagaatcatcttcctctacaatggcagaatacaaggaattaccattgctagtgccaattacctccaaagacatagaaaaaaaggagcgatccacttcacaaccagaacacaccgaagaaactcaagatatggacattgaaccatctggcatttgggaagaatctcagatttcaaacaaaagaagctttggagacccaaactatgacaaacaagaaacaactgatgacaaagatgaccttccacaattcaagaaaatcaggagtacccactctcaaggaaaaagcaaaaaatgatgcatgatagactaagaagacaaagtaaagtagtagactttaaaagatcttgactaaagtaatatatctatattttctgtttcgataaacaacgatagcgctagtgctacatcttttaatgtatataaccatgtagtatcaatagcgctacatcttaagcgtgtagcaccagcagcgctacatattttgatgtatataagcatgtagcatcaatagcgctacatcttttgttaaatataagcacatcttttgatatatataagcatgtagcatcaatagtgctagctatggtgctaatcttacattatatggcgtatatgttagttaatatctaacgttgattttttctacactagaatatcttaccatttgcatagttgcgcggcaacgccgcgcttggttttctagtatattttctaaaatgatggatataaattcggatacaatttgaac

SEQ ID NO: 202482 - DNA, 1733 bp, Zea Mays
cttctctacagccggatgtatttgcttctcccgtacacaacctgctccattcttggcgagcgttcaggcgaaagaggaaaaagagaggagtgcaccgcgagtgtacagctcgaagatccacttccaagtgcttccttttaggataatcttatataccttcaagcaaatagacaatcggaggaacttcacaaaggggaaacatgattgagctatcactatcaggaaaaagagctttggaatttgacggagatcaagttttagatgtgggtcagcaacatcatgttattgcaatatttgtaggaaccttagtcaaactttacaaaggtgaatatacattcttgagtggaacatcagcatgccggtggtacatcaacgaaaatgacattgctgaaatcaaggctttccagaaaagtttgccaagtgaacctgtacctatcaaaaagacctatctccaaaatgatgatgcaactcacaaatttgaggagaaaagtctggaacagctcaagcatgtagaccctttccttgacatgggacaaagatatcagtgcacagctactataattggtatcacagaaaaccaaacatggtgttacaaagcatgcaagatctgtaactcagcaatcattcaaaaggaaaatggttataaatgcacaaaggaaggatgtccatctacacaatttgaatggaagtacaagataccattcattgcaagtgaccacacctataatctagagtttatgttctttgaaaaaaagggaatggagcttataggaaagagtgcatcgactcttcgaaaacaatatgaaccaaaggagataccaccggatataacatcttggataggttataaattcacttttgttgttagagtcctatcaaagaaaagtgtcaagactattgatccatcctttgaagtgcttatgataaaagaaaaataccagaaggaacctattatatcatttatcagctcaagtggagttgtaccagcagaatcatcttcctctacaatggcagaatacaaggaattaccattgctagtgccaattacctccaaagacatagaaaaaaaggagcgatccacttcacaaccagaacacaccgaagaaactcaagatatggacattgaaccatctggcatttgggaagaatctcagatttcaaacaaaagaagctttggagacccaaactatgacaaacaagaaacaactgatgacaaagatgaccttccacaattcaagaaaatcaggagtacccactctcaaggaaaaagcaaaaaatgatgcatgatagactaagaagacaaagtaaagtagtagactttaaaagatcttgactaaagtaatatatctatattttctgtttcgataaacaacgatagcgctagtgctacatcttttaatgtatataaccatgtagtatcaatagcgctacatcttaagcgtgtagcaccagcagcgctacatattttgatgtatataagcatgtagcatcaatagcgctacatcttttgttaaatataagcacatcttttgatatatataagcatgtagcatcaatagtgctagctatggtgctaatcttacattatatggcgtatatgttagttaatatctaacgttgattttttctacactagaatatcttaccatttgcatagttgcgcggcaacgccgcgcttggttttctagtatattttctaaaatgatggatataaattcggatacaatttgaac

SEQ ID NO: 202483 - DNA, 2313 bp, Zea Mays
aaaatataaaggagccgcttctctacagccggatgtatttgcttctcccgtacacaacctgctccattcttggcgagcgttcaggcgaaagaggaaaaagagaggagtgcaccgcgagtgtacagctcgaagatccacttccaagtgcttccttttaggataatcttatataccttcaagcaaatagacaatcggaggaacttcacaaaggggaaacatgattgagctatcactatcaggaaaaagagctttggaatttgacggagatcaagttttagatgtgggtcagcaacatcatgttattgcaatatttgtaggaaccttagtcaaactttacaaaggtgaatatacattcttgagtggaacatcagcatgccggtggtacatcaacgaaaatgacattgctgaaatcaaggctttccagaaaagtttgccaagtgaacctgtacctatcaaaaagacctatctccaaaatgatgatgcaactcacaaatttgaggagaaaagtctggaacagctcaagcatgtagaccctttccttgacatgggacaaagatatcagtgcacagctactataattggtatcacagaaaaccaaacatggtgttacaaagcatgcaagatctgtaactcagcaatcattcaaaaggaaaatggttataaatgcacaaaggaaggatgtccatctacacaatttgaatggaagtacaagataccattcattgcaagtgaccacacctataatctagagtttatgttctttgaaaaaaagggaatggagcttataggaaagagtgcatcgactcttcgaaaacaatatgaaccaaaggagataccaccggatataacatcttggataggttataaattcacttttgttgttagagtcctatcaaagaaaagtgtcaagactattgatccatcctttgaagtgcttatgataaaagaaaaataccagaaggaacctattatatcatttatcagctcaagtggagttgtaccagcagaatcatcttcctctacaatggcagaatacaaggaattaccattgctagtgccaattacctccaaagacatagaaaaaaaggagcgatccacttcacaaccagaacacaccgaagaaactcaagatatggacattgaaccatctgggtatgattaagataagcttcgttcttaccttctatattaaatcttaatatctttcctataataccatttcatatttattttccatgatgaactatatatatgtgtctacatacaagaaaagattatacttatttgtttgatctgcaattaaaaaaaatatctagtccattcaaatactgcatattagttcaacgttttttataaacaacttcaataccttatgtcataaattcccaatgaaaccatagtttagagaccatgagctatgtagcacaatttccagaaaatctaaacacttaaatcttcatttaaagtgacatggcagttcattatgtattgtttgccattctatctatttacttttccatgtgggcacaaagtcaagaacaacaatgtggttttgtgcagttttgtgcacacatcctagactccatattatctgcatttcaacatttcgaaagaatctaggcattaatggtctatgtcatgttgttataataattttaaaatcttacgtcttgtcattctaaataatccttcacactatattatcttcatttcagcatttgggaagaatctcagatttcaaacaaaagaagctttggagacccaaactatgacaaacaagaaacaactgatgacaaagatgaccttccacaattcaagaaaatcaggagtacccactctcaaggaaaaagcaaaaaatgatgcatgatagactaagaagacaaagtaaagtagtagactttaaaagatcttgactaaagtaatatatctatattttctgtttcgataaacaacgatagcgctagtgctacatcttttaatgtatataaccatgtagtatcaatagcgctacatcttaagcgtgtagcaccagcagcgctacatattttgatgtatataagcatgtagcatcaatagcgctacatcttttgttaaatataagcacatcttttgatatatataagcatgtagcatcaatagtgctagctatggtgctaatcttacattatatggcgtatatgttagttaatatctaacgttgattttttctacactagaatatcttaccatttgcatagttgcgcggcaacgccgcgcttggttttctagtatattttctaaaatgatggatataaattcggatacaatttgaac

SEQ ID NO: 202484 - DNA, 1798 bp, Zea Mays
ctttaccttataaaaatataaaggagccgcttctctacagccggatgtatttgcttctcccgtacacaacctgctccattcttggcgagcgttcaggcgaaagaggaaaaagagaggagtgcaccgcgagtgtacagctcgaagatccacttccaagtgcttccttttaggataatcttatataccttcaagcaaatagacaatcggaggaacttcacaaagatgtcattgctaagatcagtggagtatcaaatgtagcaaaggttcctacaacctcaggagatcagcaaatgaggagagttgtattattagaagaccttaagggaaacatgattgagctatcactatcaggaaaaagagctttggaatttgacggagatcaagttttagatgtgggtcagcaacatcatgttattgcaatatttgtaggaaccttagtcaaactttacaaaggtgaatatacattcttgagtggaacatcagcatgccggtggtacatcaacgaaaatgacattgctgaaatcaaggctttccagaaaagtttgccaagtgaacctgtacctatcaaaaagacctatctccaaaatgatgatgcaactcacaaatttgaggagaaaagtctggaacagctcaagcatgtagaccctttccttgacatgggacaaagatatcagtgcacagctactataattggtatcacagaaaaccaaacatggtgttacaaagcatgcaagatctgtaactcagcaatcattcaaaaggaaaatggttataaatgcacaaaggaaggatgtccatctacacaatttgaatggaagtacaagataccattcattgcaagtgaccacacctataatctagagtttatgttctttgaaaaaaagggaatggagcttataggaaagagtgcatcgactcttcgaaaacaatatgaaccaaaggagataccaccggatataacatcttggataggttataaattcacttttgttgttagagtcctatcaaagaaaagtgtcaagactattgatccatcctttgaagtgcttatgataaaagaaaaataccagaaggaacctattatatcatttatcagctcaagtggagttgtaccagcagaatcatcttcctctacaatggcagaatacaaggaattaccattgctagtgccaattacctccaaagacatagaaaaaaaggagcgatccacttcacaaccagaacacaccgaagaaactcaagatatggacattgaaccatctgggaaacaactgatgacaaagatgaccttccacaattcaagaaaatcaggagtacccactctcaaggaaaaagcaaaaaatgatgcatgatagactaagaagacaaagtaaagtagtagactttaaaagatcttgactaaagtaatatatctatattttctgtttcgataaacaacgatagcgctagtgctacatcttttaatgtatataaccatgtagtatcaatagcgctacatcttaagcgtgtagcaccagcagcgctacatattttgatgtatataagcatgtagcatcaatagcgctacatcttttgttaaatataagcacatcttttgatatatataagcatgtagcatcaatagtgctagctatggtgctaatcttacattatatggcgtatatgttagttaatatctaacgttgattttttctacactagaatatcttaccatttgcatagttgcgcggcaacgccgcgcttggttttctagtatattttctaaaatgatggatataaattcggatacaatttgaac

SEQ ID NO: 202485 - DNA, 2760 bp, Zea Mays
atccgctagaaacatctttaccttataaaaatataaaggagccgcttctctacagccggatgtatttgcttctcccgtacacaacctgctccattcttggcgagcgttcaggcgaaagaggaaaaagagaggagtgcaccgcgagtgtacagctcgaagatccacttccaagtgcttccttttaggataatcttatataccttcaagcaaatagacaatcggaggaacttcacaaagatggaaattactccaatatcacaactacgtccaggaaagttaaattatgctttacatgtgcgaatatctagaatgtgggagtttagaggcacaaatgaacagaacgacatcaaacaccttgaccttgttctcatcgatcaaaagggaaattcaatatatgcagagattccaccagatgcaattgctgtcttaaaaagccacatctacacgaaaaaaagattgtatacatatccaaaataacaattgaacgagctaaactgggattcagagttgttgacaatccttatatggtaaagctcaacaagagaaccattgtgcttgaagataaggatcaaattcaaggttttcctaaatatacattctcactaacacccttagataagttggaccaatacaaaaacaagaccgatcgttttataggggaaacatgattgagctatcactatcaggaaaaagagctttggaatttgacggagatcaagttttagatgtgggtcagcaacatcatgttattgcaatatttgtaggaaccttagtcaaactttacaaaggtgaatatacattcttgagtggaacatcagcatgccggtggtacatcaacgaaaatgacattgctgaaatcaaggctttccagaaaagtttgccaagtgaacctgtacctatcaaaaagacctatctccaaaatgatgatgcaactcacaaatttgaggagaaaagtctggaacagctcaagcatgtagaccctttccttgacatgggacaaagatatcagtgcacagctactataattggtatcacagaaaaccaaacatggtgttacaaagcatgcaagatctgtaactcagcaatcattcaaaaggaaaatggttataaatgcacaaaggaaggatgtccatctacacaatttgaatggaagtacaagataccattcattgcaagtgaccacacctataatctagagtttatgttctttgaaaaaaagggaatggagcttataggaaagagtgcatcgactcttcgaaaacaatatgaaccaaaggagataccaccggatataacatcttggataggttataaattcacttttgttgttagagtcctatcaaagaaaagtgtcaagactattgatccatcctttgaagtgcttatgataaaagaaaaataccagaaggaacctattatatcatttatcagctcaagtggagttgtaccagcagaatcatcttcctctacaatggcagaatacaaggaattaccattgctagtgccaattacctccaaagacatagaaaaaaaggagcgatccacttcacaaccagaacacaccgaagaaactcaagatatggacattgaaccatctgggtatgattaagataagcttcgttcttaccttctatattaaatcttaatatctttcctataataccatttcatatttattttccatgatgaactatatatatgtgtctacatacaagaaaagattatacttatttgtttgatctgcaattaaaaaaaatatctagtccattcaaatactgcatattagttcaacgttttttataaacaacttcaataccttatgtcataaattcccaatgaaaccatagtttagagaccatgagctatgtagcacaatttccagaaaatctaaacacttaaatcttcatttaaagtgacatggcagttcattatgtattgtttgccattctatctatttacttttccatgtgggcacaaagtcaagaacaacaatgtggttttgtgcagttttgtgcacacatcctagactccatattatctgcatttcaacatttcgaaagaatctaggcattaatggtctatgtcatgttgttataataattttaaaatcttacgtcttgtcattctaaataatccttcacactatattatcttcatttcagcatttgggaagaatctcagatttcaaacaaaagaagctttggagacccaaactatgacaaacaagaaacaactgatgacaaagatgaccttccacaattcaagaaaatcaggagtacccactctcaaggaaaaagcaaaaaatgatgcatgatagactaagaagacaaagtaaagtagtagactttaaaagatcttgactaaagtaatatatctatattttctgtttcgataaacaacgatagcgctagtgctacatcttttaatgtatataaccatgtagtatcaatagcgctacatcttaagcgtgtagcaccagcagcgctacatattttgatgtatataagcatgtagcatcaatagcgctacatcttttgttaaatataagcacatcttttgatatatataagcatgtagcatcaatagtgctagctatggtgctaatcttacattatatggcgtatatgttagttaatatctaacgttgattttttctacactagaatatcttaccatttgcatagttgcgcggcaacgccgcgcttggttttctagtatattttctaaaatgatggatataaattcggatacaatttgaac

SEQ ID NO: 202486 - DNA, 2860 bp, Zea Mays
atccgctagaaacatctttaccttataaaaatataaaggagccgcttctctacagccggatgtatttgcttctcccgtacacaacctgctccattcttggcgagcgttcaggcgaaagaggaaaaagagaggagtgcaccgcgagtgtacagctcgaagatccacttccaagtgcttccttttaggataatcttatataccttcaagcaaatagacaatcggaggaacttcacaaagatggaaattactccaatatcacaactacgtccaggaaagttaaattatgctttacatgtgcgaatatctagaatgtgggagtttagaggcacaaatgaacagaacgacatcaaacaccttgaccttgttctcatcgatcaaaagggaaattcaatatatgcagagattccaccagatgcaattgctgtcttaaaaagccacatctacacgaaaaaaagattgtatacatatccaaaataacaattgaacgagctaaactgggattcagagttgttgacaatccttatatggtaaagctcaacaagagaaccattgtgcttgaagataaggatcaaattcaaggttttcctaaatatacattctcactaacacccttagataagttggaccaatacaaaaacaagaccgatcgttttatagatgtcattgctaagatcagtggagtatcaaatgtagcaaaggttcctacaacctcaggagatcagcaaatgaggagagttgtattattagaagaccttaagggaaacatgattgagctatcactatcaggaaaaagagctttggaatttgacggagatcaagttttagatgtgggtcagcaacatcatgttattgcaatatttgtaggaaccttagtcaaactttacaaaggtgaatatacattcttgagtggaacatcagcatgccggtggtacatcaacgaaaatgacattgctgaaatcaaggctttccagaaaagtttgccaagtgaacctgtacctatcaaaaagacctatctccaaaatgatgatgcaactcacaaatttgaggagaaaagtctggaacagctcaagcatgtagaccctttccttgacatgggacaaagatatcagtgcacagctactataattggtatcacagaaaaccaaacatggtgttacaaagcatgcaagatctgtaactcagcaatcattcaaaaggaaaatggttataaatgcacaaaggaaggatgtccatctacacaatttgaatggaagtacaagataccattcattgcaagtgaccacacctataatctagagtttatgttctttgaaaaaaagggaatggagcttataggaaagagtgcatcgactcttcgaaaacaatatgaaccaaaggagataccaccggatataacatcttggataggttataaattcacttttgttgttagagtcctatcaaagaaaagtgtcaagactattgatccatcctttgaagtgcttatgataaaagaaaaataccagaaggaacctattatatcatttatcagctcaagtggagttgtaccagcagaatcatcttcctctacaatggcagaatacaaggaattaccattgctagtgccaattacctccaaagacatagaaaaaaaggagcgatccacttcacaaccagaacacaccgaagaaactcaagatatggacattgaaccatctgggtatgattaagataagcttcgttcttaccttctatattaaatcttaatatctttcctataataccatttcatatttattttccatgatgaactatatatatgtgtctacatacaagaaaagattatacttatttgtttgatctgcaattaaaaaaaatatctagtccattcaaatactgcatattagttcaacgttttttataaacaacttcaataccttatgtcataaattcccaatgaaaccatagtttagagaccatgagctatgtagcacaatttccagaaaatctaaacacttaaatcttcatttaaagtgacatggcagttcattatgtattgtttgccattctatctatttacttttccatgtgggcacaaagtcaagaacaacaatgtggttttgtgcagttttgtgcacacatcctagactccatattatctgcatttcaacatttcgaaagaatctaggcattaatggtctatgtcatgttgttataataattttaaaatcttacgtcttgtcattctaaataatccttcacactatattatcttcatttcagcatttgggaagaatctcagatttcaaacaaaagaagctttggagacccaaactatgacaaacaagaaacaactgatgacaaagatgaccttccacaattcaagaaaatcaggagtacccactctcaaggaaaaagcaaaaaatgatgcatgatagactaagaagacaaagtaaagtagtagactttaaaagatcttgactaaagtaatatatctatattttctgtttcgataaacaacgatagcgctagtgctacatcttttaatgtatataaccatgtagtatcaatagcgctacatcttaagcgtgtagcaccagcagcgctacatattttgatgtatataagcatgtagcatcaatagcgctacatcttttgttaaatataagcacatcttttgatatatataagcatgtagcatcaatagtgctagctatggtgctaatcttacattatatggcgtatatgttagttaatatctaacgttgattttttctacactagaatatcttaccatttgcatagttgcgcggcaacgccgcgcttggttttctagtatattttctaaaatgatggatataaattcggatacaatttgaac

SEQ ID NO: 202487 - DNA, 2197 bp, Zea Mays
atccgctagaaacatctttaccttataaaaatataaaggagccgcttctctacagccggatgtatttgcttctcccgtacacaacctgctccattcttggcgagcgttcaggcgaaagaggaaaaagagaggagtgcaccgcgagtgtacagctcgaagatccacttccaagtgcttccttttaggataatcttatataccttcaagcaaatagacaatcggaggaacttcacaaagatggaaattactccaatatcacaactacgtccaggaaagttaaattatgctttacatgtgcgaatatctagaatgtgggagtttagaggcacaaatgaacagaacgacatcaaacaccttgaccttgttctcatcgatcaaaagggaaattcaatatatgcagagattccaccagatgcaattgctgtcttaaaaagccacatctacacgaaaaaaagattgtatacatatccaaaataacaattgaacgagctaaactgggattcagagttgttgacaatccttatatggtaaagctcaacaagagaaccattgtgcttgaagataaggatcaaattcaaggttttcctaaatatacattctcactaacacccttagataagttggaccaatacaaaaacaagaccgatcgttttataggggaaacatgattgagctatcactatcaggaaaaagagctttggaatttgacggagatcaagttttagatgtgggtcagcaacatcatgttattgcaatatttgtaggaaccttagtcaaactttacaaaggtgaatatacattcttgagtggaacatcagcatgccggtggtacatcaacgaaaatgacattgctgaaatcaaggctttccagaaaagtttgccaagtgaacctgtacctatcaaaaagacctatctccaaaatgatgatgcaactcacaaatttgaggagaaaagtctggaacagctcaagcatgtagaccctttccttgacatgggacaaagatatcagtgcacagctactataattggtatcacagaaaaccaaacatggtgttacaaagcatgcaagatctgtaactcagcaatcattcaaaaggaaaatggttataaatgcacaaaggaaggatgtccatctacacaatttgaatggaagtacaagataccattcattgcaagtgaccacacctataatctagagtttatgttctttgaaaaaaagggaatggagcttataggaaagagtgcatcgactcttcgaaaacaatatgaaccaaaggagataccaccggatataacatcttggataggttataaattcacttttgttgttagagtcctatcaaagaaaagtgtcaagactattgatccatcctttgaagtgcttatgataaaagaaaaataccagaaggaacctattatatcatttatcagctcaagtggagttgtaccagcagaatcatcttcctctacaatggcagaatacaaggaattaccattgctagtgccaattacctccaaagacatagaaaaaaaggagcgatccacttcacaaccagaacacaccgaagaaactcaagatatggacattgaaccatctggcatttgggaagaatctcagatttcaaacaaaagaagctttggagacccaaactatgacaaacaagaaacaactgatgacaaagatgaccttccacaattcaagaaaatcaggagtacccactctcaaggaaaaagcaaaaaatgatgcatgatagactaagaagacaaagtaaagtagtagactttaaaagatcttgactaaagtaatatatctatattttctgtttcgataaacaacgatagcgctagtgctacatcttttaatgtatataaccatgtagtatcaatagcgctacatcttaagcgtgtagcaccagcagcgctacatattttgatgtatataagcatgtagcatcaatagcgctacatcttttgttaaatataagcacatcttttgatatatataagcatgtagcatcaatagtgctagctatggtgctaatcttacattatatggcgtatatgttagttaatatctaacgttgattttttctacactagaatatcttaccatttgcatagttgcgcggcaacgccgcgcttggttttctagtatattttctaaaatgatggatataaattcggatacaatttgaac

SEQ ID NO: 202488 - DNA, 2236 bp, Zea Mays
gctatccgctagaaacatctttaccttataaaaatataaaggagccgcttctctacagccggatgtatttgcttctcccgtacacaacctgctccattcttggcgagcgttcaggcgaaagaggaaaaagagaggagtgcaccgcgagtgtacagctcgaagatccacttccaagtgcttccttttaggataatcttatataccttcaagcaaatagacaatcggaggaacttcacaaagatggaaattactccaatatcacaactacgtccaggaaagttaaattatgctttacatgtgcgaatatctagaatgtgggagtttagaggcacaaatgaacagaacgacatcaaacaccttgaccttgttctcatcgatcaaaagggaaattcaatatatgcagagattccaccagatgcaattgctgtcttaaaaagccacatctacacgaaaaaaagattgtatacatatccaaaataacaattgaacgagctaaactgggattcagagttgttgacaatccttatatggtaaagctcaacaagagaaccattgtgcttgaagataaggatcaaattcaaggttttcctaaatatacattctcactaacacccttagataagttggaccaatacaaaaacaagaccgatcgttttatagatgtcattgctaagatcagtggagtatcaaatgtagcaaaggttcctacaacctcaggagatcagcaaatgaggagagttgtattattagaagaccttaagggaaacatgattgagctatcactatcaggaaaaagagctttggaatttgacggagatcaagttttagatgtgggtcagcaacatcatgttattgcaatatttgtaggaaccttagtcaaactttacaaaggtgaatatacattcttgagtggaacatcagcatgccggtggtacatcaacgaaaatgacattgctgaaatcaaggctttccagaaaagtttgccaagtgaacctgtacctatcaaaaagacctatctccaaaatgatgatgcaactcacaaatttgaggagaaaagtctggaacagctcaagcatgtagaccctttccttgacatgggacaaagatatcagtgcacagctactataattggtatcacagaaaaccaaacatggtgttacaaagcatgcaagatctgtaactcagcaatcattcaaaaggaaaatggttataaatgcacaaaggaaggatgtccatctacacaatttgaatggaagtacaagataccattcattgcaagtgaccacacctataatctagagtttatgttctttgaaaaaaagggaatggagcttataggaaagagtgcatcgactcttcgaaaacaatatgaaccaaaggagataccaccggatataacatcttggataggttataaattcacttttgttgttagagtcctatcaaagaaaagtgtcaagactattgatccatcctttgaagtgcttatgataaaagaaaaataccagaaggaacctattatatcatttatcagctcaagtggagttgtaccagcagaatcatcttcctctacaatggcagaatacaaggaattaccattgctagtgccaattacctccaaagacatagaaaaaaaggagcgatccacttcacaaccagaacacaccgaagaaactcaagatatggacattgaaccatctgggaaacaactgatgacaaagatgaccttccacaattcaagaaaatcaggagtacccactctcaaggaaaaagcaaaaaatgatgcatgatagactaagaagacaaagtaaagtagtagactttaaaagatcttgactaaagtaatatatctatattttctgtttcgataaacaacgatagcgctagtgctacatcttttaatgtatataaccatgtagtatcaatagcgctacatcttaagcgtgtagcaccagcagcgctacatattttgatgtatataagcatgtagcatcaatagcgctacatcttttgttaaatataagcacatcttttgatatatataagcatgtagcatcaatagtgctagctatggtgctaatcttacattatatggcgtatatgttagttaatatctaacgttgattttttctacactagaatatcttaccatttgcatagttgcgcggcaacgccgcgcttggttttctagtatattttctaaaatgatggatataaattcggatacaatttgaac

SEQ ID NO: 202489 - DNA, 2507 bp, Zea Mays
cgcgagtcgtgcaaggcgccggacttgaaccgtcggcagctactagagaaatccacagcctactgctatccgctagaaacatctttaccttataaaaatataaaggagccgcttctctacagccggatgtatttgcttctcccgtacacaacctgctccattcttggcgagcgttcaggcgaaagaggaaaaagagaggagtgcaccgcgagtgtacagctcgaagatccacttccaagtgcttccttttaggataatcttatataccttcaagcaaatagacaatcggaggaacttcacaaagatgtcattgctaagatcagtggagtatcaaatgtagcaaaggttcctacaacctcaggagatcagcaaatgaggagagttgtattattagaagaccttaagggaaacatgattgagctatcactatcaggaaaaagagctttggaatttgacggagatcaagttttagatgtgggtcagcaacatcatgttattgcaatatttgtaggaaccttagtcaaactttacaaaggtgaatatacattcttgagtggaacatcagcatgccggtggtacatcaacgaaaatgacattgctgaaatcaaggctttccagaaaagtttgccaagtgaacctgtacctatcaaaaagacctatctccaaaatgatgatgcaactcacaaatttgaggagaaaagtctggaacagctcaagcatgtagaccctttccttgacatgggacaaagatatcagtgcacagctactataattggtatcacagaaaaccaaacatggtgttacaaagcatgcaagatctgtaactcagcaatcattcaaaaggaaaatggttataaatgcacaaaggaaggatgtccatctacacaatttgaatggaagtacaagataccattcattgcaagtgaccacacctataatctagagtttatgttctttgaaaaaaagggaatggagcttataggaaagagtgcatcgactcttcgaaaacaatatgaaccaaaggagataccaccggatataacatcttggataggttataaattcacttttgttgttagagtcctatcaaagaaaagtgtcaagactattgatccatcctttgaagtgcttatgataaaagaaaaataccagaaggaacctattatatcatttatcagctcaagtggagttgtaccagcagaatcatcttcctctacaatggcagaatacaaggaattaccattgctagtgccaattacctccaaagacatagaaaaaaaggagcgatccacttcacaaccagaacacaccgaagaaactcaagatatggacattgaaccatctgggtatgattaagataagcttcgttcttaccttctatattaaatcttaatatctttcctataataccatttcatatttattttccatgatgaactatatatatgtgtctacatacaagaaaagattatacttatttgtttgatctgcaattaaaaaaaatatctagtccattcaaatactgcatattagttcaacgttttttataaacaacttcaataccttatgtcataaattcccaatgaaaccatagtttagagaccatgagctatgtagcacaatttccagaaaatctaaacacttaaatcttcatttaaagtgacatggcagttcattatgtattgtttgccattctatctatttacttttccatgtgggcacaaagtcaagaacaacaatgtggttttgtgcagttttgtgcacacatcctagactccatattatctgcatttcaacatttcgaaagaatctaggcattaatggtctatgtcatgttgttataataattttaaaatcttacgtcttgtcattctaaataatccttcacactatattatcttcatttcagcatttgggaagaatctcagatttcaaacaaaagaagctttggagacccaaactatgacaaacaagaaacaactgatgacaaagatgaccttccacaattcaagaaaatcaggagtacccactctcaaggaaaaagcaaaaaatgatgcatgatagactaagaagacaaagtaaagtagtagactttaaaagatcttgactaaagtaatatatctatattttctgtttcgataaacaacgatagcgctagtgctacatcttttaatgtatataaccatgtagtatcaatagcgctacatcttaagcgtgtagcaccagcagcgctacatattttgatgtatataagcatgtagcatcaatagcgctacatcttttgttaaatataagcacatcttttgatatatataagcatgtagcatcaatagtgctagctatggtgctaatcttacattatatggcgtatatgttagttaatatctaacgttgattttttctacactagaatatcttaccatttgcatagttgcgcggcaacgccgcgcttggttttctagtatattttctaaaatgatggatataaattcggatacaatttgaac

SEQ ID NO: 202490 - DNA, 2002 bp, Zea Mays
ctcaaggctaaagccgagcaaagcagaatcgctgtcggctctgggctccgctcgcggacgcgagtcgtgcaaggcgccggacttgaaccgtcggcagctactagagaaatccacagcctactgctatccgctagaaacatctttaccttataaaaatataaaggagccgcttctctacagccggatgtatttgcttctcccgtacacaacctgctccattcttggcgagcgttcaggcgaaagaggaaaaagagaggagtgcaccgcgagtgtacagctcgaagatccacttccaagtgcttccttttaggataatcttatataccttcaagcaaatagacaatcggaggaacttcacaaagatgtcattgctaagatcagtggagtatcaaatgtagcaaaggttcctacaacctcaggagatcagcaaatgaggagagttgtattattagaagaccttaagggaaacatgattgagctatcactatcaggaaaaagagctttggaatttgacggagatcaagttttagatgtgggtcagcaacatcatgttattgcaatatttgtaggaaccttagtcaaactttacaaaggtgaatatacattcttgagtggaacatcagcatgccggtggtacatcaacgaaaatgacattgctgaaatcaaggctttccagaaaagtttgccaagtgaacctgtacctatcaaaaagacctatctccaaaatgatgatgcaactcacaaatttgaggagaaaagtctggaacagctcaagcatgtagaccctttccttgacatgggacaaagatatcagtgcacagctactataattggtatcacagaaaaccaaacatggtgttacaaagcatgcaagatctgtaactcagcaatcattcaaaaggaaaatggttataaatgcacaaaggaaggatgtccatctacacaatttgaatggaagtacaagataccattcattgcaagtgaccacacctataatctagagtttatgttctttgaaaaaaagggaatggagcttataggaaagagtgcatcgactcttcgaaaacaatatgaaccaaaggagataccaccggatataacatcttggataggttataaattcacttttgttgttagagtcctatcaaagaaaagtgtcaagactattgatccatcctttgaagtgcttatgataaaagaaaaataccagaaggaacctattatatcatttatcagctcaagtggagttgtaccagcagaatcatcttcctctacaatggcagaatacaaggaattaccattgctagtgccaattacctccaaagacatagaaaaaaaggagcgatccacttcacaaccagaacacaccgaagaaactcaagatatggacattgaaccatctggcatttgggaagaatctcagatttcaaacaaaagaagctttggagacccaaactatgacaaacaagaaacaactgatgacaaagatgaccttccacaattcaagaaaatcaggagtacccactctcaaggaaaaagcaaaaaatgatgcatgatagactaagaagacaaagtaaagtagtagactttaaaagatcttgactaaagtaatatatctatattttctgtttcgataaacaacgatagcgctagtgctacatcttttaatgtatataaccatgtagtatcaatagcgctacatcttaagcgtgtagcaccagcagcgctacatattttgatgtatataagcatgtagcatcaatagcgctacatcttttgttaaatataagcacatcttttgatatatataagcatgtagcatcaatagtgctagctatggtgctaatcttacattatatggcgtatatgttagttaatatctaacgttgattttttctacactagaatatcttaccatttgcatagttgcgcggcaacgccgcgcttggttttctagtatattttctaaaatgatggatataaattcggatacaatttgaac

SEQ ID NO: 202491 - DNA, 2422 bp, Zea Mays
ctcaaggctaaagccgagcaaagcagaatcgctgtcggctctgggctccgctcgcggacgcgagtcgtgcaaggcgccggacttgaaccgtcggcagctactagagaaatccacagcctactgctatccgctagaaacatctttaccttataaaaatataaaggagccgcttctctacagccggatgtatttgcttctcccgtacacaacctgctccattcttggcgagcgttcaggcgaaagaggaaaaagagaggagtgcaccgcgagtgtacagctcgaagatccacttccaagtgcttccttttaggataatcttatataccttcaagcaaatagacaatcggaggaacttcacaaagatggaaattactccaatatcacaactacgtccaggaaagttaaattatgctttacatgtgcgaatatctagaatgtgggagtttagaggcacaaatgaacagaacgacatcaaacaccttgaccttgttctcatcgatcaaaagggaaattcaatatatgcagagattccaccagatgcaattgctgtcttaaaaagccacatctacacgaaaaaaagattgtatacatatccaaaataacaattgaacgagctaaactgggattcagagttgttgacaatccttatatggtaaagctcaacaagagaaccattgtgcttgaagataaggatcaaattcaaggttttcctaaatatacattctcactaacacccttagataagttggaccaatacaaaaacaagaccgatcgttttatagatgtcattgctaagatcagtggagtatcaaatgtagcaaaggttcctacaacctcaggagatcagcaaatgaggagagttgtattattagaagaccttaagggaaacatgattgagctatcactatcaggaaaaagagctttggaatttgacggagatcaagttttagatgtgggtcagcaacatcatgttattgcaatatttgtaggaaccttagtcaaactttacaaaggtgaatatacattcttgagtggaacatcagcatgccggtggtacatcaacgaaaatgacattgctgaaatcaaggctttccagaaaagtttgccaagtgaacctgtacctatcaaaaagacctatctccaaaatgatgatgcaactcacaaatttgaggagaaaagtctggaacagctcaagcatgtagaccctttccttgacatgggacaaagatatcagtgcacagctactataattggtatcacagaaaaccaaacatggtgttacaaagcatgcaagatctgtaactcagcaatcattcaaaaggaaaatggttataaatgcacaaaggaaggatgtccatctacacaatttgaatggaagtacaagataccattcattgcaagtgaccacacctataatctagagtttatgttctttgaaaaaaagggaatggagcttataggaaagagtgcatcgactcttcgaaaacaatatgaaccaaaggagataccaccggatataacatcttggataggttataaattcacttttgttgttagagtcctatcaaagaaaagtgtcaagactattgatccatcctttgaagtgcttatgataaaagaaaaataccagaaggaacctattatatcatttatcagctcaagtggagttgtaccagcagaatcatcttcctctacaatggcagaatacaaggaattaccattgctagtgccaattacctccaaagacatagaaaaaaaggagcgatccacttcacaaccagaacacaccgaagaaactcaagatatggacattgaaccatctggcatttgggaagaatctcagatttcaaacaaaagaagctttggagacccaaactatgacaaacaagaaacaactgatgacaaagatgaccttccacaattcaagaaaatcaggagtacccactctcaaggaaaaagcaaaaaatgatgcatgatagactaagaagacaaagtaaagtagtagactttaaaagatcttgactaaagtaatatatctatattttctgtttcgataaacaacgatagcgctagtgctacatcttttaatgtatataaccatgtagtatcaatagcgctacatcttaagcgtgtagcaccagcagcgctacatattttgatgtatataagcatgtagcatcaatagcgctacatcttttgttaaatataagcacatcttttgatatatataagcatgtagcatcaatagtgctagctatggtgctaatcttacattatatggcgtatatgttagttaatatctaacgttgattttttctacactagaatatcttaccatttgcatagttgcgcggcaacgccgcgcttggttttctagtatattttctaaaatgatggatataaattcggatacaatttgaac

SEQ ID NO: 202492 - DNA, 1863 bp, Zea Mays
atccgctagaaacatctttaccttataaaaatataaaggagccgcttctctacagccggatgtatttgcttctcccgtacacaacctgctccattcttggcgagcgttcaggcgaaagaggaaaaagagaggagtgcaccgcgagtgtacagctcgaagatccacttccaagtgcttccttttaggataatcttatataccttcaagcaaatagacaatcggaggaacttcacaaagatggaaattactccaatatcacaactacgtccaggaaagttaaattatgctttacatgtgcgaatatctagaatgtgggagtttagaggcacaaatgaacagaacgacatcaaacaccttgaccttgttctcatcgatcaaaagggaaattcaatatatgcagagattccaccagatgcaattgctgtcttaaaaagccacatctacacgaaaaaaagattgtatacatatccaaaataacaattgaacgagctaaactgggattcagagttgttgacaatccttatatggtaaagctcaacaagagaaccattgtgcttgaagataaggatcaaattcaaggttttcctaaatatacattctcactaacacccttagataagttggaccaatacaaaaacaagaccgatcgttttatagatgtcattgctaagatcagtggagtatcaaatgtagcaaaggttcctacaacctcaggagatcagcaaatgaggagagttgtattattagaagaccttaagggaaacatgattgagctatcactatcaggaaaaagagctttggaatttgacggagatcaagttttagatgtgggtcagcaacatcatgttattgcaatatttgtaggaaccttagtcaaactttacaaaggtgaatatacattcttgagtggaacatcagcatgccggtggtacatcaacgaaaatgacattgctgaaatcaaggctttccagaaaagtttgccaagtgaacctgtacctatcaaaaagacctatctccaaaatgatgatgcaactcacaaatttgaggagaaaagtctggaacagctcaagcatgtagaccctttccttgacatggtaaagttttactttacaaaaacaatcatgctatgtaaaatgttgcatgagtaaaaaagttttcctttggtgcagggacaaagatatcagtgcacagctactataattggtatcacagaaaaccaaacatggtgttacaaagcatgcaagatctgtaactcagcaatcattcaaaaggaaaatggttataaatgcacaaaggaaggatgtccatctacacaatttgaatggaagtacaagataccattcattgcaagtgaccacacctataatctagagtttatgttctttgaaaaaaagggaatggagcttataggaaagagtgcatcgactcttcgaaaacaatatgaaccaaaggagataccaccggatataacatcttggataggttataaattcacttttgttgttagagtcctatcaaagaaaagtgtcaagactattgatccatcctttgaagtgcttatgataaaagaaaaataccagaaggaacctattatatcatttatcagctcaagtggagttgtaccagcagaatcatcttcctctacaatggcagaatacaaggaattaccattgctagtgccaattacctccaaagacatagaaaaaaaggagcgatccacttcacaaccagaacacaccgaagaaactcaagatatggacattgaaccatctggcatttgggaagaatctcagatttcaaacaaaagaagctttggagacccaaactatgacaaacaagcttcctagcgacaccgggccaatg

SEQ ID NO: 202493 - DNA, 2810 bp, Zea Mays
tctctttcttacgccctccggattcgttgcctcgctcgcgtcgccccttcccaccccgggcctgcgtggttcaaggaattggaggcaacctaatcggcggtcaggaatgcttcaagagttcgtcgacaacgtcatcgccgtcacaaaggaatctgtgaagacatttacatatgagtcactgaacaacattgcaaggttcataaatggaatgtcagcactcctattgacactattacctggaaaaggcaacattttagaagggataaatggctgggaacttaagccagcactccgtgggccgcgtcttcctcgttggatggaaagagtttgtctgccctccgtctccattgtcccaaagttcacggttatcacatgcaagcagctttggtagacatgatcgtcgactcaggagacatatcagatatgcagtttcttggatactatggccattgagattctttgtttctttaatattcattttgttcaatgccattaaatttcggatggtaagatcaactgctaaaggtgctgaaactcctcacctctcaagaactggtcttgccaagaaatcatttcatataagggaccagtttctccaacgcacaactgataggaggcgtggagtttttgaggatctgcatctggcaattgagattttcatcgaatcagtctttgacatcgttcacaaagcagcacattatattctttctccttcagaagtgtggcagaacctgttttgctggattcaaggaagtggtcatgatactagttctgtcgttgatgtattgactgctaatgttggcagtgataatcctgttccaacagagaggaagactgtgtatcgtcattctctgaacacagattcccggacatgtgaagatgttattactgagcttgggtatccttttgaggctataaaggttgttacttcagatgggtatgtcgtgttactggagagaattccaaggcgtgattcgcagaaggttgttttgttgcaacatggaatattggactcatctatgggctgggtgtcaaatggtgttgttggctcaccagcatttgcagcttatgatcaaggttatgatgttttccttggaaatcttcgtggcttggtctcaagggagcatatagataaaagtatttcctcctacaaatactggaaatattctgttaatgagcatgggactaaagatatgccagcaattattgaggaaattcacaagatcaaaatatcggaacttggcaaaagtcagcctcaatcagcagaggggacaggagatcaaaatgataagttaaaaagtttggaagtacaggcttcacaggaagacagtatagaagaccaaccctacaagctttgtgctgtatgtcacagcctgggtggtgcagttatgctgatgtatgtggttacttcaaggatcacacaaaagccccacagattgtctagactggtcctgctatctcctgcaggttttcatgaggattccaatgtggtattcagtatggtagagaagctcatcttgtttgttggtccagtgcttgcaccacttattcctggactttacataccaactcggttctttaggatgcttctgaacaaattagcaagggatttccacaattatccagctttgggtggacttgtccagacccttatgggctatgtcgttggcggtgacagttcaaattgggtaggagtgctcggtttgccccactacaacatggatgacatgcctggtgtgtcatttcatgttgcgcttcaccttgcccagataaagagggcaaagaagttccaaatgtatgactacggtagctctgcagcaaatattgaagcgtacggaacaccggaaccattggacttgggagctcattatggtctcattgacattcctgtggacttagtcgctgggcagagggacagagttatctcaccatccatggtaaagaagcactacaagctgatgcggaagtcaggggtggaggtttcatacaatgagtttgagtatgctcatttggatttcacattctcgcatagggaggagcttttgtcctatgttatgtcccgcctacttttagtgactgatccaggtaaaggccgtatcaagcagaccaccgtgcgactcaggaggcagaagaaagttcagtcagagattgaggagagcattgagtgcagagccaaggaggaatctgatgaactagctggacatttggagtgatgtggagcctgcaggttaagagtgtgttgtaagtttgtgaataggatactcgtgtcgtctctcatatgttatacaccatgtggaagatcaggggagaataggtctctgtttctagtatcatgttcatggggatcgctttttttaacccctgtaagtaacagtagaggtatatgcatcgactccgttgagcattaggtgtcctgctcttttaagtatcgagaacgaggagaatggtcaggaaccggatgtttacctggcaaatatccagtgttcttgcgacttcttttgtagaatgtcacagccattcaaaggatgtgatgtcaggcgtgcaagcgatggacagtatgttttctgcatatgttatggacagtatgtttcaactaaaacgtttttggtttggaaccaattgttactgttgcatgagtgttattgagcatggataattagcatagaaatgtaattctagtttcactggaatggaagaaagcttgttcactagaacgtaaaattggatctggacgctcctgaagaccggatcttgtaaaattagggtctgtgatccgttcttttgttttctccagcccccatgaacactgc

SEQ ID NO: 202494 - DNA, 2798 bp, Zea Mays
agcgcggggaatcaggcaatcaccgacttgtgatgatttgatctgtgaagacatttacatatgagtcactgaacaacattgcaaggttcataaatggaatgtcagcactcctattgacactattacctggaaaaggcaacattttagaagggataaatggctgggaacttaagccagcactccgtgggccgcgtcttcctcgttggatggaaagtggggtatcttcgtttaatgagttcatccatgaactttctgttgattctgatgctgattcaattgctgactctgtcgctggggacgatgatcatgaagagtttgtctgccctccgtctccattgtcccaaagttcacggttatcacatgcaagcagctttggtagacatgatcgtcgactcaggagacatatcagatatgcagtttcttggatactatggccattgagattctttgtttctttaatattcattttgttcaatgccattaaatttcggatggtaagatcaactgctaaaggtgctgaaactcctcacctctcaagaactggtcttgccaagaaatcatttcatataagggaccagtttctccaacgcacaactgataggaggcgtggagtttttgaggatctgcatctggcaattgagattttcatcgaatcagtctttgacatcgttcacaaagcagcacattatattctttctccttcagaagtgtggcagaacctgttttgctggattcaaggaagtggtcatgatactagttctgtcgttgatgtattgactgctaatgttggcagtgataatcctgttccaacagagaggaagactgtgtatcgtcattctctgaacacagattcccggacatgtgaagatgttattactgagcttgggtatccttttgaggctataaaggttgttacttcagatgggtatgtcgtgttactggagagaattccaaggcgtgattcgcagaaggttgttttgttgcaacatggaatattggactcatctatgggctgggtgtcaaatggtgttgttggctcaccagcatttgcagcttatgatcaaggttatgatgttttccttggaaatcttcgtggcttggtctcaagggagcatatagataaaagtatttcctcctacaaatactggaaatattctgttaatgagcatgggactaaagatatgccagcaattattgaggaaattcacaagatcaaaatatcggaacttggcaaaagtcagcctcaatcagcagaggggacaggagatcaaaatgataagttaaaaagtttggaagtacaggcttcacaggaagacagtatagaagaccaaccctacaagctttgtgctgtatgtcacagcctgggtggtgcagttatgctgatgtatgtggttacttcaaggatcacacaaaagccccacagattgtctagactggtcctgctatctcctgcaggttttcatgaggattccaatgtggtattcagtatggtagagaagctcatcttgtttgttggtccagtgcttgcaccacttattcctggactttacataccaactcggttctttaggatgcttctgaacaaattagcaagggatttccacaattatccagctttgggtggacttgtccagacccttatgggctatgtcgttggcggtgacagttcaaattgggtaggagtgctcggtttgccccactacaacatggatgacatgcctggtgtgtcatttcatgttgcgcttcaccttgcccagataaagagggcaaagaagttccaaatgtatgactacggtagctctgcagcaaatattgaagcgtacggaacaccggaaccattggacttgggagctcattatggtctcattgacattcctgtggacttagtcgctgggcagagggacagagttatctcaccatccatggtaaagaagcactacaagctgatgcggaagtcaggggtggaggtttcatacaatgagtttgagtatgctcatttggatttcacattctcgcatagggaggagcttttgtcctatgttatgtcccgcctacttttagtgactgatccaggtaaaggccgtatcaagcagaccaccgtgcgactcaggaggcagaagaaagttcagtcagagattgaggagagcattgagtgcagagccaaggaggaatctgatgaactagctggacatttggagtgatgtggagcctgcaggttaagagtgtgttgtaagtttgtgaataggatactcgtgtcgtctctcatatgttatacaccatgtggaagatcaggggagaataggtctctgtttctagtatcatgttcatggggatcgctttttttaacccctgtaagtaacagtagaggtatatgcatcgactccgttgagcattaggtgtcctgctcttttaagtatcgagaacgaggagaatggtcaggaaccggatgtttacctggcaaatatccagtgttcttgcgacttcttttgtagaatgtcacagccattcaaaggatgtgatgtcaggcgtgcaagcgatggacagtatgttttctgcatatgttatggacagtatgtttcaactaaaacgtttttggtttggaaccaattgttactgttgcatgagtgttattgagcatggataattagcatagaaatgtaattctagtttcactggaatggaagaaagcttgttcactagaacgtaaaattggatctggacgctcctgaagaccggatcttgtaaaattagggtctgtgatccgttcttttgttttctccagcccccatgaacactgc
